United States Patent Application Publication US 2020/0095579 A1 - sequence listing, part 9

SEQ ID NO: 118897 - DNA, 20 bp, Artificial Sequence
  Description of Artificial Sequence: Synthetic oligonucleotide
  Target: LAMA2; (-) strand; PAM type: NRG; PAM sequence: CAG
agttttgtccaaacctaatt

SEQ ID NO: 118898 - DNA, 20 bp, Artificial Sequence
  Description of Artificial Sequence: Synthetic oligonucleotide
  Target: LAMA2; (-) strand; PAM type: NRG; PAM sequence: AAG
gtatgaattttgcatgggac

SEQ ID NO: 118899 - DNA, 20 bp, Artificial Sequence
  Description of Artificial Sequence: Synthetic oligonucleotide
  Target: LAMA2; (-) strand; PAM type: NRG; PAM sequence: GGG
ctggagtatgaattttgcat

SEQ ID NO: 118900 - DNA, 20 bp, Artificial Sequence
  Description of Artificial Sequence: Synthetic oligonucleotide
  Target: LAMA2; (-) strand; PAM type: NRG; PAM sequence: TGG
tctggagtatgaattttgca

SEQ ID NO: 118901 - DNA, 20 bp, Artificial Sequence
  Description of Artificial Sequence: Synthetic oligonucleotide
  Target: LAMA2; (-) strand; PAM type: NRG; PAM sequence: GAG
caaattcatgggtcactctg

SEQ ID NO: 118902 - DNA, 20 bp, Artificial Sequence
  Description of Artificial Sequence: Synthetic oligonucleotide
  Target: LAMA2; (-) strand; PAM type: NRG; PAM sequence: TGG
tccaaattcatgggtcactc

SEQ ID NO: 118903 - DNA, 20 bp, Artificial Sequence
  Description of Artificial Sequence: Synthetic oligonucleotide
  Target: LAMA2; (-) strand; PAM type: NRG; PAM sequence: GGG
ttttggttatccaaattcat

SEQ ID NO: 118904 - DNA, 20 bp, Artificial Sequence
  Description of Artificial Sequence: Synthetic oligonucleotide
  Target: LAMA2; (-) strand; PAM type: NRG; PAM sequence: TGG
tttttggttatccaaattca

SEQ ID NO: 118905 - DNA, 20 bp, Artificial Sequence
  Description of Artificial Sequence: Synthetic oligonucleotide
  Target: LAMA2; (-) strand; PAM type: NRG; PAM sequence: TGG
cttaaaatgtggacaatttt

SEQ ID NO: 118906 - DNA, 20 bp, Artificial Sequence
  Description of Artificial Sequence: Synthetic oligonucleotide
  Target: LAMA2; (-) strand; PAM type: NRG; PAM sequence: TGG
ttatttctgaccttaaaatg

SEQ ID NO: 118907 - DNA, 20 bp, Artificial Sequence
  Description of Artificial Sequence: Synthetic oligonucleotide
  Target: LAMA2; (-) strand; PAM type: NRG; PAM sequence: GAG
agtgctgggattacaggcgt

SEQ ID NO: 118908 - DNA, 20 bp, Artificial Sequence
  Description of Artificial Sequence: Synthetic oligonucleotide
  Target: LAMA2; (-) strand; PAM type: NRG; PAM sequence: AGG
tcccaaagtgctgggattac

SEQ ID NO: 118909 - DNA, 20 bp, Artificial Sequence
  Description of Artificial Sequence: Synthetic oligonucleotide
  Target: LAMA2; (-) strand; PAM type: NRG; PAM sequence: CAG
ctcccaaagtgctgggatta

SEQ ID NO: 118910 - DNA, 20 bp, Artificial Sequence
  Description of Artificial Sequence: Synthetic oligonucleotide
  Target: LAMA2; (-) strand; PAM type: NRG; PAM sequence: GGG
cttcagcctcccaaagtgct

SEQ ID NO: 118911 - DNA, 20 bp, Artificial Sequence
  Description of Artificial Sequence: Synthetic oligonucleotide
  Target: LAMA2; (-) strand; PAM type: NRG; PAM sequence: TGG
gcttcagcctcccaaagtgc

SEQ ID NO: 118912 - DNA, 20 bp, Artificial Sequence
  Description of Artificial Sequence: Synthetic oligonucleotide
  Target: LAMA2; (-) strand; PAM type: NRG; PAM sequence: AAG
ccacctgcttcagcctccca

SEQ ID NO: 118913 - DNA, 20 bp, Artificial Sequence
  Description of Artificial Sequence: Synthetic oligonucleotide
  Target: LAMA2; (-) strand; PAM type: NRG; PAM sequence: CAG
ctcaggtggtccacctgctt

SEQ ID NO: 118914 - DNA, 20 bp, Artificial Sequence
  Description of Artificial Sequence: Synthetic oligonucleotide
  Target: LAMA2; (-) strand; PAM type: NRG; PAM sequence: TGG
cttgaactcctgacctcagg

SEQ ID NO: 118915 - DNA, 20 bp, Artificial Sequence
  Description of Artificial Sequence: Synthetic oligonucleotide
  Target: LAMA2; (-) strand; PAM type: NRG; PAM sequence: AGG
ggtcttgaactcctgacctc

SEQ ID NO: 118916 - DNA, 20 bp, Artificial Sequence
  Description of Artificial Sequence: Synthetic oligonucleotide
  Target: LAMA2; (-) strand; PAM type: NRG; PAM sequence: CAG
tggtcttgaactcctgacct

SEQ ID NO: 118917 - DNA, 20 bp, Artificial Sequence
  Description of Artificial Sequence: Synthetic oligonucleotide
  Target: LAMA2; (-) strand; PAM type: NRG; PAM sequence: TGG
tttcaccatgttggccaggc

SEQ ID NO: 118918 - DNA, 20 bp, Artificial Sequence
  Description of Artificial Sequence: Synthetic oligonucleotide
  Target: LAMA2; (-) strand; PAM type: NRG; PAM sequence: AGG
ggggtttcaccatgttggcc

SEQ ID NO: 118919 - DNA, 20 bp, Artificial Sequence
  Description of Artificial Sequence: Synthetic oligonucleotide
  Target: LAMA2; (-) strand; PAM type: NRG; PAM sequence: CAG
tggggtttcaccatgttggc

SEQ ID NO: 118920 - DNA, 20 bp, Artificial Sequence
  Description of Artificial Sequence: Synthetic oligonucleotide
  Target: LAMA2; (-) strand; PAM type: NRG; PAM sequence: TGG
gagatggggtttcaccatgt

SEQ ID NO: 118921 - DNA, 20 bp, Artificial Sequence
  Description of Artificial Sequence: Synthetic oligonucleotide
  Target: LAMA2; (-) strand; PAM type: NRG; PAM sequence: GGG
ttgtattgttagtagagatg

SEQ ID NO: 118922 - DNA, 20 bp, Artificial Sequence
  Description of Artificial Sequence: Synthetic oligonucleotide
  Target: LAMA2; (-) strand; PAM type: NRG; PAM sequence: GGG
tttgtattgttagtagagat

SEQ ID NO: 118923 - DNA, 20 bp, Artificial Sequence
  Description of Artificial Sequence: Synthetic oligonucleotide
  Target: LAMA2; (-) strand; PAM type: NRG; PAM sequence: TGG
ttttgtattgttagtagaga

SEQ ID NO: 118924 - DNA, 20 bp, Artificial Sequence
  Description of Artificial Sequence: Synthetic oligonucleotide
  Target: LAMA2; (-) strand; PAM type: NRG; PAM sequence: GAG
taatttttgtattgttagta

SEQ ID NO: 118925 - DNA, 20 bp, Artificial Sequence
  Description of Artificial Sequence: Synthetic oligonucleotide
  Target: LAMA2; (-) strand; PAM type: NRG; PAM sequence: TAG
gttaatttttgtattgttag

SEQ ID NO: 118926 - DNA, 20 bp, Artificial Sequence
  Description of Artificial Sequence: Synthetic oligonucleotide
  Target: LAMA2; (-) strand; PAM type: NRG; PAM sequence: TAG
ctggttaatttttgtattgt

SEQ ID NO: 118927 - DNA, 20 bp, Artificial Sequence
  Description of Artificial Sequence: Synthetic oligonucleotide
  Target: LAMA2; (-) strand; PAM type: NRG; PAM sequence: TGG
caggtgcctgccaccacacc

SEQ ID NO: 118928 - DNA, 20 bp, Artificial Sequence
  Description of Artificial Sequence: Synthetic oligonucleotide
  Target: LAMA2; (-) strand; PAM type: NRG; PAM sequence: AGG
tcccgagtagctgagattac

SEQ ID NO: 118929 - DNA, 20 bp, Artificial Sequence
  Description of Artificial Sequence: Synthetic oligonucleotide
  Target: LAMA2; (-) strand; PAM type: NRG; PAM sequence: CAG
ctcccgagtagctgagatta

SEQ ID NO: 118930 - DNA, 20 bp, Artificial Sequence
  Description of Artificial Sequence: Synthetic oligonucleotide
  Target: LAMA2; (-) strand; PAM type: NRG; PAM sequence: GAG
cctcagcctcccgagtagct

SEQ ID NO: 118931 - DNA, 20 bp, Artificial Sequence
  Description of Artificial Sequence: Synthetic oligonucleotide
  Target: LAMA2; (-) strand; PAM type: NRG; PAM sequence: TAG
tcctgcctcagcctcccgag

SEQ ID NO: 118932 - DNA, 20 bp, Artificial Sequence
  Description of Artificial Sequence: Synthetic oligonucleotide
  Target: LAMA2; (-) strand; PAM type: NRG; PAM sequence: GAG
ttctcctgcctcagcctccc

SEQ ID NO: 118933 - DNA, 20 bp, Artificial Sequence
  Description of Artificial Sequence: Synthetic oligonucleotide
  Target: LAMA2; (-) strand; PAM type: NRG; PAM sequence: CAG
ttcaagcgattctcctgcct

SEQ ID NO: 118934 - DNA, 20 bp, Artificial Sequence
  Description of Artificial Sequence: Synthetic oligonucleotide
  Target: LAMA2; (-) strand; PAM type: NRG; PAM sequence: AAG
aacctccgcctcttgggttc

SEQ ID NO: 118935 - DNA, 20 bp, Artificial Sequence
  Description of Artificial Sequence: Synthetic oligonucleotide
  Target: LAMA2; (-) strand; PAM type: NRG; PAM sequence: GGG
cactgcaacctccgcctctt

SEQ ID NO: 118936 - DNA, 20 bp, Artificial Sequence
  Description of Artificial Sequence: Synthetic oligonucleotide
  Target: LAMA2; (-) strand; PAM type: NRG; PAM sequence: TGG
tcactgcaacctccgcctct

SEQ ID NO: 118937 - DNA, 20 bp, Artificial Sequence
  Description of Artificial Sequence: Synthetic oligonucleotide
  Target: LAMA2; (-) strand; PAM type: NRG; PAM sequence: TGG
ggagtgcagtggcacgatct

SEQ ID NO: 118938 - DNA, 20 bp, Artificial Sequence
  Description of Artificial Sequence: Synthetic oligonucleotide
  Target: LAMA2; (-) strand; PAM type: NRG; PAM sequence: TGG
tcgcccaggctggagtgcag

SEQ ID NO: 118939 - DNA, 20 bp, Artificial Sequence
  Description of Artificial Sequence: Synthetic oligonucleotide
  Target: LAMA2; (-) strand; PAM type: NRG; PAM sequence: CAG
ctgtcgcccaggctggagtg

SEQ ID NO: 118940 - DNA, 20 bp, Artificial Sequence
  Description of Artificial Sequence: Synthetic oligonucleotide
  Target: LAMA2; (-) strand; PAM type: NRG; PAM sequence: GAG
tcactctgtcgcccaggctg

SEQ ID NO: 118941 - DNA, 20 bp, Artificial Sequence
  Description of Artificial Sequence: Synthetic oligonucleotide
  Target: LAMA2; (-) strand; PAM type: NRG; PAM sequence: TGG
tgtcactctgtcgcccaggc

SEQ ID NO: 118942 - DNA, 20 bp, Artificial Sequence
  Description of Artificial Sequence: Synthetic oligonucleotide
  Target: LAMA2; (-) strand; PAM type: NRG; PAM sequence: AGG
agattgtcactctgtcgccc

SEQ ID NO: 118943 - DNA, 20 bp, Artificial Sequence
  Description of Artificial Sequence: Synthetic oligonucleotide
  Target: LAMA2; (-) strand; PAM type: NRG; PAM sequence: CAG
cagattgtcactctgtcgcc

SEQ ID NO: 118944 - DNA, 20 bp, Artificial Sequence
  Description of Artificial Sequence: Synthetic oligonucleotide
  Target: LAMA2; (-) strand; PAM type: NRG; PAM sequence: CAG
ttatttatttatttttgaga

SEQ ID NO: 118945 - DNA, 20 bp, Artificial Sequence
  Description of Artificial Sequence: Synthetic oligonucleotide
  Target: LAMA2; (-) strand; PAM type: NRG; PAM sequence: GAG
ttatttatttatttattttt

SEQ ID NO: 118946 - DNA, 20 bp, Artificial Sequence
  Description of Artificial Sequence: Synthetic oligonucleotide
  Target: LAMA2; (-) strand; PAM type: NRG; PAM sequence: AAG
ttaattaaaaaatactagag

SEQ ID NO: 118947 - DNA, 20 bp, Artificial Sequence
  Description of Artificial Sequence: Synthetic oligonucleotide
  Target: LAMA2; (-) strand; PAM type: NRG; PAM sequence: GAG
aaattaattaaaaaatacta

SEQ ID NO: 118948 - DNA, 20 bp, Artificial Sequence
  Description of Artificial Sequence: Synthetic oligonucleotide
  Target: LAMA2; (-) strand; PAM type: NRG; PAM sequence: TAG
agaaattaattaaaaaatac

SEQ ID NO: 118949 - DNA, 20 bp, Artificial Sequence
  Description of Artificial Sequence: Synthetic oligonucleotide
  Target: LAMA2; (-) strand; PAM type: NRG; PAM sequence: CAG
actaatttgatttttgaggt

SEQ ID NO: 118950 - DNA, 20 bp, Artificial Sequence
  Description of Artificial Sequence: Synthetic oligonucleotide
  Target: LAMA2; (-) strand; PAM type: NRG; PAM sequence: AGG
aagaactaatttgatttttg

SEQ ID NO: 118951 - DNA, 20 bp, Artificial Sequence
  Description of Artificial Sequence: Synthetic oligonucleotide
  Target: LAMA2; (-) strand; PAM type: NRG; PAM sequence: GAG
taagaactaatttgattttt

SEQ ID NO: 118952 - DNA, 20 bp, Artificial Sequence
  Description of Artificial Sequence: Synthetic oligonucleotide
  Target: LAMA2; (-) strand; PAM type: NRG; PAM sequence: AAG
attttatcttgttttgggat

SEQ ID NO: 118953 - DNA, 20 bp, Artificial Sequence
  Description of Artificial Sequence: Synthetic oligonucleotide
  Target: LAMA2; (-) strand; PAM type: NRG; PAM sequence: GGG
gaaatattttatcttgtttt

SEQ ID NO: 118954 - DNA, 20 bp, Artificial Sequence
  Description of Artificial Sequence: Synthetic oligonucleotide
  Target: LAMA2; (-) strand; PAM type: NRG; PAM sequence: TGG
ggaaatattttatcttgttt

SEQ ID NO: 118955 - DNA, 20 bp, Artificial Sequence
  Description of Artificial Sequence: Synthetic oligonucleotide
  Target: LAMA2; (-) strand; PAM type: NRG; PAM sequence: AGG
gaggggacaaggttgggtag

SEQ ID NO: 118956 - DNA, 20 bp, Artificial Sequence
  Description of Artificial Sequence: Synthetic oligonucleotide
  Target: LAMA2; (-) strand; PAM type: NRG; PAM sequence: GAG
tgaggggacaaggttgggta

SEQ ID NO: 118957 - DNA, 20 bp, Artificial Sequence
  Description of Artificial Sequence: Synthetic oligonucleotide
  Target: LAMA2; (-) strand; PAM type: NRG; PAM sequence: TAG
attgaggggacaaggttggg

SEQ ID NO: 118958 - DNA, 20 bp, Artificial Sequence
  Description of Artificial Sequence: Synthetic oligonucleotide
  Target: LAMA2; (-) strand; PAM type: NRG; PAM sequence: GGG
atcattgaggggacaaggtt

SEQ ID NO: 118959 - DNA, 20 bp, Artificial Sequence
  Description of Artificial Sequence: Synthetic oligonucleotide
  Target: LAMA2; (-) strand; PAM type: NRG; PAM sequence: TGG
aatcattgaggggacaaggt

SEQ ID NO: 118960 - DNA, 20 bp, Artificial Sequence
  Description of Artificial Sequence: Synthetic oligonucleotide
  Target: LAMA2; (-) strand; PAM type: NRG; PAM sequence: AGG
aggaaatcattgaggggaca

SEQ ID NO: 118961 - DNA, 20 bp, Artificial Sequence
  Description of Artificial Sequence: Synthetic oligonucleotide
  Target: LAMA2; (-) strand; PAM type: NRG; PAM sequence: AAG
gaggaaatcattgaggggac

SEQ ID NO: 118962 - DNA, 20 bp, Artificial Sequence
  Description of Artificial Sequence: Synthetic oligonucleotide
  Target: LAMA2; (-) strand; PAM type: NRG; PAM sequence: GGG
gaggtgaggaaatcattgag

SEQ ID NO: 118963 - DNA, 20 bp, Artificial Sequence
  Description of Artificial Sequence: Synthetic oligonucleotide
  Target: LAMA2; (-) strand; PAM type: NRG; PAM sequence: GGG
ggaggtgaggaaatcattga

SEQ ID NO: 118964 - DNA, 20 bp, Artificial Sequence
  Description of Artificial Sequence: Synthetic oligonucleotide
  Target: LAMA2; (-) strand; PAM type: NRG; PAM sequence: AGG
aggaggtgaggaaatcattg

SEQ ID NO: 118965 - DNA, 20 bp, Artificial Sequence
  Description of Artificial Sequence: Synthetic oligonucleotide
  Target: LAMA2; (-) strand; PAM type: NRG; PAM sequence: GAG
caggaggtgaggaaatcatt

SEQ ID NO: 118966 - DNA, 20 bp, Artificial Sequence
  Description of Artificial Sequence: Synthetic oligonucleotide
  Target: LAMA2; (-) strand; PAM type: NRG; PAM sequence: AGG
gctgtgggtggcaggaggtg

SEQ ID NO: 118967 - DNA, 20 bp, Artificial Sequence
  Description of Artificial Sequence: Synthetic oligonucleotide
  Target: LAMA2; (-) strand; PAM type: NRG; PAM sequence: GAG
tgctgtgggtggcaggaggt

SEQ ID NO: 118968 - DNA, 20 bp, Artificial Sequence
  Description of Artificial Sequence: Synthetic oligonucleotide
  Target: LAMA2; (-) strand; PAM type: NRG; PAM sequence: AGG
taattgctgtgggtggcagg

SEQ ID NO: 118969 - DNA, 20 bp, Artificial Sequence
  Description of Artificial Sequence: Synthetic oligonucleotide
  Target: LAMA2; (-) strand; PAM type: NRG; PAM sequence: GAG
ataattgctgtgggtggcag

SEQ ID NO: 118970 - DNA, 20 bp, Artificial Sequence
  Description of Artificial Sequence: Synthetic oligonucleotide
  Target: LAMA2; (-) strand; PAM type: NRG; PAM sequence: AGG
tcataattgctgtgggtggc

SEQ ID NO: 118971 - DNA, 20 bp, Artificial Sequence
  Description of Artificial Sequence: Synthetic oligonucleotide
  Target: LAMA2; (-) strand; PAM type: NRG; PAM sequence: CAG
ttcataattgctgtgggtgg

SEQ ID NO: 118972 - DNA, 20 bp, Artificial Sequence
  Description of Artificial Sequence: Synthetic oligonucleotide
  Target: LAMA2; (-) strand; PAM type: NRG; PAM sequence: TGG
ttcttcataattgctgtggg

SEQ ID NO: 118973 - DNA, 20 bp, Artificial Sequence
  Description of Artificial Sequence: Synthetic oligonucleotide
  Target: LAMA2; (-) strand; PAM type: NRG; PAM sequence: GGG
gctttcttcataattgctgt

SEQ ID NO: 118974 - DNA, 20 bp, Artificial Sequence
  Description of Artificial Sequence: Synthetic oligonucleotide
  Target: LAMA2; (-) strand; PAM type: NRG; PAM sequence: TGG
tgctttcttcataattgctg

SEQ ID NO: 118975 - DNA, 20 bp, Artificial Sequence
  Description of Artificial Sequence: Synthetic oligonucleotide
  Target: LAMA2; (-) strand; PAM type: NRG; PAM sequence: AAG
gtgtttggaaaataagtgaa

SEQ ID NO: 118976 - DNA, 20 bp, Artificial Sequence
  Description of Artificial Sequence: Synthetic oligonucleotide
  Target: LAMA2; (-) strand; PAM type: NRG; PAM sequence: AAG
ggagtgggtgtttggaaaat

SEQ ID NO: 118977 - DNA, 20 bp, Artificial Sequence
  Description of Artificial Sequence: Synthetic oligonucleotide
  Target: LAMA2; (-) strand; PAM type: NRG; PAM sequence: TGG
acctggtaggagtgggtgtt

SEQ ID NO: 118978 - DNA, 20 bp, Artificial Sequence
  Description of Artificial Sequence: Synthetic oligonucleotide
  Target: LAMA2; (-) strand; PAM type: NRG; PAM sequence: GGG
gctgacaacctggtaggagt

SEQ ID NO: 118979 - DNA, 20 bp, Artificial Sequence
  Description of Artificial Sequence: Synthetic oligonucleotide
  Target: LAMA2; (-) strand; PAM type: NRG; PAM sequence: TGG
ggctgacaacctggtaggag

SEQ ID NO: 118980 - DNA, 20 bp, Artificial Sequence
  Description of Artificial Sequence: Synthetic oligonucleotide
  Target: LAMA2; (-) strand; PAM type: NRG; PAM sequence: GAG
gaaggctgacaacctggtag

SEQ ID NO: 118981 - DNA, 20 bp, Artificial Sequence
  Description of Artificial Sequence: Synthetic oligonucleotide
  Target: LAMA2; (-) strand; PAM type: NRG; PAM sequence: AGG
aagaaggctgacaacctggt

SEQ ID NO: 118982 - DNA, 20 bp, Artificial Sequence
  Description of Artificial Sequence: Synthetic oligonucleotide
  Target: LAMA2; (-) strand; PAM type: NRG; PAM sequence: TAG
gaagaaggctgacaacctgg

SEQ ID NO: 118983 - DNA, 20 bp, Artificial Sequence
  Description of Artificial Sequence: Synthetic oligonucleotide
  Target: LAMA2; (-) strand; PAM type: NRG; PAM sequence: TGG
aaagaagaaggctgacaacc

SEQ ID NO: 118984 - DNA, 20 bp, Artificial Sequence
  Description of Artificial Sequence: Synthetic oligonucleotide
  Target: LAMA2; (-) strand; PAM type: NRG; PAM sequence: AGG
aagcacctttttaaagaaga

SEQ ID NO: 118985 - DNA, 20 bp, Artificial Sequence
  Description of Artificial Sequence: Synthetic oligonucleotide
  Target: LAMA2; (-) strand; PAM type: NRG; PAM sequence: AAG
aaagcacctttttaaagaag

SEQ ID NO: 118986 - DNA, 20 bp, Artificial Sequence
  Description of Artificial Sequence: Synthetic oligonucleotide
  Target: LAMA2; (-) strand; PAM type: NRG; PAM sequence: AAG
tgcaaagcacctttttaaag

SEQ ID NO: 118987 - DNA, 20 bp, Artificial Sequence
  Description of Artificial Sequence: Synthetic oligonucleotide
  Target: LAMA2; (-) strand; PAM type: NRG; PAM sequence: AAG
aagtgcaaagcaccttttta

SEQ ID NO: 118988 - DNA, 20 bp, Artificial Sequence
  Description of Artificial Sequence: Synthetic oligonucleotide
  Target: LAMA2; (-) strand; PAM type: NRG; PAM sequence: AAG
tgtttttcttctaaagtgca

SEQ ID NO: 118989 - DNA, 20 bp, Artificial Sequence
  Description of Artificial Sequence: Synthetic oligonucleotide
  Target: LAMA2; (-) strand; PAM type: NRG; PAM sequence: AAG
tcacaaatgtttttcttcta

SEQ ID NO: 118990 - DNA, 20 bp, Artificial Sequence
  Description of Artificial Sequence: Synthetic oligonucleotide
  Target: LAMA2; (+) strand; PAM type: NRG; PAM sequence: AAG
aaaaaaaaaaagaaacccaa

SEQ ID NO: 118991 - DNA, 20 bp, Artificial Sequence
  Description of Artificial Sequence: Synthetic oligonucleotide
  Target: LAMA2; (+) strand; PAM type: NRG; PAM sequence: AAG
acatgtacattcaaaactat

SEQ ID NO: 118992 - DNA, 20 bp, Artificial Sequence
  Description of Artificial Sequence: Synthetic oligonucleotide
  Target: LAMA2; (+) strand; PAM type: NRG; PAM sequence: AGG
catgtacattcaaaactata

SEQ ID NO: 118993 - DNA, 20 bp, Artificial Sequence
  Description of Artificial Sequence: Synthetic oligonucleotide
  Target: LAMA2; (+) strand; PAM type: NRG; PAM sequence: TAG
caaaactataaggcactgct

SEQ ID NO: 118994 - DNA, 20 bp, Artificial Sequence
  Description of Artificial Sequence: Synthetic oligonucleotide
  Target: LAMA2; (+) strand; PAM type: NRG; PAM sequence: AAG
attaaacatgtaaataaatg

SEQ ID NO: 118995 - DNA, 20 bp, Artificial Sequence
  Description of Artificial Sequence: Synthetic oligonucleotide
  Target: LAMA2; (+) strand; PAM type: NRG; PAM sequence: CGG
aacatgtaaataaatgaaga

SEQ ID NO: 118996 - DNA, 20 bp, Artificial Sequence
  Description of Artificial Sequence: Synthetic oligonucleotide
  Target: LAMA2; (+) strand; PAM type: NRG; PAM sequence: GGG
acatgtaaataaatgaagac

SEQ ID NO: 118997 - DNA, 20 bp, Artificial Sequence
  Description of Artificial Sequence: Synthetic oligonucleotide
  Target: LAMA2; (+) strand; PAM type: NRG; PAM sequence: TGG
agacgggctatatttgtgaa

SEQ ID NO: 118998 - DNA, 20 bp, Artificial Sequence
  Description of Artificial Sequence: Synthetic oligonucleotide
  Target: LAMA2; (+) strand; PAM type: NRG; PAM sequence: AAG
cgggctatatttgtgaatgg

SEQ ID NO: 118999 - DNA, 20 bp, Artificial Sequence
  Description of Artificial Sequence: Synthetic oligonucleotide
  Target: LAMA2; (+) strand; PAM type: NRG; PAM sequence: AAG
atggaagtctaaatattgct

SEQ ID NO: 119000 - DNA, 20 bp, Artificial Sequence
  Description of Artificial Sequence: Synthetic oligonucleotide
  Target: LAMA2; (+) strand; PAM type: NRG; PAM sequence: TAG
attatcccacaatttatctg

SEQ ID NO: 119001 - DNA, 20 bp, Artificial Sequence
  Description of Artificial Sequence: Synthetic oligonucleotide
  Target: LAMA2; (+) strand; PAM type: NRG; PAM sequence: AGG
ttatcccacaatttatctgt

SEQ ID NO: 119002 - DNA, 20 bp, Artificial Sequence
  Description of Artificial Sequence: Synthetic oligonucleotide
  Target: LAMA2; (+) strand; PAM type: NRG; PAM sequence: TGG
tgttccctactctccttttt

SEQ ID NO: 119003 - DNA, 20 bp, Artificial Sequence
  Description of Artificial Sequence: Synthetic oligonucleotide
  Target: LAMA2; (+) strand; PAM type: NRG; PAM sequence: GGG
gttccctactctcctttttt

SEQ ID NO: 119004 - DNA, 20 bp, Artificial Sequence
  Description of Artificial Sequence: Synthetic oligonucleotide
  Target: LAMA2; (+) strand; PAM type: NRG; PAM sequence: TAG
ccctactctccttttttggg

SEQ ID NO: 119005 - DNA, 20 bp, Artificial Sequence
  Description of Artificial Sequence: Synthetic oligonucleotide
  Target: LAMA2; (+) strand; PAM type: NRG; PAM sequence: AAG
ttttttgggtagaaattaat

SEQ ID NO: 119006 - DNA, 20 bp, Artificial Sequence
  Description of Artificial Sequence: Synthetic oligonucleotide
  Target: LAMA2; (+) strand; PAM type: NRG; PAM sequence: TGG
agctgatatttaaaattata

SEQ ID NO: 119007 - DNA, 20 bp, Artificial Sequence
  Description of Artificial Sequence: Synthetic oligonucleotide
  Target: LAMA2; (+) strand; PAM type: NRG; PAM sequence: AAG
atttaaaattatatggactt

SEQ ID NO: 119008 - DNA, 20 bp, Artificial Sequence
  Description of Artificial Sequence: Synthetic oligonucleotide
  Target: LAMA2; (+) strand; PAM type: NRG; PAM sequence: CAG
catattcttaccatatgatc

SEQ ID NO: 119009 - DNA, 20 bp, Artificial Sequence
  Description of Artificial Sequence: Synthetic oligonucleotide
  Target: LAMA2; (+) strand; PAM type: NRG; PAM sequence: AGG
atattcttaccatatgatcc

SEQ ID NO: 119010 - DNA, 20 bp, Artificial Sequence
  Description of Artificial Sequence: Synthetic oligonucleotide
  Target: LAMA2; (+) strand; PAM type: NRG; PAM sequence: TGG
gatccaggcaattgtgcttc

SEQ ID NO: 119011 - DNA, 20 bp, Artificial Sequence
  Description of Artificial Sequence: Synthetic oligonucleotide
  Target: LAMA2; (+) strand; PAM type: NRG; PAM sequence: GGG
atccaggcaattgtgcttct

SEQ ID NO: 119012 - DNA, 20 bp, Artificial Sequence
  Description of Artificial Sequence: Synthetic oligonucleotide
  Target: LAMA2; (+) strand; PAM type: NRG; PAM sequence: AAG
tgcttctgggtatttactca

SEQ ID NO: 119013 - DNA, 20 bp, Artificial Sequence
  Description of Artificial Sequence: Synthetic oligonucleotide
  Target: LAMA2; (+) strand; PAM type: NRG; PAM sequence: AGG
gcttctgggtatttactcaa

SEQ ID NO: 119014 - DNA, 20 bp, Artificial Sequence
  Description of Artificial Sequence: Synthetic oligonucleotide
  Target: LAMA2; (+) strand; PAM type: NRG; PAM sequence: GAG
ttctgggtatttactcaaag

SEQ ID NO: 119015 - DNA, 20 bp, Artificial Sequence
  Description of Artificial Sequence: Synthetic oligonucleotide
  Target: LAMA2; (+) strand; PAM type: NRG; PAM sequence: TGG
gggtatttactcaaaggagt

SEQ ID NO: 119016 - DNA, 20 bp, Artificial Sequence
  Description of Artificial Sequence: Synthetic oligonucleotide
  Target: LAMA2; (+) strand; PAM type: NRG; PAM sequence: GAG
aaccttcacatgtgaaatat

SEQ ID NO: 119017 - DNA, 20 bp, Artificial Sequence
  Description of Artificial Sequence: Synthetic oligonucleotide
  Target: LAMA2; (+) strand; PAM type: NRG; PAM sequence: TAG
tcacatgtgaaatatgagaa

SEQ ID NO: 119018 - DNA, 20 bp, Artificial Sequence
  Description of Artificial Sequence: Synthetic oligonucleotide
  Target: LAMA2; (+) strand; PAM type: NRG; PAM sequence: TAG
atgagaatagttataatcta

SEQ ID NO: 119019 - DNA, 20 bp, Artificial Sequence
  Description of Artificial Sequence: Synthetic oligonucleotide
  Target: LAMA2; (+) strand; PAM type: NRG; PAM sequence: TAG
ataatctatagtgacaaaat

SEQ ID NO: 119020 - DNA, 20 bp, Artificial Sequence
  Description of Artificial Sequence: Synthetic oligonucleotide
  Target: LAMA2; (+) strand; PAM type: NRG; PAM sequence: CAG
ctatagtgacaaaattagat

SEQ ID NO: 119021 - DNA, 20 bp, Artificial Sequence
  Description of Artificial Sequence: Synthetic oligonucleotide
  Target: LAMA2; (+) strand; PAM type: NRG; PAM sequence: CAG
tagtgacaaaattagatcag

SEQ ID NO: 119022 - DNA, 20 bp, Artificial Sequence
  Description of Artificial Sequence: Synthetic oligonucleotide
  Target: LAMA2; (+) strand; PAM type: NRG; PAM sequence: TGG
gatcagcagttgcctttttc

SEQ ID NO: 119023 - DNA, 20 bp, Artificial Sequence
  Description of Artificial Sequence: Synthetic oligonucleotide
  Target: LAMA2; (+) strand; PAM type: NRG; PAM sequence: GGG
atcagcagttgcctttttct

SEQ ID NO: 119024 - DNA, 20 bp, Artificial Sequence
  Description of Artificial Sequence: Synthetic oligonucleotide
  Target: LAMA2; (+) strand; PAM type: NRG; PAM sequence: TGG
cagttgcctttttctgggaa

SEQ ID NO: 119025 - DNA, 20 bp, Artificial Sequence
  Description of Artificial Sequence: Synthetic oligonucleotide
  Target: LAMA2; (+) strand; PAM type: NRG; PAM sequence: GAG
gttgcctttttctgggaatg

SEQ ID NO: 119026 - DNA, 20 bp, Artificial Sequence
  Description of Artificial Sequence: Synthetic oligonucleotide
  Target: LAMA2; (+) strand; PAM type: NRG; PAM sequence: AGG
ttgcctttttctgggaatgg

SEQ ID NO: 119027 - DNA, 20 bp, Artificial Sequence
  Description of Artificial Sequence: Synthetic oligonucleotide
  Target: LAMA2; (+) strand; PAM type: NRG; PAM sequence: TGG
ctttttctgggaatggaggt

SEQ ID NO: 119028 - DNA, 20 bp, Artificial Sequence
  Description of Artificial Sequence: Synthetic oligonucleotide
  Target: LAMA2; (+) strand; PAM type: NRG; PAM sequence: GGG
tttttctgggaatggaggtt

SEQ ID NO: 119029 - DNA, 20 bp, Artificial Sequence
  Description of Artificial Sequence: Synthetic oligonucleotide
  Target: LAMA2; (+) strand; PAM type: NRG; PAM sequence: GGG
ttttctgggaatggaggttg

SEQ ID NO: 119030 - DNA, 20 bp, Artificial Sequence
  Description of Artificial Sequence: Synthetic oligonucleotide
  Target: LAMA2; (+) strand; PAM type: NRG; PAM sequence: GGG
tttctgggaatggaggttgg

SEQ ID NO: 119031 - DNA, 20 bp, Artificial Sequence
  Description of Artificial Sequence: Synthetic oligonucleotide
  Target: LAMA2; (+) strand; PAM type: NRG; PAM sequence: AAG
ggttgggggatttattgcaa

SEQ ID NO: 119032 - DNA, 20 bp, Artificial Sequence
  Description of Artificial Sequence: Synthetic oligonucleotide
  Target: LAMA2; (+) strand; PAM type: NRG; PAM sequence: AGG
gttgggggatttattgcaaa

SEQ ID NO: 119033 - DNA, 20 bp, Artificial Sequence
  Description of Artificial Sequence: Synthetic oligonucleotide
  Target: LAMA2; (+) strand; PAM type: NRG; PAM sequence: CAG
ggggatttattgcaaaaggt

SEQ ID NO: 119034 - DNA, 20 bp, Artificial Sequence
  Description of Artificial Sequence: Synthetic oligonucleotide
  Target: LAMA2; (+) strand; PAM type: NRG; PAM sequence: TAG
tgcaaaaggtcagatgctga

SEQ ID NO: 119035 - DNA, 20 bp, Artificial Sequence
  Description of Artificial Sequence: Synthetic oligonucleotide
  Target: LAMA2; (+) strand; PAM type: NRG; PAM sequence: CAG
aaaaggtcagatgctgatag

SEQ ID NO: 119036 - DNA, 20 bp, Artificial Sequence
  Description of Artificial Sequence: Synthetic oligonucleotide
  Target: LAMA2; (+) strand; PAM type: NRG; PAM sequence: TGG
tatcaataattgtcaaaact

SEQ ID NO: 119037 - DNA, 20 bp, Artificial Sequence
  Description of Artificial Sequence: Synthetic oligonucleotide
  Target: LAMA2; (+) strand; PAM type: NRG; PAM sequence: AAG
gtcaaaacttggaaccaacc

SEQ ID NO: 119038 - DNA, 20 bp, Artificial Sequence
  Description of Artificial Sequence: Synthetic oligonucleotide
  Target: LAMA2; (+) strand; PAM type: NRG; PAM sequence: AGG
tcaaaacttggaaccaacca

SEQ ID NO: 119039 - DNA, 20 bp, Artificial Sequence
  Description of Artificial Sequence: Synthetic oligonucleotide
  Target: LAMA2; (+) strand; PAM type: NRG; PAM sequence: TAG
ccaaccaaggtgtttttcat

SEQ ID NO: 119040 - DNA, 20 bp, Artificial Sequence
  Description of Artificial Sequence: Synthetic oligonucleotide
  Target: LAMA2; (+) strand; PAM type: NRG; PAM sequence: TGG
ggtgtttttcattagatgaa

SEQ ID NO: 119041 - DNA, 20 bp, Artificial Sequence
  Description of Artificial Sequence: Synthetic oligonucleotide
  Target: LAMA2; (+) strand; PAM type: NRG; PAM sequence: GAG
ttttcattagatgaatggat

SEQ ID NO: 119042 - DNA, 20 bp, Artificial Sequence
  Description of Artificial Sequence: Synthetic oligonucleotide
  Target: LAMA2; (+) strand; PAM type: NRG; PAM sequence: TGG
atgaatggatgagtaaactg

SEQ ID NO: 119043 - DNA, 20 bp, Artificial Sequence
  Description of Artificial Sequence: Synthetic oligonucleotide
  Target: LAMA2; (+) strand; PAM type: NRG; PAM sequence: AAG
tgagtaaactgtggtacttc

SEQ ID NO: 119044 - DNA, 20 bp, Artificial Sequence
  Description of Artificial Sequence: Synthetic oligonucleotide
  Target: LAMA2; (+) strand; PAM type: NRG; PAM sequence: CAG
aagataacgaaatatttttt

SEQ ID NO: 119045 - DNA, 20 bp, Artificial Sequence
  Description of Artificial Sequence: Synthetic oligonucleotide
  Target: LAMA2; (+) strand; PAM type: NRG; PAM sequence: AAG
aatattttttcagtgctaaa

SEQ ID NO: 119046 - DNA, 20 bp, Artificial Sequence
  Description of Artificial Sequence: Synthetic oligonucleotide
  Target: LAMA2; (+) strand; PAM type: NRG; PAM sequence: GAG
tttcagtgctaaaaagaaat

SEQ ID NO: 119047 - DNA, 20 bp, Artificial Sequence
  Description of Artificial Sequence: Synthetic oligonucleotide
  Target: LAMA2; (+) strand; PAM type: NRG; PAM sequence: AAG
ctaaaaagaaatgagctatc

SEQ ID NO: 119048 - DNA, 20 bp, Artificial Sequence
  Description of Artificial Sequence: Synthetic oligonucleotide
  Target: LAMA2; (+) strand; PAM type: NRG; PAM sequence: AAG
atgagctatcaagccatgaa

SEQ ID NO: 119049 - DNA, 20 bp, Artificial Sequence
  Description of Artificial Sequence: Synthetic oligonucleotide
  Target: LAMA2; (+) strand; PAM type: NRG; PAM sequence: GAG
gagctatcaagccatgaaaa

SEQ ID NO: 119050 - DNA, 20 bp, Artificial Sequence
  Description of Artificial Sequence: Synthetic oligonucleotide
  Target: LAMA2; (+) strand; PAM type: NRG; PAM sequence: AGG
agctatcaagccatgaaaag

SEQ ID NO: 119051 - DNA, 20 bp, Artificial Sequence
  Description of Artificial Sequence: Synthetic oligonucleotide
  Target: LAMA2; (+) strand; PAM type: NRG; PAM sequence: AAG
aaacttaaatgcatattact

SEQ ID NO: 119052 - DNA, 20 bp, Artificial Sequence
  Description of Artificial Sequence: Synthetic oligonucleotide
  Target: LAMA2; (+) strand; PAM type: NRG; PAM sequence: AAG
aaatgcatattactaagtga

SEQ ID NO: 119053 - DNA, 20 bp, Artificial Sequence
  Description of Artificial Sequence: Synthetic oligonucleotide
  Target: LAMA2; (+) strand; PAM type: NRG; PAM sequence: AAG
agtgaaagaaacttatctga

SEQ ID NO: 119054 - DNA, 20 bp, Artificial Sequence
  Description of Artificial Sequence: Synthetic oligonucleotide
  Target: LAMA2; (+) strand; PAM type: NRG; PAM sequence: AGG
gtgaaagaaacttatctgaa

SEQ ID NO: 119055 - DNA, 20 bp, Artificial Sequence
  Description of Artificial Sequence: Synthetic oligonucleotide
  Target: LAMA2; (+) strand; PAM type: NRG; PAM sequence: TGG
attccaaatatatgaccttt

SEQ ID NO: 119056 - DNA, 20 bp, Artificial Sequence
  Description of Artificial Sequence: Synthetic oligonucleotide
  Target: LAMA2; (+) strand; PAM type: NRG; PAM sequence: AAG
aaatatatgaccttttggaa

SEQ ID NO: 119057 - DNA, 20 bp, Artificial Sequence
  Description of Artificial Sequence: Synthetic oligonucleotide
  Target: LAMA2; (+) strand; PAM type: NRG; PAM sequence: AGG
aatatatgaccttttggaaa

SEQ ID NO: 119058 - DNA, 20 bp, Artificial Sequence
  Description of Artificial Sequence: Synthetic oligonucleotide
  Target: LAMA2; (+) strand; PAM type: NRG; PAM sequence: AAG
cttttggaaaaggtaaaact

SEQ ID NO: 119059 - DNA, 20 bp, Artificial Sequence
  Description of Artificial Sequence: Synthetic oligonucleotide
  Target: LAMA2; (+) strand; PAM type: NRG; PAM sequence: AGG
ttttggaaaaggtaaaacta

SEQ ID NO: 119060 - DNA, 20 bp, Artificial Sequence
  Description of Artificial Sequence: Synthetic oligonucleotide
  Target: LAMA2; (+) strand; PAM type: NRG; PAM sequence: GGG
tttggaaaaggtaaaactaa

SEQ ID NO: 119061 - DNA, 20 bp, Artificial Sequence
  Description of Artificial Sequence: Synthetic oligonucleotide
  Target: LAMA2; (+) strand; PAM type: NRG; PAM sequence: GGG
ttggaaaaggtaaaactaag

SEQ ID NO: 119062 - DNA, 20 bp, Artificial Sequence
  Description of Artificial Sequence: Synthetic oligonucleotide
  Target: LAMA2; (+) strand; PAM type: NRG; PAM sequence: CAG
aaaaggtaaaactaagggga

SEQ ID NO: 119063 - DNA, 20 bp, Artificial Sequence
  Description of Artificial Sequence: Synthetic oligonucleotide
  Target: LAMA2; (+) strand; PAM type: NRG; PAM sequence: AAG
aaaactaaggggacagtaaa

SEQ ID NO: 119064 - DNA, 20 bp, Artificial Sequence
  Description of Artificial Sequence: Synthetic oligonucleotide
  Target: LAMA2; (+) strand; PAM type: NRG; PAM sequence: CAG
taaggggacagtaaaaagat

SEQ ID NO: 119065 - DNA, 20 bp, Artificial Sequence
  Description of Artificial Sequence: Synthetic oligonucleotide
  Target: LAMA2; (+) strand; PAM type: NRG; PAM sequence: TGG
ggggacagtaaaaagatcag

SEQ ID NO: 119066 - DNA, 20 bp, Artificial Sequence
  Description of Artificial Sequence: Synthetic oligonucleotide
  Target: LAMA2; (+) strand; PAM type: NRG; PAM sequence: CAG
gtaaaaagatcagtggttgc

SEQ ID NO: 119067 - DNA, 20 bp, Artificial Sequence
  Description of Artificial Sequence: Synthetic oligonucleotide
  Target: LAMA2; (+) strand; PAM type: NRG; PAM sequence: TGG
gatcagtggttgccagtgtt

SEQ ID NO: 119068 - DNA, 20 bp, Artificial Sequence
  Description of Artificial Sequence: Synthetic oligonucleotide
  Target: LAMA2; (+) strand; PAM type: NRG; PAM sequence: GAG
tcagtggttgccagtgtttg

SEQ ID NO: 119069 - DNA, 20 bp, Artificial Sequence
  Description of Artificial Sequence: Synthetic oligonucleotide
  Target: LAMA2; (+) strand; PAM type: NRG; PAM sequence: AGG
cagtggttgccagtgtttgg

SEQ ID NO: 119070 - DNA, 20 bp, Artificial Sequence
  Description of Artificial Sequence: Synthetic oligonucleotide
  Target: LAMA2; (+) strand; PAM type: NRG; PAM sequence: TGG
tggttgccagtgtttggagg

SEQ ID NO: 119071 - DNA, 20 bp, Artificial Sequence
  Description of Artificial Sequence: Synthetic oligonucleotide
  Target: LAMA2; (+) strand; PAM type: NRG; PAM sequence: GGG
ggttgccagtgtttggaggt

SEQ ID NO: 119072 - DNA, 20 bp, Artificial Sequence
  Description of Artificial Sequence: Synthetic oligonucleotide
  Target: LAMA2; (+) strand; PAM type: NRG; PAM sequence: GGG
gttgccagtgtttggaggtg

SEQ ID NO: 119073 - DNA, 20 bp, Artificial Sequence
  Description of Artificial Sequence: Synthetic oligonucleotide
  Target: LAMA2; (+) strand; PAM type: NRG; PAM sequence: CAG
ccagtgtttggaggtgggga

SEQ ID NO: 119074 - DNA, 20 bp, Artificial Sequence
  Description of Artificial Sequence: Synthetic oligonucleotide
  Target: LAMA2; (+) strand; PAM type: NRG; PAM sequence: AGG
cagtgtttggaggtggggac

SEQ ID NO: 119075 - DNA, 20 bp, Artificial Sequence
  Description of Artificial Sequence: Synthetic oligonucleotide
  Target: LAMA2; (+) strand; PAM type: NRG; PAM sequence: GGG
agtgtttggaggtggggaca

SEQ ID NO: 119076 - DNA, 20 bp, Artificial Sequence
  Description of Artificial Sequence: Synthetic oligonucleotide
  Target: LAMA2; (+) strand; PAM type: NRG; PAM sequence: GAG
tgtttggaggtggggacagg

SEQ ID NO: 119077 - DNA, 20 bp, Artificial Sequence
  Description of Artificial Sequence: Synthetic oligonucleotide
  Target: LAMA2; (+) strand; PAM type: NRG; PAM sequence: AGG
gtttggaggtggggacaggg

SEQ ID NO: 119078 - DNA, 20 bp, Artificial Sequence
  Description of Artificial Sequence: Synthetic oligonucleotide
  Target: LAMA2; (+) strand; PAM type: NRG; PAM sequence: GAG
ttggaggtggggacagggag

SEQ ID NO: 119079 - DNA, 20 bp, Artificial Sequence
  Description of Artificial Sequence: Synthetic oligonucleotide
  Target: LAMA2; (+) strand; PAM type: NRG; PAM sequence: AGG
tggaggtggggacagggagg

SEQ ID NO: 119080 - DNA, 20 bp, Artificial Sequence
  Description of Artificial Sequence: Synthetic oligonucleotide
  Target: LAMA2; (+) strand; PAM type: NRG; PAM sequence: TGG
agggaggaggcatgaatacg

SEQ ID NO: 119081 - DNA, 20 bp, Artificial Sequence
  Description of Artificial Sequence: Synthetic oligonucleotide
  Target: LAMA2; (+) strand; PAM type: NRG; PAM sequence: GAG
ggaggaggcatgaatacgtg

SEQ ID NO: 119082 - DNA, 20 bp, Artificial Sequence
  Description of Artificial Sequence: Synthetic oligonucleotide
  Target: LAMA2; (+) strand; PAM type: NRG; PAM sequence: CAG
aggcatgaatacgtggagca

SEQ ID NO: 119083 - DNA, 20 bp, Artificial Sequence
  Description of Artificial Sequence: Synthetic oligonucleotide
  Target: LAMA2; (+) strand; PAM type: NRG; PAM sequence: GAG
gcatgaatacgtggagcaca

SEQ ID NO: 119084 - DNA, 20 bp, Artificial Sequence
  Description of Artificial Sequence: Synthetic oligonucleotide
  Target: LAMA2; (+) strand; PAM type: NRG; PAM sequence: AGG
catgaatacgtggagcacag

SEQ ID NO: 119085 - DNA, 20 bp, Artificial Sequence
  Description of Artificial Sequence: Synthetic oligonucleotide
  Target: LAMA2; (+) strand; PAM type: NRG; PAM sequence: CAG
cgtggagcacagaggaatct

SEQ ID NO: 119086 - DNA, 20 bp, Artificial Sequence
  Description of Artificial Sequence: Synthetic oligonucleotide
  Target: LAMA2; (+) strand; PAM type: NRG; PAM sequence: AGG
gtggagcacagaggaatctc

SEQ ID NO: 119087 - DNA, 20 bp, Artificial Sequence
  Description of Artificial Sequence: Synthetic oligonucleotide
  Target: LAMA2; (+) strand; PAM type: NRG; PAM sequence: GGG
tggagcacagaggaatctca

SEQ ID NO: 119088 - DNA, 20 bp, Artificial Sequence
  Description of Artificial Sequence: Synthetic oligonucleotide
  Target: LAMA2; (+) strand; PAM type: NRG; PAM sequence: CAG
agcacagaggaatctcaggg

SEQ ID NO: 119089 - DNA, 20 bp, Artificial Sequence
  Description of Artificial Sequence: Synthetic oligonucleotide
  Target: LAMA2; (+) strand; PAM type: NRG; PAM sequence: TAG
agtaaaattactctatatga

SEQ ID NO: 119090 - DNA, 20 bp, Artificial Sequence
  Description of Artificial Sequence: Synthetic oligonucleotide
  Target: LAMA2; (+) strand; PAM type: NRG; PAM sequence: TGG
tctatatgatagtgtaatgt

SEQ ID NO: 119091 - DNA, 20 bp, Artificial Sequence
  Description of Artificial Sequence: Synthetic oligonucleotide
  Target: LAMA2; (+) strand; PAM type: NRG; PAM sequence: CGG
cctaatgtaaactatgaaat

SEQ ID NO: 119092 - DNA, 20 bp, Artificial Sequence
  Description of Artificial Sequence: Synthetic oligonucleotide
  Target: LAMA2; (+) strand; PAM type: NRG; PAM sequence: GAG
taatgtaaactatgaaatcg

SEQ ID NO: 119093 - DNA, 20 bp, Artificial Sequence
  Description of Artificial Sequence: Synthetic oligonucleotide
  Target: LAMA2; (+) strand; PAM type: NRG; PAM sequence: TAG
gtgataatgatatgtcaatg

SEQ ID NO: 119094 - DNA, 20 bp, Artificial Sequence
  Description of Artificial Sequence: Synthetic oligonucleotide
  Target: LAMA2; (+) strand; PAM type: NRG; PAM sequence: AGG
tgataatgatatgtcaatgt

SEQ ID NO: 119095 - DNA, 20 bp, Artificial Sequence
  Description of Artificial Sequence: Synthetic oligonucleotide
  Target: LAMA2; (+) strand; PAM type: NRG; PAM sequence: CAG
gatatgtcaatgtaggtttt

SEQ ID NO: 119096 - DNA, 20 bp, Artificial Sequence
  Description of Artificial Sequence: Synthetic oligonucleotide
  Target: LAMA2; (+) strand; PAM type: NRG; PAM sequence: TGG
tgacaaatatatcactctga

SEQ ID NO: 119097 - DNA, 20 bp, Artificial Sequence
  Description of Artificial Sequence: Synthetic oligonucleotide
  Target: LAMA2; (+) strand; PAM type: NRG; PAM sequence: GGG
gacaaatatatcactctgat

SEQ ID NO: 119098 - DNA, 20 bp, Artificial Sequence
  Description of Artificial Sequence: Synthetic oligonucleotide
  Target: LAMA2; (+) strand; PAM type: NRG; PAM sequence: GGG
acaaatatatcactctgatg

SEQ ID NO: 119099 - DNA, 20 bp, Artificial Sequence
  Description of Artificial Sequence: Synthetic oligonucleotide
  Target: LAMA2; (+) strand; PAM type: NRG; PAM sequence: AAG
tctgatggggcatgttgata

SEQ ID NO: 119100 - DNA, 20 bp, Artificial Sequence
  Description of Artificial Sequence: Synthetic oligonucleotide
  Target: LAMA2; (+) strand; PAM type: NRG; PAM sequence: AGG
ctgatggggcatgttgataa

SEQ ID NO: 119101 - DNA, 20 bp, Artificial Sequence
  Description of Artificial Sequence: Synthetic oligonucleotide
  Target: LAMA2; (+) strand; PAM type: NRG; PAM sequence: GGG
tgatggggcatgttgataaa

SEQ ID NO: 119102 - DNA, 20 bp, Artificial Sequence
  Description of Artificial Sequence: Synthetic oligonucleotide
  Target: LAMA2; (+) strand; PAM type: NRG; PAM sequence: GGG
gatggggcatgttgataaag

SEQ ID NO: 119103 - DNA, 20 bp, Artificial Sequence
  Description of Artificial Sequence: Synthetic oligonucleotide
  Target: LAMA2; (+) strand; PAM type: NRG; PAM sequence: GGG
atggggcatgttgataaagg

SEQ ID NO: 119104 - DNA, 20 bp, Artificial Sequence
  Description of Artificial Sequence: Synthetic oligonucleotide
  Target: LAMA2; (+) strand; PAM type: NRG; PAM sequence: GAG
ggggcatgttgataaagggg

SEQ ID NO: 119105 - DNA, 20 bp, Artificial Sequence
  Description of Artificial Sequence: Synthetic oligonucleotide
  Target: LAMA2; (+) strand; PAM type: NRG; PAM sequence: AGG
gggcatgttgataaaggggg

SEQ ID NO: 119106 - DNA, 20 bp, Artificial Sequence
  Description of Artificial Sequence: Synthetic oligonucleotide
  Target: LAMA2; (+) strand; PAM type: NRG; PAM sequence: TGG
gggggaggctatgaatgtgt

SEQ ID NO: 119107 - DNA, 20 bp, Artificial Sequence
  Description of Artificial Sequence: Synthetic oligonucleotide
  Target: LAMA2; (+) strand; PAM type: NRG; PAM sequence: GGG
ggggaggctatgaatgtgtt

SEQ ID NO: 119108 - DNA, 20 bp, Artificial Sequence
  Description of Artificial Sequence: Synthetic oligonucleotide
  Target: LAMA2; (+) strand; PAM type: NRG; PAM sequence: CAG
aggctatgaatgtgttgggt

SEQ ID NO: 119109 - DNA, 20 bp, Artificial Sequence
  Description of Artificial Sequence: Synthetic oligonucleotide
  Target: LAMA2; (+) strand; PAM type: NRG; PAM sequence: GAG
gctatgaatgtgttgggtca

SEQ ID NO: 119110 - DNA, 20 bp, Artificial Sequence
  Description of Artificial Sequence: Synthetic oligonucleotide
  Target: LAMA2; (+) strand; PAM type: NRG; PAM sequence: AGG
ctatgaatgtgttgggtcag

SEQ ID NO: 119111 - DNA, 20 bp, Artificial Sequence
  Description of Artificial Sequence: Synthetic oligonucleotide
  Target: LAMA2; (+) strand; PAM type: NRG; PAM sequence: TGG
tgtgttgggtcagaggtata

SEQ ID NO: 119112 - DNA, 20 bp, Artificial Sequence
  Description of Artificial Sequence: Synthetic oligonucleotide
  Target: LAMA2; (+) strand; PAM type: NRG; PAM sequence: CAG
actttgttgtgaatctaaaa

SEQ ID NO: 119113 - DNA, 20 bp, Artificial Sequence
  Description of Artificial Sequence: Synthetic oligonucleotide
  Target: LAMA2; (+) strand; PAM type: NRG; PAM sequence: TAG
tctaaaacagctctaaacaa

SEQ ID NO: 119114 - DNA, 20 bp, Artificial Sequence
  Description of Artificial Sequence: Synthetic oligonucleotide
  Target: LAMA2; (+) strand; PAM type: NRG; PAM sequence: TAG
tattcaacttcaccaatgaa

SEQ ID NO: 119115 - DNA, 20 bp, Artificial Sequence
  Description of Artificial Sequence: Synthetic oligonucleotide
  Target: LAMA2; (+) strand; PAM type: NRG; PAM sequence: AAG
taaatattacataatatgtg

SEQ ID NO: 119116 - DNA, 20 bp, Artificial Sequence
  Description of Artificial Sequence: Synthetic oligonucleotide
  Target: LAMA2; (+) strand; PAM type: NRG; PAM sequence: TAG
aatatgtgaagaacctaaaa

SEQ ID NO: 119117 - DNA, 20 bp, Artificial Sequence
  Description of Artificial Sequence: Synthetic oligonucleotide
  Target: LAMA2; (+) strand; PAM type: NRG; PAM sequence: AAG
gtgaagaacctaaaatagta

SEQ ID NO: 119118 - DNA, 20 bp, Artificial Sequence
  Description of Artificial Sequence: Synthetic oligonucleotide
  Target: LAMA2; (+) strand; PAM type: NRG; PAM sequence: TAG
tgttttgtaaaacaacatta

SEQ ID NO: 119119 - DNA, 20 bp, Artificial Sequence
  Description of Artificial Sequence: Synthetic oligonucleotide
  Target: LAMA2; (+) strand; PAM type: NRG; PAM sequence: AGG
gttttgtaaaacaacattat

SEQ ID NO: 119120 - DNA, 20 bp, Artificial Sequence
  Description of Artificial Sequence: Synthetic oligonucleotide
  Target: LAMA2; (+) strand; PAM type: NRG; PAM sequence: GAG
gatttaccttacctaacttt

SEQ ID NO: 119121 - DNA, 20 bp, Artificial Sequence
  Description of Artificial Sequence: Synthetic oligonucleotide
  Target: LAMA2; (+) strand; PAM type: NRG; PAM sequence: AGG
atttaccttacctaactttg

SEQ ID NO: 119122 - DNA, 20 bp, Artificial Sequence
  Description of Artificial Sequence: Synthetic oligonucleotide
  Target: LAMA2; (+) strand; PAM type: NRG; PAM sequence: AAG
taactttgaggctcactgta

SEQ ID NO: 119123 - DNA, 20 bp, Artificial Sequence
  Description of Artificial Sequence: Synthetic oligonucleotide
  Target: LAMA2; (+) strand; PAM type: NRG; PAM sequence: CAG
tgaggctcactgtaaagcta

SEQ ID NO: 119124 - DNA, 20 bp, Artificial Sequence
  Description of Artificial Sequence: Synthetic oligonucleotide
  Target: LAMA2; (+) strand; PAM type: NRG; PAM sequence: TAG
tcactgtaaagctacagtaa

SEQ ID NO: 119125 - DNA, 20 bp, Artificial Sequence
  Description of Artificial Sequence: Synthetic oligonucleotide
  Target: LAMA2; (+) strand; PAM type: NRG; PAM sequence: GAG
actgtaaagctacagtaata

SEQ ID NO: 119126 - DNA, 20 bp, Artificial Sequence
  Description of Artificial Sequence: Synthetic oligonucleotide
  Target: LAMA2; (+) strand; PAM type: NRG; PAM sequence: TAG
tacagtaatagagactgtga

SEQ ID NO: 119127 - DNA, 20 bp, Artificial Sequence
  Description of Artificial Sequence: Synthetic oligonucleotide
  Target: LAMA2; (+) strand; PAM type: NRG; PAM sequence: TGG
agtaatagagactgtgatag

SEQ ID NO: 119128 - DNA, 20 bp, Artificial Sequence
  Description of Artificial Sequence: Synthetic oligonucleotide
  Target: LAMA2; (+) strand; PAM type: NRG; PAM sequence: AAG
agagactgtgatagtggaat

SEQ ID NO: 119129 - DNA, 20 bp, Artificial Sequence
  Description of Artificial Sequence: Synthetic oligonucleotide
  Target: LAMA2; (+) strand; PAM type: NRG; PAM sequence: AGG
gagactgtgatagtggaata

SEQ ID NO: 119130 - DNA, 20 bp, Artificial Sequence
  Description of Artificial Sequence: Synthetic oligonucleotide
  Target: LAMA2; (+) strand; PAM type: NRG; PAM sequence: GAG
gactgtgatagtggaataag

SEQ ID NO: 119131 - DNA, 20 bp, Artificial Sequence
  Description of Artificial Sequence: Synthetic oligonucleotide
  Target: LAMA2; (+) strand; PAM type: NRG; PAM sequence: AAG
tatatatatatgccaatgaa

SEQ ID NO: 119132 - DNA, 20 bp, Artificial Sequence
  Description of Artificial Sequence: Synthetic oligonucleotide
  Target: LAMA2; (+) strand; PAM type: NRG; PAM sequence: GAG
tatatatatgccaatgaaaa

SEQ ID NO: 119133 - DNA, 20 bp, Artificial Sequence
  Description of Artificial Sequence: Synthetic oligonucleotide
  Target: LAMA2; (+) strand; PAM type: NRG; PAM sequence: GAG
tatatatgccaatgaaaaga

SEQ ID NO: 119134 - DNA, 20 bp, Artificial Sequence
  Description of Artificial Sequence: Synthetic oligonucleotide
  Target: LAMA2; (+) strand; PAM type: NRG; PAM sequence: TAG
atgaaaagagagtccaaaaa

SEQ ID NO: 119135 - DNA, 20 bp, Artificial Sequence
  Description of Artificial Sequence: Synthetic oligonucleotide
  Target: LAMA2; (+) strand; PAM type: NRG; PAM sequence: TGG
tccaaaaatagacccacacg

SEQ ID NO: 119136 - DNA, 20 bp, Artificial Sequence
  Description of Artificial Sequence: Synthetic oligonucleotide
  Target: LAMA2; (+) strand; PAM type: NRG; PAM sequence: AAG
ggtcaattgacttttgaaaa

SEQ ID NO: 119137 - DNA, 20 bp, Artificial Sequence
  Description of Artificial Sequence: Synthetic oligonucleotide
  Target: LAMA2; (+) strand; PAM type: NRG; PAM sequence: AAG
tgacttttgaaaaaagatcc

SEQ ID NO: 119138 - DNA, 20 bp, Artificial Sequence
  Description of Artificial Sequence: Synthetic oligonucleotide
  Target: LAMA2; (+) strand; PAM type: NRG; PAM sequence: AGG
gacttttgaaaaaagatcca

SEQ ID NO: 119139 - DNA, 20 bp, Artificial Sequence
  Description of Artificial Sequence: Synthetic oligonucleotide
  Target: LAMA2; (+) strand; PAM type: NRG; PAM sequence: TAG
gaaaaaagatccaaggtaat

SEQ ID NO: 119140 - DNA, 20 bp, Artificial Sequence
  Description of Artificial Sequence: Synthetic oligonucleotide
  Target: LAMA2; (+) strand; PAM type: NRG; PAM sequence: GAG
aagatccaaggtaattagac

SEQ ID NO: 119141 - DNA, 20 bp, Artificial Sequence
  Description of Artificial Sequence: Synthetic oligonucleotide
  Target: LAMA2; (+) strand; PAM type: NRG; PAM sequence: AGG
agatccaaggtaattagacg

SEQ ID NO: 119142 - DNA, 20 bp, Artificial Sequence
  Description of Artificial Sequence: Synthetic oligonucleotide
  Target: LAMA2; (+) strand; PAM type: NRG; PAM sequence: AAG
tttctcaacaaatgatgatg

SEQ ID NO: 119143 - DNA, 20 bp, Artificial Sequence
  Description of Artificial Sequence: Synthetic oligonucleotide
  Target: LAMA2; (+) strand; PAM type: NRG; PAM sequence: TGG
acaaatgatgatgaagtgaa

SEQ ID NO: 119144 - DNA, 20 bp, Artificial Sequence
  Description of Artificial Sequence: Synthetic oligonucleotide
  Target: LAMA2; (+) strand; PAM type: NRG; PAM sequence: TGG
gaagtgaatggatatctaca

SEQ ID NO: 119145 - DNA, 20 bp, Artificial Sequence
  Description of Artificial Sequence: Synthetic oligonucleotide
  Target: LAMA2; (+) strand; PAM type: NRG; PAM sequence: AAG
aatggatatctacatggaaa

SEQ ID NO: 119146 - DNA, 20 bp, Artificial Sequence
  Description of Artificial Sequence: Synthetic oligonucleotide
  Target: LAMA2; (+) strand; PAM type: NRG; PAM sequence: AAG
gatatctacatggaaaaaga

SEQ ID NO: 119147 - DNA, 20 bp, Artificial Sequence
  Description of Artificial Sequence: Synthetic oligonucleotide
  Target: LAMA2; (+) strand; PAM type: NRG; PAM sequence: AAG
gaaaaagaaagcccttacct

SEQ ID NO: 119148 - DNA, 20 bp, Artificial Sequence
  Description of Artificial Sequence: Synthetic oligonucleotide
  Target: LAMA2; (+) strand; PAM type: NRG; PAM sequence: CAG
ttacctaagcctctacttca

SEQ ID NO: 119149 - DNA, 20 bp, Artificial Sequence
  Description of Artificial Sequence: Synthetic oligonucleotide
  Target: LAMA2; (+) strand; PAM type: NRG; PAM sequence: TGG
cagcaaacaccaaaatttgc

SEQ ID NO: 119150 - DNA, 20 bp, Artificial Sequence
  Description of Artificial Sequence: Synthetic oligonucleotide
  Target: LAMA2; (+) strand; PAM type: NRG; PAM sequence: TAG
aatttgctggaaataaatca

SEQ ID NO: 119151 - DNA, 20 bp, Artificial Sequence
  Description of Artificial Sequence: Synthetic oligonucleotide
  Target: LAMA2; (+) strand; PAM type: NRG; PAM sequence: TAG
ataaatcatagacccaactg

SEQ ID NO: 119152 - DNA, 20 bp, Artificial Sequence
  Description of Artificial Sequence: Synthetic oligonucleotide
  Target: LAMA2; (+) strand; PAM type: NRG; PAM sequence: AAG
aatcatagacccaactgtag

SEQ ID NO: 119153 - DNA, 20 bp, Artificial Sequence
  Description of Artificial Sequence: Synthetic oligonucleotide
  Target: LAMA2; (+) strand; PAM type: NRG; PAM sequence: AAG
tagacccaactgtagaagct

SEQ ID NO: 119154 - DNA, 20 bp, Artificial Sequence
  Description of Artificial Sequence: Synthetic oligonucleotide
  Target: LAMA2; (+) strand; PAM type: NRG; PAM sequence: TAG
agctaagactataaaatctc

SEQ ID NO: 119155 - DNA, 20 bp, Artificial Sequence
  Description of Artificial Sequence: Synthetic oligonucleotide
  Target: LAMA2; (+) strand; PAM type: NRG; PAM sequence: AAG
aaatctctagaaaaaaaata

SEQ ID NO: 119156 - DNA, 20 bp, Artificial Sequence
  Description of Artificial Sequence: Synthetic oligonucleotide
  Target: LAMA2; (+) strand; PAM type: NRG; PAM sequence: AAG
tctctagaaaaaaaataaag

SEQ ID NO: 119157 - DNA, 20 bp, Artificial Sequence
  Description of Artificial Sequence: Synthetic oligonucleotide
  Target: LAMA2; (+) strand; PAM type: NRG; PAM sequence: TGG
gaagataatgttcacaactt

SEQ ID NO: 119158 - DNA, 20 bp, Artificial Sequence
  Description of Artificial Sequence: Synthetic oligonucleotide
  Target: LAMA2; (+) strand; PAM type: NRG; PAM sequence: TAG
taatgttcacaactttggtg

SEQ ID NO: 119159 - DNA, 20 bp, Artificial Sequence
  Description of Artificial Sequence: Synthetic oligonucleotide
  Target: LAMA2; (+) strand; PAM type: NRG; PAM sequence: AGG
aatgttcacaactttggtgt

SEQ ID NO: 119160 - DNA, 20 bp, Artificial Sequence
  Description of Artificial Sequence: Synthetic oligonucleotide
  Target: LAMA2; (+) strand; PAM type: NRG; PAM sequence: AAG
gtgtaggcaatgatttctga

SEQ ID NO: 119161 - DNA, 20 bp, Artificial Sequence
  Description of Artificial Sequence: Synthetic oligonucleotide
  Target: LAMA2; (+) strand; PAM type: NRG; PAM sequence: AGG
tgtaggcaatgatttctgaa

SEQ ID NO: 119162 - DNA, 20 bp, Artificial Sequence
  Description of Artificial Sequence: Synthetic oligonucleotide
  Target: LAMA2; (+) strand; PAM type: NRG; PAM sequence: GGG
gtaggcaatgatttctgaaa

SEQ ID NO: 119163 - DNA, 20 bp, Artificial Sequence
  Description of Artificial Sequence: Synthetic oligonucleotide
  Target: LAMA2; (+) strand; PAM type: NRG; PAM sequence: AAG
tgaaagggacaaaaaatatt

SEQ ID NO: 119164 - DNA, 20 bp, Artificial Sequence
  Description of Artificial Sequence: Synthetic oligonucleotide
  Target: LAMA2; (+) strand; PAM type: NRG; PAM sequence: CAG
tttaataaattgtatttaat

SEQ ID NO: 119165 - DNA, 20 bp, Artificial Sequence
  Description of Artificial Sequence: Synthetic oligonucleotide
  Target: LAMA2; (+) strand; PAM type: NRG; PAM sequence: AAG
taaacacttctgctctttga

SEQ ID NO: 119166 - DNA, 20 bp, Artificial Sequence
  Description of Artificial Sequence: Synthetic oligonucleotide
  Target: LAMA2; (+) strand; PAM type: NRG; PAM sequence: AAG
ttgaaagcactccaaatgca

SEQ ID NO: 119167 - DNA, 20 bp, Artificial Sequence
  Description of Artificial Sequence: Synthetic oligonucleotide
  Target: LAMA2; (+) strand; PAM type: NRG; PAM sequence: AAG
agcactccaaatgcaaagtc

SEQ ID NO: 119168 - DNA, 20 bp, Artificial Sequence
  Description of Artificial Sequence: Synthetic oligonucleotide
  Target: LAMA2; (+) strand; PAM type: NRG; PAM sequence: CAG
ccaaatgcaaagtcaagcca

SEQ ID NO: 119169 - DNA, 20 bp, Artificial Sequence
  Description of Artificial Sequence: Synthetic oligonucleotide
  Target: LAMA2; (+) strand; PAM type: NRG; PAM sequence: GAG
gcaaagtcaagccacagatt

SEQ ID NO: 119170 - DNA, 20 bp, Artificial Sequence
  Description of Artificial Sequence: Synthetic oligonucleotide
  Target: LAMA2; (+) strand; PAM type: NRG; PAM sequence: TAG
attgagaacaatacatatta

SEQ ID NO: 119171 - DNA, 20 bp, Artificial Sequence
  Description of Artificial Sequence: Synthetic oligonucleotide
  Target: LAMA2; (+) strand; PAM type: NRG; PAM sequence: AAG
tatagtaaatgtacttgaca

SEQ ID NO: 119172 - DNA, 20 bp, Artificial Sequence
  Description of Artificial Sequence: Synthetic oligonucleotide
  Target: LAMA2; (+) strand; PAM type: NRG; PAM sequence: AGG
atagtaaatgtacttgacaa

SEQ ID NO: 119173 - DNA, 20 bp, Artificial Sequence
  Description of Artificial Sequence: Synthetic oligonucleotide
  Target: LAMA2; (+) strand; PAM type: NRG; PAM sequence: TAG
cttgacaaaggtcttttctc

SEQ ID NO: 119174 - DNA, 20 bp, Artificial Sequence
  Description of Artificial Sequence: Synthetic oligonucleotide
  Target: LAMA2; (+) strand; PAM type: NRG; PAM sequence: TGG
tttaaatcttattaataatc

SEQ ID NO: 119175 - DNA, 20 bp, Artificial Sequence
  Description of Artificial Sequence: Synthetic oligonucleotide
  Target: LAMA2; (+) strand; PAM type: NRG; PAM sequence: AAG
tattaataatctggcaaaca

SEQ ID NO: 119176 - DNA, 20 bp, Artificial Sequence
  Description of Artificial Sequence: Synthetic oligonucleotide
  Target: LAMA2; (+) strand; PAM type: NRG; PAM sequence: GAG
tctggcaaacaaagcaaaat

SEQ ID NO: 119177 - DNA, 20 bp, Artificial Sequence
  Description of Artificial Sequence: Synthetic oligonucleotide
  Target: LAMA2; (+) strand; PAM type: NRG; PAM sequence: AAG
caaacaaagcaaaatgagca

SEQ ID NO: 119178 - DNA, 20 bp, Artificial Sequence
  Description of Artificial Sequence: Synthetic oligonucleotide
  Target: LAMA2; (+) strand; PAM type: NRG; PAM sequence: AAG
gcaaaatgagcaaagatttc

SEQ ID NO: 119179 - DNA, 20 bp, Artificial Sequence
  Description of Artificial Sequence: Synthetic oligonucleotide
  Target: LAMA2; (+) strand; PAM type: NRG; PAM sequence: AAG
aaatgagcaaagatttcaag

SEQ ID NO: 119180 - DNA, 20 bp, Artificial Sequence
  Description of Artificial Sequence: Synthetic oligonucleotide
  Target: LAMA2; (+) strand; PAM type: NRG; PAM sequence: AAG
caagaagaatttcacaaaat

SEQ ID NO: 119181 - DNA, 20 bp, Artificial Sequence
  Description of Artificial Sequence: Synthetic oligonucleotide
  Target: LAMA2; (+) strand; PAM type: NRG; PAM sequence: AAG
aagatatacaaatgacgatt

SEQ ID NO: 119182 - DNA, 20 bp, Artificial Sequence
  Description of Artificial Sequence: Synthetic oligonucleotide
  Target: LAMA2; (+) strand; PAM type: NRG; PAM sequence: CAG
taagcacatgaaaatatgtt

SEQ ID NO: 119183 - DNA, 20 bp, Artificial Sequence
  Description of Artificial Sequence: Synthetic oligonucleotide
  Target: LAMA2; (+) strand; PAM type: NRG; PAM sequence: AAG
aaatatgttcagcatcatca

SEQ ID NO: 119184 - DNA, 20 bp, Artificial Sequence
  Description of Artificial Sequence: Synthetic oligonucleotide
  Target: LAMA2; (+) strand; PAM type: NRG; PAM sequence: AAG
tatgttcagcatcatcaaag

SEQ ID NO: 119185 - DNA, 20 bp, Artificial Sequence
  Description of Artificial Sequence: Synthetic oligonucleotide
  Target: LAMA2; (+) strand; PAM type: NRG; PAM sequence: GAG
gtgcaaatgacaccaccaat

SEQ ID NO: 119186 - DNA, 20 bp, Artificial Sequence
  Description of Artificial Sequence: Synthetic oligonucleotide
  Target: LAMA2; (+) strand; PAM type: NRG; PAM sequence: AGG
tgcaaatgacaccaccaatg

SEQ ID NO: 119187 - DNA, 20 bp, Artificial Sequence
  Description of Artificial Sequence: Synthetic oligonucleotide
  Target: LAMA2; (+) strand; PAM type: NRG; PAM sequence: AAG
ccaatgaggtatcaccacac

SEQ ID NO: 119188 - DNA, 20 bp, Artificial Sequence
  Description of Artificial Sequence: Synthetic oligonucleotide
  Target: LAMA2; (+) strand; PAM type: NRG; PAM sequence: TAG
aggtatcaccacacaagcac

SEQ ID NO: 119189 - DNA, 20 bp, Artificial Sequence
  Description of Artificial Sequence: Synthetic oligonucleotide
  Target: LAMA2; (+) strand; PAM type: NRG; PAM sequence: TGG
tcaccacacaagcactagaa

SEQ ID NO: 119190 - DNA, 20 bp, Artificial Sequence
  Description of Artificial Sequence: Synthetic oligonucleotide
  Target: LAMA2; (+) strand; PAM type: NRG; PAM sequence: TAG
tggctaaaatgtaacaatat

SEQ ID NO: 119191 - DNA, 20 bp, Artificial Sequence
  Description of Artificial Sequence: Synthetic oligonucleotide
  Target: LAMA2; (+) strand; PAM type: NRG; PAM sequence: AAG
aacaatattagatgttaata

SEQ ID NO: 119192 - DNA, 20 bp, Artificial Sequence
  Description of Artificial Sequence: Synthetic oligonucleotide
  Target: LAMA2; (+) strand; PAM type: NRG; PAM sequence: TAG
attagatgttaataaagcca

SEQ ID NO: 119193 - DNA, 20 bp, Artificial Sequence
  Description of Artificial Sequence: Synthetic oligonucleotide
  Target: LAMA2; (+) strand; PAM type: NRG; PAM sequence: GAG
tagatgttaataaagccata

SEQ ID NO: 119194 - DNA, 20 bp, Artificial Sequence
  Description of Artificial Sequence: Synthetic oligonucleotide
  Target: LAMA2; (+) strand; PAM type: NRG; PAM sequence: TGG
taataaagccatagagcatc

SEQ ID NO: 119195 - DNA, 20 bp, Artificial Sequence
  Description of Artificial Sequence: Synthetic oligonucleotide
  Target: LAMA2; (+) strand; PAM type: NRG; PAM sequence: TGG
ggaactcctatatattgctg

SEQ ID NO: 119196 - DNA, 20 bp, Artificial Sequence
  Description of Artificial Sequence: Synthetic oligonucleotide
  Target: LAMA2; (+) strand; PAM type: NRG; PAM sequence: GGG
gaactcctatatattgctgt

SEQ ID NO: 119197 - DNA, 20 bp, Artificial Sequence
  Description of Artificial Sequence: Synthetic oligonucleotide
  Target: LAMA2; (+) strand; PAM type: NRG; PAM sequence: GAG
actcctatatattgctgtgg

SEQ ID NO: 119198 - DNA, 20 bp, Artificial Sequence
  Description of Artificial Sequence: Synthetic oligonucleotide
  Target: LAMA2; (+) strand; PAM type: NRG; PAM sequence: AGG
ctcctatatattgctgtggg

SEQ ID NO: 119199 - DNA, 20 bp, Artificial Sequence
  Description of Artificial Sequence: Synthetic oligonucleotide
  Target: LAMA2; (+) strand; PAM type: NRG; PAM sequence: TGG
gtaaaattataaaacaacat

SEQ ID NO: 119200 - DNA, 20 bp, Artificial Sequence
  Description of Artificial Sequence: Synthetic oligonucleotide
  Target: LAMA2; (+) strand; PAM type: NRG; PAM sequence: AAG
attataaaacaacattggaa

SEQ ID NO: 119201 - DNA, 20 bp, Artificial Sequence
  Description of Artificial Sequence: Synthetic oligonucleotide
  Target: LAMA2; (+) strand; PAM type: NRG; PAM sequence: GAG
tataaaacaacattggaaaa

SEQ ID NO: 119202 - DNA, 20 bp, Artificial Sequence
  Description of Artificial Sequence: Synthetic oligonucleotide
  Target: LAMA2; (+) strand; PAM type: NRG; PAM sequence: AGG
ataaaacaacattggaaaag

SEQ ID NO: 119203 - DNA, 20 bp, Artificial Sequence
  Description of Artificial Sequence: Synthetic oligonucleotide
  Target: LAMA2; (+) strand; PAM type: NRG; PAM sequence: CAG
aacattggaaaagaggttca

SEQ ID NO: 119204 - DNA, 20 bp, Artificial Sequence
  Description of Artificial Sequence: Synthetic oligonucleotide
  Target: LAMA2; (+) strand; PAM type: NRG; PAM sequence: TAG
aagaggttcacagttttgta

SEQ ID NO: 119205 - DNA, 20 bp, Artificial Sequence
  Description of Artificial Sequence: Synthetic oligonucleotide
  Target: LAMA2; (+) strand; PAM type: NRG; PAM sequence: AAG
tacctgataatataactcct

SEQ ID NO: 119206 - DNA, 20 bp, Artificial Sequence
  Description of Artificial Sequence: Synthetic oligonucleotide
  Target: LAMA2; (+) strand; PAM type: NRG; PAM sequence: TAG
atataactcctaagacttga

SEQ ID NO: 119207 - DNA, 20 bp, Artificial Sequence
  Description of Artificial Sequence: Synthetic oligonucleotide
  Target: LAMA2; (+) strand; PAM type: NRG; PAM sequence: AGG
tataactcctaagacttgat

SEQ ID NO: 119208 - DNA, 20 bp, Artificial Sequence
  Description of Artificial Sequence: Synthetic oligonucleotide
  Target: LAMA2; (+) strand; PAM type: NRG; PAM sequence: TAG
ctcctaagacttgataggaa

SEQ ID NO: 119209 - DNA, 20 bp, Artificial Sequence
  Description of Artificial Sequence: Synthetic oligonucleotide
  Target: LAMA2; (+) strand; PAM type: NRG; PAM sequence: GAG
cctaagacttgataggaata

SEQ ID NO: 119210 - DNA, 20 bp, Artificial Sequence
  Description of Artificial Sequence: Synthetic oligonucleotide
  Target: LAMA2; (+) strand; PAM type: NRG; PAM sequence: TAG
acactgtgtttaaataatca

SEQ ID NO: 119211 - DNA, 20 bp, Artificial Sequence
  Description of Artificial Sequence: Synthetic oligonucleotide
  Target: LAMA2; (+) strand; PAM type: NRG; PAM sequence: TAG
catagcaattttattcttca

SEQ ID NO: 119212 - DNA, 20 bp, Artificial Sequence
  Description of Artificial Sequence: Synthetic oligonucleotide
  Target: LAMA2; (+) strand; PAM type: NRG; PAM sequence: TGG
tattcttcatagccccaaac

SEQ ID NO: 119213 - DNA, 20 bp, Artificial Sequence
  Description of Artificial Sequence: Synthetic oligonucleotide
  Target: LAMA2; (+) strand; PAM type: NRG; PAM sequence: TAG
acaacccaaatgtactttaa

SEQ ID NO: 119214 - DNA, 20 bp, Artificial Sequence
  Description of Artificial Sequence: Synthetic oligonucleotide
  Target: LAMA2; (+) strand; PAM type: NRG; PAM sequence: TAG
tgtgatatatccatacgata

SEQ ID NO: 119215 - DNA, 20 bp, Artificial Sequence
  Description of Artificial Sequence: Synthetic oligonucleotide
  Target: LAMA2; (+) strand; PAM type: NRG; PAM sequence: TAG
atccatacgatatagaatga

SEQ ID NO: 119216 - DNA, 20 bp, Artificial Sequence
  Description of Artificial Sequence: Synthetic oligonucleotide
  Target: LAMA2; (+) strand; PAM type: NRG; PAM sequence: TAG
tatagaatgatagatactat

SEQ ID NO: 119217 - DNA, 20 bp, Artificial Sequence
  Description of Artificial Sequence: Synthetic oligonucleotide
  Target: LAMA2; (+) strand; PAM type: NRG; PAM sequence: TAG
gatagatactattagaatga

SEQ ID NO: 119218 - DNA, 20 bp, Artificial Sequence
  Description of Artificial Sequence: Synthetic oligonucleotide
  Target: LAMA2; (+) strand; PAM type: NRG; PAM sequence: CAG
tagaatgatagaatattatt

SEQ ID NO: 119219 - DNA, 20 bp, Artificial Sequence
  Description of Artificial Sequence: Synthetic oligonucleotide
  Target: LAMA2; (+) strand; PAM type: NRG; PAM sequence: GAG
gaatgatagaatattattca

SEQ ID NO: 119220 - DNA, 20 bp, Artificial Sequence
  Description of Artificial Sequence: Synthetic oligonucleotide
  Target: LAMA2; (+) strand; PAM type: NRG; PAM sequence: AAG
gaatattattcagagatgaa

SEQ ID NO: 119221 - DNA, 20 bp, Artificial Sequence
  Description of Artificial Sequence: Synthetic oligonucleotide
  Target: LAMA2; (+) strand; PAM type: NRG; PAM sequence: AGG
aatattattcagagatgaaa

SEQ ID NO: 119222 - DNA, 20 bp, Artificial Sequence
  Description of Artificial Sequence: Synthetic oligonucleotide
  Target: LAMA2; (+) strand; PAM type: NRG; PAM sequence: AAG
aaggaatgtattactgatat

SEQ ID NO: 119223 - DNA, 20 bp, Artificial Sequence
  Description of Artificial Sequence: Synthetic oligonucleotide
  Target: LAMA2; (+) strand; PAM type: NRG; PAM sequence: AAG
tacctccaaaacatgttgca

SEQ ID NO: 119224 - DNA, 20 bp, Artificial Sequence
  Description of Artificial Sequence: Synthetic oligonucleotide
  Target: LAMA2; (+) strand; PAM type: NRG; PAM sequence: AAG
caaaacatgttgcaaagtga

SEQ ID NO: 119225 - DNA, 20 bp, Artificial Sequence
  Description of Artificial Sequence: Synthetic oligonucleotide
  Target: LAMA2; (+) strand; PAM type: NRG; PAM sequence: AAG
aacatgttgcaaagtgaaag

SEQ ID NO: 119226 - DNA, 20 bp, Artificial Sequence
  Description of Artificial Sequence: Synthetic oligonucleotide
  Target: LAMA2; (+) strand; PAM type: NRG; PAM sequence: CAG
tgttgcaaagtgaaagaagc

SEQ ID NO: 119227 - DNA, 20 bp, Artificial Sequence
  Description of Artificial Sequence: Synthetic oligonucleotide
  Target: LAMA2; (+) strand; PAM type: NRG; PAM sequence: AAG
gtgaaagaagccagacacaa

SEQ ID NO: 119228 - DNA, 20 bp, Artificial Sequence
  Description of Artificial Sequence: Synthetic oligonucleotide
  Target: LAMA2; (+) strand; PAM type: NRG; PAM sequence: GAG
attgtatttacatgaaatat

SEQ ID NO: 119229 - DNA, 20 bp, Artificial Sequence
  Description of Artificial Sequence: Synthetic oligonucleotide
  Target: LAMA2; (+) strand; PAM type: NRG; PAM sequence: TAG
atttacatgaaatatgagaa

SEQ ID NO: 119230 - DNA, 20 bp, Artificial Sequence
  Description of Artificial Sequence: Synthetic oligonucleotide
  Target: LAMA2; (+) strand; PAM type: NRG; PAM sequence: TAG
atgagaatagttataatcta

SEQ ID NO: 119231 - DNA, 20 bp, Artificial Sequence
  Description of Artificial Sequence: Synthetic oligonucleotide
  Target: LAMA2; (+) strand; PAM type: NRG; PAM sequence: TAG
ataatctatagtgacaaaat

SEQ ID NO: 119232 - DNA, 20 bp, Artificial Sequence
  Description of Artificial Sequence: Synthetic oligonucleotide
  Target: LAMA2; (+) strand; PAM type: NRG; PAM sequence: CAG
ctatagtgacaaaattagat

SEQ ID NO: 119233 - DNA, 20 bp, Artificial Sequence
  Description of Artificial Sequence: Synthetic oligonucleotide
  Target: LAMA2; (+) strand; PAM type: NRG; PAM sequence: CAG
tagtgacaaaattagatcag

SEQ ID NO: 119234 - DNA, 20 bp, Artificial Sequence
  Description of Artificial Sequence: Synthetic oligonucleotide
  Target: LAMA2; (+) strand; PAM type: NRG; PAM sequence: TGG
gatcagcagttgcctttttc

SEQ ID NO: 119235 - DNA, 20 bp, Artificial Sequence
  Description of Artificial Sequence: Synthetic oligonucleotide
  Target: LAMA2; (+) strand; PAM type: NRG; PAM sequence: GGG
atcagcagttgcctttttct

SEQ ID NO: 119236 - DNA, 20 bp, Artificial Sequence
  Description of Artificial Sequence: Synthetic oligonucleotide
  Target: LAMA2; (+) strand; PAM type: NRG; PAM sequence: TGG
cagttgcctttttctgggaa

SEQ ID NO: 119237 - DNA, 20 bp, Artificial Sequence
  Description of Artificial Sequence: Synthetic oligonucleotide
  Target: LAMA2; (+) strand; PAM type: NRG; PAM sequence: GAG
gttgcctttttctgggaatg

SEQ ID NO: 119238 - DNA, 20 bp, Artificial Sequence
  Description of Artificial Sequence: Synthetic oligonucleotide
  Target: LAMA2; (+) strand; PAM type: NRG; PAM sequence: AGG
ttgcctttttctgggaatgg

SEQ ID NO: 119239 - DNA, 20 bp, Artificial Sequence
  Description of Artificial Sequence: Synthetic oligonucleotide
  Target: LAMA2; (+) strand; PAM type: NRG; PAM sequence: TGG
ctttttctgggaatggaggt

SEQ ID NO: 119240 - DNA, 20 bp, Artificial Sequence
  Description of Artificial Sequence: Synthetic oligonucleotide
  Target: LAMA2; (+) strand; PAM type: NRG; PAM sequence: GGG
tttttctgggaatggaggtt

SEQ ID NO: 119241 - DNA, 20 bp, Artificial Sequence
  Description of Artificial Sequence: Synthetic oligonucleotide
  Target: LAMA2; (+) strand; PAM type: NRG; PAM sequence: GGG
ttttctgggaatggaggttg

SEQ ID NO: 119242 - DNA, 20 bp, Artificial Sequence
  Description of Artificial Sequence: Synthetic oligonucleotide
  Target: LAMA2; (+) strand; PAM type: NRG; PAM sequence: GGG
tttctgggaatggaggttgg

SEQ ID NO: 119243 - DNA, 20 bp, Artificial Sequence
  Description of Artificial Sequence: Synthetic oligonucleotide
  Target: LAMA2; (+) strand; PAM type: NRG; PAM sequence: AAG
ggttgggggatttattgcaa

SEQ ID NO: 119244 - DNA, 20 bp, Artificial Sequence
  Description of Artificial Sequence: Synthetic oligonucleotide
  Target: LAMA2; (+) strand; PAM type: NRG; PAM sequence: AGG
gttgggggatttattgcaaa

SEQ ID NO: 119245 - DNA, 20 bp, Artificial Sequence
  Description of Artificial Sequence: Synthetic oligonucleotide
  Target: LAMA2; (+) strand; PAM type: NRG; PAM sequence: CAG
ggggatttattgcaaaaggt

SEQ ID NO: 119246 - DNA, 20 bp, Artificial Sequence
  Description of Artificial Sequence: Synthetic oligonucleotide
  Target: LAMA2; (+) strand; PAM type: NRG; PAM sequence: AAG
atttattgcaaaaggtcaga

SEQ ID NO: 119247 - DNA, 20 bp, Artificial Sequence
  Description of Artificial Sequence: Synthetic oligonucleotide
  Target: LAMA2; (+) strand; PAM type: NRG; PAM sequence: GAG
ggtcagaaagaaaacttttt

SEQ ID NO: 119248 - DNA, 20 bp, Artificial Sequence
  Description of Artificial Sequence: Synthetic oligonucleotide
  Target: LAMA2; (+) strand; PAM type: NRG; PAM sequence: TAG
aagaaaactttttgagatta

SEQ ID NO: 119249 - DNA, 20 bp, Artificial Sequence
  Description of Artificial Sequence: Synthetic oligonucleotide
  Target: LAMA2; (+) strand; PAM type: NRG; PAM sequence: TAG
actttttgagattatagaaa

SEQ ID NO: 119250 - DNA, 20 bp, Artificial Sequence
  Description of Artificial Sequence: Synthetic oligonucleotide
  Target: LAMA2; (+) strand; PAM type: NRG; PAM sequence: TGG
tatagaaatagactatgtat

SEQ ID NO: 119251 - DNA, 20 bp, Artificial Sequence
  Description of Artificial Sequence: Synthetic oligonucleotide
  Target: LAMA2; (+) strand; PAM type: NRG; PAM sequence: GGG
atagaaatagactatgtatt

SEQ ID NO: 119252 - DNA, 20 bp, Artificial Sequence
  Description of Artificial Sequence: Synthetic oligonucleotide
  Target: LAMA2; (+) strand; PAM type: NRG; PAM sequence: CAG
ctatgtattgggtactttgt

SEQ ID NO: 119253 - DNA, 20 bp, Artificial Sequence
  Description of Artificial Sequence: Synthetic oligonucleotide
  Target: LAMA2; (+) strand; PAM type: NRG; PAM sequence: GAG
tattgggtactttgtcagat

SEQ ID NO: 119254 - DNA, 20 bp, Artificial Sequence
  Description of Artificial Sequence: Synthetic oligonucleotide
  Target: LAMA2; (+) strand; PAM type: NRG; PAM sequence: GAG
atctaaaaaatgtttcaaat

SEQ ID NO: 119255 - DNA, 20 bp, Artificial Sequence
  Description of Artificial Sequence: Synthetic oligonucleotide
  Target: LAMA2; (+) strand; PAM type: NRG; PAM sequence: TAG
tgtgtaaattgtaccttatt

SEQ ID NO: 119256 - DNA, 20 bp, Artificial Sequence
  Description of Artificial Sequence: Synthetic oligonucleotide
  Target: LAMA2; (+) strand; PAM type: NRG; PAM sequence: AGG
gtgtaaattgtaccttattt

SEQ ID NO: 119257 - DNA, 20 bp, Artificial Sequence
  Description of Artificial Sequence: Synthetic oligonucleotide
  Target: LAMA2; (+) strand; PAM type: NRG; PAM sequence: TGG
gtaccttatttaggtttatt

SEQ ID NO: 119258 - DNA, 20 bp, Artificial Sequence
  Description of Artificial Sequence: Synthetic oligonucleotide
  Target: LAMA2; (+) strand; PAM type: NRG; PAM sequence: TAG
aggtttatttggaaaaaata

SEQ ID NO: 119259 - DNA, 20 bp, Artificial Sequence
  Description of Artificial Sequence: Synthetic oligonucleotide
  Target: LAMA2; (+) strand; PAM type: NRG; PAM sequence: TGG
aaatatagctctaaatatac

SEQ ID NO: 119260 - DNA, 20 bp, Artificial Sequence
  Description of Artificial Sequence: Synthetic oligonucleotide
  Target: LAMA2; (+) strand; PAM type: NRG; PAM sequence: TGG
tatactggttcattttaatt

SEQ ID NO: 119261 - DNA, 20 bp, Artificial Sequence
  Description of Artificial Sequence: Synthetic oligonucleotide
  Target: LAMA2; (+) strand; PAM type: NRG; PAM sequence: GGG
atactggttcattttaattt

SEQ ID NO: 119262 - DNA, 20 bp, Artificial Sequence
  Description of Artificial Sequence: Synthetic oligonucleotide
  Target: LAMA2; (+) strand; PAM type: NRG; PAM sequence: AAG
ttaatttgggttaaatattt

SEQ ID NO: 119263 - DNA, 20 bp, Artificial Sequence
  Description of Artificial Sequence: Synthetic oligonucleotide
  Target: LAMA2; (+) strand; PAM type: NRG; PAM sequence: AAG
ttccatgtgctgaatcaaac

SEQ ID NO: 119264 - DNA, 20 bp, Artificial Sequence
  Description of Artificial Sequence: Synthetic oligonucleotide
  Target: LAMA2; (+) strand; PAM type: NRG; PAM sequence: TAG
catgtgctgaatcaaacaag

SEQ ID NO: 119265 - DNA, 20 bp, Artificial Sequence
  Description of Artificial Sequence: Synthetic oligonucleotide
  Target: LAMA2; (+) strand; PAM type: NRG; PAM sequence: GAG
tgtgctgaatcaaacaagta

SEQ ID NO: 119266 - DNA, 20 bp, Artificial Sequence
  Description of Artificial Sequence: Synthetic oligonucleotide
  Target: LAMA2; (+) strand; PAM type: NRG; PAM sequence: CAG
aatcaaacaagtagagttga

SEQ ID NO: 119267 - DNA, 20 bp, Artificial Sequence
  Description of Artificial Sequence: Synthetic oligonucleotide
  Target: LAMA2; (+) strand; PAM type: NRG; PAM sequence: TGG
caaacaagtagagttgacag

SEQ ID NO: 119268 - DNA, 20 bp, Artificial Sequence
  Description of Artificial Sequence: Synthetic oligonucleotide
  Target: LAMA2; (+) strand; PAM type: NRG; PAM sequence: GAG
aacaagtagagttgacagtg

SEQ ID NO: 119269 - DNA, 20 bp, Artificial Sequence
  Description of Artificial Sequence: Synthetic oligonucleotide
  Target: LAMA2; (+) strand; PAM type: NRG; PAM sequence: TAG
agagttgacagtggagatca

SEQ ID NO: 119270 - DNA, 20 bp, Artificial Sequence
  Description of Artificial Sequence: Synthetic oligonucleotide
  Target: LAMA2; (+) strand; PAM type: NRG; PAM sequence: AAG
gagatcatagtcttattctc

SEQ ID NO: 119271 - DNA, 20 bp, Artificial Sequence
  Description of Artificial Sequence: Synthetic oligonucleotide
  Target: LAMA2; (+) strand; PAM type: NRG; PAM sequence: AGG
agatcatagtcttattctca

SEQ ID NO: 119272 - DNA, 20 bp, Artificial Sequence
  Description of Artificial Sequence: Synthetic oligonucleotide
  Target: LAMA2; (+) strand; PAM type: NRG; PAM sequence: TAG
caaggcattttcatgtaaaa

SEQ ID NO: 119273 - DNA, 20 bp, Artificial Sequence
  Description of Artificial Sequence: Synthetic oligonucleotide
  Target: LAMA2; (+) strand; PAM type: NRG; PAM sequence: AGG
aaggcattttcatgtaaaat

SEQ ID NO: 119274 - DNA, 20 bp, Artificial Sequence
  Description of Artificial Sequence: Synthetic oligonucleotide
  Target: LAMA2; (+) strand; PAM type: NRG; PAM sequence: CAG
tttcatgtaaaataggaact

SEQ ID NO: 119275 - DNA, 20 bp, Artificial Sequence
  Description of Artificial Sequence: Synthetic oligonucleotide
  Target: LAMA2; (+) strand; PAM type: NRG; PAM sequence: AGG
ttcatgtaaaataggaactc

SEQ ID NO: 119276 - DNA, 20 bp, Artificial Sequence
  Description of Artificial Sequence: Synthetic oligonucleotide
  Target: LAMA2; (+) strand; PAM type: NRG; PAM sequence: CAG
aataggaactcaggtaactg

SEQ ID NO: 119277 - DNA, 20 bp, Artificial Sequence
  Description of Artificial Sequence: Synthetic oligonucleotide
  Target: LAMA2; (+) strand; PAM type: NRG; PAM sequence: CAG
tcaggtaactgcagtaactg

SEQ ID NO: 119278 - DNA, 20 bp, Artificial Sequence
  Description of Artificial Sequence: Synthetic oligonucleotide
  Target: LAMA2; (+) strand; PAM type: NRG; PAM sequence: AAG
taactgcagtaactgcagaa

SEQ ID NO: 119279 - DNA, 20 bp, Artificial Sequence
  Description of Artificial Sequence: Synthetic oligonucleotide
  Target: LAMA2; (+) strand; PAM type: NRG; PAM sequence: CAG
ctgcagtaactgcagaaaag

SEQ ID NO: 119280 - DNA, 20 bp, Artificial Sequence
  Description of Artificial Sequence: Synthetic oligonucleotide
  Target: LAMA2; (+) strand; PAM type: NRG; PAM sequence: AGG
tgcagtaactgcagaaaagc

SEQ ID NO: 119281 - DNA, 20 bp, Artificial Sequence
  Description of Artificial Sequence: Synthetic oligonucleotide
  Target: LAMA2; (+) strand; PAM type: NRG; PAM sequence: TGG
aaatattgattataaaatcc

SEQ ID NO: 119282 - DNA, 20 bp, Artificial Sequence
  Description of Artificial Sequence: Synthetic oligonucleotide
  Target: LAMA2; (+) strand; PAM type: NRG; PAM sequence: GGG
aatattgattataaaatcct

SEQ ID NO: 119283 - DNA, 20 bp, Artificial Sequence
  Description of Artificial Sequence: Synthetic oligonucleotide
  Target: LAMA2; (+) strand; PAM type: NRG; PAM sequence: AAG
taaaatcctgggaaaatgta

SEQ ID NO: 119284 - DNA, 20 bp, Artificial Sequence
  Description of Artificial Sequence: Synthetic oligonucleotide
  Target: LAMA2; (+) strand; PAM type: NRG; PAM sequence: GAG
aaatcctgggaaaatgtaaa

SEQ ID NO: 119285 - DNA, 20 bp, Artificial Sequence
  Description of Artificial Sequence: Synthetic oligonucleotide
  Target: LAMA2; (+) strand; PAM type: NRG; PAM sequence: AGG
aatcctgggaaaatgtaaag

SEQ ID NO: 119286 - DNA, 20 bp, Artificial Sequence
  Description of Artificial Sequence: Synthetic oligonucleotide
  Target: LAMA2; (+) strand; PAM type: NRG; PAM sequence: AAG
cctgggaaaatgtaaagagg

SEQ ID NO: 119287 - DNA, 20 bp, Artificial Sequence
  Description of Artificial Sequence: Synthetic oligonucleotide
  Target: LAMA2; (+) strand; PAM type: NRG; PAM sequence: AGG
ctgggaaaatgtaaagagga

SEQ ID NO: 119288 - DNA, 20 bp, Artificial Sequence
  Description of Artificial Sequence: Synthetic oligonucleotide
  Target: LAMA2; (+) strand; PAM type: NRG; PAM sequence: GGG
tgggaaaatgtaaagaggaa

SEQ ID NO: 119289 - DNA, 20 bp, Artificial Sequence
  Description of Artificial Sequence: Synthetic oligonucleotide
  Target: LAMA2; (+) strand; PAM type: NRG; PAM sequence: GGG
gggaaaatgtaaagaggaag

SEQ ID NO: 119290 - DNA, 20 bp, Artificial Sequence
  Description of Artificial Sequence: Synthetic oligonucleotide
  Target: LAMA2; (+) strand; PAM type: NRG; PAM sequence: TAG
aaatgtaaagaggaagggga

SEQ ID NO: 119291 - DNA, 20 bp, Artificial Sequence
  Description of Artificial Sequence: Synthetic oligonucleotide
  Target: LAMA2; (+) strand; PAM type: NRG; PAM sequence: GAG
atgtaaagaggaaggggata

SEQ ID NO: 119292 - DNA, 20 bp, Artificial Sequence
  Description of Artificial Sequence: Synthetic oligonucleotide
  Target: LAMA2; (+) strand; PAM type: NRG; PAM sequence: AGG
tgtaaagaggaaggggatag

SEQ ID NO: 119293 - DNA, 20 bp, Artificial Sequence
  Description of Artificial Sequence: Synthetic oligonucleotide
  Target: LAMA2; (+) strand; PAM type: NRG; PAM sequence: GGG
gtaaagaggaaggggataga

SEQ ID NO: 119294 - DNA, 20 bp, Artificial Sequence
  Description of Artificial Sequence: Synthetic oligonucleotide
  Target: LAMA2; (+) strand; PAM type: NRG; PAM sequence: TGG
ggaaggggatagagggaaca

SEQ ID NO: 119295 - DNA, 20 bp, Artificial Sequence
  Description of Artificial Sequence: Synthetic oligonucleotide
  Target: LAMA2; (+) strand; PAM type: NRG; PAM sequence: TAG
gtatattttcattccacaat

SEQ ID NO: 119296 - DNA, 20 bp, Artificial Sequence
  Description of Artificial Sequence: Synthetic oligonucleotide
  Target: LAMA2; (+) strand; PAM type: NRG; PAM sequence: GAG
atattttcattccacaatta

SEQ ID NO: 119297 - DNA, 20 bp, Artificial Sequence
  Description of Artificial Sequence: Synthetic oligonucleotide
  Target: LAMA2; (+) strand; PAM type: NRG; PAM sequence: TAG
tttcattccacaattagagt

SEQ ID NO: 119298 - DNA, 20 bp, Artificial Sequence
  Description of Artificial Sequence: Synthetic oligonucleotide
  Target: LAMA2; (+) strand; PAM type: NRG; PAM sequence: CAG
cattccacaattagagttag

SEQ ID NO: 119299 - DNA, 20 bp, Artificial Sequence
  Description of Artificial Sequence: Synthetic oligonucleotide
  Target: LAMA2; (+) strand; PAM type: NRG; PAM sequence: TAG
aaatattttttattatttat

SEQ ID NO: 119300 - DNA, 20 bp, Artificial Sequence
  Description of Artificial Sequence: Synthetic oligonucleotide
  Target: LAMA2; (+) strand; PAM type: NRG; PAM sequence: GAG
tttattagattaactaattt

SEQ ID NO: 119301 - DNA, 20 bp, Artificial Sequence
  Description of Artificial Sequence: Synthetic oligonucleotide
  Target: LAMA2; (+) strand; PAM type: NRG; PAM sequence: GAG
tagattaactaatttgagtt

SEQ ID NO: 119302 - DNA, 20 bp, Artificial Sequence
  Description of Artificial Sequence: Synthetic oligonucleotide
  Target: LAMA2; (+) strand; PAM type: NRG; PAM sequence: AGG
agattaactaatttgagttg

SEQ ID NO: 119303 - DNA, 20 bp, Artificial Sequence
  Description of Artificial Sequence: Synthetic oligonucleotide
  Target: LAMA2; (+) strand; PAM type: NRG; PAM sequence: TGG
tttgagttgaggccacaaca

SEQ ID NO: 119304 - DNA, 20 bp, Artificial Sequence
  Description of Artificial Sequence: Synthetic oligonucleotide
  Target: LAMA2; (+) strand; PAM type: NRG; PAM sequence: GAG
gttgaggccacaacatggtt

SEQ ID NO: 119305 - DNA, 20 bp, Artificial Sequence
  Description of Artificial Sequence: Synthetic oligonucleotide
  Target: LAMA2; (+) strand; PAM type: NRG; PAM sequence: TAG
aaatattttttattatttat

SEQ ID NO: 119306 - DNA, 20 bp, Artificial Sequence
  Description of Artificial Sequence: Synthetic oligonucleotide
  Target: LAMA2; (+) strand; PAM type: NRG; PAM sequence: GAG
tttattagattaactaattt

SEQ ID NO: 119307 - DNA, 20 bp, Artificial Sequence
  Description of Artificial Sequence: Synthetic oligonucleotide
  Target: LAMA2; (+) strand; PAM type: NRG; PAM sequence: GAG
tagattaactaatttgagtt

SEQ ID NO: 119308 - DNA, 20 bp, Artificial Sequence
  Description of Artificial Sequence: Synthetic oligonucleotide
  Target: LAMA2; (+) strand; PAM type: NRG; PAM sequence: AGG
agattaactaatttgagttg

SEQ ID NO: 119309 - DNA, 20 bp, Artificial Sequence
  Description of Artificial Sequence: Synthetic oligonucleotide
  Target: LAMA2; (+) strand; PAM type: NRG; PAM sequence: TGG
tttgagttgaggccacaacg

SEQ ID NO: 119310 - DNA, 20 bp, Artificial Sequence
  Description of Artificial Sequence: Synthetic oligonucleotide
  Target: LAMA2; (+) strand; PAM type: NRG; PAM sequence: GAG
gttgaggccacaacgtggtt

SEQ ID NO: 119311 - DNA, 20 bp, Artificial Sequence
  Description of Artificial Sequence: Synthetic oligonucleotide
  Target: LAMA2; (+) strand; PAM type: NRG; PAM sequence: GAG
tgagtaaaaataatcattct

SEQ ID NO: 119312 - DNA, 20 bp, Artificial Sequence
  Description of Artificial Sequence: Synthetic oligonucleotide
  Target: LAMA2; (+) strand; PAM type: NRG; PAM sequence: TAG
aaaaataatcattctgagaa

SEQ ID NO: 119313 - DNA, 20 bp, Artificial Sequence
  Description of Artificial Sequence: Synthetic oligonucleotide
  Target: LAMA2; (+) strand; PAM type: NRG; PAM sequence: TAG
aatcattctgagaatagcaa

SEQ ID NO: 119314 - DNA, 20 bp, Artificial Sequence
  Description of Artificial Sequence: Synthetic oligonucleotide
  Target: LAMA2; (+) strand; PAM type: NRG; PAM sequence: AGG
atcattctgagaatagcaat

SEQ ID NO: 119315 - DNA, 20 bp, Artificial Sequence
  Description of Artificial Sequence: Synthetic oligonucleotide
  Target: LAMA2; (+) strand; PAM type: NRG; PAM sequence: TAG
tctgagaatagcaataggtt

SEQ ID NO: 119316 - DNA, 20 bp, Artificial Sequence
  Description of Artificial Sequence: Synthetic oligonucleotide
  Target: LAMA2; (+) strand; PAM type: NRG; PAM sequence: AAG
gagaatagcaataggtttag

SEQ ID NO: 119317 - DNA, 20 bp, Artificial Sequence
  Description of Artificial Sequence: Synthetic oligonucleotide
  Target: LAMA2; (+) strand; PAM type: NRG; PAM sequence: AGG
agaatagcaataggtttaga

SEQ ID NO: 119318 - DNA, 20 bp, Artificial Sequence
  Description of Artificial Sequence: Synthetic oligonucleotide
  Target: LAMA2; (+) strand; PAM type: NRG; PAM sequence: TAG
ataggtttagaaggttaatt

SEQ ID NO: 119319 - DNA, 20 bp, Artificial Sequence
  Description of Artificial Sequence: Synthetic oligonucleotide
  Target: LAMA2; (+) strand; PAM type: NRG; PAM sequence: AGG
taggtttagaaggttaattt

SEQ ID NO: 119320 - DNA, 20 bp, Artificial Sequence
  Description of Artificial Sequence: Synthetic oligonucleotide
  Target: LAMA2; (+) strand; PAM type: NRG; PAM sequence: GGG
aggtttagaaggttaattta

SEQ ID NO: 119321 - DNA, 20 bp, Artificial Sequence
  Description of Artificial Sequence: Synthetic oligonucleotide
  Target: LAMA2; (+) strand; PAM type: NRG; PAM sequence: TAG
ttagggtgcctctctgctat

SEQ ID NO: 119322 - DNA, 20 bp, Artificial Sequence
  Description of Artificial Sequence: Synthetic oligonucleotide
  Target: LAMA2; (+) strand; PAM type: NRG; PAM sequence: TAG
atgtacctgaaaaacacttc

SEQ ID NO: 119323 - DNA, 20 bp, Artificial Sequence
  Description of Artificial Sequence: Synthetic oligonucleotide
  Target: LAMA2; (+) strand; PAM type: NRG; PAM sequence: AGG
tgtacctgaaaaacacttct

SEQ ID NO: 119324 - DNA, 20 bp, Artificial Sequence
  Description of Artificial Sequence: Synthetic oligonucleotide
  Target: LAMA2; (+) strand; PAM type: NRG; PAM sequence: TAG
aaaacacttctaggcaaaat

SEQ ID NO: 119325 - DNA, 20 bp, Artificial Sequence
  Description of Artificial Sequence: Synthetic oligonucleotide
  Target: LAMA2; (+) strand; PAM type: NRG; PAM sequence: TGG
ttagaccaaattaaaaacac

SEQ ID NO: 119326 - DNA, 20 bp, Artificial Sequence
  Description of Artificial Sequence: Synthetic oligonucleotide
  Target: LAMA2; (+) strand; PAM type: NRG; PAM sequence: GGG
tagaccaaattaaaaacact

SEQ ID NO: 119327 - DNA, 20 bp, Artificial Sequence
  Description of Artificial Sequence: Synthetic oligonucleotide
  Target: LAMA2; (+) strand; PAM type: NRG; PAM sequence: GGG
agaccaaattaaaaacactg

SEQ ID NO: 119328 - DNA, 20 bp, Artificial Sequence
  Description of Artificial Sequence: Synthetic oligonucleotide
  Target: LAMA2; (+) strand; PAM type: NRG; PAM sequence: AAG
tataataaactctcaaatat

SEQ ID NO: 119329 - DNA, 20 bp, Artificial Sequence
  Description of Artificial Sequence: Synthetic oligonucleotide
  Target: LAMA2; (+) strand; PAM type: NRG; PAM sequence: AAG
tataataataaataatgtat

SEQ ID NO: 119330 - DNA, 20 bp, Artificial Sequence
  Description of Artificial Sequence: Synthetic oligonucleotide
  Target: LAMA2; (+) strand; PAM type: NRG; PAM sequence: CAG
ataaataatgtataagtgtg

SEQ ID NO: 119331 - DNA, 20 bp, Artificial Sequence
  Description of Artificial Sequence: Synthetic oligonucleotide
  Target: LAMA2; (+) strand; PAM type: NRG; PAM sequence: TGG
aatgtataagtgtgcagaca

SEQ ID NO: 119332 - DNA, 20 bp, Artificial Sequence
  Description of Artificial Sequence: Synthetic oligonucleotide
  Target: LAMA2; (+) strand; PAM type: NRG; PAM sequence: GGG
atgtataagtgtgcagacat

SEQ ID NO: 119333 - DNA, 20 bp, Artificial Sequence
  Description of Artificial Sequence: Synthetic oligonucleotide
  Target: LAMA2; (+) strand; PAM type: NRG; PAM sequence: CAG
tataagtgtgcagacatggg

SEQ ID NO: 119334 - DNA, 20 bp, Artificial Sequence
  Description of Artificial Sequence: Synthetic oligonucleotide
  Target: LAMA2; (+) strand; PAM type: NRG; PAM sequence: CAG
ctacattttgcaaatttcca

SEQ ID NO: 119335 - DNA, 20 bp, Artificial Sequence
  Description of Artificial Sequence: Synthetic oligonucleotide
  Target: LAMA2; (+) strand; PAM type: NRG; PAM sequence: AAG
attttgcaaatttccacagt

SEQ ID NO: 119336 - DNA, 20 bp, Artificial Sequence
  Description of Artificial Sequence: Synthetic oligonucleotide
  Target: LAMA2; (+) strand; PAM type: NRG; PAM sequence: AGG
ttttgcaaatttccacagta

SEQ ID NO: 119337 - DNA, 20 bp, Artificial Sequence
  Description of Artificial Sequence: Synthetic oligonucleotide
  Target: LAMA2; (+) strand; PAM type: NRG; PAM sequence: AAG
aaatttccacagtaaggtaa

SEQ ID NO: 119338 - DNA, 20 bp, Artificial Sequence
  Description of Artificial Sequence: Synthetic oligonucleotide
  Target: LAMA2; (+) strand; PAM type: NRG; PAM sequence: AGG
aatttccacagtaaggtaaa

SEQ ID NO: 119339 - DNA, 20 bp, Artificial Sequence
  Description of Artificial Sequence: Synthetic oligonucleotide
  Target: LAMA2; (+) strand; PAM type: NRG; PAM sequence: AAG
agtaaggtaaaaggattaca

SEQ ID NO: 119340 - DNA, 20 bp, Artificial Sequence
  Description of Artificial Sequence: Synthetic oligonucleotide
  Target: LAMA2; (+) strand; PAM type: NRG; PAM sequence: TGG
aaaaggattacaaagctttc

SEQ ID NO: 119341 - DNA, 20 bp, Artificial Sequence
  Description of Artificial Sequence: Synthetic oligonucleotide
  Target: LAMA2; (+) strand; PAM type: NRG; PAM sequence: CAG
gctttctggtataatattaa

SEQ ID NO: 119342 - DNA, 20 bp, Artificial Sequence
  Description of Artificial Sequence: Synthetic oligonucleotide
  Target: LAMA2; (+) strand; PAM type: NRG; PAM sequence: AAG
tataatattaacagaactaa

SEQ ID NO: 119343 - DNA, 20 bp, Artificial Sequence
  Description of Artificial Sequence: Synthetic oligonucleotide
  Target: LAMA2; (+) strand; PAM type: NRG; PAM sequence: AAG
aaaagacatgaataatatta

SEQ ID NO: 119344 - DNA, 20 bp, Artificial Sequence
  Description of Artificial Sequence: Synthetic oligonucleotide
  Target: LAMA2; (+) strand; PAM type: NRG; PAM sequence: TGG
acatgaataatattaaagaa

SEQ ID NO: 119345 - DNA, 20 bp, Artificial Sequence
  Description of Artificial Sequence: Synthetic oligonucleotide
  Target: LAMA2; (+) strand; PAM type: NRG; PAM sequence: GGG
catgaataatattaaagaat

SEQ ID NO: 119346 - DNA, 20 bp, Artificial Sequence
  Description of Artificial Sequence: Synthetic oligonucleotide
  Target: LAMA2; (+) strand; PAM type: NRG; PAM sequence: TGG
taatattaaagaatgggctt

SEQ ID NO: 119347 - DNA, 20 bp, Artificial Sequence
  Description of Artificial Sequence: Synthetic oligonucleotide
  Target: LAMA2; (+) strand; PAM type: NRG; PAM sequence: TAG
attaaagaatgggctttggc

SEQ ID NO: 119348 - DNA, 20 bp, Artificial Sequence
  Description of Artificial Sequence: Synthetic oligonucleotide
  Target: LAMA2; (+) strand; PAM type: NRG; PAM sequence: AAG
ttttcaatcaattctcttca

SEQ ID NO: 119349 - DNA, 20 bp, Artificial Sequence
  Description of Artificial Sequence: Synthetic oligonucleotide
  Target: LAMA2; (+) strand; PAM type: NRG; PAM sequence: AAG
tactctcttaattttactga

SEQ ID NO: 119350 - DNA, 20 bp, Artificial Sequence
  Description of Artificial Sequence: Synthetic oligonucleotide
  Target: LAMA2; (+) strand; PAM type: NRG; PAM sequence: TAG
ttcaactttaatataatatt

SEQ ID NO: 119351 - DNA, 20 bp, Artificial Sequence
  Description of Artificial Sequence: Synthetic oligonucleotide
  Target: LAMA2; (+) strand; PAM type: NRG; PAM sequence: AAG
aatacatcttaactataaaa

SEQ ID NO: 119352 - DNA, 20 bp, Artificial Sequence
  Description of Artificial Sequence: Synthetic oligonucleotide
  Target: LAMA2; (+) strand; PAM type: NRG; PAM sequence: AAG
aaaaagaaaactatctatat

SEQ ID NO: 119353 - DNA, 20 bp, Artificial Sequence
  Description of Artificial Sequence: Synthetic oligonucleotide
  Target: LAMA2; (+) strand; PAM type: NRG; PAM sequence: TGG
tatttcaacatataaatgct

SEQ ID NO: 119354 - DNA, 20 bp, Artificial Sequence
  Description of Artificial Sequence: Synthetic oligonucleotide
  Target: LAMA2; (+) strand; PAM type: NRG; PAM sequence: GGG
atttcaacatataaatgctt

SEQ ID NO: 119355 - DNA, 20 bp, Artificial Sequence
  Description of Artificial Sequence: Synthetic oligonucleotide
  Target: LAMA2; (+) strand; PAM type: NRG; PAM sequence: TAG
atgcttgggtaaaacttcct

SEQ ID NO: 119356 - DNA, 20 bp, Artificial Sequence
  Description of Artificial Sequence: Synthetic oligonucleotide
  Target: LAMA2; (+) strand; PAM type: NRG; PAM sequence: AGG
tgcttgggtaaaacttcctt

SEQ ID NO: 119357 - DNA, 20 bp, Artificial Sequence
  Description of Artificial Sequence: Synthetic oligonucleotide
  Target: LAMA2; (+) strand; PAM type: NRG; PAM sequence: GAG
cttgggtaaaacttccttag

SEQ ID NO: 119358 - DNA, 20 bp, Artificial Sequence
  Description of Artificial Sequence: Synthetic oligonucleotide
  Target: LAMA2; (+) strand; PAM type: NRG; PAM sequence: AGG
ttgggtaaaacttccttagg

SEQ ID NO: 119359 - DNA, 20 bp, Artificial Sequence
  Description of Artificial Sequence: Synthetic oligonucleotide
  Target: LAMA2; (+) strand; PAM type: NRG; PAM sequence: AAG
taggaggcaaaataaaataa

SEQ ID NO: 119360 - DNA, 20 bp, Artificial Sequence
  Description of Artificial Sequence: Synthetic oligonucleotide
  Target: LAMA2; (+) strand; PAM type: NRG; PAM sequence: TAG
taaaagtttgcacctattct

SEQ ID NO: 119361 - DNA, 20 bp, Artificial Sequence
  Description of Artificial Sequence: Synthetic oligonucleotide
  Target: LAMA2; (+) strand; PAM type: NRG; PAM sequence: CAG
cacctattcttagatgaccc

SEQ ID NO: 119362 - DNA, 20 bp, Artificial Sequence
  Description of Artificial Sequence: Synthetic oligonucleotide
  Target: LAMA2; (+) strand; PAM type: NRG; PAM sequence: TGG
gatgaccccagtgtaatcga

SEQ ID NO: 119363 - DNA, 20 bp, Artificial Sequence
  Description of Artificial Sequence: Synthetic oligonucleotide
  Target: LAMA2; (+) strand; PAM type: NRG; PAM sequence: GGG
atgaccccagtgtaatcgat

SEQ ID NO: 119364 - DNA, 20 bp, Artificial Sequence
  Description of Artificial Sequence: Synthetic oligonucleotide
  Target: LAMA2; (+) strand; PAM type: NRG; PAM sequence: TGG
atgggatgttgatattgtgc

SEQ ID NO: 119365 - DNA, 20 bp, Artificial Sequence
  Description of Artificial Sequence: Synthetic oligonucleotide
  Target: LAMA2; (+) strand; PAM type: NRG; PAM sequence: AAG
tgatattgtgctggtgactc

SEQ ID NO: 119366 - DNA, 20 bp, Artificial Sequence
  Description of Artificial Sequence: Synthetic oligonucleotide
  Target: LAMA2; (+) strand; PAM type: NRG; PAM sequence: TGG
tgctggtgactcaagtacca

SEQ ID NO: 119367 - DNA, 20 bp, Artificial Sequence
  Description of Artificial Sequence: Synthetic oligonucleotide
  Target: LAMA2; (+) strand; PAM type: NRG; PAM sequence: GGG
gctggtgactcaagtaccat

SEQ ID NO: 119368 - DNA, 20 bp, Artificial Sequence
  Description of Artificial Sequence: Synthetic oligonucleotide
  Target: LAMA2; (+) strand; PAM type: NRG; PAM sequence: AAG
gtgactcaagtaccatgggc

SEQ ID NO: 119369 - DNA, 20 bp, Artificial Sequence
  Description of Artificial Sequence: Synthetic oligonucleotide
  Target: LAMA2; (+) strand; PAM type: NRG; PAM sequence: AGG
tgactcaagtaccatgggca

SEQ ID NO: 119370 - DNA, 20 bp, Artificial Sequence
  Description of Artificial Sequence: Synthetic oligonucleotide
  Target: LAMA2; (+) strand; PAM type: NRG; PAM sequence: CAG
accatgggcaaggttgttat

SEQ ID NO: 119371 - DNA, 20 bp, Artificial Sequence
  Description of Artificial Sequence: Synthetic oligonucleotide
  Target: LAMA2; (+) strand; PAM type: NRG; PAM sequence: AAG
tcagtgatgtgcttctctga

SEQ ID NO: 119372 - DNA, 20 bp, Artificial Sequence
  Description of Artificial Sequence: Synthetic oligonucleotide
  Target: LAMA2; (+) strand; PAM type: NRG; PAM sequence: TGG
tctttacacccattgacaaa

SEQ ID NO: 119373 - DNA, 20 bp, Artificial Sequence
  Description of Artificial Sequence: Synthetic oligonucleotide
  Target: LAMA2; (+) strand; PAM type: NRG; PAM sequence: GGG
ctttacacccattgacaaat

SEQ ID NO: 119374 - DNA, 20 bp, Artificial Sequence
  Description of Artificial Sequence: Synthetic oligonucleotide
  Target: LAMA2; (+) strand; PAM type: NRG; PAM sequence: AAG
gtgtaaaatccaaaaacaca

SEQ ID NO: 119375 - DNA, 20 bp, Artificial Sequence
  Description of Artificial Sequence: Synthetic oligonucleotide
  Target: LAMA2; (+) strand; PAM type: NRG; PAM sequence: TAG
aattatcttctcaatgtata

SEQ ID NO: 119376 - DNA, 20 bp, Artificial Sequence
  Description of Artificial Sequence: Synthetic oligonucleotide
  Target: LAMA2; (+) strand; PAM type: NRG; PAM sequence: TAG
tatcttctcaatgtatatag

SEQ ID NO: 119377 - DNA, 20 bp, Artificial Sequence
  Description of Artificial Sequence: Synthetic oligonucleotide
  Target: LAMA2; (+) strand; PAM type: NRG; PAM sequence: TAG
tgtatatagtagatgcatcc

SEQ ID NO: 119378 - DNA, 20 bp, Artificial Sequence
  Description of Artificial Sequence: Synthetic oligonucleotide
  Target: LAMA2; (+) strand; PAM type: NRG; PAM sequence: TGG
acacacacaaaaatttgatg

SEQ ID NO: 119379 - DNA, 20 bp, Artificial Sequence
  Description of Artificial Sequence: Synthetic oligonucleotide
  Target: LAMA2; (+) strand; PAM type: NRG; PAM sequence: TAG
atgtggaaacaaacttaaat

SEQ ID NO: 119380 - DNA, 20 bp, Artificial Sequence
  Description of Artificial Sequence: Synthetic oligonucleotide
  Target: LAMA2; (+) strand; PAM type: NRG; PAM sequence: AGG
tgtggaaacaaacttaaatt

SEQ ID NO: 119381 - DNA, 20 bp, Artificial Sequence
  Description of Artificial Sequence: Synthetic oligonucleotide
  Target: LAMA2; (+) strand; PAM type: NRG; PAM sequence: AAG
ttaaattaggtttcaaatat

SEQ ID NO: 119382 - DNA, 20 bp, Artificial Sequence
  Description of Artificial Sequence: Synthetic oligonucleotide
  Target: LAMA2; (+) strand; PAM type: NRG; PAM sequence: AGG
taaattaggtttcaaatata

SEQ ID NO: 119383 - DNA, 20 bp, Artificial Sequence
  Description of Artificial Sequence: Synthetic oligonucleotide
  Target: LAMA2; (+) strand; PAM type: NRG; PAM sequence: AAG
ttaggtttcaaatataaggc

SEQ ID NO: 119384 - DNA, 20 bp, Artificial Sequence
  Description of Artificial Sequence: Synthetic oligonucleotide
  Target: LAMA2; (+) strand; PAM type: NRG; PAM sequence: AGG
taggtttcaaatataaggca

SEQ ID NO: 119385 - DNA, 20 bp, Artificial Sequence
  Description of Artificial Sequence: Synthetic oligonucleotide
  Target: LAMA2; (+) strand; PAM type: NRG; PAM sequence: CAG
ttactcactacataaatgac

SEQ ID NO: 119386 - DNA, 20 bp, Artificial Sequence
  Description of Artificial Sequence: Synthetic oligonucleotide
  Target: LAMA2; (+) strand; PAM type: NRG; PAM sequence: TGG
ctcactacataaatgaccag

SEQ ID NO: 119387 - DNA, 20 bp, Artificial Sequence
  Description of Artificial Sequence: Synthetic oligonucleotide
  Target: LAMA2; (+) strand; PAM type: NRG; PAM sequence: CAG
taaatgaccagtggcccatt

SEQ ID NO: 119388 - DNA, 20 bp, Artificial Sequence
  Description of Artificial Sequence: Synthetic oligonucleotide
  Target: LAMA2; (+) strand; PAM type: NRG; PAM sequence: AAG
atgaccagtggcccattcag

SEQ ID NO: 119389 - DNA, 20 bp, Artificial Sequence
  Description of Artificial Sequence: Synthetic oligonucleotide
  Target: LAMA2; (+) strand; PAM type: NRG; PAM sequence: AAG
agtggcccattcagaagtct

SEQ ID NO: 119390 - DNA, 20 bp, Artificial Sequence
  Description of Artificial Sequence: Synthetic oligonucleotide
  Target: LAMA2; (+) strand; PAM type: NRG; PAM sequence: AGG
gtggcccattcagaagtcta

SEQ ID NO: 119391 - DNA, 20 bp, Artificial Sequence
  Description of Artificial Sequence: Synthetic oligonucleotide
  Target: LAMA2; (+) strand; PAM type: NRG; PAM sequence: TAG
tctaaggacaaaatatgttg

SEQ ID NO: 119392 - DNA, 20 bp, Artificial Sequence
  Description of Artificial Sequence: Synthetic oligonucleotide
  Target: LAMA2; (+) strand; PAM type: NRG; PAM sequence: AGG
ctaaggacaaaatatgttgt

SEQ ID NO: 119393 - DNA, 20 bp, Artificial Sequence
  Description of Artificial Sequence: Synthetic oligonucleotide
  Target: LAMA2; (+) strand; PAM type: NRG; PAM sequence: GAG
gtaggactgtcctgaccact

SEQ ID NO: 119394 - DNA, 20 bp, Artificial Sequence
  Description of Artificial Sequence: Synthetic oligonucleotide
  Target: LAMA2; (+) strand; PAM type: NRG; PAM sequence: AGG
taggactgtcctgaccactg

SEQ ID NO: 119395 - DNA, 20 bp, Artificial Sequence
  Description of Artificial Sequence: Synthetic oligonucleotide
  Target: LAMA2; (+) strand; PAM type: NRG; PAM sequence: GGG
aggactgtcctgaccactga

SEQ ID NO: 119396 - DNA, 20 bp, Artificial Sequence
  Description of Artificial Sequence: Synthetic oligonucleotide
  Target: LAMA2; (+) strand; PAM type: NRG; PAM sequence: CAG
ctgtcctgaccactgaggga

SEQ ID NO: 119397 - DNA, 20 bp, Artificial Sequence
  Description of Artificial Sequence: Synthetic oligonucleotide
  Target: LAMA2; (+) strand; PAM type: NRG; PAM sequence: CAG
cagctcacaccctgacccaa

SEQ ID NO: 119398 - DNA, 20 bp, Artificial Sequence
  Description of Artificial Sequence: Synthetic oligonucleotide
  Target: LAMA2; (+) strand; PAM type: NRG; PAM sequence: CAG
caacagtacactaatgcctg

SEQ ID NO: 119399 - DNA, 20 bp, Artificial Sequence
  Description of Artificial Sequence: Synthetic oligonucleotide
  Target: LAMA2; (+) strand; PAM type: NRG; PAM sequence: CGG
cctgcagtacccaccgttcc

SEQ ID NO: 119400 - DNA, 20 bp, Artificial Sequence
  Description of Artificial Sequence: Synthetic oligonucleotide
  Target: LAMA2; (+) strand; PAM type: NRG; PAM sequence: GAG
tgcagtacccaccgttcccg

SEQ ID NO: 119401 - DNA, 20 bp, Artificial Sequence
  Description of Artificial Sequence: Synthetic oligonucleotide
  Target: LAMA2; (+) strand; PAM type: NRG; PAM sequence: AAG
ccgttcccggagtaaaccaa

SEQ ID NO: 119402 - DNA, 20 bp, Artificial Sequence
  Description of Artificial Sequence: Synthetic oligonucleotide
  Target: LAMA2; (+) strand; PAM type: NRG; PAM sequence: TGG
gcgactcacaaaatccatta

SEQ ID NO: 119403 - DNA, 20 bp, Artificial Sequence
  Description of Artificial Sequence: Synthetic oligonucleotide
  Target: LAMA2; (+) strand; PAM type: NRG; PAM sequence: GAG
gactcacaaaatccattatg

SEQ ID NO: 119404 - DNA, 20 bp, Artificial Sequence
  Description of Artificial Sequence: Synthetic oligonucleotide
  Target: LAMA2; (+) strand; PAM type: NRG; PAM sequence: GAG
ggagttgttttaaaccttat

SEQ ID NO: 119405 - DNA, 20 bp, Artificial Sequence
  Description of Artificial Sequence: Synthetic oligonucleotide
  Target: LAMA2; (+) strand; PAM type: NRG; PAM sequence: TAG
ccttatgagaaccactgacc

SEQ ID NO: 119406 - DNA, 20 bp, Artificial Sequence
  Description of Artificial Sequence: Synthetic oligonucleotide
  Target: LAMA2; (+) strand; PAM type: NRG; PAM sequence: AGG
cttatgagaaccactgacct

SEQ ID NO: 119407 - DNA, 20 bp, Artificial Sequence
  Description of Artificial Sequence: Synthetic oligonucleotide
  Target: LAMA2; (+) strand; PAM type: NRG; PAM sequence: TAG
aatgaaaaaacaacaaaaac

SEQ ID NO: 119408 - DNA, 20 bp, Artificial Sequence
  Description of Artificial Sequence: Synthetic oligonucleotide
  Target: LAMA2; (+) strand; PAM type: NRG; PAM sequence: AGG
atgaaaaaacaacaaaaact

SEQ ID NO: 119409 - DNA, 20 bp, Artificial Sequence
  Description of Artificial Sequence: Synthetic oligonucleotide
  Target: LAMA2; (+) strand; PAM type: NRG; PAM sequence: TGG
aaaacaacaaaaactaggaa

SEQ ID NO: 119410 - DNA, 20 bp, Artificial Sequence
  Description of Artificial Sequence: Synthetic oligonucleotide
  Target: LAMA2; (+) strand; PAM type: NRG; PAM sequence: CAG
acaacaaaaactaggaatgg

SEQ ID NO: 119411 - DNA, 20 bp, Artificial Sequence
  Description of Artificial Sequence: Synthetic oligonucleotide
  Target: LAMA2; (+) strand; PAM type: NRG; PAM sequence: TAG
acaaaaactaggaatggcag

SEQ ID NO: 119412 - DNA, 20 bp, Artificial Sequence
  Description of Artificial Sequence: Synthetic oligonucleotide
  Target: LAMA2; (+) strand; PAM type: NRG; PAM sequence: GAG
ggaatggcagtagttctgtt

SEQ ID NO: 119413 - DNA, 20 bp, Artificial Sequence
  Description of Artificial Sequence: Synthetic oligonucleotide
  Target: LAMA2; (+) strand; PAM type: NRG; PAM sequence: AAG
gcagtagttctgttgagtta

SEQ ID NO: 119414 - DNA, 20 bp, Artificial Sequence
  Description of Artificial Sequence: Synthetic oligonucleotide
  Target: LAMA2; (+) strand; PAM type: NRG; PAM sequence: GAG
agtagttctgttgagttaaa

SEQ ID NO: 119415 - DNA, 20 bp, Artificial Sequence
  Description of Artificial Sequence: Synthetic oligonucleotide
  Target: LAMA2; (+) strand; PAM type: NRG; PAM sequence: AGG
gtagttctgttgagttaaag

SEQ ID NO: 119416 - DNA, 20 bp, Artificial Sequence
  Description of Artificial Sequence: Synthetic oligonucleotide
  Target: LAMA2; (+) strand; PAM type: NRG; PAM sequence: GAG
agttctgttgagttaaagag

SEQ ID NO: 119417 - DNA, 20 bp, Artificial Sequence
  Description of Artificial Sequence: Synthetic oligonucleotide
  Target: LAMA2; (+) strand; PAM type: NRG; PAM sequence: AAG
ctgttgagttaaagaggaga

SEQ ID NO: 119418 - DNA, 20 bp, Artificial Sequence
  Description of Artificial Sequence: Synthetic oligonucleotide
  Target: LAMA2; (+) strand; PAM type: NRG; PAM sequence: GAG
gttgagttaaagaggagaaa

SEQ ID NO: 119419 - DNA, 20 bp, Artificial Sequence
  Description of Artificial Sequence: Synthetic oligonucleotide
  Target: LAMA2; (+) strand; PAM type: NRG; PAM sequence: AGG
ttgagttaaagaggagaaag

SEQ ID NO: 119420 - DNA, 20 bp, Artificial Sequence
  Description of Artificial Sequence: Synthetic oligonucleotide
  Target: LAMA2; (+) strand; PAM type: NRG; PAM sequence: GAG
gagttaaagaggagaaagag

SEQ ID NO: 119421 - DNA, 20 bp, Artificial Sequence
  Description of Artificial Sequence: Synthetic oligonucleotide
  Target: LAMA2; (+) strand; PAM type: NRG; PAM sequence: CAG
agaggagaaagaggagaaac

SEQ ID NO: 119422 - DNA, 20 bp, Artificial Sequence
  Description of Artificial Sequence: Synthetic oligonucleotide
  Target: LAMA2; (+) strand; PAM type: NRG; PAM sequence: AGG
gaggagaaagaggagaaacc

SEQ ID NO: 119423 - DNA, 20 bp, Artificial Sequence
  Description of Artificial Sequence: Synthetic oligonucleotide
  Target: LAMA2; (+) strand; PAM type: NRG; PAM sequence: TGG
gaaagaggagaaaccaggac

SEQ ID NO: 119424 - DNA, 20 bp, Artificial Sequence
  Description of Artificial Sequence: Synthetic oligonucleotide
  Target: LAMA2; (+) strand; PAM type: NRG; PAM sequence: AAG
agaggagaaaccaggactgg

SEQ ID NO: 119425 - DNA, 20 bp, Artificial Sequence
  Description of Artificial Sequence: Synthetic oligonucleotide
  Target: LAMA2; (+) strand; PAM type: NRG; PAM sequence: GAG
aggagaaaccaggactggaa

SEQ ID NO: 119426 - DNA, 20 bp, Artificial Sequence
  Description of Artificial Sequence: Synthetic oligonucleotide
  Target: LAMA2; (+) strand; PAM type: NRG; PAM sequence: GAG
actggaagagatgaaattgt

SEQ ID NO: 119427 - DNA, 20 bp, Artificial Sequence
  Description of Artificial Sequence: Synthetic oligonucleotide
  Target: LAMA2; (+) strand; PAM type: NRG; PAM sequence: TGG
aagagatgaaattgtgagtc

SEQ ID NO: 119428 - DNA, 20 bp, Artificial Sequence
  Description of Artificial Sequence: Synthetic oligonucleotide
  Target: LAMA2; (+) strand; PAM type: NRG; PAM sequence: AAG
agatgaaattgtgagtctgg

SEQ ID NO: 119429 - DNA, 20 bp, Artificial Sequence
  Description of Artificial Sequence: Synthetic oligonucleotide
  Target: LAMA2; (+) strand; PAM type: NRG; PAM sequence: AGG
gatgaaattgtgagtctgga

SEQ ID NO: 119430 - DNA, 20 bp, Artificial Sequence
  Description of Artificial Sequence: Synthetic oligonucleotide
  Target: LAMA2; (+) strand; PAM type: NRG; PAM sequence: AAG
tctggaaggaaactattgca

SEQ ID NO: 119431 - DNA, 20 bp, Artificial Sequence
  Description of Artificial Sequence: Synthetic oligonucleotide
  Target: LAMA2; (+) strand; PAM type: NRG; PAM sequence: AGG
ctggaaggaaactattgcaa

SEQ ID NO: 119432 - DNA, 20 bp, Artificial Sequence
  Description of Artificial Sequence: Synthetic oligonucleotide
  Target: LAMA2; (+) strand; PAM type: NRG; PAM sequence: AAG
caaaggcctttattaccttt

SEQ ID NO: 119433 - DNA, 20 bp, Artificial Sequence
  Description of Artificial Sequence: Synthetic oligonucleotide
  Target: LAMA2; (+) strand; PAM type: NRG; PAM sequence: AAG
atgtctcctaactgaactga

SEQ ID NO: 119434 - DNA, 20 bp, Artificial Sequence
  Description of Artificial Sequence: Synthetic oligonucleotide
  Target: LAMA2; (+) strand; PAM type: NRG; PAM sequence: TAG
aaagccttcattctaaccat

SEQ ID NO: 119435 - DNA, 20 bp, Artificial Sequence
  Description of Artificial Sequence: Synthetic oligonucleotide
  Target: LAMA2; (+) strand; PAM type: NRG; PAM sequence: TGG
cttcattctaaccattagtt

SEQ ID NO: 119436 - DNA, 20 bp, Artificial Sequence
  Description of Artificial Sequence: Synthetic oligonucleotide
  Target: LAMA2; (+) strand; PAM type: NRG; PAM sequence: CAG
attctaaccattagtttggt

SEQ ID NO: 119437 - DNA, 20 bp, Artificial Sequence
  Description of Artificial Sequence: Synthetic oligonucleotide
  Target: LAMA2; (+) strand; PAM type: NRG; PAM sequence: AGG
ttctaaccattagtttggtc

SEQ ID NO: 119438 - DNA, 20 bp, Artificial Sequence
  Description of Artificial Sequence: Synthetic oligonucleotide
  Target: LAMA2; (+) strand; PAM type: NRG; PAM sequence: CAG
tagtttggtcaggaacattt

SEQ ID NO: 119439 - DNA, 20 bp, Artificial Sequence
  Description of Artificial Sequence: Synthetic oligonucleotide
  Target: LAMA2; (+) strand; PAM type: NRG; PAM sequence: AGG
agtttggtcaggaacatttc

SEQ ID NO: 119440 - DNA, 20 bp, Artificial Sequence
  Description of Artificial Sequence: Synthetic oligonucleotide
  Target: LAMA2; (+) strand; PAM type: NRG; PAM sequence: GGG
gtttggtcaggaacatttca

SEQ ID NO: 119441 - DNA, 20 bp, Artificial Sequence
  Description of Artificial Sequence: Synthetic oligonucleotide
  Target: LAMA2; (+) strand; PAM type: NRG; PAM sequence: CAG
caggaacatttcagggacgc

SEQ ID NO: 119442 - DNA, 20 bp, Artificial Sequence
  Description of Artificial Sequence: Synthetic oligonucleotide
  Target: LAMA2; (+) strand; PAM type: NRG; PAM sequence: AGG
aggaacatttcagggacgcc

SEQ ID NO: 119443 - DNA, 20 bp, Artificial Sequence
  Description of Artificial Sequence: Synthetic oligonucleotide
  Target: LAMA2; (+) strand; PAM type: NRG; PAM sequence: GGG
ggaacatttcagggacgcca

SEQ ID NO: 119444 - DNA, 20 bp, Artificial Sequence
  Description of Artificial Sequence: Synthetic oligonucleotide
  Target: LAMA2; (+) strand; PAM type: NRG; PAM sequence: TGG
acatttcagggacgccaggg

SEQ ID NO: 119445 - DNA, 20 bp, Artificial Sequence
  Description of Artificial Sequence: Synthetic oligonucleotide
  Target: LAMA2; (+) strand; PAM type: NRG; PAM sequence: CAG
cacttcctttactgccctcc

SEQ ID NO: 119446 - DNA, 20 bp, Artificial Sequence
  Description of Artificial Sequence: Synthetic oligonucleotide
  Target: LAMA2; (+) strand; PAM type: NRG; PAM sequence: CAG
ttcctttactgccctcccag

SEQ ID NO: 119447 - DNA, 20 bp, Artificial Sequence
  Description of Artificial Sequence: Synthetic oligonucleotide
  Target: LAMA2; (+) strand; PAM type: NRG; PAM sequence: TAG
tgccctcccagcagcctacc

SEQ ID NO: 119448 - DNA, 20 bp, Artificial Sequence
  Description of Artificial Sequence: Synthetic oligonucleotide
  Target: LAMA2; (+) strand; PAM type: NRG; PAM sequence: CAG
cctcccagcagcctacctag

SEQ ID NO: 119449 - DNA, 20 bp, Artificial Sequence
  Description of Artificial Sequence: Synthetic oligonucleotide
  Target: LAMA2; (+) strand; PAM type: NRG; PAM sequence: AAG
ccagcagcctacctagcagt

SEQ ID NO: 119450 - DNA, 20 bp, Artificial Sequence
  Description of Artificial Sequence: Synthetic oligonucleotide
  Target: LAMA2; (+) strand; PAM type: NRG; PAM sequence: CAG
ctacctagcagtaagttccc

SEQ ID NO: 119451 - DNA, 20 bp, Artificial Sequence
  Description of Artificial Sequence: Synthetic oligonucleotide
  Target: LAMA2; (+) strand; PAM type: NRG; PAM sequence: CAG
gcagtaagttccccagcctg

SEQ ID NO: 119452 - DNA, 20 bp, Artificial Sequence
  Description of Artificial Sequence: Synthetic oligonucleotide
  Target: LAMA2; (+) strand; PAM type: NRG; PAM sequence: CAG
tccccagcctgcagtgtccc

SEQ ID NO: 119453 - DNA, 20 bp, Artificial Sequence
  Description of Artificial Sequence: Synthetic oligonucleotide
  Target: LAMA2; (+) strand; PAM type: NRG; PAM sequence: GAG
cccagcctgcagtgtcccca

SEQ ID NO: 119454 - DNA, 20 bp, Artificial Sequence
  Description of Artificial Sequence: Synthetic oligonucleotide
  Target: LAMA2; (+) strand; PAM type: NRG; PAM sequence: AGG
ccagcctgcagtgtccccag

SEQ ID NO: 119455 - DNA, 20 bp, Artificial Sequence
  Description of Artificial Sequence: Synthetic oligonucleotide
  Target: LAMA2; (+) strand; PAM type: NRG; PAM sequence: GGG
cagcctgcagtgtccccaga

SEQ ID NO: 119456 - DNA, 20 bp, Artificial Sequence
  Description of Artificial Sequence: Synthetic oligonucleotide
  Target: LAMA2; (+) strand; PAM type: NRG; PAM sequence: CGG
ccccagagggcaccttccct

SEQ ID NO: 119457 - DNA, 20 bp, Artificial Sequence
  Description of Artificial Sequence: Synthetic oligonucleotide
  Target: LAMA2; (+) strand; PAM type: NRG; PAM sequence: TAG
agagggcaccttccctcggc

SEQ ID NO: 119458 - DNA, 20 bp, Artificial Sequence
  Description of Artificial Sequence: Synthetic oligonucleotide
  Target: LAMA2; (+) strand; PAM type: NRG; PAM sequence: CAG
tccctcggctagtaacttct

SEQ ID NO: 119459 - DNA, 20 bp, Artificial Sequence
  Description of Artificial Sequence: Synthetic oligonucleotide
  Target: LAMA2; (+) strand; PAM type: NRG; PAM sequence: TGG
tagtaacttctcagacactc

SEQ ID NO: 119460 - DNA, 20 bp, Artificial Sequence
  Description of Artificial Sequence: Synthetic oligonucleotide
  Target: LAMA2; (+) strand; PAM type: NRG; PAM sequence: TGG
cttctcagacactctggcct

SEQ ID NO: 119461 - DNA, 20 bp, Artificial Sequence
  Description of Artificial Sequence: Synthetic oligonucleotide
  Target: LAMA2; (+) strand; PAM type: NRG; PAM sequence: GGG
ttctcagacactctggcctt

SEQ ID NO: 119462 - DNA, 20 bp, Artificial Sequence
  Description of Artificial Sequence: Synthetic oligonucleotide
  Target: LAMA2; (+) strand; PAM type: NRG; PAM sequence: GGG
tctcagacactctggccttg

SEQ ID NO: 119463 - DNA, 20 bp, Artificial Sequence
  Description of Artificial Sequence: Synthetic oligonucleotide
  Target: LAMA2; (+) strand; PAM type: NRG; PAM sequence: TGG
ctctggccttggggatgtct

SEQ ID NO: 119464 - DNA, 20 bp, Artificial Sequence
  Description of Artificial Sequence: Synthetic oligonucleotide
  Target: LAMA2; (+) strand; PAM type: NRG; PAM sequence: TAG
tggggatgtcttggatcttc

SEQ ID NO: 119465 - DNA, 20 bp, Artificial Sequence
  Description of Artificial Sequence: Synthetic oligonucleotide
  Target: LAMA2; (+) strand; PAM type: NRG; PAM sequence: AGG
ggggatgtcttggatcttct

SEQ ID NO: 119466 - DNA, 20 bp, Artificial Sequence
  Description of Artificial Sequence: Synthetic oligonucleotide
  Target: LAMA2; (+) strand; PAM type: NRG; PAM sequence: CAG
tcttggatcttctaggtaca

SEQ ID NO: 119467 - DNA, 20 bp, Artificial Sequence
  Description of Artificial Sequence: Synthetic oligonucleotide
  Target: LAMA2; (+) strand; PAM type: NRG; PAM sequence: TGG
tggatcttctaggtacacag

SEQ ID NO: 119468 - DNA, 20 bp, Artificial Sequence
  Description of Artificial Sequence: Synthetic oligonucleotide
  Target: LAMA2; (+) strand; PAM type: NRG; PAM sequence: CAG
aggtacacagtggctgcaca

SEQ ID NO: 119469 - DNA, 20 bp, Artificial Sequence
  Description of Artificial Sequence: Synthetic oligonucleotide
  Target: LAMA2; (+) strand; PAM type: NRG; PAM sequence: CAG
gtggctgcacacagttttgc

SEQ ID NO: 119470 - DNA, 20 bp, Artificial Sequence
  Description of Artificial Sequence: Synthetic oligonucleotide
  Target: LAMA2; (+) strand; PAM type: NRG; PAM sequence: AGG
tggctgcacacagttttgcc

SEQ ID NO: 119471 - DNA, 20 bp, Artificial Sequence
  Description of Artificial Sequence: Synthetic oligonucleotide
  Target: LAMA2; (+) strand; PAM type: NRG; PAM sequence: AAG
agttttgccaggcctttctc

SEQ ID NO: 119472 - DNA, 20 bp, Artificial Sequence
  Description of Artificial Sequence: Synthetic oligonucleotide
  Target: LAMA2; (+) strand; PAM type: NRG; PAM sequence: GAG
ttttgccaggcctttctcaa

SEQ ID NO: 119473 - DNA, 20 bp, Artificial Sequence
  Description of Artificial Sequence: Synthetic oligonucleotide
  Target: LAMA2; (+) strand; PAM type: NRG; PAM sequence: AGG
tttgccaggcctttctcaag

SEQ ID NO: 119474 - DNA, 20 bp, Artificial Sequence
  Description of Artificial Sequence: Synthetic oligonucleotide
  Target: LAMA2; (+) strand; PAM type: NRG; PAM sequence: AAG
aggcctttctcaagaggtaa

SEQ ID NO: 119475 - DNA, 20 bp, Artificial Sequence
  Description of Artificial Sequence: Synthetic oligonucleotide
  Target: LAMA2; (+) strand; PAM type: NRG; PAM sequence: TAG
tctcaagaggtaaaagttcc

SEQ ID NO: 119476 - DNA, 20 bp, Artificial Sequence
  Description of Artificial Sequence: Synthetic oligonucleotide
  Target: LAMA2; (+) strand; PAM type: NRG; PAM sequence: CAG
tcctagctgtttgcatttcc

SEQ ID NO: 119477 - DNA, 20 bp, Artificial Sequence
  Description of Artificial Sequence: Synthetic oligonucleotide
  Target: LAMA2; (+) strand; PAM type: NRG; PAM sequence: TAG
gaaataatgttttccatgtg

SEQ ID NO: 119478 - DNA, 20 bp, Artificial Sequence
  Description of Artificial Sequence: Synthetic oligonucleotide
  Target: LAMA2; (+) strand; PAM type: NRG; PAM sequence: AGG
aaataatgttttccatgtgt

SEQ ID NO: 119479 - DNA, 20 bp, Artificial Sequence
  Description of Artificial Sequence: Synthetic oligonucleotide
  Target: LAMA2; (+) strand; PAM type: NRG; PAM sequence: GGG
aataatgttttccatgtgta

SEQ ID NO: 119480 - DNA, 20 bp, Artificial Sequence
  Description of Artificial Sequence: Synthetic oligonucleotide
  Target: LAMA2; (+) strand; PAM type: NRG; PAM sequence: CAG
ttccatgtgtagggatttta

SEQ ID NO: 119481 - DNA, 20 bp, Artificial Sequence
  Description of Artificial Sequence: Synthetic oligonucleotide
  Target: LAMA2; (+) strand; PAM type: NRG; PAM sequence: AAG
tagggattttacagatttca

SEQ ID NO: 119482 - DNA, 20 bp, Artificial Sequence
  Description of Artificial Sequence: Synthetic oligonucleotide
  Target: LAMA2; (+) strand; PAM type: NRG; PAM sequence: AAG
aattactttctttaatttaa

SEQ ID NO: 119483 - DNA, 20 bp, Artificial Sequence
  Description of Artificial Sequence: Synthetic oligonucleotide
  Target: LAMA2; (+) strand; PAM type: NRG; PAM sequence: AAG
tactttctttaatttaaaag

SEQ ID NO: 119484 - DNA, 20 bp, Artificial Sequence
  Description of Artificial Sequence: Synthetic oligonucleotide
  Target: LAMA2; (+) strand; PAM type: NRG; PAM sequence: CAG
tctttaatttaaaagaagtt

SEQ ID NO: 119485 - DNA, 20 bp, Artificial Sequence
  Description of Artificial Sequence: Synthetic oligonucleotide
  Target: LAMA2; (+) strand; PAM type: NRG; PAM sequence: CAG
tttaaaagaagttcagatac

SEQ ID NO: 119486 - DNA, 20 bp, Artificial Sequence
  Description of Artificial Sequence: Synthetic oligonucleotide
  Target: LAMA2; (+) strand; PAM type: NRG; PAM sequence: AGG
ttaaaagaagttcagatacc

SEQ ID NO: 119487 - DNA, 20 bp, Artificial Sequence
  Description of Artificial Sequence: Synthetic oligonucleotide
  Target: LAMA2; (+) strand; PAM type: NRG; PAM sequence: AAG
agaagttcagataccaggtc

SEQ ID NO: 119488 - DNA, 20 bp, Artificial Sequence
  Description of Artificial Sequence: Synthetic oligonucleotide
  Target: LAMA2; (+) strand; PAM type: NRG; PAM sequence: TAG
gttcagataccaggtcaagc

SEQ ID NO: 119489 - DNA, 20 bp, Artificial Sequence
  Description of Artificial Sequence: Synthetic oligonucleotide
  Target: LAMA2; (+) strand; PAM type: NRG; PAM sequence: AGG
ttcagataccaggtcaagct

SEQ ID NO: 119490 - DNA, 20 bp, Artificial Sequence
  Description of Artificial Sequence: Synthetic oligonucleotide
  Target: LAMA2; (+) strand; PAM type: NRG; PAM sequence: CGG
aggtcaagctaggaatgatc

SEQ ID NO: 119491 - DNA, 20 bp, Artificial Sequence
  Description of Artificial Sequence: Synthetic oligonucleotide
  Target: LAMA2; (+) strand; PAM type: NRG; PAM sequence: CAG
agctaggaatgatccggtct

SEQ ID NO: 119492 - DNA, 20 bp, Artificial Sequence
  Description of Artificial Sequence: Synthetic oligonucleotide
  Target: LAMA2; (+) strand; PAM type: NRG; PAM sequence: GAG
ctaggaatgatccggtctca

SEQ ID NO: 119493 - DNA, 20 bp, Artificial Sequence
  Description of Artificial Sequence: Synthetic oligonucleotide
  Target: LAMA2; (+) strand; PAM type: NRG; PAM sequence: AGG
taggaatgatccggtctcag

SEQ ID NO: 119494 - DNA, 20 bp, Artificial Sequence
  Description of Artificial Sequence: Synthetic oligonucleotide
  Target: LAMA2; (+) strand; PAM type: NRG; PAM sequence: GGG
aggaatgatccggtctcaga

SEQ ID NO: 119495 - DNA, 20 bp, Artificial Sequence
  Description of Artificial Sequence: Synthetic oligonucleotide
  Target: LAMA2; (+) strand; PAM type: NRG; PAM sequence: AAG
aatgatccggtctcagaggg

SEQ ID NO: 119496 - DNA, 20 bp, Artificial Sequence
  Description of Artificial Sequence: Synthetic oligonucleotide
  Target: LAMA2; (+) strand; PAM type: NRG; PAM sequence: AGG
atgatccggtctcagaggga

SEQ ID NO: 119497 - DNA, 20 bp, Artificial Sequence
  Description of Artificial Sequence: Synthetic oligonucleotide
  Target: LAMA2; (+) strand; PAM type: NRG; PAM sequence: GAG
gatccggtctcagagggaag

SEQ ID NO: 119498 - DNA, 20 bp, Artificial Sequence
  Description of Artificial Sequence: Synthetic oligonucleotide
  Target: LAMA2; (+) strand; PAM type: NRG; PAM sequence: TAG
ctcagagggaaggagcgctc

SEQ ID NO: 119499 - DNA, 20 bp, Artificial Sequence
  Description of Artificial Sequence: Synthetic oligonucleotide
  Target: LAMA2; (+) strand; PAM type: NRG; PAM sequence: AGG
tcagagggaaggagcgctct

SEQ ID NO: 119500 - DNA, 20 bp, Artificial Sequence
  Description of Artificial Sequence: Synthetic oligonucleotide
  Target: LAMA2; (+) strand; PAM type: NRG; PAM sequence: AAG
agggaaggagcgctctagga

SEQ ID NO: 119501 - DNA, 20 bp, Artificial Sequence
  Description of Artificial Sequence: Synthetic oligonucleotide
  Target: LAMA2; (+) strand; PAM type: NRG; PAM sequence: AGG
gggaaggagcgctctaggaa

SEQ ID NO: 119502 - DNA, 20 bp, Artificial Sequence
  Description of Artificial Sequence: Synthetic oligonucleotide
  Target: LAMA2; (+) strand; PAM type: NRG; PAM sequence: GAG
gaaggagcgctctaggaaag

SEQ ID NO: 119503 - DNA, 20 bp, Artificial Sequence
  Description of Artificial Sequence: Synthetic oligonucleotide
  Target: LAMA2; (+) strand; PAM type: NRG; PAM sequence: AGG
aaggagcgctctaggaaagg

SEQ ID NO: 119504 - DNA, 20 bp, Artificial Sequence
  Description of Artificial Sequence: Synthetic oligonucleotide
  Target: LAMA2; (+) strand; PAM type: NRG; PAM sequence: TAG
aggaaaggaggatcctttaa

SEQ ID NO: 119505 - DNA, 20 bp, Artificial Sequence
  Description of Artificial Sequence: Synthetic oligonucleotide
  Target: LAMA2; (+) strand; PAM type: NRG; PAM sequence: GAG
gaaaggaggatcctttaata

SEQ ID NO: 119506 - DNA, 20 bp, Artificial Sequence
  Description of Artificial Sequence: Synthetic oligonucleotide
  Target: LAMA2; (+) strand; PAM type: NRG; PAM sequence: AGG
aaaggaggatcctttaatag

SEQ ID NO: 119507 - DNA, 20 bp, Artificial Sequence
  Description of Artificial Sequence: Synthetic oligonucleotide
  Target: LAMA2; (+) strand; PAM type: NRG; PAM sequence: GGG
aaggaggatcctttaataga

SEQ ID NO: 119508 - DNA, 20 bp, Artificial Sequence
  Description of Artificial Sequence: Synthetic oligonucleotide
  Target: LAMA2; (+) strand; PAM type: NRG; PAM sequence: TGG
cctttaatagagggccgtcc

SEQ ID NO: 119509 - DNA, 20 bp, Artificial Sequence
  Description of Artificial Sequence: Synthetic oligonucleotide
  Target: LAMA2; (+) strand; PAM type: NRG; PAM sequence: GGG
ctttaatagagggccgtcct

SEQ ID NO: 119510 - DNA, 20 bp, Artificial Sequence
  Description of Artificial Sequence: Synthetic oligonucleotide
  Target: LAMA2; (+) strand; PAM type: NRG; PAM sequence: GGG
tttaatagagggccgtcctg

SEQ ID NO: 119511 - DNA, 20 bp, Artificial Sequence
  Description of Artificial Sequence: Synthetic oligonucleotide
  Target: LAMA2; (+) strand; PAM type: NRG; PAM sequence: TGG
gtcctggggccgcgtgccca

SEQ ID NO: 119512 - DNA, 20 bp, Artificial Sequence
  Description of Artificial Sequence: Synthetic oligonucleotide
  Target: LAMA2; (+) strand; PAM type: NRG; PAM sequence: AAG
ctggggccgcgtgcccatgg

SEQ ID NO: 119513 - DNA, 20 bp, Artificial Sequence
  Description of Artificial Sequence: Synthetic oligonucleotide
  Target: LAMA2; (+) strand; PAM type: NRG; PAM sequence: AGG
tggggccgcgtgcccatgga

SEQ ID NO: 119514 - DNA, 20 bp, Artificial Sequence
  Description of Artificial Sequence: Synthetic oligonucleotide
  Target: LAMA2; (+) strand; PAM type: NRG; PAM sequence: GAG
gccgcgtgcccatggaaggc

SEQ ID NO: 119515 - DNA, 20 bp, Artificial Sequence
  Description of Artificial Sequence: Synthetic oligonucleotide
  Target: LAMA2; (+) strand; PAM type: NRG; PAM sequence: GAG
cgcgtgcccatggaaggcga

SEQ ID NO: 119516 - DNA, 20 bp, Artificial Sequence
  Description of Artificial Sequence: Synthetic oligonucleotide
  Target: LAMA2; (+) strand; PAM type: NRG; PAM sequence: TGG
gtgcccatggaaggcgagag

SEQ ID NO: 119517 - DNA, 20 bp, Artificial Sequence
  Description of Artificial Sequence: Synthetic oligonucleotide
  Target: LAMA2; (+) strand; PAM type: NRG; PAM sequence: GAG
gcccatggaaggcgagagtg

SEQ ID NO: 119518 - DNA, 20 bp, Artificial Sequence
  Description of Artificial Sequence: Synthetic oligonucleotide
  Target: LAMA2; (+) strand; PAM type: NRG; PAM sequence: AGG
cccatggaaggcgagagtgg

SEQ ID NO: 119519 - DNA, 20 bp, Artificial Sequence
  Description of Artificial Sequence: Synthetic oligonucleotide
  Target: LAMA2; (+) strand; PAM type: NRG; PAM sequence: GAG
catggaaggcgagagtggag

SEQ ID NO: 119520 - DNA, 20 bp, Artificial Sequence
  Description of Artificial Sequence: Synthetic oligonucleotide
  Target: LAMA2; (+) strand; PAM type: NRG; PAM sequence: CAG
tcctctttctcccccaccct

SEQ ID NO: 119521 - DNA, 20 bp, Artificial Sequence
  Description of Artificial Sequence: Synthetic oligonucleotide
  Target: LAMA2; (+) strand; PAM type: NRG; PAM sequence: AGG
cctctttctcccccaccctc

SEQ ID NO: 119522 - DNA, 20 bp, Artificial Sequence
  Description of Artificial Sequence: Synthetic oligonucleotide
  Target: LAMA2; (+) strand; PAM type: NRG; PAM sequence: CGG
ctttctcccccaccctcagg

SEQ ID NO: 119523 - DNA, 20 bp, Artificial Sequence
  Description of Artificial Sequence: Synthetic oligonucleotide
  Target: LAMA2; (+) strand; PAM type: NRG; PAM sequence: CGG
tctcccccaccctcaggcgg

SEQ ID NO: 119524 - DNA, 20 bp, Artificial Sequence
  Description of Artificial Sequence: Synthetic oligonucleotide
  Target: LAMA2; (+) strand; PAM type: NRG; PAM sequence: CGG
cccaccctcaggcggcggcc

SEQ ID NO: 119525 - DNA, 20 bp, Artificial Sequence
  Description of Artificial Sequence: Synthetic oligonucleotide
  Target: LAMA2; (+) strand; PAM type: NRG; PAM sequence: AAG
ctcaggcggcggcccggcca

SEQ ID NO: 119526 - DNA, 20 bp, Artificial Sequence
  Description of Artificial Sequence: Synthetic oligonucleotide
  Target: LAMA2; (+) strand; PAM type: NRG; PAM sequence: CAG
ggcggcggcccggccaaagc

SEQ ID NO: 119527 - DNA, 20 bp, Artificial Sequence
  Description of Artificial Sequence: Synthetic oligonucleotide
  Target: LAMA2; (+) strand; PAM type: NRG; PAM sequence: GAG
cggcggcccggccaaagcca

SEQ ID NO: 119528 - DNA, 20 bp, Artificial Sequence
  Description of Artificial Sequence: Synthetic oligonucleotide
  Target: LAMA2; (+) strand; PAM type: NRG; PAM sequence: AGG
ggcggcccggccaaagccag

SEQ ID NO: 119529 - DNA, 20 bp, Artificial Sequence
  Description of Artificial Sequence: Synthetic oligonucleotide
  Target: LAMA2; (+) strand; PAM type: NRG; PAM sequence: GGG
gcggcccggccaaagccaga

SEQ ID NO: 119530 - DNA, 20 bp, Artificial Sequence
  Description of Artificial Sequence: Synthetic oligonucleotide
  Target: LAMA2; (+) strand; PAM type: NRG; PAM sequence: GGG
cggcccggccaaagccagag

SEQ ID NO: 119531 - DNA, 20 bp, Artificial Sequence
  Description of Artificial Sequence: Synthetic oligonucleotide
  Target: LAMA2; (+) strand; PAM type: NRG; PAM sequence: GGG
ggcccggccaaagccagagg

SEQ ID NO: 119532 - DNA, 20 bp, Artificial Sequence
  Description of Artificial Sequence: Synthetic oligonucleotide
  Target: LAMA2; (+) strand; PAM type: NRG; PAM sequence: CAG
ggctgtctcctcctcttccc

SEQ ID NO: 119533 - DNA, 20 bp, Artificial Sequence
  Description of Artificial Sequence: Synthetic oligonucleotide
  Target: LAMA2; (+) strand; PAM type: NRG; PAM sequence: CAG
tgtctcctcctcttccccag

SEQ ID NO: 119534 - DNA, 20 bp, Artificial Sequence
  Description of Artificial Sequence: Synthetic oligonucleotide
  Target: LAMA2; (+) strand; PAM type: NRG; PAM sequence: CAG
cccagcagctgctgctcgct

SEQ ID NO: 119535 - DNA, 20 bp, Artificial Sequence
  Description of Artificial Sequence: Synthetic oligonucleotide
  Target: LAMA2; (+) strand; PAM type: NRG; PAM sequence: AAG
ctgctgctcgctcagctcac

SEQ ID NO: 119536 - DNA, 20 bp, Artificial Sequence
  Description of Artificial Sequence: Synthetic oligonucleotide
  Target: LAMA2; (+) strand; PAM type: NRG; PAM sequence: AAG
gctcgctcagctcacaagcc

SEQ ID NO: 119537 - DNA, 20 bp, Artificial Sequence
  Description of Artificial Sequence: Synthetic oligonucleotide
  Target: LAMA2; (+) strand; PAM type: NRG; PAM sequence: AGG
ctcgctcagctcacaagcca

SEQ ID NO: 119538 - DNA, 20 bp, Artificial Sequence
  Description of Artificial Sequence: Synthetic oligonucleotide
  Target: LAMA2; (+) strand; PAM type: NRG; PAM sequence: CAG
ctcagctcacaagccaaggc

SEQ ID NO: 119539 - DNA, 20 bp, Artificial Sequence
  Description of Artificial Sequence: Synthetic oligonucleotide
  Target: LAMA2; (+) strand; PAM type: NRG; PAM sequence: AGG
tcagctcacaagccaaggcc

SEQ ID NO: 119540 - DNA, 20 bp, Artificial Sequence
  Description of Artificial Sequence: Synthetic oligonucleotide
  Target: LAMA2; (+) strand; PAM type: NRG; PAM sequence: GGG
cagctcacaagccaaggcca

SEQ ID NO: 119541 - DNA, 20 bp, Artificial Sequence
  Description of Artificial Sequence: Synthetic oligonucleotide
  Target: LAMA2; (+) strand; PAM type: NRG; PAM sequence: GGG
agctcacaagccaaggccag

SEQ ID NO: 119542 - DNA, 20 bp, Artificial Sequence
  Description of Artificial Sequence: Synthetic oligonucleotide
  Target: LAMA2; (+) strand; PAM type: NRG; PAM sequence: CAG
cacaagccaaggccagggga

SEQ ID NO: 119543 - DNA, 20 bp, Artificial Sequence
  Description of Artificial Sequence: Synthetic oligonucleotide
  Target: LAMA2; (+) strand; PAM type: NRG; PAM sequence: AGG
acaagccaaggccaggggac

SEQ ID NO: 119544 - DNA, 20 bp, Artificial Sequence
  Description of Artificial Sequence: Synthetic oligonucleotide
  Target: LAMA2; (+) strand; PAM type: NRG; PAM sequence: GGG
caagccaaggccaggggaca

SEQ ID NO: 119545 - DNA, 20 bp, Artificial Sequence
  Description of Artificial Sequence: Synthetic oligonucleotide
  Target: LAMA2; (+) strand; PAM type: NRG; PAM sequence: CGG
gccaaggccaggggacaggg

SEQ ID NO: 119546 - DNA, 20 bp, Artificial Sequence
  Description of Artificial Sequence: Synthetic oligonucleotide
  Target: LAMA2; (+) strand; PAM type: NRG; PAM sequence: CAG
aaggccaggggacagggcgg

SEQ ID NO: 119547 - DNA, 20 bp, Artificial Sequence
  Description of Artificial Sequence: Synthetic oligonucleotide
  Target: LAMA2; (+) strand; PAM type: NRG; PAM sequence: TGG
cagggcggcagcgactcctc

SEQ ID NO: 119548 - DNA, 20 bp, Artificial Sequence
  Description of Artificial Sequence: Synthetic oligonucleotide
  Target: LAMA2; (+) strand; PAM type: NRG; PAM sequence: GAG
cagcgactcctctggctccc

SEQ ID NO: 119549 - DNA, 20 bp, Artificial Sequence
  Description of Artificial Sequence: Synthetic oligonucleotide
  Target: LAMA2; (+) strand; PAM type: NRG; PAM sequence: AAG
cgactcctctggctcccgag

SEQ ID NO: 119550 - DNA, 20 bp, Artificial Sequence
  Description of Artificial Sequence: Synthetic oligonucleotide
  Target: LAMA2; (+) strand; PAM type: NRG; PAM sequence: TGG
ctcctctggctcccgagaag

SEQ ID NO: 119551 - DNA, 20 bp, Artificial Sequence
  Description of Artificial Sequence: Synthetic oligonucleotide
  Target: LAMA2; (+) strand; PAM type: NRG; PAM sequence: CGG
tggctcccgagaagtggatc

SEQ ID NO: 119552 - DNA, 20 bp, Artificial Sequence
  Description of Artificial Sequence: Synthetic oligonucleotide
  Target: LAMA2; (+) strand; PAM type: NRG; PAM sequence: CGG
ccgagaagtggatccggtcg

SEQ ID NO: 119553 - DNA, 20 bp, Artificial Sequence
  Description of Artificial Sequence: Synthetic oligonucleotide
  Target: LAMA2; (+) strand; PAM type: NRG; PAM sequence: CGG
ggtcgcggccactacgatgc

SEQ ID NO: 119554 - DNA, 20 bp, Artificial Sequence
  Description of Artificial Sequence: Synthetic oligonucleotide
  Target: LAMA2; (+) strand; PAM type: NRG; PAM sequence: GGG
gtcgcggccactacgatgcc

SEQ ID NO: 119555 - DNA, 20 bp, Artificial Sequence
  Description of Artificial Sequence: Synthetic oligonucleotide
  Target: LAMA2; (+) strand; PAM type: NRG; PAM sequence: GAG
cgcggccactacgatgccgg

SEQ ID NO: 119556 - DNA, 20 bp, Artificial Sequence
  Description of Artificial Sequence: Synthetic oligonucleotide
  Target: LAMA2; (+) strand; PAM type: NRG; PAM sequence: CGG
actacgatgccgggagccgc

SEQ ID NO: 119557 - DNA, 20 bp, Artificial Sequence
  Description of Artificial Sequence: Synthetic oligonucleotide
  Target: LAMA2; (+) strand; PAM type: NRG; PAM sequence: GGG
ctacgatgccgggagccgcc

SEQ ID NO: 119558 - DNA, 20 bp, Artificial Sequence
  Description of Artificial Sequence: Synthetic oligonucleotide
  Target: LAMA2; (+) strand; PAM type: NRG; PAM sequence: GGG
tacgatgccgggagccgccg

SEQ ID NO: 119559 - DNA, 20 bp, Artificial Sequence
  Description of Artificial Sequence: Synthetic oligonucleotide
  Target: LAMA2; (+) strand; PAM type: NRG; PAM sequence: CGG
ctcctccttctgctgctctc

SEQ ID NO: 119560 - DNA, 20 bp, Artificial Sequence
  Description of Artificial Sequence: Synthetic oligonucleotide
  Target: LAMA2; (+) strand; PAM type: NRG; PAM sequence: GAG
cctccttctgctgctctccg

SEQ ID NO: 119561 - DNA, 20 bp, Artificial Sequence
  Description of Artificial Sequence: Synthetic oligonucleotide
  Target: LAMA2; (+) strand; PAM type: NRG; PAM sequence: AGG
ctccttctgctgctctccgg

SEQ ID NO: 119562 - DNA, 20 bp, Artificial Sequence
  Description of Artificial Sequence: Synthetic oligonucleotide
  Target: LAMA2; (+) strand; PAM type: NRG; PAM sequence: CGG
ctgctgctctccggaggcct

SEQ ID NO: 119563 - DNA, 20 bp, Artificial Sequence
  Description of Artificial Sequence: Synthetic oligonucleotide
  Target: LAMA2; (+) strand; PAM type: NRG; PAM sequence: GGG
tgctgctctccggaggcctc

SEQ ID NO: 119564 - DNA, 20 bp, Artificial Sequence
  Description of Artificial Sequence: Synthetic oligonucleotide
  Target: LAMA2; (+) strand; PAM type: NRG; PAM sequence: GGG
gctgctctccggaggcctcg

SEQ ID NO: 119565 - DNA, 20 bp, Artificial Sequence
  Description of Artificial Sequence: Synthetic oligonucleotide
  Target: LAMA2; (+) strand; PAM type: NRG; PAM sequence: GGG
ctgctctccggaggcctcgg

SEQ ID NO: 119566 - DNA, 20 bp, Artificial Sequence
  Description of Artificial Sequence: Synthetic oligonucleotide
  Target: LAMA2; (+) strand; PAM type: NRG; PAM sequence: CAG
ccggaggcctcgggggcgta

SEQ ID NO: 119567 - DNA, 20 bp, Artificial Sequence
  Description of Artificial Sequence: Synthetic oligonucleotide
  Target: LAMA2; (+) strand; PAM type: NRG; PAM sequence: AGG
cggaggcctcgggggcgtac

SEQ ID NO: 119568 - DNA, 20 bp, Artificial Sequence
  Description of Artificial Sequence: Synthetic oligonucleotide
  Target: LAMA2; (+) strand; PAM type: NRG; PAM sequence: CAG
gcctcgggggcgtacaggcg

SEQ ID NO: 119569 - DNA, 20 bp, Artificial Sequence
  Description of Artificial Sequence: Synthetic oligonucleotide
  Target: LAMA2; (+) strand; PAM type: NRG; PAM sequence: CGG
tcgggggcgtacaggcgcag

SEQ ID NO: 119570 - DNA, 20 bp, Artificial Sequence
  Description of Artificial Sequence: Synthetic oligonucleotide
  Target: LAMA2; (+) strand; PAM type: NRG; PAM sequence: CAG
gcgtacaggcgcagcggccg

SEQ ID NO: 119571 - DNA, 20 bp, Artificial Sequence
  Description of Artificial Sequence: Synthetic oligonucleotide
  Target: LAMA2; (+) strand; PAM type: NRG; PAM sequence: CAG
tacaggcgcagcggccgcag

SEQ ID NO: 119572 - DNA, 20 bp, Artificial Sequence
  Description of Artificial Sequence: Synthetic oligonucleotide
  Target: LAMA2; (+) strand; PAM type: NRG; PAM sequence: CAG
aggcgcagcggccgcagcag

SEQ ID NO: 119573 - DNA, 20 bp, Artificial Sequence
  Description of Artificial Sequence: Synthetic oligonucleotide
  Target: LAMA2; (+) strand; PAM type: NRG; PAM sequence: CGG
cgcagcggccgcagcagcag

SEQ ID NO: 119574 - DNA, 20 bp, Artificial Sequence
  Description of Artificial Sequence: Synthetic oligonucleotide
  Target: LAMA2; (+) strand; PAM type: NRG; PAM sequence: CAG
agcggccgcagcagcagcgg

SEQ ID NO: 119575 - DNA, 20 bp, Artificial Sequence
  Description of Artificial Sequence: Synthetic oligonucleotide
  Target: LAMA2; (+) strand; PAM type: NRG; PAM sequence: CAG
cgcagcagcagcggcagtca

SEQ ID NO: 119576 - DNA, 20 bp, Artificial Sequence
  Description of Artificial Sequence: Synthetic oligonucleotide
  Target: LAMA2; (+) strand; PAM type: NRG; PAM sequence: AGG
gcagcagcagcggcagtcac

SEQ ID NO: 119577 - DNA, 20 bp, Artificial Sequence
  Description of Artificial Sequence: Synthetic oligonucleotide
  Target: LAMA2; (+) strand; PAM type: NRG; PAM sequence: CAG
agcggcagtcacaggcacat

SEQ ID NO: 119578 - DNA, 20 bp, Artificial Sequence
  Description of Artificial Sequence: Synthetic oligonucleotide
  Target: LAMA2; (+) strand; PAM type: NRG; PAM sequence: AAG
cagtcacaggcacatcagca

SEQ ID NO: 119579 - DNA, 20 bp, Artificial Sequence
  Description of Artificial Sequence: Synthetic oligonucleotide
  Target: LAMA2; (+) strand; PAM type: NRG; PAM sequence: GAG
gtcacaggcacatcagcaaa

SEQ ID NO: 119580 - DNA, 20 bp, Artificial Sequence
  Description of Artificial Sequence: Synthetic oligonucleotide
  Target: LAMA2; (+) strand; PAM type: NRG; PAM sequence: AGG
tcacaggcacatcagcaaag

SEQ ID NO: 119581 - DNA, 20 bp, Artificial Sequence
  Description of Artificial Sequence: Synthetic oligonucleotide
  Target: LAMA2; (+) strand; PAM type: NRG; PAM sequence: CAG
ggcacatcagcaaagaggta

SEQ ID NO: 119582 - DNA, 20 bp, Artificial Sequence
  Description of Artificial Sequence: Synthetic oligonucleotide
  Target: LAMA2; (+) strand; PAM type: NRG; PAM sequence: GAG
atcagcaaagaggtacagtc

SEQ ID NO: 119583 - DNA, 20 bp, Artificial Sequence
  Description of Artificial Sequence: Synthetic oligonucleotide
  Target: LAMA2; (+) strand; PAM type: NRG; PAM sequence: AGG
tcagcaaagaggtacagtcg

SEQ ID NO: 119584 - DNA, 20 bp, Artificial Sequence
  Description of Artificial Sequence: Synthetic oligonucleotide
  Target: LAMA2; (+) strand; PAM type: NRG; PAM sequence: TGG
aaagaggtacagtcgaggca

SEQ ID NO: 119585 - DNA, 20 bp, Artificial Sequence
  Description of Artificial Sequence: Synthetic oligonucleotide
  Target: LAMA2; (+) strand; PAM type: NRG; PAM sequence: GGG
aagaggtacagtcgaggcat

SEQ ID NO: 119586 - DNA, 20 bp, Artificial Sequence
  Description of Artificial Sequence: Synthetic oligonucleotide
  Target: LAMA2; (+) strand; PAM type: NRG; PAM sequence: TGG
gtacagtcgaggcatgggct

SEQ ID NO: 119587 - DNA, 20 bp, Artificial Sequence
  Description of Artificial Sequence: Synthetic oligonucleotide
  Target: LAMA2; (+) strand; PAM type: NRG; PAM sequence: GGG
tacagtcgaggcatgggctt

SEQ ID NO: 119588 - DNA, 20 bp, Artificial Sequence
  Description of Artificial Sequence: Synthetic oligonucleotide
  Target: LAMA2; (+) strand; PAM type: NRG; PAM sequence: CGG
gcttgggttgcatcctttgc

SEQ ID NO: 119589 - DNA, 20 bp, Artificial Sequence
  Description of Artificial Sequence: Synthetic oligonucleotide
  Target: LAMA2; (+) strand; PAM type: NRG; PAM sequence: GGG
cttgggttgcatcctttgcc

SEQ ID NO: 119590 - DNA, 20 bp, Artificial Sequence
  Description of Artificial Sequence: Synthetic oligonucleotide
  Target: LAMA2; (+) strand; PAM type: NRG; PAM sequence: GAG
ttgcatcctttgccgggacc

SEQ ID NO: 119591 - DNA, 20 bp, Artificial Sequence
  Description of Artificial Sequence: Synthetic oligonucleotide
  Target: LAMA2; (+) strand; PAM type: NRG; PAM sequence: GAG
ctcacttcttccactcttcc

SEQ ID NO: 119592 - DNA, 20 bp, Artificial Sequence
  Description of Artificial Sequence: Synthetic oligonucleotide
  Target: LAMA2; (+) strand; PAM type: NRG; PAM sequence: GAG
cacttcttccactcttccga

SEQ ID NO: 119593 - DNA, 20 bp, Artificial Sequence
  Description of Artificial Sequence: Synthetic oligonucleotide
  Target: LAMA2; (+) strand; PAM type: NRG; PAM sequence: TGG
cttccgagagttgctgtctg

SEQ ID NO: 119594 - DNA, 20 bp, Artificial Sequence
  Description of Artificial Sequence: Synthetic oligonucleotide
  Target: LAMA2; (+) strand; PAM type: NRG; PAM sequence: CAG
ctgccgtcttgcttcgcctt

SEQ ID NO: 119595 - DNA, 20 bp, Artificial Sequence
  Description of Artificial Sequence: Synthetic oligonucleotide
  Target: LAMA2; (+) strand; PAM type: NRG; PAM sequence: GAG
gccgtcttgcttcgccttca

SEQ ID NO: 119596 - DNA, 20 bp, Artificial Sequence
  Description of Artificial Sequence: Synthetic oligonucleotide
  Target: LAMA2; (+) strand; PAM type: NRG; PAM sequence: GAG
cgtcttgcttcgccttcaga

SEQ ID NO: 119597 - DNA, 20 bp, Artificial Sequence
  Description of Artificial Sequence: Synthetic oligonucleotide
  Target: LAMA2; (+) strand; PAM type: NRG; PAM sequence: TGG
cgccttcagagagtgcgctc

SEQ ID NO: 119598 - DNA, 20 bp, Artificial Sequence
  Description of Artificial Sequence: Synthetic oligonucleotide
  Target: LAMA2; (+) strand; PAM type: NRG; PAM sequence: GGG
gccttcagagagtgcgctct

SEQ ID NO: 119599 - DNA, 20 bp, Artificial Sequence
  Description of Artificial Sequence: Synthetic oligonucleotide
  Target: LAMA2; (+) strand; PAM type: NRG; PAM sequence: GGG
ccttcagagagtgcgctctg

SEQ ID NO: 119600 - DNA, 20 bp, Artificial Sequence
  Description of Artificial Sequence: Synthetic oligonucleotide
  Target: LAMA2; (+) strand; PAM type: NRG; PAM sequence: AAG
cagagagtgcgctctggggc

SEQ ID NO: 119601 - DNA, 20 bp, Artificial Sequence
  Description of Artificial Sequence: Synthetic oligonucleotide
  Target: LAMA2; (+) strand; PAM type: NRG; PAM sequence: GAG
gagagtgcgctctggggcaa

SEQ ID NO: 119602 - DNA, 20 bp, Artificial Sequence
  Description of Artificial Sequence: Synthetic oligonucleotide
  Target: LAMA2; (+) strand; PAM type: NRG; PAM sequence: AGG
agagtgcgctctggggcaag

SEQ ID NO: 119603 - DNA, 20 bp, Artificial Sequence
  Description of Artificial Sequence: Synthetic oligonucleotide
  Target: LAMA2; (+) strand; PAM type: NRG; PAM sequence: AAG
tctggggcaagaggaacttg

SEQ ID NO: 119604 - DNA, 20 bp, Artificial Sequence
  Description of Artificial Sequence: Synthetic oligonucleotide
  Target: LAMA2; (+) strand; PAM type: NRG; PAM sequence: AAG
gggcaagaggaacttgaagc

SEQ ID NO: 119605 - DNA, 20 bp, Artificial Sequence
  Description of Artificial Sequence: Synthetic oligonucleotide
  Target: LAMA2; (+) strand; PAM type: NRG; PAM sequence: AAG
gaggaacttgaagcaagttc

SEQ ID NO: 119606 - DNA, 20 bp, Artificial Sequence
  Description of Artificial Sequence: Synthetic oligonucleotide
  Target: LAMA2; (+) strand; PAM type: NRG; PAM sequence: GAG
aagttcaagttcaatgccat

SEQ ID NO: 119607 - DNA, 20 bp, Artificial Sequence
  Description of Artificial Sequence: Synthetic oligonucleotide
  Target: LAMA2; (+) strand; PAM type: NRG; PAM sequence: GAG
gttcaagttcaatgccatga

SEQ ID NO: 119608 - DNA, 20 bp, Artificial Sequence
  Description of Artificial Sequence: Synthetic oligonucleotide
  Target: LAMA2; (+) strand; PAM type: NRG; PAM sequence: TAG
agttcaatgccatgagagcg

SEQ ID NO: 119609 - DNA, 20 bp, Artificial Sequence
  Description of Artificial Sequence: Synthetic oligonucleotide
  Target: LAMA2; (+) strand; PAM type: NRG; PAM sequence: TAG
aatgccatgagagcgtagtg

SEQ ID NO: 119610 - DNA, 20 bp, Artificial Sequence
  Description of Artificial Sequence: Synthetic oligonucleotide
  Target: LAMA2; (+) strand; PAM type: NRG; PAM sequence: AGG
atgccatgagagcgtagtgt

SEQ ID NO: 119611 - DNA, 20 bp, Artificial Sequence
  Description of Artificial Sequence: Synthetic oligonucleotide
  Target: LAMA2; (+) strand; PAM type: NRG; PAM sequence: GGG
tgccatgagagcgtagtgta

SEQ ID NO: 119612 - DNA, 20 bp, Artificial Sequence
  Description of Artificial Sequence: Synthetic oligonucleotide
  Target: LAMA2; (+) strand; PAM type: NRG; PAM sequence: GGG
gccatgagagcgtagtgtag

SEQ ID NO: 119613 - DNA, 20 bp, Artificial Sequence
  Description of Artificial Sequence: Synthetic oligonucleotide
  Target: LAMA2; (+) strand; PAM type: NRG; PAM sequence: GGG
ccatgagagcgtagtgtagg

SEQ ID NO: 119614 - DNA, 20 bp, Artificial Sequence
  Description of Artificial Sequence: Synthetic oligonucleotide
  Target: LAMA2; (+) strand; PAM type: NRG; PAM sequence: AAG
tagtgtagggggaattacct

SEQ ID NO: 119615 - DNA, 20 bp, Artificial Sequence
  Description of Artificial Sequence: Synthetic oligonucleotide
  Target: LAMA2; (+) strand; PAM type: NRG; PAM sequence: AAG
gaattacctaagtcctgcaa

SEQ ID NO: 119616 - DNA, 20 bp, Artificial Sequence
  Description of Artificial Sequence: Synthetic oligonucleotide
  Target: LAMA2; (+) strand; PAM type: NRG; PAM sequence: AGG
aattacctaagtcctgcaaa

SEQ ID NO: 119617 - DNA, 20 bp, Artificial Sequence
  Description of Artificial Sequence: Synthetic oligonucleotide
  Target: LAMA2; (+) strand; PAM type: NRG; PAM sequence: CGG
cctaagtcctgcaaaaggaa

SEQ ID NO: 119618 - DNA, 20 bp, Artificial Sequence
  Description of Artificial Sequence: Synthetic oligonucleotide
  Target: LAMA2; (+) strand; PAM type: NRG; PAM sequence: GGG
ctaagtcctgcaaaaggaac

SEQ ID NO: 119619 - DNA, 20 bp, Artificial Sequence
  Description of Artificial Sequence: Synthetic oligonucleotide
  Target: LAMA2; (+) strand; PAM type: NRG; PAM sequence: GGG
taagtcctgcaaaaggaacg

SEQ ID NO: 119620 - DNA, 20 bp, Artificial Sequence
  Description of Artificial Sequence: Synthetic oligonucleotide
  Target: LAMA2; (+) strand; PAM type: NRG; PAM sequence: GAG
agtcctgcaaaaggaacggg

SEQ ID NO: 119621 - DNA, 20 bp, Artificial Sequence
  Description of Artificial Sequence: Synthetic oligonucleotide
  Target: LAMA2; (+) strand; PAM type: NRG; PAM sequence: TAG
gagtgcttttcattgttctt

SEQ ID NO: 119622 - DNA, 20 bp, Artificial Sequence
  Description of Artificial Sequence: Synthetic oligonucleotide
  Target: LAMA2; (+) strand; PAM type: NRG; PAM sequence: AAG
ttcattgttctttagtttcg

SEQ ID NO: 119623 - DNA, 20 bp, Artificial Sequence
  Description of Artificial Sequence: Synthetic oligonucleotide
  Target: LAMA2; (+) strand; PAM type: NRG; PAM sequence: GAG
cattgttctttagtttcgaa

SEQ ID NO: 119624 - DNA, 20 bp, Artificial Sequence
  Description of Artificial Sequence: Synthetic oligonucleotide
  Target: LAMA2; (+) strand; PAM type: NRG; PAM sequence: AGG
attgttctttagtttcgaag

SEQ ID NO: 119625 - DNA, 20 bp, Artificial Sequence
  Description of Artificial Sequence: Synthetic oligonucleotide
  Target: LAMA2; (+) strand; PAM type: NRG; PAM sequence: AAG
ttgatttctgaaatctttcc

SEQ ID NO: 119626 - DNA, 20 bp, Artificial Sequence
  Description of Artificial Sequence: Synthetic oligonucleotide
  Target: LAMA2; (+) strand; PAM type: NRG; PAM sequence: GAG
gatttctgaaatctttccaa

SEQ ID NO: 119627 - DNA, 20 bp, Artificial Sequence
  Description of Artificial Sequence: Synthetic oligonucleotide
  Target: LAMA2; (+) strand; PAM type: NRG; PAM sequence: AGG
atttctgaaatctttccaag

SEQ ID NO: 119628 - DNA, 20 bp, Artificial Sequence
  Description of Artificial Sequence: Synthetic oligonucleotide
  Target: LAMA2; (+) strand; PAM type: NRG; PAM sequence: TGG
agaggaaaactttttccaat

SEQ ID NO: 119629 - DNA, 20 bp, Artificial Sequence
  Description of Artificial Sequence: Synthetic oligonucleotide
  Target: LAMA2; (+) strand; PAM type: NRG; PAM sequence: AAG
ctttttccaattggaaaaaa

SEQ ID NO: 119630 - DNA, 20 bp, Artificial Sequence
  Description of Artificial Sequence: Synthetic oligonucleotide
  Target: LAMA2; (+) strand; PAM type: NRG; PAM sequence: CAG
aaaaaagaatttcttcaaat

SEQ ID NO: 119631 - DNA, 20 bp, Artificial Sequence
  Description of Artificial Sequence: Synthetic oligonucleotide
  Target: LAMA2; (+) strand; PAM type: NRG; PAM sequence: GAG
aaaagaatttcttcaaatca

SEQ ID NO: 119632 - DNA, 20 bp, Artificial Sequence
  Description of Artificial Sequence: Synthetic oligonucleotide
  Target: LAMA2; (+) strand; PAM type: NRG; PAM sequence: CAG
tcaaatcagagcccatcctg

SEQ ID NO: 119633 - DNA, 20 bp, Artificial Sequence
  Description of Artificial Sequence: Synthetic oligonucleotide
  Target: LAMA2; (+) strand; PAM type: NRG; PAM sequence: GAG
aaatcagagcccatcctgca

SEQ ID NO: 119634 - DNA, 20 bp, Artificial Sequence
  Description of Artificial Sequence: Synthetic oligonucleotide
  Target: LAMA2; (+) strand; PAM type: NRG; PAM sequence: AAG
cagagcccatcctgcagaga

SEQ ID NO: 119635 - DNA, 20 bp, Artificial Sequence
  Description of Artificial Sequence: Synthetic oligonucleotide
  Target: LAMA2; (+) strand; PAM type: NRG; PAM sequence: AGG
agagcccatcctgcagagaa

SEQ ID NO: 119636 - DNA, 20 bp, Artificial Sequence
  Description of Artificial Sequence: Synthetic oligonucleotide
  Target: LAMA2; (+) strand; PAM type: NRG; PAM sequence: AAG
cctgcagagaaaggcttccc

SEQ ID NO: 119637 - DNA, 20 bp, Artificial Sequence
  Description of Artificial Sequence: Synthetic oligonucleotide
  Target: LAMA2; (+) strand; PAM type: NRG; PAM sequence: TGG
gaaaggcttcccaagctgtg

SEQ ID NO: 119638 - DNA, 20 bp, Artificial Sequence
  Description of Artificial Sequence: Synthetic oligonucleotide
  Target: LAMA2; (+) strand; PAM type: NRG; PAM sequence: TGG
ccaagctgtgtggttcatcc

SEQ ID NO: 119639 - DNA, 20 bp, Artificial Sequence
  Description of Artificial Sequence: Synthetic oligonucleotide
  Target: LAMA2; (+) strand; PAM type: NRG; PAM sequence: GGG
caagctgtgtggttcatcct

SEQ ID NO: 119640 - DNA, 20 bp, Artificial Sequence
  Description of Artificial Sequence: Synthetic oligonucleotide
  Target: LAMA2; (+) strand; PAM type: NRG; PAM sequence: TGG
tggttcatcctgggacttta

SEQ ID NO: 119641 - DNA, 20 bp, Artificial Sequence
  Description of Artificial Sequence: Synthetic oligonucleotide
  Target: LAMA2; (+) strand; PAM type: NRG; PAM sequence: GAG
gttcatcctgggactttatg

SEQ ID NO: 119642 - DNA, 20 bp, Artificial Sequence
  Description of Artificial Sequence: Synthetic oligonucleotide
  Target: LAMA2; (+) strand; PAM type: NRG; PAM sequence: AGG
ttcatcctgggactttatgg

SEQ ID NO: 119643 - DNA, 20 bp, Artificial Sequence
  Description of Artificial Sequence: Synthetic oligonucleotide
  Target: LAMA2; (+) strand; PAM type: NRG; PAM sequence: GGG
tcatcctgggactttatgga

SEQ ID NO: 119644 - DNA, 20 bp, Artificial Sequence
  Description of Artificial Sequence: Synthetic oligonucleotide
  Target: LAMA2; (+) strand; PAM type: NRG; PAM sequence: TAG
tcctgggactttatggaggg

SEQ ID NO: 119645 - DNA, 20 bp, Artificial Sequence
  Description of Artificial Sequence: Synthetic oligonucleotide
  Target: LAMA2; (+) strand; PAM type: NRG; PAM sequence: AAG
cacacatatatatatatata

SEQ ID NO: 119646 - DNA, 20 bp, Artificial Sequence
  Description of Artificial Sequence: Synthetic oligonucleotide
  Target: LAMA2; (+) strand; PAM type: NRG; PAM sequence: CAG
tatatatatataaagtttta

SEQ ID NO: 119647 - DNA, 20 bp, Artificial Sequence
  Description of Artificial Sequence: Synthetic oligonucleotide
  Target: LAMA2; (+) strand; PAM type: NRG; PAM sequence: CAG
tttgttttcaacttttaaaa

SEQ ID NO: 119648 - DNA, 20 bp, Artificial Sequence
  Description of Artificial Sequence: Synthetic oligonucleotide
  Target: LAMA2; (+) strand; PAM type: NRG; PAM sequence: AGG
ttgttttcaacttttaaaac

SEQ ID NO: 119649 - DNA, 20 bp, Artificial Sequence
  Description of Artificial Sequence: Synthetic oligonucleotide
  Target: LAMA2; (+) strand; PAM type: NRG; PAM sequence: AAG
cttttaaaacaggatttcta

SEQ ID NO: 119650 - DNA, 20 bp, Artificial Sequence
  Description of Artificial Sequence: Synthetic oligonucleotide
  Target: LAMA2; (+) strand; PAM type: NRG; PAM sequence: AAG
ttaaaacaggatttctaaag

SEQ ID NO: 119651 - DNA, 20 bp, Artificial Sequence
  Description of Artificial Sequence: Synthetic oligonucleotide
  Target: LAMA2; (+) strand; PAM type: NRG; PAM sequence: TGG
ggatttctaaagaagttatg

SEQ ID NO: 119652 - DNA, 20 bp, Artificial Sequence
  Description of Artificial Sequence: Synthetic oligonucleotide
  Target: LAMA2; (+) strand; PAM type: NRG; PAM sequence: TGG
atgtggttttttttctttca

SEQ ID NO: 119653 - DNA, 20 bp, Artificial Sequence
  Description of Artificial Sequence: Synthetic oligonucleotide
  Target: LAMA2; (+) strand; PAM type: NRG; PAM sequence: TGG
ttttttttctttcatggcaa

SEQ ID NO: 119654 - DNA, 20 bp, Artificial Sequence
  Description of Artificial Sequence: Synthetic oligonucleotide
  Target: LAMA2; (+) strand; PAM type: NRG; PAM sequence: CAG
tttcatggcaatggcgcctc

SEQ ID NO: 119655 - DNA, 20 bp, Artificial Sequence
  Description of Artificial Sequence: Synthetic oligonucleotide
  Target: LAMA2; (+) strand; PAM type: NRG; PAM sequence: TAG
cttcatatcctattttattg

SEQ ID NO: 119656 - DNA, 20 bp, Artificial Sequence
  Description of Artificial Sequence: Synthetic oligonucleotide
  Target: LAMA2; (+) strand; PAM type: NRG; PAM sequence: CAG
tttctccttttgcttaaata

SEQ ID NO: 119657 - DNA, 20 bp, Artificial Sequence
  Description of Artificial Sequence: Synthetic oligonucleotide
  Target: LAMA2; (+) strand; PAM type: NRG; PAM sequence: GAG
tctccttttgcttaaataca

SEQ ID NO: 119658 - DNA, 20 bp, Artificial Sequence
  Description of Artificial Sequence: Synthetic oligonucleotide
  Target: LAMA2; (+) strand; PAM type: NRG; PAM sequence: AGG
ctccttttgcttaaatacag

SEQ ID NO: 119659 - DNA, 20 bp, Artificial Sequence
  Description of Artificial Sequence: Synthetic oligonucleotide
  Target: LAMA2; (+) strand; PAM type: NRG; PAM sequence: GAG
ccttttgcttaaatacagag

SEQ ID NO: 119660 - DNA, 20 bp, Artificial Sequence
  Description of Artificial Sequence: Synthetic oligonucleotide
  Target: LAMA2; (+) strand; PAM type: NRG; PAM sequence: AAG
ttctatgtcatgtgtacttt

SEQ ID NO: 119661 - DNA, 20 bp, Artificial Sequence
  Description of Artificial Sequence: Synthetic oligonucleotide
  Target: LAMA2; (+) strand; PAM type: NRG; PAM sequence: AGG
tctatgtcatgtgtacttta

SEQ ID NO: 119662 - DNA, 20 bp, Artificial Sequence
  Description of Artificial Sequence: Synthetic oligonucleotide
  Target: LAMA2; (+) strand; PAM type: NRG; PAM sequence: CAG
tcatgtgtactttaaggcca

SEQ ID NO: 119663 - DNA, 20 bp, Artificial Sequence
  Description of Artificial Sequence: Synthetic oligonucleotide
  Target: LAMA2; (+) strand; PAM type: NRG; PAM sequence: TAG
tactttaaggccacagtgac

SEQ ID NO: 119664 - DNA, 20 bp, Artificial Sequence
  Description of Artificial Sequence: Synthetic oligonucleotide
  Target: LAMA2; (+) strand; PAM type: NRG; PAM sequence: TGG
cagtgactagatatacactt

SEQ ID NO: 119665 - DNA, 20 bp, Artificial Sequence
  Description of Artificial Sequence: Synthetic oligonucleotide
  Target: LAMA2; (+) strand; PAM type: NRG; PAM sequence: GAG
gtgactagatatacactttg

SEQ ID NO: 119666 - DNA, 20 bp, Artificial Sequence
  Description of Artificial Sequence: Synthetic oligonucleotide
  Target: LAMA2; (+) strand; PAM type: NRG; PAM sequence: AGG
tgactagatatacactttgg

SEQ ID NO: 119667 - DNA, 20 bp, Artificial Sequence
  Description of Artificial Sequence: Synthetic oligonucleotide
  Target: LAMA2; (+) strand; PAM type: NRG; PAM sequence: TGG
atatacactttggaggactt

SEQ ID NO: 119668 - DNA, 20 bp, Artificial Sequence
  Description of Artificial Sequence: Synthetic oligonucleotide
  Target: LAMA2; (+) strand; PAM type: NRG; PAM sequence: AAG
tacactttggaggactttgg

SEQ ID NO: 119669 - DNA, 20 bp, Artificial Sequence
  Description of Artificial Sequence: Synthetic oligonucleotide
  Target: LAMA2; (+) strand; PAM type: NRG; PAM sequence: TGG
ctttggaggactttggaaga

SEQ ID NO: 119670 - DNA, 20 bp, Artificial Sequence
  Description of Artificial Sequence: Synthetic oligonucleotide
  Target: LAMA2; (+) strand; PAM type: NRG; PAM sequence: CAG
cttaaataacttattctcct

SEQ ID NO: 119671 - DNA, 20 bp, Artificial Sequence
  Description of Artificial Sequence: Synthetic oligonucleotide
  Target: LAMA2; (+) strand; PAM type: NRG; PAM sequence: GAG
taaataacttattctcctca

SEQ ID NO: 119672 - DNA, 20 bp, Artificial Sequence
  Description of Artificial Sequence: Synthetic oligonucleotide
  Target: LAMA2; (+) strand; PAM type: NRG; PAM sequence: TAG
ttattctcctcagagcctct

SEQ ID NO: 119673 - DNA, 20 bp, Artificial Sequence
  Description of Artificial Sequence: Synthetic oligonucleotide
  Target: LAMA2; (+) strand; PAM type: NRG; PAM sequence: TAG
tcttagtgtttatgtatata

SEQ ID NO: 119674 - DNA, 20 bp, Artificial Sequence
  Description of Artificial Sequence: Synthetic oligonucleotide
  Target: LAMA2; (+) strand; PAM type: NRG; PAM sequence: TGG
agctctcatttctgaaactt

SEQ ID NO: 119675 - DNA, 20 bp, Artificial Sequence
  Description of Artificial Sequence: Synthetic oligonucleotide
  Target: LAMA2; (+) strand; PAM type: NRG; PAM sequence: GGG
gctctcatttctgaaacttt

SEQ ID NO: 119676 - DNA, 20 bp, Artificial Sequence
  Description of Artificial Sequence: Synthetic oligonucleotide
  Target: LAMA2; (+) strand; PAM type: NRG; PAM sequence: GGG
ctctcatttctgaaactttg

SEQ ID NO: 119677 - DNA, 20 bp, Artificial Sequence
  Description of Artificial Sequence: Synthetic oligonucleotide
  Target: LAMA2; (+) strand; PAM type: NRG; PAM sequence: GAG
ctcatttctgaaactttggg

SEQ ID NO: 119678 - DNA, 20 bp, Artificial Sequence
  Description of Artificial Sequence: Synthetic oligonucleotide
  Target: LAMA2; (+) strand; PAM type: NRG; PAM sequence: AAG
gaaactttggggagtctttg

SEQ ID NO: 119679 - DNA, 20 bp, Artificial Sequence
  Description of Artificial Sequence: Synthetic oligonucleotide
  Target: LAMA2; (+) strand; PAM type: NRG; PAM sequence: GAG
aactttggggagtctttgaa

SEQ ID NO: 119680 - DNA, 20 bp, Artificial Sequence
  Description of Artificial Sequence: Synthetic oligonucleotide
  Target: LAMA2; (+) strand; PAM type: NRG; PAM sequence: CAG
ttttattatcatgaatttta

SEQ ID NO: 119681 - DNA, 20 bp, Artificial Sequence
  Description of Artificial Sequence: Synthetic oligonucleotide
  Target: LAMA2; (+) strand; PAM type: NRG; PAM sequence: AGG
tttattatcatgaattttac

SEQ ID NO: 119682 - DNA, 20 bp, Artificial Sequence
  Description of Artificial Sequence: Synthetic oligonucleotide
  Target: LAMA2; (+) strand; PAM type: NRG; PAM sequence: AAG
attatcatgaattttacagg

SEQ ID NO: 119683 - DNA, 20 bp, Artificial Sequence
  Description of Artificial Sequence: Synthetic oligonucleotide
  Target: LAMA2; (+) strand; PAM type: NRG; PAM sequence: CAG
ttttacaggaagcacatgtg

SEQ ID NO: 119684 - DNA, 20 bp, Artificial Sequence
  Description of Artificial Sequence: Synthetic oligonucleotide
  Target: LAMA2; (+) strand; PAM type: NRG; PAM sequence: AAG
aagcacatgtgcagcattgt

SEQ ID NO: 119685 - DNA, 20 bp, Artificial Sequence
  Description of Artificial Sequence: Synthetic oligonucleotide
  Target: LAMA2; (+) strand; PAM type: NRG; PAM sequence: CAG
tactttgtaacacattattt

SEQ ID NO: 119686 - DNA, 20 bp, Artificial Sequence
  Description of Artificial Sequence: Synthetic oligonucleotide
  Target: LAMA2; (+) strand; PAM type: NRG; PAM sequence: AAG
atttcagcaaacaattcttt

SEQ ID NO: 119687 - DNA, 20 bp, Artificial Sequence
  Description of Artificial Sequence: Synthetic oligonucleotide
  Target: LAMA2; (+) strand; PAM type: NRG; PAM sequence: TGG
cagcaaacaattctttaagt

SEQ ID NO: 119688 - DNA, 20 bp, Artificial Sequence
  Description of Artificial Sequence: Synthetic oligonucleotide
  Target: LAMA2; (+) strand; PAM type: NRG; PAM sequence: AAG
aagttggaaaacctgtatca

SEQ ID NO: 119689 - DNA, 20 bp, Artificial Sequence
  Description of Artificial Sequence: Synthetic oligonucleotide
  Target: LAMA2; (+) strand; PAM type: NRG; PAM sequence: AAG
ctgtatcaaagtaaaaaaaa

SEQ ID NO: 119690 - DNA, 20 bp, Artificial Sequence
  Description of Artificial Sequence: Synthetic oligonucleotide
  Target: LAMA2; (+) strand; PAM type: NRG; PAM sequence: CGG
aaaaagaaatatttattatt

SEQ ID NO: 119691 - DNA, 20 bp, Artificial Sequence
  Description of Artificial Sequence: Synthetic oligonucleotide
  Target: LAMA2; (+) strand; PAM type: NRG; PAM sequence: AAG
aatatgaaaatgtttaacct

SEQ ID NO: 119692 - DNA, 20 bp, Artificial Sequence
  Description of Artificial Sequence: Synthetic oligonucleotide
  Target: LAMA2; (+) strand; PAM type: NRG; PAM sequence: GAG
tatgaaaatgtttaacctaa

SEQ ID NO: 119693 - DNA, 20 bp, Artificial Sequence
  Description of Artificial Sequence: Synthetic oligonucleotide
  Target: LAMA2; (+) strand; PAM type: NRG; PAM sequence: TAG
acctaagagtacaaaatctg

SEQ ID NO: 119694 - DNA, 20 bp, Artificial Sequence
  Description of Artificial Sequence: Synthetic oligonucleotide
  Target: LAMA2; (+) strand; PAM type: NRG; PAM sequence: AGG
cctaagagtacaaaatctgt

SEQ ID NO: 119695 - DNA, 20 bp, Artificial Sequence
  Description of Artificial Sequence: Synthetic oligonucleotide
  Target: LAMA2; (+) strand; PAM type: NRG; PAM sequence: TAG
agagtacaaaatctgtaggt

SEQ ID NO: 119696 - DNA, 20 bp, Artificial Sequence
  Description of Artificial Sequence: Synthetic oligonucleotide
  Target: LAMA2; (+) strand; PAM type: NRG; PAM sequence: AAG
gtacaaaatctgtaggttag

SEQ ID NO: 119697 - DNA, 20 bp, Artificial Sequence
  Description of Artificial Sequence: Synthetic oligonucleotide
  Target: LAMA2; (+) strand; PAM type: NRG; PAM sequence: AAG
tgtaggttagaagcttttaa

SEQ ID NO: 119698 - DNA, 20 bp, Artificial Sequence
  Description of Artificial Sequence: Synthetic oligonucleotide
  Target: LAMA2; (+) strand; PAM type: NRG; PAM sequence: GAG
aagcttttaaaagttttaat

SEQ ID NO: 119699 - DNA, 20 bp, Artificial Sequence
  Description of Artificial Sequence: Synthetic oligonucleotide
  Target: LAMA2; (+) strand; PAM type: NRG; PAM sequence: AGG
agcttttaaaagttttaatg

SEQ ID NO: 119700 - DNA, 20 bp, Artificial Sequence
  Description of Artificial Sequence: Synthetic oligonucleotide
  Target: LAMA2; (+) strand; PAM type: NRG; PAM sequence: AAG
taatgaggctgaatctgctt

SEQ ID NO: 119701 - DNA, 20 bp, Artificial Sequence
  Description of Artificial Sequence: Synthetic oligonucleotide
  Target: LAMA2; (+) strand; PAM type: NRG; PAM sequence: AAG
ctgaatctgcttaagttttg

SEQ ID NO: 119702 - DNA, 20 bp, Artificial Sequence
  Description of Artificial Sequence: Synthetic oligonucleotide
  Target: LAMA2; (+) strand; PAM type: NRG; PAM sequence: CAG
aagtatacttatccttcttc

SEQ ID NO: 119703 - DNA, 20 bp, Artificial Sequence
  Description of Artificial Sequence: Synthetic oligonucleotide
  Target: LAMA2; (+) strand; PAM type: NRG; PAM sequence: TAG
tccttcttccagttaacttc

SEQ ID NO: 119704 - DNA, 20 bp, Artificial Sequence
  Description of Artificial Sequence: Synthetic oligonucleotide
  Target: LAMA2; (+) strand; PAM type: NRG; PAM sequence: AAG
cttccagttaacttctagcc

SEQ ID NO: 119705 - DNA, 20 bp, Artificial Sequence
  Description of Artificial Sequence: Synthetic oligonucleotide
  Target: LAMA2; (+) strand; PAM type: NRG; PAM sequence: TAG
ttaacttctagccaagtcaa

SEQ ID NO: 119706 - DNA, 20 bp, Artificial Sequence
  Description of Artificial Sequence: Synthetic oligonucleotide
  Target: LAMA2; (+) strand; PAM type: NRG; PAM sequence: TAG
tgatatttgttcttataatc

SEQ ID NO: 119707 - DNA, 20 bp, Artificial Sequence
  Description of Artificial Sequence: Synthetic oligonucleotide
  Target: LAMA2; (+) strand; PAM type: NRG; PAM sequence: TAG
ttcttataatctagcatttt

SEQ ID NO: 119708 - DNA, 20 bp, Artificial Sequence
  Description of Artificial Sequence: Synthetic oligonucleotide
  Target: LAMA2; (+) strand; PAM type: NRG; PAM sequence: CAG
ttataatctagcatttttag

SEQ ID NO: 119709 - DNA, 20 bp, Artificial Sequence
  Description of Artificial Sequence: Synthetic oligonucleotide
  Target: LAMA2; (+) strand; PAM type: NRG; PAM sequence: AAG
ttttagcagtactatttttt

SEQ ID NO: 119710 - DNA, 20 bp, Artificial Sequence
  Description of Artificial Sequence: Synthetic oligonucleotide
  Target: LAMA2; (+) strand; PAM type: NRG; PAM sequence: AGG
tttagcagtactatttttta

SEQ ID NO: 119711 - DNA, 20 bp, Artificial Sequence
  Description of Artificial Sequence: Synthetic oligonucleotide
  Target: LAMA2; (+) strand; PAM type: NRG; PAM sequence: GAG
tagcagtactattttttaag

SEQ ID NO: 119712 - DNA, 20 bp, Artificial Sequence
  Description of Artificial Sequence: Synthetic oligonucleotide
  Target: LAMA2; (+) strand; PAM type: NRG; PAM sequence: AAG
gtactattttttaaggagta

SEQ ID NO: 119713 - DNA, 20 bp, Artificial Sequence
  Description of Artificial Sequence: Synthetic oligonucleotide
  Target: LAMA2; (+) strand; PAM type: NRG; PAM sequence: GAG
actattttttaaggagtaaa

SEQ ID NO: 119714 - DNA, 20 bp, Artificial Sequence
  Description of Artificial Sequence: Synthetic oligonucleotide
  Target: LAMA2; (+) strand; PAM type: NRG; PAM sequence: AAG
aaggagtaaagagatatccc

SEQ ID NO: 119715 - DNA, 20 bp, Artificial Sequence
  Description of Artificial Sequence: Synthetic oligonucleotide
  Target: LAMA2; (+) strand; PAM type: NRG; PAM sequence: TGG
aactccctgattaaaattct

SEQ ID NO: 119716 - DNA, 20 bp, Artificial Sequence
  Description of Artificial Sequence: Synthetic oligonucleotide
  Target: LAMA2; (+) strand; PAM type: NRG; PAM sequence: GAG
atttttgcttttgcttctct

SEQ ID NO: 119717 - DNA, 20 bp, Artificial Sequence
  Description of Artificial Sequence: Synthetic oligonucleotide
  Target: LAMA2; (+) strand; PAM type: NRG; PAM sequence: GAG
ttttgcttttgcttctctga

SEQ ID NO: 119718 - DNA, 20 bp, Artificial Sequence
  Description of Artificial Sequence: Synthetic oligonucleotide
  Target: LAMA2; (+) strand; PAM type: NRG; PAM sequence: AGG
tttgcttttgcttctctgag

SEQ ID NO: 119719 - DNA, 20 bp, Artificial Sequence
  Description of Artificial Sequence: Synthetic oligonucleotide
  Target: LAMA2; (+) strand; PAM type: NRG; PAM sequence: TGG
tgcttctctgagaggtaaaa

SEQ ID NO: 119720 - DNA, 20 bp, Artificial Sequence
  Description of Artificial Sequence: Synthetic oligonucleotide
  Target: LAMA2; (+) strand; PAM type: NRG; PAM sequence: GGG
gcttctctgagaggtaaaat

SEQ ID NO: 119721 - DNA, 20 bp, Artificial Sequence
  Description of Artificial Sequence: Synthetic oligonucleotide
  Target: LAMA2; (+) strand; PAM type: NRG; PAM sequence: GGG
cttctctgagaggtaaaatg

SEQ ID NO: 119722 - DNA, 20 bp, Artificial Sequence
  Description of Artificial Sequence: Synthetic oligonucleotide
  Target: LAMA2; (+) strand; PAM type: NRG; PAM sequence: GAG
acttaattaatataatttac

SEQ ID NO: 119723 - DNA, 20 bp, Artificial Sequence
  Description of Artificial Sequence: Synthetic oligonucleotide
  Target: LAMA2; (+) strand; PAM type: NRG; PAM sequence: GAG
ttaattaatataatttacga

SEQ ID NO: 119724 - DNA, 20 bp, Artificial Sequence
  Description of Artificial Sequence: Synthetic oligonucleotide
  Target: LAMA2; (+) strand; PAM type: NRG; PAM sequence: AAG
taatttacgagagtgatttt

SEQ ID NO: 119725 - DNA, 20 bp, Artificial Sequence
  Description of Artificial Sequence: Synthetic oligonucleotide
  Target: LAMA2; (+) strand; PAM type: NRG; PAM sequence: GAG
atttacgagagtgattttaa

SEQ ID NO: 119726 - DNA, 20 bp, Artificial Sequence
  Description of Artificial Sequence: Synthetic oligonucleotide
  Target: LAMA2; (+) strand; PAM type: NRG; PAM sequence: TGG
agtgattttaagagtatctc

SEQ ID NO: 119727 - DNA, 20 bp, Artificial Sequence
  Description of Artificial Sequence: Synthetic oligonucleotide
  Target: LAMA2; (+) strand; PAM type: NRG; PAM sequence: AAG
attaaactttgctcaattac

SEQ ID NO: 119728 - DNA, 20 bp, Artificial Sequence
  Description of Artificial Sequence: Synthetic oligonucleotide
  Target: LAMA2; (+) strand; PAM type: NRG; PAM sequence: AGG
ttaaactttgctcaattaca

SEQ ID NO: 119729 - DNA, 20 bp, Artificial Sequence
  Description of Artificial Sequence: Synthetic oligonucleotide
  Target: LAMA2; (+) strand; PAM type: NRG; PAM sequence: AAG
attacaaggtgtgtttaaac

SEQ ID NO: 119730 - DNA, 20 bp, Artificial Sequence
  Description of Artificial Sequence: Synthetic oligonucleotide
  Target: LAMA2; (+) strand; PAM type: NRG; PAM sequence: TAG
acataatactttaataatgt

SEQ ID NO: 119731 - DNA, 20 bp, Artificial Sequence
  Description of Artificial Sequence: Synthetic oligonucleotide
  Target: LAMA2; (+) strand; PAM type: NRG; PAM sequence: AGG
cataatactttaataatgtt

SEQ ID NO: 119732 - DNA, 20 bp, Artificial Sequence
  Description of Artificial Sequence: Synthetic oligonucleotide
  Target: LAMA2; (+) strand; PAM type: NRG; PAM sequence: CAG
aatactttaataatgttagg

SEQ ID NO: 119733 - DNA, 20 bp, Artificial Sequence
  Description of Artificial Sequence: Synthetic oligonucleotide
  Target: LAMA2; (+) strand; PAM type: NRG; PAM sequence: TGG
ctttaataatgttaggcagc

SEQ ID NO: 119734 - DNA, 20 bp, Artificial Sequence
  Description of Artificial Sequence: Synthetic oligonucleotide
  Target: LAMA2; (+) strand; PAM type: NRG; PAM sequence: GGG
tttaataatgttaggcagct

SEQ ID NO: 119735 - DNA, 20 bp, Artificial Sequence
  Description of Artificial Sequence: Synthetic oligonucleotide
  Target: LAMA2; (+) strand; PAM type: NRG; PAM sequence: GAG
taataatgttaggcagctgg

SEQ ID NO: 119736 - DNA, 20 bp, Artificial Sequence
  Description of Artificial Sequence: Synthetic oligonucleotide
  Target: LAMA2; (+) strand; PAM type: NRG; PAM sequence: GAG
gttaggcagctgggagaaat

SEQ ID NO: 119737 - DNA, 20 bp, Artificial Sequence
  Description of Artificial Sequence: Synthetic oligonucleotide
  Target: LAMA2; (+) strand; PAM type: NRG; PAM sequence: AGG
ttaggcagctgggagaaatg

SEQ ID NO: 119738 - DNA, 20 bp, Artificial Sequence
  Description of Artificial Sequence: Synthetic oligonucleotide
  Target: LAMA2; (+) strand; PAM type: NRG; PAM sequence: GGG
taggcagctgggagaaatga

SEQ ID NO: 119739 - DNA, 20 bp, Artificial Sequence
  Description of Artificial Sequence: Synthetic oligonucleotide
  Target: LAMA2; (+) strand; PAM type: NRG; PAM sequence: GGG
aggcagctgggagaaatgag

SEQ ID NO: 119740 - DNA, 20 bp, Artificial Sequence
  Description of Artificial Sequence: Synthetic oligonucleotide
  Target: LAMA2; (+) strand; PAM type: NRG; PAM sequence: CAG
agctgggagaaatgaggggc

SEQ ID NO: 119741 - DNA, 20 bp, Artificial Sequence
  Description of Artificial Sequence: Synthetic oligonucleotide
  Target: LAMA2; (+) strand; PAM type: NRG; PAM sequence: AGG
gctgggagaaatgaggggcc

SEQ ID NO: 119742 - DNA, 20 bp, Artificial Sequence
  Description of Artificial Sequence: Synthetic oligonucleotide
  Target: LAMA2; (+) strand; PAM type: NRG; PAM sequence: GGG
ctgggagaaatgaggggcca

SEQ ID NO: 119743 - DNA, 20 bp, Artificial Sequence
  Description of Artificial Sequence: Synthetic oligonucleotide
  Target: LAMA2; (+) strand; PAM type: NRG; PAM sequence: GGG
tgggagaaatgaggggccag

SEQ ID NO: 119744 - DNA, 20 bp, Artificial Sequence
  Description of Artificial Sequence: Synthetic oligonucleotide
  Target: LAMA2; (+) strand; PAM type: NRG; PAM sequence: TGG
caccaatccttatgtccact

SEQ ID NO: 119745 - DNA, 20 bp, Artificial Sequence
  Description of Artificial Sequence: Synthetic oligonucleotide
  Target: LAMA2; (+) strand; PAM type: NRG; PAM sequence: TGG
atccttatgtccacttggaa

SEQ ID NO: 119746 - DNA, 20 bp, Artificial Sequence
  Description of Artificial Sequence: Synthetic oligonucleotide
  Target: LAMA2; (+) strand; PAM type: NRG; PAM sequence: GGG
tccttatgtccacttggaat

SEQ ID NO: 119747 - DNA, 20 bp, Artificial Sequence
  Description of Artificial Sequence: Synthetic oligonucleotide
  Target: LAMA2; (+) strand; PAM type: NRG; PAM sequence: GGG
ccttatgtccacttggaatg

SEQ ID NO: 119748 - DNA, 20 bp, Artificial Sequence
  Description of Artificial Sequence: Synthetic oligonucleotide
  Target: LAMA2; (+) strand; PAM type: NRG; PAM sequence: CAG
tatgtccacttggaatgggg

SEQ ID NO: 119749 - DNA, 20 bp, Artificial Sequence
  Description of Artificial Sequence: Synthetic oligonucleotide
  Target: LAMA2; (+) strand; PAM type: NRG; PAM sequence: AAG
tggaatggggcagaaactca

SEQ ID NO: 119750 - DNA, 20 bp, Artificial Sequence
  Description of Artificial Sequence: Synthetic oligonucleotide
  Target: LAMA2; (+) strand; PAM type: NRG; PAM sequence: CAG
gggcagaaactcaaagcatg

SEQ ID NO: 119751 - DNA, 20 bp, Artificial Sequence
  Description of Artificial Sequence: Synthetic oligonucleotide
  Target: LAMA2; (+) strand; PAM type: NRG; PAM sequence: GAG
gcagaaactcaaagcatgca

SEQ ID NO: 119752 - DNA, 20 bp, Artificial Sequence
  Description of Artificial Sequence: Synthetic oligonucleotide
  Target: LAMA2; (+) strand; PAM type: NRG; PAM sequence: AAG
aaactcaaagcatgcagagt

SEQ ID NO: 119753 - DNA, 20 bp, Artificial Sequence
  Description of Artificial Sequence: Synthetic oligonucleotide
  Target: LAMA2; (+) strand; PAM type: NRG; PAM sequence: AGG
aactcaaagcatgcagagta

SEQ ID NO: 119754 - DNA, 20 bp, Artificial Sequence
  Description of Artificial Sequence: Synthetic oligonucleotide
  Target: LAMA2; (+) strand; PAM type: NRG; PAM sequence: AAG
aagcatgcagagtaaggatc

SEQ ID NO: 119755 - DNA, 20 bp, Artificial Sequence
  Description of Artificial Sequence: Synthetic oligonucleotide
  Target: LAMA2; (+) strand; PAM type: NRG; PAM sequence: AAG
ggatcaagtaaattgttgct

SEQ ID NO: 119756 - DNA, 20 bp, Artificial Sequence
  Description of Artificial Sequence: Synthetic oligonucleotide
  Target: LAMA2; (+) strand; PAM type: NRG; PAM sequence: CAG
agaattatcctgaacacaca

SEQ ID NO: 119757 - DNA, 20 bp, Artificial Sequence
  Description of Artificial Sequence: Synthetic oligonucleotide
  Target: LAMA2; (+) strand; PAM type: NRG; PAM sequence: AGG
gaattatcctgaacacacac

SEQ ID NO: 119758 - DNA, 20 bp, Artificial Sequence
  Description of Artificial Sequence: Synthetic oligonucleotide
  Target: LAMA2; (+) strand; PAM type: NRG; PAM sequence: AAG
tatttactctcttttcaaat

SEQ ID NO: 119759 - DNA, 20 bp, Artificial Sequence
  Description of Artificial Sequence: Synthetic oligonucleotide
  Target: LAMA2; (+) strand; PAM type: NRG; PAM sequence: AGG
atttactctcttttcaaata

SEQ ID NO: 119760 - DNA, 20 bp, Artificial Sequence
  Description of Artificial Sequence: Synthetic oligonucleotide
  Target: LAMA2; (+) strand; PAM type: NRG; PAM sequence: CAG
taactctgatttctatgacc

SEQ ID NO: 119761 - DNA, 20 bp, Artificial Sequence
  Description of Artificial Sequence: Synthetic oligonucleotide
  Target: LAMA2; (+) strand; PAM type: NRG; PAM sequence: AGG
aactctgatttctatgaccc

SEQ ID NO: 119762 - DNA, 20 bp, Artificial Sequence
  Description of Artificial Sequence: Synthetic oligonucleotide
  Target: LAMA2; (+) strand; PAM type: NRG; PAM sequence: AAG
gatttctatgacccaggcac

SEQ ID NO: 119763 - DNA, 20 bp, Artificial Sequence
  Description of Artificial Sequence: Synthetic oligonucleotide
  Target: LAMA2; (+) strand; PAM type: NRG; PAM sequence: AAG
tatgacccaggcacaagatg

SEQ ID NO: 119764 - DNA, 20 bp, Artificial Sequence
  Description of Artificial Sequence: Synthetic oligonucleotide
  Target: LAMA2; (+) strand; PAM type: NRG; PAM sequence: CAG
ggcacaagatgaagtgaatt

SEQ ID NO: 119765 - DNA, 20 bp, Artificial Sequence
  Description of Artificial Sequence: Synthetic oligonucleotide
  Target: LAMA2; (+) strand; PAM type: NRG; PAM sequence: AGG
gcacaagatgaagtgaattc

SEQ ID NO: 119766 - DNA, 20 bp, Artificial Sequence
  Description of Artificial Sequence: Synthetic oligonucleotide
  Target: LAMA2; (+) strand; PAM type: NRG; PAM sequence: GAG
acaagatgaagtgaattcag

SEQ ID NO: 119767 - DNA, 20 bp, Artificial Sequence
  Description of Artificial Sequence: Synthetic oligonucleotide
  Target: LAMA2; (+) strand; PAM type: NRG; PAM sequence: AGG
caagatgaagtgaattcagg

SEQ ID NO: 119768 - DNA, 20 bp, Artificial Sequence
  Description of Artificial Sequence: Synthetic oligonucleotide
  Target: LAMA2; (+) strand; PAM type: NRG; PAM sequence: AAG
gatgaagtgaattcaggagg

SEQ ID NO: 119769 - DNA, 20 bp, Artificial Sequence
  Description of Artificial Sequence: Synthetic oligonucleotide
  Target: LAMA2; (+) strand; PAM type: NRG; PAM sequence: AGG
atgaagtgaattcaggagga

SEQ ID NO: 119770 - DNA, 20 bp, Artificial Sequence
  Description of Artificial Sequence: Synthetic oligonucleotide
  Target: LAMA2; (+) strand; PAM type: NRG; PAM sequence: GGG
tgaagtgaattcaggaggaa

SEQ ID NO: 119771 - DNA, 20 bp, Artificial Sequence
  Description of Artificial Sequence: Synthetic oligonucleotide
  Target: LAMA2; (+) strand; PAM type: NRG; PAM sequence: AAG
gtttatactaccattctgtc

SEQ ID NO: 119772 - DNA, 20 bp, Artificial Sequence
  Description of Artificial Sequence: Synthetic oligonucleotide
  Target: LAMA2; (+) strand; PAM type: NRG; PAM sequence: AAG
acttaaatgctacatacaat

SEQ ID NO: 119773 - DNA, 20 bp, Artificial Sequence
  Description of Artificial Sequence: Synthetic oligonucleotide
  Target: LAMA2; (+) strand; PAM type: NRG; PAM sequence: AGG
cttaaatgctacatacaata

SEQ ID NO: 119774 - DNA, 20 bp, Artificial Sequence
  Description of Artificial Sequence: Synthetic oligonucleotide
  Target: LAMA2; (+) strand; PAM type: NRG; PAM sequence: TAG
ataaggaattttattcaaaa

SEQ ID NO: 119775 - DNA, 20 bp, Artificial Sequence
  Description of Artificial Sequence: Synthetic oligonucleotide
  Target: LAMA2; (+) strand; PAM type: NRG; PAM sequence: TAG
ctacaacatacaatctacta

SEQ ID NO: 119776 - DNA, 20 bp, Artificial Sequence
  Description of Artificial Sequence: Synthetic oligonucleotide
  Target: LAMA2; (+) strand; PAM type: NRG; PAM sequence: AGG
tacaacatacaatctactat

SEQ ID NO: 119777 - DNA, 20 bp, Artificial Sequence
  Description of Artificial Sequence: Synthetic oligonucleotide
  Target: LAMA2; (+) strand; PAM type: NRG; PAM sequence: TAG
ggctgctataatctgcattc

SEQ ID NO: 119778 - DNA, 20 bp, Artificial Sequence
  Description of Artificial Sequence: Synthetic oligonucleotide
  Target: LAMA2; (+) strand; PAM type: NRG; PAM sequence: TAG
atatattattgtctttgtca

SEQ ID NO: 119779 - DNA, 20 bp, Artificial Sequence
  Description of Artificial Sequence: Synthetic oligonucleotide
  Target: LAMA2; (+) strand; PAM type: NRG; PAM sequence: TGG
tagaccatttacaatatatc

SEQ ID NO: 119780 - DNA, 20 bp, Artificial Sequence
  Description of Artificial Sequence: Synthetic oligonucleotide
  Target: LAMA2; (+) strand; PAM type: NRG; PAM sequence: GAG
gaccatttacaatatatctg

SEQ ID NO: 119781 - DNA, 20 bp, Artificial Sequence
  Description of Artificial Sequence: Synthetic oligonucleotide
  Target: LAMA2; (+) strand; PAM type: NRG; PAM sequence: AGG
accatttacaatatatctgg

SEQ ID NO: 119782 - DNA, 20 bp, Artificial Sequence
  Description of Artificial Sequence: Synthetic oligonucleotide
  Target: LAMA2; (+) strand; PAM type: NRG; PAM sequence: TGG
tttacaatatatctggaggt

SEQ ID NO: 119783 - DNA, 20 bp, Artificial Sequence
  Description of Artificial Sequence: Synthetic oligonucleotide
  Target: LAMA2; (+) strand; PAM type: NRG; PAM sequence: AAG
atatatctggaggttggctc

SEQ ID NO: 119784 - DNA, 20 bp, Artificial Sequence
  Description of Artificial Sequence: Synthetic oligonucleotide
  Target: LAMA2; (+) strand; PAM type: NRG; PAM sequence: AGG
tatatctggaggttggctca

SEQ ID NO: 119785 - DNA, 20 bp, Artificial Sequence
  Description of Artificial Sequence: Synthetic oligonucleotide
  Target: LAMA2; (+) strand; PAM type: NRG; PAM sequence: AAG
cttaaacctgttaatgttga

SEQ ID NO: 119786 - DNA, 20 bp, Artificial Sequence
  Description of Artificial Sequence: Synthetic oligonucleotide
  Target: LAMA2; (+) strand; PAM type: NRG; PAM sequence: TGG
aattcatgaaactttaaaat

SEQ ID NO: 119787 - DNA, 20 bp, Artificial Sequence
  Description of Artificial Sequence: Synthetic oligonucleotide
  Target: LAMA2; (+) strand; PAM type: NRG; PAM sequence: TAG
catgaaactttaaaattgga

SEQ ID NO: 119788 - DNA, 20 bp, Artificial Sequence
  Description of Artificial Sequence: Synthetic oligonucleotide
  Target: LAMA2; (+) strand; PAM type: NRG; PAM sequence: CAG
acacgatctttattcacctt

SEQ ID NO: 119789 - DNA, 20 bp, Artificial Sequence
  Description of Artificial Sequence: Synthetic oligonucleotide
  Target: LAMA2; (+) strand; PAM type: NRG; PAM sequence: AAG
ttcagatattattattctca

SEQ ID NO: 119790 - DNA, 20 bp, Artificial Sequence
  Description of Artificial Sequence: Synthetic oligonucleotide
  Target: LAMA2; (+) strand; PAM type: NRG; PAM sequence: AGG
tcagatattattattctcaa

SEQ ID NO: 119791 - DNA, 20 bp, Artificial Sequence
  Description of Artificial Sequence: Synthetic oligonucleotide
  Target: LAMA2; (+) strand; PAM type: NRG; PAM sequence: TAG
ttattctcaaaggacaaatt

SEQ ID NO: 119792 - DNA, 20 bp, Artificial Sequence
  Description of Artificial Sequence: Synthetic oligonucleotide
  Target: LAMA2; (+) strand; PAM type: NRG; PAM sequence: TAG
caaaggacaaatttagaact

SEQ ID NO: 119793 - DNA, 20 bp, Artificial Sequence
  Description of Artificial Sequence: Synthetic oligonucleotide
  Target: LAMA2; (+) strand; PAM type: NRG; PAM sequence: AGG
aaaggacaaatttagaactt

SEQ ID NO: 119794 - DNA, 20 bp, Artificial Sequence
  Description of Artificial Sequence: Synthetic oligonucleotide
  Target: LAMA2; (+) strand; PAM type: NRG; PAM sequence: CAG
aaatttagaacttaggcttc

SEQ ID NO: 119795 - DNA, 20 bp, Artificial Sequence
  Description of Artificial Sequence: Synthetic oligonucleotide
  Target: LAMA2; (+) strand; PAM type: NRG; PAM sequence: TAG
tttagaacttaggcttccag

SEQ ID NO: 119796 - DNA, 20 bp, Artificial Sequence
  Description of Artificial Sequence: Synthetic oligonucleotide
  Target: LAMA2; (+) strand; PAM type: NRG; PAM sequence: AAG
gcttccagtagttgtaattt

SEQ ID NO: 119797 - DNA, 20 bp, Artificial Sequence
  Description of Artificial Sequence: Synthetic oligonucleotide
  Target: LAMA2; (+) strand; PAM type: NRG; PAM sequence: CGG
ttcaacaactaaaacacttc

SEQ ID NO: 119798 - DNA, 20 bp, Artificial Sequence
  Description of Artificial Sequence: Synthetic oligonucleotide
  Target: LAMA2; (+) strand; PAM type: NRG; PAM sequence: TGG
gtgctgaattccctttttta

SEQ ID NO: 119799 - DNA, 20 bp, Artificial Sequence
  Description of Artificial Sequence: Synthetic oligonucleotide
  Target: LAMA2; (+) strand; PAM type: NRG; PAM sequence: AAG
attcccttttttatggttcc

SEQ ID NO: 119800 - DNA, 20 bp, Artificial Sequence
  Description of Artificial Sequence: Synthetic oligonucleotide
  Target: LAMA2; (+) strand; PAM type: NRG; PAM sequence: AGG
ttcccttttttatggttcca

SEQ ID NO: 119801 - DNA, 20 bp, Artificial Sequence
  Description of Artificial Sequence: Synthetic oligonucleotide
  Target: LAMA2; (+) strand; PAM type: NRG; PAM sequence: TAG
gtttctttccattaattgtt

SEQ ID NO: 119802 - DNA, 20 bp, Artificial Sequence
  Description of Artificial Sequence: Synthetic oligonucleotide
  Target: LAMA2; (+) strand; PAM type: NRG; PAM sequence: AGG
tttctttccattaattgttt

SEQ ID NO: 119803 - DNA, 20 bp, Artificial Sequence
  Description of Artificial Sequence: Synthetic oligonucleotide
  Target: LAMA2; (+) strand; PAM type: NRG; PAM sequence: TAG
tttaggccatgttttctttt

SEQ ID NO: 119804 - DNA, 20 bp, Artificial Sequence
  Description of Artificial Sequence: Synthetic oligonucleotide
  Target: LAMA2; (+) strand; PAM type: NRG; PAM sequence: AAG
tttttagtgttgttccattg

SEQ ID NO: 119805 - DNA, 20 bp, Artificial Sequence
  Description of Artificial Sequence: Synthetic oligonucleotide
  Target: LAMA2; (+) strand; PAM type: NRG; PAM sequence: AAG
tagtgttgttccattgaagc

SEQ ID NO: 119806 - DNA, 20 bp, Artificial Sequence
  Description of Artificial Sequence: Synthetic oligonucleotide
  Target: LAMA2; (+) strand; PAM type: NRG; PAM sequence: CGG
caagccctctgtgaaaatca

SEQ ID NO: 119807 - DNA, 20 bp, Artificial Sequence
  Description of Artificial Sequence: Synthetic oligonucleotide
  Target: LAMA2; (+) strand; PAM type: NRG; PAM sequence: GGG
aagccctctgtgaaaatcac

SEQ ID NO: 119808 - DNA, 20 bp, Artificial Sequence
  Description of Artificial Sequence: Synthetic oligonucleotide
  Target: LAMA2; (+) strand; PAM type: NRG; PAM sequence: GAG
ctgtgaaaatcacgggatat

SEQ ID NO: 119809 - DNA, 20 bp, Artificial Sequence
  Description of Artificial Sequence: Synthetic oligonucleotide
  Target: LAMA2; (+) strand; PAM type: NRG; PAM sequence: TGG
tcacgggatatgagtttgac

SEQ ID NO: 119810 - DNA, 20 bp, Artificial Sequence
  Description of Artificial Sequence: Synthetic oligonucleotide
  Target: LAMA2; (+) strand; PAM type: NRG; PAM sequence: GAG
acgggatatgagtttgactg

SEQ ID NO: 119811 - DNA, 20 bp, Artificial Sequence
  Description of Artificial Sequence: Synthetic oligonucleotide
  Target: LAMA2; (+) strand; PAM type: NRG; PAM sequence: AAG
ggatatgagtttgactggag

SEQ ID NO: 119812 - DNA, 20 bp, Artificial Sequence
  Description of Artificial Sequence: Synthetic oligonucleotide
  Target: LAMA2; (+) strand; PAM type: NRG; PAM sequence: AGG
gatatgagtttgactggaga

SEQ ID NO: 119813 - DNA, 20 bp, Artificial Sequence
  Description of Artificial Sequence: Synthetic oligonucleotide
  Target: LAMA2; (+) strand; PAM type: NRG; PAM sequence: GGG
atatgagtttgactggagaa

SEQ ID NO: 119814 - DNA, 20 bp, Artificial Sequence
  Description of Artificial Sequence: Synthetic oligonucleotide
  Target: LAMA2; (+) strand; PAM type: NRG; PAM sequence: TGG
tgactggagaagggttttcc

SEQ ID NO: 119815 - DNA, 20 bp, Artificial Sequence
  Description of Artificial Sequence: Synthetic oligonucleotide
  Target: LAMA2; (+) strand; PAM type: NRG; PAM sequence: TAG
ttttctgttttcgattatac

SEQ ID NO: 119816 - DNA, 20 bp, Artificial Sequence
  Description of Artificial Sequence: Synthetic oligonucleotide
  Target: LAMA2; (+) strand; PAM type: NRG; PAM sequence: TAG
tatactagcactgacctttc

SEQ ID NO: 119817 - DNA, 20 bp, Artificial Sequence
  Description of Artificial Sequence: Synthetic oligonucleotide
  Target: LAMA2; (+) strand; PAM type: NRG; PAM sequence: AGG
atactagcactgacctttct

SEQ ID NO: 119818 - DNA, 20 bp, Artificial Sequence
  Description of Artificial Sequence: Synthetic oligonucleotide
  Target: LAMA2; (+) strand; PAM type: NRG; PAM sequence: AAG
tagcactgacctttctaggc

SEQ ID NO: 119819 - DNA, 20 bp, Artificial Sequence
  Description of Artificial Sequence: Synthetic oligonucleotide
  Target: LAMA2; (+) strand; PAM type: NRG; PAM sequence: TAG
ctaggcaagcgctaattgtg

SEQ ID NO: 119820 - DNA, 20 bp, Artificial Sequence
  Description of Artificial Sequence: Synthetic oligonucleotide
  Target: LAMA2; (+) strand; PAM type: NRG; PAM sequence: AAG
ggcaagcgctaattgtgtag

SEQ ID NO: 119821 - DNA, 20 bp, Artificial Sequence
  Description of Artificial Sequence: Synthetic oligonucleotide
  Target: LAMA2; (+) strand; PAM type: NRG; PAM sequence: AAG
taattcgataccactttatt

SEQ ID NO: 119822 - DNA, 20 bp, Artificial Sequence
  Description of Artificial Sequence: Synthetic oligonucleotide
  Target: LAMA2; (+) strand; PAM type: NRG; PAM sequence: TAG
tgacatgaatcaaccatttt

SEQ ID NO: 119823 - DNA, 20 bp, Artificial Sequence
  Description of Artificial Sequence: Synthetic oligonucleotide
  Target: LAMA2; (+) strand; PAM type: NRG; PAM sequence: CAG
tcaaccatttttagatgttg

SEQ ID NO: 119824 - DNA, 20 bp, Artificial Sequence
  Description of Artificial Sequence: Synthetic oligonucleotide
  Target: LAMA2; (+) strand; PAM type: NRG; PAM sequence: GAG
catttttagatgttgcagtt

SEQ ID NO: 119825 - DNA, 20 bp, Artificial Sequence
  Description of Artificial Sequence: Synthetic oligonucleotide
  Target: LAMA2; (+) strand; PAM type: NRG; PAM sequence: TAG
tttagatgttgcagttgagt

SEQ ID NO: 119826 - DNA, 20 bp, Artificial Sequence
  Description of Artificial Sequence: Synthetic oligonucleotide
  Target: LAMA2; (+) strand; PAM type: NRG; PAM sequence: CAG
agttgagttagaaacataac

SEQ ID NO: 119827 - DNA, 20 bp, Artificial Sequence
  Description of Artificial Sequence: Synthetic oligonucleotide
  Target: LAMA2; (+) strand; PAM type: NRG; PAM sequence: TGG
tttttctttgaaatcttatg

SEQ ID NO: 119828 - DNA, 20 bp, Artificial Sequence
  Description of Artificial Sequence: Synthetic oligonucleotide
  Target: LAMA2; (+) strand; PAM type: NRG; PAM sequence: TAG
gaaatcttatgtggtttcta

SEQ ID NO: 119829 - DNA, 20 bp, Artificial Sequence
  Description of Artificial Sequence: Synthetic oligonucleotide
  Target: LAMA2; (+) strand; PAM type: NRG; PAM sequence: TAG
ttctatagcatactcgattg

SEQ ID NO: 119830 - DNA, 20 bp, Artificial Sequence
  Description of Artificial Sequence: Synthetic oligonucleotide
  Target: LAMA2; (+) strand; PAM type: NRG; PAM sequence: TAG
atactcgattgtagtatgaa

SEQ ID NO: 119831 - DNA, 20 bp, Artificial Sequence
  Description of Artificial Sequence: Synthetic oligonucleotide
  Target: LAMA2; (+) strand; PAM type: NRG; PAM sequence: CAG
tagtatgaatagcattgatt

SEQ ID NO: 119832 - DNA, 20 bp, Artificial Sequence
  Description of Artificial Sequence: Synthetic oligonucleotide
  Target: LAMA2; (+) strand; PAM type: NRG; PAM sequence: AAG
atgaatagcattgattcagc

SEQ ID NO: 119833 - DNA, 20 bp, Artificial Sequence
  Description of Artificial Sequence: Synthetic oligonucleotide
  Target: LAMA2; (+) strand; PAM type: NRG; PAM sequence: AAG
ttcagcaagaatgatattcc

SEQ ID NO: 119834 - DNA, 20 bp, Artificial Sequence
  Description of Artificial Sequence: Synthetic oligonucleotide
  Target: LAMA2; (+) strand; PAM type: NRG; PAM sequence: AGG
tcagcaagaatgatattcca

SEQ ID NO: 119835 - DNA, 20 bp, Artificial Sequence
  Description of Artificial Sequence: Synthetic oligonucleotide
  Target: LAMA2; (+) strand; PAM type: NRG; PAM sequence: TAG
gatattccaaggaaattctt

SEQ ID NO: 119836 - DNA, 20 bp, Artificial Sequence
  Description of Artificial Sequence: Synthetic oligonucleotide
  Target: LAMA2; (+) strand; PAM type: NRG; PAM sequence: TAG
tatatttaaaattgacgaaa

SEQ ID NO: 119837 - DNA, 20 bp, Artificial Sequence
  Description of Artificial Sequence: Synthetic oligonucleotide
  Target: LAMA2; (+) strand; PAM type: NRG; PAM sequence: CAG
atcaaaatgattctgcattt

SEQ ID NO: 119838 - DNA, 20 bp, Artificial Sequence
  Description of Artificial Sequence: Synthetic oligonucleotide
  Target: LAMA2; (+) strand; PAM type: NRG; PAM sequence: AAG
aaatgattctgcatttcagc

SEQ ID NO: 119839 - DNA, 20 bp, Artificial Sequence
  Description of Artificial Sequence: Synthetic oligonucleotide
  Target: LAMA2; (+) strand; PAM type: NRG; PAM sequence: AGG
aatgattctgcatttcagca

SEQ ID NO: 119840 - DNA, 20 bp, Artificial Sequence
  Description of Artificial Sequence: Synthetic oligonucleotide
  Target: LAMA2; (+) strand; PAM type: NRG; PAM sequence: CAG
gattctgcatttcagcaagg

SEQ ID NO: 119841 - DNA, 20 bp, Artificial Sequence
  Description of Artificial Sequence: Synthetic oligonucleotide
  Target: LAMA2; (+) strand; PAM type: NRG; PAM sequence: TGG
atattcttgtgaataatatg

SEQ ID NO: 119842 - DNA, 20 bp, Artificial Sequence
  Description of Artificial Sequence: Synthetic oligonucleotide
  Target: LAMA2; (+) strand; PAM type: NRG; PAM sequence: AAG
tgaataatatgtggaaactg

SEQ ID NO: 119843 - DNA, 20 bp, Artificial Sequence
  Description of Artificial Sequence: Synthetic oligonucleotide
  Target: LAMA2; (+) strand; PAM type: NRG; PAM sequence: TGG
atgtggaaactgaagcataa

SEQ ID NO: 119844 - DNA, 20 bp, Artificial Sequence
  Description of Artificial Sequence: Synthetic oligonucleotide
  Target: LAMA2; (+) strand; PAM type: NRG; PAM sequence: CAG
tggaaactgaagcataatgg

SEQ ID NO: 119845 - DNA, 20 bp, Artificial Sequence
  Description of Artificial Sequence: Synthetic oligonucleotide
  Target: LAMA2; (+) strand; PAM type: NRG; PAM sequence: AGG
ggaaactgaagcataatggc

SEQ ID NO: 119846 - DNA, 20 bp, Artificial Sequence
  Description of Artificial Sequence: Synthetic oligonucleotide
  Target: LAMA2; (+) strand; PAM type: NRG; PAM sequence: TAG
aattgcaactgattgaaaaa

SEQ ID NO: 119847 - DNA, 20 bp, Artificial Sequence
  Description of Artificial Sequence: Synthetic oligonucleotide
  Target: LAMA2; (+) strand; PAM type: NRG; PAM sequence: AAG
tgattgaaaaatagttcaca

SEQ ID NO: 119848 - DNA, 20 bp, Artificial Sequence
  Description of Artificial Sequence: Synthetic oligonucleotide
  Target: LAMA2; (+) strand; PAM type: NRG; PAM sequence: TAG
agttcacaaagaatattgca

SEQ ID NO: 119849 - DNA, 20 bp, Artificial Sequence
  Description of Artificial Sequence: Synthetic oligonucleotide
  Target: LAMA2; (+) strand; PAM type: NRG; PAM sequence: TGG
tcacaaagaatattgcatag

SEQ ID NO: 119850 - DNA, 20 bp, Artificial Sequence
  Description of Artificial Sequence: Synthetic oligonucleotide
  Target: LAMA2; (+) strand; PAM type: NRG; PAM sequence: AAG
agaatattgcatagtggatt

SEQ ID NO: 119851 - DNA, 20 bp, Artificial Sequence
  Description of Artificial Sequence: Synthetic oligonucleotide
  Target: LAMA2; (+) strand; PAM type: NRG; PAM sequence: AGG
gaatattgcatagtggatta

SEQ ID NO: 119852 - DNA, 20 bp, Artificial Sequence
  Description of Artificial Sequence: Synthetic oligonucleotide
  Target: LAMA2; (+) strand; PAM type: NRG; PAM sequence: CGG
atagtggattaaggtcaatc

SEQ ID NO: 119853 - DNA, 20 bp, Artificial Sequence
  Description of Artificial Sequence: Synthetic oligonucleotide
  Target: LAMA2; (+) strand; PAM type: NRG; PAM sequence: AAG
tggattaaggtcaatccgga

SEQ ID NO: 119854 - DNA, 20 bp, Artificial Sequence
  Description of Artificial Sequence: Synthetic oligonucleotide
  Target: LAMA2; (+) strand; PAM type: NRG; PAM sequence: AAG
attaaggtcaatccggaaag

SEQ ID NO: 119855 - DNA, 20 bp, Artificial Sequence
  Description of Artificial Sequence: Synthetic oligonucleotide
  Target: LAMA2; (+) strand; PAM type: NRG; PAM sequence: TAG
tcaatccggaaagaagtctc

SEQ ID NO: 119856 - DNA, 20 bp, Artificial Sequence
  Description of Artificial Sequence: Synthetic oligonucleotide
  Target: LAMA2; (+) strand; PAM type: NRG; PAM sequence: CAG
atccggaaagaagtctctag

SEQ ID NO: 119857 - DNA, 20 bp, Artificial Sequence
  Description of Artificial Sequence: Synthetic oligonucleotide
  Target: LAMA2; (+) strand; PAM type: NRG; PAM sequence: CAG
agaagtctctagcagtgcaa

SEQ ID NO: 119858 - DNA, 20 bp, Artificial Sequence
  Description of Artificial Sequence: Synthetic oligonucleotide
  Target: LAMA2; (+) strand; PAM type: NRG; PAM sequence: GAG
aagtctctagcagtgcaaca

SEQ ID NO: 119859 - DNA, 20 bp, Artificial Sequence
  Description of Artificial Sequence: Synthetic oligonucleotide
  Target: LAMA2; (+) strand; PAM type: NRG; PAM sequence: AGG
agtctctagcagtgcaacag

SEQ ID NO: 119860 - DNA, 20 bp, Artificial Sequence
  Description of Artificial Sequence: Synthetic oligonucleotide
  Target: LAMA2; (+) strand; PAM type: NRG; PAM sequence: TGG
tttcttatactcaactatct

SEQ ID NO: 119861 - DNA, 20 bp, Artificial Sequence
  Description of Artificial Sequence: Synthetic oligonucleotide
  Target: LAMA2; (+) strand; PAM type: NRG; PAM sequence: TGG
atactcaactatcttggtaa

SEQ ID NO: 119862 - DNA, 20 bp, Artificial Sequence
  Description of Artificial Sequence: Synthetic oligonucleotide
  Target: LAMA2; (+) strand; PAM type: NRG; PAM sequence: TGG
ctatcttggtaatggcttga

SEQ ID NO: 119863 - DNA, 20 bp, Artificial Sequence
  Description of Artificial Sequence: Synthetic oligonucleotide
  Target: LAMA2; (+) strand; PAM type: NRG; PAM sequence: AAG
tgatggaaaatgtaaaatcc

SEQ ID NO: 119864 - DNA, 20 bp, Artificial Sequence
  Description of Artificial Sequence: Synthetic oligonucleotide
  Target: LAMA2; (+) strand; PAM type: NRG; PAM sequence: CAG
aatgtaaaatccaagcttat

SEQ ID NO: 119865 - DNA, 20 bp, Artificial Sequence
  Description of Artificial Sequence: Synthetic oligonucleotide
  Target: LAMA2; (+) strand; PAM type: NRG; PAM sequence: TGG
aagcttatcagaactgcatg

SEQ ID NO: 119866 - DNA, 20 bp, Artificial Sequence
  Description of Artificial Sequence: Synthetic oligonucleotide
  Target: LAMA2; (+) strand; PAM type: NRG; PAM sequence: TAG
tgcatgtggtccaaaattga

SEQ ID NO: 119867 - DNA, 20 bp, Artificial Sequence
  Description of Artificial Sequence: Synthetic oligonucleotide
  Target: LAMA2; (+) strand; PAM type: NRG; PAM sequence: GAG
catgtggtccaaaattgata

SEQ ID NO: 119868 - DNA, 20 bp, Artificial Sequence
  Description of Artificial Sequence: Synthetic oligonucleotide
  Target: LAMA2; (+) strand; PAM type: NRG; PAM sequence: AGG
atgtggtccaaaattgatag

SEQ ID NO: 119869 - DNA, 20 bp, Artificial Sequence
  Description of Artificial Sequence: Synthetic oligonucleotide
  Target: LAMA2; (+) strand; PAM type: NRG; PAM sequence: TGG
tggtccaaaattgatagagg

SEQ ID NO: 119870 - DNA, 20 bp, Artificial Sequence
  Description of Artificial Sequence: Synthetic oligonucleotide
  Target: LAMA2; (+) strand; PAM type: NRG; PAM sequence: AAG
caaaattgatagaggtggct

SEQ ID NO: 119871 - DNA, 20 bp, Artificial Sequence
  Description of Artificial Sequence: Synthetic oligonucleotide
  Target: LAMA2; (+) strand; PAM type: NRG; PAM sequence: TGG
attgatagaggtggctaagc

SEQ ID NO: 119872 - DNA, 20 bp, Artificial Sequence
  Description of Artificial Sequence: Synthetic oligonucleotide
  Target: LAMA2; (+) strand; PAM type: NRG; PAM sequence: AAG
tggctaagctggttactaac

SEQ ID NO: 119873 - DNA, 20 bp, Artificial Sequence
  Description of Artificial Sequence: Synthetic oligonucleotide
  Target: LAMA2; (+) strand; PAM type: NRG; PAM sequence: CAG
aagctggttactaacaagtt

SEQ ID NO: 119874 - DNA, 20 bp, Artificial Sequence
  Description of Artificial Sequence: Synthetic oligonucleotide
  Target: LAMA2; (+) strand; PAM type: NRG; PAM sequence: AAG
taacaagttcagaaatttta

SEQ ID NO: 119875 - DNA, 20 bp, Artificial Sequence
  Description of Artificial Sequence: Synthetic oligonucleotide
  Target: LAMA2; (+) strand; PAM type: NRG; PAM sequence: AGG
aacaagttcagaaattttaa

SEQ ID NO: 119876 - DNA, 20 bp, Artificial Sequence
  Description of Artificial Sequence: Synthetic oligonucleotide
  Target: LAMA2; (+) strand; PAM type: NRG; PAM sequence: TAG
agaaattttaaaggtctcta

SEQ ID NO: 119877 - DNA, 20 bp, Artificial Sequence
  Description of Artificial Sequence: Synthetic oligonucleotide
  Target: LAMA2; (+) strand; PAM type: NRG; PAM sequence: TGG
tctatagccttgaccatgaa

SEQ ID NO: 119878 - DNA, 20 bp, Artificial Sequence
  Description of Artificial Sequence: Synthetic oligonucleotide
  Target: LAMA2; (+) strand; PAM type: NRG; PAM sequence: AAG
ccatgaatggcacctacatg

SEQ ID NO: 119879 - DNA, 20 bp, Artificial Sequence
  Description of Artificial Sequence: Synthetic oligonucleotide
  Target: LAMA2; (+) strand; PAM type: NRG; PAM sequence: AAG
atccacatgttaaaaaaaaa

SEQ ID NO: 119880 - DNA, 20 bp, Artificial Sequence
  Description of Artificial Sequence: Synthetic oligonucleotide
  Target: LAMA2; (+) strand; PAM type: NRG; PAM sequence: TGG
aaagtccatttgtgctcttc

SEQ ID NO: 119881 - DNA, 20 bp, Artificial Sequence
  Description of Artificial Sequence: Synthetic oligonucleotide
  Target: LAMA2; (+) strand; PAM type: NRG; PAM sequence: TAG
atttgtgctcttctggaaat

SEQ ID NO: 119882 - DNA, 20 bp, Artificial Sequence
  Description of Artificial Sequence: Synthetic oligonucleotide
  Target: LAMA2; (+) strand; PAM type: NRG; PAM sequence: TAG
agttacattgtttatatgtt

SEQ ID NO: 119883 - DNA, 20 bp, Artificial Sequence
  Description of Artificial Sequence: Synthetic oligonucleotide
  Target: LAMA2; (+) strand; PAM type: NRG; PAM sequence: AGG
gttacattgtttatatgttt

SEQ ID NO: 119884 - DNA, 20 bp, Artificial Sequence
  Description of Artificial Sequence: Synthetic oligonucleotide
  Target: LAMA2; (+) strand; PAM type: NRG; PAM sequence: AAG
tatgtttaggaatgaatatg

SEQ ID NO: 119885 - DNA, 20 bp, Artificial Sequence
  Description of Artificial Sequence: Synthetic oligonucleotide
  Target: LAMA2; (+) strand; PAM type: NRG; PAM sequence: CAG
tttaggaatgaatatgaaga

SEQ ID NO: 119886 - DNA, 20 bp, Artificial Sequence
  Description of Artificial Sequence: Synthetic oligonucleotide
  Target: LAMA2; (+) strand; PAM type: NRG; PAM sequence: AGG
ttaggaatgaatatgaagac

SEQ ID NO: 119887 - DNA, 20 bp, Artificial Sequence
  Description of Artificial Sequence: Synthetic oligonucleotide
  Target: LAMA2; (+) strand; PAM type: NRG; PAM sequence: AAG
ggaatgaatatgaagacagg

SEQ ID NO: 119888 - DNA, 20 bp, Artificial Sequence
  Description of Artificial Sequence: Synthetic oligonucleotide
  Target: LAMA2; (+) strand; PAM type: NRG; PAM sequence: GAG
aatgaatatgaagacaggaa

SEQ ID NO: 119889 - DNA, 20 bp, Artificial Sequence
  Description of Artificial Sequence: Synthetic oligonucleotide
  Target: LAMA2; (+) strand; PAM type: NRG; PAM sequence: AAG
aatatgaagacaggaagaga

SEQ ID NO: 119890 - DNA, 20 bp, Artificial Sequence
  Description of Artificial Sequence: Synthetic oligonucleotide
  Target: LAMA2; (+) strand; PAM type: NRG; PAM sequence: AGG
atatgaagacaggaagagaa

SEQ ID NO: 119891 - DNA, 20 bp, Artificial Sequence
  Description of Artificial Sequence: Synthetic oligonucleotide
  Target: LAMA2; (+) strand; PAM type: NRG; PAM sequence: CAG
agaaaggccactctgaattg

SEQ ID NO: 119892 - DNA, 20 bp, Artificial Sequence
  Description of Artificial Sequence: Synthetic oligonucleotide
  Target: LAMA2; (+) strand; PAM type: NRG; PAM sequence: AAG
aggccactctgaattgcagc

SEQ ID NO: 119893 - DNA, 20 bp, Artificial Sequence
  Description of Artificial Sequence: Synthetic oligonucleotide
  Target: LAMA2; (+) strand; PAM type: NRG; PAM sequence: TAG
gcaagttcgatatgaacata

SEQ ID NO: 119894 - DNA, 20 bp, Artificial Sequence
  Description of Artificial Sequence: Synthetic oligonucleotide
  Target: LAMA2; (+) strand; PAM type: NRG; PAM sequence: TGG
tatgaacatatagtgtaata

SEQ ID NO: 119895 - DNA, 20 bp, Artificial Sequence
  Description of Artificial Sequence: Synthetic oligonucleotide
  Target: LAMA2; (+) strand; PAM type: NRG; PAM sequence: AAG
agtgtaatatggtgacaaaa

SEQ ID NO: 119896 - DNA, 20 bp, Artificial Sequence
  Description of Artificial Sequence: Synthetic oligonucleotide
  Target: LAMA2; (+) strand; PAM type: NRG; PAM sequence: AGG
gtgtaatatggtgacaaaaa

SEQ ID NO: 119897 - DNA, 20 bp, Artificial Sequence
  Description of Artificial Sequence: Synthetic oligonucleotide
  Target: LAMA2; (+) strand; PAM type: NRG; PAM sequence: TGG
aatatggtgacaaaaaaggt

SEQ ID NO: 119898 - DNA, 20 bp, Artificial Sequence
  Description of Artificial Sequence: Synthetic oligonucleotide
  Target: LAMA2; (+) strand; PAM type: NRG; PAM sequence: TAG
tcacttttacacaaaactca

SEQ ID NO: 119899 - DNA, 20 bp, Artificial Sequence
  Description of Artificial Sequence: Synthetic oligonucleotide
  Target: LAMA2; (+) strand; PAM type: NRG; PAM sequence: AAG
cttttacacaaaactcatag

SEQ ID NO: 119900 - DNA, 20 bp, Artificial Sequence
  Description of Artificial Sequence: Synthetic oligonucleotide
  Target: LAMA2; (+) strand; PAM type: NRG; PAM sequence: TAG
acaaaactcatagaagcaca

SEQ ID NO: 119901 - DNA, 20 bp, Artificial Sequence
  Description of Artificial Sequence: Synthetic oligonucleotide
  Target: LAMA2; (+) strand; PAM type: NRG; PAM sequence: AGG
caaaactcatagaagcacat

SEQ ID NO: 119902 - DNA, 20 bp, Artificial Sequence
  Description of Artificial Sequence: Synthetic oligonucleotide
  Target: LAMA2; (+) strand; PAM type: NRG; PAM sequence: TGG
tctgttgcttaacacacatt

SEQ ID NO: 119903 - DNA, 20 bp, Artificial Sequence
  Description of Artificial Sequence: Synthetic oligonucleotide
  Target: LAMA2; (+) strand; PAM type: NRG; PAM sequence: GGG
ctgttgcttaacacacattt

SEQ ID NO: 119904 - DNA, 20 bp, Artificial Sequence
  Description of Artificial Sequence: Synthetic oligonucleotide
  Target: LAMA2; (+) strand; PAM type: NRG; PAM sequence: TGG
ttgggtatttcattgacaaa

SEQ ID NO: 119905 - DNA, 20 bp, Artificial Sequence
  Description of Artificial Sequence: Synthetic oligonucleotide
  Target: LAMA2; (+) strand; PAM type: NRG; PAM sequence: GGG
tgggtatttcattgacaaat

SEQ ID NO: 119906 - DNA, 20 bp, Artificial Sequence
  Description of Artificial Sequence: Synthetic oligonucleotide
  Target: LAMA2; (+) strand; PAM type: NRG; PAM sequence: TAG
atttcattgacaaatgggtg

SEQ ID NO: 119907 - DNA, 20 bp, Artificial Sequence
  Description of Artificial Sequence: Synthetic oligonucleotide
  Target: LAMA2; (+) strand; PAM type: NRG; PAM sequence: CAG
ttgacaaatgggtgtagatg

SEQ ID NO: 119908 - DNA, 20 bp, Artificial Sequence
  Description of Artificial Sequence: Synthetic oligonucleotide
  Target: LAMA2; (+) strand; PAM type: NRG; PAM sequence: GAG
gacaaatgggtgtagatgca

SEQ ID NO: 119909 - DNA, 20 bp, Artificial Sequence
  Description of Artificial Sequence: Synthetic oligonucleotide
  Target: LAMA2; (+) strand; PAM type: NRG; PAM sequence: AAG
aaatgggtgtagatgcagag

SEQ ID NO: 119910 - DNA, 20 bp, Artificial Sequence
  Description of Artificial Sequence: Synthetic oligonucleotide
  Target: LAMA2; (+) strand; PAM type: NRG; PAM sequence: AGG
aatgggtgtagatgcagaga

SEQ ID NO: 119911 - DNA, 20 bp, Artificial Sequence
  Description of Artificial Sequence: Synthetic oligonucleotide
  Target: LAMA2; (+) strand; PAM type: NRG; PAM sequence: GGG
atgggtgtagatgcagagaa

SEQ ID NO: 119912 - DNA, 20 bp, Artificial Sequence
  Description of Artificial Sequence: Synthetic oligonucleotide
  Target: LAMA2; (+) strand; PAM type: NRG; PAM sequence: GAG
gggtgtagatgcagagaagg

SEQ ID NO: 119913 - DNA, 20 bp, Artificial Sequence
  Description of Artificial Sequence: Synthetic oligonucleotide
  Target: LAMA2; (+) strand; PAM type: NRG; PAM sequence: GAG
gtgtagatgcagagaaggga

SEQ ID NO: 119914 - DNA, 20 bp, Artificial Sequence
  Description of Artificial Sequence: Synthetic oligonucleotide
  Target: LAMA2; (+) strand; PAM type: NRG; PAM sequence: CAG
tagatgcagagaagggagag

SEQ ID NO: 119915 - DNA, 20 bp, Artificial Sequence
  Description of Artificial Sequence: Synthetic oligonucleotide
  Target: LAMA2; (+) strand; PAM type: NRG; PAM sequence: TGG
gcagagaagggagagcagaa

SEQ ID NO: 119916 - DNA, 20 bp, Artificial Sequence
  Description of Artificial Sequence: Synthetic oligonucleotide
  Target: LAMA2; (+) strand; PAM type: NRG; PAM sequence: AAG
gaagggagagcagaatggtt

SEQ ID NO: 119917 - DNA, 20 bp, Artificial Sequence
  Description of Artificial Sequence: Synthetic oligonucleotide
  Target: LAMA2; (+) strand; PAM type: NRG; PAM sequence: GAG
agggagagcagaatggttaa

SEQ ID NO: 119918 - DNA, 20 bp, Artificial Sequence
  Description of Artificial Sequence: Synthetic oligonucleotide
  Target: LAMA2; (+) strand; PAM type: NRG; PAM sequence: GAG
agcagaatggttaagagtct

SEQ ID NO: 119919 - DNA, 20 bp, Artificial Sequence
  Description of Artificial Sequence: Synthetic oligonucleotide
  Target: LAMA2; (+) strand; PAM type: NRG; PAM sequence: AAG
agaatggttaagagtctgag

SEQ ID NO: 119920 - DNA, 20 bp, Artificial Sequence
  Description of Artificial Sequence: Synthetic oligonucleotide
  Target: LAMA2; (+) strand; PAM type: NRG; PAM sequence: CAG
taagagtctgagaagatttt

SEQ ID NO: 119921 - DNA, 20 bp, Artificial Sequence
  Description of Artificial Sequence: Synthetic oligonucleotide
  Target: LAMA2; (+) strand; PAM type: NRG; PAM sequence: AAG
gagtctgagaagattttcag

SEQ ID NO: 119922 - DNA, 20 bp, Artificial Sequence
  Description of Artificial Sequence: Synthetic oligonucleotide
  Target: LAMA2; (+) strand; PAM type: NRG; PAM sequence: GAG
gtctgagaagattttcagaa

SEQ ID NO: 119923 - DNA, 20 bp, Artificial Sequence
  Description of Artificial Sequence: Synthetic oligonucleotide
  Target: LAMA2; (+) strand; PAM type: NRG; PAM sequence: AGG
tctgagaagattttcagaag

SEQ ID NO: 119924 - DNA, 20 bp, Artificial Sequence
  Description of Artificial Sequence: Synthetic oligonucleotide
  Target: LAMA2; (+) strand; PAM type: NRG; PAM sequence: AAG
tttcagaagaggaatgtccc

SEQ ID NO: 119925 - DNA, 20 bp, Artificial Sequence
  Description of Artificial Sequence: Synthetic oligonucleotide
  Target: LAMA2; (+) strand; PAM type: NRG; PAM sequence: AAG
taaaatctttccatctgaac

SEQ ID NO: 119926 - DNA, 20 bp, Artificial Sequence
  Description of Artificial Sequence: Synthetic oligonucleotide
  Target: LAMA2; (+) strand; PAM type: NRG; PAM sequence: AGG
aaaatctttccatctgaaca

SEQ ID NO: 119927 - DNA, 20 bp, Artificial Sequence
  Description of Artificial Sequence: Synthetic oligonucleotide
  Target: LAMA2; (+) strand; PAM type: NRG; PAM sequence: AAG
tctttccatctgaacaagga

SEQ ID NO: 119928 - DNA, 20 bp, Artificial Sequence
  Description of Artificial Sequence: Synthetic oligonucleotide
  Target: LAMA2; (+) strand; PAM type: NRG; PAM sequence: TAG
catctgaacaaggaaagatt

SEQ ID NO: 119929 - DNA, 20 bp, Artificial Sequence
  Description of Artificial Sequence: Synthetic oligonucleotide
  Target: LAMA2; (+) strand; PAM type: NRG; PAM sequence: AGG
atctgaacaaggaaagattt

SEQ ID NO: 119930 - DNA, 20 bp, Artificial Sequence
  Description of Artificial Sequence: Synthetic oligonucleotide
  Target: LAMA2; (+) strand; PAM type: NRG; PAM sequence: GGG
tctgaacaaggaaagattta

SEQ ID NO: 119931 - DNA, 20 bp, Artificial Sequence
  Description of Artificial Sequence: Synthetic oligonucleotide
  Target: LAMA2; (+) strand; PAM type: NRG; PAM sequence: AAG
gaacaaggaaagatttaggg

SEQ ID NO: 119932 - DNA, 20 bp, Artificial Sequence
  Description of Artificial Sequence: Synthetic oligonucleotide
  Target: LAMA2; (+) strand; PAM type: NRG; PAM sequence: AGG
aacaaggaaagatttaggga

SEQ ID NO: 119933 - DNA, 20 bp, Artificial Sequence
  Description of Artificial Sequence: Synthetic oligonucleotide
  Target: LAMA2; (+) strand; PAM type: NRG; PAM sequence: AAG
gatttagggaaggcaatcat

SEQ ID NO: 119934 - DNA, 20 bp, Artificial Sequence
  Description of Artificial Sequence: Synthetic oligonucleotide
  Target: LAMA2; (+) strand; PAM type: NRG; PAM sequence: AGG
atttagggaaggcaatcata

SEQ ID NO: 119935 - DNA, 20 bp, Artificial Sequence
  Description of Artificial Sequence: Synthetic oligonucleotide
  Target: LAMA2; (+) strand; PAM type: NRG; PAM sequence: CAG
aaggactgtcctcaaatttt

SEQ ID NO: 119936 - DNA, 20 bp, Artificial Sequence
  Description of Artificial Sequence: Synthetic oligonucleotide
  Target: LAMA2; (+) strand; PAM type: NRG; PAM sequence: AAG
gactgtcctcaaattttcag

SEQ ID NO: 119937 - DNA, 20 bp, Artificial Sequence
  Description of Artificial Sequence: Synthetic oligonucleotide
  Target: LAMA2; (+) strand; PAM type: NRG; PAM sequence: GAG
ctgtcctcaaattttcagaa

SEQ ID NO: 119938 - DNA, 20 bp, Artificial Sequence
  Description of Artificial Sequence: Synthetic oligonucleotide
  Target: LAMA2; (+) strand; PAM type: NRG; PAM sequence: AAG
tcagaagagtcgttatgtta

SEQ ID NO: 119939 - DNA, 20 bp, Artificial Sequence
  Description of Artificial Sequence: Synthetic oligonucleotide
  Target: LAMA2; (+) strand; PAM type: NRG; PAM sequence: GAG
agaagagtcgttatgttaaa

SEQ ID NO: 119940 - DNA, 20 bp, Artificial Sequence
  Description of Artificial Sequence: Synthetic oligonucleotide
  Target: LAMA2; (+) strand; PAM type: NRG; PAM sequence: AGG
gaagagtcgttatgttaaag

SEQ ID NO: 119941 - DNA, 20 bp, Artificial Sequence
  Description of Artificial Sequence: Synthetic oligonucleotide
  Target: LAMA2; (+) strand; PAM type: NRG; PAM sequence: GGG
aagagtcgttatgttaaaga

SEQ ID NO: 119942 - DNA, 20 bp, Artificial Sequence
  Description of Artificial Sequence: Synthetic oligonucleotide
  Target: LAMA2; (+) strand; PAM type: NRG; PAM sequence: AAG
gttaaagagggactattcta

SEQ ID NO: 119943 - DNA, 20 bp, Artificial Sequence
  Description of Artificial Sequence: Synthetic oligonucleotide
  Target: LAMA2; (+) strand; PAM type: NRG; PAM sequence: AGG
ttaaagagggactattctaa

SEQ ID NO: 119944 - DNA, 20 bp, Artificial Sequence
  Description of Artificial Sequence: Synthetic oligonucleotide
  Target: LAMA2; (+) strand; PAM type: NRG; PAM sequence: AAG
agggactattctaaaggctg

SEQ ID NO: 119945 - DNA, 20 bp, Artificial Sequence
  Description of Artificial Sequence: Synthetic oligonucleotide
  Target: LAMA2; (+) strand; PAM type: NRG; PAM sequence: AGG
gggactattctaaaggctga

SEQ ID NO: 119946 - DNA, 20 bp, Artificial Sequence
  Description of Artificial Sequence: Synthetic oligonucleotide
  Target: LAMA2; (+) strand; PAM type: NRG; PAM sequence: TGG
actattctaaaggctgaagg

SEQ ID NO: 119947 - DNA, 20 bp, Artificial Sequence
  Description of Artificial Sequence: Synthetic oligonucleotide
  Target: LAMA2; (+) strand; PAM type: NRG; PAM sequence: TAG
aaaggctgaaggtggatcca

SEQ ID NO: 119948 - DNA, 20 bp, Artificial Sequence
  Description of Artificial Sequence: Synthetic oligonucleotide
  Target: LAMA2; (+) strand; PAM type: NRG; PAM sequence: AAG
ggctgaaggtggatccatag

SEQ ID NO: 119949 - DNA, 20 bp, Artificial Sequence
  Description of Artificial Sequence: Synthetic oligonucleotide
  Target: LAMA2; (+) strand; PAM type: NRG; PAM sequence: CAG
agaagaacatgacaaacaac

SEQ ID NO: 119950 - DNA, 20 bp, Artificial Sequence
  Description of Artificial Sequence: Synthetic oligonucleotide
  Target: LAMA2; (+) strand; PAM type: NRG; PAM sequence: AGG
gaagaacatgacaaacaacc

SEQ ID NO: 119951 - DNA, 20 bp, Artificial Sequence
  Description of Artificial Sequence: Synthetic oligonucleotide
  Target: LAMA2; (+) strand; PAM type: NRG; PAM sequence: TGG
caggtttgaattttataata

SEQ ID NO: 119952 - DNA, 20 bp, Artificial Sequence
  Description of Artificial Sequence: Synthetic oligonucleotide
  Target: LAMA2; (+) strand; PAM type: NRG; PAM sequence: GAG
ggtttgaattttataatatg

SEQ ID NO: 119953 - DNA, 20 bp, Artificial Sequence
  Description of Artificial Sequence: Synthetic oligonucleotide
  Target: LAMA2; (+) strand; PAM type: NRG; PAM sequence: TAG
attttataatatggagaaaa

SEQ ID NO: 119954 - DNA, 20 bp, Artificial Sequence
  Description of Artificial Sequence: Synthetic oligonucleotide
  Target: LAMA2; (+) strand; PAM type: NRG; PAM sequence: GAG
cttcctccccatgccatttt

SEQ ID NO: 119955 - DNA, 20 bp, Artificial Sequence
  Description of Artificial Sequence: Synthetic oligonucleotide
  Target: LAMA2; (+) strand; PAM type: NRG; PAM sequence: CAG
ccatgccattttgagttgtt

SEQ ID NO: 119956 - DNA, 20 bp, Artificial Sequence
  Description of Artificial Sequence: Synthetic oligonucleotide
  Target: LAMA2; (+) strand; PAM type: NRG; PAM sequence: TAG
cattttgagttgttcagaaa

SEQ ID NO: 119957 - DNA, 20 bp, Artificial Sequence
  Description of Artificial Sequence: Synthetic oligonucleotide
  Target: LAMA2; (+) strand; PAM type: NRG; PAM sequence: GAG
gaaatagctgaattgtgttt

SEQ ID NO: 119958 - DNA, 20 bp, Artificial Sequence
  Description of Artificial Sequence: Synthetic oligonucleotide
  Target: LAMA2; (+) strand; PAM type: NRG; PAM sequence: TGG
gtgtttgagcaacttgcttc

SEQ ID NO: 119959 - DNA, 20 bp, Artificial Sequence
  Description of Artificial Sequence: Synthetic oligonucleotide
  Target: LAMA2; (+) strand; PAM type: NRG; PAM sequence: CAG
tgcttctggaaatgaccatg

SEQ ID NO: 119960 - DNA, 20 bp, Artificial Sequence
  Description of Artificial Sequence: Synthetic oligonucleotide
  Target: LAMA2; (+) strand; PAM type: NRG; PAM sequence: CAG
ggaaatgaccatgcagtgat

SEQ ID NO: 119961 - DNA, 20 bp, Artificial Sequence
  Description of Artificial Sequence: Synthetic oligonucleotide
  Target: LAMA2; (+) strand; PAM type: NRG; PAM sequence: CAG
ccatgcagtgatcagatgta

SEQ ID NO: 119962 - DNA, 20 bp, Artificial Sequence
  Description of Artificial Sequence: Synthetic oligonucleotide
  Target: LAMA2; (+) strand; PAM type: NRG; PAM sequence: TAG
gcagtgatcagatgtacagt

SEQ ID NO: 119963 - DNA, 20 bp, Artificial Sequence
  Description of Artificial Sequence: Synthetic oligonucleotide
  Target: LAMA2; (+) strand; PAM type: NRG; PAM sequence: GAG
tgatcagatgtacagttagt

SEQ ID NO: 119964 - DNA, 20 bp, Artificial Sequence
  Description of Artificial Sequence: Synthetic oligonucleotide
  Target: LAMA2; (+) strand; PAM type: NRG; PAM sequence: AGG
gatcagatgtacagttagtg

SEQ ID NO: 119965 - DNA, 20 bp, Artificial Sequence
  Description of Artificial Sequence: Synthetic oligonucleotide
  Target: LAMA2; (+) strand; PAM type: NRG; PAM sequence: GGG
atcagatgtacagttagtga

SEQ ID NO: 119966 - DNA, 20 bp, Artificial Sequence
  Description of Artificial Sequence: Synthetic oligonucleotide
  Target: LAMA2; (+) strand; PAM type: NRG; PAM sequence: GAG
gttagtgagggatgctttat

SEQ ID NO: 119967 - DNA, 20 bp, Artificial Sequence
  Description of Artificial Sequence: Synthetic oligonucleotide
  Target: LAMA2; (+) strand; PAM type: NRG; PAM sequence: AGG
ttagtgagggatgctttatg

SEQ ID NO: 119968 - DNA, 20 bp, Artificial Sequence
  Description of Artificial Sequence: Synthetic oligonucleotide
  Target: LAMA2; (+) strand; PAM type: NRG; PAM sequence: GGG
tagtgagggatgctttatga

SEQ ID NO: 119969 - DNA, 20 bp, Artificial Sequence
  Description of Artificial Sequence: Synthetic oligonucleotide
  Target: LAMA2; (+) strand; PAM type: NRG; PAM sequence: GAG
tatgagggaatgcctctact

SEQ ID NO: 119970 - DNA, 20 bp, Artificial Sequence
  Description of Artificial Sequence: Synthetic oligonucleotide
  Target: LAMA2; (+) strand; PAM type: NRG; PAM sequence: GAG
tgagggaatgcctctactga

SEQ ID NO: 119971 - DNA, 20 bp, Artificial Sequence
  Description of Artificial Sequence: Synthetic oligonucleotide
  Target: LAMA2; (+) strand; PAM type: NRG; PAM sequence: AGG
gagggaatgcctctactgag

SEQ ID NO: 119972 - DNA, 20 bp, Artificial Sequence
  Description of Artificial Sequence: Synthetic oligonucleotide
  Target: LAMA2; (+) strand; PAM type: NRG; PAM sequence: AAG
ggaatgcctctactgagagg

SEQ ID NO: 119973 - DNA, 20 bp, Artificial Sequence
  Description of Artificial Sequence: Synthetic oligonucleotide
  Target: LAMA2; (+) strand; PAM type: NRG; PAM sequence: AAG
gcctctactgagaggaagtt

SEQ ID NO: 119974 - DNA, 20 bp, Artificial Sequence
  Description of Artificial Sequence: Synthetic oligonucleotide
  Target: LAMA2; (+) strand; PAM type: NRG; PAM sequence: TAG
gttaagactcatcaactgtc

SEQ ID NO: 119975 - DNA, 20 bp, Artificial Sequence
  Description of Artificial Sequence: Synthetic oligonucleotide
  Target: LAMA2; (+) strand; PAM type: NRG; PAM sequence: CAG
tcaactgtctagccatttgt

SEQ ID NO: 119976 - DNA, 20 bp, Artificial Sequence
  Description of Artificial Sequence: Synthetic oligonucleotide
  Target: LAMA2; (+) strand; PAM type: NRG; PAM sequence: AAG
tctagccatttgtcagttct

SEQ ID NO: 119977 - DNA, 20 bp, Artificial Sequence
  Description of Artificial Sequence: Synthetic oligonucleotide
  Target: LAMA2; (+) strand; PAM type: NRG; PAM sequence: TAG
gttctaagattctaatatta

SEQ ID NO: 119978 - DNA, 20 bp, Artificial Sequence
  Description of Artificial Sequence: Synthetic oligonucleotide
  Target: LAMA2; (+) strand; PAM type: NRG; PAM sequence: TAG
atattatagtctattgcttt

SEQ ID NO: 119979 - DNA, 20 bp, Artificial Sequence
  Description of Artificial Sequence: Synthetic oligonucleotide
  Target: LAMA2; (+) strand; PAM type: NRG; PAM sequence: GAG
attatagtctattgctttta

SEQ ID NO: 119980 - DNA, 20 bp, Artificial Sequence
  Description of Artificial Sequence: Synthetic oligonucleotide
  Target: LAMA2; (+) strand; PAM type: NRG; PAM sequence: AAG
ttctgaattcttaaaatgtc

SEQ ID NO: 119981 - DNA, 20 bp, Artificial Sequence
  Description of Artificial Sequence: Synthetic oligonucleotide
  Target: LAMA2; (+) strand; PAM type: NRG; PAM sequence: TGG
atgtgtttttaaatcccttc

SEQ ID NO: 119982 - DNA, 20 bp, Artificial Sequence
  Description of Artificial Sequence: Synthetic oligonucleotide
  Target: LAMA2; (+) strand; PAM type: NRG; PAM sequence: GGG
tgtgtttttaaatcccttct

SEQ ID NO: 119983 - DNA, 20 bp, Artificial Sequence
  Description of Artificial Sequence: Synthetic oligonucleotide
  Target: LAMA2; (+) strand; PAM type: NRG; PAM sequence: GAG
tttaaaataaaaacatgttt

SEQ ID NO: 119984 - DNA, 20 bp, Artificial Sequence
  Description of Artificial Sequence: Synthetic oligonucleotide
  Target: LAMA2; (+) strand; PAM type: NRG; PAM sequence: TGG
agacaatcctcacacatttt

SEQ ID NO: 119985 - DNA, 20 bp, Artificial Sequence
  Description of Artificial Sequence: Synthetic oligonucleotide
  Target: LAMA2; (+) strand; PAM type: NRG; PAM sequence: AAG
aatcctcacacatttttggc

SEQ ID NO: 119986 - DNA, 20 bp, Artificial Sequence
  Description of Artificial Sequence: Synthetic oligonucleotide
  Target: LAMA2; (+) strand; PAM type: NRG; PAM sequence: TAG
acatttttggcaagaatact

SEQ ID NO: 119987 - DNA, 20 bp, Artificial Sequence
  Description of Artificial Sequence: Synthetic oligonucleotide
  Target: LAMA2; (+) strand; PAM type: NRG; PAM sequence: TAG
ggcaagaatacttagatatt

SEQ ID NO: 119988 - DNA, 20 bp, Artificial Sequence
  Description of Artificial Sequence: Synthetic oligonucleotide
  Target: LAMA2; (+) strand; PAM type: NRG; PAM sequence: TGG
gaatacttagatatttagca

SEQ ID NO: 119989 - DNA, 20 bp, Artificial Sequence
  Description of Artificial Sequence: Synthetic oligonucleotide
  Target: LAMA2; (+) strand; PAM type: NRG; PAM sequence: CAG
ccacatcatcgtcaattgca

SEQ ID NO: 119990 - DNA, 20 bp, Artificial Sequence
  Description of Artificial Sequence: Synthetic oligonucleotide
  Target: LAMA2; (+) strand; PAM type: NRG; PAM sequence: AAG
catcttgtgttataacacgc

SEQ ID NO: 119991 - DNA, 20 bp, Artificial Sequence
  Description of Artificial Sequence: Synthetic oligonucleotide
  Target: LAMA2; (+) strand; PAM type: NRG; PAM sequence: GAG
gaatactttataaattacct

SEQ ID NO: 119992 - DNA, 20 bp, Artificial Sequence
  Description of Artificial Sequence: Synthetic oligonucleotide
  Target: LAMA2; (+) strand; PAM type: NRG; PAM sequence: CAG
taaattacctgagaaatttt

SEQ ID NO: 119993 - DNA, 20 bp, Artificial Sequence
  Description of Artificial Sequence: Synthetic oligonucleotide
  Target: LAMA2; (+) strand; PAM type: NRG; PAM sequence: AGG
aaattacctgagaaattttc

SEQ ID NO: 119994 - DNA, 20 bp, Artificial Sequence
  Description of Artificial Sequence: Synthetic oligonucleotide
  Target: LAMA2; (+) strand; PAM type: NRG; PAM sequence: GGG
aattacctgagaaattttca

SEQ ID NO: 119995 - DNA, 20 bp, Artificial Sequence
  Description of Artificial Sequence: Synthetic oligonucleotide
  Target: LAMA2; (+) strand; PAM type: NRG; PAM sequence: GGG
attacctgagaaattttcag

SEQ ID NO: 119996 - DNA, 20 bp, Artificial Sequence
  Description of Artificial Sequence: Synthetic oligonucleotide
  Target: LAMA2; (+) strand; PAM type: NRG; PAM sequence: TAG
agaaattttcaggggattca

SEQ ID NO: 119997 - DNA, 20 bp, Artificial Sequence
  Description of Artificial Sequence: Synthetic oligonucleotide
  Target: LAMA2; (+) strand; PAM type: NRG; PAM sequence: TGG
aattttcaggggattcatag

SEQ ID NO: 119998 - DNA, 20 bp, Artificial Sequence
  Description of Artificial Sequence: Synthetic oligonucleotide
  Target: LAMA2; (+) strand; PAM type: NRG; PAM sequence: TGG
attcatagtggccataaacc

SEQ ID NO: 119999 - DNA, 20 bp, Artificial Sequence
  Description of Artificial Sequence: Synthetic oligonucleotide
  Target: LAMA2; (+) strand; PAM type: NRG; PAM sequence: TGG
tgctgcatatgttaactttt

SEQ ID NO: 120000 - DNA, 20 bp, Artificial Sequence
  Description of Artificial Sequence: Synthetic oligonucleotide
  Target: LAMA2; (+) strand; PAM type: NRG; PAM sequence: TAG
catatactgacctaatcatt

SEQ ID NO: 120001 - DNA, 20 bp, Artificial Sequence
  Description of Artificial Sequence: Synthetic oligonucleotide
  Target: LAMA2; (+) strand; PAM type: NRG; PAM sequence: CAG
ttagtaaaaatgattcataa

SEQ ID NO: 120002 - DNA, 20 bp, Artificial Sequence
  Description of Artificial Sequence: Synthetic oligonucleotide
  Target: LAMA2; (+) strand; PAM type: NRG; PAM sequence: TGG
ttcataacagataaaatgca

SEQ ID NO: 120003 - DNA, 20 bp, Artificial Sequence
  Description of Artificial Sequence: Synthetic oligonucleotide
  Target: LAMA2; (+) strand; PAM type: NRG; PAM sequence: TAG
atattcaacactgaatatta

SEQ ID NO: 120004 - DNA, 20 bp, Artificial Sequence
  Description of Artificial Sequence: Synthetic oligonucleotide
  Target: LAMA2; (+) strand; PAM type: NRG; PAM sequence: TAG
actgaatattatagatgtga

SEQ ID NO: 120005 - DNA, 20 bp, Artificial Sequence
  Description of Artificial Sequence: Synthetic oligonucleotide
  Target: LAMA2; (+) strand; PAM type: NRG; PAM sequence: CAG
atttcacatatcaatgtgta

SEQ ID NO: 120006 - DNA, 20 bp, Artificial Sequence
  Description of Artificial Sequence: Synthetic oligonucleotide
  Target: LAMA2; (+) strand; PAM type: NRG; PAM sequence: TGG
tatcaatgtgtacagatttc

SEQ ID NO: 120007 - DNA, 20 bp, Artificial Sequence
  Description of Artificial Sequence: Synthetic oligonucleotide
  Target: LAMA2; (+) strand; PAM type: NRG; PAM sequence: AAG
acagatttctggtctatctt

SEQ ID NO: 120008 - DNA, 20 bp, Artificial Sequence
  Description of Artificial Sequence: Synthetic oligonucleotide
  Target: LAMA2; (+) strand; PAM type: NRG; PAM sequence: TAG
atcttaagatttttctaccc

SEQ ID NO: 120009 - DNA, 20 bp, Artificial Sequence
  Description of Artificial Sequence: Synthetic oligonucleotide
  Target: LAMA2; (+) strand; PAM type: NRG; PAM sequence: AGG
tcttaagatttttctaccct

SEQ ID NO: 120010 - DNA, 20 bp, Artificial Sequence
  Description of Artificial Sequence: Synthetic oligonucleotide
  Target: LAMA2; (+) strand; PAM type: NRG; PAM sequence: AAG
taatgaactgaatctatatc

SEQ ID NO: 120011 - DNA, 20 bp, Artificial Sequence
  Description of Artificial Sequence: Synthetic oligonucleotide
  Target: LAMA2; (+) strand; PAM type: NRG; PAM sequence: AGG
aatgaactgaatctatatca

SEQ ID NO: 120012 - DNA, 20 bp, Artificial Sequence
  Description of Artificial Sequence: Synthetic oligonucleotide
  Target: LAMA2; (+) strand; PAM type: NRG; PAM sequence: GGG
atgaactgaatctatatcaa

SEQ ID NO: 120013 - DNA, 20 bp, Artificial Sequence
  Description of Artificial Sequence: Synthetic oligonucleotide
  Target: LAMA2; (+) strand; PAM type: NRG; PAM sequence: TGG
gaatctatatcaagggatgc

SEQ ID NO: 120014 - DNA, 20 bp, Artificial Sequence
  Description of Artificial Sequence: Synthetic oligonucleotide
  Target: LAMA2; (+) strand; PAM type: NRG; PAM sequence: GGG
aatctatatcaagggatgct

SEQ ID NO: 120015 - DNA, 20 bp, Artificial Sequence
  Description of Artificial Sequence: Synthetic oligonucleotide
  Target: LAMA2; (+) strand; PAM type: NRG; PAM sequence: GGG
atctatatcaagggatgctg

SEQ ID NO: 120016 - DNA, 20 bp, Artificial Sequence
  Description of Artificial Sequence: Synthetic oligonucleotide
  Target: LAMA2; (+) strand; PAM type: NRG; PAM sequence: GGG
tctatatcaagggatgctgg

SEQ ID NO: 120017 - DNA, 20 bp, Artificial Sequence
  Description of Artificial Sequence: Synthetic oligonucleotide
  Target: LAMA2; (+) strand; PAM type: NRG; PAM sequence: TGG
tatcaagggatgctgggggc

SEQ ID NO: 120018 - DNA, 20 bp, Artificial Sequence
  Description of Artificial Sequence: Synthetic oligonucleotide
  Target: LAMA2; (+) strand; PAM type: NRG; PAM sequence: GGG
atcaagggatgctgggggct

SEQ ID NO: 120019 - DNA, 20 bp, Artificial Sequence
  Description of Artificial Sequence: Synthetic oligonucleotide
  Target: LAMA2; (+) strand; PAM type: NRG; PAM sequence: AAG
agggatgctgggggctgggc

SEQ ID NO: 120020 - DNA, 20 bp, Artificial Sequence
  Description of Artificial Sequence: Synthetic oligonucleotide
  Target: LAMA2; (+) strand; PAM type: NRG; PAM sequence: AGG
gggatgctgggggctgggca

SEQ ID NO: 120021 - DNA, 20 bp, Artificial Sequence
  Description of Artificial Sequence: Synthetic oligonucleotide
  Target: LAMA2; (+) strand; PAM type: NRG; PAM sequence: TGG
atgctgggggctgggcaagg

SEQ ID NO: 120022 - DNA, 20 bp, Artificial Sequence
  Description of Artificial Sequence: Synthetic oligonucleotide
  Target: LAMA2; (+) strand; PAM type: NRG; PAM sequence: CAG
gtggctcactcctgtaatcg

SEQ ID NO: 120023 - DNA, 20 bp, Artificial Sequence
  Description of Artificial Sequence: Synthetic oligonucleotide
  Target: LAMA2; (+) strand; PAM type: NRG; PAM sequence: TGG
ctcctgtaatcgcagcactt

SEQ ID NO: 120024 - DNA, 20 bp, Artificial Sequence
  Description of Artificial Sequence: Synthetic oligonucleotide
  Target: LAMA2; (+) strand; PAM type: NRG; PAM sequence: GGG
tcctgtaatcgcagcacttt

SEQ ID NO: 120025 - DNA, 20 bp, Artificial Sequence
  Description of Artificial Sequence: Synthetic oligonucleotide
  Target: LAMA2; (+) strand; PAM type: NRG; PAM sequence: GAG
ctgtaatcgcagcactttgg

SEQ ID NO: 120026 - DNA, 20 bp, Artificial Sequence
  Description of Artificial Sequence: Synthetic oligonucleotide
  Target: LAMA2; (+) strand; PAM type: NRG; PAM sequence: AGG
tgtaatcgcagcactttggg

SEQ ID NO: 120027 - DNA, 20 bp, Artificial Sequence
  Description of Artificial Sequence: Synthetic oligonucleotide
  Target: LAMA2; (+) strand; PAM type: NRG; PAM sequence: TAG
tcgcagcactttgggaggcc

SEQ ID NO: 120028 - DNA, 20 bp, Artificial Sequence
  Description of Artificial Sequence: Synthetic oligonucleotide
  Target: LAMA2; (+) strand; PAM type: NRG; PAM sequence: AGG
cgcagcactttgggaggcct

SEQ ID NO: 120029 - DNA, 20 bp, Artificial Sequence
  Description of Artificial Sequence: Synthetic oligonucleotide
  Target: LAMA2; (+) strand; PAM type: NRG; PAM sequence: TGG
agcactttgggaggcctagg

SEQ ID NO: 120030 - DNA, 20 bp, Artificial Sequence
  Description of Artificial Sequence: Synthetic oligonucleotide
  Target: LAMA2; (+) strand; PAM type: NRG; PAM sequence: GGG
gcactttgggaggcctaggt

SEQ ID NO: 120031 - DNA, 20 bp, Artificial Sequence
  Description of Artificial Sequence: Synthetic oligonucleotide
  Target: LAMA2; (+) strand; PAM type: NRG; PAM sequence: TGG
ctttgggaggcctaggtggg

SEQ ID NO: 120032 - DNA, 20 bp, Artificial Sequence
  Description of Artificial Sequence: Synthetic oligonucleotide
  Target: LAMA2; (+) strand; PAM type: NRG; PAM sequence: TAG
cctaggtgggtggatcacct

SEQ ID NO: 120033 - DNA, 20 bp, Artificial Sequence
  Description of Artificial Sequence: Synthetic oligonucleotide
  Target: LAMA2; (+) strand; PAM type: NRG; PAM sequence: AGG
ctaggtgggtggatcacctt

SEQ ID NO: 120034 - DNA, 20 bp, Artificial Sequence
  Description of Artificial Sequence: Synthetic oligonucleotide
  Target: LAMA2; (+) strand; PAM type: NRG; PAM sequence: CAG
gtgggtggatcaccttaggt

SEQ ID NO: 120035 - DNA, 20 bp, Artificial Sequence
  Description of Artificial Sequence: Synthetic oligonucleotide
  Target: LAMA2; (+) strand; PAM type: NRG; PAM sequence: AGG
tgggtggatcaccttaggtc

SEQ ID NO: 120036 - DNA, 20 bp, Artificial Sequence
  Description of Artificial Sequence: Synthetic oligonucleotide
  Target: LAMA2; (+) strand; PAM type: NRG; PAM sequence: GAG
ggtggatcaccttaggtcag

SEQ ID NO: 120037 - DNA, 20 bp, Artificial Sequence
  Description of Artificial Sequence: Synthetic oligonucleotide
  Target: LAMA2; (+) strand; PAM type: NRG; PAM sequence: AAG
tcaccttaggtcaggagttc

SEQ ID NO: 120038 - DNA, 20 bp, Artificial Sequence
  Description of Artificial Sequence: Synthetic oligonucleotide
  Target: LAMA2; (+) strand; PAM type: NRG; PAM sequence: CAG
ttaggtcaggagttcaagac

SEQ ID NO: 120039 - DNA, 20 bp, Artificial Sequence
  Description of Artificial Sequence: Synthetic oligonucleotide
  Target: LAMA2; (+) strand; PAM type: NRG; PAM sequence: CGG
gaccagcctgaccaacataa

SEQ ID NO: 120040 - DNA, 20 bp, Artificial Sequence
  Description of Artificial Sequence: Synthetic oligonucleotide
  Target: LAMA2; (+) strand; PAM type: NRG; PAM sequence: TAG
tctactaaaaatacaaaaat

SEQ ID NO: 120041 - DNA, 20 bp, Artificial Sequence
  Description of Artificial Sequence: Synthetic oligonucleotide
  Target: LAMA2; (+) strand; PAM type: NRG; PAM sequence: CAG
ctaaaaatacaaaaattagc

SEQ ID NO: 120042 - DNA, 20 bp, Artificial Sequence
  Description of Artificial Sequence: Synthetic oligonucleotide
  Target: LAMA2; (+) strand; PAM type: NRG; PAM sequence: AGG
taaaaatacaaaaattagcc

SEQ ID NO: 120043 - DNA, 20 bp, Artificial Sequence
  Description of Artificial Sequence: Synthetic oligonucleotide
  Target: LAMA2; (+) strand; PAM type: NRG; PAM sequence: TGG
atacaaaaattagccaggcg

SEQ ID NO: 120044 - DNA, 20 bp, Artificial Sequence
  Description of Artificial Sequence: Synthetic oligonucleotide
  Target: LAMA2; (+) strand; PAM type: NRG; PAM sequence: TGG
caaaaattagccaggcgtgg

SEQ ID NO: 120045 - DNA, 20 bp, Artificial Sequence
  Description of Artificial Sequence: Synthetic oligonucleotide
  Target: LAMA2; (+) strand; PAM type: NRG; PAM sequence: CAG
gtggcatgtgcctgtaatcc

SEQ ID NO: 120046 - DNA, 20 bp, Artificial Sequence
  Description of Artificial Sequence: Synthetic oligonucleotide
  Target: LAMA2; (+) strand; PAM type: NRG; PAM sequence: CAG
tgcctgtaatcccagctact

SEQ ID NO: 120047 - DNA, 20 bp, Artificial Sequence
  Description of Artificial Sequence: Synthetic oligonucleotide
  Target: LAMA2; (+) strand; PAM type: NRG; PAM sequence: AGG
gcctgtaatcccagctactc

SEQ ID NO: 120048 - DNA, 20 bp, Artificial Sequence
  Description of Artificial Sequence: Synthetic oligonucleotide
  Target: LAMA2; (+) strand; PAM type: NRG; PAM sequence: GAG
ctgtaatcccagctactcag

SEQ ID NO: 120049 - DNA, 20 bp, Artificial Sequence
  Description of Artificial Sequence: Synthetic oligonucleotide
  Target: LAMA2; (+) strand; PAM type: NRG; PAM sequence: AGG
tgtaatcccagctactcagg

SEQ ID NO: 120050 - DNA, 20 bp, Artificial Sequence
  Description of Artificial Sequence: Synthetic oligonucleotide
  Target: LAMA2; (+) strand; PAM type: NRG; PAM sequence: GAG
tcccagctactcaggaggct

SEQ ID NO: 120051 - DNA, 20 bp, Artificial Sequence
  Description of Artificial Sequence: Synthetic oligonucleotide
  Target: LAMA2; (+) strand; PAM type: NRG; PAM sequence: AGG
cccagctactcaggaggctg

SEQ ID NO: 120052 - DNA, 20 bp, Artificial Sequence
  Description of Artificial Sequence: Synthetic oligonucleotide
  Target: LAMA2; (+) strand; PAM type: NRG; PAM sequence: CAG
agctactcaggaggctgagg

SEQ ID NO: 120053 - DNA, 20 bp, Artificial Sequence
  Description of Artificial Sequence: Synthetic oligonucleotide
  Target: LAMA2; (+) strand; PAM type: NRG; PAM sequence: AGG
gctactcaggaggctgaggc

SEQ ID NO: 120054 - DNA, 20 bp, Artificial Sequence
  Description of Artificial Sequence: Synthetic oligonucleotide
  Target: LAMA2; (+) strand; PAM type: NRG; PAM sequence: GAG
tactcaggaggctgaggcag

SEQ ID NO: 120055 - DNA, 20 bp, Artificial Sequence
  Description of Artificial Sequence: Synthetic oligonucleotide
  Target: LAMA2; (+) strand; PAM type: NRG; PAM sequence: TGG
caggagaatcacttgaaccc

SEQ ID NO: 120056 - DNA, 20 bp, Artificial Sequence
  Description of Artificial Sequence: Synthetic oligonucleotide
  Target: LAMA2; (+) strand; PAM type: NRG; PAM sequence: GAG
ggagaatcacttgaaccctg

SEQ ID NO: 120057 - DNA, 20 bp, Artificial Sequence
  Description of Artificial Sequence: Synthetic oligonucleotide
  Target: LAMA2; (+) strand; PAM type: NRG; PAM sequence: AGG
gagaatcacttgaaccctgg

SEQ ID NO: 120058 - DNA, 20 bp, Artificial Sequence
  Description of Artificial Sequence: Synthetic oligonucleotide
  Target: LAMA2; (+) strand; PAM type: NRG; PAM sequence: CAG
aatcacttgaaccctggagg

SEQ ID NO: 120059 - DNA, 20 bp, Artificial Sequence
  Description of Artificial Sequence: Synthetic oligonucleotide
  Target: LAMA2; (+) strand; PAM type: NRG; PAM sequence: GAG
tcacttgaaccctggaggca

SEQ ID NO: 120060 - DNA, 20 bp, Artificial Sequence
  Description of Artificial Sequence: Synthetic oligonucleotide
  Target: LAMA2; (+) strand; PAM type: NRG; PAM sequence: AGG
cacttgaaccctggaggcag

SEQ ID NO: 120061 - DNA, 20 bp, Artificial Sequence
  Description of Artificial Sequence: Synthetic oligonucleotide
  Target: LAMA2; (+) strand; PAM type: NRG; PAM sequence: CAG
aaccctggaggcagaggttg

SEQ ID NO: 120062 - DNA, 20 bp, Artificial Sequence
  Description of Artificial Sequence: Synthetic oligonucleotide
  Target: LAMA2; (+) strand; PAM type: NRG; PAM sequence: GAG
ctggaggcagaggttgcagt

SEQ ID NO: 120063 - DNA, 20 bp, Artificial Sequence
  Description of Artificial Sequence: Synthetic oligonucleotide
  Target: LAMA2; (+) strand; PAM type: NRG; PAM sequence: GAG
ggcagaggttgcagtgagcc

SEQ ID NO: 120064 - DNA, 20 bp, Artificial Sequence
  Description of Artificial Sequence: Synthetic oligonucleotide
  Target: LAMA2; (+) strand; PAM type: NRG; PAM sequence: CAG
gagatcgtgtcattgcactc

SEQ ID NO: 120065 - DNA, 20 bp, Artificial Sequence
  Description of Artificial Sequence: Synthetic oligonucleotide
  Target: LAMA2; (+) strand; PAM type: NRG; PAM sequence: TGG
cgtgtcattgcactccagcc

SEQ ID NO: 120066 - DNA, 20 bp, Artificial Sequence
  Description of Artificial Sequence: Synthetic oligonucleotide
  Target: LAMA2; (+) strand; PAM type: NRG; PAM sequence: GGG
gtgtcattgcactccagcct

SEQ ID NO: 120067 - DNA, 20 bp, Artificial Sequence
  Description of Artificial Sequence: Synthetic oligonucleotide
  Target: LAMA2; (+) strand; PAM type: NRG; PAM sequence: CAG
ttgcactccagcctgggcaa

SEQ ID NO: 120068 - DNA, 20 bp, Artificial Sequence
  Description of Artificial Sequence: Synthetic oligonucleotide
  Target: LAMA2; (+) strand; PAM type: NRG; PAM sequence: GAG
gcactccagcctgggcaaca

SEQ ID NO: 120069 - DNA, 20 bp, Artificial Sequence
  Description of Artificial Sequence: Synthetic oligonucleotide
  Target: LAMA2; (+) strand; PAM type: NRG; PAM sequence: AGG
cactccagcctgggcaacag

SEQ ID NO: 120070 - DNA, 20 bp, Artificial Sequence
  Description of Artificial Sequence: Synthetic oligonucleotide
  Target: LAMA2; (+) strand; PAM type: NRG; PAM sequence: GGG
actccagcctgggcaacaga

SEQ ID NO: 120071 - DNA, 20 bp, Artificial Sequence
  Description of Artificial Sequence: Synthetic oligonucleotide
  Target: LAMA2; (+) strand; PAM type: NRG; PAM sequence: GAG
tccagcctgggcaacagagg

SEQ ID NO: 120072 - DNA, 20 bp, Artificial Sequence
  Description of Artificial Sequence: Synthetic oligonucleotide
  Target: LAMA2; (+) strand; PAM type: NRG; PAM sequence: AAG
aaacaaaacaaaaatttaaa

SEQ ID NO: 120073 - DNA, 20 bp, Artificial Sequence
  Description of Artificial Sequence: Synthetic oligonucleotide
  Target: LAMA2; (+) strand; PAM type: NRG; PAM sequence: CAG
tttgcaacttatcatctatc

SEQ ID NO: 120074 - DNA, 20 bp, Artificial Sequence
  Description of Artificial Sequence: Synthetic oligonucleotide
  Target: LAMA2; (+) strand; PAM type: NRG; PAM sequence: CAG
cttatcatctatccagtttg

SEQ ID NO: 120075 - DNA, 20 bp, Artificial Sequence
  Description of Artificial Sequence: Synthetic oligonucleotide
  Target: LAMA2; (+) strand; PAM type: NRG; PAM sequence: TAG
atcatctatccagtttgcag

SEQ ID NO: 120076 - DNA, 20 bp, Artificial Sequence
  Description of Artificial Sequence: Synthetic oligonucleotide
  Target: LAMA2; (+) strand; PAM type: NRG; PAM sequence: AGG
tcatctatccagtttgcagt

SEQ ID NO: 120077 - DNA, 20 bp, Artificial Sequence
  Description of Artificial Sequence: Synthetic oligonucleotide
  Target: LAMA2; (+) strand; PAM type: NRG; PAM sequence: GGG
catctatccagtttgcagta

SEQ ID NO: 120078 - DNA, 20 bp, Artificial Sequence
  Description of Artificial Sequence: Synthetic oligonucleotide
  Target: LAMA2; (+) strand; PAM type: NRG; PAM sequence: TAG
gtttgcagtagggccttatt

SEQ ID NO: 120079 - DNA, 20 bp, Artificial Sequence
  Description of Artificial Sequence: Synthetic oligonucleotide
  Target: LAMA2; (+) strand; PAM type: NRG; PAM sequence: TAG
gtagggccttatttagcatc

SEQ ID NO: 120080 - DNA, 20 bp, Artificial Sequence
  Description of Artificial Sequence: Synthetic oligonucleotide
  Target: LAMA2; (+) strand; PAM type: NRG; PAM sequence: AAG
catctagaaaccatgtgaaa

SEQ ID NO: 120081 - DNA, 20 bp, Artificial Sequence
  Description of Artificial Sequence: Synthetic oligonucleotide
  Target: LAMA2; (+) strand; PAM type: NRG; PAM sequence: CAG
agaaaccatgtgaaaaagat

SEQ ID NO: 120082 - DNA, 20 bp, Artificial Sequence
  Description of Artificial Sequence: Synthetic oligonucleotide
  Target: LAMA2; (+) strand; PAM type: NRG; PAM sequence: AGG
gaaaccatgtgaaaaagatc

SEQ ID NO: 120083 - DNA, 20 bp, Artificial Sequence
  Description of Artificial Sequence: Synthetic oligonucleotide
  Target: LAMA2; (+) strand; PAM type: NRG; PAM sequence: AAG
accatgtgaaaaagatcagg

SEQ ID NO: 120084 - DNA, 20 bp, Artificial Sequence
  Description of Artificial Sequence: Synthetic oligonucleotide
  Target: LAMA2; (+) strand; PAM type: NRG; PAM sequence: TGG
ttgtaaataattattgtaaa

SEQ ID NO: 120085 - DNA, 20 bp, Artificial Sequence
  Description of Artificial Sequence: Synthetic oligonucleotide
  Target: LAMA2; (+) strand; PAM type: NRG; PAM sequence: AAG
attattgtaaatggttgcac

SEQ ID NO: 120086 - DNA, 20 bp, Artificial Sequence
  Description of Artificial Sequence: Synthetic oligonucleotide
  Target: LAMA2; (+) strand; PAM type: NRG; PAM sequence: TGG
attgtaaatggttgcacaag

SEQ ID NO: 120087 - DNA, 20 bp, Artificial Sequence
  Description of Artificial Sequence: Synthetic oligonucleotide
  Target: LAMA2; (+) strand; PAM type: NRG; PAM sequence: TAG
aagtggtttaacttctaatc

SEQ ID NO: 120088 - DNA, 20 bp, Artificial Sequence
  Description of Artificial Sequence: Synthetic oligonucleotide
  Target: LAMA2; (+) strand; PAM type: NRG; PAM sequence: AAG
tggtttaacttctaatctag

SEQ ID NO: 120089 - DNA, 20 bp, Artificial Sequence
  Description of Artificial Sequence: Synthetic oligonucleotide
  Target: LAMA2; (+) strand; PAM type: NRG; PAM sequence: CGG
aacttctaatctagaagatt

SEQ ID NO: 120090 - DNA, 20 bp, Artificial Sequence
  Description of Artificial Sequence: Synthetic oligonucleotide
  Target: LAMA2; (+) strand; PAM type: NRG; PAM sequence: GGG
acttctaatctagaagattc

SEQ ID NO: 120091 - DNA, 20 bp, Artificial Sequence
  Description of Artificial Sequence: Synthetic oligonucleotide
  Target: LAMA2; (+) strand; PAM type: NRG; PAM sequence: TAG
taatctagaagattcgggtt

SEQ ID NO: 120092 - DNA, 20 bp, Artificial Sequence
  Description of Artificial Sequence: Synthetic oligonucleotide
  Target: LAMA2; (+) strand; PAM type: NRG; PAM sequence: AGG
aatctagaagattcgggttt

SEQ ID NO: 120093 - DNA, 20 bp, Artificial Sequence
  Description of Artificial Sequence: Synthetic oligonucleotide
  Target: LAMA2; (+) strand; PAM type: NRG; PAM sequence: CAG
tcgggtttaggatttgttta

SEQ ID NO: 120094 - DNA, 20 bp, Artificial Sequence
  Description of Artificial Sequence: Synthetic oligonucleotide
  Target: LAMA2; (+) strand; PAM type: NRG; PAM sequence: GAG
tttgtttacagttgcaactt

SEQ ID NO: 120095 - DNA, 20 bp, Artificial Sequence
  Description of Artificial Sequence: Synthetic oligonucleotide
  Target: LAMA2; (+) strand; PAM type: NRG; PAM sequence: TAG
agttgcaacttgagcctcga

SEQ ID NO: 120096 - DNA, 20 bp, Artificial Sequence
  Description of Artificial Sequence: Synthetic oligonucleotide
  Target: LAMA2; (+) strand; PAM type: NRG; PAM sequence: CAG
cttgagcctcgatagctaaa

SEQ ID NO: 120097 - DNA, 20 bp, Artificial Sequence
  Description of Artificial Sequence: Synthetic oligonucleotide
  Target: LAMA2; (+) strand; PAM type: NRG; PAM sequence: AGG
ttgagcctcgatagctaaac

SEQ ID NO: 120098 - DNA, 20 bp, Artificial Sequence
  Description of Artificial Sequence: Synthetic oligonucleotide
  Target: LAMA2; (+) strand; PAM type: NRG; PAM sequence: TAG
tcgatagctaaacaggaatt

SEQ ID NO: 120099 - DNA, 20 bp, Artificial Sequence
  Description of Artificial Sequence: Synthetic oligonucleotide
  Target: LAMA2; (+) strand; PAM type: NRG; PAM sequence: AGG
cgatagctaaacaggaattt

SEQ ID NO: 120100 - DNA, 20 bp, Artificial Sequence
  Description of Artificial Sequence: Synthetic oligonucleotide
  Target: LAMA2; (+) strand; PAM type: NRG; PAM sequence: CAG
tagctaaacaggaatttagg

SEQ ID NO: 120101 - DNA, 20 bp, Artificial Sequence
  Description of Artificial Sequence: Synthetic oligonucleotide
  Target: LAMA2; (+) strand; PAM type: NRG; PAM sequence: AAG
ctaaacaggaatttaggcag

SEQ ID NO: 120102 - DNA, 20 bp, Artificial Sequence
  Description of Artificial Sequence: Synthetic oligonucleotide
  Target: LAMA2; (+) strand; PAM type: NRG; PAM sequence: CAG
tttaggcagaagctccgttt

SEQ ID NO: 120103 - DNA, 20 bp, Artificial Sequence
  Description of Artificial Sequence: Synthetic oligonucleotide
  Target: LAMA2; (+) strand; PAM type: NRG; PAM sequence: GAG
gaagctccgtttcagtaaat

SEQ ID NO: 120104 - DNA, 20 bp, Artificial Sequence
  Description of Artificial Sequence: Synthetic oligonucleotide
  Target: LAMA2; (+) strand; PAM type: NRG; PAM sequence: AAG
gtttcagtaaatgagaaaac

SEQ ID NO: 120105 - DNA, 20 bp, Artificial Sequence
  Description of Artificial Sequence: Synthetic oligonucleotide
  Target: LAMA2; (+) strand; PAM type: NRG; PAM sequence: CAG
cagtaaatgagaaaacaaga

SEQ ID NO: 120106 - DNA, 20 bp, Artificial Sequence
  Description of Artificial Sequence: Synthetic oligonucleotide
  Target: LAMA2; (+) strand; PAM type: NRG; PAM sequence: GAG
gtaaatgagaaaacaagaca

SEQ ID NO: 120107 - DNA, 20 bp, Artificial Sequence
  Description of Artificial Sequence: Synthetic oligonucleotide
  Target: LAMA2; (+) strand; PAM type: NRG; PAM sequence: TAG
tgagaaaacaagacagagtt

SEQ ID NO: 120108 - DNA, 20 bp, Artificial Sequence
  Description of Artificial Sequence: Synthetic oligonucleotide
  Target: LAMA2; (+) strand; PAM type: NRG; PAM sequence: GAG
agaaaacaagacagagttta

SEQ ID NO: 120109 - DNA, 20 bp, Artificial Sequence
  Description of Artificial Sequence: Synthetic oligonucleotide
  Target: LAMA2; (+) strand; PAM type: NRG; PAM sequence: AAG
aacaagacagagtttagaga

SEQ ID NO: 120110 - DNA, 20 bp, Artificial Sequence
  Description of Artificial Sequence: Synthetic oligonucleotide
  Target: LAMA2; (+) strand; PAM type: NRG; PAM sequence: AAG
cagagtttagagaaagataa

SEQ ID NO: 120111 - DNA, 20 bp, Artificial Sequence
  Description of Artificial Sequence: Synthetic oligonucleotide
  Target: LAMA2; (+) strand; PAM type: NRG; PAM sequence: TAG
agtttagagaaagataaaag

SEQ ID NO: 120112 - DNA, 20 bp, Artificial Sequence
  Description of Artificial Sequence: Synthetic oligonucleotide
  Target: LAMA2; (+) strand; PAM type: NRG; PAM sequence: CAG
aaagataaaagtagattttc

SEQ ID NO: 120113 - DNA, 20 bp, Artificial Sequence
  Description of Artificial Sequence: Synthetic oligonucleotide
  Target: LAMA2; (+) strand; PAM type: NRG; PAM sequence: AGG
aagataaaagtagattttcc

SEQ ID NO: 120114 - DNA, 20 bp, Artificial Sequence
  Description of Artificial Sequence: Synthetic oligonucleotide
  Target: LAMA2; (+) strand; PAM type: NRG; PAM sequence: TAG
aaaagtagattttccaggct

SEQ ID NO: 120115 - DNA, 20 bp, Artificial Sequence
  Description of Artificial Sequence: Synthetic oligonucleotide
  Target: LAMA2; (+) strand; PAM type: NRG; PAM sequence: AAG
ttccaggcttagtatatacc

SEQ ID NO: 120116 - DNA, 20 bp, Artificial Sequence
  Description of Artificial Sequence: Synthetic oligonucleotide
  Target: LAMA2; (+) strand; PAM type: NRG; PAM sequence: CAG
caggcttagtatataccaag

SEQ ID NO: 120117 - DNA, 20 bp, Artificial Sequence
  Description of Artificial Sequence: Synthetic oligonucleotide
  Target: LAMA2; (+) strand; PAM type: NRG; PAM sequence: TAG
cttagtatataccaagcaga

SEQ ID NO: 120118 - DNA, 20 bp, Artificial Sequence
  Description of Artificial Sequence: Synthetic oligonucleotide
  Target: LAMA2; (+) strand; PAM type: NRG; PAM sequence: TAG
gatagaaataaaactaattc

SEQ ID NO: 120119 - DNA, 20 bp, Artificial Sequence
  Description of Artificial Sequence: Synthetic oligonucleotide
  Target: LAMA2; (+) strand; PAM type: NRG; PAM sequence: AGG
atagaaataaaactaattct

SEQ ID NO: 120120 - DNA, 20 bp, Artificial Sequence
  Description of Artificial Sequence: Synthetic oligonucleotide
  Target: LAMA2; (+) strand; PAM type: NRG; PAM sequence: TGG
taattctaggctttccccat

SEQ ID NO: 120121 - DNA, 20 bp, Artificial Sequence
  Description of Artificial Sequence: Synthetic oligonucleotide
  Target: LAMA2; (+) strand; PAM type: NRG; PAM sequence: AAG
tctaggctttccccattggt

SEQ ID NO: 120122 - DNA, 20 bp, Artificial Sequence
  Description of Artificial Sequence: Synthetic oligonucleotide
  Target: LAMA2; (+) strand; PAM type: NRG; PAM sequence: TAG
cccattggtaagactgaatt

SEQ ID NO: 120123 - DNA, 20 bp, Artificial Sequence
  Description of Artificial Sequence: Synthetic oligonucleotide
  Target: LAMA2; (+) strand; PAM type: NRG; PAM sequence: GAG
cattggtaagactgaattta

SEQ ID NO: 120124 - DNA, 20 bp, Artificial Sequence
  Description of Artificial Sequence: Synthetic oligonucleotide
  Target: LAMA2; (+) strand; PAM type: NRG; PAM sequence: AGG
attggtaagactgaatttag

SEQ ID NO: 120125 - DNA, 20 bp, Artificial Sequence
  Description of Artificial Sequence: Synthetic oligonucleotide
  Target: LAMA2; (+) strand; PAM type: NRG; PAM sequence: CAG
gtaagactgaatttagaggt

SEQ ID NO: 120126 - DNA, 20 bp, Artificial Sequence
  Description of Artificial Sequence: Synthetic oligonucleotide
  Target: LAMA2; (+) strand; PAM type: NRG; PAM sequence: AAG
agactgaatttagaggtcag

SEQ ID NO: 120127 - DNA, 20 bp, Artificial Sequence
  Description of Artificial Sequence: Synthetic oligonucleotide
  Target: LAMA2; (+) strand; PAM type: NRG; PAM sequence: AAG
tttagaggtcagaagttgtg

SEQ ID NO: 120128 - DNA, 20 bp, Artificial Sequence
  Description of Artificial Sequence: Synthetic oligonucleotide
  Target: LAMA2; (+) strand; PAM type: NRG; PAM sequence: AGG
ttagaggtcagaagttgtga

SEQ ID NO: 120129 - DNA, 20 bp, Artificial Sequence
  Description of Artificial Sequence: Synthetic oligonucleotide
  Target: LAMA2; (+) strand; PAM type: NRG; PAM sequence: TGG
tcagaagttgtgaaggaaat

SEQ ID NO: 120130 - DNA, 20 bp, Artificial Sequence
  Description of Artificial Sequence: Synthetic oligonucleotide
  Target: LAMA2; (+) strand; PAM type: NRG; PAM sequence: TGG
gaagttgtgaaggaaattgg

SEQ ID NO: 120131 - DNA, 20 bp, Artificial Sequence
  Description of Artificial Sequence: Synthetic oligonucleotide
  Target: LAMA2; (+) strand; PAM type: NRG; PAM sequence: GGG
aagttgtgaaggaaattggt

SEQ ID NO: 120132 - DNA, 20 bp, Artificial Sequence
  Description of Artificial Sequence: Synthetic oligonucleotide
  Target: LAMA2; (+) strand; PAM type: NRG; PAM sequence: GGG
agttgtgaaggaaattggtg

SEQ ID NO: 120133 - DNA, 20 bp, Artificial Sequence
  Description of Artificial Sequence: Synthetic oligonucleotide
  Target: LAMA2; (+) strand; PAM type: NRG; PAM sequence: TGG
gtgaaggaaattggtggggt

SEQ ID NO: 120134 - DNA, 20 bp, Artificial Sequence
  Description of Artificial Sequence: Synthetic oligonucleotide
  Target: LAMA2; (+) strand; PAM type: NRG; PAM sequence: GGG
tgaaggaaattggtggggtt

SEQ ID NO: 120135 - DNA, 20 bp, Artificial Sequence
  Description of Artificial Sequence: Synthetic oligonucleotide
  Target: LAMA2; (+) strand; PAM type: NRG; PAM sequence: TGG
ggggttgggcctatatgcat

SEQ ID NO: 120136 - DNA, 20 bp, Artificial Sequence
  Description of Artificial Sequence: Synthetic oligonucleotide
  Target: LAMA2; (+) strand; PAM type: NRG; PAM sequence: TGG
ggcctatatgcattggaatg

SEQ ID NO: 120137 - DNA, 20 bp, Artificial Sequence
  Description of Artificial Sequence: Synthetic oligonucleotide
  Target: LAMA2; (+) strand; PAM type: NRG; PAM sequence: CAG
ggtaaatgaatgaatgttta

SEQ ID NO: 120138 - DNA, 20 bp, Artificial Sequence
  Description of Artificial Sequence: Synthetic oligonucleotide
  Target: LAMA2; (+) strand; PAM type: NRG; PAM sequence: GAG
aatgaatgaatgtttacagt

SEQ ID NO: 120139 - DNA, 20 bp, Artificial Sequence
  Description of Artificial Sequence: Synthetic oligonucleotide
  Target: LAMA2; (+) strand; PAM type: NRG; PAM sequence: AAG
atgaatgtttacagtgagta

SEQ ID NO: 120140 - DNA, 20 bp, Artificial Sequence
  Description of Artificial Sequence: Synthetic oligonucleotide
  Target: LAMA2; (+) strand; PAM type: NRG; PAM sequence: AAG
aatgtttacagtgagtaaag

SEQ ID NO: 120141 - DNA, 20 bp, Artificial Sequence
  Description of Artificial Sequence: Synthetic oligonucleotide
  Target: LAMA2; (+) strand; PAM type: NRG; PAM sequence: TGG
taaaaaaattcctgctcttg

SEQ ID NO: 120142 - DNA, 20 bp, Artificial Sequence
  Description of Artificial Sequence: Synthetic oligonucleotide
  Target: LAMA2; (+) strand; PAM type: NRG; PAM sequence: TAG
gctcttgtggaactaatatt

SEQ ID NO: 120143 - DNA, 20 bp, Artificial Sequence
  Description of Artificial Sequence: Synthetic oligonucleotide
  Target: LAMA2; (+) strand; PAM type: NRG; PAM sequence: TGG
ttgtggaactaatatttagt

SEQ ID NO: 120144 - DNA, 20 bp, Artificial Sequence
  Description of Artificial Sequence: Synthetic oligonucleotide
  Target: LAMA2; (+) strand; PAM type: NRG; PAM sequence: GGG
tgtggaactaatatttagtt

SEQ ID NO: 120145 - DNA, 20 bp, Artificial Sequence
  Description of Artificial Sequence: Synthetic oligonucleotide
  Target: LAMA2; (+) strand; PAM type: NRG; PAM sequence: TGG
gaactaatatttagttggga

SEQ ID NO: 120146 - DNA, 20 bp, Artificial Sequence
  Description of Artificial Sequence: Synthetic oligonucleotide
  Target: LAMA2; (+) strand; PAM type: NRG; PAM sequence: GAG
actaatatttagttgggatg

SEQ ID NO: 120147 - DNA, 20 bp, Artificial Sequence
  Description of Artificial Sequence: Synthetic oligonucleotide
  Target: LAMA2; (+) strand; PAM type: NRG; PAM sequence: GAG
tatttagttgggatggagat

SEQ ID NO: 120148 - DNA, 20 bp, Artificial Sequence
  Description of Artificial Sequence: Synthetic oligonucleotide
  Target: LAMA2; (+) strand; PAM type: NRG; PAM sequence: CAG
ttagttgggatggagatgag

SEQ ID NO: 120149 - DNA, 20 bp, Artificial Sequence
  Description of Artificial Sequence: Synthetic oligonucleotide
  Target: LAMA2; (+) strand; PAM type: NRG; PAM sequence: CAG
ttgggatggagatgagcaga

SEQ ID NO: 120150 - DNA, 20 bp, Artificial Sequence
  Description of Artificial Sequence: Synthetic oligonucleotide
  Target: LAMA2; (+) strand; PAM type: NRG; PAM sequence: AGG
tgggatggagatgagcagac

SEQ ID NO: 120151 - DNA, 20 bp, Artificial Sequence
  Description of Artificial Sequence: Synthetic oligonucleotide
  Target: LAMA2; (+) strand; PAM type: NRG; PAM sequence: AAG
actatgatgaatatatgatg

SEQ ID NO: 120152 - DNA, 20 bp, Artificial Sequence
  Description of Artificial Sequence: Synthetic oligonucleotide
  Target: LAMA2; (+) strand; PAM type: NRG; PAM sequence: AAG
aatatatgatgaagcaacaa

SEQ ID NO: 120153 - DNA, 20 bp, Artificial Sequence
  Description of Artificial Sequence: Synthetic oligonucleotide
  Target: LAMA2; (+) strand; PAM type: NRG; PAM sequence: TAG
cacctatattgtataaaatg

SEQ ID NO: 120154 - DNA, 20 bp, Artificial Sequence
  Description of Artificial Sequence: Synthetic oligonucleotide
  Target: LAMA2; (+) strand; PAM type: NRG; PAM sequence: TGG
gtagttgatgaaaaatgtcc

SEQ ID NO: 120155 - DNA, 20 bp, Artificial Sequence
  Description of Artificial Sequence: Synthetic oligonucleotide
  Target: LAMA2; (+) strand; PAM type: NRG; PAM sequence: CGG
tcctggacaaacaaatacaa

SEQ ID NO: 120156 - DNA, 20 bp, Artificial Sequence
  Description of Artificial Sequence: Synthetic oligonucleotide
  Target: LAMA2; (+) strand; PAM type: NRG; PAM sequence: GGG
cctggacaaacaaatacaac

SEQ ID NO: 120157 - DNA, 20 bp, Artificial Sequence
  Description of Artificial Sequence: Synthetic oligonucleotide
  Target: LAMA2; (+) strand; PAM type: NRG; PAM sequence: GGG
ctggacaaacaaatacaacg

SEQ ID NO: 120158 - DNA, 20 bp, Artificial Sequence
  Description of Artificial Sequence: Synthetic oligonucleotide
  Target: LAMA2; (+) strand; PAM type: NRG; PAM sequence: AAG
acaaacaaatacaacggggt

SEQ ID NO: 120159 - DNA, 20 bp, Artificial Sequence
  Description of Artificial Sequence: Synthetic oligonucleotide
  Target: LAMA2; (+) strand; PAM type: NRG; PAM sequence: AGG
caaacaaatacaacggggta

SEQ ID NO: 120160 - DNA, 20 bp, Artificial Sequence
  Description of Artificial Sequence: Synthetic oligonucleotide
  Target: LAMA2; (+) strand; PAM type: NRG; PAM sequence: CAG
caaatacaacggggtaagga

SEQ ID NO: 120161 - DNA, 20 bp, Artificial Sequence
  Description of Artificial Sequence: Synthetic oligonucleotide
  Target: LAMA2; (+) strand; PAM type: NRG; PAM sequence: CAG
tacaacggggtaaggacagt

SEQ ID NO: 120162 - DNA, 20 bp, Artificial Sequence
  Description of Artificial Sequence: Synthetic oligonucleotide
  Target: LAMA2; (+) strand; PAM type: NRG; PAM sequence: AGG
acaacggggtaaggacagtc

SEQ ID NO: 120163 - DNA, 20 bp, Artificial Sequence
  Description of Artificial Sequence: Synthetic oligonucleotide
  Target: LAMA2; (+) strand; PAM type: NRG; PAM sequence: GAG
aacggggtaaggacagtcag

SEQ ID NO: 120164 - DNA, 20 bp, Artificial Sequence
  Description of Artificial Sequence: Synthetic oligonucleotide
  Target: LAMA2; (+) strand; PAM type: NRG; PAM sequence: TAG
gtaaggacagtcaggagttc

SEQ ID NO: 120165 - DNA, 20 bp, Artificial Sequence
  Description of Artificial Sequence: Synthetic oligonucleotide
  Target: LAMA2; (+) strand; PAM type: NRG; PAM sequence: AGG
taaggacagtcaggagttct

SEQ ID NO: 120166 - DNA, 20 bp, Artificial Sequence
  Description of Artificial Sequence: Synthetic oligonucleotide
  Target: LAMA2; (+) strand; PAM type: NRG; PAM sequence: TGG
acagtcaggagttctaggaa

SEQ ID NO: 120167 - DNA, 20 bp, Artificial Sequence
  Description of Artificial Sequence: Synthetic oligonucleotide
  Target: LAMA2; (+) strand; PAM type: NRG; PAM sequence: GAG
agtcaggagttctaggaatg

SEQ ID NO: 120168 - DNA, 20 bp, Artificial Sequence
  Description of Artificial Sequence: Synthetic oligonucleotide
  Target: LAMA2; (+) strand; PAM type: NRG; PAM sequence: AGG
gtcaggagttctaggaatgg

SEQ ID NO: 120169 - DNA, 20 bp, Artificial Sequence
  Description of Artificial Sequence: Synthetic oligonucleotide
  Target: LAMA2; (+) strand; PAM type: NRG; PAM sequence: GGG
tcaggagttctaggaatgga

SEQ ID NO: 120170 - DNA, 20 bp, Artificial Sequence
  Description of Artificial Sequence: Synthetic oligonucleotide
  Target: LAMA2; (+) strand; PAM type: NRG; PAM sequence: GAG
aggagttctaggaatggagg

SEQ ID NO: 120171 - DNA, 20 bp, Artificial Sequence
  Description of Artificial Sequence: Synthetic oligonucleotide
  Target: LAMA2; (+) strand; PAM type: NRG; PAM sequence: AGG
ggagttctaggaatggaggg

SEQ ID NO: 120172 - DNA, 20 bp, Artificial Sequence
  Description of Artificial Sequence: Synthetic oligonucleotide
  Target: LAMA2; (+) strand; PAM type: NRG; PAM sequence: TGG
taggaatggagggaggttga

SEQ ID NO: 120173 - DNA, 20 bp, Artificial Sequence
  Description of Artificial Sequence: Synthetic oligonucleotide
  Target: LAMA2; (+) strand; PAM type: NRG; PAM sequence: TGG
gaggttgatggctattttgt

SEQ ID NO: 120174 - DNA, 20 bp, Artificial Sequence
  Description of Artificial Sequence: Synthetic oligonucleotide
  Target: LAMA2; (+) strand; PAM type: NRG; PAM sequence: AAG
tgatggctattttgttggta

SEQ ID NO: 120175 - DNA, 20 bp, Artificial Sequence
  Description of Artificial Sequence: Synthetic oligonucleotide
  Target: LAMA2; (+) strand; PAM type: NRG; PAM sequence: AGG
gatggctattttgttggtaa

SEQ ID NO: 120176 - DNA, 20 bp, Artificial Sequence
  Description of Artificial Sequence: Synthetic oligonucleotide
  Target: LAMA2; (+) strand; PAM type: NRG; PAM sequence: TGG
gctattttgttggtaaaggt

SEQ ID NO: 120177 - DNA, 20 bp, Artificial Sequence
  Description of Artificial Sequence: Synthetic oligonucleotide
  Target: LAMA2; (+) strand; PAM type: NRG; PAM sequence: AAG
tttgttggtaaaggttggta

SEQ ID NO: 120178 - DNA, 20 bp, Artificial Sequence
  Description of Artificial Sequence: Synthetic oligonucleotide
  Target: LAMA2; (+) strand; PAM type: NRG; PAM sequence: AGG
ttgttggtaaaggttggtaa

SEQ ID NO: 120179 - DNA, 20 bp, Artificial Sequence
  Description of Artificial Sequence: Synthetic oligonucleotide
  Target: LAMA2; (+) strand; PAM type: NRG; PAM sequence: GAG
tggtaaaggttgacctcttt

SEQ ID NO: 120180 - DNA, 20 bp, Artificial Sequence
  Description of Artificial Sequence: Synthetic oligonucleotide
  Target: LAMA2; (+) strand; PAM type: NRG; PAM sequence: GAG
gtaaaggttgacctctttga

SEQ ID NO: 120181 - DNA, 20 bp, Artificial Sequence
  Description of Artificial Sequence: Synthetic oligonucleotide
  Target: LAMA2; (+) strand; PAM type: NRG; PAM sequence: AGG
taaaggttgacctctttgag

SEQ ID NO: 120182 - DNA, 20 bp, Artificial Sequence
  Description of Artificial Sequence: Synthetic oligonucleotide
  Target: LAMA2; (+) strand; PAM type: NRG; PAM sequence: TGG
tctttgagaggatctcactt

SEQ ID NO: 120183 - DNA, 20 bp, Artificial Sequence
  Description of Artificial Sequence: Synthetic oligonucleotide
  Target: LAMA2; (+) strand; PAM type: NRG; PAM sequence: AAG
ctcactttggcaaacacttg

SEQ ID NO: 120184 - DNA, 20 bp, Artificial Sequence
  Description of Artificial Sequence: Synthetic oligonucleotide
  Target: LAMA2; (+) strand; PAM type: NRG; PAM sequence: TGG
gcaaacacttgaagatgacg

SEQ ID NO: 120185 - DNA, 20 bp, Artificial Sequence
  Description of Artificial Sequence: Synthetic oligonucleotide
  Target: LAMA2; (+) strand; PAM type: NRG; PAM sequence: GGG
caaacacttgaagatgacgt

SEQ ID NO: 120186 - DNA, 20 bp, Artificial Sequence
  Description of Artificial Sequence: Synthetic oligonucleotide
  Target: LAMA2; (+) strand; PAM type: NRG; PAM sequence: GAG
aacacttgaagatgacgtgg

SEQ ID NO: 120187 - DNA, 20 bp, Artificial Sequence
  Description of Artificial Sequence: Synthetic oligonucleotide
  Target: LAMA2; (+) strand; PAM type: NRG; PAM sequence: CAG
tgacgtgggagtgatttgtg

SEQ ID NO: 120188 - DNA, 20 bp, Artificial Sequence
  Description of Artificial Sequence: Synthetic oligonucleotide
  Target: LAMA2; (+) strand; PAM type: NRG; PAM sequence: CAG
ggagtgatttgtgcagttat

SEQ ID NO: 120189 - DNA, 20 bp, Artificial Sequence
  Description of Artificial Sequence: Synthetic oligonucleotide
  Target: LAMA2; (+) strand; PAM type: NRG; PAM sequence: AGG
gagtgatttgtgcagttatc

SEQ ID NO: 120190 - DNA, 20 bp, Artificial Sequence
  Description of Artificial Sequence: Synthetic oligonucleotide
  Target: LAMA2; (+) strand; PAM type: NRG; PAM sequence: GGG
agtgatttgtgcagttatca

SEQ ID NO: 120191 - DNA, 20 bp, Artificial Sequence
  Description of Artificial Sequence: Synthetic oligonucleotide
  Target: LAMA2; (+) strand; PAM type: NRG; PAM sequence: GGG
gtgatttgtgcagttatcag

SEQ ID NO: 120192 - DNA, 20 bp, Artificial Sequence
  Description of Artificial Sequence: Synthetic oligonucleotide
  Target: LAMA2; (+) strand; PAM type: NRG; PAM sequence: GGG
tgatttgtgcagttatcagg

SEQ ID NO: 120193 - DNA, 20 bp, Artificial Sequence
  Description of Artificial Sequence: Synthetic oligonucleotide
  Target: LAMA2; (+) strand; PAM type: NRG; PAM sequence: AAG
tttgtgcagttatcaggggg

SEQ ID NO: 120194 - DNA, 20 bp, Artificial Sequence
  Description of Artificial Sequence: Synthetic oligonucleotide
  Target: LAMA2; (+) strand; PAM type: NRG; PAM sequence: GAG
tgtgcagttatcagggggaa

SEQ ID NO: 120195 - DNA, 20 bp, Artificial Sequence
  Description of Artificial Sequence: Synthetic oligonucleotide
  Target: LAMA2; (+) strand; PAM type: NRG; PAM sequence: CAG
ggggaagagtactctctgta

SEQ ID NO: 120196 - DNA, 20 bp, Artificial Sequence
  Description of Artificial Sequence: Synthetic oligonucleotide
  Target: LAMA2; (+) strand; PAM type: NRG; PAM sequence: AGG
gggaagagtactctctgtac

SEQ ID NO: 120197 - DNA, 20 bp, Artificial Sequence
  Description of Artificial Sequence: Synthetic oligonucleotide
  Target: LAMA2; (+) strand; PAM type: NRG; PAM sequence: GGG
ggaagagtactctctgtaca

SEQ ID NO: 120198 - DNA, 20 bp, Artificial Sequence
  Description of Artificial Sequence: Synthetic oligonucleotide
  Target: LAMA2; (+) strand; PAM type: NRG; PAM sequence: GAG
aagagtactctctgtacagg

SEQ ID NO: 120199 - DNA, 20 bp, Artificial Sequence
  Description of Artificial Sequence: Synthetic oligonucleotide
  Target: LAMA2; (+) strand; PAM type: NRG; PAM sequence: CAG
agtactctctgtacagggag

SEQ ID NO: 120200 - DNA, 20 bp, Artificial Sequence
  Description of Artificial Sequence: Synthetic oligonucleotide
  Target: LAMA2; (+) strand; PAM type: NRG; PAM sequence: AGG
gtactctctgtacagggagc

SEQ ID NO: 120201 - DNA, 20 bp, Artificial Sequence
  Description of Artificial Sequence: Synthetic oligonucleotide
  Target: LAMA2; (+) strand; PAM type: NRG; PAM sequence: GAG
tgtacagggagcaggcctat

SEQ ID NO: 120202 - DNA, 20 bp, Artificial Sequence
  Description of Artificial Sequence: Synthetic oligonucleotide
  Target: LAMA2; (+) strand; PAM type: NRG; PAM sequence: AGG
gtacagggagcaggcctatg

SEQ ID NO: 120203 - DNA, 20 bp, Artificial Sequence
  Description of Artificial Sequence: Synthetic oligonucleotide
  Target: LAMA2; (+) strand; PAM type: NRG; PAM sequence: AAG
gagcaggcctatgaggatct

SEQ ID NO: 120204 - DNA, 20 bp, Artificial Sequence
  Description of Artificial Sequence: Synthetic oligonucleotide
  Target: LAMA2; (+) strand; PAM type: NRG; PAM sequence: TGG
ggcctatgaggatctaagct

SEQ ID NO: 120205 - DNA, 20 bp, Artificial Sequence
  Description of Artificial Sequence: Synthetic oligonucleotide
  Target: LAMA2; (+) strand; PAM type: NRG; PAM sequence: GAG
cctatgaggatctaagcttg

SEQ ID NO: 120206 - DNA, 20 bp, Artificial Sequence
  Description of Artificial Sequence: Synthetic oligonucleotide
  Target: LAMA2; (+) strand; PAM type: NRG; PAM sequence: TGG
gaggatctaagcttggagca

SEQ ID NO: 120207 - DNA, 20 bp, Artificial Sequence
  Description of Artificial Sequence: Synthetic oligonucleotide
  Target: LAMA2; (+) strand; PAM type: NRG; PAM sequence: GAG
atctaagcttggagcatggt

SEQ ID NO: 120208 - DNA, 20 bp, Artificial Sequence
  Description of Artificial Sequence: Synthetic oligonucleotide
  Target: LAMA2; (+) strand; PAM type: NRG; PAM sequence: AAG
taagcttggagcatggtgag

SEQ ID NO: 120209 - DNA, 20 bp, Artificial Sequence
  Description of Artificial Sequence: Synthetic oligonucleotide
  Target: LAMA2; (+) strand; PAM type: NRG; PAM sequence: AGG
aagcttggagcatggtgaga

SEQ ID NO: 120210 - DNA, 20 bp, Artificial Sequence
  Description of Artificial Sequence: Synthetic oligonucleotide
  Target: LAMA2; (+) strand; PAM type: NRG; PAM sequence: CAG
tggagcatggtgagaaggct

SEQ ID NO: 120211 - DNA, 20 bp, Artificial Sequence
  Description of Artificial Sequence: Synthetic oligonucleotide
  Target: LAMA2; (+) strand; PAM type: NRG; PAM sequence: GAG
gagcatggtgagaaggctca

SEQ ID NO: 120212 - DNA, 20 bp, Artificial Sequence
  Description of Artificial Sequence: Synthetic oligonucleotide
  Target: LAMA2; (+) strand; PAM type: NRG; PAM sequence: AGG
agcatggtgagaaggctcag

SEQ ID NO: 120213 - DNA, 20 bp, Artificial Sequence
  Description of Artificial Sequence: Synthetic oligonucleotide
  Target: LAMA2; (+) strand; PAM type: NRG; PAM sequence: GAG
catggtgagaaggctcagag

SEQ ID NO: 120214 - DNA, 20 bp, Artificial Sequence
  Description of Artificial Sequence: Synthetic oligonucleotide
  Target: LAMA2; (+) strand; PAM type: NRG; PAM sequence: TGG
gagaaggctcagaggagaaa

SEQ ID NO: 120215 - DNA, 20 bp, Artificial Sequence
  Description of Artificial Sequence: Synthetic oligonucleotide
  Target: LAMA2; (+) strand; PAM type: NRG; PAM sequence: GGG
agaaggctcagaggagaaat

SEQ ID NO: 120216 - DNA, 20 bp, Artificial Sequence
  Description of Artificial Sequence: Synthetic oligonucleotide
  Target: LAMA2; (+) strand; PAM type: NRG; PAM sequence: TGG
tcagaggagaaatgggaaac

SEQ ID NO: 120217 - DNA, 20 bp, Artificial Sequence
  Description of Artificial Sequence: Synthetic oligonucleotide
  Target: LAMA2; (+) strand; PAM type: NRG; PAM sequence: TAG
aaatgggaaactggaacaca

SEQ ID NO: 120218 - DNA, 20 bp, Artificial Sequence
  Description of Artificial Sequence: Synthetic oligonucleotide
  Target: LAMA2; (+) strand; PAM type: NRG; PAM sequence: AAG
cattgttgaccttaatttta

SEQ ID NO: 120219 - DNA, 20 bp, Artificial Sequence
  Description of Artificial Sequence: Synthetic oligonucleotide
  Target: LAMA2; (+) strand; PAM type: NRG; PAM sequence: GAG
aagattttgcctttttgtct

SEQ ID NO: 120220 - DNA, 20 bp, Artificial Sequence
  Description of Artificial Sequence: Synthetic oligonucleotide
  Target: LAMA2; (+) strand; PAM type: NRG; PAM sequence: GAG
ttttgcctttttgtctgagt

SEQ ID NO: 120221 - DNA, 20 bp, Artificial Sequence
  Description of Artificial Sequence: Synthetic oligonucleotide
  Target: LAMA2; (+) strand; PAM type: NRG; PAM sequence: GAG
cctttttgtctgagtgagat

SEQ ID NO: 120222 - DNA, 20 bp, Artificial Sequence
  Description of Artificial Sequence: Synthetic oligonucleotide
  Target: LAMA2; (+) strand; PAM type: NRG; PAM sequence: AGG
ctttttgtctgagtgagatg

SEQ ID NO: 120223 - DNA, 20 bp, Artificial Sequence
  Description of Artificial Sequence: Synthetic oligonucleotide
  Target: LAMA2; (+) strand; PAM type: NRG; PAM sequence: GAG
ttttgtctgagtgagatgag

SEQ ID NO: 120224 - DNA, 20 bp, Artificial Sequence
  Description of Artificial Sequence: Synthetic oligonucleotide
  Target: LAMA2; (+) strand; PAM type: NRG; PAM sequence: AGG
tttgtctgagtgagatgagg

SEQ ID NO: 120225 - DNA, 20 bp, Artificial Sequence
  Description of Artificial Sequence: Synthetic oligonucleotide
  Target: LAMA2; (+) strand; PAM type: NRG; PAM sequence: CGG
tgagtgagatgaggaggcat

SEQ ID NO: 120226 - DNA, 20 bp, Artificial Sequence
  Description of Artificial Sequence: Synthetic oligonucleotide
  Target: LAMA2; (+) strand; PAM type: NRG; PAM sequence: GAG
tgagatgaggaggcatcggt

SEQ ID NO: 120227 - DNA, 20 bp, Artificial Sequence
  Description of Artificial Sequence: Synthetic oligonucleotide
  Target: LAMA2; (+) strand; PAM type: NRG; PAM sequence: CAG
gaggcatcggtgagttttaa

SEQ ID NO: 120228 - DNA, 20 bp, Artificial Sequence
  Description of Artificial Sequence: Synthetic oligonucleotide
  Target: LAMA2; (+) strand; PAM type: NRG; PAM sequence: GAG
ggcatcggtgagttttaaca

SEQ ID NO: 120229 - DNA, 20 bp, Artificial Sequence
  Description of Artificial Sequence: Synthetic oligonucleotide
  Target: LAMA2; (+) strand; PAM type: NRG; PAM sequence: CAG
taaataaatgaataaaatca

SEQ ID NO: 120230 - DNA, 20 bp, Artificial Sequence
  Description of Artificial Sequence: Synthetic oligonucleotide
  Target: LAMA2; (+) strand; PAM type: NRG; PAM sequence: AGG
aaataaatgaataaaatcac

SEQ ID NO: 120231 - DNA, 20 bp, Artificial Sequence
  Description of Artificial Sequence: Synthetic oligonucleotide
  Target: LAMA2; (+) strand; PAM type: NRG; PAM sequence: TGG
ctcaaatacgcactaatcca

SEQ ID NO: 120232 - DNA, 20 bp, Artificial Sequence
  Description of Artificial Sequence: Synthetic oligonucleotide
  Target: LAMA2; (+) strand; PAM type: NRG; PAM sequence: GGG
tcaaatacgcactaatccat

SEQ ID NO: 120233 - DNA, 20 bp, Artificial Sequence
  Description of Artificial Sequence: Synthetic oligonucleotide
  Target: LAMA2; (+) strand; PAM type: NRG; PAM sequence: TAG
tacgcactaatccatgggac

SEQ ID NO: 120234 - DNA, 20 bp, Artificial Sequence
  Description of Artificial Sequence: Synthetic oligonucleotide
  Target: LAMA2; (+) strand; PAM type: NRG; PAM sequence: CAG
aatccatgggactagaccaa

SEQ ID NO: 120235 - DNA, 20 bp, Artificial Sequence
  Description of Artificial Sequence: Synthetic oligonucleotide
  Target: LAMA2; (+) strand; PAM type: NRG; PAM sequence: AAG
tgggactagaccaacagtcc

SEQ ID NO: 120236 - DNA, 20 bp, Artificial Sequence
  Description of Artificial Sequence: Synthetic oligonucleotide
  Target: LAMA2; (+) strand; PAM type: NRG; PAM sequence: TAG
ctagaccaacagtccaagca

SEQ ID NO: 120237 - DNA, 20 bp, Artificial Sequence
  Description of Artificial Sequence: Synthetic oligonucleotide
  Target: LAMA2; (+) strand; PAM type: NRG; PAM sequence: TAG
gtccaagcatagaattattt

SEQ ID NO: 120238 - DNA, 20 bp, Artificial Sequence
  Description of Artificial Sequence: Synthetic oligonucleotide
  Target: LAMA2; (+) strand; PAM type: NRG; PAM sequence: TAG
tgtcccaaacactccactga

SEQ ID NO: 120239 - DNA, 20 bp, Artificial Sequence
  Description of Artificial Sequence: Synthetic oligonucleotide
  Target: LAMA2; (+) strand; PAM type: NRG; PAM sequence: AAG
tccactgatagaacacattt

SEQ ID NO: 120240 - DNA, 20 bp, Artificial Sequence
  Description of Artificial Sequence: Synthetic oligonucleotide
  Target: LAMA2; (+) strand; PAM type: NRG; PAM sequence: AAG
atttaagtgattctacattc

SEQ ID NO: 120241 - DNA, 20 bp, Artificial Sequence
  Description of Artificial Sequence: Synthetic oligonucleotide
  Target: LAMA2; (+) strand; PAM type: NRG; PAM sequence: GAG
ttaagtgattctacattcaa

SEQ ID NO: 120242 - DNA, 20 bp, Artificial Sequence
  Description of Artificial Sequence: Synthetic oligonucleotide
  Target: LAMA2; (+) strand; PAM type: NRG; PAM sequence: TGG
ccacttcaaccatcttatca

SEQ ID NO: 120243 - DNA, 20 bp, Artificial Sequence
  Description of Artificial Sequence: Synthetic oligonucleotide
  Target: LAMA2; (+) strand; PAM type: NRG; PAM sequence: AAG
tcaaccatcttatcatggtg

SEQ ID NO: 120244 - DNA, 20 bp, Artificial Sequence
  Description of Artificial Sequence: Synthetic oligonucleotide
  Target: LAMA2; (+) strand; PAM type: NRG; PAM sequence: CAG
catcttatcatggtgaagct

SEQ ID NO: 120245 - DNA, 20 bp, Artificial Sequence
  Description of Artificial Sequence: Synthetic oligonucleotide
  Target: LAMA2; (+) strand; PAM type: NRG; PAM sequence: TGG
taacactcttttcttccctt

SEQ ID NO: 120246 - DNA, 20 bp, Artificial Sequence
  Description of Artificial Sequence: Synthetic oligonucleotide
  Target: LAMA2; (+) strand; PAM type: NRG; PAM sequence: CAG
ttttcttccctttggcaact

SEQ ID NO: 120247 - DNA, 20 bp, Artificial Sequence
  Description of Artificial Sequence: Synthetic oligonucleotide
  Target: LAMA2; (+) strand; PAM type: NRG; PAM sequence: CAG
ttccattattcaaaatatat

SEQ ID NO: 120248 - DNA, 20 bp, Artificial Sequence
  Description of Artificial Sequence: Synthetic oligonucleotide
  Target: LAMA2; (+) strand; PAM type: NRG; PAM sequence: CAG
ttcaaaatatatcagtacct

SEQ ID NO: 120249 - DNA, 20 bp, Artificial Sequence
  Description of Artificial Sequence: Synthetic oligonucleotide
  Target: LAMA2; (+) strand; PAM type: NRG; PAM sequence: CAG
cctcagaaacaatttgtgtg

SEQ ID NO: 120250 - DNA, 20 bp, Artificial Sequence
  Description of Artificial Sequence: Synthetic oligonucleotide
  Target: LAMA2; (+) strand; PAM type: NRG; PAM sequence: AGG
ctcagaaacaatttgtgtgc

SEQ ID NO: 120251 - DNA, 20 bp, Artificial Sequence
  Description of Artificial Sequence: Synthetic oligonucleotide
  Target: LAMA2; (+) strand; PAM type: NRG; PAM sequence: GGG
tcagaaacaatttgtgtgca

SEQ ID NO: 120252 - DNA, 20 bp, Artificial Sequence
  Description of Artificial Sequence: Synthetic oligonucleotide
  Target: LAMA2; (+) strand; PAM type: NRG; PAM sequence: CAG
ttgtgtgcagggaacttccg

SEQ ID NO: 120253 - DNA, 20 bp, Artificial Sequence
  Description of Artificial Sequence: Synthetic oligonucleotide
  Target: LAMA2; (+) strand; PAM type: NRG; PAM sequence: CAG
agcttttaaaaattttgctc

SEQ ID NO: 120254 - DNA, 20 bp, Artificial Sequence
  Description of Artificial Sequence: Synthetic oligonucleotide
  Target: LAMA2; (+) strand; PAM type: NRG; PAM sequence: TAG
ttaaaaattttgctccagtg

SEQ ID NO: 120255 - DNA, 20 bp, Artificial Sequence
  Description of Artificial Sequence: Synthetic oligonucleotide
  Target: LAMA2; (+) strand; PAM type: NRG; PAM sequence: TAG
aaattttgctccagtgtagt

SEQ ID NO: 120256 - DNA, 20 bp, Artificial Sequence
  Description of Artificial Sequence: Synthetic oligonucleotide
  Target: LAMA2; (+) strand; PAM type: NRG; PAM sequence: CAG
cagtgtagttagaaatatga

SEQ ID NO: 120257 - DNA, 20 bp, Artificial Sequence
  Description of Artificial Sequence: Synthetic oligonucleotide
  Target: LAMA2; (+) strand; PAM type: NRG; PAM sequence: AAG
tagaaatatgacagattttt

SEQ ID NO: 120258 - DNA, 20 bp, Artificial Sequence
  Description of Artificial Sequence: Synthetic oligonucleotide
  Target: LAMA2; (+) strand; PAM type: NRG; PAM sequence: AGG
agaaatatgacagattttta

SEQ ID NO: 120259 - DNA, 20 bp, Artificial Sequence
  Description of Artificial Sequence: Synthetic oligonucleotide
  Target: LAMA2; (+) strand; PAM type: NRG; PAM sequence: GGG
gaaatatgacagatttttaa

SEQ ID NO: 120260 - DNA, 20 bp, Artificial Sequence
  Description of Artificial Sequence: Synthetic oligonucleotide
  Target: LAMA2; (+) strand; PAM type: NRG; PAM sequence: TAG
tttttaagggtaattttaaa

SEQ ID NO: 120261 - DNA, 20 bp, Artificial Sequence
  Description of Artificial Sequence: Synthetic oligonucleotide
  Target: LAMA2; (+) strand; PAM type: NRG; PAM sequence: TGG
gaattattcacaatcccaca

SEQ ID NO: 120262 - DNA, 20 bp, Artificial Sequence
  Description of Artificial Sequence: Synthetic oligonucleotide
  Target: LAMA2; (+) strand; PAM type: NRG; PAM sequence: TAG
cacaatcccacatggacata

SEQ ID NO: 120263 - DNA, 20 bp, Artificial Sequence
  Description of Artificial Sequence: Synthetic oligonucleotide
  Target: LAMA2; (+) strand; PAM type: NRG; PAM sequence: AGG
acaatcccacatggacatat

SEQ ID NO: 120264 - DNA, 20 bp, Artificial Sequence
  Description of Artificial Sequence: Synthetic oligonucleotide
  Target: LAMA2; (+) strand; PAM type: NRG; PAM sequence: TGG
acatggacatataggtactt

SEQ ID NO: 120265 - DNA, 20 bp, Artificial Sequence
  Description of Artificial Sequence: Synthetic oligonucleotide
  Target: LAMA2; (+) strand; PAM type: NRG; PAM sequence: GAG
atggacatataggtactttg

SEQ ID NO: 120266 - DNA, 20 bp, Artificial Sequence
  Description of Artificial Sequence: Synthetic oligonucleotide
  Target: LAMA2; (+) strand; PAM type: NRG; PAM sequence: CAG
tttattatctatttcaatct

SEQ ID NO: 120267 - DNA, 20 bp, Artificial Sequence
  Description of Artificial Sequence: Synthetic oligonucleotide
  Target: LAMA2; (+) strand; PAM type: NRG; PAM sequence: AAG
tatttcaatctcagacgcta

SEQ ID NO: 120268 - DNA, 20 bp, Artificial Sequence
  Description of Artificial Sequence: Synthetic oligonucleotide
  Target: LAMA2; (+) strand; PAM type: NRG; PAM sequence: TAG
caatctcagacgctaaagtt

SEQ ID NO: 120269 - DNA, 20 bp, Artificial Sequence
  Description of Artificial Sequence: Synthetic oligonucleotide
  Target: LAMA2; (+) strand; PAM type: NRG; PAM sequence: TAG
cacaattgttgaaaatgaca

SEQ ID NO: 120270 - DNA, 20 bp, Artificial Sequence
  Description of Artificial Sequence: Synthetic oligonucleotide
  Target: LAMA2; (+) strand; PAM type: NRG; PAM sequence: CAG
aatgctacctgttttacatt

SEQ ID NO: 120271 - DNA, 20 bp, Artificial Sequence
  Description of Artificial Sequence: Synthetic oligonucleotide
  Target: LAMA2; (+) strand; PAM type: NRG; PAM sequence: AAG
tccatttttgttactgtttt

SEQ ID NO: 120272 - DNA, 20 bp, Artificial Sequence
  Description of Artificial Sequence: Synthetic oligonucleotide
  Target: LAMA2; (+) strand; PAM type: NRG; PAM sequence: AAG
ctgttttaagaatcacttgt

SEQ ID NO: 120273 - DNA, 20 bp, Artificial Sequence
  Description of Artificial Sequence: Synthetic oligonucleotide
  Target: LAMA2; (+) strand; PAM type: NRG; PAM sequence: TGG
aagctttaacaataacgttt

SEQ ID NO: 120274 - DNA, 20 bp, Artificial Sequence
  Description of Artificial Sequence: Synthetic oligonucleotide
  Target: LAMA2; (+) strand; PAM type: NRG; PAM sequence: TAG
aacaataacgttttggacta

SEQ ID NO: 120275 - DNA, 20 bp, Artificial Sequence
  Description of Artificial Sequence: Synthetic oligonucleotide
  Target: LAMA2; (+) strand; PAM type: NRG; PAM sequence: TGG
ggactatagtaatgcaattt

SEQ ID NO: 120276 - DNA, 20 bp, Artificial Sequence
  Description of Artificial Sequence: Synthetic oligonucleotide
  Target: LAMA2; (+) strand; PAM type: NRG; PAM sequence: TAG
cctaatttaattctgtcatt

SEQ ID NO: 120277 - DNA, 20 bp, Artificial Sequence
  Description of Artificial Sequence: Synthetic oligonucleotide
  Target: LAMA2; (+) strand; PAM type: NRG; PAM sequence: AAG
ttctgtcatttagaacaaaa

SEQ ID NO: 120278 - DNA, 20 bp, Artificial Sequence
  Description of Artificial Sequence: Synthetic oligonucleotide
  Target: LAMA2; (+) strand; PAM type: NRG; PAM sequence: AGG
tctgtcatttagaacaaaaa

SEQ ID NO: 120279 - DNA, 20 bp, Artificial Sequence
  Description of Artificial Sequence: Synthetic oligonucleotide
  Target: LAMA2; (+) strand; PAM type: NRG; PAM sequence: TGG
aacaaaaaaggtaaaaaaat

SEQ ID NO: 120280 - DNA, 20 bp, Artificial Sequence
  Description of Artificial Sequence: Synthetic oligonucleotide
  Target: LAMA2; (+) strand; PAM type: NRG; PAM sequence: TAG
aaaaaggtaaaaaaattgga

SEQ ID NO: 120281 - DNA, 20 bp, Artificial Sequence
  Description of Artificial Sequence: Synthetic oligonucleotide
  Target: LAMA2; (+) strand; PAM type: NRG; PAM sequence: TAG
tctttattttccttttccct

SEQ ID NO: 120282 - DNA, 20 bp, Artificial Sequence
  Description of Artificial Sequence: Synthetic oligonucleotide
  Target: LAMA2; (+) strand; PAM type: NRG; PAM sequence: AAG
attcttcctgtgaataaaat

SEQ ID NO: 120283 - DNA, 20 bp, Artificial Sequence
  Description of Artificial Sequence: Synthetic oligonucleotide
  Target: LAMA2; (+) strand; PAM type: NRG; PAM sequence: AGG
ttcttcctgtgaataaaata

SEQ ID NO: 120284 - DNA, 20 bp, Artificial Sequence
  Description of Artificial Sequence: Synthetic oligonucleotide
  Target: LAMA2; (+) strand; PAM type: NRG; PAM sequence: TAG
ataaaataaggtaattaaaa

SEQ ID NO: 120285 - DNA, 20 bp, Artificial Sequence
  Description of Artificial Sequence: Synthetic oligonucleotide
  Target: LAMA2; (+) strand; PAM type: NRG; PAM sequence: TAG
attctaacaaatataacatt

SEQ ID NO: 120286 - DNA, 20 bp, Artificial Sequence
  Description of Artificial Sequence: Synthetic oligonucleotide
  Target: LAMA2; (+) strand; PAM type: NRG; PAM sequence: AGG
ttctaacaaatataacattt

SEQ ID NO: 120287 - DNA, 20 bp, Artificial Sequence
  Description of Artificial Sequence: Synthetic oligonucleotide
  Target: LAMA2; (+) strand; PAM type: NRG; PAM sequence: AAG
taacaaatataacatttagg

SEQ ID NO: 120288 - DNA, 20 bp, Artificial Sequence
  Description of Artificial Sequence: Synthetic oligonucleotide
  Target: LAMA2; (+) strand; PAM type: NRG; PAM sequence: TAG
aaatataacatttaggaaga

SEQ ID NO: 120289 - DNA, 20 bp, Artificial Sequence
  Description of Artificial Sequence: Synthetic oligonucleotide
  Target: LAMA2; (+) strand; PAM type: NRG; PAM sequence: AAG
ataacatttaggaagatagt

SEQ ID NO: 120290 - DNA, 20 bp, Artificial Sequence
  Description of Artificial Sequence: Synthetic oligonucleotide
  Target: LAMA2; (+) strand; PAM type: NRG; PAM sequence: AGG
taacatttaggaagatagta

SEQ ID NO: 120291 - DNA, 20 bp, Artificial Sequence
  Description of Artificial Sequence: Synthetic oligonucleotide
  Target: LAMA2; (+) strand; PAM type: NRG; PAM sequence: AAG
acttaaatcttccttattaa

SEQ ID NO: 120292 - DNA, 20 bp, Artificial Sequence
  Description of Artificial Sequence: Synthetic oligonucleotide
  Target: LAMA2; (+) strand; PAM type: NRG; PAM sequence: CAG
atcttccttattaaaagcca

SEQ ID NO: 120293 - DNA, 20 bp, Artificial Sequence
  Description of Artificial Sequence: Synthetic oligonucleotide
  Target: LAMA2; (+) strand; PAM type: NRG; PAM sequence: AGG
tcttccttattaaaagccac

SEQ ID NO: 120294 - DNA, 20 bp, Artificial Sequence
  Description of Artificial Sequence: Synthetic oligonucleotide
  Target: LAMA2; (+) strand; PAM type: NRG; PAM sequence: AAG
ccacaggtaattactatcta

SEQ ID NO: 120295 - DNA, 20 bp, Artificial Sequence
  Description of Artificial Sequence: Synthetic oligonucleotide
  Target: LAMA2; (+) strand; PAM type: NRG; PAM sequence: TAG
aggtaattactatctaaaga

SEQ ID NO: 120296 - DNA, 20 bp, Artificial Sequence
  Description of Artificial Sequence: Synthetic oligonucleotide
  Target: LAMA2; (+) strand; PAM type: NRG; PAM sequence: GAG
ttactatctaaagatagttt

SEQ ID NO: 120297 - DNA, 20 bp, Artificial Sequence
  Description of Artificial Sequence: Synthetic oligonucleotide
  Target: LAMA2; (+) strand; PAM type: NRG; PAM sequence: CAG
gatagtttgagacatatttt

SEQ ID NO: 120298 - DNA, 20 bp, Artificial Sequence
  Description of Artificial Sequence: Synthetic oligonucleotide
  Target: LAMA2; (+) strand; PAM type: NRG; PAM sequence: AGG
atagtttgagacatattttc

SEQ ID NO: 120299 - DNA, 20 bp, Artificial Sequence
  Description of Artificial Sequence: Synthetic oligonucleotide
  Target: LAMA2; (+) strand; PAM type: NRG; PAM sequence: GGG
tagtttgagacatattttca

SEQ ID NO: 120300 - DNA, 20 bp, Artificial Sequence
  Description of Artificial Sequence: Synthetic oligonucleotide
  Target: LAMA2; (+) strand; PAM type: NRG; PAM sequence: GAG
ttgagacatattttcagggt

SEQ ID NO: 120301 - DNA, 20 bp, Artificial Sequence
  Description of Artificial Sequence: Synthetic oligonucleotide
  Target: LAMA2; (+) strand; PAM type: NRG; PAM sequence: AAG
catattttcagggtgagtta

SEQ ID NO: 120302 - DNA, 20 bp, Artificial Sequence
  Description of Artificial Sequence: Synthetic oligonucleotide
  Target: LAMA2; (+) strand; PAM type: NRG; PAM sequence: AAG
ttcagggtgagttaaagcta

SEQ ID NO: 120303 - DNA, 20 bp, Artificial Sequence
  Description of Artificial Sequence: Synthetic oligonucleotide
  Target: LAMA2; (+) strand; PAM type: NRG; PAM sequence: AAG
ctaaagacatttgcttgtca

SEQ ID NO: 120304 - DNA, 20 bp, Artificial Sequence
  Description of Artificial Sequence: Synthetic oligonucleotide
  Target: LAMA2; (+) strand; PAM type: NRG; PAM sequence: TGG
cttgtcaaagatgtataata

SEQ ID NO: 120305 - DNA, 20 bp, Artificial Sequence
  Description of Artificial Sequence: Synthetic oligonucleotide
  Target: LAMA2; (+) strand; PAM type: NRG; PAM sequence: GGG
ttgtcaaagatgtataatat

SEQ ID NO: 120306 - DNA, 20 bp, Artificial Sequence
  Description of Artificial Sequence: Synthetic oligonucleotide
  Target: LAMA2; (+) strand; PAM type: NRG; PAM sequence: AAG
tttaaaaatgtttttctcct

SEQ ID NO: 120307 - DNA, 20 bp, Artificial Sequence
  Description of Artificial Sequence: Synthetic oligonucleotide
  Target: LAMA2; (+) strand; PAM type: NRG; PAM sequence: GAG
tttttctcctaagtaatctt

SEQ ID NO: 120308 - DNA, 20 bp, Artificial Sequence
  Description of Artificial Sequence: Synthetic oligonucleotide
  Target: LAMA2; (+) strand; PAM type: NRG; PAM sequence: TGG
ctcctaagtaatcttgagtg

SEQ ID NO: 120309 - DNA, 20 bp, Artificial Sequence
  Description of Artificial Sequence: Synthetic oligonucleotide
  Target: LAMA2; (+) strand; PAM type: NRG; PAM sequence: TGG
cttgagtgtggatcttaata

SEQ ID NO: 120310 - DNA, 20 bp, Artificial Sequence
  Description of Artificial Sequence: Synthetic oligonucleotide
  Target: LAMA2; (+) strand; PAM type: NRG; PAM sequence: GGG
ttgagtgtggatcttaatat

SEQ ID NO: 120311 - DNA, 20 bp, Artificial Sequence
  Description of Artificial Sequence: Synthetic oligonucleotide
  Target: LAMA2; (+) strand; PAM type: NRG; PAM sequence: TGG
tatgggaactttatgctatt

SEQ ID NO: 120312 - DNA, 20 bp, Artificial Sequence
  Description of Artificial Sequence: Synthetic oligonucleotide
  Target: LAMA2; (+) strand; PAM type: NRG; PAM sequence: TGG
tatgctatttggattttatt

SEQ ID NO: 120313 - DNA, 20 bp, Artificial Sequence
  Description of Artificial Sequence: Synthetic oligonucleotide
  Target: LAMA2; (+) strand; PAM type: NRG; PAM sequence: AAG
tggacacgtgacatttacaa

SEQ ID NO: 120314 - DNA, 20 bp, Artificial Sequence
  Description of Artificial Sequence: Synthetic oligonucleotide
  Target: LAMA2; (+) strand; PAM type: NRG; PAM sequence: GAG
gacatttacaaaagatcatt

SEQ ID NO: 120315 - DNA, 20 bp, Artificial Sequence
  Description of Artificial Sequence: Synthetic oligonucleotide
  Target: LAMA2; (+) strand; PAM type: NRG; PAM sequence: AGG
acatttacaaaagatcattg

SEQ ID NO: 120316 - DNA, 20 bp, Artificial Sequence
  Description of Artificial Sequence: Synthetic oligonucleotide
  Target: LAMA2; (+) strand; PAM type: NRG; PAM sequence: TGG
cattgaggattgcctattaa

SEQ ID NO: 120317 - DNA, 20 bp, Artificial Sequence
  Description of Artificial Sequence: Synthetic oligonucleotide
  Target: LAMA2; (+) strand; PAM type: NRG; PAM sequence: GGG
attgaggattgcctattaat

SEQ ID NO: 120318 - DNA, 20 bp, Artificial Sequence
  Description of Artificial Sequence: Synthetic oligonucleotide
  Target: LAMA2; (+) strand; PAM type: NRG; PAM sequence: CGG
tgggttattattcataatat

SEQ ID NO: 120319 - DNA, 20 bp, Artificial Sequence
  Description of Artificial Sequence: Synthetic oligonucleotide
  Target: LAMA2; (+) strand; PAM type: NRG; PAM sequence: TAG
cctctgtgacatgcctaatc

SEQ ID NO: 120320 - DNA, 20 bp, Artificial Sequence
  Description of Artificial Sequence: Synthetic oligonucleotide
  Target: LAMA2; (+) strand; PAM type: NRG; PAM sequence: AAG
cctaatctagttcaaacaac

SEQ ID NO: 120321 - DNA, 20 bp, Artificial Sequence
  Description of Artificial Sequence: Synthetic oligonucleotide
  Target: LAMA2; (+) strand; PAM type: NRG; PAM sequence: CAG
attcctgatgatgaaaacct

SEQ ID NO: 120322 - DNA, 20 bp, Artificial Sequence
  Description of Artificial Sequence: Synthetic oligonucleotide
  Target: LAMA2; (+) strand; PAM type: NRG; PAM sequence: AGG
ttcctgatgatgaaaacctc

SEQ ID NO: 120323 - DNA, 20 bp, Artificial Sequence
  Description of Artificial Sequence: Synthetic oligonucleotide
  Target: LAMA2; (+) strand; PAM type: NRG; PAM sequence: GAG
cctgatgatgaaaacctcag

SEQ ID NO: 120324 - DNA, 20 bp, Artificial Sequence
  Description of Artificial Sequence: Synthetic oligonucleotide
  Target: LAMA2; (+) strand; PAM type: NRG; PAM sequence: TAG
tgaaaacctcaggagctatt

SEQ ID NO: 120325 - DNA, 20 bp, Artificial Sequence
  Description of Artificial Sequence: Synthetic oligonucleotide
  Target: LAMA2; (+) strand; PAM type: NRG; PAM sequence: TGG
ctcaggagctatttagtgcc

SEQ ID NO: 120326 - DNA, 20 bp, Artificial Sequence
  Description of Artificial Sequence: Synthetic oligonucleotide
  Target: LAMA2; (+) strand; PAM type: NRG; PAM sequence: TAG
gctatttagtgcctggcact

SEQ ID NO: 120327 - DNA, 20 bp, Artificial Sequence
  Description of Artificial Sequence: Synthetic oligonucleotide
  Target: LAMA2; (+) strand; PAM type: NRG; PAM sequence: AGG
ctatttagtgcctggcactt

SEQ ID NO: 120328 - DNA, 20 bp, Artificial Sequence
  Description of Artificial Sequence: Synthetic oligonucleotide
  Target: LAMA2; (+) strand; PAM type: NRG; PAM sequence: AAG
aatgtaccttgtgcaatgtt

SEQ ID NO: 120329 - DNA, 20 bp, Artificial Sequence
  Description of Artificial Sequence: Synthetic oligonucleotide
  Target: LAMA2; (+) strand; PAM type: NRG; PAM sequence: TAG
taagtatgtctctgtatgtg

SEQ ID NO: 120330 - DNA, 20 bp, Artificial Sequence
  Description of Artificial Sequence: Synthetic oligonucleotide
  Target: LAMA2; (+) strand; PAM type: NRG; PAM sequence: AAG
cccgaactgtgtacctcccc

SEQ ID NO: 120331 - DNA, 20 bp, Artificial Sequence
  Description of Artificial Sequence: Synthetic oligonucleotide
  Target: LAMA2; (+) strand; PAM type: NRG; PAM sequence: AGG
ccgaactgtgtacctcccca

SEQ ID NO: 120332 - DNA, 20 bp, Artificial Sequence
  Description of Artificial Sequence: Synthetic oligonucleotide
  Target: LAMA2; (+) strand; PAM type: NRG; PAM sequence: TAG
cctccccaaggctcttcatt

SEQ ID NO: 120333 - DNA, 20 bp, Artificial Sequence
  Description of Artificial Sequence: Synthetic oligonucleotide
  Target: LAMA2; (+) strand; PAM type: NRG; PAM sequence: GAG
tcttcatttagctgcgtctt

SEQ ID NO: 120334 - DNA, 20 bp, Artificial Sequence
  Description of Artificial Sequence: Synthetic oligonucleotide
  Target: LAMA2; (+) strand; PAM type: NRG; PAM sequence: CAG
tttagctgcgtcttgagtgc

SEQ ID NO: 120335 - DNA, 20 bp, Artificial Sequence
  Description of Artificial Sequence: Synthetic oligonucleotide
  Target: LAMA2; (+) strand; PAM type: NRG; PAM sequence: TGG
gctgcgtcttgagtgccaga

SEQ ID NO: 120336 - DNA, 20 bp, Artificial Sequence
  Description of Artificial Sequence: Synthetic oligonucleotide
  Target: LAMA2; (+) strand; PAM type: NRG; PAM sequence: TAG
gtcttgagtgccagatggtt

SEQ ID NO: 120337 - DNA, 20 bp, Artificial Sequence
  Description of Artificial Sequence: Synthetic oligonucleotide
  Target: LAMA2; (+) strand; PAM type: NRG; PAM sequence: TGG
gagtgccagatggtttagat

SEQ ID NO: 120338 - DNA, 20 bp, Artificial Sequence
  Description of Artificial Sequence: Synthetic oligonucleotide
  Target: LAMA2; (+) strand; PAM type: NRG; PAM sequence: TAG
tagattggtataataatatg

SEQ ID NO: 120339 - DNA, 20 bp, Artificial Sequence
  Description of Artificial Sequence: Synthetic oligonucleotide
  Target: LAMA2; (+) strand; PAM type: NRG; PAM sequence: GAG
aataatatgtagtgcattgt

SEQ ID NO: 120340 - DNA, 20 bp, Artificial Sequence
  Description of Artificial Sequence: Synthetic oligonucleotide
  Target: LAMA2; (+) strand; PAM type: NRG; PAM sequence: TAG
cattaacacatttacttacg

SEQ ID NO: 120341 - DNA, 20 bp, Artificial Sequence
  Description of Artificial Sequence: Synthetic oligonucleotide
  Target: LAMA2; (+) strand; PAM type: NRG; PAM sequence: CAG
taacacatttacttacgtag

SEQ ID NO: 120342 - DNA, 20 bp, Artificial Sequence
  Description of Artificial Sequence: Synthetic oligonucleotide
  Target: LAMA2; (+) strand; PAM type: NRG; PAM sequence: GAG
acacatttacttacgtagca

SEQ ID NO: 120343 - DNA, 20 bp, Artificial Sequence
  Description of Artificial Sequence: Synthetic oligonucleotide
  Target: LAMA2; (+) strand; PAM type: NRG; PAM sequence: TAG
acttacgtagcagagctgtt

SEQ ID NO: 120344 - DNA, 20 bp, Artificial Sequence
  Description of Artificial Sequence: Synthetic oligonucleotide
  Target: LAMA2; (+) strand; PAM type: NRG; PAM sequence: TAG
tacgtagcagagctgtttag

SEQ ID NO: 120345 - DNA, 20 bp, Artificial Sequence
  Description of Artificial Sequence: Synthetic oligonucleotide
  Target: LAMA2; (+) strand; PAM type: NRG; PAM sequence: CAG
tagattaatataattatcct

SEQ ID NO: 120346 - DNA, 20 bp, Artificial Sequence
  Description of Artificial Sequence: Synthetic oligonucleotide
  Target: LAMA2; (+) strand; PAM type: NRG; PAM sequence: TAG
atataattatcctcagtttg

SEQ ID NO: 120347 - DNA, 20 bp, Artificial Sequence
  Description of Artificial Sequence: Synthetic oligonucleotide
  Target: LAMA2; (+) strand; PAM type: NRG; PAM sequence: AAG
taattatcctcagtttgtag

SEQ ID NO: 120348 - DNA, 20 bp, Artificial Sequence
  Description of Artificial Sequence: Synthetic oligonucleotide
  Target: LAMA2; (+) strand; PAM type: NRG; PAM sequence: AGG
aattatcctcagtttgtaga

SEQ ID NO: 120349 - DNA, 20 bp, Artificial Sequence
  Description of Artificial Sequence: Synthetic oligonucleotide
  Target: LAMA2; (+) strand; PAM type: NRG; PAM sequence: CAG
ttgtagaaggaaaatatgcc

SEQ ID NO: 120350 - DNA, 20 bp, Artificial Sequence
  Description of Artificial Sequence: Synthetic oligonucleotide
  Target: LAMA2; (+) strand; PAM type: NRG; PAM sequence: AAG
aatatgcccagcaacttgtc

SEQ ID NO: 120351 - DNA, 20 bp, Artificial Sequence
  Description of Artificial Sequence: Synthetic oligonucleotide
  Target: LAMA2; (+) strand; PAM type: NRG; PAM sequence: AGG
atatgcccagcaacttgtca

SEQ ID NO: 120352 - DNA, 20 bp, Artificial Sequence
  Description of Artificial Sequence: Synthetic oligonucleotide
  Target: LAMA2; (+) strand; PAM type: NRG; PAM sequence: TAG
aaaaattccaatgcttattt

SEQ ID NO: 120353 - DNA, 20 bp, Artificial Sequence
  Description of Artificial Sequence: Synthetic oligonucleotide
  Target: LAMA2; (+) strand; PAM type: NRG; PAM sequence: TAG
tccaatgcttattttagaat

SEQ ID NO: 120354 - DNA, 20 bp, Artificial Sequence
  Description of Artificial Sequence: Synthetic oligonucleotide
  Target: LAMA2; (+) strand; PAM type: NRG; PAM sequence: CGG
tagaattagaaattaaatta

SEQ ID NO: 120355 - DNA, 20 bp, Artificial Sequence
  Description of Artificial Sequence: Synthetic oligonucleotide
  Target: LAMA2; (+) strand; PAM type: NRG; PAM sequence: TAG
cggtcctgctcttgactttg

SEQ ID NO: 120356 - DNA, 20 bp, Artificial Sequence
  Description of Artificial Sequence: Synthetic oligonucleotide
  Target: LAMA2; (+) strand; PAM type: NRG; PAM sequence: TGG
atgctaactatcacctcttt

SEQ ID NO: 120357 - DNA, 20 bp, Artificial Sequence
  Description of Artificial Sequence: Synthetic oligonucleotide
  Target: LAMA2; (+) strand; PAM type: NRG; PAM sequence: GAG
tatctttcataaaataccct

SEQ ID NO: 120358 - DNA, 20 bp, Artificial Sequence
  Description of Artificial Sequence: Synthetic oligonucleotide
  Target: LAMA2; (+) strand; PAM type: NRG; PAM sequence: AGG
atctttcataaaataccctg

SEQ ID NO: 120359 - DNA, 20 bp, Artificial Sequence
  Description of Artificial Sequence: Synthetic oligonucleotide
  Target: LAMA2; (+) strand; PAM type: NRG; PAM sequence: AAG
ggaaaaaaaaatccatttct

SEQ ID NO: 120360 - DNA, 20 bp, Artificial Sequence
  Description of Artificial Sequence: Synthetic oligonucleotide
  Target: LAMA2; (+) strand; PAM type: NRG; PAM sequence: TAG
aatccatttctaagttatgt

SEQ ID NO: 120361 - DNA, 20 bp, Artificial Sequence
  Description of Artificial Sequence: Synthetic oligonucleotide
  Target: LAMA2; (+) strand; PAM type: NRG; PAM sequence: CAG
ttatgttagtctatcatatc

SEQ ID NO: 120362 - DNA, 20 bp, Artificial Sequence
  Description of Artificial Sequence: Synthetic oligonucleotide
  Target: LAMA2; (+) strand; PAM type: NRG; PAM sequence: GAG
atgttagtctatcatatcca

SEQ ID NO: 120363 - DNA, 20 bp, Artificial Sequence
  Description of Artificial Sequence: Synthetic oligonucleotide
  Target: LAMA2; (+) strand; PAM type: NRG; PAM sequence: TGG
atcatatccagagattcatt

SEQ ID NO: 120364 - DNA, 20 bp, Artificial Sequence
  Description of Artificial Sequence: Synthetic oligonucleotide
  Target: LAMA2; (+) strand; PAM type: NRG; PAM sequence: TGG
cagagattcatttggtatta

SEQ ID NO: 120365 - DNA, 20 bp, Artificial Sequence
  Description of Artificial Sequence: Synthetic oligonucleotide
  Target: LAMA2; (+) strand; PAM type: NRG; PAM sequence: AAG
agattcatttggtattatgg

SEQ ID NO: 120366 - DNA, 20 bp, Artificial Sequence
  Description of Artificial Sequence: Synthetic oligonucleotide
  Target: LAMA2; (+) strand; PAM type: NRG; PAM sequence: TAG
agaacaaaaaataaaatgtg

SEQ ID NO: 120367 - DNA, 20 bp, Artificial Sequence
  Description of Artificial Sequence: Synthetic oligonucleotide
  Target: LAMA2; (+) strand; PAM type: NRG; PAM sequence: AAG
aaataaaatgtgtagtcttg

SEQ ID NO: 120368 - DNA, 20 bp, Artificial Sequence
  Description of Artificial Sequence: Synthetic oligonucleotide
  Target: LAMA2; (+) strand; PAM type: NRG; PAM sequence: AGG
aataaaatgtgtagtcttga

SEQ ID NO: 120369 - DNA, 20 bp, Artificial Sequence
  Description of Artificial Sequence: Synthetic oligonucleotide
  Target: LAMA2; (+) strand; PAM type: NRG; PAM sequence: GGG
ataaaatgtgtagtcttgaa

SEQ ID NO: 120370 - DNA, 20 bp, Artificial Sequence
  Description of Artificial Sequence: Synthetic oligonucleotide
  Target: LAMA2; (+) strand; PAM type: NRG; PAM sequence: TAG
acatgctgcttattactatg

SEQ ID NO: 120371 - DNA, 20 bp, Artificial Sequence
  Description of Artificial Sequence: Synthetic oligonucleotide
  Target: LAMA2; (+) strand; PAM type: NRG; PAM sequence: TAG
caaatgcattcatcaaattt

SEQ ID NO: 120372 - DNA, 20 bp, Artificial Sequence
  Description of Artificial Sequence: Synthetic oligonucleotide
  Target: LAMA2; (+) strand; PAM type: NRG; PAM sequence: TGG
aattttagtgtttacattct

SEQ ID NO: 120373 - DNA, 20 bp, Artificial Sequence
  Description of Artificial Sequence: Synthetic oligonucleotide
  Target: LAMA2; (+) strand; PAM type: NRG; PAM sequence: TGG
attcttggaactttgattac

SEQ ID NO: 120374 - DNA, 20 bp, Artificial Sequence
  Description of Artificial Sequence: Synthetic oligonucleotide
  Target: LAMA2; (+) strand; PAM type: NRG; PAM sequence: TAG
gaactttgattactggacac

SEQ ID NO: 120375 - DNA, 20 bp, Artificial Sequence
  Description of Artificial Sequence: Synthetic oligonucleotide
  Target: LAMA2; (+) strand; PAM type: NRG; PAM sequence: AGG
aactttgattactggacact

SEQ ID NO: 120376 - DNA, 20 bp, Artificial Sequence
  Description of Artificial Sequence: Synthetic oligonucleotide
  Target: LAMA2; (+) strand; PAM type: NRG; PAM sequence: AAG
attactggacactaggctat

SEQ ID NO: 120377 - DNA, 20 bp, Artificial Sequence
  Description of Artificial Sequence: Synthetic oligonucleotide
  Target: LAMA2; (+) strand; PAM type: NRG; PAM sequence: TGG
aatattaattgattctttat

SEQ ID NO: 120378 - DNA, 20 bp, Artificial Sequence
  Description of Artificial Sequence: Synthetic oligonucleotide
  Target: LAMA2; (+) strand; PAM type: NRG; PAM sequence: AAG
attctttattggcttttctg

SEQ ID NO: 120379 - DNA, 20 bp, Artificial Sequence
  Description of Artificial Sequence: Synthetic oligonucleotide
  Target: LAMA2; (+) strand; PAM type: NRG; PAM sequence: CAG
gcttttctgaagtaacttta

SEQ ID NO: 120380 - DNA, 20 bp, Artificial Sequence
  Description of Artificial Sequence: Synthetic oligonucleotide
  Target: LAMA2; (+) strand; PAM type: NRG; PAM sequence: AAG
tttctgaagtaactttacag

SEQ ID NO: 120381 - DNA, 20 bp, Artificial Sequence
  Description of Artificial Sequence: Synthetic oligonucleotide
  Target: LAMA2; (+) strand; PAM type: NRG; PAM sequence: CAG
taactttacagaagttactt

SEQ ID NO: 120382 - DNA, 20 bp, Artificial Sequence
  Description of Artificial Sequence: Synthetic oligonucleotide
  Target: LAMA2; (+) strand; PAM type: NRG; PAM sequence: AAG
tttacagaagttacttcagc

SEQ ID NO: 120383 - DNA, 20 bp, Artificial Sequence
  Description of Artificial Sequence: Synthetic oligonucleotide
  Target: LAMA2; (+) strand; PAM type: NRG; PAM sequence: TAG
cagaagttacttcagcaagc

SEQ ID NO: 120384 - DNA, 20 bp, Artificial Sequence
  Description of Artificial Sequence: Synthetic oligonucleotide
  Target: LAMA2; (+) strand; PAM type: NRG; PAM sequence: CGG
cttcagcaagctagaaacaa

SEQ ID NO: 120385 - DNA, 20 bp, Artificial Sequence
  Description of Artificial Sequence: Synthetic oligonucleotide
  Target: LAMA2; (+) strand; PAM type: NRG; PAM sequence: AAG
tactgtataatgaacccttt

SEQ ID NO: 120386 - DNA, 20 bp, Artificial Sequence
  Description of Artificial Sequence: Synthetic oligonucleotide
  Target: LAMA2; (+) strand; PAM type: NRG; PAM sequence: TAG
tataatgaaccctttaagaa

SEQ ID NO: 120387 - DNA, 20 bp, Artificial Sequence
  Description of Artificial Sequence: Synthetic oligonucleotide
  Target: LAMA2; (+) strand; PAM type: NRG; PAM sequence: CAG
aatagtcaatgtgtaaatgt

SEQ ID NO: 120388 - DNA, 20 bp, Artificial Sequence
  Description of Artificial Sequence: Synthetic oligonucleotide
  Target: LAMA2; (+) strand; PAM type: NRG; PAM sequence: AAG
tgtaaatgtcagtgaatgaa

SEQ ID NO: 120389 - DNA, 20 bp, Artificial Sequence
  Description of Artificial Sequence: Synthetic oligonucleotide
  Target: LAMA2; (+) strand; PAM type: NRG; PAM sequence: AAG
tgtcagtgaatgaaaagaac

SEQ ID NO: 120390 - DNA, 20 bp, Artificial Sequence
  Description of Artificial Sequence: Synthetic oligonucleotide
  Target: LAMA2; (+) strand; PAM type: NRG; PAM sequence: CAG
tgaaaagaacaagaaccaaa

SEQ ID NO: 120391 - DNA, 20 bp, Artificial Sequence
  Description of Artificial Sequence: Synthetic oligonucleotide
  Target: LAMA2; (+) strand; PAM type: NRG; PAM sequence: AAG
agaaccaaacagatatacct

SEQ ID NO: 120392 - DNA, 20 bp, Artificial Sequence
  Description of Artificial Sequence: Synthetic oligonucleotide
  Target: LAMA2; (+) strand; PAM type: NRG; PAM sequence: CAG
aaacagatatacctaagaat

SEQ ID NO: 120393 - DNA, 20 bp, Artificial Sequence
  Description of Artificial Sequence: Synthetic oligonucleotide
  Target: LAMA2; (+) strand; PAM type: NRG; PAM sequence: GAG
acagatatacctaagaatca

SEQ ID NO: 120394 - DNA, 20 bp, Artificial Sequence
  Description of Artificial Sequence: Synthetic oligonucleotide
  Target: LAMA2; (+) strand; PAM type: NRG; PAM sequence: AAG
atatacctaagaatcagagc

SEQ ID NO: 120395 - DNA, 20 bp, Artificial Sequence
  Description of Artificial Sequence: Synthetic oligonucleotide
  Target: LAMA2; (+) strand; PAM type: NRG; PAM sequence: AAG
atctcaaaattccttctgaa

SEQ ID NO: 120396 - DNA, 20 bp, Artificial Sequence
  Description of Artificial Sequence: Synthetic oligonucleotide
  Target: LAMA2; (+) strand; PAM type: NRG; PAM sequence: AAG
catcttcataaaaacattta

SEQ ID NO: 120397 - DNA, 20 bp, Artificial Sequence
  Description of Artificial Sequence: Synthetic oligonucleotide
  Target: LAMA2; (+) strand; PAM type: NRG; PAM sequence: AAG
catttaaagactttcatttg

SEQ ID NO: 120398 - DNA, 20 bp, Artificial Sequence
  Description of Artificial Sequence: Synthetic oligonucleotide
  Target: LAMA2; (+) strand; PAM type: NRG; PAM sequence: CAG
ctttcatttgaagttgaact

SEQ ID NO: 120399 - DNA, 20 bp, Artificial Sequence
  Description of Artificial Sequence: Synthetic oligonucleotide
  Target: LAMA2; (+) strand; PAM type: NRG; PAM sequence: AAG
atttgaagttgaactcagtt

SEQ ID NO: 120400 - DNA, 20 bp, Artificial Sequence
  Description of Artificial Sequence: Synthetic oligonucleotide
  Target: LAMA2; (+) strand; PAM type: NRG; PAM sequence: AAG
gttgaactcagttaagacaa

SEQ ID NO: 120401 - DNA, 20 bp, Artificial Sequence
  Description of Artificial Sequence: Synthetic oligonucleotide
  Target: LAMA2; (+) strand; PAM type: NRG; PAM sequence: CAG
acaaaagtcttccaatctcc

SEQ ID NO: 120402 - DNA, 20 bp, Artificial Sequence
  Description of Artificial Sequence: Synthetic oligonucleotide
  Target: LAMA2; (+) strand; PAM type: NRG; PAM sequence: GAG
cttccaatctcccagatttt

SEQ ID NO: 120403 - DNA, 20 bp, Artificial Sequence
  Description of Artificial Sequence: Synthetic oligonucleotide
  Target: LAMA2; (+) strand; PAM type: NRG; PAM sequence: GAG
tccaatctcccagattttga

SEQ ID NO: 120404 - DNA, 20 bp, Artificial Sequence
  Description of Artificial Sequence: Synthetic oligonucleotide
  Target: LAMA2; (+) strand; PAM type: NRG; PAM sequence: AGG
ccaatctcccagattttgag

SEQ ID NO: 120405 - DNA, 20 bp, Artificial Sequence
  Description of Artificial Sequence: Synthetic oligonucleotide
  Target: LAMA2; (+) strand; PAM type: NRG; PAM sequence: GGG
caatctcccagattttgaga

SEQ ID NO: 120406 - DNA, 20 bp, Artificial Sequence
  Description of Artificial Sequence: Synthetic oligonucleotide
  Target: LAMA2; (+) strand; PAM type: NRG; PAM sequence: CAG
tttgtgtatgtatgtgattg

SEQ ID NO: 120407 - DNA, 20 bp, Artificial Sequence
  Description of Artificial Sequence: Synthetic oligonucleotide
  Target: LAMA2; (+) strand; PAM type: NRG; PAM sequence: CAG
tatgtatgtgattgcagcac

SEQ ID NO: 120408 - DNA, 20 bp, Artificial Sequence
  Description of Artificial Sequence: Synthetic oligonucleotide
  Target: LAMA2; (+) strand; PAM type: NRG; PAM sequence: CAG
cagtgcacatgtaccattta

SEQ ID NO: 120409 - DNA, 20 bp, Artificial Sequence
  Description of Artificial Sequence: Synthetic oligonucleotide
  Target: LAMA2; (+) strand; PAM type: NRG; PAM sequence: TAG
cacatgtaccatttacagcc

SEQ ID NO: 120410 - DNA, 20 bp, Artificial Sequence
  Description of Artificial Sequence: Synthetic oligonucleotide
  Target: LAMA2; (+) strand; PAM type: NRG; PAM sequence: CAG
catttacagcctagcactca

SEQ ID NO: 120411 - DNA, 20 bp, Artificial Sequence
  Description of Artificial Sequence: Synthetic oligonucleotide
  Target: LAMA2; (+) strand; PAM type: NRG; PAM sequence: AGG
atttacagcctagcactcac

SEQ ID NO: 120412 - DNA, 20 bp, Artificial Sequence
  Description of Artificial Sequence: Synthetic oligonucleotide
  Target: LAMA2; (+) strand; PAM type: NRG; PAM sequence: TAG
caggacctaatttgtatatt

SEQ ID NO: 120413 - DNA, 20 bp, Artificial Sequence
  Description of Artificial Sequence: Synthetic oligonucleotide
  Target: LAMA2; (+) strand; PAM type: NRG; PAM sequence: AAG
tgtttgatttttgttgtctt

SEQ ID NO: 120414 - DNA, 20 bp, Artificial Sequence
  Description of Artificial Sequence: Synthetic oligonucleotide
  Target: LAMA2; (+) strand; PAM type: NRG; PAM sequence: AGG
gtttgatttttgttgtctta

SEQ ID NO: 120415 - DNA, 20 bp, Artificial Sequence
  Description of Artificial Sequence: Synthetic oligonucleotide
  Target: LAMA2; (+) strand; PAM type: NRG; PAM sequence: TAG
tttttgttgtcttaaggtat

SEQ ID NO: 120416 - DNA, 20 bp, Artificial Sequence
  Description of Artificial Sequence: Synthetic oligonucleotide
  Target: LAMA2; (+) strand; PAM type: NRG; PAM sequence: AAG
gtttatcaaaatctttgaat

SEQ ID NO: 120417 - DNA, 20 bp, Artificial Sequence
  Description of Artificial Sequence: Synthetic oligonucleotide
  Target: LAMA2; (+) strand; PAM type: NRG; PAM sequence: TAG
aaatctaaaaattgaatttc

SEQ ID NO: 120418 - DNA, 20 bp, Artificial Sequence
  Description of Artificial Sequence: Synthetic oligonucleotide
  Target: LAMA2; (+) strand; PAM type: NRG; PAM sequence: TAG
attgaatttctagaaaactc

SEQ ID NO: 120419 - DNA, 20 bp, Artificial Sequence
  Description of Artificial Sequence: Synthetic oligonucleotide
  Target: LAMA2; (+) strand; PAM type: NRG; PAM sequence: TGG
gttgccttgacaaatgatta

SEQ ID NO: 120420 - DNA, 20 bp, Artificial Sequence
  Description of Artificial Sequence: Synthetic oligonucleotide
  Target: LAMA2; (+) strand; PAM type: NRG; PAM sequence: AAG
tgacaaatgattatggacca

SEQ ID NO: 120421 - DNA, 20 bp, Artificial Sequence
  Description of Artificial Sequence: Synthetic oligonucleotide
  Target: LAMA2; (+) strand; PAM type: NRG; PAM sequence: GAG
ccaaagaataaattataaat

SEQ ID NO: 120422 - DNA, 20 bp, Artificial Sequence
  Description of Artificial Sequence: Synthetic oligonucleotide
  Target: LAMA2; (+) strand; PAM type: NRG; PAM sequence: CAG
gacaattataatattccatc

SEQ ID NO: 120423 - DNA, 20 bp, Artificial Sequence
  Description of Artificial Sequence: Synthetic oligonucleotide
  Target: LAMA2; (+) strand; PAM type: NRG; PAM sequence: TAG
aattataatattccatccag

SEQ ID NO: 120424 - DNA, 20 bp, Artificial Sequence
  Description of Artificial Sequence: Synthetic oligonucleotide
  Target: LAMA2; (+) strand; PAM type: NRG; PAM sequence: AAG
agctatactgttaaaattcc

SEQ ID NO: 120425 - DNA, 20 bp, Artificial Sequence
  Description of Artificial Sequence: Synthetic oligonucleotide
  Target: LAMA2; (+) strand; PAM type: NRG; PAM sequence: AGG
gctatactgttaaaattcca

SEQ ID NO: 120426 - DNA, 20 bp, Artificial Sequence
  Description of Artificial Sequence: Synthetic oligonucleotide
  Target: LAMA2; (+) strand; PAM type: NRG; PAM sequence: GAG
tccaaggtataatccctttc

SEQ ID NO: 120427 - DNA, 20 bp, Artificial Sequence
  Description of Artificial Sequence: Synthetic oligonucleotide
  Target: LAMA2; (+) strand; PAM type: NRG; PAM sequence: TAG
ctttcgagttgcttgtaact

SEQ ID NO: 120428 - DNA, 20 bp, Artificial Sequence
  Description of Artificial Sequence: Synthetic oligonucleotide
  Target: LAMA2; (+) strand; PAM type: NRG; PAM sequence: AAG
tcgagttgcttgtaacttag

SEQ ID NO: 120429 - DNA, 20 bp, Artificial Sequence
  Description of Artificial Sequence: Synthetic oligonucleotide
  Target: LAMA2; (+) strand; PAM type: NRG; PAM sequence: AGG
cgagttgcttgtaacttaga

SEQ ID NO: 120430 - DNA, 20 bp, Artificial Sequence
  Description of Artificial Sequence: Synthetic oligonucleotide
  Target: LAMA2; (+) strand; PAM type: NRG; PAM sequence: TAG
acttagaaggtcctattcta

SEQ ID NO: 120431 - DNA, 20 bp, Artificial Sequence
  Description of Artificial Sequence: Synthetic oligonucleotide
  Target: LAMA2; (+) strand; PAM type: NRG; PAM sequence: AAG
tagaaggtcctattctatag

SEQ ID NO: 120432 - DNA, 20 bp, Artificial Sequence
  Description of Artificial Sequence: Synthetic oligonucleotide
  Target: LAMA2; (+) strand; PAM type: NRG; PAM sequence: TAG
gtcctattctatagaagaaa

SEQ ID NO: 120433 - DNA, 20 bp, Artificial Sequence
  Description of Artificial Sequence: Synthetic oligonucleotide
  Target: LAMA2; (+) strand; PAM type: NRG; PAM sequence: GAG
cctattctatagaagaaata

SEQ ID NO: 120434 - DNA, 20 bp, Artificial Sequence
  Description of Artificial Sequence: Synthetic oligonucleotide
  Target: LAMA2; (+) strand; PAM type: NRG; PAM sequence: TAG
ttctatagaagaaatagagt

SEQ ID NO: 120435 - DNA, 20 bp, Artificial Sequence
  Description of Artificial Sequence: Synthetic oligonucleotide
  Target: LAMA2; (+) strand; PAM type: NRG; PAM sequence: TAG
tatagaagaaatagagttag

SEQ ID NO: 120436 - DNA, 20 bp, Artificial Sequence
  Description of Artificial Sequence: Synthetic oligonucleotide
  Target: LAMA2; (+) strand; PAM type: NRG; PAM sequence: GAG
tagaagaaatagagttagta

SEQ ID NO: 120437 - DNA, 20 bp, Artificial Sequence
  Description of Artificial Sequence: Synthetic oligonucleotide
  Target: LAMA2; (+) strand; PAM type: NRG; PAM sequence: TAG
tttcaaatgcctacatatta

SEQ ID NO: 120438 - DNA, 20 bp, Artificial Sequence
  Description of Artificial Sequence: Synthetic oligonucleotide
  Target: LAMA2; (+) strand; PAM type: NRG; PAM sequence: TGG
ttatagttgacacaatttcc

SEQ ID NO: 120439 - DNA, 20 bp, Artificial Sequence
  Description of Artificial Sequence: Synthetic oligonucleotide
  Target: LAMA2; (+) strand; PAM type: NRG; PAM sequence: TGG
tctgtgcaattttcaattat

SEQ ID NO: 120440 - DNA, 20 bp, Artificial Sequence
  Description of Artificial Sequence: Synthetic oligonucleotide
  Target: LAMA2; (+) strand; PAM type: NRG; PAM sequence: GAG
gcaattttcaattattggat

SEQ ID NO: 120441 - DNA, 20 bp, Artificial Sequence
  Description of Artificial Sequence: Synthetic oligonucleotide
  Target: LAMA2; (+) strand; PAM type: NRG; PAM sequence: AGG
caattttcaattattggatg

SEQ ID NO: 120442 - DNA, 20 bp, Artificial Sequence
  Description of Artificial Sequence: Synthetic oligonucleotide
  Target: LAMA2; (+) strand; PAM type: NRG; PAM sequence: AAG
caattattggatgaggctga

SEQ ID NO: 120443 - DNA, 20 bp, Artificial Sequence
  Description of Artificial Sequence: Synthetic oligonucleotide
  Target: LAMA2; (+) strand; PAM type: NRG; PAM sequence: AAG
ggatgaggctgaaagtttga

SEQ ID NO: 120444 - DNA, 20 bp, Artificial Sequence
  Description of Artificial Sequence: Synthetic oligonucleotide
  Target: LAMA2; (+) strand; PAM type: NRG; PAM sequence: GAG
atgaggctgaaagtttgaaa

SEQ ID NO: 120445 - DNA, 20 bp, Artificial Sequence
  Description of Artificial Sequence: Synthetic oligonucleotide
  Target: LAMA2; (+) strand; PAM type: NRG; PAM sequence: AAG
aaagtttgaaagagaatatg

SEQ ID NO: 120446 - DNA, 20 bp, Artificial Sequence
  Description of Artificial Sequence: Synthetic oligonucleotide
  Target: LAMA2; (+) strand; PAM type: NRG; PAM sequence: CAG
gtttgaaagagaatatgaag

SEQ ID NO: 120447 - DNA, 20 bp, Artificial Sequence
  Description of Artificial Sequence: Synthetic oligonucleotide
  Target: LAMA2; (+) strand; PAM type: NRG; PAM sequence: CAG
aagcagtgcaattgtcattt

SEQ ID NO: 120448 - DNA, 20 bp, Artificial Sequence
  Description of Artificial Sequence: Synthetic oligonucleotide
  Target: LAMA2; (+) strand; PAM type: NRG; PAM sequence: GAG
agtgcaattgtcatttcagt

SEQ ID NO: 120449 - DNA, 20 bp, Artificial Sequence
  Description of Artificial Sequence: Synthetic oligonucleotide
  Target: LAMA2; (+) strand; PAM type: NRG; PAM sequence: TGG
agtgagctacctcatctcat

SEQ ID NO: 120450 - DNA, 20 bp, Artificial Sequence
  Description of Artificial Sequence: Synthetic oligonucleotide
  Target: LAMA2; (+) strand; PAM type: NRG; PAM sequence: TGG
ctcatctcattggtttgtcg

SEQ ID NO: 120451 - DNA, 20 bp, Artificial Sequence
  Description of Artificial Sequence: Synthetic oligonucleotide
  Target: LAMA2; (+) strand; PAM type: NRG; PAM sequence: TAG
aatataaaacatgaaacatc

SEQ ID NO: 120452 - DNA, 20 bp, Artificial Sequence
  Description of Artificial Sequence: Synthetic oligonucleotide
  Target: LAMA2; (+) strand; PAM type: NRG; PAM sequence: AAG
taaaacatgaaacatctagt

SEQ ID NO: 120453 - DNA, 20 bp, Artificial Sequence
  Description of Artificial Sequence: Synthetic oligonucleotide
  Target: LAMA2; (+) strand; PAM type: NRG; PAM sequence: AGG
aaaacatgaaacatctagta

SEQ ID NO: 120454 - DNA, 20 bp, Artificial Sequence
  Description of Artificial Sequence: Synthetic oligonucleotide
  Target: LAMA2; (+) strand; PAM type: NRG; PAM sequence: TGG
caacctaacatgacattctc

SEQ ID NO: 120455 - DNA, 20 bp, Artificial Sequence
  Description of Artificial Sequence: Synthetic oligonucleotide
  Target: LAMA2; (+) strand; PAM type: NRG; PAM sequence: AAG
acatgacattctctggctga

SEQ ID NO: 120456 - DNA, 20 bp, Artificial Sequence
  Description of Artificial Sequence: Synthetic oligonucleotide
  Target: LAMA2; (+) strand; PAM type: NRG; PAM sequence: TGG
cactcttctccaacatcatg

SEQ ID NO: 120457 - DNA, 20 bp, Artificial Sequence
  Description of Artificial Sequence: Synthetic oligonucleotide
  Target: LAMA2; (+) strand; PAM type: NRG; PAM sequence: CAG
atcatgtggtataccaaatt

SEQ ID NO: 120458 - DNA, 20 bp, Artificial Sequence
  Description of Artificial Sequence: Synthetic oligonucleotide
  Target: LAMA2; (+) strand; PAM type: NRG; PAM sequence: GAG
gtggtataccaaattcagtt

SEQ ID NO: 120459 - DNA, 20 bp, Artificial Sequence
  Description of Artificial Sequence: Synthetic oligonucleotide
  Target: LAMA2; (+) strand; PAM type: NRG; PAM sequence: AAG
ttcagttgagactgtttgtg

SEQ ID NO: 120460 - DNA, 20 bp, Artificial Sequence
  Description of Artificial Sequence: Synthetic oligonucleotide
  Target: LAMA2; (+) strand; PAM type: NRG; PAM sequence: AGG
tcagttgagactgtttgtga

SEQ ID NO: 120461 - DNA, 20 bp, Artificial Sequence
  Description of Artificial Sequence: Synthetic oligonucleotide
  Target: LAMA2; (+) strand; PAM type: NRG; PAM sequence: AAG
gttgagactgtttgtgaagg

SEQ ID NO: 120462 - DNA, 20 bp, Artificial Sequence
  Description of Artificial Sequence: Synthetic oligonucleotide
  Target: LAMA2; (+) strand; PAM type: NRG; PAM sequence: AGG
ttgagactgtttgtgaagga

SEQ ID NO: 120463 - DNA, 20 bp, Artificial Sequence
  Description of Artificial Sequence: Synthetic oligonucleotide
  Target: LAMA2; (+) strand; PAM type: NRG; PAM sequence: AAG
gcttatatacttaaacacac

SEQ ID NO: 120464 - DNA, 20 bp, Artificial Sequence
  Description of Artificial Sequence: Synthetic oligonucleotide
  Target: LAMA2; (+) strand; PAM type: NRG; PAM sequence: TAG
acaagtatttgaattctaat

SEQ ID NO: 120465 - DNA, 20 bp, Artificial Sequence
  Description of Artificial Sequence: Synthetic oligonucleotide
  Target: LAMA2; (+) strand; PAM type: NRG; PAM sequence: CAG
tctaattagaatttgtgctg

SEQ ID NO: 120466 - DNA, 20 bp, Artificial Sequence
  Description of Artificial Sequence: Synthetic oligonucleotide
  Target: LAMA2; (+) strand; PAM type: NRG; PAM sequence: TAG
tttctttattctcaacttta

SEQ ID NO: 120467 - DNA, 20 bp, Artificial Sequence
  Description of Artificial Sequence: Synthetic oligonucleotide
  Target: LAMA2; (+) strand; PAM type: NRG; PAM sequence: TAG
ttattctcaactttatagct

SEQ ID NO: 120468 - DNA, 20 bp, Artificial Sequence
  Description of Artificial Sequence: Synthetic oligonucleotide
  Target: LAMA2; (+) strand; PAM type: NRG; PAM sequence: TAG
tacgtacctctttatacctt

SEQ ID NO: 120469 - DNA, 20 bp, Artificial Sequence
  Description of Artificial Sequence: Synthetic oligonucleotide
  Target: LAMA2; (+) strand; PAM type: NRG; PAM sequence: CAG
atacctttagtttccacata

SEQ ID NO: 120470 - DNA, 20 bp, Artificial Sequence
  Description of Artificial Sequence: Synthetic oligonucleotide
  Target: LAMA2; (+) strand; PAM type: NRG; PAM sequence: TGG
ccacatacagtactcttctt

SEQ ID NO: 120471 - DNA, 20 bp, Artificial Sequence
  Description of Artificial Sequence: Synthetic oligonucleotide
  Target: LAMA2; (+) strand; PAM type: NRG; PAM sequence: GAG
acatacagtactcttctttg

SEQ ID NO: 120472 - DNA, 20 bp, Artificial Sequence
  Description of Artificial Sequence: Synthetic oligonucleotide
  Target: LAMA2; (+) strand; PAM type: NRG; PAM sequence: AGG
catacagtactcttctttgg

SEQ ID NO: 120473 - DNA, 20 bp, Artificial Sequence
  Description of Artificial Sequence: Synthetic oligonucleotide
  Target: LAMA2; (+) strand; PAM type: NRG; PAM sequence: TAG
ctttggaggtaactgaatcg

SEQ ID NO: 120474 - DNA, 20 bp, Artificial Sequence
  Description of Artificial Sequence: Synthetic oligonucleotide
  Target: LAMA2; (+) strand; PAM type: NRG; PAM sequence: TGG
actgaatcgtagaaaacgta

SEQ ID NO: 120475 - DNA, 20 bp, Artificial Sequence
  Description of Artificial Sequence: Synthetic oligonucleotide
  Target: LAMA2; (+) strand; PAM type: NRG; PAM sequence: TAG
tcgtagaaaacgtatggact

SEQ ID NO: 120476 - DNA, 20 bp, Artificial Sequence
  Description of Artificial Sequence: Synthetic oligonucleotide
  Target: LAMA2; (+) strand; PAM type: NRG; PAM sequence: AGG
cgtagaaaacgtatggactt

SEQ ID NO: 120477 - DNA, 20 bp, Artificial Sequence
  Description of Artificial Sequence: Synthetic oligonucleotide
  Target: LAMA2; (+) strand; PAM type: NRG; PAM sequence: GAG
tagaaaacgtatggacttag

SEQ ID NO: 120478 - DNA, 20 bp, Artificial Sequence
  Description of Artificial Sequence: Synthetic oligonucleotide
  Target: LAMA2; (+) strand; PAM type: NRG; PAM sequence: AAG
aaaacgtatggacttaggag

SEQ ID NO: 120479 - DNA, 20 bp, Artificial Sequence
  Description of Artificial Sequence: Synthetic oligonucleotide
  Target: LAMA2; (+) strand; PAM type: NRG; PAM sequence: AGG
aaacgtatggacttaggaga

SEQ ID NO: 120480 - DNA, 20 bp, Artificial Sequence
  Description of Artificial Sequence: Synthetic oligonucleotide
  Target: LAMA2; (+) strand; PAM type: NRG; PAM sequence: TAG
gtatggacttaggagaaggc

SEQ ID NO: 120481 - DNA, 20 bp, Artificial Sequence
  Description of Artificial Sequence: Synthetic oligonucleotide
  Target: LAMA2; (+) strand; PAM type: NRG; PAM sequence: CGG
acttaggagaaggctagact

SEQ ID NO: 120482 - DNA, 20 bp, Artificial Sequence
  Description of Artificial Sequence: Synthetic oligonucleotide
  Target: LAMA2; (+) strand; PAM type: NRG; PAM sequence: TAG
gaaggctagactcggatcca

SEQ ID NO: 120483 - DNA, 20 bp, Artificial Sequence
  Description of Artificial Sequence: Synthetic oligonucleotide
  Target: LAMA2; (+) strand; PAM type: NRG; PAM sequence: AAG
ctagactcggatccatagcc

SEQ ID NO: 120484 - DNA, 20 bp, Artificial Sequence
  Description of Artificial Sequence: Synthetic oligonucleotide
  Target: LAMA2; (+) strand; PAM type: NRG; PAM sequence: AAG
agccaagtcaccactttact

SEQ ID NO: 120485 - DNA, 20 bp, Artificial Sequence
  Description of Artificial Sequence: Synthetic oligonucleotide
  Target: LAMA2; (+) strand; PAM type: NRG; PAM sequence: AAG
caccactttactaagatcaa

SEQ ID NO: 120486 - DNA, 20 bp, Artificial Sequence
  Description of Artificial Sequence: Synthetic oligonucleotide
  Target: LAMA2; (+) strand; PAM type: NRG; PAM sequence: GAG
tttactaagatcaaaagcct

SEQ ID NO: 120487 - DNA, 20 bp, Artificial Sequence
  Description of Artificial Sequence: Synthetic oligonucleotide
  Target: LAMA2; (+) strand; PAM type: NRG; PAM sequence: CGG
agatcaaaagcctgagtcaa

SEQ ID NO: 120488 - DNA, 20 bp, Artificial Sequence
  Description of Artificial Sequence: Synthetic oligonucleotide
  Target: LAMA2; (+) strand; PAM type: NRG; PAM sequence: GAG
atcaaaagcctgagtcaacg

SEQ ID NO: 120489 - DNA, 20 bp, Artificial Sequence
  Description of Artificial Sequence: Synthetic oligonucleotide
  Target: LAMA2; (+) strand; PAM type: NRG; PAM sequence: AAG
gagttaaattttctattcgt

SEQ ID NO: 120490 - DNA, 20 bp, Artificial Sequence
  Description of Artificial Sequence: Synthetic oligonucleotide
  Target: LAMA2; (+) strand; PAM type: NRG; PAM sequence: TAG
taaattttctattcgtaaga

SEQ ID NO: 120491 - DNA, 20 bp, Artificial Sequence
  Description of Artificial Sequence: Synthetic oligonucleotide
  Target: LAMA2; (+) strand; PAM type: NRG; PAM sequence: AGG
aaattttctattcgtaagat

SEQ ID NO: 120492 - DNA, 20 bp, Artificial Sequence
  Description of Artificial Sequence: Synthetic oligonucleotide
  Target: LAMA2; (+) strand; PAM type: NRG; PAM sequence: TAG
ttctattcgtaagataggtt

SEQ ID NO: 120493 - DNA, 20 bp, Artificial Sequence
  Description of Artificial Sequence: Synthetic oligonucleotide
  Target: LAMA2; (+) strand; PAM type: NRG; PAM sequence: AGG
tctattcgtaagataggttt

SEQ ID NO: 120494 - DNA, 20 bp, Artificial Sequence
  Description of Artificial Sequence: Synthetic oligonucleotide
  Target: LAMA2; (+) strand; PAM type: NRG; PAM sequence: TAG
ttcgtaagataggtttaggt

SEQ ID NO: 120495 - DNA, 20 bp, Artificial Sequence
  Description of Artificial Sequence: Synthetic oligonucleotide
  Target: LAMA2; (+) strand; PAM type: NRG; PAM sequence: CAG
ataaatgtgaaaatacttgc

SEQ ID NO: 120496 - DNA, 20 bp, Artificial Sequence
  Description of Artificial Sequence: Synthetic oligonucleotide
  Target: LAMA2; (+) strand; PAM type: NRG; PAM sequence: CAG
gaaaatacttgccagctaat

SEQ ID NO: 120497 - DNA, 20 bp, Artificial Sequence
  Description of Artificial Sequence: Synthetic oligonucleotide
  Target: LAMA2; (+) strand; PAM type: NRG; PAM sequence: TAG
gccagctaatcagtaaatac

SEQ ID NO: 120498 - DNA, 20 bp, Artificial Sequence
  Description of Artificial Sequence: Synthetic oligonucleotide
  Target: LAMA2; (+) strand; PAM type: NRG; PAM sequence: GAG
tcttttcttctttattttat

SEQ ID NO: 120499 - DNA, 20 bp, Artificial Sequence
  Description of Artificial Sequence: Synthetic oligonucleotide
  Target: LAMA2; (+) strand; PAM type: NRG; PAM sequence: AAG
tgagcataaaactaaaaaaa

SEQ ID NO: 120500 - DNA, 20 bp, Artificial Sequence
  Description of Artificial Sequence: Synthetic oligonucleotide
  Target: LAMA2; (+) strand; PAM type: NRG; PAM sequence: TAG
aaaaagatttgctttgcata

SEQ ID NO: 120501 - DNA, 20 bp, Artificial Sequence
  Description of Artificial Sequence: Synthetic oligonucleotide
  Target: LAMA2; (+) strand; PAM type: NRG; PAM sequence: AAG
atagcatatcctttttgctt

SEQ ID NO: 120502 - DNA, 20 bp, Artificial Sequence
  Description of Artificial Sequence: Synthetic oligonucleotide
  Target: LAMA2; (+) strand; PAM type: NRG; PAM sequence: CAG
atatcctttttgcttaagaa

SEQ ID NO: 120503 - DNA, 20 bp, Artificial Sequence
  Description of Artificial Sequence: Synthetic oligonucleotide
  Target: LAMA2; (+) strand; PAM type: NRG; PAM sequence: GAG
aatattctaaaaatttcttt

SEQ ID NO: 120504 - DNA, 20 bp, Artificial Sequence
  Description of Artificial Sequence: Synthetic oligonucleotide
  Target: LAMA2; (+) strand; PAM type: NRG; PAM sequence: AGG
atattctaaaaatttctttg

SEQ ID NO: 120505 - DNA, 20 bp, Artificial Sequence
  Description of Artificial Sequence: Synthetic oligonucleotide
  Target: LAMA2; (+) strand; PAM type: NRG; PAM sequence: GAG
attctaaaaatttctttgag

SEQ ID NO: 120506 - DNA, 20 bp, Artificial Sequence
  Description of Artificial Sequence: Synthetic oligonucleotide
  Target: LAMA2; (+) strand; PAM type: NRG; PAM sequence: AAG
aatttctttgaggagaccct

SEQ ID NO: 120507 - DNA, 20 bp, Artificial Sequence
  Description of Artificial Sequence: Synthetic oligonucleotide
  Target: LAMA2; (+) strand; PAM type: NRG; PAM sequence: GAG
tttctttgaggagaccctaa

SEQ ID NO: 120508 - DNA, 20 bp, Artificial Sequence
  Description of Artificial Sequence: Synthetic oligonucleotide
  Target: LAMA2; (+) strand; PAM type: NRG; PAM sequence: TAG
gaggagaccctaagagacta

SEQ ID NO: 120509 - DNA, 20 bp, Artificial Sequence
  Description of Artificial Sequence: Synthetic oligonucleotide
  Target: LAMA2; (+) strand; PAM type: NRG; PAM sequence: TGG
agaccctaagagactataga

SEQ ID NO: 120510 - DNA, 20 bp, Artificial Sequence
  Description of Artificial Sequence: Synthetic oligonucleotide
  Target: LAMA2; (+) strand; PAM type: NRG; PAM sequence: AAG
aaactatttatctcattgcc

SEQ ID NO: 120511 - DNA, 20 bp, Artificial Sequence
  Description of Artificial Sequence: Synthetic oligonucleotide
  Target: LAMA2; (+) strand; PAM type: NRG; PAM sequence: GAG
actatttatctcattgccaa

SEQ ID NO: 120512 - DNA, 20 bp, Artificial Sequence
  Description of Artificial Sequence: Synthetic oligonucleotide
  Target: LAMA2; (+) strand; PAM type: NRG; PAM sequence: GAG
agagattgaataattctgtc

SEQ ID NO: 120513 - DNA, 20 bp, Artificial Sequence
  Description of Artificial Sequence: Synthetic oligonucleotide
  Target: LAMA2; (+) strand; PAM type: NRG; PAM sequence: AGG
gagattgaataattctgtcg

SEQ ID NO: 120514 - DNA, 20 bp, Artificial Sequence
  Description of Artificial Sequence: Synthetic oligonucleotide
  Target: LAMA2; (+) strand; PAM type: NRG; PAM sequence: CAG
ataattctgtcgaggttaca

SEQ ID NO: 120515 - DNA, 20 bp, Artificial Sequence
  Description of Artificial Sequence: Synthetic oligonucleotide
  Target: LAMA2; (+) strand; PAM type: NRG; PAM sequence: AAG
ttctgtcgaggttacacagc

SEQ ID NO: 120516 - DNA, 20 bp, Artificial Sequence
  Description of Artificial Sequence: Synthetic oligonucleotide
  Target: LAMA2; (+) strand; PAM type: NRG; PAM sequence: CAG
gtcgaggttacacagcaagt

SEQ ID NO: 120517 - DNA, 20 bp, Artificial Sequence
  Description of Artificial Sequence: Synthetic oligonucleotide
  Target: LAMA2; (+) strand; PAM type: NRG; PAM sequence: CAG
gttacacagcaagtcagtaa

SEQ ID NO: 120518 - DNA, 20 bp, Artificial Sequence
  Description of Artificial Sequence: Synthetic oligonucleotide
  Target: LAMA2; (+) strand; PAM type: NRG; PAM sequence: GAG
tacacagcaagtcagtaaca

SEQ ID NO: 120519 - DNA, 20 bp, Artificial Sequence
  Description of Artificial Sequence: Synthetic oligonucleotide
  Target: LAMA2; (+) strand; PAM type: NRG; PAM sequence: AAG
agcaagtcagtaacagagat

SEQ ID NO: 120520 - DNA, 20 bp, Artificial Sequence
  Description of Artificial Sequence: Synthetic oligonucleotide
  Target: LAMA2; (+) strand; PAM type: NRG; PAM sequence: AAG
aagtcagtaacagagataag

SEQ ID NO: 120521 - DNA, 20 bp, Artificial Sequence
  Description of Artificial Sequence: Synthetic oligonucleotide
  Target: LAMA2; (+) strand; PAM type: NRG; PAM sequence: AAG
acagagataagaagaaacac

SEQ ID NO: 120522 - DNA, 20 bp, Artificial Sequence
  Description of Artificial Sequence: Synthetic oligonucleotide
  Target: LAMA2; (+) strand; PAM type: NRG; PAM sequence: TAG
gaaacacaagttcctataat

SEQ ID NO: 120523 - DNA, 20 bp, Artificial Sequence
  Description of Artificial Sequence: Synthetic oligonucleotide
  Target: LAMA2; (+) strand; PAM type: NRG; PAM sequence: CAG
aagttcctataattagctaa

SEQ ID NO: 120524 - DNA, 20 bp, Artificial Sequence
  Description of Artificial Sequence: Synthetic oligonucleotide
  Target: LAMA2; (+) strand; PAM type: NRG; PAM sequence: TAG
taattagctaacagttatgt

SEQ ID NO: 120525 - DNA, 20 bp, Artificial Sequence
  Description of Artificial Sequence: Synthetic oligonucleotide
  Target: LAMA2; (+) strand; PAM type: NRG; PAM sequence: TAG
ttagctaacagttatgttag

SEQ ID NO: 120526 - DNA, 20 bp, Artificial Sequence
  Description of Artificial Sequence: Synthetic oligonucleotide
  Target: LAMA2; (+) strand; PAM type: NRG; PAM sequence: GAG
ttatgttagtagctctgtgt

SEQ ID NO: 120527 - DNA, 20 bp, Artificial Sequence
  Description of Artificial Sequence: Synthetic oligonucleotide
  Target: LAMA2; (+) strand; PAM type: NRG; PAM sequence: AAG
tgttagtagctctgtgtgag

SEQ ID NO: 120528 - DNA, 20 bp, Artificial Sequence
  Description of Artificial Sequence: Synthetic oligonucleotide
  Target: LAMA2; (+) strand; PAM type: NRG; PAM sequence: CAG
gtgtgagaagtgatttaaaa

SEQ ID NO: 120529 - DNA, 20 bp, Artificial Sequence
  Description of Artificial Sequence: Synthetic oligonucleotide
  Target: LAMA2; (+) strand; PAM type: NRG; PAM sequence: AGG
tgtgagaagtgatttaaaac

SEQ ID NO: 120530 - DNA, 20 bp, Artificial Sequence
  Description of Artificial Sequence: Synthetic oligonucleotide
  Target: LAMA2; (+) strand; PAM type: NRG; PAM sequence: TGG
atttaaaacaggcaacatga

SEQ ID NO: 120531 - DNA, 20 bp, Artificial Sequence
  Description of Artificial Sequence: Synthetic oligonucleotide
  Target: LAMA2; (+) strand; PAM type: NRG; PAM sequence: TAG
gaaatttttgcaataatttg

SEQ ID NO: 120532 - DNA, 20 bp, Artificial Sequence
  Description of Artificial Sequence: Synthetic oligonucleotide
  Target: LAMA2; (+) strand; PAM type: NRG; PAM sequence: TGG
agttattcatacttcaaatg

SEQ ID NO: 120533 - DNA, 20 bp, Artificial Sequence
  Description of Artificial Sequence: Synthetic oligonucleotide
  Target: LAMA2; (+) strand; PAM type: NRG; PAM sequence: TAG
ggtacaataaacgttttttc

SEQ ID NO: 120534 - DNA, 20 bp, Artificial Sequence
  Description of Artificial Sequence: Synthetic oligonucleotide
  Target: LAMA2; (+) strand; PAM type: NRG; PAM sequence: AGG
gtacaataaacgttttttct

SEQ ID NO: 120535 - DNA, 20 bp, Artificial Sequence
  Description of Artificial Sequence: Synthetic oligonucleotide
  Target: LAMA2; (+) strand; PAM type: NRG; PAM sequence: TAG
tttaatacttataatatgtt

SEQ ID NO: 120536 - DNA, 20 bp, Artificial Sequence
  Description of Artificial Sequence: Synthetic oligonucleotide
  Target: LAMA2; (+) strand; PAM type: NRG; PAM sequence: TGG
aatatgtttagataaatata

SEQ ID NO: 120537 - DNA, 20 bp, Artificial Sequence
  Description of Artificial Sequence: Synthetic oligonucleotide
  Target: LAMA2; (+) strand; PAM type: NRG; PAM sequence: TAG
ttagataaatatatggcata

SEQ ID NO: 120538 - DNA, 20 bp, Artificial Sequence
  Description of Artificial Sequence: Synthetic oligonucleotide
  Target: LAMA2; (+) strand; PAM type: NRG; PAM sequence: AAG
ataaatatatggcatatagt

SEQ ID NO: 120539 - DNA, 20 bp, Artificial Sequence
  Description of Artificial Sequence: Synthetic oligonucleotide
  Target: LAMA2; (+) strand; PAM type: NRG; PAM sequence: AAG
catatagtaagcacttcata

SEQ ID NO: 120540 - DNA, 20 bp, Artificial Sequence
  Description of Artificial Sequence: Synthetic oligonucleotide
  Target: LAMA2; (+) strand; PAM type: NRG; PAM sequence: AGG
atatagtaagcacttcataa

SEQ ID NO: 120541 - DNA, 20 bp, Artificial Sequence
  Description of Artificial Sequence: Synthetic oligonucleotide
  Target: LAMA2; (+) strand; PAM type: NRG; PAM sequence: TAG
agtaagcacttcataaaggt

SEQ ID NO: 120542 - DNA, 20 bp, Artificial Sequence
  Description of Artificial Sequence: Synthetic oligonucleotide
  Target: LAMA2; (+) strand; PAM type: NRG; PAM sequence: TAG
taaaggttagttattattct

SEQ ID NO: 120543 - DNA, 20 bp, Artificial Sequence
  Description of Artificial Sequence: Synthetic oligonucleotide
  Target: LAMA2; (+) strand; PAM type: NRG; PAM sequence: AAG
gttattattcttagtctatg

SEQ ID NO: 120544 - DNA, 20 bp, Artificial Sequence
  Description of Artificial Sequence: Synthetic oligonucleotide
  Target: LAMA2; (+) strand; PAM type: NRG; PAM sequence: TGG
tgttttcattgacatctgct

SEQ ID NO: 120545 - DNA, 20 bp, Artificial Sequence
  Description of Artificial Sequence: Synthetic oligonucleotide
  Target: LAMA2; (+) strand; PAM type: NRG; PAM sequence: GGG
gttttcattgacatctgctt

SEQ ID NO: 120546 - DNA, 20 bp, Artificial Sequence
  Description of Artificial Sequence: Synthetic oligonucleotide
  Target: LAMA2; (+) strand; PAM type: NRG; PAM sequence: TAG
ttcattgacatctgcttggg

SEQ ID NO: 120547 - DNA, 20 bp, Artificial Sequence
  Description of Artificial Sequence: Synthetic oligonucleotide
  Target: LAMA2; (+) strand; PAM type: NRG; PAM sequence: GAG
cattgacatctgcttgggta

SEQ ID NO: 120548 - DNA, 20 bp, Artificial Sequence
  Description of Artificial Sequence: Synthetic oligonucleotide
  Target: LAMA2; (+) strand; PAM type: NRG; PAM sequence: TGG
cttgggtagagatgacaatg

SEQ ID NO: 120549 - DNA, 20 bp, Artificial Sequence
  Description of Artificial Sequence: Synthetic oligonucleotide
  Target: LAMA2; (+) strand; PAM type: NRG; PAM sequence: AAG
gcgtgtttgacacacaatgt

SEQ ID NO: 120550 - DNA, 20 bp, Artificial Sequence
  Description of Artificial Sequence: Synthetic oligonucleotide
  Target: LAMA2; (+) strand; PAM type: NRG; PAM sequence: CAG
cacacaatgtaagttaattt

SEQ ID NO: 120551 - DNA, 20 bp, Artificial Sequence
  Description of Artificial Sequence: Synthetic oligonucleotide
  Target: LAMA2; (+) strand; PAM type: NRG; PAM sequence: TGG
aatgtaagttaatttcagca

SEQ ID NO: 120552 - DNA, 20 bp, Artificial Sequence
  Description of Artificial Sequence: Synthetic oligonucleotide
  Target: LAMA2; (+) strand; PAM type: NRG; PAM sequence: CAG
gttaatttcagcatggcctt

SEQ ID NO: 120553 - DNA, 20 bp, Artificial Sequence
  Description of Artificial Sequence: Synthetic oligonucleotide
  Target: LAMA2; (+) strand; PAM type: NRG; PAM sequence: TGG
aatttcagcatggccttcag

SEQ ID NO: 120554 - DNA, 20 bp, Artificial Sequence
  Description of Artificial Sequence: Synthetic oligonucleotide
  Target: LAMA2; (+) strand; PAM type: NRG; PAM sequence: AAG
tcagcatggccttcagtgga

SEQ ID NO: 120555 - DNA, 20 bp, Artificial Sequence
  Description of Artificial Sequence: Synthetic oligonucleotide
  Target: LAMA2; (+) strand; PAM type: NRG; PAM sequence: TGG
ccttcagtggaaagtctaat

SEQ ID NO: 120556 - DNA, 20 bp, Artificial Sequence
  Description of Artificial Sequence: Synthetic oligonucleotide
  Target: LAMA2; (+) strand; PAM type: NRG; PAM sequence: CAG
tggaaagtctaattggattg

SEQ ID NO: 120557 - DNA, 20 bp, Artificial Sequence
  Description of Artificial Sequence: Synthetic oligonucleotide
  Target: LAMA2; (+) strand; PAM type: NRG; PAM sequence: TAG
ttgcagaaaatctctcaata

SEQ ID NO: 120558 - DNA, 20 bp, Artificial Sequence
  Description of Artificial Sequence: Synthetic oligonucleotide
  Target: LAMA2; (+) strand; PAM type: NRG; PAM sequence: TGG
caatatagattgtctttatt

SEQ ID NO: 120559 - DNA, 20 bp, Artificial Sequence
  Description of Artificial Sequence: Synthetic oligonucleotide
  Target: LAMA2; (+) strand; PAM type: NRG; PAM sequence: TAG
tggactctccctaattacta

SEQ ID NO: 120560 - DNA, 20 bp, Artificial Sequence
  Description of Artificial Sequence: Synthetic oligonucleotide
  Target: LAMA2; (+) strand; PAM type: NRG; PAM sequence: TGG
actatagtaaaaaaaattct

SEQ ID NO: 120561 - DNA, 20 bp, Artificial Sequence
  Description of Artificial Sequence: Synthetic oligonucleotide
  Target: LAMA2; (+) strand; PAM type: NRG; PAM sequence: TGG
tacattatttaatacaactc

SEQ ID NO: 120562 - DNA, 20 bp, Artificial Sequence
  Description of Artificial Sequence: Synthetic oligonucleotide
  Target: LAMA2; (+) strand; PAM type: NRG; PAM sequence: TAG
ttatttaatacaactctgga

SEQ ID NO: 120563 - DNA, 20 bp, Artificial Sequence
  Description of Artificial Sequence: Synthetic oligonucleotide
  Target: LAMA2; (+) strand; PAM type: NRG; PAM sequence: AGG
tatttaatacaactctggat

SEQ ID NO: 120564 - DNA, 20 bp, Artificial Sequence
  Description of Artificial Sequence: Synthetic oligonucleotide
  Target: LAMA2; (+) strand; PAM type: NRG; PAM sequence: GGG
atttaatacaactctggata

SEQ ID NO: 120565 - DNA, 20 bp, Artificial Sequence
  Description of Artificial Sequence: Synthetic oligonucleotide
  Target: LAMA2; (+) strand; PAM type: NRG; PAM sequence: GAG
ttaatacaactctggatagg

SEQ ID NO: 120566 - DNA, 20 bp, Artificial Sequence
  Description of Artificial Sequence: Synthetic oligonucleotide
  Target: LAMA2; (+) strand; PAM type: NRG; PAM sequence: AGG
taatacaactctggataggg

SEQ ID NO: 120567 - DNA, 20 bp, Artificial Sequence
  Description of Artificial Sequence: Synthetic oligonucleotide
  Target: LAMA2; (+) strand; PAM type: NRG; PAM sequence: TAG
ctctggatagggaggattct

SEQ ID NO: 120568 - DNA, 20 bp, Artificial Sequence
  Description of Artificial Sequence: Synthetic oligonucleotide
  Target: LAMA2; (+) strand; PAM type: NRG; PAM sequence: TAG
ctacttgtgtattaaatttt

SEQ ID NO: 120569 - DNA, 20 bp, Artificial Sequence
  Description of Artificial Sequence: Synthetic oligonucleotide
  Target: LAMA2; (+) strand; PAM type: NRG; PAM sequence: CAG
caaaaccaaaaaacctactt

SEQ ID NO: 120570 - DNA, 20 bp, Artificial Sequence
  Description of Artificial Sequence: Synthetic oligonucleotide
  Target: LAMA2; (+) strand; PAM type: NRG; PAM sequence: TAG
acctacttcagaaaatcata

SEQ ID NO: 120571 - DNA, 20 bp, Artificial Sequence
  Description of Artificial Sequence: Synthetic oligonucleotide
  Target: LAMA2; (+) strand; PAM type: NRG; PAM sequence: TAG
atagtactctaacaaatctc

SEQ ID NO: 120572 - DNA, 20 bp, Artificial Sequence
  Description of Artificial Sequence: Synthetic oligonucleotide
  Target: LAMA2; (+) strand; PAM type: NRG; PAM sequence: GAG
agtactctaacaaatctcta

SEQ ID NO: 120573 - DNA, 20 bp, Artificial Sequence
  Description of Artificial Sequence: Synthetic oligonucleotide
  Target: LAMA2; (+) strand; PAM type: NRG; PAM sequence: TGG
gaaaactgcttttctaaact

SEQ ID NO: 120574 - DNA, 20 bp, Artificial Sequence
  Description of Artificial Sequence: Synthetic oligonucleotide
  Target: LAMA2; (+) strand; PAM type: NRG; PAM sequence: GGG
aaaactgcttttctaaactt

SEQ ID NO: 120575 - DNA, 20 bp, Artificial Sequence
  Description of Artificial Sequence: Synthetic oligonucleotide
  Target: LAMA2; (+) strand; PAM type: NRG; PAM sequence: TGG
ttttctaaacttgggaacgc

SEQ ID NO: 120576 - DNA, 20 bp, Artificial Sequence
  Description of Artificial Sequence: Synthetic oligonucleotide
  Target: LAMA2; (+) strand; PAM type: NRG; PAM sequence: CAG
gctggattttgaaaatattt

SEQ ID NO: 120577 - DNA, 20 bp, Artificial Sequence
  Description of Artificial Sequence: Synthetic oligonucleotide
  Target: LAMA2; (+) strand; PAM type: NRG; PAM sequence: AAG
ttcagacaaaacacttctta

SEQ ID NO: 120578 - DNA, 20 bp, Artificial Sequence
  Description of Artificial Sequence: Synthetic oligonucleotide
  Target: LAMA2; (+) strand; PAM type: NRG; PAM sequence: AGG
tcagacaaaacacttcttaa

SEQ ID NO: 120579 - DNA, 20 bp, Artificial Sequence
  Description of Artificial Sequence: Synthetic oligonucleotide
  Target: LAMA2; (+) strand; PAM type: NRG; PAM sequence: AAG
aaggcccgtttaccatcaaa

SEQ ID NO: 120580 - DNA, 20 bp, Artificial Sequence
  Description of Artificial Sequence: Synthetic oligonucleotide
  Target: LAMA2; (+) strand; PAM type: NRG; PAM sequence: TAG
attttttcattctgatacat

SEQ ID NO: 120581 - DNA, 20 bp, Artificial Sequence
  Description of Artificial Sequence: Synthetic oligonucleotide
  Target: LAMA2; (+) strand; PAM type: NRG; PAM sequence: AAG
ttcattctgatacattagaa

SEQ ID NO: 120582 - DNA, 20 bp, Artificial Sequence
  Description of Artificial Sequence: Synthetic oligonucleotide
  Target: LAMA2; (+) strand; PAM type: NRG; PAM sequence: TGG
tgatacattagaaaagtcac

SEQ ID NO: 120583 - DNA, 20 bp, Artificial Sequence
  Description of Artificial Sequence: Synthetic oligonucleotide
  Target: LAMA2; (+) strand; PAM type: NRG; PAM sequence: TGG
aaagtcactggatttgtaat

SEQ ID NO: 120584 - DNA, 20 bp, Artificial Sequence
  Description of Artificial Sequence: Synthetic oligonucleotide
  Target: LAMA2; (+) strand; PAM type: NRG; PAM sequence: TAG
caaaatataaattttccctc

SEQ ID NO: 120585 - DNA, 20 bp, Artificial Sequence
  Description of Artificial Sequence: Synthetic oligonucleotide
  Target: LAMA2; (+) strand; PAM type: NRG; PAM sequence: AAG
tttccctctagctcttccta

SEQ ID NO: 120586 - DNA, 20 bp, Artificial Sequence
  Description of Artificial Sequence: Synthetic oligonucleotide
  Target: LAMA2; (+) strand; PAM type: NRG; PAM sequence: GAG
tccctctagctcttcctaaa

SEQ ID NO: 120587 - DNA, 20 bp, Artificial Sequence
  Description of Artificial Sequence: Synthetic oligonucleotide
  Target: LAMA2; (+) strand; PAM type: NRG; PAM sequence: TGG
taaagagattaccttaaaca

SEQ ID NO: 120588 - DNA, 20 bp, Artificial Sequence
  Description of Artificial Sequence: Synthetic oligonucleotide
  Target: LAMA2; (+) strand; PAM type: NRG; PAM sequence: AAG
agattaccttaaacatggat

SEQ ID NO: 120589 - DNA, 20 bp, Artificial Sequence
  Description of Artificial Sequence: Synthetic oligonucleotide
  Target: LAMA2; (+) strand; PAM type: NRG; PAM sequence: TGG
taatgttcgaatctatttca

SEQ ID NO: 120590 - DNA, 20 bp, Artificial Sequence
  Description of Artificial Sequence: Synthetic oligonucleotide
  Target: LAMA2; (+) strand; PAM type: NRG; PAM sequence: GGG
aatgttcgaatctatttcat

SEQ ID NO: 120591 - DNA, 20 bp, Artificial Sequence
  Description of Artificial Sequence: Synthetic oligonucleotide
  Target: LAMA2; (+) strand; PAM type: NRG; PAM sequence: GGG
atgttcgaatctatttcatg

SEQ ID NO: 120592 - DNA, 20 bp, Artificial Sequence
  Description of Artificial Sequence: Synthetic oligonucleotide
  Target: LAMA2; (+) strand; PAM type: NRG; PAM sequence: AAG
ctatttcatggggttgttat

SEQ ID NO: 120593 - DNA, 20 bp, Artificial Sequence
  Description of Artificial Sequence: Synthetic oligonucleotide
  Target: LAMA2; (+) strand; PAM type: NRG; PAM sequence: AGG
tatttcatggggttgttata

SEQ ID NO: 120594 - DNA, 20 bp, Artificial Sequence
  Description of Artificial Sequence: Synthetic oligonucleotide
  Target: LAMA2; (+) strand; PAM type: NRG; PAM sequence: GGG
atttcatggggttgttataa

SEQ ID NO: 120595 - DNA, 20 bp, Artificial Sequence
  Description of Artificial Sequence: Synthetic oligonucleotide
  Target: LAMA2; (+) strand; PAM type: NRG; PAM sequence: AAG
ggttgttataagggttaaat

SEQ ID NO: 120596 - DNA, 20 bp, Artificial Sequence
  Description of Artificial Sequence: Synthetic oligonucleotide
  Target: LAMA2; (+) strand; PAM type: NRG; PAM sequence: AGG
gttgttataagggttaaata

SEQ ID NO: 120597 - DNA, 20 bp, Artificial Sequence
  Description of Artificial Sequence: Synthetic oligonucleotide
  Target: LAMA2; (+) strand; PAM type: NRG; PAM sequence: CAG
gttataagggttaaataagg

SEQ ID NO: 120598 - DNA, 20 bp, Artificial Sequence
  Description of Artificial Sequence: Synthetic oligonucleotide
  Target: LAMA2; (+) strand; PAM type: NRG; PAM sequence: CAG
tttgttattataataaatga

SEQ ID NO: 120599 - DNA, 20 bp, Artificial Sequence
  Description of Artificial Sequence: Synthetic oligonucleotide
  Target: LAMA2; (+) strand; PAM type: NRG; PAM sequence: GAG
tgttattataataaatgaca

SEQ ID NO: 120600 - DNA, 20 bp, Artificial Sequence
  Description of Artificial Sequence: Synthetic oligonucleotide
  Target: LAMA2; (+) strand; PAM type: NRG; PAM sequence: TGG
attataataaatgacagagt

SEQ ID NO: 120601 - DNA, 20 bp, Artificial Sequence
  Description of Artificial Sequence: Synthetic oligonucleotide
  Target: LAMA2; (+) strand; PAM type: NRG; PAM sequence: TAG
ataaatgacagagttggtct

SEQ ID NO: 120602 - DNA, 20 bp, Artificial Sequence
  Description of Artificial Sequence: Synthetic oligonucleotide
  Target: LAMA2; (+) strand; PAM type: NRG; PAM sequence: AGG
taaatgacagagttggtctt

SEQ ID NO: 120603 - DNA, 20 bp, Artificial Sequence
  Description of Artificial Sequence: Synthetic oligonucleotide
  Target: LAMA2; (+) strand; PAM type: NRG; PAM sequence: TGG
gagttggtcttaggcatcat

SEQ ID NO: 120604 - DNA, 20 bp, Artificial Sequence
  Description of Artificial Sequence: Synthetic oligonucleotide
  Target: LAMA2; (+) strand; PAM type: NRG; PAM sequence: AAG
cttaggcatcattggttatg

SEQ ID NO: 120605 - DNA, 20 bp, Artificial Sequence
  Description of Artificial Sequence: Synthetic oligonucleotide
  Target: LAMA2; (+) strand; PAM type: NRG; PAM sequence: CAG
ctttctttgttttttttccc

SEQ ID NO: 120606 - DNA, 20 bp, Artificial Sequence
  Description of Artificial Sequence: Synthetic oligonucleotide
  Target: LAMA2; (+) strand; PAM type: NRG; PAM sequence: TGG
tctttgttttttttccccag

SEQ ID NO: 120607 - DNA, 20 bp, Artificial Sequence
  Description of Artificial Sequence: Synthetic oligonucleotide
  Target: LAMA2; (+) strand; PAM type: NRG; PAM sequence: TAG
atgttatgtattaatatact

SEQ ID NO: 120608 - DNA, 20 bp, Artificial Sequence
  Description of Artificial Sequence: Synthetic oligonucleotide
  Target: LAMA2; (+) strand; PAM type: NRG; PAM sequence: AAG
tacttagttctcctgttttc

SEQ ID NO: 120609 - DNA, 20 bp, Artificial Sequence
  Description of Artificial Sequence: Synthetic oligonucleotide
  Target: LAMA2; (+) strand; PAM type: NRG; PAM sequence: AGG
acttagttctcctgttttca

SEQ ID NO: 120610 - DNA, 20 bp, Artificial Sequence
  Description of Artificial Sequence: Synthetic oligonucleotide
  Target: LAMA2; (+) strand; PAM type: NRG; PAM sequence: TAG
tttcaaggacccatgacaca

SEQ ID NO: 120611 - DNA, 20 bp, Artificial Sequence
  Description of Artificial Sequence: Synthetic oligonucleotide
  Target: LAMA2; (+) strand; PAM type: NRG; PAM sequence: TGG
tgacacatagctttcaaaca

SEQ ID NO: 120612 - DNA, 20 bp, Artificial Sequence
  Description of Artificial Sequence: Synthetic oligonucleotide
  Target: LAMA2; (+) strand; PAM type: NRG; PAM sequence: TAG
catggcacaaattatttgtt

SEQ ID NO: 120613 - DNA, 20 bp, Artificial Sequence
  Description of Artificial Sequence: Synthetic oligonucleotide
  Target: LAMA2; (+) strand; PAM type: NRG; PAM sequence: AAG
acatatacatactactgcat

SEQ ID NO: 120614 - DNA, 20 bp, Artificial Sequence
  Description of Artificial Sequence: Synthetic oligonucleotide
  Target: LAMA2; (+) strand; PAM type: NRG; PAM sequence: AAG
tatacatactactgcataag

SEQ ID NO: 120615 - DNA, 20 bp, Artificial Sequence
  Description of Artificial Sequence: Synthetic oligonucleotide
  Target: LAMA2; (+) strand; PAM type: NRG; PAM sequence: TGG
tactgcataagaagaaaata

SEQ ID NO: 120616 - DNA, 20 bp, Artificial Sequence
  Description of Artificial Sequence: Synthetic oligonucleotide
  Target: LAMA2; (+) strand; PAM type: NRG; PAM sequence: AAG
gaagaaaatatggtatctga

SEQ ID NO: 120617 - DNA, 20 bp, Artificial Sequence
  Description of Artificial Sequence: Synthetic oligonucleotide
  Target: LAMA2; (+) strand; PAM type: NRG; PAM sequence: CAG
tggtatctgaaagtgtacat

SEQ ID NO: 120618 - DNA, 20 bp, Artificial Sequence
  Description of Artificial Sequence: Synthetic oligonucleotide
  Target: LAMA2; (+) strand; PAM type: NRG; PAM sequence: AAG
tacatcagcttcctacaaac

SEQ ID NO: 120619 - DNA, 20 bp, Artificial Sequence
  Description of Artificial Sequence: Synthetic oligonucleotide
  Target: LAMA2; (+) strand; PAM type: NRG; PAM sequence: TAG
atcagcttcctacaaacaag

SEQ ID NO: 120620 - DNA, 20 bp, Artificial Sequence
  Description of Artificial Sequence: Synthetic oligonucleotide
  Target: LAMA2; (+) strand; PAM type: NRG; PAM sequence: AAG
cttcctacaaacaagtagca

SEQ ID NO: 120621 - DNA, 20 bp, Artificial Sequence
  Description of Artificial Sequence: Synthetic oligonucleotide
  Target: LAMA2; (+) strand; PAM type: NRG; PAM sequence: GAG
tcctacaaacaagtagcaaa

SEQ ID NO: 120622 - DNA, 20 bp, Artificial Sequence
  Description of Artificial Sequence: Synthetic oligonucleotide
  Target: LAMA2; (+) strand; PAM type: NRG; PAM sequence: AAG
acaaacaagtagcaaagagt

SEQ ID NO: 120623 - DNA, 20 bp, Artificial Sequence
  Description of Artificial Sequence: Synthetic oligonucleotide
  Target: LAMA2; (+) strand; PAM type: NRG; PAM sequence: CAG
agtagcaaagagtaagtatt

SEQ ID NO: 120624 - DNA, 20 bp, Artificial Sequence
  Description of Artificial Sequence: Synthetic oligonucleotide
  Target: LAMA2; (+) strand; PAM type: NRG; PAM sequence: TAG
ttataaaactatcataaaaa

SEQ ID NO: 120625 - DNA, 20 bp, Artificial Sequence
  Description of Artificial Sequence: Synthetic oligonucleotide
  Target: LAMA2; (+) strand; PAM type: NRG; PAM sequence: AAG
aactatcataaaaatagcct

SEQ ID NO: 120626 - DNA, 20 bp, Artificial Sequence
  Description of Artificial Sequence: Synthetic oligonucleotide
  Target: LAMA2; (+) strand; PAM type: NRG; PAM sequence: AGG
actatcataaaaatagccta

SEQ ID NO: 120627 - DNA, 20 bp, Artificial Sequence
  Description of Artificial Sequence: Synthetic oligonucleotide
  Target: LAMA2; (+) strand; PAM type: NRG; PAM sequence: GGG
ctatcataaaaatagcctaa

SEQ ID NO: 120628 - DNA, 20 bp, Artificial Sequence
  Description of Artificial Sequence: Synthetic oligonucleotide
  Target: LAMA2; (+) strand; PAM type: NRG; PAM sequence: AAG
gctctgaaacattctatgtc

SEQ ID NO: 120629 - DNA, 20 bp, Artificial Sequence
  Description of Artificial Sequence: Synthetic oligonucleotide
  Target: LAMA2; (+) strand; PAM type: NRG; PAM sequence: TGG
ataattgaaactttgattta

SEQ ID NO: 120630 - DNA, 20 bp, Artificial Sequence
  Description of Artificial Sequence: Synthetic oligonucleotide
  Target: LAMA2; (+) strand; PAM type: NRG; PAM sequence: TGG
gattgtattaaaattaaaat

SEQ ID NO: 120631 - DNA, 20 bp, Artificial Sequence
  Description of Artificial Sequence: Synthetic oligonucleotide
  Target: LAMA2; (+) strand; PAM type: NRG; PAM sequence: GGG
attgtattaaaattaaaatt

SEQ ID NO: 120632 - DNA, 20 bp, Artificial Sequence
  Description of Artificial Sequence: Synthetic oligonucleotide
  Target: LAMA2; (+) strand; PAM type: NRG; PAM sequence: CAG
tactaattaatttaaaatac

SEQ ID NO: 120633 - DNA, 20 bp, Artificial Sequence
  Description of Artificial Sequence: Synthetic oligonucleotide
  Target: LAMA2; (+) strand; PAM type: NRG; PAM sequence: AAG
aacaattacatgttgacaaa

SEQ ID NO: 120634 - DNA, 20 bp, Artificial Sequence
  Description of Artificial Sequence: Synthetic oligonucleotide
  Target: LAMA2; (+) strand; PAM type: NRG; PAM sequence: TGG
aaataaaactcttcaatgtc

SEQ ID NO: 120635 - DNA, 20 bp, Artificial Sequence
  Description of Artificial Sequence: Synthetic oligonucleotide
  Target: LAMA2; (+) strand; PAM type: NRG; PAM sequence: TAG
ctcttcaatgtctggcttaa

SEQ ID NO: 120636 - DNA, 20 bp, Artificial Sequence
  Description of Artificial Sequence: Synthetic oligonucleotide
  Target: LAMA2; (+) strand; PAM type: NRG; PAM sequence: AAG
ttcaatgtctggcttaatag

SEQ ID NO: 120637 - DNA, 20 bp, Artificial Sequence
  Description of Artificial Sequence: Synthetic oligonucleotide
  Target: LAMA2; (+) strand; PAM type: NRG; PAM sequence: GAG
caatgtctggcttaatagaa

SEQ ID NO: 120638 - DNA, 20 bp, Artificial Sequence
  Description of Artificial Sequence: Synthetic oligonucleotide
  Target: LAMA2; (+) strand; PAM type: NRG; PAM sequence: TGG
ctggcttaatagaagagaac

SEQ ID NO: 120639 - DNA, 20 bp, Artificial Sequence
  Description of Artificial Sequence: Synthetic oligonucleotide
  Target: LAMA2; (+) strand; PAM type: NRG; PAM sequence: TAG
caaattattacatgttattt

SEQ ID NO: 120640 - DNA, 20 bp, Artificial Sequence
  Description of Artificial Sequence: Synthetic oligonucleotide
  Target: LAMA2; (+) strand; PAM type: NRG; PAM sequence: TGG
tattttagtttaaattattt

SEQ ID NO: 120641 - DNA, 20 bp, Artificial Sequence
  Description of Artificial Sequence: Synthetic oligonucleotide
  Target: LAMA2; (+) strand; PAM type: NRG; PAM sequence: AAG
agtttaaattattttggttt

SEQ ID NO: 120642 - DNA, 20 bp, Artificial Sequence
  Description of Artificial Sequence: Synthetic oligonucleotide
  Target: LAMA2; (+) strand; PAM type: NRG; PAM sequence: AAG
tattttggtttaagcatatt

SEQ ID NO: 120643 - DNA, 20 bp, Artificial Sequence
  Description of Artificial Sequence: Synthetic oligonucleotide
  Target: LAMA2; (+) strand; PAM type: NRG; PAM sequence: TAG
gaaatatataacaacaaaca

SEQ ID NO: 120644 - DNA, 20 bp, Artificial Sequence
  Description of Artificial Sequence: Synthetic oligonucleotide
  Target: LAMA2; (+) strand; PAM type: NRG; PAM sequence: AAG
atataacaacaaacatagat

SEQ ID NO: 120645 - DNA, 20 bp, Artificial Sequence
  Description of Artificial Sequence: Synthetic oligonucleotide
  Target: LAMA2; (+) strand; PAM type: NRG; PAM sequence: TGG
aacaaacatagataagctat

SEQ ID NO: 120646 - DNA, 20 bp, Artificial Sequence
  Description of Artificial Sequence: Synthetic oligonucleotide
  Target: LAMA2; (+) strand; PAM type: NRG; PAM sequence: AAG
atagataagctattggaaaa

SEQ ID NO: 120647 - DNA, 20 bp, Artificial Sequence
  Description of Artificial Sequence: Synthetic oligonucleotide
  Target: LAMA2; (+) strand; PAM type: NRG; PAM sequence: GAG
agataagctattggaaaaaa

SEQ ID NO: 120648 - DNA, 20 bp, Artificial Sequence
  Description of Artificial Sequence: Synthetic oligonucleotide
  Target: LAMA2; (+) strand; PAM type: NRG; PAM sequence: AGG
gataagctattggaaaaaag

SEQ ID NO: 120649 - DNA, 20 bp, Artificial Sequence
  Description of Artificial Sequence: Synthetic oligonucleotide
  Target: LAMA2; (+) strand; PAM type: NRG; PAM sequence: GAG
taagctattggaaaaaagag

SEQ ID NO: 120650 - DNA, 20 bp, Artificial Sequence
  Description of Artificial Sequence: Synthetic oligonucleotide
  Target: LAMA2; (+) strand; PAM type: NRG; PAM sequence: CAG
tggaaaaaagaggagtctgt

SEQ ID NO: 120651 - DNA, 20 bp, Artificial Sequence
  Description of Artificial Sequence: Synthetic oligonucleotide
  Target: LAMA2; (+) strand; PAM type: NRG; PAM sequence: AAG
ggagtctgtcagtgcctttt

SEQ ID NO: 120652 - DNA, 20 bp, Artificial Sequence
  Description of Artificial Sequence: Synthetic oligonucleotide
  Target: LAMA2; (+) strand; PAM type: NRG; PAM sequence: TAG
tctgtcagtgccttttaaga

SEQ ID NO: 120653 - DNA, 20 bp, Artificial Sequence
  Description of Artificial Sequence: Synthetic oligonucleotide
  Target: LAMA2; (+) strand; PAM type: NRG; PAM sequence: CAG
tttgattctataccaaaact

SEQ ID NO: 120654 - DNA, 20 bp, Artificial Sequence
  Description of Artificial Sequence: Synthetic oligonucleotide
  Target: LAMA2; (+) strand; PAM type: NRG; PAM sequence: AAG
attctataccaaaactcagt

SEQ ID NO: 120655 - DNA, 20 bp, Artificial Sequence
  Description of Artificial Sequence: Synthetic oligonucleotide
  Target: LAMA2; (+) strand; PAM type: NRG; PAM sequence: TGG
ctataccaaaactcagtaag

SEQ ID NO: 120656 - DNA, 20 bp, Artificial Sequence
  Description of Artificial Sequence: Synthetic oligonucleotide
  Target: LAMA2; (+) strand; PAM type: NRG; PAM sequence: TAG
taccaaaactcagtaagtgg

SEQ ID NO: 120657 - DNA, 20 bp, Artificial Sequence
  Description of Artificial Sequence: Synthetic oligonucleotide
  Target: LAMA2; (+) strand; PAM type: NRG; PAM sequence: AAG
cagtaagtggtagttttcaa

SEQ ID NO: 120658 - DNA, 20 bp, Artificial Sequence
  Description of Artificial Sequence: Synthetic oligonucleotide
  Target: LAMA2; (+) strand; PAM type: NRG; PAM sequence: TGG
agtggtagttttcaaaagat

SEQ ID NO: 120659 - DNA, 20 bp, Artificial Sequence
  Description of Artificial Sequence: Synthetic oligonucleotide
  Target: LAMA2; (+) strand; PAM type: NRG; PAM sequence: CAG
agttttcaaaagattggctg

SEQ ID NO: 120660 - DNA, 20 bp, Artificial Sequence
  Description of Artificial Sequence: Synthetic oligonucleotide
  Target: LAMA2; (+) strand; PAM type: NRG; PAM sequence: TGG
tcaaaagattggctgcagtg

SEQ ID NO: 120661 - DNA, 20 bp, Artificial Sequence
  Description of Artificial Sequence: Synthetic oligonucleotide
  Target: LAMA2; (+) strand; PAM type: NRG; PAM sequence: CGG
cgcttttatattaaaatcta

SEQ ID NO: 120662 - DNA, 20 bp, Artificial Sequence
  Description of Artificial Sequence: Synthetic oligonucleotide
  Target: LAMA2; (+) strand; PAM type: NRG; PAM sequence: TGG
ctacggatctatcttacacc

SEQ ID NO: 120663 - DNA, 20 bp, Artificial Sequence
  Description of Artificial Sequence: Synthetic oligonucleotide
  Target: LAMA2; (+) strand; PAM type: NRG; PAM sequence: AAG
ggatctatcttacacctgga

SEQ ID NO: 120664 - DNA, 20 bp, Artificial Sequence
  Description of Artificial Sequence: Synthetic oligonucleotide
  Target: LAMA2; (+) strand; PAM type: NRG; PAM sequence: TAG
tttacccatgtgtgatgtta

SEQ ID NO: 120665 - DNA, 20 bp, Artificial Sequence
  Description of Artificial Sequence: Synthetic oligonucleotide
  Target: LAMA2; (+) strand; PAM type: NRG; PAM sequence: TAG
tgatgttatagtatcattca

SEQ ID NO: 120666 - DNA, 20 bp, Artificial Sequence
  Description of Artificial Sequence: Synthetic oligonucleotide
  Target: LAMA2; (+) strand; PAM type: NRG; PAM sequence: TGG
agtatcattcatagatcatt

SEQ ID NO: 120667 - DNA, 20 bp, Artificial Sequence
  Description of Artificial Sequence: Synthetic oligonucleotide
  Target: LAMA2; (+) strand; PAM type: NRG; PAM sequence: AAG
atcattcatagatcatttgg

SEQ ID NO: 120668 - DNA, 20 bp, Artificial Sequence
  Description of Artificial Sequence: Synthetic oligonucleotide
  Target: LAMA2; (+) strand; PAM type: NRG; PAM sequence: TAG
tttggaagatactgatttac

SEQ ID NO: 120669 - DNA, 20 bp, Artificial Sequence
  Description of Artificial Sequence: Synthetic oligonucleotide
  Target: LAMA2; (+) strand; PAM type: NRG; PAM sequence: CAG
atactgatttactagttatg

SEQ ID NO: 120670 - DNA, 20 bp, Artificial Sequence
  Description of Artificial Sequence: Synthetic oligonucleotide
  Target: LAMA2; (+) strand; PAM type: NRG; PAM sequence: CAG
gatttactagttatgcagat

SEQ ID NO: 120671 - DNA, 20 bp, Artificial Sequence
  Description of Artificial Sequence: Synthetic oligonucleotide
  Target: LAMA2; (+) strand; PAM type: NRG; PAM sequence: CAG
gcagatcagccacaacttga

SEQ ID NO: 120672 - DNA, 20 bp, Artificial Sequence
  Description of Artificial Sequence: Synthetic oligonucleotide
  Target: LAMA2; (+) strand; PAM type: NRG; PAM sequence: CAG
tttatgactattgatctcac

SEQ ID NO: 120673 - DNA, 20 bp, Artificial Sequence
  Description of Artificial Sequence: Synthetic oligonucleotide
  Target: LAMA2; (+) strand; PAM type: NRG; PAM sequence: AAG
gactattgatctcaccagaa

SEQ ID NO: 120674 - DNA, 20 bp, Artificial Sequence
  Description of Artificial Sequence: Synthetic oligonucleotide
  Target: LAMA2; (+) strand; PAM type: NRG; PAM sequence: TAG
ccagaaaagtccctaaatat

SEQ ID NO: 120675 - DNA, 20 bp, Artificial Sequence
  Description of Artificial Sequence: Synthetic oligonucleotide
  Target: LAMA2; (+) strand; PAM type: NRG; PAM sequence: AAG
gaaaagtccctaaatattag

SEQ ID NO: 120676 - DNA, 20 bp, Artificial Sequence
  Description of Artificial Sequence: Synthetic oligonucleotide
  Target: LAMA2; (+) strand; PAM type: NRG; PAM sequence: TGG
agaagctgttaatctcacaa

SEQ ID NO: 120677 - DNA, 20 bp, Artificial Sequence
  Description of Artificial Sequence: Synthetic oligonucleotide
  Target: LAMA2; (+) strand; PAM type: NRG; PAM sequence: TAG
agctgttaatctcacaatgg

SEQ ID NO: 120678 - DNA, 20 bp, Artificial Sequence
  Description of Artificial Sequence: Synthetic oligonucleotide
  Target: LAMA2; (+) strand; PAM type: NRG; PAM sequence: GAG
ctgttaatctcacaatggta

SEQ ID NO: 120679 - DNA, 20 bp, Artificial Sequence
  Description of Artificial Sequence: Synthetic oligonucleotide
  Target: LAMA2; (+) strand; PAM type: NRG; PAM sequence: CAG
aatggtagagacaaattttt

SEQ ID NO: 120680 - DNA, 20 bp, Artificial Sequence
  Description of Artificial Sequence: Synthetic oligonucleotide
  Target: LAMA2; (+) strand; PAM type: NRG; PAM sequence: AAG
gaatttttattttcatttgt

SEQ ID NO: 120681 - DNA, 20 bp, Artificial Sequence
  Description of Artificial Sequence: Synthetic oligonucleotide
  Target: LAMA2; (+) strand; PAM type: NRG; PAM sequence: TAG
ttttcatttgtaagtttctg

SEQ ID NO: 120682 - DNA, 20 bp, Artificial Sequence
  Description of Artificial Sequence: Synthetic oligonucleotide
  Target: LAMA2; (+) strand; PAM type: NRG; PAM sequence: TAG
ttttgttatttttcttgaaa

SEQ ID NO: 120683 - DNA, 20 bp, Artificial Sequence
  Description of Artificial Sequence: Synthetic oligonucleotide
  Target: LAMA2; (+) strand; PAM type: NRG; PAM sequence: AAG
tagttactttattcattctt

SEQ ID NO: 120684 - DNA, 20 bp, Artificial Sequence
  Description of Artificial Sequence: Synthetic oligonucleotide
  Target: LAMA2; (+) strand; PAM type: NRG; PAM sequence: GAG
aaaatgtttatcaaacaaat

SEQ ID NO: 120685 - DNA, 20 bp, Artificial Sequence
  Description of Artificial Sequence: Synthetic oligonucleotide
  Target: LAMA2; (+) strand; PAM type: NRG; PAM sequence: TAG
caaatgagtcttaaaaacca

SEQ ID NO: 120686 - DNA, 20 bp, Artificial Sequence
  Description of Artificial Sequence: Synthetic oligonucleotide
  Target: LAMA2; (+) strand; PAM type: NRG; PAM sequence: TAG
tgagtcttaaaaaccatagt

SEQ ID NO: 120687 - DNA, 20 bp, Artificial Sequence
  Description of Artificial Sequence: Synthetic oligonucleotide
  Target: LAMA2; (+) strand; PAM type: NRG; PAM sequence: TAG
ccatagttagatcctttttg

SEQ ID NO: 120688 - DNA, 20 bp, Artificial Sequence
  Description of Artificial Sequence: Synthetic oligonucleotide
  Target: LAMA2; (+) strand; PAM type: NRG; PAM sequence: TAG
tagatcctttttgtagtaca

SEQ ID NO: 120689 - DNA, 20 bp, Artificial Sequence
  Description of Artificial Sequence: Synthetic oligonucleotide
  Target: LAMA2; (+) strand; PAM type: NRG; PAM sequence: AGG
agatcctttttgtagtacat

SEQ ID NO: 120690 - DNA, 20 bp, Artificial Sequence
  Description of Artificial Sequence: Synthetic oligonucleotide
  Target: LAMA2; (+) strand; PAM type: NRG; PAM sequence: GGG
gatcctttttgtagtacata

SEQ ID NO: 120691 - DNA, 20 bp, Artificial Sequence
  Description of Artificial Sequence: Synthetic oligonucleotide
  Target: LAMA2; (+) strand; PAM type: NRG; PAM sequence: AAG
catagggtattccacgaaaa

SEQ ID NO: 120692 - DNA, 20 bp, Artificial Sequence
  Description of Artificial Sequence: Synthetic oligonucleotide
  Target: LAMA2; (+) strand; PAM type: NRG; PAM sequence: TGG
agggtattccacgaaaaaag

SEQ ID NO: 120693 - DNA, 20 bp, Artificial Sequence
  Description of Artificial Sequence: Synthetic oligonucleotide
  Target: LAMA2; (+) strand; PAM type: NRG; PAM sequence: TAG
tattccacgaaaaaagtggc

SEQ ID NO: 120694 - DNA, 20 bp, Artificial Sequence
  Description of Artificial Sequence: Synthetic oligonucleotide
  Target: LAMA2; (+) strand; PAM type: NRG; PAM sequence: TAG
cacgaaaaaagtggctagtt

SEQ ID NO: 120695 - DNA, 20 bp, Artificial Sequence
  Description of Artificial Sequence: Synthetic oligonucleotide
  Target: LAMA2; (+) strand; PAM type: NRG; PAM sequence: CAG
aaagtggctagtttagcttg

SEQ ID NO: 120696 - DNA, 20 bp, Artificial Sequence
  Description of Artificial Sequence: Synthetic oligonucleotide
  Target: LAMA2; (+) strand; PAM type: NRG; PAM sequence: CAG
tcaaatcaaccatcatgctt

SEQ ID NO: 120697 - DNA, 20 bp, Artificial Sequence
  Description of Artificial Sequence: Synthetic oligonucleotide
  Target: LAMA2; (+) strand; PAM type: NRG; PAM sequence: CAG
aaccatcatgcttcagtata

SEQ ID NO: 120698 - DNA, 20 bp, Artificial Sequence
  Description of Artificial Sequence: Synthetic oligonucleotide
  Target: LAMA2; (+) strand; PAM type: NRG; PAM sequence: AAG
agtatacagttgatgttaaa

SEQ ID NO: 120699 - DNA, 20 bp, Artificial Sequence
  Description of Artificial Sequence: Synthetic oligonucleotide
  Target: LAMA2; (+) strand; PAM type: NRG; PAM sequence: AAG
gatgttaaaaagatgtaccc

SEQ ID NO: 120700 - DNA, 20 bp, Artificial Sequence
  Description of Artificial Sequence: Synthetic oligonucleotide
  Target: LAMA2; (+) strand; PAM type: NRG; PAM sequence: AAG
atcattgttactacttcatc

SEQ ID NO: 120701 - DNA, 20 bp, Artificial Sequence
  Description of Artificial Sequence: Synthetic oligonucleotide
  Target: LAMA2; (+) strand; PAM type: NRG; PAM sequence: TAG
agtacattcatctgtgaaac

SEQ ID NO: 120702 - DNA, 20 bp, Artificial Sequence
  Description of Artificial Sequence: Synthetic oligonucleotide
  Target: LAMA2; (+) strand; PAM type: NRG; PAM sequence: TGG
aactagttgtttttttcttc

SEQ ID NO: 120703 - DNA, 20 bp, Artificial Sequence
  Description of Artificial Sequence: Synthetic oligonucleotide
  Target: LAMA2; (+) strand; PAM type: NRG; PAM sequence: GGG
actagttgtttttttcttct

SEQ ID NO: 120704 - DNA, 20 bp, Artificial Sequence
  Description of Artificial Sequence: Synthetic oligonucleotide
  Target: LAMA2; (+) strand; PAM type: NRG; PAM sequence: GAG
tagttgtttttttcttctgg

SEQ ID NO: 120705 - DNA, 20 bp, Artificial Sequence
  Description of Artificial Sequence: Synthetic oligonucleotide
  Target: LAMA2; (+) strand; PAM type: NRG; PAM sequence: TGG
ttttttcttctgggagtgtg

SEQ ID NO: 120706 - DNA, 20 bp, Artificial Sequence
  Description of Artificial Sequence: Synthetic oligonucleotide
  Target: LAMA2; (+) strand; PAM type: NRG; PAM sequence: TGG
tttcttctgggagtgtgtgg

SEQ ID NO: 120707 - DNA, 20 bp, Artificial Sequence
  Description of Artificial Sequence: Synthetic oligonucleotide
  Target: LAMA2; (+) strand; PAM type: NRG; PAM sequence: TAG
gtgaaaactaaactgaccac

SEQ ID NO: 120708 - DNA, 20 bp, Artificial Sequence
  Description of Artificial Sequence: Synthetic oligonucleotide
  Target: LAMA2; (+) strand; PAM type: NRG; PAM sequence: TGG
aactaaactgaccactagca

SEQ ID NO: 120709 - DNA, 20 bp, Artificial Sequence
  Description of Artificial Sequence: Synthetic oligonucleotide
  Target: LAMA2; (+) strand; PAM type: NRG; PAM sequence: TAG
aactgaccactagcatggtt

SEQ ID NO: 120710 - DNA, 20 bp, Artificial Sequence
  Description of Artificial Sequence: Synthetic oligonucleotide
  Target: LAMA2; (+) strand; PAM type: NRG; PAM sequence: CAG
gatttgtgctaatgtaccat

SEQ ID NO: 120711 - DNA, 20 bp, Artificial Sequence
  Description of Artificial Sequence: Synthetic oligonucleotide
  Target: LAMA2; (+) strand; PAM type: NRG; PAM sequence: CAG
cactattgcttttgcaccat

SEQ ID NO: 120712 - DNA, 20 bp, Artificial Sequence
  Description of Artificial Sequence: Synthetic oligonucleotide
  Target: LAMA2; (+) strand; PAM type: NRG; PAM sequence: AAG
gcacatgtcaacacaatgaa

SEQ ID NO: 120713 - DNA, 20 bp, Artificial Sequence
  Description of Artificial Sequence: Synthetic oligonucleotide
  Target: LAMA2; (+) strand; PAM type: NRG; PAM sequence: AGG
cacatgtcaacacaatgaaa

SEQ ID NO: 120714 - DNA, 20 bp, Artificial Sequence
  Description of Artificial Sequence: Synthetic oligonucleotide
  Target: LAMA2; (+) strand; PAM type: NRG; PAM sequence: CAG
atgtcaacacaatgaaaagg

SEQ ID NO: 120715 - DNA, 20 bp, Artificial Sequence
  Description of Artificial Sequence: Synthetic oligonucleotide
  Target: LAMA2; (+) strand; PAM type: NRG; PAM sequence: AAG
taattaaatcttgttactaa

SEQ ID NO: 120716 - DNA, 20 bp, Artificial Sequence
  Description of Artificial Sequence: Synthetic oligonucleotide
  Target: LAMA2; (+) strand; PAM type: NRG; PAM sequence: AGG
aattaaatcttgttactaaa

SEQ ID NO: 120717 - DNA, 20 bp, Artificial Sequence
  Description of Artificial Sequence: Synthetic oligonucleotide
  Target: LAMA2; (+) strand; PAM type: NRG; PAM sequence: TGG
tttttgaacttgtgtaccta

SEQ ID NO: 120718 - DNA, 20 bp, Artificial Sequence
  Description of Artificial Sequence: Synthetic oligonucleotide
  Target: LAMA2; (+) strand; PAM type: NRG; PAM sequence: TGG
tacctatggataatgtattg

SEQ ID NO: 120719 - DNA, 20 bp, Artificial Sequence
  Description of Artificial Sequence: Synthetic oligonucleotide
  Target: LAMA2; (+) strand; PAM type: NRG; PAM sequence: CAG
gataatgtattgtggactcc

SEQ ID NO: 120720 - DNA, 20 bp, Artificial Sequence
  Description of Artificial Sequence: Synthetic oligonucleotide
  Target: LAMA2; (+) strand; PAM type: NRG; PAM sequence: AGG
ataatgtattgtggactccc

SEQ ID NO: 120721 - DNA, 20 bp, Artificial Sequence
  Description of Artificial Sequence: Synthetic oligonucleotide
  Target: LAMA2; (+) strand; PAM type: NRG; PAM sequence: GGG
taatgtattgtggactccca

SEQ ID NO: 120722 - DNA, 20 bp, Artificial Sequence
  Description of Artificial Sequence: Synthetic oligonucleotide
  Target: LAMA2; (+) strand; PAM type: NRG; PAM sequence: CAG
tgtggactcccagggattca

SEQ ID NO: 120723 - DNA, 20 bp, Artificial Sequence
  Description of Artificial Sequence: Synthetic oligonucleotide
  Target: LAMA2; (+) strand; PAM type: NRG; PAM sequence: GAG
ggattcacagatctttcttt

SEQ ID NO: 120724 - DNA, 20 bp, Artificial Sequence
  Description of Artificial Sequence: Synthetic oligonucleotide
  Target: LAMA2; (+) strand; PAM type: NRG; PAM sequence: CAG
agatctttctttgagctcta

SEQ ID NO: 120725 - DNA, 20 bp, Artificial Sequence
  Description of Artificial Sequence: Synthetic oligonucleotide
  Target: LAMA2; (+) strand; PAM type: NRG; PAM sequence: AGG
gatctttctttgagctctac

SEQ ID NO: 120726 - DNA, 20 bp, Artificial Sequence
  Description of Artificial Sequence: Synthetic oligonucleotide
  Target: LAMA2; (+) strand; PAM type: NRG; PAM sequence: GGG
atctttctttgagctctaca

SEQ ID NO: 120727 - DNA, 20 bp, Artificial Sequence
  Description of Artificial Sequence: Synthetic oligonucleotide
  Target: LAMA2; (+) strand; PAM type: NRG; PAM sequence: TGG
ttctttgagctctacagggt

SEQ ID NO: 120728 - DNA, 20 bp, Artificial Sequence
  Description of Artificial Sequence: Synthetic oligonucleotide
  Target: LAMA2; (+) strand; PAM type: NRG; PAM sequence: CAG
agctctacagggttggacta

SEQ ID NO: 120729 - DNA, 20 bp, Artificial Sequence
  Description of Artificial Sequence: Synthetic oligonucleotide
  Target: LAMA2; (+) strand; PAM type: NRG; PAM sequence: AAG
tacagggttggactacagtt

SEQ ID NO: 120730 - DNA, 20 bp, Artificial Sequence
  Description of Artificial Sequence: Synthetic oligonucleotide
  Target: LAMA2; (+) strand; PAM type: NRG; PAM sequence: TAG
caccaattctacaaaatcta

SEQ ID NO: 120731 - DNA, 20 bp, Artificial Sequence
  Description of Artificial Sequence: Synthetic oligonucleotide
  Target: LAMA2; (+) strand; PAM type: NRG; PAM sequence: AAG
acaaaatctatagccatatg

SEQ ID NO: 120732 - DNA, 20 bp, Artificial Sequence
  Description of Artificial Sequence: Synthetic oligonucleotide
  Target: LAMA2; (+) strand; PAM type: NRG; PAM sequence: AGG
caaaatctatagccatatga

SEQ ID NO: 120733 - DNA, 20 bp, Artificial Sequence
  Description of Artificial Sequence: Synthetic oligonucleotide
  Target: LAMA2; (+) strand; PAM type: NRG; PAM sequence: CAG
atgaaggtaaattttgcaat

SEQ ID NO: 120734 - DNA, 20 bp, Artificial Sequence
  Description of Artificial Sequence: Synthetic oligonucleotide
  Target: LAMA2; (+) strand; PAM type: NRG; PAM sequence: AAG
gtaaattttgcaatcagaaa

SEQ ID NO: 120735 - DNA, 20 bp, Artificial Sequence
  Description of Artificial Sequence: Synthetic oligonucleotide
  Target: LAMA2; (+) strand; PAM type: NRG; PAM sequence: CAG
agaaaaagccaaaaccactt

SEQ ID NO: 120736 - DNA, 20 bp, Artificial Sequence
  Description of Artificial Sequence: Synthetic oligonucleotide
  Target: LAMA2; (+) strand; PAM type: NRG; PAM sequence: CAG
aaccacttcagtttttacct

SEQ ID NO: 120737 - DNA, 20 bp, Artificial Sequence
  Description of Artificial Sequence: Synthetic oligonucleotide
  Target: LAMA2; (+) strand; PAM type: NRG; PAM sequence: AGG
accacttcagtttttacctc

SEQ ID NO: 120738 - DNA, 20 bp, Artificial Sequence
  Description of Artificial Sequence: Synthetic oligonucleotide
  Target: LAMA2; (+) strand; PAM type: NRG; PAM sequence: TAG
ttcagtttttacctcaggtc

SEQ ID NO: 120739 - DNA, 20 bp, Artificial Sequence
  Description of Artificial Sequence: Synthetic oligonucleotide
  Target: LAMA2; (+) strand; PAM type: NRG; PAM sequence: TAG
tttttacctcaggtctagtc

SEQ ID NO: 120740 - DNA, 20 bp, Artificial Sequence
  Description of Artificial Sequence: Synthetic oligonucleotide
  Target: LAMA2; (+) strand; PAM type: NRG; PAM sequence: AGG
ttttacctcaggtctagtct

SEQ ID NO: 120741 - DNA, 20 bp, Artificial Sequence
  Description of Artificial Sequence: Synthetic oligonucleotide
  Target: LAMA2; (+) strand; PAM type: NRG; PAM sequence: GAG
ttacctcaggtctagtctag

SEQ ID NO: 120742 - DNA, 20 bp, Artificial Sequence
  Description of Artificial Sequence: Synthetic oligonucleotide
  Target: LAMA2; (+) strand; PAM type: NRG; PAM sequence: GAG
acctcaggtctagtctagga

SEQ ID NO: 120743 - DNA, 20 bp, Artificial Sequence
  Description of Artificial Sequence: Synthetic oligonucleotide
  Target: LAMA2; (+) strand; PAM type: NRG; PAM sequence: AAG
gagtgataccatttcttttt

SEQ ID NO: 120744 - DNA, 20 bp, Artificial Sequence
  Description of Artificial Sequence: Synthetic oligonucleotide
  Target: LAMA2; (+) strand; PAM type: NRG; PAM sequence: AGG
agtgataccatttcttttta

SEQ ID NO: 120745 - DNA, 20 bp, Artificial Sequence
  Description of Artificial Sequence: Synthetic oligonucleotide
  Target: LAMA2; (+) strand; PAM type: NRG; PAM sequence: GGG
gtgataccatttctttttaa

SEQ ID NO: 120746 - DNA, 20 bp, Artificial Sequence
  Description of Artificial Sequence: Synthetic oligonucleotide
  Target: LAMA2; (+) strand; PAM type: NRG; PAM sequence: GGG
tgataccatttctttttaag

SEQ ID NO: 120747 - DNA, 20 bp, Artificial Sequence
  Description of Artificial Sequence: Synthetic oligonucleotide
  Target: LAMA2; (+) strand; PAM type: NRG; PAM sequence: GGG
gataccatttctttttaagg

SEQ ID NO: 120748 - DNA, 20 bp, Artificial Sequence
  Description of Artificial Sequence: Synthetic oligonucleotide
  Target: LAMA2; (+) strand; PAM type: NRG; PAM sequence: AAG
accatttctttttaaggggg

SEQ ID NO: 120749 - DNA, 20 bp, Artificial Sequence
  Description of Artificial Sequence: Synthetic oligonucleotide
  Target: LAMA2; (+) strand; PAM type: NRG; PAM sequence: CAG
tttttaagggggaagaaatc

SEQ ID NO: 120750 - DNA, 20 bp, Artificial Sequence
  Description of Artificial Sequence: Synthetic oligonucleotide
  Target: LAMA2; (+) strand; PAM type: NRG; PAM sequence: AAG
aagggggaagaaatccagaa

SEQ ID NO: 120751 - DNA, 20 bp, Artificial Sequence
  Description of Artificial Sequence: Synthetic oligonucleotide
  Target: LAMA2; (+) strand; PAM type: NRG; PAM sequence: TGG
atccagaaaagcttcttctg

SEQ ID NO: 120752 - DNA, 20 bp, Artificial Sequence
  Description of Artificial Sequence: Synthetic oligonucleotide
  Target: LAMA2; (+) strand; PAM type: NRG; PAM sequence: AAG
aaaagcttcttctgtggaaa

SEQ ID NO: 120753 - DNA, 20 bp, Artificial Sequence
  Description of Artificial Sequence: Synthetic oligonucleotide
  Target: LAMA2; (+) strand; PAM type: NRG; PAM sequence: CAG
agcttcttctgtggaaaaag

SEQ ID NO: 120754 - DNA, 20 bp, Artificial Sequence
  Description of Artificial Sequence: Synthetic oligonucleotide
  Target: LAMA2; (+) strand; PAM type: NRG; PAM sequence: AGG
gcttcttctgtggaaaaagc

SEQ ID NO: 120755 - DNA, 20 bp, Artificial Sequence
  Description of Artificial Sequence: Synthetic oligonucleotide
  Target: LAMA2; (+) strand; PAM type: NRG; PAM sequence: AAG
tcttctgtggaaaaagcagg

SEQ ID NO: 120756 - DNA, 20 bp, Artificial Sequence
  Description of Artificial Sequence: Synthetic oligonucleotide
  Target: LAMA2; (+) strand; PAM type: NRG; PAM sequence: CAG
aaagcaggaagtgttaaaac

SEQ ID NO: 120757 - DNA, 20 bp, Artificial Sequence
  Description of Artificial Sequence: Synthetic oligonucleotide
  Target: LAMA2; (+) strand; PAM type: NRG; PAM sequence: CAG
caggaagtgttaaaaccagc

SEQ ID NO: 120758 - DNA, 20 bp, Artificial Sequence
  Description of Artificial Sequence: Synthetic oligonucleotide
  Target: LAMA2; (+) strand; PAM type: NRG; PAM sequence: TAG
aaaccagccagacatacata

SEQ ID NO: 120759 - DNA, 20 bp, Artificial Sequence
  Description of Artificial Sequence: Synthetic oligonucleotide
  Target: LAMA2; (+) strand; PAM type: NRG; PAM sequence: TAG
cctttcacttgcccaaacta

SEQ ID NO: 120760 - DNA, 20 bp, Artificial Sequence
  Description of Artificial Sequence: Synthetic oligonucleotide
  Target: LAMA2; (+) strand; PAM type: NRG; PAM sequence: TAG
ttcacttgcccaaactatag

SEQ ID NO: 120761 - DNA, 20 bp, Artificial Sequence
  Description of Artificial Sequence: Synthetic oligonucleotide
  Target: LAMA2; (+) strand; PAM type: NRG; PAM sequence: GAG
cacttgcccaaactatagta

SEQ ID NO: 120762 - DNA, 20 bp, Artificial Sequence
  Description of Artificial Sequence: Synthetic oligonucleotide
  Target: LAMA2; (+) strand; PAM type: NRG; PAM sequence: TAG
tgcccaaactatagtagaga

SEQ ID NO: 120763 - DNA, 20 bp, Artificial Sequence
  Description of Artificial Sequence: Synthetic oligonucleotide
  Target: LAMA2; (+) strand; PAM type: NRG; PAM sequence: CAG
agagatagtgtacttaccca

SEQ ID NO: 120764 - DNA, 20 bp, Artificial Sequence
  Description of Artificial Sequence: Synthetic oligonucleotide
  Target: LAMA2; (+) strand; PAM type: NRG; PAM sequence: TGG
atagtgtacttacccacagt

SEQ ID NO: 120765 - DNA, 20 bp, Artificial Sequence
  Description of Artificial Sequence: Synthetic oligonucleotide
  Target: LAMA2; (+) strand; PAM type: NRG; PAM sequence: TAG
acatatgatgttattcctaa

SEQ ID NO: 120766 - DNA, 20 bp, Artificial Sequence
  Description of Artificial Sequence: Synthetic oligonucleotide
  Target: LAMA2; (+) strand; PAM type: NRG; PAM sequence: AAG
ttattcctaatagacttaaa

SEQ ID NO: 120767 - DNA, 20 bp, Artificial Sequence
  Description of Artificial Sequence: Synthetic oligonucleotide
  Target: LAMA2; (+) strand; PAM type: NRG; PAM sequence: TGG
agacttaaaaagtgaactca

SEQ ID NO: 120768 - DNA, 20 bp, Artificial Sequence
  Description of Artificial Sequence: Synthetic oligonucleotide
  Target: LAMA2; (+) strand; PAM type: NRG; PAM sequence: CGG
cttaaaaagtgaactcatgg

SEQ ID NO: 120769 - DNA, 20 bp, Artificial Sequence
  Description of Artificial Sequence: Synthetic oligonucleotide
  Target: LAMA2; (+) strand; PAM type: NRG; PAM sequence: GGG
ttaaaaagtgaactcatggc

SEQ ID NO: 120770 - DNA, 20 bp, Artificial Sequence
  Description of Artificial Sequence: Synthetic oligonucleotide
  Target: LAMA2; (+) strand; PAM type: NRG; PAM sequence: GGG
taaaaagtgaactcatggcg

SEQ ID NO: 120771 - DNA, 20 bp, Artificial Sequence
  Description of Artificial Sequence: Synthetic oligonucleotide
  Target: LAMA2; (+) strand; PAM type: NRG; PAM sequence: CGG
agtgaactcatggcggggcg

SEQ ID NO: 120772 - DNA, 20 bp, Artificial Sequence
  Description of Artificial Sequence: Synthetic oligonucleotide
  Target: LAMA2; (+) strand; PAM type: NRG; PAM sequence: TGG
gaactcatggcggggcgcgg

SEQ ID NO: 120773 - DNA, 20 bp, Artificial Sequence
  Description of Artificial Sequence: Synthetic oligonucleotide
  Target: LAMA2; (+) strand; PAM type: NRG; PAM sequence: CAG
gtggctcacgcctgtaatcc

SEQ ID NO: 120774 - DNA, 20 bp, Artificial Sequence
  Description of Artificial Sequence: Synthetic oligonucleotide
  Target: LAMA2; (+) strand; PAM type: NRG; PAM sequence: TGG
cgcctgtaatcccagcactt

SEQ ID NO: 120775 - DNA, 20 bp, Artificial Sequence
  Description of Artificial Sequence: Synthetic oligonucleotide
  Target: LAMA2; (+) strand; PAM type: NRG; PAM sequence: GGG
gcctgtaatcccagcacttt

SEQ ID NO: 120776 - DNA, 20 bp, Artificial Sequence
  Description of Artificial Sequence: Synthetic oligonucleotide
  Target: LAMA2; (+) strand; PAM type: NRG; PAM sequence: GAG
ctgtaatcccagcactttgg

SEQ ID NO: 120777 - DNA, 20 bp, Artificial Sequence
  Description of Artificial Sequence: Synthetic oligonucleotide
  Target: LAMA2; (+) strand; PAM type: NRG; PAM sequence: AGG
tgtaatcccagcactttggg

SEQ ID NO: 120778 - DNA, 20 bp, Artificial Sequence
  Description of Artificial Sequence: Synthetic oligonucleotide
  Target: LAMA2; (+) strand; PAM type: NRG; PAM sequence: CGG
atcccagcactttgggaggc

SEQ ID NO: 120779 - DNA, 20 bp, Artificial Sequence
  Description of Artificial Sequence: Synthetic oligonucleotide
  Target: LAMA2; (+) strand; PAM type: NRG; PAM sequence: GGG
tcccagcactttgggaggcc

SEQ ID NO: 120780 - DNA, 20 bp, Artificial Sequence
  Description of Artificial Sequence: Synthetic oligonucleotide
  Target: LAMA2; (+) strand; PAM type: NRG; PAM sequence: GGG
cccagcactttgggaggccg

SEQ ID NO: 120781 - DNA, 20 bp, Artificial Sequence
  Description of Artificial Sequence: Synthetic oligonucleotide
  Target: LAMA2; (+) strand; PAM type: NRG; PAM sequence: CGG
agcactttgggaggccgggg

SEQ ID NO: 120782 - DNA, 20 bp, Artificial Sequence
  Description of Artificial Sequence: Synthetic oligonucleotide
  Target: LAMA2; (+) strand; PAM type: NRG; PAM sequence: GGG
gcactttgggaggccggggc

SEQ ID NO: 120783 - DNA, 20 bp, Artificial Sequence
  Description of Artificial Sequence: Synthetic oligonucleotide
  Target: LAMA2; (+) strand; PAM type: NRG; PAM sequence: TGG
ctttgggaggccggggcggg

SEQ ID NO: 120784 - DNA, 20 bp, Artificial Sequence
  Description of Artificial Sequence: Synthetic oligonucleotide
  Target: LAMA2; (+) strand; PAM type: NRG; PAM sequence: GAG
ggccggggcgggtggatcac

SEQ ID NO: 120785 - DNA, 20 bp, Artificial Sequence
  Description of Artificial Sequence: Synthetic oligonucleotide
  Target: LAMA2; (+) strand; PAM type: NRG; PAM sequence: AGG
gccggggcgggtggatcacg

SEQ ID NO: 120786 - DNA, 20 bp, Artificial Sequence
  Description of Artificial Sequence: Synthetic oligonucleotide
  Target: LAMA2; (+) strand; PAM type: NRG; PAM sequence: CAG
gggcgggtggatcacgaggt

SEQ ID NO: 120787 - DNA, 20 bp, Artificial Sequence
  Description of Artificial Sequence: Synthetic oligonucleotide
  Target: LAMA2; (+) strand; PAM type: NRG; PAM sequence: AGG
ggcgggtggatcacgaggtc

SEQ ID NO: 120788 - DNA, 20 bp, Artificial Sequence
  Description of Artificial Sequence: Synthetic oligonucleotide
  Target: LAMA2; (+) strand; PAM type: NRG; PAM sequence: GAG
cgggtggatcacgaggtcag

SEQ ID NO: 120789 - DNA, 20 bp, Artificial Sequence
  Description of Artificial Sequence: Synthetic oligonucleotide
  Target: LAMA2; (+) strand; PAM type: NRG; PAM sequence: GAG
gatcacgaggtcaggagatc

SEQ ID NO: 120790 - DNA, 20 bp, Artificial Sequence
  Description of Artificial Sequence: Synthetic oligonucleotide
  Target: LAMA2; (+) strand; PAM type: NRG; PAM sequence: TGG
tcaggagatcgagaccatcc

SEQ ID NO: 120791 - DNA, 20 bp, Artificial Sequence
  Description of Artificial Sequence: Synthetic oligonucleotide
  Target: LAMA2; (+) strand; PAM type: NRG; PAM sequence: TGG
cgagaccatcctggctaaca

SEQ ID NO: 120792 - DNA, 20 bp, Artificial Sequence
  Description of Artificial Sequence: Synthetic oligonucleotide
  Target: LAMA2; (+) strand; PAM type: NRG; PAM sequence: AAG
aaaaaaaaaaaaaaaaaaaa

SEQ ID NO: 120793 - DNA, 20 bp, Artificial Sequence
  Description of Artificial Sequence: Synthetic oligonucleotide
  Target: LAMA2; (+) strand; PAM type: NRG; PAM sequence: TAG
aaaaaaaaaaaagcaaaaat

SEQ ID NO: 120794 - DNA, 20 bp, Artificial Sequence
  Description of Artificial Sequence: Synthetic oligonucleotide
  Target: LAMA2; (+) strand; PAM type: NRG; PAM sequence: CGG
aaaaaaaagcaaaaattagc

SEQ ID NO: 120795 - DNA, 20 bp, Artificial Sequence
  Description of Artificial Sequence: Synthetic oligonucleotide
  Target: LAMA2; (+) strand; PAM type: NRG; PAM sequence: GGG
aaaaaaagcaaaaattagcc

SEQ ID NO: 120796 - DNA, 20 bp, Artificial Sequence
  Description of Artificial Sequence: Synthetic oligonucleotide
  Target: LAMA2; (+) strand; PAM type: NRG; PAM sequence: TGG
aagcaaaaattagccgggcg

SEQ ID NO: 120797 - DNA, 20 bp, Artificial Sequence
  Description of Artificial Sequence: Synthetic oligonucleotide
  Target: LAMA2; (+) strand; PAM type: NRG; PAM sequence: TGG
caaaaattagccgggcgtgg

SEQ ID NO: 120798 - DNA, 20 bp, Artificial Sequence
  Description of Artificial Sequence: Synthetic oligonucleotide
  Target: LAMA2; (+) strand; PAM type: NRG; PAM sequence: CGG
aaattagccgggcgtggtgg

SEQ ID NO: 120799 - DNA, 20 bp, Artificial Sequence
  Description of Artificial Sequence: Synthetic oligonucleotide
  Target: LAMA2; (+) strand; PAM type: NRG; PAM sequence: GGG
aattagccgggcgtggtggc

SEQ ID NO: 120800 - DNA, 20 bp, Artificial Sequence
  Description of Artificial Sequence: Synthetic oligonucleotide
  Target: LAMA2; (+) strand; PAM type: NRG; PAM sequence: TAG
ggcgtggtggcgggcgcttg

SEQ ID NO: 120801 - DNA, 20 bp, Artificial Sequence
  Description of Artificial Sequence: Synthetic oligonucleotide
  Target: LAMA2; (+) strand; PAM type: NRG; PAM sequence: CAG
gtggcgggcgcttgtagtgc

SEQ ID NO: 120802 - DNA, 20 bp, Artificial Sequence
  Description of Artificial Sequence: Synthetic oligonucleotide
  Target: LAMA2; (+) strand; PAM type: NRG; PAM sequence: AGG
tggcgggcgcttgtagtgcc

SEQ ID NO: 120803 - DNA, 20 bp, Artificial Sequence
  Description of Artificial Sequence: Synthetic oligonucleotide
  Target: LAMA2; (+) strand; PAM type: NRG; PAM sequence: TGG
gcttgtagtgccaggtactc

SEQ ID NO: 120804 - DNA, 20 bp, Artificial Sequence
  Description of Artificial Sequence: Synthetic oligonucleotide
  Target: LAMA2; (+) strand; PAM type: NRG; PAM sequence: GAG
ttgtagtgccaggtactctg

SEQ ID NO: 120805 - DNA, 20 bp, Artificial Sequence
  Description of Artificial Sequence: Synthetic oligonucleotide
  Target: LAMA2; (+) strand; PAM type: NRG; PAM sequence: AGG
tgtagtgccaggtactctgg

SEQ ID NO: 120806 - DNA, 20 bp, Artificial Sequence
  Description of Artificial Sequence: Synthetic oligonucleotide
  Target: LAMA2; (+) strand; PAM type: NRG; PAM sequence: GAG
tgccaggtactctggaggct

SEQ ID NO: 120807 - DNA, 20 bp, Artificial Sequence
  Description of Artificial Sequence: Synthetic oligonucleotide
  Target: LAMA2; (+) strand; PAM type: NRG; PAM sequence: AGG
gccaggtactctggaggctg

SEQ ID NO: 120808 - DNA, 20 bp, Artificial Sequence
  Description of Artificial Sequence: Synthetic oligonucleotide
  Target: LAMA2; (+) strand; PAM type: NRG; PAM sequence: CAG
aggtactctggaggctgagg

SEQ ID NO: 120809 - DNA, 20 bp, Artificial Sequence
  Description of Artificial Sequence: Synthetic oligonucleotide
  Target: LAMA2; (+) strand; PAM type: NRG; PAM sequence: AGG
ggtactctggaggctgaggc

SEQ ID NO: 120810 - DNA, 20 bp, Artificial Sequence
  Description of Artificial Sequence: Synthetic oligonucleotide
  Target: LAMA2; (+) strand; PAM type: NRG; PAM sequence: GAG
tactctggaggctgaggcag

SEQ ID NO: 120811 - DNA, 20 bp, Artificial Sequence
  Description of Artificial Sequence: Synthetic oligonucleotide
  Target: LAMA2; (+) strand; PAM type: NRG; PAM sequence: TGG
tggaggctgaggcaggagaa

SEQ ID NO: 120812 - DNA, 20 bp, Artificial Sequence
  Description of Artificial Sequence: Synthetic oligonucleotide
  Target: LAMA2; (+) strand; PAM type: NRG; PAM sequence: CGG
gcaggagaatggcgtgaatc

SEQ ID NO: 120813 - DNA, 20 bp, Artificial Sequence
  Description of Artificial Sequence: Synthetic oligonucleotide
  Target: LAMA2; (+) strand; PAM type: NRG; PAM sequence: GGG
caggagaatggcgtgaatcc

SEQ ID NO: 120814 - DNA, 20 bp, Artificial Sequence
  Description of Artificial Sequence: Synthetic oligonucleotide
  Target: LAMA2; (+) strand; PAM type: NRG; PAM sequence: GAG
ggagaatggcgtgaatccgg

SEQ ID NO: 120815 - DNA, 20 bp, Artificial Sequence
  Description of Artificial Sequence: Synthetic oligonucleotide
  Target: LAMA2; (+) strand; PAM type: NRG; PAM sequence: AGG
gagaatggcgtgaatccggg

SEQ ID NO: 120816 - DNA, 20 bp, Artificial Sequence
  Description of Artificial Sequence: Synthetic oligonucleotide
  Target: LAMA2; (+) strand; PAM type: NRG; PAM sequence: GAG
gaatggcgtgaatccgggag

SEQ ID NO: 120817 - DNA, 20 bp, Artificial Sequence
  Description of Artificial Sequence: Synthetic oligonucleotide
  Target: LAMA2; (+) strand; PAM type: NRG; PAM sequence: AGG
aatggcgtgaatccgggagg

SEQ ID NO: 120818 - DNA, 20 bp, Artificial Sequence
  Description of Artificial Sequence: Synthetic oligonucleotide
  Target: LAMA2; (+) strand; PAM type: NRG; PAM sequence: GAG
tggcgtgaatccgggaggag

SEQ ID NO: 120819 - DNA, 20 bp, Artificial Sequence
  Description of Artificial Sequence: Synthetic oligonucleotide
  Target: LAMA2; (+) strand; PAM type: NRG; PAM sequence: CAG
aatccgggaggaggagcttg

SEQ ID NO: 120820 - DNA, 20 bp, Artificial Sequence
  Description of Artificial Sequence: Synthetic oligonucleotide
  Target: LAMA2; (+) strand; PAM type: NRG; PAM sequence: GAG
cgggaggaggagcttgcagt

SEQ ID NO: 120821 - DNA, 20 bp, Artificial Sequence
  Description of Artificial Sequence: Synthetic oligonucleotide
  Target: LAMA2; (+) strand; PAM type: NRG; PAM sequence: GAG
ggaggagcttgcagtgagcc

SEQ ID NO: 120822 - DNA, 20 bp, Artificial Sequence
  Description of Artificial Sequence: Synthetic oligonucleotide
  Target: LAMA2; (+) strand; PAM type: NRG; PAM sequence: CAG
gagattgcgccactgcactc

SEQ ID NO: 120823 - DNA, 20 bp, Artificial Sequence
  Description of Artificial Sequence: Synthetic oligonucleotide
  Target: LAMA2; (+) strand; PAM type: NRG; PAM sequence: TGG
tgcgccactgcactccagct

SEQ ID NO: 120824 - DNA, 20 bp, Artificial Sequence
  Description of Artificial Sequence: Synthetic oligonucleotide
  Target: LAMA2; (+) strand; PAM type: NRG; PAM sequence: GGG
gcgccactgcactccagctt

SEQ ID NO: 120825 - DNA, 20 bp, Artificial Sequence
  Description of Artificial Sequence: Synthetic oligonucleotide
  Target: LAMA2; (+) strand; PAM type: NRG; PAM sequence: CAG
ctgcactccagcttgggcaa

SEQ ID NO: 120826 - DNA, 20 bp, Artificial Sequence
  Description of Artificial Sequence: Synthetic oligonucleotide
  Target: LAMA2; (+) strand; PAM type: NRG; PAM sequence: GAG
gcactccagcttgggcaaca

SEQ ID NO: 120827 - DNA, 20 bp, Artificial Sequence
  Description of Artificial Sequence: Synthetic oligonucleotide
  Target: LAMA2; (+) strand; PAM type: NRG; PAM sequence: GAG
tccagcttgggcaacagagc

SEQ ID NO: 120828 - DNA, 20 bp, Artificial Sequence
  Description of Artificial Sequence: Synthetic oligonucleotide
  Target: LAMA2; (+) strand; PAM type: NRG; PAM sequence: GAG
gcgagactccgtgaactcat

SEQ ID NO: 120829 - DNA, 20 bp, Artificial Sequence
  Description of Artificial Sequence: Synthetic oligonucleotide
  Target: LAMA2; (+) strand; PAM type: NRG; PAM sequence: AAG
gactccgtgaactcatgagc

SEQ ID NO: 120830 - DNA, 20 bp, Artificial Sequence
  Description of Artificial Sequence: Synthetic oligonucleotide
  Target: LAMA2; (+) strand; PAM type: NRG; PAM sequence: AGG
actccgtgaactcatgagca

SEQ ID NO: 120831 - DNA, 20 bp, Artificial Sequence
  Description of Artificial Sequence: Synthetic oligonucleotide
  Target: LAMA2; (+) strand; PAM type: NRG; PAM sequence: TAG
gtgaactcatgagcaaggtt

SEQ ID NO: 120832 - DNA, 20 bp, Artificial Sequence
  Description of Artificial Sequence: Synthetic oligonucleotide
  Target: LAMA2; (+) strand; PAM type: NRG; PAM sequence: AAG
catgagcaaggtttagtaca

SEQ ID NO: 120833 - DNA, 20 bp, Artificial Sequence
  Description of Artificial Sequence: Synthetic oligonucleotide
  Target: LAMA2; (+) strand; PAM type: NRG; PAM sequence: AGG
atgagcaaggtttagtacaa

SEQ ID NO: 120834 - DNA, 20 bp, Artificial Sequence
  Description of Artificial Sequence: Synthetic oligonucleotide
  Target: LAMA2; (+) strand; PAM type: NRG; PAM sequence: TAG
atatctgtaattctgaatat

SEQ ID NO: 120835 - DNA, 20 bp, Artificial Sequence
  Description of Artificial Sequence: Synthetic oligonucleotide
  Target: LAMA2; (+) strand; PAM type: NRG; PAM sequence: CAG
tctgtaattctgaatattag

SEQ ID NO: 120836 - DNA, 20 bp, Artificial Sequence
  Description of Artificial Sequence: Synthetic oligonucleotide
  Target: LAMA2; (+) strand; PAM type: NRG; PAM sequence: AAG
gtaattctgaatattagcag

SEQ ID NO: 120837 - DNA, 20 bp, Artificial Sequence
  Description of Artificial Sequence: Synthetic oligonucleotide
  Target: LAMA2; (+) strand; PAM type: NRG; PAM sequence: GAG
aattctgaatattagcagaa

SEQ ID NO: 120838 - DNA, 20 bp, Artificial Sequence
  Description of Artificial Sequence: Synthetic oligonucleotide
  Target: LAMA2; (+) strand; PAM type: NRG; PAM sequence: GAG
agagatttttattccttgct

SEQ ID NO: 120839 - DNA, 20 bp, Artificial Sequence
  Description of Artificial Sequence: Synthetic oligonucleotide
  Target: LAMA2; (+) strand; PAM type: NRG; PAM sequence: CAG
ctgagctcctgaactcacat

SEQ ID NO: 120840 - DNA, 20 bp, Artificial Sequence
  Description of Artificial Sequence: Synthetic oligonucleotide
  Target: LAMA2; (+) strand; PAM type: NRG; PAM sequence: AGG
tgagctcctgaactcacatc

SEQ ID NO: 120841 - DNA, 20 bp, Artificial Sequence
  Description of Artificial Sequence: Synthetic oligonucleotide
  Target: LAMA2; (+) strand; PAM type: NRG; PAM sequence: GAG
agctcctgaactcacatcag

SEQ ID NO: 120842 - DNA, 20 bp, Artificial Sequence
  Description of Artificial Sequence: Synthetic oligonucleotide
  Target: LAMA2; (+) strand; PAM type: NRG; PAM sequence: AGG
gctcctgaactcacatcagg

SEQ ID NO: 120843 - DNA, 20 bp, Artificial Sequence
  Description of Artificial Sequence: Synthetic oligonucleotide
  Target: LAMA2; (+) strand; PAM type: NRG; PAM sequence: GGG
ctcctgaactcacatcagga

SEQ ID NO: 120844 - DNA, 20 bp, Artificial Sequence
  Description of Artificial Sequence: Synthetic oligonucleotide
  Target: LAMA2; (+) strand; PAM type: NRG; PAM sequence: GGG
tcctgaactcacatcaggag

SEQ ID NO: 120845 - DNA, 20 bp, Artificial Sequence
  Description of Artificial Sequence: Synthetic oligonucleotide
  Target: LAMA2; (+) strand; PAM type: NRG; PAM sequence: TAG
ggggtcctttgttcttttca

SEQ ID NO: 120846 - DNA, 20 bp, Artificial Sequence
  Description of Artificial Sequence: Synthetic oligonucleotide
  Target: LAMA2; (+) strand; PAM type: NRG; PAM sequence: AAG
tcctttgttcttttcataga

SEQ ID NO: 120847 - DNA, 20 bp, Artificial Sequence
  Description of Artificial Sequence: Synthetic oligonucleotide
  Target: LAMA2; (+) strand; PAM type: NRG; PAM sequence: TGG
ttcatagaaagaattcctgt

SEQ ID NO: 120848 - DNA, 20 bp, Artificial Sequence
  Description of Artificial Sequence: Synthetic oligonucleotide
  Target: LAMA2; (+) strand; PAM type: NRG; PAM sequence: AAG
atagaaagaattcctgttgg

SEQ ID NO: 120849 - DNA, 20 bp, Artificial Sequence
  Description of Artificial Sequence: Synthetic oligonucleotide
  Target: LAMA2; (+) strand; PAM type: NRG; PAM sequence: TGG
agaattcctgttggaagcac

SEQ ID NO: 120850 - DNA, 20 bp, Artificial Sequence
  Description of Artificial Sequence: Synthetic oligonucleotide
  Target: LAMA2; (+) strand; PAM type: NRG; PAM sequence: TGG
atatcgtatttctcaaaata

SEQ ID NO: 120851 - DNA, 20 bp, Artificial Sequence
  Description of Artificial Sequence: Synthetic oligonucleotide
  Target: LAMA2; (+) strand; PAM type: NRG; PAM sequence: TAG
gaatttccttcatttatttc

SEQ ID NO: 120852 - DNA, 20 bp, Artificial Sequence
  Description of Artificial Sequence: Synthetic oligonucleotide
  Target: LAMA2; (+) strand; PAM type: NRG; PAM sequence: AAG
tcatttatttctagcctttg

SEQ ID NO: 120853 - DNA, 20 bp, Artificial Sequence
  Description of Artificial Sequence: Synthetic oligonucleotide
  Target: LAMA2; (+) strand; PAM type: NRG; PAM sequence: AAG
ttgaagttttgtgatttcta

SEQ ID NO: 120854 - DNA, 20 bp, Artificial Sequence
  Description of Artificial Sequence: Synthetic oligonucleotide
  Target: LAMA2; (+) strand; PAM type: NRG; PAM sequence: AAG
gtgatttctaaagcatttaa

SEQ ID NO: 120855 - DNA, 20 bp, Artificial Sequence
  Description of Artificial Sequence: Synthetic oligonucleotide
  Target: LAMA2; (+) strand; PAM type: NRG; PAM sequence: AGG
tgatttctaaagcatttaaa

SEQ ID NO: 120856 - DNA, 20 bp, Artificial Sequence
  Description of Artificial Sequence: Synthetic oligonucleotide
  Target: LAMA2; (+) strand; PAM type: NRG; PAM sequence: GAG
ttaaaaggttttgtaatgtt

SEQ ID NO: 120857 - DNA, 20 bp, Artificial Sequence
  Description of Artificial Sequence: Synthetic oligonucleotide
  Target: LAMA2; (+) strand; PAM type: NRG; PAM sequence: TGG
attgtatgtgtgtcatatga

SEQ ID NO: 120858 - DNA, 20 bp, Artificial Sequence
  Description of Artificial Sequence: Synthetic oligonucleotide
  Target: LAMA2; (+) strand; PAM type: NRG; PAM sequence: TGG
tgtgtgtcatatgatggatc

SEQ ID NO: 120859 - DNA, 20 bp, Artificial Sequence
  Description of Artificial Sequence: Synthetic oligonucleotide
  Target: LAMA2; (+) strand; PAM type: NRG; PAM sequence: TGG
ggtttctttttcttatttgt

SEQ ID NO: 120860 - DNA, 20 bp, Artificial Sequence
  Description of Artificial Sequence: Synthetic oligonucleotide
  Target: LAMA2; (+) strand; PAM type: NRG; PAM sequence: GGG
gtttctttttcttatttgtt

SEQ ID NO: 120861 - DNA, 20 bp, Artificial Sequence
  Description of Artificial Sequence: Synthetic oligonucleotide
  Target: LAMA2; (+) strand; PAM type: NRG; PAM sequence: GAG
ttctttttcttatttgttgg

SEQ ID NO: 120862 - DNA, 20 bp, Artificial Sequence
  Description of Artificial Sequence: Synthetic oligonucleotide
  Target: LAMA2; (+) strand; PAM type: NRG; PAM sequence: CAG
cttatttgttgggagatgtc

SEQ ID NO: 120863 - DNA, 20 bp, Artificial Sequence
  Description of Artificial Sequence: Synthetic oligonucleotide
  Target: LAMA2; (+) strand; PAM type: NRG; PAM sequence: GAG
tatttgttgggagatgtcca

SEQ ID NO: 120864 - DNA, 20 bp, Artificial Sequence
  Description of Artificial Sequence: Synthetic oligonucleotide
  Target: LAMA2; (+) strand; PAM type: NRG; PAM sequence: AAG
tgggagatgtccagagactc

SEQ ID NO: 120865 - DNA, 20 bp, Artificial Sequence
  Description of Artificial Sequence: Synthetic oligonucleotide
  Target: LAMA2; (+) strand; PAM type: NRG; PAM sequence: AGG
gggagatgtccagagactca

SEQ ID NO: 120866 - DNA, 20 bp, Artificial Sequence
  Description of Artificial Sequence: Synthetic oligonucleotide
  Target: LAMA2; (+) strand; PAM type: NRG; PAM sequence: AAG
gaccaaatttttcactcttc

SEQ ID NO: 120867 - DNA, 20 bp, Artificial Sequence
  Description of Artificial Sequence: Synthetic oligonucleotide
  Target: LAMA2; (+) strand; PAM type: NRG; PAM sequence: AGG
accaaatttttcactcttca

SEQ ID NO: 120868 - DNA, 20 bp, Artificial Sequence
  Description of Artificial Sequence: Synthetic oligonucleotide
  Target: LAMA2; (+) strand; PAM type: NRG; PAM sequence: GGG
ccaaatttttcactcttcaa

SEQ ID NO: 120869 - DNA, 20 bp, Artificial Sequence
  Description of Artificial Sequence: Synthetic oligonucleotide
  Target: LAMA2; (+) strand; PAM type: NRG; PAM sequence: CAG
gcctcatactgctctgattt

SEQ ID NO: 120870 - DNA, 20 bp, Artificial Sequence
  Description of Artificial Sequence: Synthetic oligonucleotide
  Target: LAMA2; (+) strand; PAM type: NRG; PAM sequence: TAG
ctgctctgatttcagatgta

SEQ ID NO: 120871 - DNA, 20 bp, Artificial Sequence
  Description of Artificial Sequence: Synthetic oligonucleotide
  Target: LAMA2; (+) strand; PAM type: NRG; PAM sequence: TGG
tattgcttatcaaacactga

SEQ ID NO: 120872 - DNA, 20 bp, Artificial Sequence
  Description of Artificial Sequence: Synthetic oligonucleotide
  Target: LAMA2; (+) strand; PAM type: NRG; PAM sequence: GGG
attgcttatcaaacactgat

SEQ ID NO: 120873 - DNA, 20 bp, Artificial Sequence
  Description of Artificial Sequence: Synthetic oligonucleotide
  Target: LAMA2; (+) strand; PAM type: NRG; PAM sequence: GAG
acactgatgggtctgaacat

SEQ ID NO: 120874 - DNA, 20 bp, Artificial Sequence
  Description of Artificial Sequence: Synthetic oligonucleotide
  Target: LAMA2; (+) strand; PAM type: NRG; PAM sequence: TGG
ctgatgggtctgaacatgag

SEQ ID NO: 120875 - DNA, 20 bp, Artificial Sequence
  Description of Artificial Sequence: Synthetic oligonucleotide
  Target: LAMA2; (+) strand; PAM type: NRG; PAM sequence: TAG
atgggtctgaacatgagtgg

SEQ ID NO: 120876 - DNA, 20 bp, Artificial Sequence
  Description of Artificial Sequence: Synthetic oligonucleotide
  Target: LAMA2; (+) strand; PAM type: NRG; PAM sequence: AAG
gtctgaacatgagtggtagt

SEQ ID NO: 120877 - DNA, 20 bp, Artificial Sequence
  Description of Artificial Sequence: Synthetic oligonucleotide
  Target: LAMA2; (+) strand; PAM type: NRG; PAM sequence: CAG
gagtggtagtaagatatttc

SEQ ID NO: 120878 - DNA, 20 bp, Artificial Sequence
  Description of Artificial Sequence: Synthetic oligonucleotide
  Target: LAMA2; (+) strand; PAM type: NRG; PAM sequence: AAG
tagtaagatatttccagatt

SEQ ID NO: 120879 - DNA, 20 bp, Artificial Sequence
  Description of Artificial Sequence: Synthetic oligonucleotide
  Target: LAMA2; (+) strand; PAM type: NRG; PAM sequence: TAG
taagatatttccagattaag

SEQ ID NO: 120880 - DNA, 20 bp, Artificial Sequence
  Description of Artificial Sequence: Synthetic oligonucleotide
  Target: LAMA2; (+) strand; PAM type: NRG; PAM sequence: CAG
gattaagtagacaaattgtg

SEQ ID NO: 120881 - DNA, 20 bp, Artificial Sequence
  Description of Artificial Sequence: Synthetic oligonucleotide
  Target: LAMA2; (+) strand; PAM type: NRG; PAM sequence: TAG
acaaattgtgcagaactttt

SEQ ID NO: 120882 - DNA, 20 bp, Artificial Sequence
  Description of Artificial Sequence: Synthetic oligonucleotide
  Target: LAMA2; (+) strand; PAM type: NRG; PAM sequence: GAG
atttaaatgactaaattttt

SEQ ID NO: 120883 - DNA, 20 bp, Artificial Sequence
  Description of Artificial Sequence: Synthetic oligonucleotide
  Target: LAMA2; (+) strand; PAM type: NRG; PAM sequence: AGG
tttaaatgactaaatttttg

SEQ ID NO: 120884 - DNA, 20 bp, Artificial Sequence
  Description of Artificial Sequence: Synthetic oligonucleotide
  Target: LAMA2; (+) strand; PAM type: NRG; PAM sequence: CAG
ttttgaggtttatgtgtatc

SEQ ID NO: 120885 - DNA, 20 bp, Artificial Sequence
  Description of Artificial Sequence: Synthetic oligonucleotide
  Target: LAMA2; (+) strand; PAM type: NRG; PAM sequence: TAG
caatatgtcctctccttatc

SEQ ID NO: 120886 - DNA, 20 bp, Artificial Sequence
  Description of Artificial Sequence: Synthetic oligonucleotide
  Target: LAMA2; (+) strand; PAM type: NRG; PAM sequence: TAG
tataatttatctttaaaaat

SEQ ID NO: 120887 - DNA, 20 bp, Artificial Sequence
  Description of Artificial Sequence: Synthetic oligonucleotide
  Target: LAMA2; (+) strand; PAM type: NRG; PAM sequence: TGG
tttatctttaaaaattagac

SEQ ID NO: 120888 - DNA, 20 bp, Artificial Sequence
  Description of Artificial Sequence: Synthetic oligonucleotide
  Target: LAMA2; (+) strand; PAM type: NRG; PAM sequence: TGG
ctttaaaaattagactggct

SEQ ID NO: 120889 - DNA, 20 bp, Artificial Sequence
  Description of Artificial Sequence: Synthetic oligonucleotide
  Target: LAMA2; (+) strand; PAM type: NRG; PAM sequence: CAG
tagactggcttggcatatgt

SEQ ID NO: 120890 - DNA, 20 bp, Artificial Sequence
  Description of Artificial Sequence: Synthetic oligonucleotide
  Target: LAMA2; (+) strand; PAM type: NRG; PAM sequence: CAG
atgtcagattttgtatttaa

SEQ ID NO: 120891 - DNA, 20 bp, Artificial Sequence
  Description of Artificial Sequence: Synthetic oligonucleotide
  Target: LAMA2; (+) strand; PAM type: NRG; PAM sequence: TAG
ctttttatatatttctttgt

SEQ ID NO: 120892 - DNA, 20 bp, Artificial Sequence
  Description of Artificial Sequence: Synthetic oligonucleotide
  Target: LAMA2; (+) strand; PAM type: NRG; PAM sequence: AGG
tttttatatatttctttgtt

SEQ ID NO: 120893 - DNA, 20 bp, Artificial Sequence
  Description of Artificial Sequence: Synthetic oligonucleotide
  Target: LAMA2; (+) strand; PAM type: NRG; PAM sequence: GAG
tttatatatttctttgttag

SEQ ID NO: 120894 - DNA, 20 bp, Artificial Sequence
  Description of Artificial Sequence: Synthetic oligonucleotide
  Target: LAMA2; (+) strand; PAM type: NRG; PAM sequence: AGG
ttatatatttctttgttagg

SEQ ID NO: 120895 - DNA, 20 bp, Artificial Sequence
  Description of Artificial Sequence: Synthetic oligonucleotide
  Target: LAMA2; (+) strand; PAM type: NRG; PAM sequence: TAG
tgttaggaggtgttcaatgt

SEQ ID NO: 120896 - DNA, 20 bp, Artificial Sequence
  Description of Artificial Sequence: Synthetic oligonucleotide
  Target: LAMA2; (+) strand; PAM type: NRG; PAM sequence: AAG
gaggtgttcaatgttagaca

SEQ ID NO: 120897 - DNA, 20 bp, Artificial Sequence
  Description of Artificial Sequence: Synthetic oligonucleotide
  Target: LAMA2; (+) strand; PAM type: NRG; PAM sequence: CAG
tcaatgttagacaaagtgaa

SEQ ID NO: 120898 - DNA, 20 bp, Artificial Sequence
  Description of Artificial Sequence: Synthetic oligonucleotide
  Target: LAMA2; (+) strand; PAM type: NRG; PAM sequence: TGG
acaaagtgaacagattactt

SEQ ID NO: 120899 - DNA, 20 bp, Artificial Sequence
  Description of Artificial Sequence: Synthetic oligonucleotide
  Target: LAMA2; (+) strand; PAM type: NRG; PAM sequence: TGG
ttactttggaatccatgtcc

SEQ ID NO: 120900 - DNA, 20 bp, Artificial Sequence
  Description of Artificial Sequence: Synthetic oligonucleotide
  Target: LAMA2; (+) strand; PAM type: NRG; PAM sequence: CAG
tttttctgccatacacattc

SEQ ID NO: 120901 - DNA, 20 bp, Artificial Sequence
  Description of Artificial Sequence: Synthetic oligonucleotide
  Target: LAMA2; (+) strand; PAM type: NRG; PAM sequence: AAG
acacattccagtaacactga

SEQ ID NO: 120902 - DNA, 20 bp, Artificial Sequence
  Description of Artificial Sequence: Synthetic oligonucleotide
  Target: LAMA2; (+) strand; PAM type: NRG; PAM sequence: GAG
acattccagtaacactgaaa

SEQ ID NO: 120903 - DNA, 20 bp, Artificial Sequence
  Description of Artificial Sequence: Synthetic oligonucleotide
  Target: LAMA2; (+) strand; PAM type: NRG; PAM sequence: TAG
atctttattgcttttgtaaa

SEQ ID NO: 120904 - DNA, 20 bp, Artificial Sequence
  Description of Artificial Sequence: Synthetic oligonucleotide
  Target: LAMA2; (+) strand; PAM type: NRG; PAM sequence: TAG
attgcttttgtaaatagcta

SEQ ID NO: 120905 - DNA, 20 bp, Artificial Sequence
  Description of Artificial Sequence: Synthetic oligonucleotide
  Target: LAMA2; (+) strand; PAM type: NRG; PAM sequence: TAG
ctatagatacactttatatg

SEQ ID NO: 120906 - DNA, 20 bp, Artificial Sequence
  Description of Artificial Sequence: Synthetic oligonucleotide
  Target: LAMA2; (+) strand; PAM type: NRG; PAM sequence: TGG
tacactttatatgtagataa

SEQ ID NO: 120907 - DNA, 20 bp, Artificial Sequence
  Description of Artificial Sequence: Synthetic oligonucleotide
  Target: LAMA2; (+) strand; PAM type: NRG; PAM sequence: TAG
gttttaaaattctgcaaaaa

SEQ ID NO: 120908 - DNA, 20 bp, Artificial Sequence
  Description of Artificial Sequence: Synthetic oligonucleotide
  Target: LAMA2; (+) strand; PAM type: NRG; PAM sequence: AAG
ttctctttattctctttctc

SEQ ID NO: 120909 - DNA, 20 bp, Artificial Sequence
  Description of Artificial Sequence: Synthetic oligonucleotide
  Target: LAMA2; (+) strand; PAM type: NRG; PAM sequence: TAG
aatatttttcattcaacttt

SEQ ID NO: 120910 - DNA, 20 bp, Artificial Sequence
  Description of Artificial Sequence: Synthetic oligonucleotide
  Target: LAMA2; (+) strand; PAM type: NRG; PAM sequence: AGG
atatttttcattcaactttt

SEQ ID NO: 120911 - DNA, 20 bp, Artificial Sequence
  Description of Artificial Sequence: Synthetic oligonucleotide
  Target: LAMA2; (+) strand; PAM type: NRG; PAM sequence: GGG
tatttttcattcaactttta

SEQ ID NO: 120912 - DNA, 20 bp, Artificial Sequence
  Description of Artificial Sequence: Synthetic oligonucleotide
  Target: LAMA2; (+) strand; PAM type: NRG; PAM sequence: TAG
ttagggactgattttctcca

SEQ ID NO: 120913 - DNA, 20 bp, Artificial Sequence
  Description of Artificial Sequence: Synthetic oligonucleotide
  Target: LAMA2; (+) strand; PAM type: NRG; PAM sequence: GAG
agggactgattttctccata

SEQ ID NO: 120914 - DNA, 20 bp, Artificial Sequence
  Description of Artificial Sequence: Synthetic oligonucleotide
  Target: LAMA2; (+) strand; PAM type: NRG; PAM sequence: TGG
tctccatagagttcctgatg

SEQ ID NO: 120915 - DNA, 20 bp, Artificial Sequence
  Description of Artificial Sequence: Synthetic oligonucleotide
  Target: LAMA2; (+) strand; PAM type: NRG; PAM sequence: TGG
agttcctgatgtggtgctac

SEQ ID NO: 120916 - DNA, 20 bp, Artificial Sequence
  Description of Artificial Sequence: Synthetic oligonucleotide
  Target: LAMA2; (+) strand; PAM type: NRG; PAM sequence: GAG
ttcctgatgtggtgctactg

SEQ ID NO: 120917 - DNA, 20 bp, Artificial Sequence
  Description of Artificial Sequence: Synthetic oligonucleotide
  Target: LAMA2; (+) strand; PAM type: NRG; PAM sequence: GAG
ggtgctactggagtgatgct

SEQ ID NO: 120918 - DNA, 20 bp, Artificial Sequence
  Description of Artificial Sequence: Synthetic oligonucleotide
  Target: LAMA2; (+) strand; PAM type: NRG; PAM sequence: TAG
acattattctaaatgttttt

SEQ ID NO: 120919 - DNA, 20 bp, Artificial Sequence
  Description of Artificial Sequence: Synthetic oligonucleotide
  Target: LAMA2; (+) strand; PAM type: NRG; PAM sequence: TAG
tgttttttagaaacattttt

SEQ ID NO: 120920 - DNA, 20 bp, Artificial Sequence
  Description of Artificial Sequence: Synthetic oligonucleotide
  Target: LAMA2; (+) strand; PAM type: NRG; PAM sequence: CAG
tttagaaaacatcattcacc

SEQ ID NO: 120921 - DNA, 20 bp, Artificial Sequence
  Description of Artificial Sequence: Synthetic oligonucleotide
  Target: LAMA2; (+) strand; PAM type: NRG; PAM sequence: TGG
tctttatttatttattcctt

SEQ ID NO: 120922 - DNA, 20 bp, Artificial Sequence
  Description of Artificial Sequence: Synthetic oligonucleotide
  Target: LAMA2; (+) strand; PAM type: NRG; PAM sequence: CAG
tggataaaacattgccctca

SEQ ID NO: 120923 - DNA, 20 bp, Artificial Sequence
  Description of Artificial Sequence: Synthetic oligonucleotide
  Target: LAMA2; (+) strand; PAM type: NRG; PAM sequence: AGG
ggataaaacattgccctcac

SEQ ID NO: 120924 - DNA, 20 bp, Artificial Sequence
  Description of Artificial Sequence: Synthetic oligonucleotide
  Target: LAMA2; (+) strand; PAM type: NRG; PAM sequence: TGG
gctgttattattcactttaa

SEQ ID NO: 120925 - DNA, 20 bp, Artificial Sequence
  Description of Artificial Sequence: Synthetic oligonucleotide
  Target: LAMA2; (+) strand; PAM type: NRG; PAM sequence: CAG
tctgctgacctcctttttga

SEQ ID NO: 120926 - DNA, 20 bp, Artificial Sequence
  Description of Artificial Sequence: Synthetic oligonucleotide
  Target: LAMA2; (+) strand; PAM type: NRG; PAM sequence: TAG
tgacctcctttttgacagtt

SEQ ID NO: 120927 - DNA, 20 bp, Artificial Sequence
  Description of Artificial Sequence: Synthetic oligonucleotide
  Target: LAMA2; (+) strand; PAM type: NRG; PAM sequence: AGG
gacctcctttttgacagttt

SEQ ID NO: 120928 - DNA, 20 bp, Artificial Sequence
  Description of Artificial Sequence: Synthetic oligonucleotide
  Target: LAMA2; (+) strand; PAM type: NRG; PAM sequence: AAG
tgacagtttaggactgtatt

SEQ ID NO: 120929 - DNA, 20 bp, Artificial Sequence
  Description of Artificial Sequence: Synthetic oligonucleotide
  Target: LAMA2; (+) strand; PAM type: NRG; PAM sequence: CAG
ttaggactgtattaagtttt

SEQ ID NO: 120930 - DNA, 20 bp, Artificial Sequence
  Description of Artificial Sequence: Synthetic oligonucleotide
  Target: LAMA2; (+) strand; PAM type: NRG; PAM sequence: CGG
attaagttttcagatctgct

SEQ ID NO: 120931 - DNA, 20 bp, Artificial Sequence
  Description of Artificial Sequence: Synthetic oligonucleotide
  Target: LAMA2; (+) strand; PAM type: NRG; PAM sequence: GAG
agttttcagatctgctcggt

SEQ ID NO: 120932 - DNA, 20 bp, Artificial Sequence
  Description of Artificial Sequence: Synthetic oligonucleotide
  Target: LAMA2; (+) strand; PAM type: NRG; PAM sequence: TAG
cagatctgctcggtgagaaa

SEQ ID NO: 120933 - DNA, 20 bp, Artificial Sequence
  Description of Artificial Sequence: Synthetic oligonucleotide
  Target: LAMA2; (+) strand; PAM type: NRG; PAM sequence: TAG
gagaaatagtgaaataaaac

SEQ ID NO: 120934 - DNA, 20 bp, Artificial Sequence
  Description of Artificial Sequence: Synthetic oligonucleotide
  Target: LAMA2; (+) strand; PAM type: NRG; PAM sequence: TGG
ataaaactagttaacatcta

SEQ ID NO: 120935 - DNA, 20 bp, Artificial Sequence
  Description of Artificial Sequence: Synthetic oligonucleotide
  Target: LAMA2; (+) strand; PAM type: NRG; PAM sequence: TGG
atctatggaatacctaacta

SEQ ID NO: 120936 - DNA, 20 bp, Artificial Sequence
  Description of Artificial Sequence: Synthetic oligonucleotide
  Target: LAMA2; (+) strand; PAM type: NRG; PAM sequence: GGG
tctatggaatacctaactat

SEQ ID NO: 120937 - DNA, 20 bp, Artificial Sequence
  Description of Artificial Sequence: Synthetic oligonucleotide
  Target: LAMA2; (+) strand; PAM type: NRG; PAM sequence: CAG
tggaatacctaactatgggc

SEQ ID NO: 120938 - DNA, 20 bp, Artificial Sequence
  Description of Artificial Sequence: Synthetic oligonucleotide
  Target: LAMA2; (+) strand; PAM type: NRG; PAM sequence: AAG
ctatgggccagcactgctgt

SEQ ID NO: 120939 - DNA, 20 bp, Artificial Sequence
  Description of Artificial Sequence: Synthetic oligonucleotide
  Target: LAMA2; (+) strand; PAM type: NRG; PAM sequence: AAG
tctcatgccttaatttatca

SEQ ID NO: 120940 - DNA, 20 bp, Artificial Sequence
  Description of Artificial Sequence: Synthetic oligonucleotide
  Target: LAMA2; (+) strand; PAM type: NRG; PAM sequence: AGG
ctcatgccttaatttatcaa

SEQ ID NO: 120941 - DNA, 20 bp, Artificial Sequence
  Description of Artificial Sequence: Synthetic oligonucleotide
  Target: LAMA2; (+) strand; PAM type: NRG; PAM sequence: TAG
atgccttaatttatcaaagg

SEQ ID NO: 120942 - DNA, 20 bp, Artificial Sequence
  Description of Artificial Sequence: Synthetic oligonucleotide
  Target: LAMA2; (+) strand; PAM type: NRG; PAM sequence: CAG
atgctattaatctcatttaa

SEQ ID NO: 120943 - DNA, 20 bp, Artificial Sequence
  Description of Artificial Sequence: Synthetic oligonucleotide
  Target: LAMA2; (+) strand; PAM type: NRG; PAM sequence: AAG
ctattaatctcatttaacag

SEQ ID NO: 120944 - DNA, 20 bp, Artificial Sequence
  Description of Artificial Sequence: Synthetic oligonucleotide
  Target: LAMA2; (+) strand; PAM type: NRG; PAM sequence: GAG
attaatctcatttaacagaa

SEQ ID NO: 120945 - DNA, 20 bp, Artificial Sequence
  Description of Artificial Sequence: Synthetic oligonucleotide
  Target: LAMA2; (+) strand; PAM type: NRG; PAM sequence: AAG
aaactgaaatgcaaaatgtt

SEQ ID NO: 120946 - DNA, 20 bp, Artificial Sequence
  Description of Artificial Sequence: Synthetic oligonucleotide
  Target: LAMA2; (+) strand; PAM type: NRG; PAM sequence: AAG
aatgttaagtaactttccaa

SEQ ID NO: 120947 - DNA, 20 bp, Artificial Sequence
  Description of Artificial Sequence: Synthetic oligonucleotide
  Target: LAMA2; (+) strand; PAM type: NRG; PAM sequence: CAG
ctttccaaaagtaaaacaac

SEQ ID NO: 120948 - DNA, 20 bp, Artificial Sequence
  Description of Artificial Sequence: Synthetic oligonucleotide
  Target: LAMA2; (+) strand; PAM type: NRG; PAM sequence: TGG
aagtaaaacaaccagtgaac

SEQ ID NO: 120949 - DNA, 20 bp, Artificial Sequence
  Description of Artificial Sequence: Synthetic oligonucleotide
  Target: LAMA2; (+) strand; PAM type: NRG; PAM sequence: TAG
taaaacaaccagtgaactgg

SEQ ID NO: 120950 - DNA, 20 bp, Artificial Sequence
  Description of Artificial Sequence: Synthetic oligonucleotide
  Target: LAMA2; (+) strand; PAM type: NRG; PAM sequence: GAG
aaacaaccagtgaactggta

SEQ ID NO: 120951 - DNA, 20 bp, Artificial Sequence
  Description of Artificial Sequence: Synthetic oligonucleotide
  Target: LAMA2; (+) strand; PAM type: NRG; PAM sequence: AAG
ccagtgaactggtagagacc

SEQ ID NO: 120952 - DNA, 20 bp, Artificial Sequence
  Description of Artificial Sequence: Synthetic oligonucleotide
  Target: LAMA2; (+) strand; PAM type: NRG; PAM sequence: TGG
aactggtagagaccaagatt

SEQ ID NO: 120953 - DNA, 20 bp, Artificial Sequence
  Description of Artificial Sequence: Synthetic oligonucleotide
  Target: LAMA2; (+) strand; PAM type: NRG; PAM sequence: TAG
tagagaccaagatttggacc

SEQ ID NO: 120954 - DNA, 20 bp, Artificial Sequence
  Description of Artificial Sequence: Synthetic oligonucleotide
  Target: LAMA2; (+) strand; PAM type: NRG; PAM sequence: AGG
agagaccaagatttggacct

SEQ ID NO: 120955 - DNA, 20 bp, Artificial Sequence
  Description of Artificial Sequence: Synthetic oligonucleotide
  Target: LAMA2; (+) strand; PAM type: NRG; PAM sequence: TAG
gaccaagatttggacctagg

SEQ ID NO: 120956 - DNA, 20 bp, Artificial Sequence
  Description of Artificial Sequence: Synthetic oligonucleotide
  Target: LAMA2; (+) strand; PAM type: NRG; PAM sequence: TGG
acctaggtagttctactttg

SEQ ID NO: 120957 - DNA, 20 bp, Artificial Sequence
  Description of Artificial Sequence: Synthetic oligonucleotide
  Target: LAMA2; (+) strand; PAM type: NRG; PAM sequence: TGG
gtggcccattcacctaccca

SEQ ID NO: 120958 - DNA, 20 bp, Artificial Sequence
  Description of Artificial Sequence: Synthetic oligonucleotide
  Target: LAMA2; (+) strand; PAM type: NRG; PAM sequence: CAG
gcccattcacctacccatgg

SEQ ID NO: 120959 - DNA, 20 bp, Artificial Sequence
  Description of Artificial Sequence: Synthetic oligonucleotide
  Target: LAMA2; (+) strand; PAM type: NRG; PAM sequence: AAG
gcgtgtgacctcaaccctga

SEQ ID NO: 120960 - DNA, 20 bp, Artificial Sequence
  Description of Artificial Sequence: Synthetic oligonucleotide
  Target: LAMA2; (+) strand; PAM type: NRG; PAM sequence: GAG
gtgtgacctcaaccctgaaa

SEQ ID NO: 120961 - DNA, 20 bp, Artificial Sequence
  Description of Artificial Sequence: Synthetic oligonucleotide
  Target: LAMA2; (+) strand; PAM type: NRG; PAM sequence: TAG
aaccctgaaagagtacaaat

SEQ ID NO: 120962 - DNA, 20 bp, Artificial Sequence
  Description of Artificial Sequence: Synthetic oligonucleotide
  Target: LAMA2; (+) strand; PAM type: NRG; PAM sequence: AAG
ctgaaagagtacaaattagt

SEQ ID NO: 120963 - DNA, 20 bp, Artificial Sequence
  Description of Artificial Sequence: Synthetic oligonucleotide
  Target: LAMA2; (+) strand; PAM type: NRG; PAM sequence: AAG
agagtacaaattagtaagta

SEQ ID NO: 120964 - DNA, 20 bp, Artificial Sequence
  Description of Artificial Sequence: Synthetic oligonucleotide
  Target: LAMA2; (+) strand; PAM type: NRG; PAM sequence: AGG
gagtacaaattagtaagtaa

SEQ ID NO: 120965 - DNA, 20 bp, Artificial Sequence
  Description of Artificial Sequence: Synthetic oligonucleotide
  Target: LAMA2; (+) strand; PAM type: NRG; PAM sequence: GGG
agtacaaattagtaagtaaa

SEQ ID NO: 120966 - DNA, 20 bp, Artificial Sequence
  Description of Artificial Sequence: Synthetic oligonucleotide
  Target: LAMA2; (+) strand; PAM type: NRG; PAM sequence: TAG
agtaagtaaagggcttcctt

SEQ ID NO: 120967 - DNA, 20 bp, Artificial Sequence
  Description of Artificial Sequence: Synthetic oligonucleotide
  Target: LAMA2; (+) strand; PAM type: NRG; PAM sequence: CAG
cttcctttagtgacatactt

SEQ ID NO: 120968 - DNA, 20 bp, Artificial Sequence
  Description of Artificial Sequence: Synthetic oligonucleotide
  Target: LAMA2; (+) strand; PAM type: NRG; PAM sequence: GAG
tcctttagtgacatacttca

SEQ ID NO: 120969 - DNA, 20 bp, Artificial Sequence
  Description of Artificial Sequence: Synthetic oligonucleotide
  Target: LAMA2; (+) strand; PAM type: NRG; PAM sequence: AGG
cctttagtgacatacttcag

SEQ ID NO: 120970 - DNA, 20 bp, Artificial Sequence
  Description of Artificial Sequence: Synthetic oligonucleotide
  Target: LAMA2; (+) strand; PAM type: NRG; PAM sequence: GAG
attttatttcccttttttgt

SEQ ID NO: 120971 - DNA, 20 bp, Artificial Sequence
  Description of Artificial Sequence: Synthetic oligonucleotide
  Target: LAMA2; (+) strand; PAM type: NRG; PAM sequence: AAG
tttgtgagatttcctatgaa

SEQ ID NO: 120972 - DNA, 20 bp, Artificial Sequence
  Description of Artificial Sequence: Synthetic oligonucleotide
  Target: LAMA2; (+) strand; PAM type: NRG; PAM sequence: TAG
tttaaacaatatttgccatt

SEQ ID NO: 120973 - DNA, 20 bp, Artificial Sequence
  Description of Artificial Sequence: Synthetic oligonucleotide
  Target: LAMA2; (+) strand; PAM type: NRG; PAM sequence: CAG
caatatttgccatttagatt

SEQ ID NO: 120974 - DNA, 20 bp, Artificial Sequence
  Description of Artificial Sequence: Synthetic oligonucleotide
  Target: LAMA2; (+) strand; PAM type: NRG; PAM sequence: CAG
agcactatgtcctgatatat

SEQ ID NO: 120975 - DNA, 20 bp, Artificial Sequence
  Description of Artificial Sequence: Synthetic oligonucleotide
  Target: LAMA2; (+) strand; PAM type: NRG; PAM sequence: AAG
actatgtcctgatatatcag

SEQ ID NO: 120976 - DNA, 20 bp, Artificial Sequence
  Description of Artificial Sequence: Synthetic oligonucleotide
  Target: LAMA2; (+) strand; PAM type: NRG; PAM sequence: GAG
tatgtcctgatatatcagaa

SEQ ID NO: 120977 - DNA, 20 bp, Artificial Sequence
  Description of Artificial Sequence: Synthetic oligonucleotide
  Target: LAMA2; (+) strand; PAM type: NRG; PAM sequence: AAG
ctatgaacttttttttttta

SEQ ID NO: 120978 - DNA, 20 bp, Artificial Sequence
  Description of Artificial Sequence: Synthetic oligonucleotide
  Target: LAMA2; (+) strand; PAM type: NRG; PAM sequence: TGG
ttttttttttaaagactcct

SEQ ID NO: 120979 - DNA, 20 bp, Artificial Sequence
  Description of Artificial Sequence: Synthetic oligonucleotide
  Target: LAMA2; (+) strand; PAM type: NRG; PAM sequence: GAG
ttttttttaaagactccttg

SEQ ID NO: 120980 - DNA, 20 bp, Artificial Sequence
  Description of Artificial Sequence: Synthetic oligonucleotide
  Target: LAMA2; (+) strand; PAM type: NRG; PAM sequence: TAG
ttttaaagactccttggaga

SEQ ID NO: 120981 - DNA, 20 bp, Artificial Sequence
  Description of Artificial Sequence: Synthetic oligonucleotide
  Target: LAMA2; (+) strand; PAM type: NRG; PAM sequence: CAG
gaatgaattcttaactgtgt

SEQ ID NO: 120982 - DNA, 20 bp, Artificial Sequence
  Description of Artificial Sequence: Synthetic oligonucleotide
  Target: LAMA2; (+) strand; PAM type: NRG; PAM sequence: AGG
aatgaattcttaactgtgtc

SEQ ID NO: 120983 - DNA, 20 bp, Artificial Sequence
  Description of Artificial Sequence: Synthetic oligonucleotide
  Target: LAMA2; (+) strand; PAM type: NRG; PAM sequence: GAG
caggcatgcctgaatttttt

SEQ ID NO: 120984 - DNA, 20 bp, Artificial Sequence
  Description of Artificial Sequence: Synthetic oligonucleotide
  Target: LAMA2; (+) strand; PAM type: NRG; PAM sequence: AAG
ctgaattttttgagtcatat

SEQ ID NO: 120985 - DNA, 20 bp, Artificial Sequence
  Description of Artificial Sequence: Synthetic oligonucleotide
  Target: LAMA2; (+) strand; PAM type: NRG; PAM sequence: GAG
gaattttttgagtcatataa

SEQ ID NO: 120986 - DNA, 20 bp, Artificial Sequence
  Description of Artificial Sequence: Synthetic oligonucleotide
  Target: LAMA2; (+) strand; PAM type: NRG; PAM sequence: TAG
ttgagtcatataagagtttg

SEQ ID NO: 120987 - DNA, 20 bp, Artificial Sequence
  Description of Artificial Sequence: Synthetic oligonucleotide
  Target: LAMA2; (+) strand; PAM type: NRG; PAM sequence: TAG
ataagagtttgtagcactcc

SEQ ID NO: 120988 - DNA, 20 bp, Artificial Sequence
  Description of Artificial Sequence: Synthetic oligonucleotide
  Target: LAMA2; (+) strand; PAM type: NRG; PAM sequence: TGG
cctagaattgttaacttaat

SEQ ID NO: 120989 - DNA, 20 bp, Artificial Sequence
  Description of Artificial Sequence: Synthetic oligonucleotide
  Target: LAMA2; (+) strand; PAM type: NRG; PAM sequence: AAG
gaattgttaacttaattggt

SEQ ID NO: 120990 - DNA, 20 bp, Artificial Sequence
  Description of Artificial Sequence: Synthetic oligonucleotide
  Target: LAMA2; (+) strand; PAM type: NRG; PAM sequence: AAG
tttctctttgttgttgtatg

SEQ ID NO: 120991 - DNA, 20 bp, Artificial Sequence
  Description of Artificial Sequence: Synthetic oligonucleotide
  Target: LAMA2; (+) strand; PAM type: NRG; PAM sequence: AAG
gtgttaaaccaaaaataatc

SEQ ID NO: 120992 - DNA, 20 bp, Artificial Sequence
  Description of Artificial Sequence: Synthetic oligonucleotide
  Target: LAMA2; (+) strand; PAM type: NRG; PAM sequence: AGG
tgttaaaccaaaaataatca

SEQ ID NO: 120993 - DNA, 20 bp, Artificial Sequence
  Description of Artificial Sequence: Synthetic oligonucleotide
  Target: LAMA2; (+) strand; PAM type: NRG; PAM sequence: CAG
aaccaaaaataatcaaggcc

SEQ ID NO: 120994 - DNA, 20 bp, Artificial Sequence
  Description of Artificial Sequence: Synthetic oligonucleotide
  Target: LAMA2; (+) strand; PAM type: NRG; PAM sequence: AGG
accaaaaataatcaaggccc

SEQ ID NO: 120995 - DNA, 20 bp, Artificial Sequence
  Description of Artificial Sequence: Synthetic oligonucleotide
  Target: LAMA2; (+) strand; PAM type: NRG; PAM sequence: GGG
ccaaaaataatcaaggccca

SEQ ID NO: 120996 - DNA, 20 bp, Artificial Sequence
  Description of Artificial Sequence: Synthetic oligonucleotide
  Target: LAMA2; (+) strand; PAM type: NRG; PAM sequence: TGG
tcaaggcccagggcttttcc

SEQ ID NO: 120997 - DNA, 20 bp, Artificial Sequence
  Description of Artificial Sequence: Synthetic oligonucleotide
  Target: LAMA2; (+) strand; PAM type: NRG; PAM sequence: TGG
ggcttttcctggtccattaa

SEQ ID NO: 120998 - DNA, 20 bp, Artificial Sequence
  Description of Artificial Sequence: Synthetic oligonucleotide
  Target: LAMA2; (+) strand; PAM type: NRG; PAM sequence: AAG
tccattaatggatatatgac

SEQ ID NO: 120999 - DNA, 20 bp, Artificial Sequence
  Description of Artificial Sequence: Synthetic oligonucleotide
  Target: LAMA2; (+) strand; PAM type: NRG; PAM sequence: TGG
aatggatatatgacaagtga

SEQ ID NO: 121000 - DNA, 20 bp, Artificial Sequence
  Description of Artificial Sequence: Synthetic oligonucleotide
  Target: LAMA2; (+) strand; PAM type: NRG; PAM sequence: AAG
tatatgacaagtgatggcaa

SEQ ID NO: 121001 - DNA, 20 bp, Artificial Sequence
  Description of Artificial Sequence: Synthetic oligonucleotide
  Target: LAMA2; (+) strand; PAM type: NRG; PAM sequence: AGG
atatgacaagtgatggcaaa

SEQ ID NO: 121002 - DNA, 20 bp, Artificial Sequence
  Description of Artificial Sequence: Synthetic oligonucleotide
  Target: LAMA2; (+) strand; PAM type: NRG; PAM sequence: TAG
gacaagtgatggcaaaagga

SEQ ID NO: 121003 - DNA, 20 bp, Artificial Sequence
  Description of Artificial Sequence: Synthetic oligonucleotide
  Target: LAMA2; (+) strand; PAM type: NRG; PAM sequence: CAG
tgatggcaaaaggatagtta

SEQ ID NO: 121004 - DNA, 20 bp, Artificial Sequence
  Description of Artificial Sequence: Synthetic oligonucleotide
  Target: LAMA2; (+) strand; PAM type: NRG; PAM sequence: TGG
ttattaacttaatcattaat

SEQ ID NO: 121005 - DNA, 20 bp, Artificial Sequence
  Description of Artificial Sequence: Synthetic oligonucleotide
  Target: LAMA2; (+) strand; PAM type: NRG; PAM sequence: CAG
aacttaatcattaattggct

SEQ ID NO: 121006 - DNA, 20 bp, Artificial Sequence
  Description of Artificial Sequence: Synthetic oligonucleotide
  Target: LAMA2; (+) strand; PAM type: NRG; PAM sequence: AGG
acttaatcattaattggctc

SEQ ID NO: 121007 - DNA, 20 bp, Artificial Sequence
  Description of Artificial Sequence: Synthetic oligonucleotide
  Target: LAMA2; (+) strand; PAM type: NRG; PAM sequence: GGG
cttaatcattaattggctca

SEQ ID NO: 121008 - DNA, 20 bp, Artificial Sequence
  Description of Artificial Sequence: Synthetic oligonucleotide
  Target: LAMA2; (+) strand; PAM type: NRG; PAM sequence: CAG
tcagggtatccccaaaaccg

SEQ ID NO: 121009 - DNA, 20 bp, Artificial Sequence
  Description of Artificial Sequence: Synthetic oligonucleotide
  Target: LAMA2; (+) strand; PAM type: NRG; PAM sequence: TGG
ggtatccccaaaaccgcagt

SEQ ID NO: 121010 - DNA, 20 bp, Artificial Sequence
  Description of Artificial Sequence: Synthetic oligonucleotide
  Target: LAMA2; (+) strand; PAM type: NRG; PAM sequence: AAG
caaaaccgcagttggaactg

SEQ ID NO: 121011 - DNA, 20 bp, Artificial Sequence
  Description of Artificial Sequence: Synthetic oligonucleotide
  Target: LAMA2; (+) strand; PAM type: NRG; PAM sequence: TAG
aaatgaccattttgttgtta

SEQ ID NO: 121012 - DNA, 20 bp, Artificial Sequence
  Description of Artificial Sequence: Synthetic oligonucleotide
  Target: LAMA2; (+) strand; PAM type: NRG; PAM sequence: AAG
gttatagcttttcttcacat

SEQ ID NO: 121013 - DNA, 20 bp, Artificial Sequence
  Description of Artificial Sequence: Synthetic oligonucleotide
  Target: LAMA2; (+) strand; PAM type: NRG; PAM sequence: AGG
ttatagcttttcttcacata

SEQ ID NO: 121014 - DNA, 20 bp, Artificial Sequence
  Description of Artificial Sequence: Synthetic oligonucleotide
  Target: LAMA2; (+) strand; PAM type: NRG; PAM sequence: AAG
cttcacataaggaaataaat

SEQ ID NO: 121015 - DNA, 20 bp, Artificial Sequence
  Description of Artificial Sequence: Synthetic oligonucleotide
  Target: LAMA2; (+) strand; PAM type: NRG; PAM sequence: AAG
taaggaaataaataagcaaa

SEQ ID NO: 121016 - DNA, 20 bp, Artificial Sequence
  Description of Artificial Sequence: Synthetic oligonucleotide
  Target: LAMA2; (+) strand; PAM type: NRG; PAM sequence: GAG
aggaaataaataagcaaaaa

SEQ ID NO: 121017 - DNA, 20 bp, Artificial Sequence
  Description of Artificial Sequence: Synthetic oligonucleotide
  Target: LAMA2; (+) strand; PAM type: NRG; PAM sequence: AGG
ggaaataaataagcaaaaag

SEQ ID NO: 121018 - DNA, 20 bp, Artificial Sequence
  Description of Artificial Sequence: Synthetic oligonucleotide
  Target: LAMA2; (+) strand; PAM type: NRG; PAM sequence: GGG
gaaataaataagcaaaaaga

SEQ ID NO: 121019 - DNA, 20 bp, Artificial Sequence
  Description of Artificial Sequence: Synthetic oligonucleotide
  Target: LAMA2; (+) strand; PAM type: NRG; PAM sequence: GAG
aataaataagcaaaaagagg

SEQ ID NO: 121020 - DNA, 20 bp, Artificial Sequence
  Description of Artificial Sequence: Synthetic oligonucleotide
  Target: LAMA2; (+) strand; PAM type: NRG; PAM sequence: AAG
tcttatctatttgttgatca

SEQ ID NO: 121021 - DNA, 20 bp, Artificial Sequence
  Description of Artificial Sequence: Synthetic oligonucleotide
  Target: LAMA2; (+) strand; PAM type: NRG; PAM sequence: TGG
agatcttgtaattctgctta

SEQ ID NO: 121022 - DNA, 20 bp, Artificial Sequence
  Description of Artificial Sequence: Synthetic oligonucleotide
  Target: LAMA2; (+) strand; PAM type: NRG; PAM sequence: CAG
attctgcttatggtaactcc

SEQ ID NO: 121023 - DNA, 20 bp, Artificial Sequence
  Description of Artificial Sequence: Synthetic oligonucleotide
  Target: LAMA2; (+) strand; PAM type: NRG; PAM sequence: GAG
tctgcttatggtaactccca

SEQ ID NO: 121024 - DNA, 20 bp, Artificial Sequence
  Description of Artificial Sequence: Synthetic oligonucleotide
  Target: LAMA2; (+) strand; PAM type: NRG; PAM sequence: TAG
gcttatggtaactcccagag

SEQ ID NO: 121025 - DNA, 20 bp, Artificial Sequence
  Description of Artificial Sequence: Synthetic oligonucleotide
  Target: LAMA2; (+) strand; PAM type: NRG; PAM sequence: GAG
ttatggtaactcccagagta

SEQ ID NO: 121026 - DNA, 20 bp, Artificial Sequence
  Description of Artificial Sequence: Synthetic oligonucleotide
  Target: LAMA2; (+) strand; PAM type: NRG; PAM sequence: CAG
ccagagtagagaatatcatc

SEQ ID NO: 121027 - DNA, 20 bp, Artificial Sequence
  Description of Artificial Sequence: Synthetic oligonucleotide
  Target: LAMA2; (+) strand; PAM type: NRG; PAM sequence: TGG
agtagagaatatcatccagt

SEQ ID NO: 121028 - DNA, 20 bp, Artificial Sequence
  Description of Artificial Sequence: Synthetic oligonucleotide
  Target: LAMA2; (+) strand; PAM type: NRG; PAM sequence: TGG
gttggccccctttatgaact

SEQ ID NO: 121029 - DNA, 20 bp, Artificial Sequence
  Description of Artificial Sequence: Synthetic oligonucleotide
  Target: LAMA2; (+) strand; PAM type: NRG; PAM sequence: TGG
tttatgaacttggattgcaa

SEQ ID NO: 121030 - DNA, 20 bp, Artificial Sequence
  Description of Artificial Sequence: Synthetic oligonucleotide
  Target: LAMA2; (+) strand; PAM type: NRG; PAM sequence: AAG
atgaacttggattgcaatgg

SEQ ID NO: 121031 - DNA, 20 bp, Artificial Sequence
  Description of Artificial Sequence: Synthetic oligonucleotide
  Target: LAMA2; (+) strand; PAM type: NRG; PAM sequence: CGG
gattgcaatggaagtcctat

SEQ ID NO: 121032 - DNA, 20 bp, Artificial Sequence
  Description of Artificial Sequence: Synthetic oligonucleotide
  Target: LAMA2; (+) strand; PAM type: NRG; PAM sequence: CAG
gcaatggaagtcctatcggc

SEQ ID NO: 121033 - DNA, 20 bp, Artificial Sequence
  Description of Artificial Sequence: Synthetic oligonucleotide
  Target: LAMA2; (+) strand; PAM type: NRG; PAM sequence: TAG
agtcctatcggccagtttac

SEQ ID NO: 121034 - DNA, 20 bp, Artificial Sequence
  Description of Artificial Sequence: Synthetic oligonucleotide
  Target: LAMA2; (+) strand; PAM type: NRG; PAM sequence: CAG
tcggccagtttactagttaa

SEQ ID NO: 121035 - DNA, 20 bp, Artificial Sequence
  Description of Artificial Sequence: Synthetic oligonucleotide
  Target: LAMA2; (+) strand; PAM type: NRG; PAM sequence: AGG
cggccagtttactagttaac

SEQ ID NO: 121036 - DNA, 20 bp, Artificial Sequence
  Description of Artificial Sequence: Synthetic oligonucleotide
  Target: LAMA2; (+) strand; PAM type: NRG; PAM sequence: GAG
gccagtttactagttaacag

SEQ ID NO: 121037 - DNA, 20 bp, Artificial Sequence
  Description of Artificial Sequence: Synthetic oligonucleotide
  Target: LAMA2; (+) strand; PAM type: NRG; PAM sequence: TAG
ttactagttaacaggagctg

SEQ ID NO: 121038 - DNA, 20 bp, Artificial Sequence
  Description of Artificial Sequence: Synthetic oligonucleotide
  Target: LAMA2; (+) strand; PAM type: NRG; PAM sequence: TAG
gttaacaggagctgtagtac

SEQ ID NO: 121039 - DNA, 20 bp, Artificial Sequence
  Description of Artificial Sequence: Synthetic oligonucleotide
  Target: LAMA2; (+) strand; PAM type: NRG; PAM sequence: GAG
taacaggagctgtagtacta

SEQ ID NO: 121040 - DNA, 20 bp, Artificial Sequence
  Description of Artificial Sequence: Synthetic oligonucleotide
  Target: LAMA2; (+) strand; PAM type: NRG; PAM sequence: CAG
tactagagctatgactgcat

SEQ ID NO: 121041 - DNA, 20 bp, Artificial Sequence
  Description of Artificial Sequence: Synthetic oligonucleotide
  Target: LAMA2; (+) strand; PAM type: NRG; PAM sequence: AAG
tagagctatgactgcatcag

SEQ ID NO: 121042 - DNA, 20 bp, Artificial Sequence
  Description of Artificial Sequence: Synthetic oligonucleotide
  Target: LAMA2; (+) strand; PAM type: NRG; PAM sequence: CAG
ctatgactgcatcagaagtc

SEQ ID NO: 121043 - DNA, 20 bp, Artificial Sequence
  Description of Artificial Sequence: Synthetic oligonucleotide
  Target: LAMA2; (+) strand; PAM type: NRG; PAM sequence: CAG
tgactgcatcagaagtccag

SEQ ID NO: 121044 - DNA, 20 bp, Artificial Sequence
  Description of Artificial Sequence: Synthetic oligonucleotide
  Target: LAMA2; (+) strand; PAM type: NRG; PAM sequence: TGG
gcatcagaagtccagcagtg

SEQ ID NO: 121045 - DNA, 20 bp, Artificial Sequence
  Description of Artificial Sequence: Synthetic oligonucleotide
  Target: LAMA2; (+) strand; PAM type: NRG; PAM sequence: GGG
catcagaagtccagcagtgt

SEQ ID NO: 121046 - DNA, 20 bp, Artificial Sequence
  Description of Artificial Sequence: Synthetic oligonucleotide
  Target: LAMA2; (+) strand; PAM type: NRG; PAM sequence: AAG
agtccagcagtgtgggcaca

SEQ ID NO: 121047 - DNA, 20 bp, Artificial Sequence
  Description of Artificial Sequence: Synthetic oligonucleotide
  Target: LAMA2; (+) strand; PAM type: NRG; PAM sequence: CAG
ccagcagtgtgggcacaaag

SEQ ID NO: 121048 - DNA, 20 bp, Artificial Sequence
  Description of Artificial Sequence: Synthetic oligonucleotide
  Target: LAMA2; (+) strand; PAM type: NRG; PAM sequence: CAG
agtgtgggcacaaagcagcg

SEQ ID NO: 121049 - DNA, 20 bp, Artificial Sequence
  Description of Artificial Sequence: Synthetic oligonucleotide
  Target: LAMA2; (+) strand; PAM type: NRG; PAM sequence: AAG
aaagcagcgcagcacttttg

SEQ ID NO: 121050 - DNA, 20 bp, Artificial Sequence
  Description of Artificial Sequence: Synthetic oligonucleotide
  Target: LAMA2; (+) strand; PAM type: NRG; PAM sequence: TAG
cagcgcagcacttttgaagt

SEQ ID NO: 121051 - DNA, 20 bp, Artificial Sequence
  Description of Artificial Sequence: Synthetic oligonucleotide
  Target: LAMA2; (+) strand; PAM type: NRG; PAM sequence: GAG
cacttttgaagttagacatc

SEQ ID NO: 121052 - DNA, 20 bp, Artificial Sequence
  Description of Artificial Sequence: Synthetic oligonucleotide
  Target: LAMA2; (+) strand; PAM type: NRG; PAM sequence: GAG
cttttgaagttagacatcga

SEQ ID NO: 121053 - DNA, 20 bp, Artificial Sequence
  Description of Artificial Sequence: Synthetic oligonucleotide
  Target: LAMA2; (+) strand; PAM type: NRG; PAM sequence: GAG
aagttagacatcgagagttt

SEQ ID NO: 121054 - DNA, 20 bp, Artificial Sequence
  Description of Artificial Sequence: Synthetic oligonucleotide
  Target: LAMA2; (+) strand; PAM type: NRG; PAM sequence: TAG
gacatcgagagtttgagtcc

SEQ ID NO: 121055 - DNA, 20 bp, Artificial Sequence
  Description of Artificial Sequence: Synthetic oligonucleotide
  Target: LAMA2; (+) strand; PAM type: NRG; PAM sequence: TGG
gtcctagattcacaccttgc

SEQ ID NO: 121056 - DNA, 20 bp, Artificial Sequence
  Description of Artificial Sequence: Synthetic oligonucleotide
  Target: LAMA2; (+) strand; PAM type: NRG; PAM sequence: GAG
agattcacaccttgctggct

SEQ ID NO: 121057 - DNA, 20 bp, Artificial Sequence
  Description of Artificial Sequence: Synthetic oligonucleotide
  Target: LAMA2; (+) strand; PAM type: NRG; PAM sequence: TAG
ctggctgagtgctgttgcaa

SEQ ID NO: 121058 - DNA, 20 bp, Artificial Sequence
  Description of Artificial Sequence: Synthetic oligonucleotide
  Target: LAMA2; (+) strand; PAM type: NRG; PAM sequence: GAG
gctgttgcaatagtgctgtt

SEQ ID NO: 121059 - DNA, 20 bp, Artificial Sequence
  Description of Artificial Sequence: Synthetic oligonucleotide
  Target: LAMA2; (+) strand; PAM type: NRG; PAM sequence: GAG
ttgcaatagtgctgttgagt

SEQ ID NO: 121060 - DNA, 20 bp, Artificial Sequence
  Description of Artificial Sequence: Synthetic oligonucleotide
  Target: LAMA2; (+) strand; PAM type: NRG; PAM sequence: AAG
acctgatcatcctcaccttt

SEQ ID NO: 121061 - DNA, 20 bp, Artificial Sequence
  Description of Artificial Sequence: Synthetic oligonucleotide
  Target: LAMA2; (+) strand; PAM type: NRG; PAM sequence: GAG
ctgatcatcctcacctttaa

SEQ ID NO: 121062 - DNA, 20 bp, Artificial Sequence
  Description of Artificial Sequence: Synthetic oligonucleotide
  Target: LAMA2; (+) strand; PAM type: NRG; PAM sequence: TAG
cacctttaagagaatgaaaa

SEQ ID NO: 121063 - DNA, 20 bp, Artificial Sequence
  Description of Artificial Sequence: Synthetic oligonucleotide
  Target: LAMA2; (+) strand; PAM type: NRG; PAM sequence: TAG
ctttaagagaatgaaaatag

SEQ ID NO: 121064 - DNA, 20 bp, Artificial Sequence
  Description of Artificial Sequence: Synthetic oligonucleotide
  Target: LAMA2; (+) strand; PAM type: NRG; PAM sequence: AAG
gaaaatagtagtgccttttt

SEQ ID NO: 121065 - DNA, 20 bp, Artificial Sequence
  Description of Artificial Sequence: Synthetic oligonucleotide
  Target: LAMA2; (+) strand; PAM type: NRG; PAM sequence: AGG
aaaatagtagtgccttttta

SEQ ID NO: 121066 - DNA, 20 bp, Artificial Sequence
  Description of Artificial Sequence: Synthetic oligonucleotide
  Target: LAMA2; (+) strand; PAM type: NRG; PAM sequence: TGG
gtgcctttttaaggattaaa

SEQ ID NO: 121067 - DNA, 20 bp, Artificial Sequence
  Description of Artificial Sequence: Synthetic oligonucleotide
  Target: LAMA2; (+) strand; PAM type: NRG; PAM sequence: AAG
tttaaggattaaatggaatt

SEQ ID NO: 121068 - DNA, 20 bp, Artificial Sequence
  Description of Artificial Sequence: Synthetic oligonucleotide
  Target: LAMA2; (+) strand; PAM type: NRG; PAM sequence: CAG
ttaagtatttaatttgtatt

SEQ ID NO: 121069 - DNA, 20 bp, Artificial Sequence
  Description of Artificial Sequence: Synthetic oligonucleotide
  Target: LAMA2; (+) strand; PAM type: NRG; PAM sequence: AAG
agtatttaatttgtattcag

SEQ ID NO: 121070 - DNA, 20 bp, Artificial Sequence
  Description of Artificial Sequence: Synthetic oligonucleotide
  Target: LAMA2; (+) strand; PAM type: NRG; PAM sequence: GAG
tatttaatttgtattcagaa

SEQ ID NO: 121071 - DNA, 20 bp, Artificial Sequence
  Description of Artificial Sequence: Synthetic oligonucleotide
  Target: LAMA2; (+) strand; PAM type: NRG; PAM sequence: AGG
atttaatttgtattcagaag

SEQ ID NO: 121072 - DNA, 20 bp, Artificial Sequence
  Description of Artificial Sequence: Synthetic oligonucleotide
  Target: LAMA2; (+) strand; PAM type: NRG; PAM sequence: TGG
aatttgtattcagaagagga

SEQ ID NO: 121073 - DNA, 20 bp, Artificial Sequence
  Description of Artificial Sequence: Synthetic oligonucleotide
  Target: LAMA2; (+) strand; PAM type: NRG; PAM sequence: AAG
gaggatggaatcatcattca

SEQ ID NO: 121074 - DNA, 20 bp, Artificial Sequence
  Description of Artificial Sequence: Synthetic oligonucleotide
  Target: LAMA2; (+) strand; PAM type: NRG; PAM sequence: CAG
tcattcaaagactttacaat

SEQ ID NO: 121075 - DNA, 20 bp, Artificial Sequence
  Description of Artificial Sequence: Synthetic oligonucleotide
  Target: LAMA2; (+) strand; PAM type: NRG; PAM sequence: TGG
ttcaaagactttacaatcag

SEQ ID NO: 121076 - DNA, 20 bp, Artificial Sequence
  Description of Artificial Sequence: Synthetic oligonucleotide
  Target: LAMA2; (+) strand; PAM type: NRG; PAM sequence: CAG
tttacaatcagtggtgtttt

SEQ ID NO: 121077 - DNA, 20 bp, Artificial Sequence
  Description of Artificial Sequence: Synthetic oligonucleotide
  Target: LAMA2; (+) strand; PAM type: NRG; PAM sequence: TGG
aatcagtggtgttttcagca

SEQ ID NO: 121078 - DNA, 20 bp, Artificial Sequence
  Description of Artificial Sequence: Synthetic oligonucleotide
  Target: LAMA2; (+) strand; PAM type: NRG; PAM sequence: TGG
gtgttttcagcatggacaac

SEQ ID NO: 121079 - DNA, 20 bp, Artificial Sequence
  Description of Artificial Sequence: Synthetic oligonucleotide
  Target: LAMA2; (+) strand; PAM type: NRG; PAM sequence: GAG
gttttcagcatggacaactg

SEQ ID NO: 121080 - DNA, 20 bp, Artificial Sequence
  Description of Artificial Sequence: Synthetic oligonucleotide
  Target: LAMA2; (+) strand; PAM type: NRG; PAM sequence: AAG
caactggagctttaacttaa

SEQ ID NO: 121081 - DNA, 20 bp, Artificial Sequence
  Description of Artificial Sequence: Synthetic oligonucleotide
  Target: LAMA2; (+) strand; PAM type: NRG; PAM sequence: TAG
gagctttaacttaaaagatc

SEQ ID NO: 121082 - DNA, 20 bp, Artificial Sequence
  Description of Artificial Sequence: Synthetic oligonucleotide
  Target: LAMA2; (+) strand; PAM type: NRG; PAM sequence: TGG
aacttaaaagatctagaaac

SEQ ID NO: 121083 - DNA, 20 bp, Artificial Sequence
  Description of Artificial Sequence: Synthetic oligonucleotide
  Target: LAMA2; (+) strand; PAM type: NRG; PAM sequence: GGG
acttaaaagatctagaaact

SEQ ID NO: 121084 - DNA, 20 bp, Artificial Sequence
  Description of Artificial Sequence: Synthetic oligonucleotide
  Target: LAMA2; (+) strand; PAM type: NRG; PAM sequence: TGG
gatctagaaactgggcttgt

SEQ ID NO: 121085 - DNA, 20 bp, Artificial Sequence
  Description of Artificial Sequence: Synthetic oligonucleotide
  Target: LAMA2; (+) strand; PAM type: NRG; PAM sequence: CAG
gaaactgggcttgttggcca

SEQ ID NO: 121086 - DNA, 20 bp, Artificial Sequence
  Description of Artificial Sequence: Synthetic oligonucleotide
  Target: LAMA2; (+) strand; PAM type: NRG; PAM sequence: TAG
gggcttgttggccacagttt

SEQ ID NO: 121087 - DNA, 20 bp, Artificial Sequence
  Description of Artificial Sequence: Synthetic oligonucleotide
  Target: LAMA2; (+) strand; PAM type: NRG; PAM sequence: TAG
ggccacagttttagtgtgat

SEQ ID NO: 121088 - DNA, 20 bp, Artificial Sequence
  Description of Artificial Sequence: Synthetic oligonucleotide
  Target: LAMA2; (+) strand; PAM type: NRG; PAM sequence: GAG
ccacagttttagtgtgatta

SEQ ID NO: 121089 - DNA, 20 bp, Artificial Sequence
  Description of Artificial Sequence: Synthetic oligonucleotide
  Target: LAMA2; (+) strand; PAM type: NRG; PAM sequence: AGG
cacagttttagtgtgattag

SEQ ID NO: 121090 - DNA, 20 bp, Artificial Sequence
  Description of Artificial Sequence: Synthetic oligonucleotide
  Target: LAMA2; (+) strand; PAM type: NRG; PAM sequence: TGG
agttttagtgtgattagagg

SEQ ID NO: 121091 - DNA, 20 bp, Artificial Sequence
  Description of Artificial Sequence: Synthetic oligonucleotide
  Target: LAMA2; (+) strand; PAM type: NRG; PAM sequence: TAG
agtgtgattagaggtggtca

SEQ ID NO: 121092 - DNA, 20 bp, Artificial Sequence
  Description of Artificial Sequence: Synthetic oligonucleotide
  Target: LAMA2; (+) strand; PAM type: NRG; PAM sequence: AGG
gtgtgattagaggtggtcat

SEQ ID NO: 121093 - DNA, 20 bp, Artificial Sequence
  Description of Artificial Sequence: Synthetic oligonucleotide
  Target: LAMA2; (+) strand; PAM type: NRG; PAM sequence: GGG
tgtgattagaggtggtcata

SEQ ID NO: 121094 - DNA, 20 bp, Artificial Sequence
  Description of Artificial Sequence: Synthetic oligonucleotide
  Target: LAMA2; (+) strand; PAM type: NRG; PAM sequence: TAG
gattagaggtggtcataggg

SEQ ID NO: 121095 - DNA, 20 bp, Artificial Sequence
  Description of Artificial Sequence: Synthetic oligonucleotide
  Target: LAMA2; (+) strand; PAM type: NRG; PAM sequence: AAG
aggtggtcatagggtagtca

SEQ ID NO: 121096 - DNA, 20 bp, Artificial Sequence
  Description of Artificial Sequence: Synthetic oligonucleotide
  Target: LAMA2; (+) strand; PAM type: NRG; PAM sequence: TGG
agtcaaagttgccactatcc

SEQ ID NO: 121097 - DNA, 20 bp, Artificial Sequence
  Description of Artificial Sequence: Synthetic oligonucleotide
  Target: LAMA2; (+) strand; PAM type: NRG; PAM sequence: TGG
agttgccactatcctggtta

SEQ ID NO: 121098 - DNA, 20 bp, Artificial Sequence
  Description of Artificial Sequence: Synthetic oligonucleotide
  Target: LAMA2; (+) strand; PAM type: NRG; PAM sequence: TGG
gccactatcctggttatgga

SEQ ID NO: 121099 - DNA, 20 bp, Artificial Sequence
  Description of Artificial Sequence: Synthetic oligonucleotide
  Target: LAMA2; (+) strand; PAM type: NRG; PAM sequence: TAG
atcctggttatggatggtaa

SEQ ID NO: 121100 - DNA, 20 bp, Artificial Sequence
  Description of Artificial Sequence: Synthetic oligonucleotide
  Target: LAMA2; (+) strand; PAM type: NRG; PAM sequence: TAG
atttatttgatgtcttcact

SEQ ID NO: 121101 - DNA, 20 bp, Artificial Sequence
  Description of Artificial Sequence: Synthetic oligonucleotide
  Target: LAMA2; (+) strand; PAM type: NRG; PAM sequence: TAG
gtcttcacttagttgtctcc

SEQ ID NO: 121102 - DNA, 20 bp, Artificial Sequence
  Description of Artificial Sequence: Synthetic oligonucleotide
  Target: LAMA2; (+) strand; PAM type: NRG; PAM sequence: AGG
tcttcacttagttgtctcct

SEQ ID NO: 121103 - DNA, 20 bp, Artificial Sequence
  Description of Artificial Sequence: Synthetic oligonucleotide
  Target: LAMA2; (+) strand; PAM type: NRG; PAM sequence: CAG
gttgtctcctaggtccttca

SEQ ID NO: 121104 - DNA, 20 bp, Artificial Sequence
  Description of Artificial Sequence: Synthetic oligonucleotide
  Target: LAMA2; (+) strand; PAM type: NRG; PAM sequence: CAG
ccttcacagcgaacatttgc

SEQ ID NO: 121105 - DNA, 20 bp, Artificial Sequence
  Description of Artificial Sequence: Synthetic oligonucleotide
  Target: LAMA2; (+) strand; PAM type: NRG; PAM sequence: AGG
cttcacagcgaacatttgcc

SEQ ID NO: 121106 - DNA, 20 bp, Artificial Sequence
  Description of Artificial Sequence: Synthetic oligonucleotide
  Target: LAMA2; (+) strand; PAM type: NRG; PAM sequence: TAG
acatttgccaggattgaaca

SEQ ID NO: 121107 - DNA, 20 bp, Artificial Sequence
  Description of Artificial Sequence: Synthetic oligonucleotide
  Target: LAMA2; (+) strand; PAM type: NRG; PAM sequence: AGG
catttgccaggattgaacat

SEQ ID NO: 121108 - DNA, 20 bp, Artificial Sequence
  Description of Artificial Sequence: Synthetic oligonucleotide
  Target: LAMA2; (+) strand; PAM type: NRG; PAM sequence: CAG
ttcctcaactcttttcccat

SEQ ID NO: 121109 - DNA, 20 bp, Artificial Sequence
  Description of Artificial Sequence: Synthetic oligonucleotide
  Target: LAMA2; (+) strand; PAM type: NRG; PAM sequence: CAG
cccatcagcttttcccaact

SEQ ID NO: 121110 - DNA, 20 bp, Artificial Sequence
  Description of Artificial Sequence: Synthetic oligonucleotide
  Target: LAMA2; (+) strand; PAM type: NRG; PAM sequence: TGG
gcttttcccaactcagaaaa

SEQ ID NO: 121111 - DNA, 20 bp, Artificial Sequence
  Description of Artificial Sequence: Synthetic oligonucleotide
  Target: LAMA2; (+) strand; PAM type: NRG; PAM sequence: TAG
cttgaatcaaatttgacatc

SEQ ID NO: 121112 - DNA, 20 bp, Artificial Sequence
  Description of Artificial Sequence: Synthetic oligonucleotide
  Target: LAMA2; (+) strand; PAM type: NRG; PAM sequence: AAG
gaatcaaatttgacatctag

SEQ ID NO: 121113 - DNA, 20 bp, Artificial Sequence
  Description of Artificial Sequence: Synthetic oligonucleotide
  Target: LAMA2; (+) strand; PAM type: NRG; PAM sequence: CAG
tctctctttccttcacctcc

SEQ ID NO: 121114 - DNA, 20 bp, Artificial Sequence
  Description of Artificial Sequence: Synthetic oligonucleotide
  Target: LAMA2; (+) strand; PAM type: NRG; PAM sequence: CAG
acctcccagattgaaataat

SEQ ID NO: 121115 - DNA, 20 bp, Artificial Sequence
  Description of Artificial Sequence: Synthetic oligonucleotide
  Target: LAMA2; (+) strand; PAM type: NRG; PAM sequence: CAG
atgtctgtcatccacaccac

SEQ ID NO: 121116 - DNA, 20 bp, Artificial Sequence
  Description of Artificial Sequence: Synthetic oligonucleotide
  Target: LAMA2; (+) strand; PAM type: NRG; PAM sequence: GAG
gtctgtcatccacaccacca

SEQ ID NO: 121117 - DNA, 20 bp, Artificial Sequence
  Description of Artificial Sequence: Synthetic oligonucleotide
  Target: LAMA2; (+) strand; PAM type: NRG; PAM sequence: TAG
tttttgtccctattgccttc

SEQ ID NO: 121118 - DNA, 20 bp, Artificial Sequence
  Description of Artificial Sequence: Synthetic oligonucleotide
  Target: LAMA2; (+) strand; PAM type: NRG; PAM sequence: CAG
ccctattgccttctagacca

SEQ ID NO: 121119 - DNA, 20 bp, Artificial Sequence
  Description of Artificial Sequence: Synthetic oligonucleotide
  Target: LAMA2; (+) strand; PAM type: NRG; PAM sequence: CAG
tttttttgcctatgcaactt

SEQ ID NO: 121120 - DNA, 20 bp, Artificial Sequence
  Description of Artificial Sequence: Synthetic oligonucleotide
  Target: LAMA2; (+) strand; PAM type: NRG; PAM sequence: CAG
ttttgcctatgcaacttcag

SEQ ID NO: 121121 - DNA, 20 bp, Artificial Sequence
  Description of Artificial Sequence: Synthetic oligonucleotide
  Target: LAMA2; (+) strand; PAM type: NRG; PAM sequence: CAG
atgcaacttcagcagcctcc

SEQ ID NO: 121122 - DNA, 20 bp, Artificial Sequence
  Description of Artificial Sequence: Synthetic oligonucleotide
  Target: LAMA2; (+) strand; PAM type: NRG; PAM sequence: TAG
acaatcaattttccatgcaa

SEQ ID NO: 121123 - DNA, 20 bp, Artificial Sequence
  Description of Artificial Sequence: Synthetic oligonucleotide
  Target: LAMA2; (+) strand; PAM type: NRG; PAM sequence: AGG
caatcaattttccatgcaat

SEQ ID NO: 121124 - DNA, 20 bp, Artificial Sequence
  Description of Artificial Sequence: Synthetic oligonucleotide
  Target: LAMA2; (+) strand; PAM type: NRG; PAM sequence: AAG
aattttccatgcaataggca

SEQ ID NO: 121125 - DNA, 20 bp, Artificial Sequence
  Description of Artificial Sequence: Synthetic oligonucleotide
  Target: LAMA2; (+) strand; PAM type: NRG; PAM sequence: TAG
ggcaaagtgaactctgaaaa

SEQ ID NO: 121126 - DNA, 20 bp, Artificial Sequence
  Description of Artificial Sequence: Synthetic oligonucleotide
  Target: LAMA2; (+) strand; PAM type: NRG; PAM sequence: CAG
gaactctgaaaatagtaaat

SEQ ID NO: 121127 - DNA, 20 bp, Artificial Sequence
  Description of Artificial Sequence: Synthetic oligonucleotide
  Target: LAMA2; (+) strand; PAM type: NRG; PAM sequence: TAG
ctgaaaatagtaaatcagat

SEQ ID NO: 121128 - DNA, 20 bp, Artificial Sequence
  Description of Artificial Sequence: Synthetic oligonucleotide
  Target: LAMA2; (+) strand; PAM type: NRG; PAM sequence: AAG
tttcaatgcatttctattat

SEQ ID NO: 121129 - DNA, 20 bp, Artificial Sequence
  Description of Artificial Sequence: Synthetic oligonucleotide
  Target: LAMA2; (+) strand; PAM type: NRG; PAM sequence: TAG
agaataaattctaaattcat

SEQ ID NO: 121130 - DNA, 20 bp, Artificial Sequence
  Description of Artificial Sequence: Synthetic oligonucleotide
  Target: LAMA2; (+) strand; PAM type: NRG; PAM sequence: AAG
ttctaaattcattagatttt

SEQ ID NO: 121131 - DNA, 20 bp, Artificial Sequence
  Description of Artificial Sequence: Synthetic oligonucleotide
  Target: LAMA2; (+) strand; PAM type: NRG; PAM sequence: CAG
gattttaagtctattcatga

SEQ ID NO: 121132 - DNA, 20 bp, Artificial Sequence
  Description of Artificial Sequence: Synthetic oligonucleotide
  Target: LAMA2; (+) strand; PAM type: NRG; PAM sequence: CAG
tctctttttctgttatttac

SEQ ID NO: 121133 - DNA, 20 bp, Artificial Sequence
  Description of Artificial Sequence: Synthetic oligonucleotide
  Target: LAMA2; (+) strand; PAM type: NRG; PAM sequence: CAG
tttctgttatttaccagcaa

SEQ ID NO: 121134 - DNA, 20 bp, Artificial Sequence
  Description of Artificial Sequence: Synthetic oligonucleotide
  Target: LAMA2; (+) strand; PAM type: NRG; PAM sequence: AAG
gttatttaccagcaacagta

SEQ ID NO: 121135 - DNA, 20 bp, Artificial Sequence
  Description of Artificial Sequence: Synthetic oligonucleotide
  Target: LAMA2; (+) strand; PAM type: NRG; PAM sequence: AAG
aaagactttttttccgtctc

SEQ ID NO: 121136 - DNA, 20 bp, Artificial Sequence
  Description of Artificial Sequence: Synthetic oligonucleotide
  Target: LAMA2; (+) strand; PAM type: NRG; PAM sequence: AGG
aagactttttttccgtctca

SEQ ID NO: 121137 - DNA, 20 bp, Artificial Sequence
  Description of Artificial Sequence: Synthetic oligonucleotide
  Target: LAMA2; (+) strand; PAM type: NRG; PAM sequence: CAG
gtccttgctgttcctctgtc

SEQ ID NO: 121138 - DNA, 20 bp, Artificial Sequence
  Description of Artificial Sequence: Synthetic oligonucleotide
  Target: LAMA2; (+) strand; PAM type: NRG; PAM sequence: GAG
ccttgctgttcctctgtcca

SEQ ID NO: 121139 - DNA, 20 bp, Artificial Sequence
  Description of Artificial Sequence: Synthetic oligonucleotide
  Target: LAMA2; (+) strand; PAM type: NRG; PAM sequence: TAG
tgtccagagcattgttccat

SEQ ID NO: 121140 - DNA, 20 bp, Artificial Sequence
  Description of Artificial Sequence: Synthetic oligonucleotide
  Target: LAMA2; (+) strand; PAM type: NRG; PAM sequence: TGG
ttgttccattagatccctga

SEQ ID NO: 121141 - DNA, 20 bp, Artificial Sequence
  Description of Artificial Sequence: Synthetic oligonucleotide
  Target: LAMA2; (+) strand; PAM type: NRG; PAM sequence: CAG
atgtcaaatgtcacctctta

SEQ ID NO: 121142 - DNA, 20 bp, Artificial Sequence
  Description of Artificial Sequence: Synthetic oligonucleotide
  Target: LAMA2; (+) strand; PAM type: NRG; PAM sequence: GAG
gtcaaatgtcacctcttaca

SEQ ID NO: 121143 - DNA, 20 bp, Artificial Sequence
  Description of Artificial Sequence: Synthetic oligonucleotide
  Target: LAMA2; (+) strand; PAM type: NRG; PAM sequence: AGG
tcaaatgtcacctcttacag

SEQ ID NO: 121144 - DNA, 20 bp, Artificial Sequence
  Description of Artificial Sequence: Synthetic oligonucleotide
  Target: LAMA2; (+) strand; PAM type: NRG; PAM sequence: CAG
acctcttacagaggcctttc

SEQ ID NO: 121145 - DNA, 20 bp, Artificial Sequence
  Description of Artificial Sequence: Synthetic oligonucleotide
  Target: LAMA2; (+) strand; PAM type: NRG; PAM sequence: GAG
ctcttacagaggcctttcca

SEQ ID NO: 121146 - DNA, 20 bp, Artificial Sequence
  Description of Artificial Sequence: Synthetic oligonucleotide
  Target: LAMA2; (+) strand; PAM type: NRG; PAM sequence: AGG
tcttacagaggcctttccag

SEQ ID NO: 121147 - DNA, 20 bp, Artificial Sequence
  Description of Artificial Sequence: Synthetic oligonucleotide
  Target: LAMA2; (+) strand; PAM type: NRG; PAM sequence: TAG
tccagaggaccactttaaat

SEQ ID NO: 121148 - DNA, 20 bp, Artificial Sequence
  Description of Artificial Sequence: Synthetic oligonucleotide
  Target: LAMA2; (+) strand; PAM type: NRG; PAM sequence: CAG
cactttaaattagcttctgt

SEQ ID NO: 121149 - DNA, 20 bp, Artificial Sequence
  Description of Artificial Sequence: Synthetic oligonucleotide
  Target: LAMA2; (+) strand; PAM type: NRG; PAM sequence: AGG
actttaaattagcttctgtc

SEQ ID NO: 121150 - DNA, 20 bp, Artificial Sequence
  Description of Artificial Sequence: Synthetic oligonucleotide
  Target: LAMA2; (+) strand; PAM type: NRG; PAM sequence: CAG
ttctttgttgtttgtctccc

SEQ ID NO: 121151 - DNA, 20 bp, Artificial Sequence
  Description of Artificial Sequence: Synthetic oligonucleotide
  Target: LAMA2; (+) strand; PAM type: NRG; PAM sequence: TGG
tgtttgtctccccagactgt

SEQ ID NO: 121152 - DNA, 20 bp, Artificial Sequence
  Description of Artificial Sequence: Synthetic oligonucleotide
  Target: LAMA2; (+) strand; PAM type: NRG; PAM sequence: TGG
atataaattttgttataaaa

SEQ ID NO: 121153 - DNA, 20 bp, Artificial Sequence
  Description of Artificial Sequence: Synthetic oligonucleotide
  Target: LAMA2; (+) strand; PAM type: NRG; PAM sequence: CAG
tataaaatggccttcatctc

SEQ ID NO: 121154 - DNA, 20 bp, Artificial Sequence
  Description of Artificial Sequence: Synthetic oligonucleotide
  Target: LAMA2; (+) strand; PAM type: NRG; PAM sequence: GAG
taaaatggccttcatctcca

SEQ ID NO: 121155 - DNA, 20 bp, Artificial Sequence
  Description of Artificial Sequence: Synthetic oligonucleotide
  Target: LAMA2; (+) strand; PAM type: NRG; PAM sequence: GAG
tggccttcatctccagagct

SEQ ID NO: 121156 - DNA, 20 bp, Artificial Sequence
  Description of Artificial Sequence: Synthetic oligonucleotide
  Target: LAMA2; (+) strand; PAM type: NRG; PAM sequence: AGG
ggccttcatctccagagctg

SEQ ID NO: 121157 - DNA, 20 bp, Artificial Sequence
  Description of Artificial Sequence: Synthetic oligonucleotide
  Target: LAMA2; (+) strand; PAM type: NRG; PAM sequence: GAG
ccttcatctccagagctgag

SEQ ID NO: 121158 - DNA, 20 bp, Artificial Sequence
  Description of Artificial Sequence: Synthetic oligonucleotide
  Target: LAMA2; (+) strand; PAM type: NRG; PAM sequence: TGG
ttttattttgaattaacaca

SEQ ID NO: 121159 - DNA, 20 bp, Artificial Sequence
  Description of Artificial Sequence: Synthetic oligonucleotide
  Target: LAMA2; (+) strand; PAM type: NRG; PAM sequence: CAG
aattaacacatggctgtgtt

SEQ ID NO: 121160 - DNA, 20 bp, Artificial Sequence
  Description of Artificial Sequence: Synthetic oligonucleotide
  Target: LAMA2; (+) strand; PAM type: NRG; PAM sequence: AGG
attaacacatggctgtgttc

SEQ ID NO: 121161 - DNA, 20 bp, Artificial Sequence
  Description of Artificial Sequence: Synthetic oligonucleotide
  Target: LAMA2; (+) strand; PAM type: NRG; PAM sequence: TGG
ctcttctgaatgtaattcca

SEQ ID NO: 121162 - DNA, 20 bp, Artificial Sequence
  Description of Artificial Sequence: Synthetic oligonucleotide
  Target: LAMA2; (+) strand; PAM type: NRG; PAM sequence: GAG
cttctgaatgtaattccatg

SEQ ID NO: 121163 - DNA, 20 bp, Artificial Sequence
  Description of Artificial Sequence: Synthetic oligonucleotide
  Target: LAMA2; (+) strand; PAM type: NRG; PAM sequence: AGG
ttctgaatgtaattccatgg

SEQ ID NO: 121164 - DNA, 20 bp, Artificial Sequence
  Description of Artificial Sequence: Synthetic oligonucleotide
  Target: LAMA2; (+) strand; PAM type: NRG; PAM sequence: GAG
ctgaatgtaattccatggag

SEQ ID NO: 121165 - DNA, 20 bp, Artificial Sequence
  Description of Artificial Sequence: Synthetic oligonucleotide
  Target: LAMA2; (+) strand; PAM type: NRG; PAM sequence: AGG
tgaatgtaattccatggagg

SEQ ID NO: 121166 - DNA, 20 bp, Artificial Sequence
  Description of Artificial Sequence: Synthetic oligonucleotide
  Target: LAMA2; (+) strand; PAM type: NRG; PAM sequence: TGG
tccatggaggaggtcaaaat

SEQ ID NO: 121167 - DNA, 20 bp, Artificial Sequence
  Description of Artificial Sequence: Synthetic oligonucleotide
  Target: LAMA2; (+) strand; PAM type: NRG; PAM sequence: TAG
caaaattggattcctgtatg

SEQ ID NO: 121168 - DNA, 20 bp, Artificial Sequence
  Description of Artificial Sequence: Synthetic oligonucleotide
  Target: LAMA2; (+) strand; PAM type: NRG; PAM sequence: CAG
tctgtcccgtttatgatttt

SEQ ID NO: 121169 - DNA, 20 bp, Artificial Sequence
  Description of Artificial Sequence: Synthetic oligonucleotide
  Target: LAMA2; (+) strand; PAM type: NRG; PAM sequence: TAG
atgattttcagttatataat

SEQ ID NO: 121170 - DNA, 20 bp, Artificial Sequence
  Description of Artificial Sequence: Synthetic oligonucleotide
  Target: LAMA2; (+) strand; PAM type: NRG; PAM sequence: TAG
ttttcagttatataattagt

SEQ ID NO: 121171 - DNA, 20 bp, Artificial Sequence
  Description of Artificial Sequence: Synthetic oligonucleotide
  Target: LAMA2; (+) strand; PAM type: NRG; PAM sequence: AAG
tcagttatataattagttag

SEQ ID NO: 121172 - DNA, 20 bp, Artificial Sequence
  Description of Artificial Sequence: Synthetic oligonucleotide
  Target: LAMA2; (+) strand; PAM type: NRG; PAM sequence: CAG
agaccaatccaatcatattt

SEQ ID NO: 121173 - DNA, 20 bp, Artificial Sequence
  Description of Artificial Sequence: Synthetic oligonucleotide
  Target: LAMA2; (+) strand; PAM type: NRG; PAM sequence: AAG
tcatatttcagataaacctc

SEQ ID NO: 121174 - DNA, 20 bp, Artificial Sequence
  Description of Artificial Sequence: Synthetic oligonucleotide
  Target: LAMA2; (+) strand; PAM type: NRG; PAM sequence: GAG
atatttcagataaacctcaa

SEQ ID NO: 121175 - DNA, 20 bp, Artificial Sequence
  Description of Artificial Sequence: Synthetic oligonucleotide
  Target: LAMA2; (+) strand; PAM type: NRG; PAM sequence: TGG
aacctcaagagcaattgcta

SEQ ID NO: 121176 - DNA, 20 bp, Artificial Sequence
  Description of Artificial Sequence: Synthetic oligonucleotide
  Target: LAMA2; (+) strand; PAM type: NRG; PAM sequence: CAG
ctcaagagcaattgctatgg

SEQ ID NO: 121177 - DNA, 20 bp, Artificial Sequence
  Description of Artificial Sequence: Synthetic oligonucleotide
  Target: LAMA2; (+) strand; PAM type: NRG; PAM sequence: GAG
caagagcaattgctatggca

SEQ ID NO: 121178 - DNA, 20 bp, Artificial Sequence
  Description of Artificial Sequence: Synthetic oligonucleotide
  Target: LAMA2; (+) strand; PAM type: NRG; PAM sequence: TAG
caattgctatggcagagaac

SEQ ID NO: 121179 - DNA, 20 bp, Artificial Sequence
  Description of Artificial Sequence: Synthetic oligonucleotide
  Target: LAMA2; (+) strand; PAM type: NRG; PAM sequence: AAG
ttgctatggcagagaactag

SEQ ID NO: 121180 - DNA, 20 bp, Artificial Sequence
  Description of Artificial Sequence: Synthetic oligonucleotide
  Target: LAMA2; (+) strand; PAM type: NRG; PAM sequence: AGG
tgctatggcagagaactaga

SEQ ID NO: 121181 - DNA, 20 bp, Artificial Sequence
  Description of Artificial Sequence: Synthetic oligonucleotide
  Target: LAMA2; (+) strand; PAM type: NRG; PAM sequence: GGG
gctatggcagagaactagaa

SEQ ID NO: 121182 - DNA, 20 bp, Artificial Sequence
  Description of Artificial Sequence: Synthetic oligonucleotide
  Target: LAMA2; (+) strand; PAM type: NRG; PAM sequence: TAG
tagaagggtatttaatcaac

SEQ ID NO: 121183 - DNA, 20 bp, Artificial Sequence
  Description of Artificial Sequence: Synthetic oligonucleotide
  Target: LAMA2; (+) strand; PAM type: NRG; PAM sequence: AAG
aatcaactagttccttttcc

SEQ ID NO: 121184 - DNA, 20 bp, Artificial Sequence
  Description of Artificial Sequence: Synthetic oligonucleotide
  Target: LAMA2; (+) strand; PAM type: NRG; PAM sequence: TAG
agttccttttccaagatctt

SEQ ID NO: 121185 - DNA, 20 bp, Artificial Sequence
  Description of Artificial Sequence: Synthetic oligonucleotide
  Target: LAMA2; (+) strand; PAM type: NRG; PAM sequence: CAG
caagatctttagctctttaa

SEQ ID NO: 121186 - DNA, 20 bp, Artificial Sequence
  Description of Artificial Sequence: Synthetic oligonucleotide
  Target: LAMA2; (+) strand; PAM type: NRG; PAM sequence: AAG
ttaacagttataaattaata

SEQ ID NO: 121187 - DNA, 20 bp, Artificial Sequence
  Description of Artificial Sequence: Synthetic oligonucleotide
  Target: LAMA2; (+) strand; PAM type: NRG; PAM sequence: TAG
taaagtatgttatataatgc

SEQ ID NO: 121188 - DNA, 20 bp, Artificial Sequence
  Description of Artificial Sequence: Synthetic oligonucleotide
  Target: LAMA2; (+) strand; PAM type: NRG; PAM sequence: AGG
aaagtatgttatataatgct

SEQ ID NO: 121189 - DNA, 20 bp, Artificial Sequence
  Description of Artificial Sequence: Synthetic oligonucleotide
  Target: LAMA2; (+) strand; PAM type: NRG; PAM sequence: CAG
tgtttctgttgctttatctc

SEQ ID NO: 121190 - DNA, 20 bp, Artificial Sequence
  Description of Artificial Sequence: Synthetic oligonucleotide
  Target: LAMA2; (+) strand; PAM type: NRG; PAM sequence: TAG
gttgctttatctccagcttc

SEQ ID NO: 121191 - DNA, 20 bp, Artificial Sequence
  Description of Artificial Sequence: Synthetic oligonucleotide
  Target: LAMA2; (+) strand; PAM type: NRG; PAM sequence: TGG
ccagcttctagtctgacata

SEQ ID NO: 121192 - DNA, 20 bp, Artificial Sequence
  Description of Artificial Sequence: Synthetic oligonucleotide
  Target: LAMA2; (+) strand; PAM type: NRG; PAM sequence: TAG
gcttctagtctgacatatgg

SEQ ID NO: 121193 - DNA, 20 bp, Artificial Sequence
  Description of Artificial Sequence: Synthetic oligonucleotide
  Target: LAMA2; (+) strand; PAM type: NRG; PAM sequence: AGG
cttctagtctgacatatggt

SEQ ID NO: 121194 - DNA, 20 bp, Artificial Sequence
  Description of Artificial Sequence: Synthetic oligonucleotide
  Target: LAMA2; (+) strand; PAM type: NRG; PAM sequence: TGG
tatggtaggcactcaaaaat

SEQ ID NO: 121195 - DNA, 20 bp, Artificial Sequence
  Description of Artificial Sequence: Synthetic oligonucleotide
  Target: LAMA2; (+) strand; PAM type: NRG; PAM sequence: AAG
aggcactcaaaaattggatg

SEQ ID NO: 121196 - DNA, 20 bp, Artificial Sequence
  Description of Artificial Sequence: Synthetic oligonucleotide
  Target: LAMA2; (+) strand; PAM type: NRG; PAM sequence: AAG
cactcaaaaattggatgaag

SEQ ID NO: 121197 - DNA, 20 bp, Artificial Sequence
  Description of Artificial Sequence: Synthetic oligonucleotide
  Target: LAMA2; (+) strand; PAM type: NRG; PAM sequence: CAG
tcaaaaattggatgaagaag

SEQ ID NO: 121198 - DNA, 20 bp, Artificial Sequence
  Description of Artificial Sequence: Synthetic oligonucleotide
  Target: LAMA2; (+) strand; PAM type: NRG; PAM sequence: TGG
gatgaagaagcagctctttt

SEQ ID NO: 121199 - DNA, 20 bp, Artificial Sequence
  Description of Artificial Sequence: Synthetic oligonucleotide
  Target: LAMA2; (+) strand; PAM type: NRG; PAM sequence: CAG
aagaagcagctctttttgga

SEQ ID NO: 121200 - DNA, 20 bp, Artificial Sequence
  Description of Artificial Sequence: Synthetic oligonucleotide
  Target: LAMA2; (+) strand; PAM type: NRG; PAM sequence: AAG
cagctctttttggacagacc

SEQ ID NO: 121201 - DNA, 20 bp, Artificial Sequence
  Description of Artificial Sequence: Synthetic oligonucleotide
  Target: LAMA2; (+) strand; PAM type: NRG; PAM sequence: GAG
gctctttttggacagaccaa

SEQ ID NO: 121202 - DNA, 20 bp, Artificial Sequence
  Description of Artificial Sequence: Synthetic oligonucleotide
  Target: LAMA2; (+) strand; PAM type: NRG; PAM sequence: TAG
ttttccccctgatcctttta

SEQ ID NO: 121203 - DNA, 20 bp, Artificial Sequence
  Description of Artificial Sequence: Synthetic oligonucleotide
  Target: LAMA2; (+) strand; PAM type: NRG; PAM sequence: AAG
gtatgaatgaatgtttgtat

SEQ ID NO: 121204 - DNA, 20 bp, Artificial Sequence
  Description of Artificial Sequence: Synthetic oligonucleotide
  Target: LAMA2; (+) strand; PAM type: NRG; PAM sequence: CAG
tttctacaaatactgaaaca

SEQ ID NO: 121205 - DNA, 20 bp, Artificial Sequence
  Description of Artificial Sequence: Synthetic oligonucleotide
  Target: LAMA2; (+) strand; PAM type: NRG; PAM sequence: TGG
acaaatactgaaacacagta

SEQ ID NO: 121206 - DNA, 20 bp, Artificial Sequence
  Description of Artificial Sequence: Synthetic oligonucleotide
  Target: LAMA2; (+) strand; PAM type: NRG; PAM sequence: CAG
atactgaaacacagtatgga

SEQ ID NO: 121207 - DNA, 20 bp, Artificial Sequence
  Description of Artificial Sequence: Synthetic oligonucleotide
  Target: LAMA2; (+) strand; PAM type: NRG; PAM sequence: GAG
aacacagtatggacagatat

SEQ ID NO: 121208 - DNA, 20 bp, Artificial Sequence
  Description of Artificial Sequence: Synthetic oligonucleotide
  Target: LAMA2; (+) strand; PAM type: NRG; PAM sequence: TAG
ttattattattaatatcacc

SEQ ID NO: 121209 - DNA, 20 bp, Artificial Sequence
  Description of Artificial Sequence: Synthetic oligonucleotide
  Target: LAMA2; (+) strand; PAM type: NRG; PAM sequence: TAG
tattaatatcacctagataa

SEQ ID NO: 121210 - DNA, 20 bp, Artificial Sequence
  Description of Artificial Sequence: Synthetic oligonucleotide
  Target: LAMA2; (+) strand; PAM type: NRG; PAM sequence: TAG
agataatagataaaatattt

SEQ ID NO: 121211 - DNA, 20 bp, Artificial Sequence
  Description of Artificial Sequence: Synthetic oligonucleotide
  Target: LAMA2; (+) strand; PAM type: NRG; PAM sequence: AAG
aatagataaaatattttaga

SEQ ID NO: 121212 - DNA, 20 bp, Artificial Sequence
  Description of Artificial Sequence: Synthetic oligonucleotide
  Target: LAMA2; (+) strand; PAM type: NRG; PAM sequence: GAG
gataaaatattttagaaagt

SEQ ID NO: 121213 - DNA, 20 bp, Artificial Sequence
  Description of Artificial Sequence: Synthetic oligonucleotide
  Target: LAMA2; (+) strand; PAM type: NRG; PAM sequence: AGG
ataaaatattttagaaagtg

SEQ ID NO: 121214 - DNA, 20 bp, Artificial Sequence
  Description of Artificial Sequence: Synthetic oligonucleotide
  Target: LAMA2; (+) strand; PAM type: NRG; PAM sequence: GAG
cttaaattatcttgcttctt

SEQ ID NO: 121215 - DNA, 20 bp, Artificial Sequence
  Description of Artificial Sequence: Synthetic oligonucleotide
  Target: LAMA2; (+) strand; PAM type: NRG; PAM sequence: AAG
gagttttttttttcccctct

SEQ ID NO: 121216 - DNA, 20 bp, Artificial Sequence
  Description of Artificial Sequence: Synthetic oligonucleotide
  Target: LAMA2; (+) strand; PAM type: NRG; PAM sequence: AGG
agttttttttttcccctcta

SEQ ID NO: 121217 - DNA, 20 bp, Artificial Sequence
  Description of Artificial Sequence: Synthetic oligonucleotide
  Target: LAMA2; (+) strand; PAM type: NRG; PAM sequence: CAG
tttcccctctaaggatattc

SEQ ID NO: 121218 - DNA, 20 bp, Artificial Sequence
  Description of Artificial Sequence: Synthetic oligonucleotide
  Target: LAMA2; (+) strand; PAM type: NRG; PAM sequence: AAG
ccctctaaggatattccagt

SEQ ID NO: 121219 - DNA, 20 bp, Artificial Sequence
  Description of Artificial Sequence: Synthetic oligonucleotide
  Target: LAMA2; (+) strand; PAM type: NRG; PAM sequence: GAG
ctctaaggatattccagtaa

SEQ ID NO: 121220 - DNA, 20 bp, Artificial Sequence
  Description of Artificial Sequence: Synthetic oligonucleotide
  Target: LAMA2; (+) strand; PAM type: NRG; PAM sequence: GAG
aggatattccagtaagagtt

SEQ ID NO: 121221 - DNA, 20 bp, Artificial Sequence
  Description of Artificial Sequence: Synthetic oligonucleotide
  Target: LAMA2; (+) strand; PAM type: NRG; PAM sequence: CAG
atattccagtaagagttgag

SEQ ID NO: 121222 - DNA, 20 bp, Artificial Sequence
  Description of Artificial Sequence: Synthetic oligonucleotide
  Target: LAMA2; (+) strand; PAM type: NRG; PAM sequence: AAG
gtaagagttgagcagtattt

SEQ ID NO: 121223 - DNA, 20 bp, Artificial Sequence
  Description of Artificial Sequence: Synthetic oligonucleotide
  Target: LAMA2; (+) strand; PAM type: NRG; PAM sequence: TGG
gttgagcagtatttaagctt

SEQ ID NO: 121224 - DNA, 20 bp, Artificial Sequence
  Description of Artificial Sequence: Synthetic oligonucleotide
  Target: LAMA2; (+) strand; PAM type: NRG; PAM sequence: AAG
gcagtatttaagctttggat

SEQ ID NO: 121225 - DNA, 20 bp, Artificial Sequence
  Description of Artificial Sequence: Synthetic oligonucleotide
  Target: LAMA2; (+) strand; PAM type: NRG; PAM sequence: AGG
cagtatttaagctttggata

SEQ ID NO: 121226 - DNA, 20 bp, Artificial Sequence
  Description of Artificial Sequence: Synthetic oligonucleotide
  Target: LAMA2; (+) strand; PAM type: NRG; PAM sequence: TGG
gataaggaatgcatatttct

SEQ ID NO: 121227 - DNA, 20 bp, Artificial Sequence
  Description of Artificial Sequence: Synthetic oligonucleotide
  Target: LAMA2; (+) strand; PAM type: NRG; PAM sequence: TAG
ggaatgcatatttcttggct

SEQ ID NO: 121228 - DNA, 20 bp, Artificial Sequence
  Description of Artificial Sequence: Synthetic oligonucleotide
  Target: LAMA2; (+) strand; PAM type: NRG; PAM sequence: CAG
tgcatatttcttggcttagt

SEQ ID NO: 121229 - DNA, 20 bp, Artificial Sequence
  Description of Artificial Sequence: Synthetic oligonucleotide
  Target: LAMA2; (+) strand; PAM type: NRG; PAM sequence: TGG
tggcttagtcagaacttttc

SEQ ID NO: 121230 - DNA, 20 bp, Artificial Sequence
  Description of Artificial Sequence: Synthetic oligonucleotide
  Target: LAMA2; (+) strand; PAM type: NRG; PAM sequence: TGG
ttagtcagaacttttctgga

SEQ ID NO: 121231 - DNA, 20 bp, Artificial Sequence
  Description of Artificial Sequence: Synthetic oligonucleotide
  Target: LAMA2; (+) strand; PAM type: NRG; PAM sequence: AAG
gtcagaacttttctggatgg

SEQ ID NO: 121232 - DNA, 20 bp, Artificial Sequence
  Description of Artificial Sequence: Synthetic oligonucleotide
  Target: LAMA2; (+) strand; PAM type: NRG; PAM sequence: AGG
tcagaacttttctggatgga

SEQ ID NO: 121233 - DNA, 20 bp, Artificial Sequence
  Description of Artificial Sequence: Synthetic oligonucleotide
  Target: LAMA2; (+) strand; PAM type: NRG; PAM sequence: TGG
ttctggatggaaggtctttt

SEQ ID NO: 121234 - DNA, 20 bp, Artificial Sequence
  Description of Artificial Sequence: Synthetic oligonucleotide
  Target: LAMA2; (+) strand; PAM type: NRG; PAM sequence: GAG
gatggaaggtctttttggat

SEQ ID NO: 121235 - DNA, 20 bp, Artificial Sequence
  Description of Artificial Sequence: Synthetic oligonucleotide
  Target: LAMA2; (+) strand; PAM type: NRG; PAM sequence: AAG
ggatgagaattatactacat

SEQ ID NO: 121236 - DNA, 20 bp, Artificial Sequence
  Description of Artificial Sequence: Synthetic oligonucleotide
  Target: LAMA2; (+) strand; PAM type: NRG; PAM sequence: AAG
taagattaaaatgcccattt

SEQ ID NO: 121237 - DNA, 20 bp, Artificial Sequence
  Description of Artificial Sequence: Synthetic oligonucleotide
  Target: LAMA2; (+) strand; PAM type: NRG; PAM sequence: TAG
cccatttaagatgtaaatta

SEQ ID NO: 121238 - DNA, 20 bp, Artificial Sequence
  Description of Artificial Sequence: Synthetic oligonucleotide
  Target: LAMA2; (+) strand; PAM type: NRG; PAM sequence: AGG
ccatttaagatgtaaattat

SEQ ID NO: 121239 - DNA, 20 bp, Artificial Sequence
  Description of Artificial Sequence: Synthetic oligonucleotide
  Target: LAMA2; (+) strand; PAM type: NRG; PAM sequence: GGG
catttaagatgtaaattata

SEQ ID NO: 121240 - DNA, 20 bp, Artificial Sequence
  Description of Artificial Sequence: Synthetic oligonucleotide
  Target: LAMA2; (+) strand; PAM type: NRG; PAM sequence: TAG
taaattatagggataaaata

SEQ ID NO: 121241 - DNA, 20 bp, Artificial Sequence
  Description of Artificial Sequence: Synthetic oligonucleotide
  Target: LAMA2; (+) strand; PAM type: NRG; PAM sequence: TGG
taaaatatagataactcaca

SEQ ID NO: 121242 - DNA, 20 bp, Artificial Sequence
  Description of Artificial Sequence: Synthetic oligonucleotide
  Target: LAMA2; (+) strand; PAM type: NRG; PAM sequence: GGG
aaaatatagataactcacat

SEQ ID NO: 121243 - DNA, 20 bp, Artificial Sequence
  Description of Artificial Sequence: Synthetic oligonucleotide
  Target: LAMA2; (+) strand; PAM type: NRG; PAM sequence: GGG
aaatatagataactcacatg

SEQ ID NO: 121244 - DNA, 20 bp, Artificial Sequence
  Description of Artificial Sequence: Synthetic oligonucleotide
  Target: LAMA2; (+) strand; PAM type: NRG; PAM sequence: TGG
ctcacatggggtgatttgat

SEQ ID NO: 121245 - DNA, 20 bp, Artificial Sequence
  Description of Artificial Sequence: Synthetic oligonucleotide
  Target: LAMA2; (+) strand; PAM type: NRG; PAM sequence: TAG
catttttctttgtttctttt

SEQ ID NO: 121246 - DNA, 20 bp, Artificial Sequence
  Description of Artificial Sequence: Synthetic oligonucleotide
  Target: LAMA2; (+) strand; PAM type: NRG; PAM sequence: AAG
tttctttttagataccacca

SEQ ID NO: 121247 - DNA, 20 bp, Artificial Sequence
  Description of Artificial Sequence: Synthetic oligonucleotide
  Target: LAMA2; (+) strand; PAM type: NRG; PAM sequence: CAG
caccaaagtccttcctattt

SEQ ID NO: 121248 - DNA, 20 bp, Artificial Sequence
  Description of Artificial Sequence: Synthetic oligonucleotide
  Target: LAMA2; (+) strand; PAM type: NRG; PAM sequence: AGG
accaaagtccttcctatttc

SEQ ID NO: 121249 - DNA, 20 bp, Artificial Sequence
  Description of Artificial Sequence: Synthetic oligonucleotide
  Target: LAMA2; (+) strand; PAM type: NRG; PAM sequence: AAG
tccttcctatttcaggcaaa

SEQ ID NO: 121250 - DNA, 20 bp, Artificial Sequence
  Description of Artificial Sequence: Synthetic oligonucleotide
  Target: LAMA2; (+) strand; PAM type: NRG; PAM sequence: AAG
atgttttaaaaaccactcac

SEQ ID NO: 121251 - DNA, 20 bp, Artificial Sequence
  Description of Artificial Sequence: Synthetic oligonucleotide
  Target: LAMA2; (+) strand; PAM type: NRG; PAM sequence: AGG
tgttttaaaaaccactcaca

SEQ ID NO: 121252 - DNA, 20 bp, Artificial Sequence
  Description of Artificial Sequence: Synthetic oligonucleotide
  Target: LAMA2; (+) strand; PAM type: NRG; PAM sequence: CAG
acaaggcctctacaatatgt

SEQ ID NO: 121253 - DNA, 20 bp, Artificial Sequence
  Description of Artificial Sequence: Synthetic oligonucleotide
  Target: LAMA2; (+) strand; PAM type: NRG; PAM sequence: TGG
tgcatgtgcgtgaatgtcct

SEQ ID NO: 121254 - DNA, 20 bp, Artificial Sequence
  Description of Artificial Sequence: Synthetic oligonucleotide
  Target: LAMA2; (+) strand; PAM type: NRG; PAM sequence: TGG
tgaatgtccttggatgtgta

SEQ ID NO: 121255 - DNA, 20 bp, Artificial Sequence
  Description of Artificial Sequence: Synthetic oligonucleotide
  Target: LAMA2; (+) strand; PAM type: NRG; PAM sequence: AAG
tgtgtatggtctcttgcttg

SEQ ID NO: 121256 - DNA, 20 bp, Artificial Sequence
  Description of Artificial Sequence: Synthetic oligonucleotide
  Target: LAMA2; (+) strand; PAM type: NRG; PAM sequence: CAG
ggtctcttgcttgaagttat

SEQ ID NO: 121257 - DNA, 20 bp, Artificial Sequence
  Description of Artificial Sequence: Synthetic oligonucleotide
  Target: LAMA2; (+) strand; PAM type: NRG; PAM sequence: CAG
tcttgcttgaagttatcagc

SEQ ID NO: 121258 - DNA, 20 bp, Artificial Sequence
  Description of Artificial Sequence: Synthetic oligonucleotide
  Target: LAMA2; (+) strand; PAM type: NRG; PAM sequence: TGG
gaagttatcagccagcaaaa

SEQ ID NO: 121259 - DNA, 20 bp, Artificial Sequence
  Description of Artificial Sequence: Synthetic oligonucleotide
  Target: LAMA2; (+) strand; PAM type: NRG; PAM sequence: TAG
cagcaaaatggtgaaatact

SEQ ID NO: 121260 - DNA, 20 bp, Artificial Sequence
  Description of Artificial Sequence: Synthetic oligonucleotide
  Target: LAMA2; (+) strand; PAM type: NRG; PAM sequence: TGG
cttagaattaatcaaacatc

SEQ ID NO: 121261 - DNA, 20 bp, Artificial Sequence
  Description of Artificial Sequence: Synthetic oligonucleotide
  Target: LAMA2; (+) strand; PAM type: NRG; PAM sequence: GAG
tagaattaatcaaacatctg

SEQ ID NO: 121262 - DNA, 20 bp, Artificial Sequence
  Description of Artificial Sequence: Synthetic oligonucleotide
  Target: LAMA2; (+) strand; PAM type: NRG; PAM sequence: AGG
agaattaatcaaacatctgg

SEQ ID NO: 121263 - DNA, 20 bp, Artificial Sequence
  Description of Artificial Sequence: Synthetic oligonucleotide
  Target: LAMA2; (+) strand; PAM type: NRG; PAM sequence: AAG
taatcaaacatctggaggtc

SEQ ID NO: 121264 - DNA, 20 bp, Artificial Sequence
  Description of Artificial Sequence: Synthetic oligonucleotide
  Target: LAMA2; (+) strand; PAM type: NRG; PAM sequence: CAG
catctggaggtcaagaaacg

SEQ ID NO: 121265 - DNA, 20 bp, Artificial Sequence
  Description of Artificial Sequence: Synthetic oligonucleotide
  Target: LAMA2; (+) strand; PAM type: NRG; PAM sequence: AAG
tatattcttctccttacttt

SEQ ID NO: 121266 - DNA, 20 bp, Artificial Sequence
  Description of Artificial Sequence: Synthetic oligonucleotide
  Target: LAMA2; (+) strand; PAM type: NRG; PAM sequence: AAG
gaatgaaactaataaaaaat

SEQ ID NO: 121267 - DNA, 20 bp, Artificial Sequence
  Description of Artificial Sequence: Synthetic oligonucleotide
  Target: LAMA2; (+) strand; PAM type: NRG; PAM sequence: AGG
aatgaaactaataaaaaata

SEQ ID NO: 121268 - DNA, 20 bp, Artificial Sequence
  Description of Artificial Sequence: Synthetic oligonucleotide
  Target: LAMA2; (+) strand; PAM type: NRG; PAM sequence: CGG
gaaactaataaaaaataagg

SEQ ID NO: 121269 - DNA, 20 bp, Artificial Sequence
  Description of Artificial Sequence: Synthetic oligonucleotide
  Target: LAMA2; (+) strand; PAM type: NRG; PAM sequence: GAG
aactaataaaaaataaggcg

SEQ ID NO: 121270 - DNA, 20 bp, Artificial Sequence
  Description of Artificial Sequence: Synthetic oligonucleotide
  Target: LAMA2; (+) strand; PAM type: NRG; PAM sequence: TGG
aataaaaaataaggcggagc

SEQ ID NO: 121271 - DNA, 20 bp, Artificial Sequence
  Description of Artificial Sequence: Synthetic oligonucleotide
  Target: LAMA2; (+) strand; PAM type: NRG; PAM sequence: CAG
ataaggcggagctggccctt

SEQ ID NO: 121272 - DNA, 20 bp, Artificial Sequence
  Description of Artificial Sequence: Synthetic oligonucleotide
  Target: LAMA2; (+) strand; PAM type: NRG; PAM sequence: AAG
gcggagctggcccttcagca

SEQ ID NO: 121273 - DNA, 20 bp, Artificial Sequence
  Description of Artificial Sequence: Synthetic oligonucleotide
  Target: LAMA2; (+) strand; PAM type: NRG; PAM sequence: AGG
cggagctggcccttcagcaa

SEQ ID NO: 121274 - DNA, 20 bp, Artificial Sequence
  Description of Artificial Sequence: Synthetic oligonucleotide
  Target: LAMA2; (+) strand; PAM type: NRG; PAM sequence: GAG
gagctggcccttcagcaaag

SEQ ID NO: 121275 - DNA, 20 bp, Artificial Sequence
  Description of Artificial Sequence: Synthetic oligonucleotide
  Target: LAMA2; (+) strand; PAM type: NRG; PAM sequence: AGG
agctggcccttcagcaaagg

SEQ ID NO: 121276 - DNA, 20 bp, Artificial Sequence
  Description of Artificial Sequence: Synthetic oligonucleotide
  Target: LAMA2; (+) strand; PAM type: NRG; PAM sequence: GGG
gctggcccttcagcaaagga

SEQ ID NO: 121277 - DNA, 20 bp, Artificial Sequence
  Description of Artificial Sequence: Synthetic oligonucleotide
  Target: LAMA2; (+) strand; PAM type: NRG; PAM sequence: GAG
aggagggatttttattatat

SEQ ID NO: 121278 - DNA, 20 bp, Artificial Sequence
  Description of Artificial Sequence: Synthetic oligonucleotide
  Target: LAMA2; (+) strand; PAM type: NRG; PAM sequence: GAG
tttattatatgagtgaattt

SEQ ID NO: 121279 - DNA, 20 bp, Artificial Sequence
  Description of Artificial Sequence: Synthetic oligonucleotide
  Target: LAMA2; (+) strand; PAM type: NRG; PAM sequence: GAG
tattatatgagtgaatttga

SEQ ID NO: 121280 - DNA, 20 bp, Artificial Sequence
  Description of Artificial Sequence: Synthetic oligonucleotide
  Target: LAMA2; (+) strand; PAM type: NRG; PAM sequence: AAG
atatgagtgaatttgagaga

SEQ ID NO: 121281 - DNA, 20 bp, Artificial Sequence
  Description of Artificial Sequence: Synthetic oligonucleotide
  Target: LAMA2; (+) strand; PAM type: NRG; PAM sequence: AGG
tatgagtgaatttgagagaa

SEQ ID NO: 121282 - DNA, 20 bp, Artificial Sequence
  Description of Artificial Sequence: Synthetic oligonucleotide
  Target: LAMA2; (+) strand; PAM type: NRG; PAM sequence: GGG
atgagtgaatttgagagaaa

SEQ ID NO: 121283 - DNA, 20 bp, Artificial Sequence
  Description of Artificial Sequence: Synthetic oligonucleotide
  Target: LAMA2; (+) strand; PAM type: NRG; PAM sequence: GGG
tgagtgaatttgagagaaag

SEQ ID NO: 121284 - DNA, 20 bp, Artificial Sequence
  Description of Artificial Sequence: Synthetic oligonucleotide
  Target: LAMA2; (+) strand; PAM type: NRG; PAM sequence: GGG
gagtgaatttgagagaaagg

SEQ ID NO: 121285 - DNA, 20 bp, Artificial Sequence
  Description of Artificial Sequence: Synthetic oligonucleotide
  Target: LAMA2; (+) strand; PAM type: NRG; PAM sequence: AAG
aatttgagagaaagggggac

SEQ ID NO: 121286 - DNA, 20 bp, Artificial Sequence
  Description of Artificial Sequence: Synthetic oligonucleotide
  Target: LAMA2; (+) strand; PAM type: NRG; PAM sequence: AAG
gagagaaagggggacaagaa

SEQ ID NO: 121287 - DNA, 20 bp, Artificial Sequence
  Description of Artificial Sequence: Synthetic oligonucleotide
  Target: LAMA2; (+) strand; PAM type: NRG; PAM sequence: GAG
ggggacaagaaaagaccttt

SEQ ID NO: 121288 - DNA, 20 bp, Artificial Sequence
  Description of Artificial Sequence: Synthetic oligonucleotide
  Target: LAMA2; (+) strand; PAM type: NRG; PAM sequence: CAG
caagaaaagacctttgagat

SEQ ID NO: 121289 - DNA, 20 bp, Artificial Sequence
  Description of Artificial Sequence: Synthetic oligonucleotide
  Target: LAMA2; (+) strand; PAM type: NRG; PAM sequence: AGG
aagaaaagacctttgagatc

SEQ ID NO: 121290 - DNA, 20 bp, Artificial Sequence
  Description of Artificial Sequence: Synthetic oligonucleotide
  Target: LAMA2; (+) strand; PAM type: NRG; PAM sequence: GGG
agaaaagacctttgagatca

SEQ ID NO: 121291 - DNA, 20 bp, Artificial Sequence
  Description of Artificial Sequence: Synthetic oligonucleotide
  Target: LAMA2; (+) strand; PAM type: NRG; PAM sequence: CAG
agacctttgagatcagggcc

SEQ ID NO: 121292 - DNA, 20 bp, Artificial Sequence
  Description of Artificial Sequence: Synthetic oligonucleotide
  Target: LAMA2; (+) strand; PAM type: NRG; PAM sequence: AGG
gacctttgagatcagggccc

SEQ ID NO: 121293 - DNA, 20 bp, Artificial Sequence
  Description of Artificial Sequence: Synthetic oligonucleotide
  Target: LAMA2; (+) strand; PAM type: NRG; PAM sequence: TAG
actactgtatccttactgca

SEQ ID NO: 121294 - DNA, 20 bp, Artificial Sequence
  Description of Artificial Sequence: Synthetic oligonucleotide
  Target: LAMA2; (+) strand; PAM type: NRG; PAM sequence: CAG
tgtatccttactgcatagca

SEQ ID NO: 121295 - DNA, 20 bp, Artificial Sequence
  Description of Artificial Sequence: Synthetic oligonucleotide
  Target: LAMA2; (+) strand; PAM type: NRG; PAM sequence: TGG
ttactgcatagcacagtgcc

SEQ ID NO: 121296 - DNA, 20 bp, Artificial Sequence
  Description of Artificial Sequence: Synthetic oligonucleotide
  Target: LAMA2; (+) strand; PAM type: NRG; PAM sequence: TAG
atagcacagtgcctggcacc

SEQ ID NO: 121297 - DNA, 20 bp, Artificial Sequence
  Description of Artificial Sequence: Synthetic oligonucleotide
  Target: LAMA2; (+) strand; PAM type: NRG; PAM sequence: TGG
acagtgcctggcacctagca

SEQ ID NO: 121298 - DNA, 20 bp, Artificial Sequence
  Description of Artificial Sequence: Synthetic oligonucleotide
  Target: LAMA2; (+) strand; PAM type: NRG; PAM sequence: CAG
cctggcacctagcatggtca

SEQ ID NO: 121299 - DNA, 20 bp, Artificial Sequence
  Description of Artificial Sequence: Synthetic oligonucleotide
  Target: LAMA2; (+) strand; PAM type: NRG; PAM sequence: AAG
cacctagcatggtcacagta

SEQ ID NO: 121300 - DNA, 20 bp, Artificial Sequence
  Description of Artificial Sequence: Synthetic oligonucleotide
  Target: LAMA2; (+) strand; PAM type: NRG; PAM sequence: TAG
tcacagtaaagattgaatga

SEQ ID NO: 121301 - DNA, 20 bp, Artificial Sequence
  Description of Artificial Sequence: Synthetic oligonucleotide
  Target: LAMA2; (+) strand; PAM type: NRG; PAM sequence: TAG
aagattgaatgatagaaaaa

SEQ ID NO: 121302 - DNA, 20 bp, Artificial Sequence
  Description of Artificial Sequence: Synthetic oligonucleotide
  Target: LAMA2; (+) strand; PAM type: NRG; PAM sequence: AAG
tgaatgatagaaaaatagaa

SEQ ID NO: 121303 - DNA, 20 bp, Artificial Sequence
  Description of Artificial Sequence: Synthetic oligonucleotide
  Target: LAMA2; (+) strand; PAM type: NRG; PAM sequence: AGG
gaatgatagaaaaatagaaa

SEQ ID NO: 121304 - DNA, 20 bp, Artificial Sequence
  Description of Artificial Sequence: Synthetic oligonucleotide
  Target: LAMA2; (+) strand; PAM type: NRG; PAM sequence: AAG
tgatagaaaaatagaaaagg

SEQ ID NO: 121305 - DNA, 20 bp, Artificial Sequence
  Description of Artificial Sequence: Synthetic oligonucleotide
  Target: LAMA2; (+) strand; PAM type: NRG; PAM sequence: GAG
atagaaaaatagaaaaggaa

SEQ ID NO: 121306 - DNA, 20 bp, Artificial Sequence
  Description of Artificial Sequence: Synthetic oligonucleotide
  Target: LAMA2; (+) strand; PAM type: NRG; PAM sequence: TAG
gaaaaggaagagctaacttt

SEQ ID NO: 121307 - DNA, 20 bp, Artificial Sequence
  Description of Artificial Sequence: Synthetic oligonucleotide
  Target: LAMA2; (+) strand; PAM type: NRG; PAM sequence: AGG
aaaaggaagagctaactttt

SEQ ID NO: 121308 - DNA, 20 bp, Artificial Sequence
  Description of Artificial Sequence: Synthetic oligonucleotide
  Target: LAMA2; (+) strand; PAM type: NRG; PAM sequence: AAG
aggaagagctaacttttagg

SEQ ID NO: 121309 - DNA, 20 bp, Artificial Sequence
  Description of Artificial Sequence: Synthetic oligonucleotide
  Target: LAMA2; (+) strand; PAM type: NRG; PAM sequence: AGG
ggaagagctaacttttagga

SEQ ID NO: 121310 - DNA, 20 bp, Artificial Sequence
  Description of Artificial Sequence: Synthetic oligonucleotide
  Target: LAMA2; (+) strand; PAM type: NRG; PAM sequence: CAG
gaacacttacttcccactta

SEQ ID NO: 121311 - DNA, 20 bp, Artificial Sequence
  Description of Artificial Sequence: Synthetic oligonucleotide
  Target: LAMA2; (+) strand; PAM type: NRG; PAM sequence: AAG
cagttattgaaaaaactatg

SEQ ID NO: 121312 - DNA, 20 bp, Artificial Sequence
  Description of Artificial Sequence: Synthetic oligonucleotide
  Target: LAMA2; (+) strand; PAM type: NRG; PAM sequence: TGG
tattgaaaaaactatgaaga

SEQ ID NO: 121313 - DNA, 20 bp, Artificial Sequence
  Description of Artificial Sequence: Synthetic oligonucleotide
  Target: LAMA2; (+) strand; PAM type: NRG; PAM sequence: CGG
ggttaacatcatgatactgt

SEQ ID NO: 121314 - DNA, 20 bp, Artificial Sequence
  Description of Artificial Sequence: Synthetic oligonucleotide
  Target: LAMA2; (+) strand; PAM type: NRG; PAM sequence: TAG
catcatgatactgtcggatg

SEQ ID NO: 121315 - DNA, 20 bp, Artificial Sequence
  Description of Artificial Sequence: Synthetic oligonucleotide
  Target: LAMA2; (+) strand; PAM type: NRG; PAM sequence: AGG
atcatgatactgtcggatgt

SEQ ID NO: 121316 - DNA, 20 bp, Artificial Sequence
  Description of Artificial Sequence: Synthetic oligonucleotide
  Target: LAMA2; (+) strand; PAM type: NRG; PAM sequence: CAG
atgatactgtcggatgtagg

SEQ ID NO: 121317 - DNA, 20 bp, Artificial Sequence
  Description of Artificial Sequence: Synthetic oligonucleotide
  Target: LAMA2; (+) strand; PAM type: NRG; PAM sequence: TAG
ttacaatttctactcaacga

SEQ ID NO: 121318 - DNA, 20 bp, Artificial Sequence
  Description of Artificial Sequence: Synthetic oligonucleotide
  Target: LAMA2; (+) strand; PAM type: NRG; PAM sequence: AAG
ttctactcaacgatagaaaa

SEQ ID NO: 121319 - DNA, 20 bp, Artificial Sequence
  Description of Artificial Sequence: Synthetic oligonucleotide
  Target: LAMA2; (+) strand; PAM type: NRG; PAM sequence: AAG
aacgatagaaaaaagaacta

SEQ ID NO: 121320 - DNA, 20 bp, Artificial Sequence
  Description of Artificial Sequence: Synthetic oligonucleotide
  Target: LAMA2; (+) strand; PAM type: NRG; PAM sequence: GAG
cgatagaaaaaagaactaaa

SEQ ID NO: 121321 - DNA, 20 bp, Artificial Sequence
  Description of Artificial Sequence: Synthetic oligonucleotide
  Target: LAMA2; (+) strand; PAM type: NRG; PAM sequence: CAG
aagaactaaagagaatttac

SEQ ID NO: 121322 - DNA, 20 bp, Artificial Sequence
  Description of Artificial Sequence: Synthetic oligonucleotide
  Target: LAMA2; (+) strand; PAM type: NRG; PAM sequence: AGG
agaactaaagagaatttacc

SEQ ID NO: 121323 - DNA, 20 bp, Artificial Sequence
  Description of Artificial Sequence: Synthetic oligonucleotide
  Target: LAMA2; (+) strand; PAM type: NRG; PAM sequence: AAG
gagaatttaccaggacatga

SEQ ID NO: 121324 - DNA, 20 bp, Artificial Sequence
  Description of Artificial Sequence: Synthetic oligonucleotide
  Target: LAMA2; (+) strand; PAM type: NRG; PAM sequence: AAG
atttaccaggacatgaaaga

SEQ ID NO: 121325 - DNA, 20 bp, Artificial Sequence
  Description of Artificial Sequence: Synthetic oligonucleotide
  Target: LAMA2; (+) strand; PAM type: NRG; PAM sequence: AGG
tttaccaggacatgaaagaa

SEQ ID NO: 121326 - DNA, 20 bp, Artificial Sequence
  Description of Artificial Sequence: Synthetic oligonucleotide
  Target: LAMA2; (+) strand; PAM type: NRG; PAM sequence: AAG
aggacatgaaagaaaggtgt

SEQ ID NO: 121327 - DNA, 20 bp, Artificial Sequence
  Description of Artificial Sequence: Synthetic oligonucleotide
  Target: LAMA2; (+) strand; PAM type: NRG; PAM sequence: TGG
gaaagaaaggtgtaagatca

SEQ ID NO: 121328 - DNA, 20 bp, Artificial Sequence
  Description of Artificial Sequence: Synthetic oligonucleotide
  Target: LAMA2; (+) strand; PAM type: NRG; PAM sequence: CAG
aagatcatggattcctgaaa

SEQ ID NO: 121329 - DNA, 20 bp, Artificial Sequence
  Description of Artificial Sequence: Synthetic oligonucleotide
  Target: LAMA2; (+) strand; PAM type: NRG; PAM sequence: AGG
agatcatggattcctgaaac

SEQ ID NO: 121330 - DNA, 20 bp, Artificial Sequence
  Description of Artificial Sequence: Synthetic oligonucleotide
  Target: LAMA2; (+) strand; PAM type: NRG; PAM sequence: AAG
ccaattaaatatttaaattt

SEQ ID NO: 121331 - DNA, 20 bp, Artificial Sequence
  Description of Artificial Sequence: Synthetic oligonucleotide
  Target: LAMA2; (+) strand; PAM type: NRG; PAM sequence: GAG
ttaaatatttaaatttaagt

SEQ ID NO: 121332 - DNA, 20 bp, Artificial Sequence
  Description of Artificial Sequence: Synthetic oligonucleotide
  Target: LAMA2; (+) strand; PAM type: NRG; PAM sequence: AGG
taaatatttaaatttaagtg

SEQ ID NO: 121333 - DNA, 20 bp, Artificial Sequence
  Description of Artificial Sequence: Synthetic oligonucleotide
  Target: LAMA2; (+) strand; PAM type: NRG; PAM sequence: TAG
ttaaatttaagtgaggattg

SEQ ID NO: 121334 - DNA, 20 bp, Artificial Sequence
  Description of Artificial Sequence: Synthetic oligonucleotide
  Target: LAMA2; (+) strand; PAM type: NRG; PAM sequence: AGG
taaatttaagtgaggattgt

SEQ ID NO: 121335 - DNA, 20 bp, Artificial Sequence
  Description of Artificial Sequence: Synthetic oligonucleotide
  Target: LAMA2; (+) strand; PAM type: NRG; PAM sequence: GAG
aatttaagtgaggattgtag

SEQ ID NO: 121336 - DNA, 20 bp, Artificial Sequence
  Description of Artificial Sequence: Synthetic oligonucleotide
  Target: LAMA2; (+) strand; PAM type: NRG; PAM sequence: CAG
tgaggattgtaggagtttaa

SEQ ID NO: 121337 - DNA, 20 bp, Artificial Sequence
  Description of Artificial Sequence: Synthetic oligonucleotide
  Target: LAMA2; (+) strand; PAM type: NRG; PAM sequence: TAG
cgccctgctgctttccttcc

SEQ ID NO: 121338 - DNA, 20 bp, Artificial Sequence
  Description of Artificial Sequence: Synthetic oligonucleotide
  Target: LAMA2; (+) strand; PAM type: NRG; PAM sequence: AGG
gccctgctgctttccttcct

SEQ ID NO: 121339 - DNA, 20 bp, Artificial Sequence
  Description of Artificial Sequence: Synthetic oligonucleotide
  Target: LAMA2; (+) strand; PAM type: NRG; PAM sequence: AAG
ctaggttctccacaccttca

SEQ ID NO: 121340 - DNA, 20 bp, Artificial Sequence
  Description of Artificial Sequence: Synthetic oligonucleotide
  Target: LAMA2; (+) strand; PAM type: NRG; PAM sequence: TGG
caccttcaaagctcatcact

SEQ ID NO: 121341 - DNA, 20 bp, Artificial Sequence
  Description of Artificial Sequence: Synthetic oligonucleotide
  Target: LAMA2; (+) strand; PAM type: NRG; PAM sequence: AAG
tcaaagctcatcacttggat

SEQ ID NO: 121342 - DNA, 20 bp, Artificial Sequence
  Description of Artificial Sequence: Synthetic oligonucleotide
  Target: LAMA2; (+) strand; PAM type: NRG; PAM sequence: TGG
ttactttttccaaatcaatc

SEQ ID NO: 121343 - DNA, 20 bp, Artificial Sequence
  Description of Artificial Sequence: Synthetic oligonucleotide
  Target: LAMA2; (+) strand; PAM type: NRG; PAM sequence: AAG
gaaaactcccctctttcact

SEQ ID NO: 121344 - DNA, 20 bp, Artificial Sequence
  Description of Artificial Sequence: Synthetic oligonucleotide
  Target: LAMA2; (+) strand; PAM type: NRG; PAM sequence: AGG
aaaactcccctctttcacta

SEQ ID NO: 121345 - DNA, 20 bp, Artificial Sequence
  Description of Artificial Sequence: Synthetic oligonucleotide
  Target: LAMA2; (+) strand; PAM type: NRG; PAM sequence: GAG
cctctttcactaaggtattt

SEQ ID NO: 121346 - DNA, 20 bp, Artificial Sequence
  Description of Artificial Sequence: Synthetic oligonucleotide
  Target: LAMA2; (+) strand; PAM type: NRG; PAM sequence: AAG
actaaggtatttgagccatc

SEQ ID NO: 121347 - DNA, 20 bp, Artificial Sequence
  Description of Artificial Sequence: Synthetic oligonucleotide
  Target: LAMA2; (+) strand; PAM type: NRG; PAM sequence: TAG
atcaagaacaccctcctgtc

SEQ ID NO: 121348 - DNA, 20 bp, Artificial Sequence
  Description of Artificial Sequence: Synthetic oligonucleotide
  Target: LAMA2; (+) strand; PAM type: NRG; PAM sequence: AGG
tcaagaacaccctcctgtct

SEQ ID NO: 121349 - DNA, 20 bp, Artificial Sequence
  Description of Artificial Sequence: Synthetic oligonucleotide
  Target: LAMA2; (+) strand; PAM type: NRG; PAM sequence: TGG
aacaccctcctgtctaggca

SEQ ID NO: 121350 - DNA, 20 bp, Artificial Sequence
  Description of Artificial Sequence: Synthetic oligonucleotide
  Target: LAMA2; (+) strand; PAM type: NRG; PAM sequence: TGG
accctcctgtctaggcatgg

SEQ ID NO: 121351 - DNA, 20 bp, Artificial Sequence
  Description of Artificial Sequence: Synthetic oligonucleotide
  Target: LAMA2; (+) strand; PAM type: NRG; PAM sequence: CAG
tgtctaggcatggtggctca

SEQ ID NO: 121352 - DNA, 20 bp, Artificial Sequence
  Description of Artificial Sequence: Synthetic oligonucleotide
  Target: LAMA2; (+) strand; PAM type: NRG; PAM sequence: CAG
gtggctcacagctataatcc

SEQ ID NO: 121353 - DNA, 20 bp, Artificial Sequence
  Description of Artificial Sequence: Synthetic oligonucleotide
  Target: LAMA2; (+) strand; PAM type: NRG; PAM sequence: TGG
cagctataatcccagctctt

SEQ ID NO: 121354 - DNA, 20 bp, Artificial Sequence
  Description of Artificial Sequence: Synthetic oligonucleotide
  Target: LAMA2; (+) strand; PAM type: NRG; PAM sequence: AAG
ctataatcccagctctttgg

SEQ ID NO: 121355 - DNA, 20 bp, Artificial Sequence
  Description of Artificial Sequence: Synthetic oligonucleotide
  Target: LAMA2; (+) strand; PAM type: NRG; PAM sequence: AGG
tataatcccagctctttgga

SEQ ID NO: 121356 - DNA, 20 bp, Artificial Sequence
  Description of Artificial Sequence: Synthetic oligonucleotide
  Target: LAMA2; (+) strand; PAM type: NRG; PAM sequence: AAG
tcccagctctttggaaggcc

SEQ ID NO: 121357 - DNA, 20 bp, Artificial Sequence
  Description of Artificial Sequence: Synthetic oligonucleotide
  Target: LAMA2; (+) strand; PAM type: NRG; PAM sequence: AGG
cccagctctttggaaggcca

SEQ ID NO: 121358 - DNA, 20 bp, Artificial Sequence
  Description of Artificial Sequence: Synthetic oligonucleotide
  Target: LAMA2; (+) strand; PAM type: NRG; PAM sequence: CAG
agctctttggaaggccaagg

SEQ ID NO: 121359 - DNA, 20 bp, Artificial Sequence
  Description of Artificial Sequence: Synthetic oligonucleotide
  Target: LAMA2; (+) strand; PAM type: NRG; PAM sequence: AGG
gctctttggaaggccaaggc

SEQ ID NO: 121360 - DNA, 20 bp, Artificial Sequence
  Description of Artificial Sequence: Synthetic oligonucleotide
  Target: LAMA2; (+) strand; PAM type: NRG; PAM sequence: GAG
tctttggaaggccaaggcag

SEQ ID NO: 121361 - DNA, 20 bp, Artificial Sequence
  Description of Artificial Sequence: Synthetic oligonucleotide
  Target: LAMA2; (+) strand; PAM type: NRG; PAM sequence: AGG
ctttggaaggccaaggcagg

SEQ ID NO: 121362 - DNA, 20 bp, Artificial Sequence
  Description of Artificial Sequence: Synthetic oligonucleotide
  Target: LAMA2; (+) strand; PAM type: NRG; PAM sequence: TGG
ggaaggccaaggcaggagga

SEQ ID NO: 121363 - DNA, 20 bp, Artificial Sequence
  Description of Artificial Sequence: Synthetic oligonucleotide
  Target: LAMA2; (+) strand; PAM type: NRG; PAM sequence: GAG
ccaaggcaggaggatggctt

SEQ ID NO: 121364 - DNA, 20 bp, Artificial Sequence
  Description of Artificial Sequence: Synthetic oligonucleotide
  Target: LAMA2; (+) strand; PAM type: NRG; PAM sequence: AGG
caaggcaggaggatggcttg

SEQ ID NO: 121365 - DNA, 20 bp, Artificial Sequence
  Description of Artificial Sequence: Synthetic oligonucleotide
  Target: LAMA2; (+) strand; PAM type: NRG; PAM sequence: CAG
gcaggaggatggcttgaggc

SEQ ID NO: 121366 - DNA, 20 bp, Artificial Sequence
  Description of Artificial Sequence: Synthetic oligonucleotide
  Target: LAMA2; (+) strand; PAM type: NRG; PAM sequence: AGG
caggaggatggcttgaggcc

SEQ ID NO: 121367 - DNA, 20 bp, Artificial Sequence
  Description of Artificial Sequence: Synthetic oligonucleotide
  Target: LAMA2; (+) strand; PAM type: NRG; PAM sequence: GAG
ggaggatggcttgaggccag

SEQ ID NO: 121368 - DNA, 20 bp, Artificial Sequence
  Description of Artificial Sequence: Synthetic oligonucleotide
  Target: LAMA2; (+) strand; PAM type: NRG; PAM sequence: AAG
tggcttgaggccaggagttc

SEQ ID NO: 121369 - DNA, 20 bp, Artificial Sequence
  Description of Artificial Sequence: Synthetic oligonucleotide
  Target: LAMA2; (+) strand; PAM type: NRG; PAM sequence: CAG
tgaggccaggagttcaagac

SEQ ID NO: 121370 - DNA, 20 bp, Artificial Sequence
  Description of Artificial Sequence: Synthetic oligonucleotide
  Target: LAMA2; (+) strand; PAM type: NRG; PAM sequence: TAG
ccaggagttcaagaccagct

SEQ ID NO: 121371 - DNA, 20 bp, Artificial Sequence
  Description of Artificial Sequence: Synthetic oligonucleotide
  Target: LAMA2; (+) strand; PAM type: NRG; PAM sequence: AGG
caggagttcaagaccagctt

SEQ ID NO: 121372 - DNA, 20 bp, Artificial Sequence
  Description of Artificial Sequence: Synthetic oligonucleotide
  Target: LAMA2; (+) strand; PAM type: NRG; PAM sequence: TAG
caagaccagcttaggcaaaa

SEQ ID NO: 121373 - DNA, 20 bp, Artificial Sequence
  Description of Artificial Sequence: Synthetic oligonucleotide
  Target: LAMA2; (+) strand; PAM type: NRG; PAM sequence: GAG
accagcttaggcaaaatagt

SEQ ID NO: 121374 - DNA, 20 bp, Artificial Sequence
  Description of Artificial Sequence: Synthetic oligonucleotide
  Target: LAMA2; (+) strand; PAM type: NRG; PAM sequence: TAG
caaaaataaaatgaaaaaat

SEQ ID NO: 121375 - DNA, 20 bp, Artificial Sequence
  Description of Artificial Sequence: Synthetic oligonucleotide
  Target: LAMA2; (+) strand; PAM type: NRG; PAM sequence: TGG
atgaaaaaattagctgcgtg

SEQ ID NO: 121376 - DNA, 20 bp, Artificial Sequence
  Description of Artificial Sequence: Synthetic oligonucleotide
  Target: LAMA2; (+) strand; PAM type: NRG; PAM sequence: TGG
aaaaaattagctgcgtgtgg

SEQ ID NO: 121377 - DNA, 20 bp, Artificial Sequence
  Description of Artificial Sequence: Synthetic oligonucleotide
  Target: LAMA2; (+) strand; PAM type: NRG; PAM sequence: CAG
ctgcgtgtggtggcacatgc

SEQ ID NO: 121378 - DNA, 20 bp, Artificial Sequence
  Description of Artificial Sequence: Synthetic oligonucleotide
  Target: LAMA2; (+) strand; PAM type: NRG; PAM sequence: TGG
cgtgtggtggcacatgccag

SEQ ID NO: 121379 - DNA, 20 bp, Artificial Sequence
  Description of Artificial Sequence: Synthetic oligonucleotide
  Target: LAMA2; (+) strand; PAM type: NRG; PAM sequence: CAG
gtggcacatgccagtggtcc

SEQ ID NO: 121380 - DNA, 20 bp, Artificial Sequence
  Description of Artificial Sequence: Synthetic oligonucleotide
  Target: LAMA2; (+) strand; PAM type: NRG; PAM sequence: CAG
tgccagtggtcccagctact

SEQ ID NO: 121381 - DNA, 20 bp, Artificial Sequence
  Description of Artificial Sequence: Synthetic oligonucleotide
  Target: LAMA2; (+) strand; PAM type: NRG; PAM sequence: AGG
gccagtggtcccagctactc

SEQ ID NO: 121382 - DNA, 20 bp, Artificial Sequence
  Description of Artificial Sequence: Synthetic oligonucleotide
  Target: LAMA2; (+) strand; PAM type: NRG; PAM sequence: GAG
cagtggtcccagctactcag

SEQ ID NO: 121383 - DNA, 20 bp, Artificial Sequence
  Description of Artificial Sequence: Synthetic oligonucleotide
  Target: LAMA2; (+) strand; PAM type: NRG; PAM sequence: AGG
agtggtcccagctactcagg

SEQ ID NO: 121384 - DNA, 20 bp, Artificial Sequence
  Description of Artificial Sequence: Synthetic oligonucleotide
  Target: LAMA2; (+) strand; PAM type: NRG; PAM sequence: GAG
tcccagctactcaggaggct

SEQ ID NO: 121385 - DNA, 20 bp, Artificial Sequence
  Description of Artificial Sequence: Synthetic oligonucleotide
  Target: LAMA2; (+) strand; PAM type: NRG; PAM sequence: TGG
agctactcaggaggctgaga

SEQ ID NO: 121386 - DNA, 20 bp, Artificial Sequence
  Description of Artificial Sequence: Synthetic oligonucleotide
  Target: LAMA2; (+) strand; PAM type: NRG; PAM sequence: GGG
gctactcaggaggctgagat

SEQ ID NO: 121387 - DNA, 20 bp, Artificial Sequence
  Description of Artificial Sequence: Synthetic oligonucleotide
  Target: LAMA2; (+) strand; PAM type: NRG; PAM sequence: AAG
actcaggaggctgagatggg

SEQ ID NO: 121388 - DNA, 20 bp, Artificial Sequence
  Description of Artificial Sequence: Synthetic oligonucleotide
  Target: LAMA2; (+) strand; PAM type: NRG; PAM sequence: CGG
atgggaagattacttgaacc

SEQ ID NO: 121389 - DNA, 20 bp, Artificial Sequence
  Description of Artificial Sequence: Synthetic oligonucleotide
  Target: LAMA2; (+) strand; PAM type: NRG; PAM sequence: GGG
tgggaagattacttgaaccc

SEQ ID NO: 121390 - DNA, 20 bp, Artificial Sequence
  Description of Artificial Sequence: Synthetic oligonucleotide
  Target: LAMA2; (+) strand; PAM type: NRG; PAM sequence: GAG
ggaagattacttgaacccgg

SEQ ID NO: 121391 - DNA, 20 bp, Artificial Sequence
  Description of Artificial Sequence: Synthetic oligonucleotide
  Target: LAMA2; (+) strand; PAM type: NRG; PAM sequence: AGG
gaagattacttgaacccggg

SEQ ID NO: 121392 - DNA, 20 bp, Artificial Sequence
  Description of Artificial Sequence: Synthetic oligonucleotide
  Target: LAMA2; (+) strand; PAM type: NRG; PAM sequence: GAG
ttacttgaacccgggaggtc

SEQ ID NO: 121393 - DNA, 20 bp, Artificial Sequence
  Description of Artificial Sequence: Synthetic oligonucleotide
  Target: LAMA2; (+) strand; PAM type: NRG; PAM sequence: AGG
tacttgaacccgggaggtcg

SEQ ID NO: 121394 - DNA, 20 bp, Artificial Sequence
  Description of Artificial Sequence: Synthetic oligonucleotide
  Target: LAMA2; (+) strand; PAM type: NRG; PAM sequence: CAG
aacccgggaggtcgaggctg

SEQ ID NO: 121395 - DNA, 20 bp, Artificial Sequence
  Description of Artificial Sequence: Synthetic oligonucleotide
  Target: LAMA2; (+) strand; PAM type: NRG; PAM sequence: TAG
atgatcacaccactgcactt

SEQ ID NO: 121396 - DNA, 20 bp, Artificial Sequence
  Description of Artificial Sequence: Synthetic oligonucleotide
  Target: LAMA2; (+) strand; PAM type: NRG; PAM sequence: TGG
cacaccactgcactttagcc

SEQ ID NO: 121397 - DNA, 20 bp, Artificial Sequence
  Description of Artificial Sequence: Synthetic oligonucleotide
  Target: LAMA2; (+) strand; PAM type: NRG; PAM sequence: GGG
acaccactgcactttagcct

SEQ ID NO: 121398 - DNA, 20 bp, Artificial Sequence
  Description of Artificial Sequence: Synthetic oligonucleotide
  Target: LAMA2; (+) strand; PAM type: NRG; PAM sequence: CAG
ctgcactttagcctgggcaa

SEQ ID NO: 121399 - DNA, 20 bp, Artificial Sequence
  Description of Artificial Sequence: Synthetic oligonucleotide
  Target: LAMA2; (+) strand; PAM type: NRG; PAM sequence: GAG
gcactttagcctgggcaaca

SEQ ID NO: 121400 - DNA, 20 bp, Artificial Sequence
  Description of Artificial Sequence: Synthetic oligonucleotide
  Target: LAMA2; (+) strand; PAM type: NRG; PAM sequence: AAG
tttagcctgggcaacagagc

SEQ ID NO: 121401 - DNA, 20 bp, Artificial Sequence
  Description of Artificial Sequence: Synthetic oligonucleotide
  Target: LAMA2; (+) strand; PAM type: NRG; PAM sequence: TAG
caacagagcaagaccttatc

SEQ ID NO: 121402 - DNA, 20 bp, Artificial Sequence
  Description of Artificial Sequence: Synthetic oligonucleotide
  Target: LAMA2; (+) strand; PAM type: NRG; PAM sequence: AGG
aacagagcaagaccttatct

SEQ ID NO: 121403 - DNA, 20 bp, Artificial Sequence
  Description of Artificial Sequence: Synthetic oligonucleotide
  Target: LAMA2; (+) strand; PAM type: NRG; PAM sequence: TAG
tccaaaacaaaaacatgtta

SEQ ID NO: 121404 - DNA, 20 bp, Artificial Sequence
  Description of Artificial Sequence: Synthetic oligonucleotide
  Target: LAMA2; (+) strand; PAM type: NRG; PAM sequence: TAG
aacatgttatagactatcta

SEQ ID NO: 121405 - DNA, 20 bp, Artificial Sequence
  Description of Artificial Sequence: Synthetic oligonucleotide
  Target: LAMA2; (+) strand; PAM type: NRG; PAM sequence: TAG
taatactgcaattttcaaat

SEQ ID NO: 121406 - DNA, 20 bp, Artificial Sequence
  Description of Artificial Sequence: Synthetic oligonucleotide
  Target: LAMA2; (+) strand; PAM type: NRG; PAM sequence: AAG
tcaaattagctttcaccttt

SEQ ID NO: 121407 - DNA, 20 bp, Artificial Sequence
  Description of Artificial Sequence: Synthetic oligonucleotide
  Target: LAMA2; (+) strand; PAM type: NRG; PAM sequence: TGG
agaaatgctactttccatat

SEQ ID NO: 121408 - DNA, 20 bp, Artificial Sequence
  Description of Artificial Sequence: Synthetic oligonucleotide
  Target: LAMA2; (+) strand; PAM type: NRG; PAM sequence: TAG
attggaatgaataattaata

SEQ ID NO: 121409 - DNA, 20 bp, Artificial Sequence
  Description of Artificial Sequence: Synthetic oligonucleotide
  Target: LAMA2; (+) strand; PAM type: NRG; PAM sequence: TGG
atagaaccaaaatgcatgtc

SEQ ID NO: 121410 - DNA, 20 bp, Artificial Sequence
  Description of Artificial Sequence: Synthetic oligonucleotide
  Target: LAMA2; (+) strand; PAM type: NRG; PAM sequence: GGG
tagaaccaaaatgcatgtct

SEQ ID NO: 121411 - DNA, 20 bp, Artificial Sequence
  Description of Artificial Sequence: Synthetic oligonucleotide
  Target: LAMA2; (+) strand; PAM type: NRG; PAM sequence: TAG
caaaatgcatgtctgggatt

SEQ ID NO: 121412 - DNA, 20 bp, Artificial Sequence
  Description of Artificial Sequence: Synthetic oligonucleotide
  Target: LAMA2; (+) strand; PAM type: NRG; PAM sequence: TGG
gtctgggatttagaaaatct

SEQ ID NO: 121413 - DNA, 20 bp, Artificial Sequence
  Description of Artificial Sequence: Synthetic oligonucleotide
  Target: LAMA2; (+) strand; PAM type: NRG; PAM sequence: GGG
tctgggatttagaaaatctt

SEQ ID NO: 121414 - DNA, 20 bp, Artificial Sequence
  Description of Artificial Sequence: Synthetic oligonucleotide
  Target: LAMA2; (+) strand; PAM type: NRG; PAM sequence: AAG
atccttgcttattttttatt

SEQ ID NO: 121415 - DNA, 20 bp, Artificial Sequence
  Description of Artificial Sequence: Synthetic oligonucleotide
  Target: LAMA2; (+) strand; PAM type: NRG; PAM sequence: AAG
tgcttattttttattaagct

SEQ ID NO: 121416 - DNA, 20 bp, Artificial Sequence
  Description of Artificial Sequence: Synthetic oligonucleotide
  Target: LAMA2; (+) strand; PAM type: NRG; PAM sequence: AAG
taagctaagtcattcatttt

SEQ ID NO: 121417 - DNA, 20 bp, Artificial Sequence
  Description of Artificial Sequence: Synthetic oligonucleotide
  Target: LAMA2; (+) strand; PAM type: NRG; PAM sequence: TAG
gatcccctttaccccaacta

SEQ ID NO: 121418 - DNA, 20 bp, Artificial Sequence
  Description of Artificial Sequence: Synthetic oligonucleotide
  Target: LAMA2; (+) strand; PAM type: NRG; PAM sequence: GAG
tcccctttaccccaactata

SEQ ID NO: 121419 - DNA, 20 bp, Artificial Sequence
  Description of Artificial Sequence: Synthetic oligonucleotide
  Target: LAMA2; (+) strand; PAM type: NRG; PAM sequence: AGG
cccctttaccccaactatag

SEQ ID NO: 121420 - DNA, 20 bp, Artificial Sequence
  Description of Artificial Sequence: Synthetic oligonucleotide
  Target: LAMA2; (+) strand; PAM type: NRG; PAM sequence: AAG
ttatatactaccatacttaa

SEQ ID NO: 121421 - DNA, 20 bp, Artificial Sequence
  Description of Artificial Sequence: Synthetic oligonucleotide
  Target: LAMA2; (+) strand; PAM type: NRG; PAM sequence: AGG
tatatactaccatacttaaa

SEQ ID NO: 121422 - DNA, 20 bp, Artificial Sequence
  Description of Artificial Sequence: Synthetic oligonucleotide
  Target: LAMA2; (+) strand; PAM type: NRG; PAM sequence: TAG
tactaccatacttaaaaggt

SEQ ID NO: 121423 - DNA, 20 bp, Artificial Sequence
  Description of Artificial Sequence: Synthetic oligonucleotide
  Target: LAMA2; (+) strand; PAM type: NRG; PAM sequence: AAG
ccatacttaaaaggttagtg

SEQ ID NO: 121424 - DNA, 20 bp, Artificial Sequence
  Description of Artificial Sequence: Synthetic oligonucleotide
  Target: LAMA2; (+) strand; PAM type: NRG; PAM sequence: GAG
atacttaaaaggttagtgaa

SEQ ID NO: 121425 - DNA, 20 bp, Artificial Sequence
  Description of Artificial Sequence: Synthetic oligonucleotide
  Target: LAMA2; (+) strand; PAM type: NRG; PAM sequence: AGG
tacttaaaaggttagtgaag

SEQ ID NO: 121426 - DNA, 20 bp, Artificial Sequence
  Description of Artificial Sequence: Synthetic oligonucleotide
  Target: LAMA2; (+) strand; PAM type: NRG; PAM sequence: TAG
aaaaggttagtgaagaggca

SEQ ID NO: 121427 - DNA, 20 bp, Artificial Sequence
  Description of Artificial Sequence: Synthetic oligonucleotide
  Target: LAMA2; (+) strand; PAM type: NRG; PAM sequence: AAG
ggttagtgaagaggcataga

SEQ ID NO: 121428 - DNA, 20 bp, Artificial Sequence
  Description of Artificial Sequence: Synthetic oligonucleotide
  Target: LAMA2; (+) strand; PAM type: NRG; PAM sequence: GAG
ttagtgaagaggcatagaaa

SEQ ID NO: 121429 - DNA, 20 bp, Artificial Sequence
  Description of Artificial Sequence: Synthetic oligonucleotide
  Target: LAMA2; (+) strand; PAM type: NRG; PAM sequence: TAG
gtgaagaggcatagaaagag

SEQ ID NO: 121430 - DNA, 20 bp, Artificial Sequence
  Description of Artificial Sequence: Synthetic oligonucleotide
  Target: LAMA2; (+) strand; PAM type: NRG; PAM sequence: CAG
gcatagaaagagtagtgaaa

SEQ ID NO: 121431 - DNA, 20 bp, Artificial Sequence
  Description of Artificial Sequence: Synthetic oligonucleotide
  Target: LAMA2; (+) strand; PAM type: NRG; PAM sequence: TAG
agtgaaacagtgaaaccttc

SEQ ID NO: 121432 - DNA, 20 bp, Artificial Sequence
  Description of Artificial Sequence: Synthetic oligonucleotide
  Target: LAMA2; (+) strand; PAM type: NRG; PAM sequence: CAG
cagtgaaaccttctagatgc

SEQ ID NO: 121433 - DNA, 20 bp, Artificial Sequence
  Description of Artificial Sequence: Synthetic oligonucleotide
  Target: LAMA2; (+) strand; PAM type: NRG; PAM sequence: AAG
ccagatgctatacaaatgtg

SEQ ID NO: 121434 - DNA, 20 bp, Artificial Sequence
  Description of Artificial Sequence: Synthetic oligonucleotide
  Target: LAMA2; (+) strand; PAM type: NRG; PAM sequence: CAG
aaatgtgaagcatatgacac

SEQ ID NO: 121435 - DNA, 20 bp, Artificial Sequence
  Description of Artificial Sequence: Synthetic oligonucleotide
  Target: LAMA2; (+) strand; PAM type: NRG; PAM sequence: TGG
tgaagcatatgacaccagca

SEQ ID NO: 121436 - DNA, 20 bp, Artificial Sequence
  Description of Artificial Sequence: Synthetic oligonucleotide
  Target: LAMA2; (+) strand; PAM type: NRG; PAM sequence: AAG
atgacaccagcatggtgaaa

SEQ ID NO: 121437 - DNA, 20 bp, Artificial Sequence
  Description of Artificial Sequence: Synthetic oligonucleotide
  Target: LAMA2; (+) strand; PAM type: NRG; PAM sequence: AGG
tgacaccagcatggtgaaaa

SEQ ID NO: 121438 - DNA, 20 bp, Artificial Sequence
  Description of Artificial Sequence: Synthetic oligonucleotide
  Target: LAMA2; (+) strand; PAM type: NRG; PAM sequence: AAG
caccagcatggtgaaaaagg

SEQ ID NO: 121439 - DNA, 20 bp, Artificial Sequence
  Description of Artificial Sequence: Synthetic oligonucleotide
  Target: LAMA2; (+) strand; PAM type: NRG; PAM sequence: AAG
ggtgaaaaaggaagctaatt

SEQ ID NO: 121440 - DNA, 20 bp, Artificial Sequence
  Description of Artificial Sequence: Synthetic oligonucleotide
  Target: LAMA2; (+) strand; PAM type: NRG; PAM sequence: CAG
aggaagctaattaagaccat

SEQ ID NO: 121441 - DNA, 20 bp, Artificial Sequence
  Description of Artificial Sequence: Synthetic oligonucleotide
  Target: LAMA2; (+) strand; PAM type: NRG; PAM sequence: TAG
agctaattaagaccatcaga

SEQ ID NO: 121442 - DNA, 20 bp, Artificial Sequence
  Description of Artificial Sequence: Synthetic oligonucleotide
  Target: LAMA2; (+) strand; PAM type: NRG; PAM sequence: TAG
tatttgattttatctctcca

SEQ ID NO: 121443 - DNA, 20 bp, Artificial Sequence
  Description of Artificial Sequence: Synthetic oligonucleotide
  Target: LAMA2; (+) strand; PAM type: NRG; PAM sequence: TAG
atcatgataactatgttaca

SEQ ID NO: 121444 - DNA, 20 bp, Artificial Sequence
  Description of Artificial Sequence: Synthetic oligonucleotide
  Target: LAMA2; (+) strand; PAM type: NRG; PAM sequence: TAG
gttacatagttactgaaatt

SEQ ID NO: 121445 - DNA, 20 bp, Artificial Sequence
  Description of Artificial Sequence: Synthetic oligonucleotide
  Target: LAMA2; (+) strand; PAM type: NRG; PAM sequence: AAG
gttactgaaatttagacatt

SEQ ID NO: 121446 - DNA, 20 bp, Artificial Sequence
  Description of Artificial Sequence: Synthetic oligonucleotide
  Target: LAMA2; (+) strand; PAM type: NRG; PAM sequence: TGG
aaatttagacattaagtttg

SEQ ID NO: 121447 - DNA, 20 bp, Artificial Sequence
  Description of Artificial Sequence: Synthetic oligonucleotide
  Target: LAMA2; (+) strand; PAM type: NRG; PAM sequence: CAG
agtttgtggaatctctctga

SEQ ID NO: 121448 - DNA, 20 bp, Artificial Sequence
  Description of Artificial Sequence: Synthetic oligonucleotide
  Target: LAMA2; (+) strand; PAM type: NRG; PAM sequence: TAG
aatctctctgacagttatat

SEQ ID NO: 121449 - DNA, 20 bp, Artificial Sequence
  Description of Artificial Sequence: Synthetic oligonucleotide
  Target: LAMA2; (+) strand; PAM type: NRG; PAM sequence: CAG
tatattagctaatcactaaa

SEQ ID NO: 121450 - DNA, 20 bp, Artificial Sequence
  Description of Artificial Sequence: Synthetic oligonucleotide
  Target: LAMA2; (+) strand; PAM type: NRG; PAM sequence: AAG
tcactaaacagaaattttaa

SEQ ID NO: 121451 - DNA, 20 bp, Artificial Sequence
  Description of Artificial Sequence: Synthetic oligonucleotide
  Target: LAMA2; (+) strand; PAM type: NRG; PAM sequence: AAG
ctaaacagaaattttaaaag

SEQ ID NO: 121452 - DNA, 20 bp, Artificial Sequence
  Description of Artificial Sequence: Synthetic oligonucleotide
  Target: LAMA2; (+) strand; PAM type: NRG; PAM sequence: AAG
agtatttaatattaattctc

SEQ ID NO: 121453 - DNA, 20 bp, Artificial Sequence
  Description of Artificial Sequence: Synthetic oligonucleotide
  Target: LAMA2; (+) strand; PAM type: NRG; PAM sequence: TAG
taatattaattctcaagtct

SEQ ID NO: 121454 - DNA, 20 bp, Artificial Sequence
  Description of Artificial Sequence: Synthetic oligonucleotide
  Target: LAMA2; (+) strand; PAM type: NRG; PAM sequence: AGG
aatattaattctcaagtctt

SEQ ID NO: 121455 - DNA, 20 bp, Artificial Sequence
  Description of Artificial Sequence: Synthetic oligonucleotide
  Target: LAMA2; (+) strand; PAM type: NRG; PAM sequence: GAG
tattaattctcaagtcttag

SEQ ID NO: 121456 - DNA, 20 bp, Artificial Sequence
  Description of Artificial Sequence: Synthetic oligonucleotide
  Target: LAMA2; (+) strand; PAM type: NRG; PAM sequence: TAG
tcaagtcttaggagaatatt

SEQ ID NO: 121457 - DNA, 20 bp, Artificial Sequence
  Description of Artificial Sequence: Synthetic oligonucleotide
  Target: LAMA2; (+) strand; PAM type: NRG; PAM sequence: CAG
atatttagctaataattcta

SEQ ID NO: 121458 - DNA, 20 bp, Artificial Sequence
  Description of Artificial Sequence: Synthetic oligonucleotide
  Target: LAMA2; (+) strand; PAM type: NRG; PAM sequence: CAG
aataattctacagttgactg

SEQ ID NO: 121459 - DNA, 20 bp, Artificial Sequence
  Description of Artificial Sequence: Synthetic oligonucleotide
  Target: LAMA2; (+) strand; PAM type: NRG; PAM sequence: GAG
taattctacagttgactgca

SEQ ID NO: 121460 - DNA, 20 bp, Artificial Sequence
  Description of Artificial Sequence: Synthetic oligonucleotide
  Target: LAMA2; (+) strand; PAM type: NRG; PAM sequence: AAG
ttactgtttcttgattcatg

SEQ ID NO: 121461 - DNA, 20 bp, Artificial Sequence
  Description of Artificial Sequence: Synthetic oligonucleotide
  Target: LAMA2; (+) strand; PAM type: NRG; PAM sequence: AAG
attcatgaagaatacatgcc

SEQ ID NO: 121462 - DNA, 20 bp, Artificial Sequence
  Description of Artificial Sequence: Synthetic oligonucleotide
  Target: LAMA2; (+) strand; PAM type: NRG; PAM sequence: TAG
agaatacatgccaagtgtat

SEQ ID NO: 121463 - DNA, 20 bp, Artificial Sequence
  Description of Artificial Sequence: Synthetic oligonucleotide
  Target: LAMA2; (+) strand; PAM type: NRG; PAM sequence: AAG
tctgttctcacactgctgta

SEQ ID NO: 121464 - DNA, 20 bp, Artificial Sequence
  Description of Artificial Sequence: Synthetic oligonucleotide
  Target: LAMA2; (+) strand; PAM type: NRG; PAM sequence: TGG
ctcacactgctgtaaagaac

SEQ ID NO: 121465 - DNA, 20 bp, Artificial Sequence
  Description of Artificial Sequence: Synthetic oligonucleotide
  Target: LAMA2; (+) strand; PAM type: NRG; PAM sequence: AAG
actgctgtaaagaactggcc

SEQ ID NO: 121466 - DNA, 20 bp, Artificial Sequence
  Description of Artificial Sequence: Synthetic oligonucleotide
  Target: LAMA2; (+) strand; PAM type: NRG; PAM sequence: TGG
tgtaaagaactggccaagac

SEQ ID NO: 121467 - DNA, 20 bp, Artificial Sequence
  Description of Artificial Sequence: Synthetic oligonucleotide
  Target: LAMA2; (+) strand; PAM type: NRG; PAM sequence: GGG
gtaaagaactggccaagact

SEQ ID NO: 121468 - DNA, 20 bp, Artificial Sequence
  Description of Artificial Sequence: Synthetic oligonucleotide
  Target: LAMA2; (+) strand; PAM type: NRG; PAM sequence: AAG
ccaagactgggcaatttaca

SEQ ID NO: 121469 - DNA, 20 bp, Artificial Sequence
  Description of Artificial Sequence: Synthetic oligonucleotide
  Target: LAMA2; (+) strand; PAM type: NRG; PAM sequence: GAG
aagactgggcaatttacaaa

SEQ ID NO: 121470 - DNA, 20 bp, Artificial Sequence
  Description of Artificial Sequence: Synthetic oligonucleotide
  Target: LAMA2; (+) strand; PAM type: NRG; PAM sequence: AGG
agactgggcaatttacaaag

SEQ ID NO: 121471 - DNA, 20 bp, Artificial Sequence
  Description of Artificial Sequence: Synthetic oligonucleotide
  Target: LAMA2; (+) strand; PAM type: NRG; PAM sequence: CAG
acaaagaggtttaattgact

SEQ ID NO: 121472 - DNA, 20 bp, Artificial Sequence
  Description of Artificial Sequence: Synthetic oligonucleotide
  Target: LAMA2; (+) strand; PAM type: NRG; PAM sequence: TGG
ttaattgactcagttccacc

SEQ ID NO: 121473 - DNA, 20 bp, Artificial Sequence
  Description of Artificial Sequence: Synthetic oligonucleotide
  Target: LAMA2; (+) strand; PAM type: NRG; PAM sequence: TGG
ttgactcagttccacctggc

SEQ ID NO: 121474 - DNA, 20 bp, Artificial Sequence
  Description of Artificial Sequence: Synthetic oligonucleotide
  Target: LAMA2; (+) strand; PAM type: NRG; PAM sequence: GGG
tgactcagttccacctggct

SEQ ID NO: 121475 - DNA, 20 bp, Artificial Sequence
  Description of Artificial Sequence: Synthetic oligonucleotide
  Target: LAMA2; (+) strand; PAM type: NRG; PAM sequence: GGG
gactcagttccacctggctg

SEQ ID NO: 121476 - DNA, 20 bp, Artificial Sequence
  Description of Artificial Sequence: Synthetic oligonucleotide
  Target: LAMA2; (+) strand; PAM type: NRG; PAM sequence: GAG
ctcagttccacctggctggg

SEQ ID NO: 121477 - DNA, 20 bp, Artificial Sequence
  Description of Artificial Sequence: Synthetic oligonucleotide
  Target: LAMA2; (+) strand; PAM type: NRG; PAM sequence: AGG
tcagttccacctggctgggg

SEQ ID NO: 121478 - DNA, 20 bp, Artificial Sequence
  Description of Artificial Sequence: Synthetic oligonucleotide
  Target: LAMA2; (+) strand; PAM type: NRG; PAM sequence: CAG
ccacctggctggggaggcct

SEQ ID NO: 121479 - DNA, 20 bp, Artificial Sequence
  Description of Artificial Sequence: Synthetic oligonucleotide
  Target: LAMA2; (+) strand; PAM type: NRG; PAM sequence: AGG
cacctggctggggaggcctc

SEQ ID NO: 121480 - DNA, 20 bp, Artificial Sequence
  Description of Artificial Sequence: Synthetic oligonucleotide
  Target: LAMA2; (+) strand; PAM type: NRG; PAM sequence: CAG
caggaaacttacaatcatga

SEQ ID NO: 121481 - DNA, 20 bp, Artificial Sequence
  Description of Artificial Sequence: Synthetic oligonucleotide
  Target: LAMA2; (+) strand; PAM type: NRG; PAM sequence: AAG
gaaacttacaatcatgacag

SEQ ID NO: 121482 - DNA, 20 bp, Artificial Sequence
  Description of Artificial Sequence: Synthetic oligonucleotide
  Target: LAMA2; (+) strand; PAM type: NRG; PAM sequence: AGG
aaacttacaatcatgacaga

SEQ ID NO: 121483 - DNA, 20 bp, Artificial Sequence
  Description of Artificial Sequence: Synthetic oligonucleotide
  Target: LAMA2; (+) strand; PAM type: NRG; PAM sequence: GGG
aacttacaatcatgacagaa

SEQ ID NO: 121484 - DNA, 20 bp, Artificial Sequence
  Description of Artificial Sequence: Synthetic oligonucleotide
  Target: LAMA2; (+) strand; PAM type: NRG; PAM sequence: AAG
tacaatcatgacagaaggga

SEQ ID NO: 121485 - DNA, 20 bp, Artificial Sequence
  Description of Artificial Sequence: Synthetic oligonucleotide
  Target: LAMA2; (+) strand; PAM type: NRG; PAM sequence: CAG
cacattcttcttcatgatgt

SEQ ID NO: 121486 - DNA, 20 bp, Artificial Sequence
  Description of Artificial Sequence: Synthetic oligonucleotide
  Target: LAMA2; (+) strand; PAM type: NRG; PAM sequence: AGG
acattcttcttcatgatgtc

SEQ ID NO: 121487 - DNA, 20 bp, Artificial Sequence
  Description of Artificial Sequence: Synthetic oligonucleotide
  Target: LAMA2; (+) strand; PAM type: NRG; PAM sequence: AAG
ttcttcttcatgatgtcagg

SEQ ID NO: 121488 - DNA, 20 bp, Artificial Sequence
  Description of Artificial Sequence: Synthetic oligonucleotide
  Target: LAMA2; (+) strand; PAM type: NRG; PAM sequence: AGG
tcttcttcatgatgtcagga

SEQ ID NO: 121489 - DNA, 20 bp, Artificial Sequence
  Description of Artificial Sequence: Synthetic oligonucleotide
  Target: LAMA2; (+) strand; PAM type: NRG; PAM sequence: GAG
ttcttcatgatgtcaggaag

SEQ ID NO: 121490 - DNA, 20 bp, Artificial Sequence
  Description of Artificial Sequence: Synthetic oligonucleotide
  Target: LAMA2; (+) strand; PAM type: NRG; PAM sequence: AAG
ttcatgatgtcaggaaggag

SEQ ID NO: 121491 - DNA, 20 bp, Artificial Sequence
  Description of Artificial Sequence: Synthetic oligonucleotide
  Target: LAMA2; (+) strand; PAM type: NRG; PAM sequence: CAG
gatgtcaggaaggagaagtg

SEQ ID NO: 121492 - DNA, 20 bp, Artificial Sequence
  Description of Artificial Sequence: Synthetic oligonucleotide
  Target: LAMA2; (+) strand; PAM type: NRG; PAM sequence: GAG
tgtcaggaaggagaagtgca

SEQ ID NO: 121493 - DNA, 20 bp, Artificial Sequence
  Description of Artificial Sequence: Synthetic oligonucleotide
  Target: LAMA2; (+) strand; PAM type: NRG; PAM sequence: AAG
ggaaggagaagtgcagagcg

SEQ ID NO: 121494 - DNA, 20 bp, Artificial Sequence
  Description of Artificial Sequence: Synthetic oligonucleotide
  Target: LAMA2; (+) strand; PAM type: NRG; PAM sequence: TGG
aggagaagtgcagagcgaag

SEQ ID NO: 121495 - DNA, 20 bp, Artificial Sequence
  Description of Artificial Sequence: Synthetic oligonucleotide
  Target: LAMA2; (+) strand; PAM type: NRG; PAM sequence: GGG
ggagaagtgcagagcgaagt

SEQ ID NO: 121496 - DNA, 20 bp, Artificial Sequence
  Description of Artificial Sequence: Synthetic oligonucleotide
  Target: LAMA2; (+) strand; PAM type: NRG; PAM sequence: GGG
gagaagtgcagagcgaagtg

SEQ ID NO: 121497 - DNA, 20 bp, Artificial Sequence
  Description of Artificial Sequence: Synthetic oligonucleotide
  Target: LAMA2; (+) strand; PAM type: NRG; PAM sequence: GGG
agaagtgcagagcgaagtgg

SEQ ID NO: 121498 - DNA, 20 bp, Artificial Sequence
  Description of Artificial Sequence: Synthetic oligonucleotide
  Target: LAMA2; (+) strand; PAM type: NRG; PAM sequence: AAG
tgcagagcgaagtgggggaa

SEQ ID NO: 121499 - DNA, 20 bp, Artificial Sequence
  Description of Artificial Sequence: Synthetic oligonucleotide
  Target: LAMA2; (+) strand; PAM type: NRG; PAM sequence: CAG
aaagccccttataaaaccat

SEQ ID NO: 121500 - DNA, 20 bp, Artificial Sequence
  Description of Artificial Sequence: Synthetic oligonucleotide
  Target: LAMA2; (+) strand; PAM type: NRG; PAM sequence: GAG
ataaaaccatcagacctcat

SEQ ID NO: 121501 - DNA, 20 bp, Artificial Sequence
  Description of Artificial Sequence: Synthetic oligonucleotide
  Target: LAMA2; (+) strand; PAM type: NRG; PAM sequence: GAG
atgagactactcactatcct

SEQ ID NO: 121502 - DNA, 20 bp, Artificial Sequence
  Description of Artificial Sequence: Synthetic oligonucleotide
  Target: LAMA2; (+) strand; PAM type: NRG; PAM sequence: CAG
actactcactatcctgagaa

SEQ ID NO: 121503 - DNA, 20 bp, Artificial Sequence
  Description of Artificial Sequence: Synthetic oligonucleotide
  Target: LAMA2; (+) strand; PAM type: NRG; PAM sequence: TGG
tcactatcctgagaacagca

SEQ ID NO: 121504 - DNA, 20 bp, Artificial Sequence
  Description of Artificial Sequence: Synthetic oligonucleotide
  Target: LAMA2; (+) strand; PAM type: NRG; PAM sequence: GGG
cactatcctgagaacagcat

SEQ ID NO: 121505 - DNA, 20 bp, Artificial Sequence
  Description of Artificial Sequence: Synthetic oligonucleotide
  Target: LAMA2; (+) strand; PAM type: NRG; PAM sequence: GGG
actatcctgagaacagcatg

SEQ ID NO: 121506 - DNA, 20 bp, Artificial Sequence
  Description of Artificial Sequence: Synthetic oligonucleotide
  Target: LAMA2; (+) strand; PAM type: NRG; PAM sequence: GGG
ctatcctgagaacagcatgg

SEQ ID NO: 121507 - DNA, 20 bp, Artificial Sequence
  Description of Artificial Sequence: Synthetic oligonucleotide
  Target: LAMA2; (+) strand; PAM type: NRG; PAM sequence: CAG
ctcatgatctaatcaccttc

SEQ ID NO: 121508 - DNA, 20 bp, Artificial Sequence
  Description of Artificial Sequence: Synthetic oligonucleotide
  Target: LAMA2; (+) strand; PAM type: NRG; PAM sequence: AGG
tcatgatctaatcaccttcc

SEQ ID NO: 121509 - DNA, 20 bp, Artificial Sequence
  Description of Artificial Sequence: Synthetic oligonucleotide
  Target: LAMA2; (+) strand; PAM type: NRG; PAM sequence: GAG
atgatctaatcaccttccag

SEQ ID NO: 121510 - DNA, 20 bp, Artificial Sequence
  Description of Artificial Sequence: Synthetic oligonucleotide
  Target: LAMA2; (+) strand; PAM type: NRG; PAM sequence: AGG
tgatctaatcaccttccagg

SEQ ID NO: 121511 - DNA, 20 bp, Artificial Sequence
  Description of Artificial Sequence: Synthetic oligonucleotide
  Target: LAMA2; (+) strand; PAM type: NRG; PAM sequence: TGG
gaggtccctcccccaacaca

SEQ ID NO: 121512 - DNA, 20 bp, Artificial Sequence
  Description of Artificial Sequence: Synthetic oligonucleotide
  Target: LAMA2; (+) strand; PAM type: NRG; PAM sequence: GGG
aggtccctcccccaacacat

SEQ ID NO: 121513 - DNA, 20 bp, Artificial Sequence
  Description of Artificial Sequence: Synthetic oligonucleotide
  Target: LAMA2; (+) strand; PAM type: NRG; PAM sequence: GGG
ggtccctcccccaacacatg

SEQ ID NO: 121514 - DNA, 20 bp, Artificial Sequence
  Description of Artificial Sequence: Synthetic oligonucleotide
  Target: LAMA2; (+) strand; PAM type: NRG; PAM sequence: TGG
aacacatggggattacaatt

SEQ ID NO: 121515 - DNA, 20 bp, Artificial Sequence
  Description of Artificial Sequence: Synthetic oligonucleotide
  Target: LAMA2; (+) strand; PAM type: NRG; PAM sequence: AAG
tacaatttggattacaattc

SEQ ID NO: 121516 - DNA, 20 bp, Artificial Sequence
  Description of Artificial Sequence: Synthetic oligonucleotide
  Target: LAMA2; (+) strand; PAM type: NRG; PAM sequence: GAG
tttggattacaattcaagat

SEQ ID NO: 121517 - DNA, 20 bp, Artificial Sequence
  Description of Artificial Sequence: Synthetic oligonucleotide
  Target: LAMA2; (+) strand; PAM type: NRG; PAM sequence: GAG
aattcaagatgagattttgt

SEQ ID NO: 121518 - DNA, 20 bp, Artificial Sequence
  Description of Artificial Sequence: Synthetic oligonucleotide
  Target: LAMA2; (+) strand; PAM type: NRG; PAM sequence: AGG
attcaagatgagattttgtg

SEQ ID NO: 121519 - DNA, 20 bp, Artificial Sequence
  Description of Artificial Sequence: Synthetic oligonucleotide
  Target: LAMA2; (+) strand; PAM type: NRG; PAM sequence: GAG
tgagattttgtgaggacact

SEQ ID NO: 121520 - DNA, 20 bp, Artificial Sequence
  Description of Artificial Sequence: Synthetic oligonucleotide
  Target: LAMA2; (+) strand; PAM type: NRG; PAM sequence: CAG
attttgtgaggacactgagc

SEQ ID NO: 121521 - DNA, 20 bp, Artificial Sequence
  Description of Artificial Sequence: Synthetic oligonucleotide
  Target: LAMA2; (+) strand; PAM type: NRG; PAM sequence: AAG
ctgagccagaccatatcact

SEQ ID NO: 121522 - DNA, 20 bp, Artificial Sequence
  Description of Artificial Sequence: Synthetic oligonucleotide
  Target: LAMA2; (+) strand; PAM type: NRG; PAM sequence: GAG
gagccagaccatatcactaa

SEQ ID NO: 121523 - DNA, 20 bp, Artificial Sequence
  Description of Artificial Sequence: Synthetic oligonucleotide
  Target: LAMA2; (+) strand; PAM type: NRG; PAM sequence: TGG
tatcactaagagaataaaaa

SEQ ID NO: 121524 - DNA, 20 bp, Artificial Sequence
  Description of Artificial Sequence: Synthetic oligonucleotide
  Target: LAMA2; (+) strand; PAM type: NRG; PAM sequence: CAG
taagagaataaaaatggaca

SEQ ID NO: 121525 - DNA, 20 bp, Artificial Sequence
  Description of Artificial Sequence: Synthetic oligonucleotide
  Target: LAMA2; (+) strand; PAM type: NRG; PAM sequence: CAG
ctattccctttaaatatttc

SEQ ID NO: 121526 - DNA, 20 bp, Artificial Sequence
  Description of Artificial Sequence: Synthetic oligonucleotide
  Target: LAMA2; (+) strand; PAM type: NRG; PAM sequence: AAG
ctttaaatatttccagttga

SEQ ID NO: 121527 - DNA, 20 bp, Artificial Sequence
  Description of Artificial Sequence: Synthetic oligonucleotide
  Target: LAMA2; (+) strand; PAM type: NRG; PAM sequence: TAG
ttgaaagtatttccatgacc

SEQ ID NO: 121528 - DNA, 20 bp, Artificial Sequence
  Description of Artificial Sequence: Synthetic oligonucleotide
  Target: LAMA2; (+) strand; PAM type: NRG; PAM sequence: GAG
aagtatttccatgacctagt

SEQ ID NO: 121529 - DNA, 20 bp, Artificial Sequence
  Description of Artificial Sequence: Synthetic oligonucleotide
  Target: LAMA2; (+) strand; PAM type: NRG; PAM sequence: TAG
tccatgacctagtgagttct

SEQ ID NO: 121530 - DNA, 20 bp, Artificial Sequence
  Description of Artificial Sequence: Synthetic oligonucleotide
  Target: LAMA2; (+) strand; PAM type: NRG; PAM sequence: GAG
catgacctagtgagttctta

SEQ ID NO: 121531 - DNA, 20 bp, Artificial Sequence
  Description of Artificial Sequence: Synthetic oligonucleotide
  Target: LAMA2; (+) strand; PAM type: NRG; PAM sequence: TGG
atcactattgatgtcccaac

SEQ ID NO: 121532 - DNA, 20 bp, Artificial Sequence
  Description of Artificial Sequence: Synthetic oligonucleotide
  Target: LAMA2; (+) strand; PAM type: NRG; PAM sequence: AAG
tgtcccaactggtataataa

SEQ ID NO: 121533 - DNA, 20 bp, Artificial Sequence
  Description of Artificial Sequence: Synthetic oligonucleotide
  Target: LAMA2; (+) strand; PAM type: NRG; PAM sequence: AAG
cccaactggtataataaaag

SEQ ID NO: 121534 - DNA, 20 bp, Artificial Sequence
  Description of Artificial Sequence: Synthetic oligonucleotide
  Target: LAMA2; (+) strand; PAM type: NRG; PAM sequence: GAG
agaagaaaacacataatttt

SEQ ID NO: 121535 - DNA, 20 bp, Artificial Sequence
  Description of Artificial Sequence: Synthetic oligonucleotide
  Target: LAMA2; (+) strand; PAM type: NRG; PAM sequence: CAG
ttccacctttctcacactct

SEQ ID NO: 121536 - DNA, 20 bp, Artificial Sequence
  Description of Artificial Sequence: Synthetic oligonucleotide
  Target: LAMA2; (+) strand; PAM type: NRG; PAM sequence: AAG
agcatataaacacataatcg

SEQ ID NO: 121537 - DNA, 20 bp, Artificial Sequence
  Description of Artificial Sequence: Synthetic oligonucleotide
  Target: LAMA2; (+) strand; PAM type: NRG; PAM sequence: AAG
tataaacacataatcgaagc

SEQ ID NO: 121538 - DNA, 20 bp, Artificial Sequence
  Description of Artificial Sequence: Synthetic oligonucleotide
  Target: LAMA2; (+) strand; PAM type: NRG; PAM sequence: GAG
ataatcgaagcaagaaaaat

SEQ ID NO: 121539 - DNA, 20 bp, Artificial Sequence
  Description of Artificial Sequence: Synthetic oligonucleotide
  Target: LAMA2; (+) strand; PAM type: NRG; PAM sequence: AAG
atcaaatatataatatgatg

SEQ ID NO: 121540 - DNA, 20 bp, Artificial Sequence
  Description of Artificial Sequence: Synthetic oligonucleotide
  Target: LAMA2; (+) strand; PAM type: NRG; PAM sequence: TGG
acactattcattatgacatg

SEQ ID NO: 121541 - DNA, 20 bp, Artificial Sequence
  Description of Artificial Sequence: Synthetic oligonucleotide
  Target: LAMA2; (+) strand; PAM type: NRG; PAM sequence: GGG
cactattcattatgacatgt

SEQ ID NO: 121542 - DNA, 20 bp, Artificial Sequence
  Description of Artificial Sequence: Synthetic oligonucleotide
  Target: LAMA2; (+) strand; PAM type: NRG; PAM sequence: GGG
actattcattatgacatgtg

SEQ ID NO: 121543 - DNA, 20 bp, Artificial Sequence
  Description of Artificial Sequence: Synthetic oligonucleotide
  Target: LAMA2; (+) strand; PAM type: NRG; PAM sequence: AAG
cattatgacatgtggggcca

SEQ ID NO: 121544 - DNA, 20 bp, Artificial Sequence
  Description of Artificial Sequence: Synthetic oligonucleotide
  Target: LAMA2; (+) strand; PAM type: NRG; PAM sequence: AAG
atgtggggccaaagtgacaa

SEQ ID NO: 121545 - DNA, 20 bp, Artificial Sequence
  Description of Artificial Sequence: Synthetic oligonucleotide
  Target: LAMA2; (+) strand; PAM type: NRG; PAM sequence: TGG
gccaaagtgacaaaagtaat

SEQ ID NO: 121546 - DNA, 20 bp, Artificial Sequence
  Description of Artificial Sequence: Synthetic oligonucleotide
  Target: LAMA2; (+) strand; PAM type: NRG; PAM sequence: AAG
gtgacaaaagtaattggaca

SEQ ID NO: 121547 - DNA, 20 bp, Artificial Sequence
  Description of Artificial Sequence: Synthetic oligonucleotide
  Target: LAMA2; (+) strand; PAM type: NRG; PAM sequence: AGG
tgacaaaagtaattggacaa

SEQ ID NO: 121548 - DNA, 20 bp, Artificial Sequence
  Description of Artificial Sequence: Synthetic oligonucleotide
  Target: LAMA2; (+) strand; PAM type: NRG; PAM sequence: TAG
caaaagtaattggacaaagg

SEQ ID NO: 121549 - DNA, 20 bp, Artificial Sequence
  Description of Artificial Sequence: Synthetic oligonucleotide
  Target: LAMA2; (+) strand; PAM type: NRG; PAM sequence: CAG
taattggacaaaggtagact

SEQ ID NO: 121550 - DNA, 20 bp, Artificial Sequence
  Description of Artificial Sequence: Synthetic oligonucleotide
  Target: LAMA2; (+) strand; PAM type: NRG; PAM sequence: GAG
acaaaggtagactcagcaat

SEQ ID NO: 121551 - DNA, 20 bp, Artificial Sequence
  Description of Artificial Sequence: Synthetic oligonucleotide
  Target: LAMA2; (+) strand; PAM type: NRG; PAM sequence: AGG
caaaggtagactcagcaatg

SEQ ID NO: 121552 - DNA, 20 bp, Artificial Sequence
  Description of Artificial Sequence: Synthetic oligonucleotide
  Target: LAMA2; (+) strand; PAM type: NRG; PAM sequence: TGG
tagactcagcaatgaggact

SEQ ID NO: 121553 - DNA, 20 bp, Artificial Sequence
  Description of Artificial Sequence: Synthetic oligonucleotide
  Target: LAMA2; (+) strand; PAM type: NRG; PAM sequence: AAG
actcagcaatgaggacttgg

SEQ ID NO: 121554 - DNA, 20 bp, Artificial Sequence
  Description of Artificial Sequence: Synthetic oligonucleotide
  Target: LAMA2; (+) strand; PAM type: NRG; PAM sequence: GAG
aatgaggacttggaagaaat

SEQ ID NO: 121555 - DNA, 20 bp, Artificial Sequence
  Description of Artificial Sequence: Synthetic oligonucleotide
  Target: LAMA2; (+) strand; PAM type: NRG; PAM sequence: CAG
acttggaagaaatgagcttt

SEQ ID NO: 121556 - DNA, 20 bp, Artificial Sequence
  Description of Artificial Sequence: Synthetic oligonucleotide
  Target: LAMA2; (+) strand; PAM type: NRG; PAM sequence: AAG
gagctttcagtcccatttta

SEQ ID NO: 121557 - DNA, 20 bp, Artificial Sequence
  Description of Artificial Sequence: Synthetic oligonucleotide
  Target: LAMA2; (+) strand; PAM type: NRG; PAM sequence: TAG
ctttcagtcccattttaaag

SEQ ID NO: 121558 - DNA, 20 bp, Artificial Sequence
  Description of Artificial Sequence: Synthetic oligonucleotide
  Target: LAMA2; (+) strand; PAM type: NRG; PAM sequence: AAG
tcagtcccattttaaagtag

SEQ ID NO: 121559 - DNA, 20 bp, Artificial Sequence
  Description of Artificial Sequence: Synthetic oligonucleotide
  Target: LAMA2; (+) strand; PAM type: NRG; PAM sequence: GAG
agtcccattttaaagtagaa

SEQ ID NO: 121560 - DNA, 20 bp, Artificial Sequence
  Description of Artificial Sequence: Synthetic oligonucleotide
  Target: LAMA2; (+) strand; PAM type: NRG; PAM sequence: AAG
cccattttaaagtagaagag

SEQ ID NO: 121561 - DNA, 20 bp, Artificial Sequence
  Description of Artificial Sequence: Synthetic oligonucleotide
  Target: LAMA2; (+) strand; PAM type: NRG; PAM sequence: AGG
ccattttaaagtagaagaga

SEQ ID NO: 121562 - DNA, 20 bp, Artificial Sequence
  Description of Artificial Sequence: Synthetic oligonucleotide
  Target: LAMA2; (+) strand; PAM type: NRG; PAM sequence: TAG
ttttaaagtagaagagaagg

SEQ ID NO: 121563 - DNA, 20 bp, Artificial Sequence
  Description of Artificial Sequence: Synthetic oligonucleotide
  Target: LAMA2; (+) strand; PAM type: NRG; PAM sequence: AGG
tttaaagtagaagagaaggt

SEQ ID NO: 121564 - DNA, 20 bp, Artificial Sequence
  Description of Artificial Sequence: Synthetic oligonucleotide
  Target: LAMA2; (+) strand; PAM type: NRG; PAM sequence: GGG
ttaaagtagaagagaaggta

SEQ ID NO: 121565 - DNA, 20 bp, Artificial Sequence
  Description of Artificial Sequence: Synthetic oligonucleotide
  Target: LAMA2; (+) strand; PAM type: NRG; PAM sequence: AAG
aagagaaggtagggtatcaa

SEQ ID NO: 121566 - DNA, 20 bp, Artificial Sequence
  Description of Artificial Sequence: Synthetic oligonucleotide
  Target: LAMA2; (+) strand; PAM type: NRG; PAM sequence: TAG
agaaggtagggtatcaaaag

SEQ ID NO: 121567 - DNA, 20 bp, Artificial Sequence
  Description of Artificial Sequence: Synthetic oligonucleotide
  Target: LAMA2; (+) strand; PAM type: NRG; PAM sequence: AGG
gaaggtagggtatcaaaagt

SEQ ID NO: 121568 - DNA, 20 bp, Artificial Sequence
  Description of Artificial Sequence: Synthetic oligonucleotide
  Target: LAMA2; (+) strand; PAM type: NRG; PAM sequence: GGG
aaggtagggtatcaaaagta

SEQ ID NO: 121569 - DNA, 20 bp, Artificial Sequence
  Description of Artificial Sequence: Synthetic oligonucleotide
  Target: LAMA2; (+) strand; PAM type: NRG; PAM sequence: AAG
aaagtagggtgcgctacgca

SEQ ID NO: 121570 - DNA, 20 bp, Artificial Sequence
  Description of Artificial Sequence: Synthetic oligonucleotide
  Target: LAMA2; (+) strand; PAM type: NRG; PAM sequence: TGG
gtagggtgcgctacgcaaag

SEQ ID NO: 121571 - DNA, 20 bp, Artificial Sequence
  Description of Artificial Sequence: Synthetic oligonucleotide
  Target: LAMA2; (+) strand; PAM type: NRG; PAM sequence: GAG
agggtgcgctacgcaaagtg

SEQ ID NO: 121572 - DNA, 20 bp, Artificial Sequence
  Description of Artificial Sequence: Synthetic oligonucleotide
  Target: LAMA2; (+) strand; PAM type: NRG; PAM sequence: AGG
gggtgcgctacgcaaagtgg

SEQ ID NO: 121573 - DNA, 20 bp, Artificial Sequence
  Description of Artificial Sequence: Synthetic oligonucleotide
  Target: LAMA2; (+) strand; PAM type: NRG; PAM sequence: GGG
ggtgcgctacgcaaagtgga

SEQ ID NO: 121574 - DNA, 20 bp, Artificial Sequence
  Description of Artificial Sequence: Synthetic oligonucleotide
  Target: LAMA2; (+) strand; PAM type: NRG; PAM sequence: TAG
gtttttgttgttgttgtttt

SEQ ID NO: 121575 - DNA, 20 bp, Artificial Sequence
  Description of Artificial Sequence: Synthetic oligonucleotide
  Target: LAMA2; (+) strand; PAM type: NRG; PAM sequence: GAG
ttttgttgttgttgttttta

SEQ ID NO: 121576 - DNA, 20 bp, Artificial Sequence
  Description of Artificial Sequence: Synthetic oligonucleotide
  Target: LAMA2; (+) strand; PAM type: NRG; PAM sequence: CAG
gttgttgttgtttttagaga

SEQ ID NO: 121577 - DNA, 20 bp, Artificial Sequence
  Description of Artificial Sequence: Synthetic oligonucleotide
  Target: LAMA2; (+) strand; PAM type: NRG; PAM sequence: AGG
ttgttgttgtttttagagac

SEQ ID NO: 121578 - DNA, 20 bp, Artificial Sequence
  Description of Artificial Sequence: Synthetic oligonucleotide
  Target: LAMA2; (+) strand; PAM type: NRG; PAM sequence: GGG
tgttgttgtttttagagaca

SEQ ID NO: 121579 - DNA, 20 bp, Artificial Sequence
  Description of Artificial Sequence: Synthetic oligonucleotide
  Target: LAMA2; (+) strand; PAM type: NRG; PAM sequence: CAG
tcacccatctttgcccactg

SEQ ID NO: 121580 - DNA, 20 bp, Artificial Sequence
  Description of Artificial Sequence: Synthetic oligonucleotide
  Target: LAMA2; (+) strand; PAM type: NRG; PAM sequence: TGG
ccactgcagccttgaactac

SEQ ID NO: 121581 - DNA, 20 bp, Artificial Sequence
  Description of Artificial Sequence: Synthetic oligonucleotide
  Target: LAMA2; (+) strand; PAM type: NRG; PAM sequence: GGG
cactgcagccttgaactact

SEQ ID NO: 121582 - DNA, 20 bp, Artificial Sequence
  Description of Artificial Sequence: Synthetic oligonucleotide
  Target: LAMA2; (+) strand; PAM type: NRG; PAM sequence: AAG
agccttgaactactgggctc

SEQ ID NO: 121583 - DNA, 20 bp, Artificial Sequence
  Description of Artificial Sequence: Synthetic oligonucleotide
  Target: LAMA2; (+) strand; PAM type: NRG; PAM sequence: CAG
ctcaagtgatcctcctgcct

SEQ ID NO: 121584 - DNA, 20 bp, Artificial Sequence
  Description of Artificial Sequence: Synthetic oligonucleotide
  Target: LAMA2; (+) strand; PAM type: NRG; PAM sequence: CAG
cctcctgcctcagtctccct

SEQ ID NO: 121585 - DNA, 20 bp, Artificial Sequence
  Description of Artificial Sequence: Synthetic oligonucleotide
  Target: LAMA2; (+) strand; PAM type: NRG; PAM sequence: TGG
gcctcagtctccctcagtgc

SEQ ID NO: 121586 - DNA, 20 bp, Artificial Sequence
  Description of Artificial Sequence: Synthetic oligonucleotide
  Target: LAMA2; (+) strand; PAM type: NRG; PAM sequence: GGG
cctcagtctccctcagtgct

SEQ ID NO: 121587 - DNA, 20 bp, Artificial Sequence
  Description of Artificial Sequence: Synthetic oligonucleotide
  Target: LAMA2; (+) strand; PAM type: NRG; PAM sequence: GAG
agtgctgggattacaaatgt

SEQ ID NO: 121588 - DNA, 20 bp, Artificial Sequence
  Description of Artificial Sequence: Synthetic oligonucleotide
  Target: LAMA2; (+) strand; PAM type: NRG; PAM sequence: AAG
caatgttttcttgattgtaa

SEQ ID NO: 121589 - DNA, 20 bp, Artificial Sequence
  Description of Artificial Sequence: Synthetic oligonucleotide
  Target: LAMA2; (+) strand; PAM type: NRG; PAM sequence: TGG
tgattgtaaaagaaaattga

SEQ ID NO: 121590 - DNA, 20 bp, Artificial Sequence
  Description of Artificial Sequence: Synthetic oligonucleotide
  Target: LAMA2; (+) strand; PAM type: NRG; PAM sequence: CAG
tgatggtttctcatgttcac

SEQ ID NO: 121591 - DNA, 20 bp, Artificial Sequence
  Description of Artificial Sequence: Synthetic oligonucleotide
  Target: LAMA2; (+) strand; PAM type: NRG; PAM sequence: GAG
atggtttctcatgttcacca

SEQ ID NO: 121592 - DNA, 20 bp, Artificial Sequence
  Description of Artificial Sequence: Synthetic oligonucleotide
  Target: LAMA2; (+) strand; PAM type: NRG; PAM sequence: AGG
tggtttctcatgttcaccag

SEQ ID NO: 121593 - DNA, 20 bp, Artificial Sequence
  Description of Artificial Sequence: Synthetic oligonucleotide
  Target: LAMA2; (+) strand; PAM type: NRG; PAM sequence: GGG
ggtttctcatgttcaccaga

SEQ ID NO: 121594 - DNA, 20 bp, Artificial Sequence
  Description of Artificial Sequence: Synthetic oligonucleotide
  Target: LAMA2; (+) strand; PAM type: NRG; PAM sequence: AAG
ttactccttctttcacttta

SEQ ID NO: 121595 - DNA, 20 bp, Artificial Sequence
  Description of Artificial Sequence: Synthetic oligonucleotide
  Target: LAMA2; (+) strand; PAM type: NRG; PAM sequence: CAG
attctattcataaatatgac

SEQ ID NO: 121596 - DNA, 20 bp, Artificial Sequence
  Description of Artificial Sequence: Synthetic oligonucleotide
  Target: LAMA2; (+) strand; PAM type: NRG; PAM sequence: TAG
aaatatgaccagtcacaact

SEQ ID NO: 121597 - DNA, 20 bp, Artificial Sequence
  Description of Artificial Sequence: Synthetic oligonucleotide
  Target: LAMA2; (+) strand; PAM type: NRG; PAM sequence: TAG
cacattttgttcttctataa

SEQ ID NO: 121598 - DNA, 20 bp, Artificial Sequence
  Description of Artificial Sequence: Synthetic oligonucleotide
  Target: LAMA2; (+) strand; PAM type: NRG; PAM sequence: TGG
ttctataatagatttgtgta

SEQ ID NO: 121599 - DNA, 20 bp, Artificial Sequence
  Description of Artificial Sequence: Synthetic oligonucleotide
  Target: LAMA2; (+) strand; PAM type: NRG; PAM sequence: TAG
ttgtgtatggtttcatatat

SEQ ID NO: 121600 - DNA, 20 bp, Artificial Sequence
  Description of Artificial Sequence: Synthetic oligonucleotide
  Target: LAMA2; (+) strand; PAM type: NRG; PAM sequence: GAG
gtgtatggtttcatatatta

SEQ ID NO: 121601 - DNA, 20 bp, Artificial Sequence
  Description of Artificial Sequence: Synthetic oligonucleotide
  Target: LAMA2; (+) strand; PAM type: NRG; PAM sequence: TAG
tgaatttattgtaatttact

SEQ ID NO: 121602 - DNA, 20 bp, Artificial Sequence
  Description of Artificial Sequence: Synthetic oligonucleotide
  Target: LAMA2; (+) strand; PAM type: NRG; PAM sequence: TAG
gaaatactgatgttaacatc

SEQ ID NO: 121603 - DNA, 20 bp, Artificial Sequence
  Description of Artificial Sequence: Synthetic oligonucleotide
  Target: LAMA2; (+) strand; PAM type: NRG; PAM sequence: GAG
aacatctagtatgtttattt

SEQ ID NO: 121604 - DNA, 20 bp, Artificial Sequence
  Description of Artificial Sequence: Synthetic oligonucleotide
  Target: LAMA2; (+) strand; PAM type: NRG; PAM sequence: AGG
acatctagtatgtttatttg

SEQ ID NO: 121605 - DNA, 20 bp, Artificial Sequence
  Description of Artificial Sequence: Synthetic oligonucleotide
  Target: LAMA2; (+) strand; PAM type: NRG; PAM sequence: GGG
catctagtatgtttatttga

SEQ ID NO: 121606 - DNA, 20 bp, Artificial Sequence
  Description of Artificial Sequence: Synthetic oligonucleotide
  Target: LAMA2; (+) strand; PAM type: NRG; PAM sequence: TAG
gtatgtttatttgagggata

SEQ ID NO: 121607 - DNA, 20 bp, Artificial Sequence
  Description of Artificial Sequence: Synthetic oligonucleotide
  Target: LAMA2; (+) strand; PAM type: NRG; PAM sequence: AGG
tatgtttatttgagggatat

SEQ ID NO: 121608 - DNA, 20 bp, Artificial Sequence
  Description of Artificial Sequence: Synthetic oligonucleotide
  Target: LAMA2; (+) strand; PAM type: NRG; PAM sequence: GAG
tgtttatttgagggatatag

SEQ ID NO: 121609 - DNA, 20 bp, Artificial Sequence
  Description of Artificial Sequence: Synthetic oligonucleotide
  Target: LAMA2; (+) strand; PAM type: NRG; PAM sequence: AGG
gtttatttgagggatatagg

SEQ ID NO: 121610 - DNA, 20 bp, Artificial Sequence
  Description of Artificial Sequence: Synthetic oligonucleotide
  Target: LAMA2; (+) strand; PAM type: NRG; PAM sequence: CAG
tgagggatataggaggctta

SEQ ID NO: 121611 - DNA, 20 bp, Artificial Sequence
  Description of Artificial Sequence: Synthetic oligonucleotide
  Target: LAMA2; (+) strand; PAM type: NRG; PAM sequence: AAG
agtgaaatcatcctttcacc

SEQ ID NO: 121612 - DNA, 20 bp, Artificial Sequence
  Description of Artificial Sequence: Synthetic oligonucleotide
  Target: LAMA2; (+) strand; PAM type: NRG; PAM sequence: AAG
tttcaccaagatttctttgt

SEQ ID NO: 121613 - DNA, 20 bp, Artificial Sequence
  Description of Artificial Sequence: Synthetic oligonucleotide
  Target: LAMA2; (+) strand; PAM type: NRG; PAM sequence: TGG
tctttgtaagacactgttac

SEQ ID NO: 121614 - DNA, 20 bp, Artificial Sequence
  Description of Artificial Sequence: Synthetic oligonucleotide
  Target: LAMA2; (+) strand; PAM type: NRG; PAM sequence: TGG
ccattctacttcactacaaa

SEQ ID NO: 121615 - DNA, 20 bp, Artificial Sequence
  Description of Artificial Sequence: Synthetic oligonucleotide
  Target: LAMA2; (+) strand; PAM type: NRG; PAM sequence: AAG
attatatctgactccacaat

SEQ ID NO: 121616 - DNA, 20 bp, Artificial Sequence
  Description of Artificial Sequence: Synthetic oligonucleotide
  Target: LAMA2; (+) strand; PAM type: NRG; PAM sequence: TGG
atatctgactccacaataag

SEQ ID NO: 121617 - DNA, 20 bp, Artificial Sequence
  Description of Artificial Sequence: Synthetic oligonucleotide
  Target: LAMA2; (+) strand; PAM type: NRG; PAM sequence: GGG
tatctgactccacaataagt

SEQ ID NO: 121618 - DNA, 20 bp, Artificial Sequence
  Description of Artificial Sequence: Synthetic oligonucleotide
  Target: LAMA2; (+) strand; PAM type: NRG; PAM sequence: CAG
actccacaataagtgggttc

SEQ ID NO: 121619 - DNA, 20 bp, Artificial Sequence
  Description of Artificial Sequence: Synthetic oligonucleotide
  Target: LAMA2; (+) strand; PAM type: NRG; PAM sequence: TAG
gttccagaatcgttgacatt

SEQ ID NO: 121620 - DNA, 20 bp, Artificial Sequence
  Description of Artificial Sequence: Synthetic oligonucleotide
  Target: LAMA2; (+) strand; PAM type: NRG; PAM sequence: TAG
ccagaatcgttgacatttag

SEQ ID NO: 121621 - DNA, 20 bp, Artificial Sequence
  Description of Artificial Sequence: Synthetic oligonucleotide
  Target: LAMA2; (+) strand; PAM type: NRG; PAM sequence: CAG
gttgacatttagtagaatta

SEQ ID NO: 121622 - DNA, 20 bp, Artificial Sequence
  Description of Artificial Sequence: Synthetic oligonucleotide
  Target: LAMA2; (+) strand; PAM type: NRG; PAM sequence: TAG
tttagtagaattacagatct

SEQ ID NO: 121623 - DNA, 20 bp, Artificial Sequence
  Description of Artificial Sequence: Synthetic oligonucleotide
  Target: LAMA2; (+) strand; PAM type: NRG; PAM sequence: AAG
gtgctttcaattctgtttta

SEQ ID NO: 121624 - DNA, 20 bp, Artificial Sequence
  Description of Artificial Sequence: Synthetic oligonucleotide
  Target: LAMA2; (+) strand; PAM type: NRG; PAM sequence: TGG
gaaattgccattgatttaca

SEQ ID NO: 121625 - DNA, 20 bp, Artificial Sequence
  Description of Artificial Sequence: Synthetic oligonucleotide
  Target: LAMA2; (+) strand; PAM type: NRG; PAM sequence: TGG
cattgatttacatggttgta

SEQ ID NO: 121626 - DNA, 20 bp, Artificial Sequence
  Description of Artificial Sequence: Synthetic oligonucleotide
  Target: LAMA2; (+) strand; PAM type: NRG; PAM sequence: AAG
tgatttacatggttgtatgg

SEQ ID NO: 121627 - DNA, 20 bp, Artificial Sequence
  Description of Artificial Sequence: Synthetic oligonucleotide
  Target: LAMA2; (+) strand; PAM type: NRG; PAM sequence: GAG
atttacatggttgtatggaa

SEQ ID NO: 121628 - DNA, 20 bp, Artificial Sequence
  Description of Artificial Sequence: Synthetic oligonucleotide
  Target: LAMA2; (+) strand; PAM type: NRG; PAM sequence: TGG
aatgccattgcctgatttcc

SEQ ID NO: 121629 - DNA, 20 bp, Artificial Sequence
  Description of Artificial Sequence: Synthetic oligonucleotide
  Target: LAMA2; (+) strand; PAM type: NRG; PAM sequence: TGG
gccattgcctgatttcctgg

SEQ ID NO: 121630 - DNA, 20 bp, Artificial Sequence
  Description of Artificial Sequence: Synthetic oligonucleotide
  Target: LAMA2; (+) strand; PAM type: NRG; PAM sequence: TAG
aatcatttacaaatatttct

SEQ ID NO: 121631 - DNA, 20 bp, Artificial Sequence
  Description of Artificial Sequence: Synthetic oligonucleotide
  Target: LAMA2; (+) strand; PAM type: NRG; PAM sequence: AGG
atcatttacaaatatttctt

SEQ ID NO: 121632 - DNA, 20 bp, Artificial Sequence
  Description of Artificial Sequence: Synthetic oligonucleotide
  Target: LAMA2; (+) strand; PAM type: NRG; PAM sequence: GGG
tcatttacaaatatttctta

SEQ ID NO: 121633 - DNA, 20 bp, Artificial Sequence
  Description of Artificial Sequence: Synthetic oligonucleotide
  Target: LAMA2; (+) strand; PAM type: NRG; PAM sequence: TGG
acaaatatttcttagggtat

SEQ ID NO: 121634 - DNA, 20 bp, Artificial Sequence
  Description of Artificial Sequence: Synthetic oligonucleotide
  Target: LAMA2; (+) strand; PAM type: NRG; PAM sequence: TGG
cttagggtattggctactgt

SEQ ID NO: 121635 - DNA, 20 bp, Artificial Sequence
  Description of Artificial Sequence: Synthetic oligonucleotide
  Target: LAMA2; (+) strand; PAM type: NRG; PAM sequence: GAG
ggctactgttggtttgaaat

SEQ ID NO: 121636 - DNA, 20 bp, Artificial Sequence
  Description of Artificial Sequence: Synthetic oligonucleotide
  Target: LAMA2; (+) strand; PAM type: NRG; PAM sequence: TGG
ttgaaatgagatacaactta

SEQ ID NO: 121637 - DNA, 20 bp, Artificial Sequence
  Description of Artificial Sequence: Synthetic oligonucleotide
  Target: LAMA2; (+) strand; PAM type: NRG; PAM sequence: TAG
atgtttgtgcaaattttctc

SEQ ID NO: 121638 - DNA, 20 bp, Artificial Sequence
  Description of Artificial Sequence: Synthetic oligonucleotide
  Target: LAMA2; (+) strand; PAM type: NRG; PAM sequence: CAG
tttgtgcaaattttctctag

SEQ ID NO: 121639 - DNA, 20 bp, Artificial Sequence
  Description of Artificial Sequence: Synthetic oligonucleotide
  Target: LAMA2; (+) strand; PAM type: NRG; PAM sequence: TGG
cagtaattctaaaacctttg

SEQ ID NO: 121640 - DNA, 20 bp, Artificial Sequence
  Description of Artificial Sequence: Synthetic oligonucleotide
  Target: LAMA2; (+) strand; PAM type: NRG; PAM sequence: AAG
ctaaaacctttgtggacatt

SEQ ID NO: 121641 - DNA, 20 bp, Artificial Sequence
  Description of Artificial Sequence: Synthetic oligonucleotide
  Target: LAMA2; (+) strand; PAM type: NRG; PAM sequence: TAG
tggacattaagctgtaattg

SEQ ID NO: 121642 - DNA, 20 bp, Artificial Sequence
  Description of Artificial Sequence: Synthetic oligonucleotide
  Target: LAMA2; (+) strand; PAM type: NRG; PAM sequence: AAG
taattgtagctttctcttgc

SEQ ID NO: 121643 - DNA, 20 bp, Artificial Sequence
  Description of Artificial Sequence: Synthetic oligonucleotide
  Target: LAMA2; (+) strand; PAM type: NRG; PAM sequence: TAG
tctgctttattattcccttg

SEQ ID NO: 121644 - DNA, 20 bp, Artificial Sequence
  Description of Artificial Sequence: Synthetic oligonucleotide
  Target: LAMA2; (+) strand; PAM type: NRG; PAM sequence: AGG
ctgctttattattcccttgt

SEQ ID NO: 121645 - DNA, 20 bp, Artificial Sequence
  Description of Artificial Sequence: Synthetic oligonucleotide
  Target: LAMA2; (+) strand; PAM type: NRG; PAM sequence: AAG
ttattcccttgtaggaaatt

SEQ ID NO: 121646 - DNA, 20 bp, Artificial Sequence
  Description of Artificial Sequence: Synthetic oligonucleotide
  Target: LAMA2; (+) strand; PAM type: NRG; PAM sequence: TAG
gtattttatataataatgct

SEQ ID NO: 121647 - DNA, 20 bp, Artificial Sequence
  Description of Artificial Sequence: Synthetic oligonucleotide
  Target: LAMA2; (+) strand; PAM type: NRG; PAM sequence: AAG
tagaacatctttctctttta

SEQ ID NO: 121648 - DNA, 20 bp, Artificial Sequence
  Description of Artificial Sequence: Synthetic oligonucleotide
  Target: LAMA2; (+) strand; PAM type: NRG; PAM sequence: GAG
gaacatctttctcttttaaa

SEQ ID NO: 121649 - DNA, 20 bp, Artificial Sequence
  Description of Artificial Sequence: Synthetic oligonucleotide
  Target: LAMA2; (+) strand; PAM type: NRG; PAM sequence: AGG
aacatctttctcttttaaag

SEQ ID NO: 121650 - DNA, 20 bp, Artificial Sequence
  Description of Artificial Sequence: Synthetic oligonucleotide
  Target: LAMA2; (+) strand; PAM type: NRG; PAM sequence: GGG
acatctttctcttttaaaga

SEQ ID NO: 121651 - DNA, 20 bp, Artificial Sequence
  Description of Artificial Sequence: Synthetic oligonucleotide
  Target: LAMA2; (+) strand; PAM type: NRG; PAM sequence: AAG
ctcttttaaagagggaaatt

SEQ ID NO: 121652 - DNA, 20 bp, Artificial Sequence
  Description of Artificial Sequence: Synthetic oligonucleotide
  Target: LAMA2; (+) strand; PAM type: NRG; PAM sequence: AAG
taaagagggaaattaagata

SEQ ID NO: 121653 - DNA, 20 bp, Artificial Sequence
  Description of Artificial Sequence: Synthetic oligonucleotide
  Target: LAMA2; (+) strand; PAM type: NRG; PAM sequence: GAG
aagagggaaattaagataaa

SEQ ID NO: 121654 - DNA, 20 bp, Artificial Sequence
  Description of Artificial Sequence: Synthetic oligonucleotide
  Target: LAMA2; (+) strand; PAM type: NRG; PAM sequence: TGG
ggaaattaagataaagagct

SEQ ID NO: 121655 - DNA, 20 bp, Artificial Sequence
  Description of Artificial Sequence: Synthetic oligonucleotide
  Target: LAMA2; (+) strand; PAM type: NRG; PAM sequence: TAG
gataaagagcttggcaaata

SEQ ID NO: 121656 - DNA, 20 bp, Artificial Sequence
  Description of Artificial Sequence: Synthetic oligonucleotide
  Target: LAMA2; (+) strand; PAM type: NRG; PAM sequence: AGG
ataaagagcttggcaaatat

SEQ ID NO: 121657 - DNA, 20 bp, Artificial Sequence
  Description of Artificial Sequence: Synthetic oligonucleotide
  Target: LAMA2; (+) strand; PAM type: NRG; PAM sequence: TGG
ggcaaatataggatctttcc

SEQ ID NO: 121658 - DNA, 20 bp, Artificial Sequence
  Description of Artificial Sequence: Synthetic oligonucleotide
  Target: LAMA2; (+) strand; PAM type: NRG; PAM sequence: GAG
ttcctggattgtatgtttct

SEQ ID NO: 121659 - DNA, 20 bp, Artificial Sequence
  Description of Artificial Sequence: Synthetic oligonucleotide
  Target: LAMA2; (+) strand; PAM type: NRG; PAM sequence: TGG
gattgtatgtttctgagatt

SEQ ID NO: 121660 - DNA, 20 bp, Artificial Sequence
  Description of Artificial Sequence: Synthetic oligonucleotide
  Target: LAMA2; (+) strand; PAM type: NRG; PAM sequence: CAG
atgtttctgagatttggtga

SEQ ID NO: 121661 - DNA, 20 bp, Artificial Sequence
  Description of Artificial Sequence: Synthetic oligonucleotide
  Target: LAMA2; (+) strand; PAM type: NRG; PAM sequence: GAG
gtttctgagatttggtgaca

SEQ ID NO: 121662 - DNA, 20 bp, Artificial Sequence
  Description of Artificial Sequence: Synthetic oligonucleotide
  Target: LAMA2; (+) strand; PAM type: NRG; PAM sequence: TGG
tggtgacagagcgtctgctg

SEQ ID NO: 121663 - DNA, 20 bp, Artificial Sequence
  Description of Artificial Sequence: Synthetic oligonucleotide
  Target: LAMA2; (+) strand; PAM type: NRG; PAM sequence: GAG
gtgacagagcgtctgctgtg

SEQ ID NO: 121664 - DNA, 20 bp, Artificial Sequence
  Description of Artificial Sequence: Synthetic oligonucleotide
  Target: LAMA2; (+) strand; PAM type: NRG; PAM sequence: AGG
tgacagagcgtctgctgtgg

SEQ ID NO: 121665 - DNA, 20 bp, Artificial Sequence
  Description of Artificial Sequence: Synthetic oligonucleotide
  Target: LAMA2; (+) strand; PAM type: NRG; PAM sequence: TGG
agagcgtctgctgtggagga

SEQ ID NO: 121666 - DNA, 20 bp, Artificial Sequence
  Description of Artificial Sequence: Synthetic oligonucleotide
  Target: LAMA2; (+) strand; PAM type: NRG; PAM sequence: GGG
gagcgtctgctgtggaggat

SEQ ID NO: 121667 - DNA, 20 bp, Artificial Sequence
  Description of Artificial Sequence: Synthetic oligonucleotide
  Target: LAMA2; (+) strand; PAM type: NRG; PAM sequence: GGG
agcgtctgctgtggaggatg

SEQ ID NO: 121668 - DNA, 20 bp, Artificial Sequence
  Description of Artificial Sequence: Synthetic oligonucleotide
  Target: LAMA2; (+) strand; PAM type: NRG; PAM sequence: AAG
gtctgctgtggaggatgggg

SEQ ID NO: 121669 - DNA, 20 bp, Artificial Sequence
  Description of Artificial Sequence: Synthetic oligonucleotide
  Target: LAMA2; (+) strand; PAM type: NRG; PAM sequence: AGG
tctgctgtggaggatgggga

SEQ ID NO: 121670 - DNA, 20 bp, Artificial Sequence
  Description of Artificial Sequence: Synthetic oligonucleotide
  Target: LAMA2; (+) strand; PAM type: NRG; PAM sequence: CGG
ctgtggaggatggggaagga

SEQ ID NO: 121671 - DNA, 20 bp, Artificial Sequence
  Description of Artificial Sequence: Synthetic oligonucleotide
  Target: LAMA2; (+) strand; PAM type: NRG; PAM sequence: TGG
aggatggggaaggacggatc

SEQ ID NO: 121672 - DNA, 20 bp, Artificial Sequence
  Description of Artificial Sequence: Synthetic oligonucleotide
  Target: LAMA2; (+) strand; PAM type: NRG; PAM sequence: GGG
ggatggggaaggacggatct

SEQ ID NO: 121673 - DNA, 20 bp, Artificial Sequence
  Description of Artificial Sequence: Synthetic oligonucleotide
  Target: LAMA2; (+) strand; PAM type: NRG; PAM sequence: AAG
ggaaggacggatctgggctg

SEQ ID NO: 121674 - DNA, 20 bp, Artificial Sequence
  Description of Artificial Sequence: Synthetic oligonucleotide
  Target: LAMA2; (+) strand; PAM type: NRG; PAM sequence: AAG
aggacggatctgggctgaag

SEQ ID NO: 121675 - DNA, 20 bp, Artificial Sequence
  Description of Artificial Sequence: Synthetic oligonucleotide
  Target: LAMA2; (+) strand; PAM type: NRG; PAM sequence: TAG
acggatctgggctgaagaag

SEQ ID NO: 121676 - DNA, 20 bp, Artificial Sequence
  Description of Artificial Sequence: Synthetic oligonucleotide
  Target: LAMA2; (+) strand; PAM type: NRG; PAM sequence: CAG
atctgggctgaagaagtaga

SEQ ID NO: 121677 - DNA, 20 bp, Artificial Sequence
  Description of Artificial Sequence: Synthetic oligonucleotide
  Target: LAMA2; (+) strand; PAM type: NRG; PAM sequence: GAG
ctgggctgaagaagtagaca

SEQ ID NO: 121678 - DNA, 20 bp, Artificial Sequence
  Description of Artificial Sequence: Synthetic oligonucleotide
  Target: LAMA2; (+) strand; PAM type: NRG; PAM sequence: CAG
gctgaagaagtagacagaga

SEQ ID NO: 121679 - DNA, 20 bp, Artificial Sequence
  Description of Artificial Sequence: Synthetic oligonucleotide
  Target: LAMA2; (+) strand; PAM type: NRG; PAM sequence: TGG
gaagaagtagacagagacag

SEQ ID NO: 121680 - DNA, 20 bp, Artificial Sequence
  Description of Artificial Sequence: Synthetic oligonucleotide
  Target: LAMA2; (+) strand; PAM type: NRG; PAM sequence: TGG
tagacagagacagtggactt

SEQ ID NO: 121681 - DNA, 20 bp, Artificial Sequence
  Description of Artificial Sequence: Synthetic oligonucleotide
  Target: LAMA2; (+) strand; PAM type: NRG; PAM sequence: AAG
agacagtggactttggtttt

SEQ ID NO: 121682 - DNA, 20 bp, Artificial Sequence
  Description of Artificial Sequence: Synthetic oligonucleotide
  Target: LAMA2; (+) strand; PAM type: NRG; PAM sequence: GAG
acagtggactttggttttaa

SEQ ID NO: 121683 - DNA, 20 bp, Artificial Sequence
  Description of Artificial Sequence: Synthetic oligonucleotide
  Target: LAMA2; (+) strand; PAM type: NRG; PAM sequence: AGG
cagtggactttggttttaag

SEQ ID NO: 121684 - DNA, 20 bp, Artificial Sequence
  Description of Artificial Sequence: Synthetic oligonucleotide
  Target: LAMA2; (+) strand; PAM type: NRG; PAM sequence: TGG
ggttttaagaggcctgctgc

SEQ ID NO: 121685 - DNA, 20 bp, Artificial Sequence
  Description of Artificial Sequence: Synthetic oligonucleotide
  Target: LAMA2; (+) strand; PAM type: NRG; PAM sequence: GGG
gttttaagaggcctgctgct

SEQ ID NO: 121686 - DNA, 20 bp, Artificial Sequence
  Description of Artificial Sequence: Synthetic oligonucleotide
  Target: LAMA2; (+) strand; PAM type: NRG; PAM sequence: TAG
gggatcttctcacccatccc

SEQ ID NO: 121687 - DNA, 20 bp, Artificial Sequence
  Description of Artificial Sequence: Synthetic oligonucleotide
  Target: LAMA2; (+) strand; PAM type: NRG; PAM sequence: CAG
atcttctcacccatccctag

SEQ ID NO: 121688 - DNA, 20 bp, Artificial Sequence
  Description of Artificial Sequence: Synthetic oligonucleotide
  Target: LAMA2; (+) strand; PAM type: NRG; PAM sequence: GAG
cttctcacccatccctagca

SEQ ID NO: 121689 - DNA, 20 bp, Artificial Sequence
  Description of Artificial Sequence: Synthetic oligonucleotide
  Target: LAMA2; (+) strand; PAM type: NRG; PAM sequence: CAG
cacccatccctagcagagct

SEQ ID NO: 121690 - DNA, 20 bp, Artificial Sequence
  Description of Artificial Sequence: Synthetic oligonucleotide
  Target: LAMA2; (+) strand; PAM type: NRG; PAM sequence: AAG
ccatccctagcagagctcag

SEQ ID NO: 121691 - DNA, 20 bp, Artificial Sequence
  Description of Artificial Sequence: Synthetic oligonucleotide
  Target: LAMA2; (+) strand; PAM type: NRG; PAM sequence: TAG
tccctagcagagctcagaag

SEQ ID NO: 121692 - DNA, 20 bp, Artificial Sequence
  Description of Artificial Sequence: Synthetic oligonucleotide
  Target: LAMA2; (+) strand; PAM type: NRG; PAM sequence: AGG
ccctagcagagctcagaagt

SEQ ID NO: 121693 - DNA, 20 bp, Artificial Sequence
  Description of Artificial Sequence: Synthetic oligonucleotide
  Target: LAMA2; (+) strand; PAM type: NRG; PAM sequence: CAG
agagctcagaagtaggcatc

SEQ ID NO: 121694 - DNA, 20 bp, Artificial Sequence
  Description of Artificial Sequence: Synthetic oligonucleotide
  Target: LAMA2; (+) strand; PAM type: NRG; PAM sequence: CAG
cagaagtaggcatccagctg

SEQ ID NO: 121695 - DNA, 20 bp, Artificial Sequence
  Description of Artificial Sequence: Synthetic oligonucleotide
  Target: LAMA2; (+) strand; PAM type: NRG; PAM sequence: AGG
agaagtaggcatccagctgc

SEQ ID NO: 121696 - DNA, 20 bp, Artificial Sequence
  Description of Artificial Sequence: Synthetic oligonucleotide
  Target: LAMA2; (+) strand; PAM type: NRG; PAM sequence: TGG
agctgcaggtaattgtgttt

SEQ ID NO: 121697 - DNA, 20 bp, Artificial Sequence
  Description of Artificial Sequence: Synthetic oligonucleotide
  Target: LAMA2; (+) strand; PAM type: NRG; PAM sequence: GGG
gctgcaggtaattgtgtttt

SEQ ID NO: 121698 - DNA, 20 bp, Artificial Sequence
  Description of Artificial Sequence: Synthetic oligonucleotide
  Target: LAMA2; (+) strand; PAM type: NRG; PAM sequence: AAG
gtaattgtgttttgggctca

SEQ ID NO: 121699 - DNA, 20 bp, Artificial Sequence
  Description of Artificial Sequence: Synthetic oligonucleotide
  Target: LAMA2; (+) strand; PAM type: NRG; PAM sequence: AGG
taattgtgttttgggctcaa

SEQ ID NO: 121700 - DNA, 20 bp, Artificial Sequence
  Description of Artificial Sequence: Synthetic oligonucleotide
  Target: LAMA2; (+) strand; PAM type: NRG; PAM sequence: GAG
attgtgttttgggctcaaag

SEQ ID NO: 121701 - DNA, 20 bp, Artificial Sequence
  Description of Artificial Sequence: Synthetic oligonucleotide
  Target: LAMA2; (+) strand; PAM type: NRG; PAM sequence: TAG
tttgggctcaaaggagccct

SEQ ID NO: 121702 - DNA, 20 bp, Artificial Sequence
  Description of Artificial Sequence: Synthetic oligonucleotide
  Target: LAMA2; (+) strand; PAM type: NRG; PAM sequence: GAG
tgggctcaaaggagccctta

SEQ ID NO: 121703 - DNA, 20 bp, Artificial Sequence
  Description of Artificial Sequence: Synthetic oligonucleotide
  Target: LAMA2; (+) strand; PAM type: NRG; PAM sequence: CAG
caaaggagcccttagagtgc

SEQ ID NO: 121704 - DNA, 20 bp, Artificial Sequence
  Description of Artificial Sequence: Synthetic oligonucleotide
  Target: LAMA2; (+) strand; PAM type: NRG; PAM sequence: AAG
cccttagagtgccagaccta

SEQ ID NO: 121705 - DNA, 20 bp, Artificial Sequence
  Description of Artificial Sequence: Synthetic oligonucleotide
  Target: LAMA2; (+) strand; PAM type: NRG; PAM sequence: GAG
cttagagtgccagacctaaa

SEQ ID NO: 121706 - DNA, 20 bp, Artificial Sequence
  Description of Artificial Sequence: Synthetic oligonucleotide
  Target: LAMA2; (+) strand; PAM type: NRG; PAM sequence: AGG
ttagagtgccagacctaaag

SEQ ID NO: 121707 - DNA, 20 bp, Artificial Sequence
  Description of Artificial Sequence: Synthetic oligonucleotide
  Target: LAMA2; (+) strand; PAM type: NRG; PAM sequence: AAG
ctaaagaggcaactcccgat

SEQ ID NO: 121708 - DNA, 20 bp, Artificial Sequence
  Description of Artificial Sequence: Synthetic oligonucleotide
  Target: LAMA2; (+) strand; PAM type: NRG; PAM sequence: GAG
aaagaggcaactcccgataa

SEQ ID NO: 121709 - DNA, 20 bp, Artificial Sequence
  Description of Artificial Sequence: Synthetic oligonucleotide
  Target: LAMA2; (+) strand; PAM type: NRG; PAM sequence: TAG
actcccgataagagtttcaa

SEQ ID NO: 121710 - DNA, 20 bp, Artificial Sequence
  Description of Artificial Sequence: Synthetic oligonucleotide
  Target: LAMA2; (+) strand; PAM type: NRG; PAM sequence: TAG
ttcaatagttttatccattc

SEQ ID NO: 121711 - DNA, 20 bp, Artificial Sequence
  Description of Artificial Sequence: Synthetic oligonucleotide
  Target: LAMA2; (+) strand; PAM type: NRG; PAM sequence: AAG
tctagaaccgccatttcctt

SEQ ID NO: 121712 - DNA, 20 bp, Artificial Sequence
  Description of Artificial Sequence: Synthetic oligonucleotide
  Target: LAMA2; (+) strand; PAM type: NRG; PAM sequence: GAG
tagaaccgccatttccttaa

SEQ ID NO: 121713 - DNA, 20 bp, Artificial Sequence
  Description of Artificial Sequence: Synthetic oligonucleotide
  Target: LAMA2; (+) strand; PAM type: NRG; PAM sequence: GAG
cgccatttccttaagagtct

SEQ ID NO: 121714 - DNA, 20 bp, Artificial Sequence
  Description of Artificial Sequence: Synthetic oligonucleotide
  Target: LAMA2; (+) strand; PAM type: NRG; PAM sequence: AGG
gccatttccttaagagtctg

SEQ ID NO: 121715 - DNA, 20 bp, Artificial Sequence
  Description of Artificial Sequence: Synthetic oligonucleotide
  Target: LAMA2; (+) strand; PAM type: NRG; PAM sequence: CAG
ttccttaagagtctgaggcc

SEQ ID NO: 121716 - DNA, 20 bp, Artificial Sequence
  Description of Artificial Sequence: Synthetic oligonucleotide
  Target: LAMA2; (+) strand; PAM type: NRG; PAM sequence: AGG
tccttaagagtctgaggccc

SEQ ID NO: 121717 - DNA, 20 bp, Artificial Sequence
  Description of Artificial Sequence: Synthetic oligonucleotide
  Target: LAMA2; (+) strand; PAM type: NRG; PAM sequence: GGG
ccttaagagtctgaggccca

SEQ ID NO: 121718 - DNA, 20 bp, Artificial Sequence
  Description of Artificial Sequence: Synthetic oligonucleotide
  Target: LAMA2; (+) strand; PAM type: NRG; PAM sequence: CAG
gaggcccagggaccaacgcc

SEQ ID NO: 121719 - DNA, 20 bp, Artificial Sequence
  Description of Artificial Sequence: Synthetic oligonucleotide
  Target: LAMA2; (+) strand; PAM type: NRG; PAM sequence: AGG
aggcccagggaccaacgccc

SEQ ID NO: 121720 - DNA, 20 bp, Artificial Sequence
  Description of Artificial Sequence: Synthetic oligonucleotide
  Target: LAMA2; (+) strand; PAM type: NRG; PAM sequence: TAG
aggacatatatacactttga

SEQ ID NO: 121721 - DNA, 20 bp, Artificial Sequence
  Description of Artificial Sequence: Synthetic oligonucleotide
  Target: LAMA2; (+) strand; PAM type: NRG; PAM sequence: AGG
ggacatatatacactttgat

SEQ ID NO: 121722 - DNA, 20 bp, Artificial Sequence
  Description of Artificial Sequence: Synthetic oligonucleotide
  Target: LAMA2; (+) strand; PAM type: NRG; PAM sequence: GAG
acatatatacactttgatag

SEQ ID NO: 121723 - DNA, 20 bp, Artificial Sequence
  Description of Artificial Sequence: Synthetic oligonucleotide
  Target: LAMA2; (+) strand; PAM type: NRG; PAM sequence: AGG
catatatacactttgatagg

SEQ ID NO: 121724 - DNA, 20 bp, Artificial Sequence
  Description of Artificial Sequence: Synthetic oligonucleotide
  Target: LAMA2; (+) strand; PAM type: NRG; PAM sequence: CAG
aggaacatttcaaattcatc

SEQ ID NO: 121725 - DNA, 20 bp, Artificial Sequence
  Description of Artificial Sequence: Synthetic oligonucleotide
  Target: LAMA2; (+) strand; PAM type: NRG; PAM sequence: AGG
ggaacatttcaaattcatcc

SEQ ID NO: 121726 - DNA, 20 bp, Artificial Sequence
  Description of Artificial Sequence: Synthetic oligonucleotide
  Target: LAMA2; (+) strand; PAM type: NRG; PAM sequence: AAG
atttcaaattcatccaggtc

SEQ ID NO: 121727 - DNA, 20 bp, Artificial Sequence
  Description of Artificial Sequence: Synthetic oligonucleotide
  Target: LAMA2; (+) strand; PAM type: NRG; PAM sequence: TAG
tccaggtcaagatcactcac

SEQ ID NO: 121728 - DNA, 20 bp, Artificial Sequence
  Description of Artificial Sequence: Synthetic oligonucleotide
  Target: LAMA2; (+) strand; PAM type: NRG; PAM sequence: AGG
ccaggtcaagatcactcact

SEQ ID NO: 121729 - DNA, 20 bp, Artificial Sequence
  Description of Artificial Sequence: Synthetic oligonucleotide
  Target: LAMA2; (+) strand; PAM type: NRG; PAM sequence: TGG
tcctccgcctcttttctgtc

SEQ ID NO: 121730 - DNA, 20 bp, Artificial Sequence
  Description of Artificial Sequence: Synthetic oligonucleotide
  Target: LAMA2; (+) strand; PAM type: NRG; PAM sequence: GAG
ctccgcctcttttctgtctg

SEQ ID NO: 121731 - DNA, 20 bp, Artificial Sequence
  Description of Artificial Sequence: Synthetic oligonucleotide
  Target: LAMA2; (+) strand; PAM type: NRG; PAM sequence: TAG
gcctcttttctgtctggagt

SEQ ID NO: 121732 - DNA, 20 bp, Artificial Sequence
  Description of Artificial Sequence: Synthetic oligonucleotide
  Target: LAMA2; (+) strand; PAM type: NRG; PAM sequence: AAG
ggagttagtaaccacctcaa

SEQ ID NO: 121733 - DNA, 20 bp, Artificial Sequence
  Description of Artificial Sequence: Synthetic oligonucleotide
  Target: LAMA2; (+) strand; PAM type: NRG; PAM sequence: CAG
ttagtaaccacctcaaaaga

SEQ ID NO: 121734 - DNA, 20 bp, Artificial Sequence
  Description of Artificial Sequence: Synthetic oligonucleotide
  Target: LAMA2; (+) strand; PAM type: NRG; PAM sequence: CAG
actcgtcattataccaccta

SEQ ID NO: 121735 - DNA, 20 bp, Artificial Sequence
  Description of Artificial Sequence: Synthetic oligonucleotide
  Target: LAMA2; (+) strand; PAM type: NRG; PAM sequence: TAG
accacctacagtcttacttt

SEQ ID NO: 121736 - DNA, 20 bp, Artificial Sequence
  Description of Artificial Sequence: Synthetic oligonucleotide
  Target: LAMA2; (+) strand; PAM type: NRG; PAM sequence: TGG
ctacagtcttacttttagct

SEQ ID NO: 121737 - DNA, 20 bp, Artificial Sequence
  Description of Artificial Sequence: Synthetic oligonucleotide
  Target: LAMA2; (+) strand; PAM type: NRG; PAM sequence: GAG
tcttacttttagcttggttt

SEQ ID NO: 121738 - DNA, 20 bp, Artificial Sequence
  Description of Artificial Sequence: Synthetic oligonucleotide
  Target: LAMA2; (+) strand; PAM type: NRG; PAM sequence: AGG
cttacttttagcttggtttg

SEQ ID NO: 121739 - DNA, 20 bp, Artificial Sequence
  Description of Artificial Sequence: Synthetic oligonucleotide
  Target: LAMA2; (+) strand; PAM type: NRG; PAM sequence: GGG
ttacttttagcttggtttga

SEQ ID NO: 121740 - DNA, 20 bp, Artificial Sequence
  Description of Artificial Sequence: Synthetic oligonucleotide
  Target: LAMA2; (+) strand; PAM type: NRG; PAM sequence: CAG
ggtgtcctgttcattactta

SEQ ID NO: 121741 - DNA, 20 bp, Artificial Sequence
  Description of Artificial Sequence: Synthetic oligonucleotide
  Target: LAMA2; (+) strand; PAM type: NRG; PAM sequence: CAG
ctgttcattacttacagaaa

SEQ ID NO: 121742 - DNA, 20 bp, Artificial Sequence
  Description of Artificial Sequence: Synthetic oligonucleotide
  Target: LAMA2; (+) strand; PAM type: NRG; PAM sequence: TGG
attacttacagaaacagatt

SEQ ID NO: 121743 - DNA, 20 bp, Artificial Sequence
  Description of Artificial Sequence: Synthetic oligonucleotide
  Target: LAMA2; (+) strand; PAM type: NRG; PAM sequence: GAG
tacttacagaaacagatttg

SEQ ID NO: 121744 - DNA, 20 bp, Artificial Sequence
  Description of Artificial Sequence: Synthetic oligonucleotide
  Target: LAMA2; (+) strand; PAM type: NRG; PAM sequence: CAG
agtgtgaatgcccttaacac

SEQ ID NO: 121745 - DNA, 20 bp, Artificial Sequence
  Description of Artificial Sequence: Synthetic oligonucleotide
  Target: LAMA2; (+) strand; PAM type: NRG; PAM sequence: AAG
cccttaacaccagttttaat

SEQ ID NO: 121746 - DNA, 20 bp, Artificial Sequence
  Description of Artificial Sequence: Synthetic oligonucleotide
  Target: LAMA2; (+) strand; PAM type: NRG; PAM sequence: CAG
aattctacaataatgtgatt

SEQ ID NO: 121747 - DNA, 20 bp, Artificial Sequence
  Description of Artificial Sequence: Synthetic oligonucleotide
  Target: LAMA2; (+) strand; PAM type: NRG; PAM sequence: GAG
ttctacaataatgtgattca

SEQ ID NO: 121748 - DNA, 20 bp, Artificial Sequence
  Description of Artificial Sequence: Synthetic oligonucleotide
  Target: LAMA2; (+) strand; PAM type: NRG; PAM sequence: TAG
ttcctttgtctctatctccc

SEQ ID NO: 121749 - DNA, 20 bp, Artificial Sequence
  Description of Artificial Sequence: Synthetic oligonucleotide
  Target: LAMA2; (+) strand; PAM type: NRG; PAM sequence: TAG
tttgtctctatctccctaga

SEQ ID NO: 121750 - DNA, 20 bp, Artificial Sequence
  Description of Artificial Sequence: Synthetic oligonucleotide
  Target: LAMA2; (+) strand; PAM type: NRG; PAM sequence: TGG
tctccctagatagaaatatg

SEQ ID NO: 121751 - DNA, 20 bp, Artificial Sequence
  Description of Artificial Sequence: Synthetic oligonucleotide
  Target: LAMA2; (+) strand; PAM type: NRG; PAM sequence: GAG
tccctagatagaaatatgtg

SEQ ID NO: 121752 - DNA, 20 bp, Artificial Sequence
  Description of Artificial Sequence: Synthetic oligonucleotide
  Target: LAMA2; (+) strand; PAM type: NRG; PAM sequence: AGG
ccctagatagaaatatgtgg

SEQ ID NO: 121753 - DNA, 20 bp, Artificial Sequence
  Description of Artificial Sequence: Synthetic oligonucleotide
  Target: LAMA2; (+) strand; PAM type: NRG; PAM sequence: TGG
agatagaaatatgtggaggt

SEQ ID NO: 121754 - DNA, 20 bp, Artificial Sequence
  Description of Artificial Sequence: Synthetic oligonucleotide
  Target: LAMA2; (+) strand; PAM type: NRG; PAM sequence: GAG
tggaggttggatttcctgct

SEQ ID NO: 121755 - DNA, 20 bp, Artificial Sequence
  Description of Artificial Sequence: Synthetic oligonucleotide
  Target: LAMA2; (+) strand; PAM type: NRG; PAM sequence: AAG
tttttttttttttttttttt

SEQ ID NO: 121756 - DNA, 20 bp, Artificial Sequence
  Description of Artificial Sequence: Synthetic oligonucleotide
  Target: LAMA2; (+) strand; PAM type: NRG; PAM sequence: TGG
ttttttttttttttttaaga

SEQ ID NO: 121757 - DNA, 20 bp, Artificial Sequence
  Description of Artificial Sequence: Synthetic oligonucleotide
  Target: LAMA2; (+) strand; PAM type: NRG; PAM sequence: GAG
ttttttttttttttaagatg

SEQ ID NO: 121758 - DNA, 20 bp, Artificial Sequence
  Description of Artificial Sequence: Synthetic oligonucleotide
  Target: LAMA2; (+) strand; PAM type: NRG; PAM sequence: CAG
tggagtctcaccctgttgcc

SEQ ID NO: 121759 - DNA, 20 bp, Artificial Sequence
  Description of Artificial Sequence: Synthetic oligonucleotide
  Target: LAMA2; (+) strand; PAM type: NRG; PAM sequence: AGG
ggagtctcaccctgttgccc

SEQ ID NO: 121760 - DNA, 20 bp, Artificial Sequence
  Description of Artificial Sequence: Synthetic oligonucleotide
  Target: LAMA2; (+) strand; PAM type: NRG; PAM sequence: TGG
tctcaccctgttgcccaggc

SEQ ID NO: 121761 - DNA, 20 bp, Artificial Sequence
  Description of Artificial Sequence: Synthetic oligonucleotide
  Target: LAMA2; (+) strand; PAM type: NRG; PAM sequence: GAG
tcaccctgttgcccaggctg

SEQ ID NO: 121762 - DNA, 20 bp, Artificial Sequence
  Description of Artificial Sequence: Synthetic oligonucleotide
  Target: LAMA2; (+) strand; PAM type: NRG; PAM sequence: TGG
ttgcccaggctggagtgcaa

SEQ ID NO: 121763 - DNA, 20 bp, Artificial Sequence
  Description of Artificial Sequence: Synthetic oligonucleotide
  Target: LAMA2; (+) strand; PAM type: NRG; PAM sequence: TGG
ggagtgcaatggcgtgatct

SEQ ID NO: 121764 - DNA, 20 bp, Artificial Sequence
  Description of Artificial Sequence: Synthetic oligonucleotide
  Target: LAMA2; (+) strand; PAM type: NRG; PAM sequence: CGG
tcactgcaacctccgcctcc

SEQ ID NO: 121765 - DNA, 20 bp, Artificial Sequence
  Description of Artificial Sequence: Synthetic oligonucleotide
  Target: LAMA2; (+) strand; PAM type: NRG; PAM sequence: GGG
cactgcaacctccgcctccc

SEQ ID NO: 121766 - DNA, 20 bp, Artificial Sequence
  Description of Artificial Sequence: Synthetic oligonucleotide
  Target: LAMA2; (+) strand; PAM type: NRG; PAM sequence: AAG
aacctccgcctcccgggttc

SEQ ID NO: 121767 - DNA, 20 bp, Artificial Sequence
  Description of Artificial Sequence: Synthetic oligonucleotide
  Target: LAMA2; (+) strand; PAM type: NRG; PAM sequence: CAG
ttcaagtgattctcctgcct

SEQ ID NO: 121768 - DNA, 20 bp, Artificial Sequence
  Description of Artificial Sequence: Synthetic oligonucleotide
  Target: LAMA2; (+) strand; PAM type: NRG; PAM sequence: GAG
ttctcctgcctcagcctcct

SEQ ID NO: 121769 - DNA, 20 bp, Artificial Sequence
  Description of Artificial Sequence: Synthetic oligonucleotide
  Target: LAMA2; (+) strand; PAM type: NRG; PAM sequence: TAG
tcctgcctcagcctcctgag

SEQ ID NO: 121770 - DNA, 20 bp, Artificial Sequence
  Description of Artificial Sequence: Synthetic oligonucleotide
  Target: LAMA2; (+) strand; PAM type: NRG; PAM sequence: TGG
gcctcagcctcctgagtagc

SEQ ID NO: 121771 - DNA, 20 bp, Artificial Sequence
  Description of Artificial Sequence: Synthetic oligonucleotide
  Target: LAMA2; (+) strand; PAM type: NRG; PAM sequence: GGG
cctcagcctcctgagtagct

SEQ ID NO: 121772 - DNA, 20 bp, Artificial Sequence
  Description of Artificial Sequence: Synthetic oligonucleotide
  Target: LAMA2; (+) strand; PAM type: NRG; PAM sequence: CAG
ctcctgagtagctgggatta

SEQ ID NO: 121773 - DNA, 20 bp, Artificial Sequence
  Description of Artificial Sequence: Synthetic oligonucleotide
  Target: LAMA2; (+) strand; PAM type: NRG; PAM sequence: AGG
tcctgagtagctgggattac

SEQ ID NO: 121774 - DNA, 20 bp, Artificial Sequence
  Description of Artificial Sequence: Synthetic oligonucleotide
  Target: LAMA2; (+) strand; PAM type: NRG; PAM sequence: GAG
gagtagctgggattacaggc

SEQ ID NO: 121775 - DNA, 20 bp, Artificial Sequence
  Description of Artificial Sequence: Synthetic oligonucleotide
  Target: LAMA2; (+) strand; PAM type: NRG; PAM sequence: TGG
caggcgagcgccaccatgcc

SEQ ID NO: 121776 - DNA, 20 bp, Artificial Sequence
  Description of Artificial Sequence: Synthetic oligonucleotide
  Target: LAMA2; (+) strand; PAM type: NRG; PAM sequence: TAG
ctaatttattcttgtatttt

SEQ ID NO: 121777 - DNA, 20 bp, Artificial Sequence
  Description of Artificial Sequence: Synthetic oligonucleotide
  Target: LAMA2; (+) strand; PAM type: NRG; PAM sequence: TAG
atttattcttgtatttttag

SEQ ID NO: 121778 - DNA, 20 bp, Artificial Sequence
  Description of Artificial Sequence: Synthetic oligonucleotide
  Target: LAMA2; (+) strand; PAM type: NRG; PAM sequence: AGG
tttattcttgtatttttagt

SEQ ID NO: 121779 - DNA, 20 bp, Artificial Sequence
  Description of Artificial Sequence: Synthetic oligonucleotide
  Target: LAMA2; (+) strand; PAM type: NRG; PAM sequence: GGG
ttattcttgtatttttagta

SEQ ID NO: 121780 - DNA, 20 bp, Artificial Sequence
  Description of Artificial Sequence: Synthetic oligonucleotide
  Target: LAMA2; (+) strand; PAM type: NRG; PAM sequence: TGG
tcttgtatttttagtaggga

SEQ ID NO: 121781 - DNA, 20 bp, Artificial Sequence
  Description of Artificial Sequence: Synthetic oligonucleotide
  Target: LAMA2; (+) strand; PAM type: NRG; PAM sequence: GGG
cttgtatttttagtagggat

SEQ ID NO: 121782 - DNA, 20 bp, Artificial Sequence
  Description of Artificial Sequence: Synthetic oligonucleotide
  Target: LAMA2; (+) strand; PAM type: NRG; PAM sequence: GGG
ttgtatttttagtagggatg

SEQ ID NO: 121783 - DNA, 20 bp, Artificial Sequence
  Description of Artificial Sequence: Synthetic oligonucleotide
  Target: LAMA2; (+) strand; PAM type: NRG; PAM sequence: TGG
gggatggggtttcactatgt

SEQ ID NO: 121784 - DNA, 20 bp, Artificial Sequence
  Description of Artificial Sequence: Synthetic oligonucleotide
  Target: LAMA2; (+) strand; PAM type: NRG; PAM sequence: CAG
tggggtttcactatgttggc

SEQ ID NO: 121785 - DNA, 20 bp, Artificial Sequence
  Description of Artificial Sequence: Synthetic oligonucleotide
  Target: LAMA2; (+) strand; PAM type: NRG; PAM sequence: AGG
ggggtttcactatgttggcc

SEQ ID NO: 121786 - DNA, 20 bp, Artificial Sequence
  Description of Artificial Sequence: Synthetic oligonucleotide
  Target: LAMA2; (+) strand; PAM type: NRG; PAM sequence: TGG
tttcactatgttggccaggc

SEQ ID NO: 121787 - DNA, 20 bp, Artificial Sequence
  Description of Artificial Sequence: Synthetic oligonucleotide
  Target: LAMA2; (+) strand; PAM type: NRG; PAM sequence: TGG
accttgtgatctgcctgcct

SEQ ID NO: 121788 - DNA, 20 bp, Artificial Sequence
  Description of Artificial Sequence: Synthetic oligonucleotide
  Target: LAMA2; (+) strand; PAM type: NRG; PAM sequence: AAG
ctgcctgccttggcctccca

SEQ ID NO: 121789 - DNA, 20 bp, Artificial Sequence
  Description of Artificial Sequence: Synthetic oligonucleotide
  Target: LAMA2; (+) strand; PAM type: NRG; PAM sequence: TGG
gccttggcctcccaaagttc

SEQ ID NO: 121790 - DNA, 20 bp, Artificial Sequence
  Description of Artificial Sequence: Synthetic oligonucleotide
  Target: LAMA2; (+) strand; PAM type: NRG; PAM sequence: GGG
ccttggcctcccaaagttct

SEQ ID NO: 121791 - DNA, 20 bp, Artificial Sequence
  Description of Artificial Sequence: Synthetic oligonucleotide
  Target: LAMA2; (+) strand; PAM type: NRG; PAM sequence: CAG
ctcccaaagttctgggatta

SEQ ID NO: 121792 - DNA, 20 bp, Artificial Sequence
  Description of Artificial Sequence: Synthetic oligonucleotide
  Target: LAMA2; (+) strand; PAM type: NRG; PAM sequence: AGG
tcccaaagttctgggattac

SEQ ID NO: 121793 - DNA, 20 bp, Artificial Sequence
  Description of Artificial Sequence: Synthetic oligonucleotide
  Target: LAMA2; (+) strand; PAM type: NRG; PAM sequence: CAG
gggattacaggtgtgaacca

SEQ ID NO: 121794 - DNA, 20 bp, Artificial Sequence
  Description of Artificial Sequence: Synthetic oligonucleotide
  Target: LAMA2; (+) strand; PAM type: NRG; PAM sequence: CAG
caggtgtgaaccacagtgcc

SEQ ID NO: 121795 - DNA, 20 bp, Artificial Sequence
  Description of Artificial Sequence: Synthetic oligonucleotide
  Target: LAMA2; (+) strand; PAM type: NRG; PAM sequence: GAG
cagtgcccagccttcctgct

SEQ ID NO: 121796 - DNA, 20 bp, Artificial Sequence
  Description of Artificial Sequence: Synthetic oligonucleotide
  Target: LAMA2; (+) strand; PAM type: NRG; PAM sequence: TAG
agccttcctgctgagtttct

SEQ ID NO: 121797 - DNA, 20 bp, Artificial Sequence
  Description of Artificial Sequence: Synthetic oligonucleotide
  Target: LAMA2; (+) strand; PAM type: NRG; PAM sequence: CAG
gagtttcttagcattattgc

SEQ ID NO: 121798 - DNA, 20 bp, Artificial Sequence
  Description of Artificial Sequence: Synthetic oligonucleotide
  Target: LAMA2; (+) strand; PAM type: NRG; PAM sequence: AGG
agtttcttagcattattgcc

SEQ ID NO: 121799 - DNA, 20 bp, Artificial Sequence
  Description of Artificial Sequence: Synthetic oligonucleotide
  Target: LAMA2; (+) strand; PAM type: NRG; PAM sequence: CGG
tcttagcattattgccaggt

SEQ ID NO: 121800 - DNA, 20 bp, Artificial Sequence
  Description of Artificial Sequence: Synthetic oligonucleotide
  Target: LAMA2; (+) strand; PAM type: NRG; PAM sequence: TAG
attattgccaggtcggaact

SEQ ID NO: 121801 - DNA, 20 bp, Artificial Sequence
  Description of Artificial Sequence: Synthetic oligonucleotide
  Target: LAMA2; (+) strand; PAM type: NRG; PAM sequence: AGG
ttattgccaggtcggaactt

SEQ ID NO: 121802 - DNA, 20 bp, Artificial Sequence
  Description of Artificial Sequence: Synthetic oligonucleotide
  Target: LAMA2; (+) strand; PAM type: NRG; PAM sequence: TAG
gccaggtcggaacttaggca

SEQ ID NO: 121803 - DNA, 20 bp, Artificial Sequence
  Description of Artificial Sequence: Synthetic oligonucleotide
  Target: LAMA2; (+) strand; PAM type: NRG; PAM sequence: AAG
tgaaacatgttctgcatctg

SEQ ID NO: 121804 - DNA, 20 bp, Artificial Sequence
  Description of Artificial Sequence: Synthetic oligonucleotide
  Target: LAMA2; (+) strand; PAM type: NRG; PAM sequence: AGG
gaaacatgttctgcatctga

SEQ ID NO: 121805 - DNA, 20 bp, Artificial Sequence
  Description of Artificial Sequence: Synthetic oligonucleotide
  Target: LAMA2; (+) strand; PAM type: NRG; PAM sequence: CAG
catgttctgcatctgaaggc

SEQ ID NO: 121806 - DNA, 20 bp, Artificial Sequence
  Description of Artificial Sequence: Synthetic oligonucleotide
  Target: LAMA2; (+) strand; PAM type: NRG; PAM sequence: AAG
tctgaaggccagaatataat

SEQ ID NO: 121807 - DNA, 20 bp, Artificial Sequence
  Description of Artificial Sequence: Synthetic oligonucleotide
  Target: LAMA2; (+) strand; PAM type: NRG; PAM sequence: TAG
tataataagcattgttaatt

SEQ ID NO: 121808 - DNA, 20 bp, Artificial Sequence
  Description of Artificial Sequence: Synthetic oligonucleotide
  Target: LAMA2; (+) strand; PAM type: NRG; PAM sequence: AAG
aagcattgttaatttagtta

SEQ ID NO: 121809 - DNA, 20 bp, Artificial Sequence
  Description of Artificial Sequence: Synthetic oligonucleotide
  Target: LAMA2; (+) strand; PAM type: NRG; PAM sequence: AGG
agcattgttaatttagttaa

SEQ ID NO: 121810 - DNA, 20 bp, Artificial Sequence
  Description of Artificial Sequence: Synthetic oligonucleotide
  Target: LAMA2; (+) strand; PAM type: NRG; PAM sequence: AAG
tgttaatttagttaaaggaa

SEQ ID NO: 121811 - DNA, 20 bp, Artificial Sequence
  Description of Artificial Sequence: Synthetic oligonucleotide
  Target: LAMA2; (+) strand; PAM type: NRG; PAM sequence: AGG
gttaatttagttaaaggaaa

SEQ ID NO: 121812 - DNA, 20 bp, Artificial Sequence
  Description of Artificial Sequence: Synthetic oligonucleotide
  Target: LAMA2; (+) strand; PAM type: NRG; PAM sequence: AAG
aaaggaaaaggctgctgttg

SEQ ID NO: 121813 - DNA, 20 bp, Artificial Sequence
  Description of Artificial Sequence: Synthetic oligonucleotide
  Target: LAMA2; (+) strand; PAM type: NRG; PAM sequence: AGG
aaggaaaaggctgctgttga

SEQ ID NO: 121814 - DNA, 20 bp, Artificial Sequence
  Description of Artificial Sequence: Synthetic oligonucleotide
  Target: LAMA2; (+) strand; PAM type: NRG; PAM sequence: TAG
aaaaggctgctgttgaaggt

SEQ ID NO: 121815 - DNA, 20 bp, Artificial Sequence
  Description of Artificial Sequence: Synthetic oligonucleotide
  Target: LAMA2; (+) strand; PAM type: NRG; PAM sequence: TGG
ttagacttcttgtgtatgtg

SEQ ID NO: 121816 - DNA, 20 bp, Artificial Sequence
  Description of Artificial Sequence: Synthetic oligonucleotide
  Target: LAMA2; (+) strand; PAM type: NRG; PAM sequence: GGG
tagacttcttgtgtatgtgt

SEQ ID NO: 121817 - DNA, 20 bp, Artificial Sequence
  Description of Artificial Sequence: Synthetic oligonucleotide
  Target: LAMA2; (+) strand; PAM type: NRG; PAM sequence: GAG
gacttcttgtgtatgtgtgg

SEQ ID NO: 121818 - DNA, 20 bp, Artificial Sequence
  Description of Artificial Sequence: Synthetic oligonucleotide
  Target: LAMA2; (+) strand; PAM type: NRG; PAM sequence: CAG
tgtgtatgtgtgggagataa

SEQ ID NO: 121819 - DNA, 20 bp, Artificial Sequence
  Description of Artificial Sequence: Synthetic oligonucleotide
  Target: LAMA2; (+) strand; PAM type: NRG; PAM sequence: AAG
cagaataacgtctcttttcc

SEQ ID NO: 121820 - DNA, 20 bp, Artificial Sequence
  Description of Artificial Sequence: Synthetic oligonucleotide
  Target: LAMA2; (+) strand; PAM type: NRG; PAM sequence: TGG
tctcttttccaagatgcata

SEQ ID NO: 121821 - DNA, 20 bp, Artificial Sequence
  Description of Artificial Sequence: Synthetic oligonucleotide
  Target: LAMA2; (+) strand; PAM type: NRG; PAM sequence: TGG
tatgtgccaattttaatcaa

SEQ ID NO: 121822 - DNA, 20 bp, Artificial Sequence
  Description of Artificial Sequence: Synthetic oligonucleotide
  Target: LAMA2; (+) strand; PAM type: NRG; PAM sequence: GAG
tgtgccaattttaatcaatg

SEQ ID NO: 121823 - DNA, 20 bp, Artificial Sequence
  Description of Artificial Sequence: Synthetic oligonucleotide
  Target: LAMA2; (+) strand; PAM type: NRG; PAM sequence: TAG
aattaaccattttataattt

SEQ ID NO: 121824 - DNA, 20 bp, Artificial Sequence
  Description of Artificial Sequence: Synthetic oligonucleotide
  Target: LAMA2; (+) strand; PAM type: NRG; PAM sequence: CGG
aaccattttataattttagt

SEQ ID NO: 121825 - DNA, 20 bp, Artificial Sequence
  Description of Artificial Sequence: Synthetic oligonucleotide
  Target: LAMA2; (+) strand; PAM type: NRG; PAM sequence: TGG
ttataattttagtcggatat

SEQ ID NO: 121826 - DNA, 20 bp, Artificial Sequence
  Description of Artificial Sequence: Synthetic oligonucleotide
  Target: LAMA2; (+) strand; PAM type: NRG; PAM sequence: CAG
ttagtcggatattggttgac

SEQ ID NO: 121827 - DNA, 20 bp, Artificial Sequence
  Description of Artificial Sequence: Synthetic oligonucleotide
  Target: LAMA2; (+) strand; PAM type: NRG; PAM sequence: TGG
gttgaccagtacttatatga

SEQ ID NO: 121828 - DNA, 20 bp, Artificial Sequence
  Description of Artificial Sequence: Synthetic oligonucleotide
  Target: LAMA2; (+) strand; PAM type: NRG; PAM sequence: AAG
agtacttatatgatggtata

SEQ ID NO: 121829 - DNA, 20 bp, Artificial Sequence
  Description of Artificial Sequence: Synthetic oligonucleotide
  Target: LAMA2; (+) strand; PAM type: NRG; PAM sequence: TAG
tatatgatggtataaagttc

SEQ ID NO: 121830 - DNA, 20 bp, Artificial Sequence
  Description of Artificial Sequence: Synthetic oligonucleotide
  Target: LAMA2; (+) strand; PAM type: NRG; PAM sequence: TGG
tggtataaagttctagaaac

SEQ ID NO: 121831 - DNA, 20 bp, Artificial Sequence
  Description of Artificial Sequence: Synthetic oligonucleotide
  Target: LAMA2; (+) strand; PAM type: NRG; PAM sequence: TGG
ccatataatgcattatattc

SEQ ID NO: 121832 - DNA, 20 bp, Artificial Sequence
  Description of Artificial Sequence: Synthetic oligonucleotide
  Target: LAMA2; (+) strand; PAM type: NRG; PAM sequence: GGG
catataatgcattatattct

SEQ ID NO: 121833 - DNA, 20 bp, Artificial Sequence
  Description of Artificial Sequence: Synthetic oligonucleotide
  Target: LAMA2; (+) strand; PAM type: NRG; PAM sequence: TAG
atgcattatattctgggtca

SEQ ID NO: 121834 - DNA, 20 bp, Artificial Sequence
  Description of Artificial Sequence: Synthetic oligonucleotide
  Target: LAMA2; (+) strand; PAM type: NRG; PAM sequence: TGG
ttattttcaaaatcaatctt

SEQ ID NO: 121835 - DNA, 20 bp, Artificial Sequence
  Description of Artificial Sequence: Synthetic oligonucleotide
  Target: LAMA2; (+) strand; PAM type: NRG; PAM sequence: GGG
tattttcaaaatcaatcttt

SEQ ID NO: 121836 - DNA, 20 bp, Artificial Sequence
  Description of Artificial Sequence: Synthetic oligonucleotide
  Target: LAMA2; (+) strand; PAM type: NRG; PAM sequence: GGG
attttcaaaatcaatctttg

SEQ ID NO: 121837 - DNA, 20 bp, Artificial Sequence
  Description of Artificial Sequence: Synthetic oligonucleotide
  Target: LAMA2; (+) strand; PAM type: NRG; PAM sequence: TAG
tctttggggtaacttctact

SEQ ID NO: 121838 - DNA, 20 bp, Artificial Sequence
  Description of Artificial Sequence: Synthetic oligonucleotide
  Target: LAMA2; (+) strand; PAM type: NRG; PAM sequence: GAG
tttggggtaacttctactta

SEQ ID NO: 121839 - DNA, 20 bp, Artificial Sequence
  Description of Artificial Sequence: Synthetic oligonucleotide
  Target: LAMA2; (+) strand; PAM type: NRG; PAM sequence: TAG
cacgtattttgataatcatt

SEQ ID NO: 121840 - DNA, 20 bp, Artificial Sequence
  Description of Artificial Sequence: Synthetic oligonucleotide
  Target: LAMA2; (+) strand; PAM type: NRG; PAM sequence: TAG
attttgataatcatttagat

SEQ ID NO: 121841 - DNA, 20 bp, Artificial Sequence
  Description of Artificial Sequence: Synthetic oligonucleotide
  Target: LAMA2; (+) strand; PAM type: NRG; PAM sequence: TGG
ttagattagtcttatttatg

SEQ ID NO: 121842 - DNA, 20 bp, Artificial Sequence
  Description of Artificial Sequence: Synthetic oligonucleotide
  Target: LAMA2; (+) strand; PAM type: NRG; PAM sequence: TGG
tatgtgtaataaaatttctt

SEQ ID NO: 121843 - DNA, 20 bp, Artificial Sequence
  Description of Artificial Sequence: Synthetic oligonucleotide
  Target: LAMA2; (+) strand; PAM type: NRG; PAM sequence: TGG
taaaatttctttggaaaata

SEQ ID NO: 121844 - DNA, 20 bp, Artificial Sequence
  Description of Artificial Sequence: Synthetic oligonucleotide
  Target: LAMA2; (+) strand; PAM type: NRG; PAM sequence: GAG
tttggaaaatatggtttatt

SEQ ID NO: 121845 - DNA, 20 bp, Artificial Sequence
  Description of Artificial Sequence: Synthetic oligonucleotide
  Target: LAMA2; (+) strand; PAM type: NRG; PAM sequence: CAG
tatttttttctgttccattg

SEQ ID NO: 121846 - DNA, 20 bp, Artificial Sequence
  Description of Artificial Sequence: Synthetic oligonucleotide
  Target: LAMA2; (+) strand; PAM type: NRG; PAM sequence: AGG
atttttttctgttccattgc

SEQ ID NO: 121847 - DNA, 20 bp, Artificial Sequence
  Description of Artificial Sequence: Synthetic oligonucleotide
  Target: LAMA2; (+) strand; PAM type: NRG; PAM sequence: TAG
tttctgttccattgcaggca

SEQ ID NO: 121848 - DNA, 20 bp, Artificial Sequence
  Description of Artificial Sequence: Synthetic oligonucleotide
  Target: LAMA2; (+) strand; PAM type: NRG; PAM sequence: CAG
gcatagtaccaattctgtgt

SEQ ID NO: 121849 - DNA, 20 bp, Artificial Sequence
  Description of Artificial Sequence: Synthetic oligonucleotide
  Target: LAMA2; (+) strand; PAM type: NRG; PAM sequence: AGG
catagtaccaattctgtgtc

SEQ ID NO: 121850 - DNA, 20 bp, Artificial Sequence
  Description of Artificial Sequence: Synthetic oligonucleotide
  Target: LAMA2; (+) strand; PAM type: NRG; PAM sequence: GAG
actttgtttcaactgttctt

SEQ ID NO: 121851 - DNA, 20 bp, Artificial Sequence
  Description of Artificial Sequence: Synthetic oligonucleotide
  Target: LAMA2; (+) strand; PAM type: NRG; PAM sequence: CGG
ttcaactgttcttgagatcc

SEQ ID NO: 121852 - DNA, 20 bp, Artificial Sequence
  Description of Artificial Sequence: Synthetic oligonucleotide
  Target: LAMA2; (+) strand; PAM type: NRG; PAM sequence: GAG
caactgttcttgagatcccg

SEQ ID NO: 121853 - DNA, 20 bp, Artificial Sequence
  Description of Artificial Sequence: Synthetic oligonucleotide
  Target: LAMA2; (+) strand; PAM type: NRG; PAM sequence: AGG
aactgttcttgagatcccgg

SEQ ID NO: 121854 - DNA, 20 bp, Artificial Sequence
  Description of Artificial Sequence: Synthetic oligonucleotide
  Target: LAMA2; (+) strand; PAM type: NRG; PAM sequence: TAG
ttcttgagatcccggaggat

SEQ ID NO: 121855 - DNA, 20 bp, Artificial Sequence
  Description of Artificial Sequence: Synthetic oligonucleotide
  Target: LAMA2; (+) strand; PAM type: NRG; PAM sequence: AGG
tcttgagatcccggaggatt

SEQ ID NO: 121856 - DNA, 20 bp, Artificial Sequence
  Description of Artificial Sequence: Synthetic oligonucleotide
  Target: LAMA2; (+) strand; PAM type: NRG; PAM sequence: CAG
ccggaggattaggactattg

SEQ ID NO: 121857 - DNA, 20 bp, Artificial Sequence
  Description of Artificial Sequence: Synthetic oligonucleotide
  Target: LAMA2; (+) strand; PAM type: NRG; PAM sequence: AAG
attaggactattgcagttat

SEQ ID NO: 121858 - DNA, 20 bp, Artificial Sequence
  Description of Artificial Sequence: Synthetic oligonucleotide
  Target: LAMA2; (+) strand; PAM type: NRG; PAM sequence: GAG
gcagttataagtctataact

SEQ ID NO: 121859 - DNA, 20 bp, Artificial Sequence
  Description of Artificial Sequence: Synthetic oligonucleotide
  Target: LAMA2; (+) strand; PAM type: NRG; PAM sequence: AGG
cagttataagtctataactg

SEQ ID NO: 121860 - DNA, 20 bp, Artificial Sequence
  Description of Artificial Sequence: Synthetic oligonucleotide
  Target: LAMA2; (+) strand; PAM type: NRG; PAM sequence: AAG
tataagtctataactgagga

SEQ ID NO: 121861 - DNA, 20 bp, Artificial Sequence
  Description of Artificial Sequence: Synthetic oligonucleotide
  Target: LAMA2; (+) strand; PAM type: NRG; PAM sequence: AGG
ataagtctataactgaggaa

SEQ ID NO: 121862 - DNA, 20 bp, Artificial Sequence
  Description of Artificial Sequence: Synthetic oligonucleotide
  Target: LAMA2; (+) strand; PAM type: NRG; PAM sequence: AAG
agtctataactgaggaaagg

SEQ ID NO: 121863 - DNA, 20 bp, Artificial Sequence
  Description of Artificial Sequence: Synthetic oligonucleotide
  Target: LAMA2; (+) strand; PAM type: NRG; PAM sequence: TGG
ctgaggaaaggaagcttatc

SEQ ID NO: 121864 - DNA, 20 bp, Artificial Sequence
  Description of Artificial Sequence: Synthetic oligonucleotide
  Target: LAMA2; (+) strand; PAM type: NRG; PAM sequence: CAG
ggaaaggaagcttatctgga

SEQ ID NO: 121865 - DNA, 20 bp, Artificial Sequence
  Description of Artificial Sequence: Synthetic oligonucleotide
  Target: LAMA2; (+) strand; PAM type: NRG; PAM sequence: AGG
gaaaggaagcttatctggac

SEQ ID NO: 121866 - DNA, 20 bp, Artificial Sequence
  Description of Artificial Sequence: Synthetic oligonucleotide
  Target: LAMA2; (+) strand; PAM type: NRG; PAM sequence: AAG
aggaagcttatctggacagg

SEQ ID NO: 121867 - DNA, 20 bp, Artificial Sequence
  Description of Artificial Sequence: Synthetic oligonucleotide
  Target: LAMA2; (+) strand; PAM type: NRG; PAM sequence: TAG
tatctggacaggaagatatt

SEQ ID NO: 121868 - DNA, 20 bp, Artificial Sequence
  Description of Artificial Sequence: Synthetic oligonucleotide
  Target: LAMA2; (+) strand; PAM type: NRG; PAM sequence: GAG
tctggacaggaagatattta

SEQ ID NO: 121869 - DNA, 20 bp, Artificial Sequence
  Description of Artificial Sequence: Synthetic oligonucleotide
  Target: LAMA2; (+) strand; PAM type: NRG; PAM sequence: AAG
gatatttagagtatgatata

SEQ ID NO: 121870 - DNA, 20 bp, Artificial Sequence
  Description of Artificial Sequence: Synthetic oligonucleotide
  Target: LAMA2; (+) strand; PAM type: NRG; PAM sequence: CAG
tttagagtatgatataaaga

SEQ ID NO: 121871 - DNA, 20 bp, Artificial Sequence
  Description of Artificial Sequence: Synthetic oligonucleotide
  Target: LAMA2; (+) strand; PAM type: NRG; PAM sequence: CAG
agacagtctctttttaaaaa

SEQ ID NO: 121872 - DNA, 20 bp, Artificial Sequence
  Description of Artificial Sequence: Synthetic oligonucleotide
  Target: LAMA2; (+) strand; PAM type: NRG; PAM sequence: AAG
tttttaaaaacagcatttta

SEQ ID NO: 121873 - DNA, 20 bp, Artificial Sequence
  Description of Artificial Sequence: Synthetic oligonucleotide
  Target: LAMA2; (+) strand; PAM type: NRG; PAM sequence: AGG
ttttaaaaacagcattttaa

SEQ ID NO: 121874 - DNA, 20 bp, Artificial Sequence
  Description of Artificial Sequence: Synthetic oligonucleotide
  Target: LAMA2; (+) strand; PAM type: NRG; PAM sequence: AAG
ttcttttattattatacttt

SEQ ID NO: 121875 - DNA, 20 bp, Artificial Sequence
  Description of Artificial Sequence: Synthetic oligonucleotide
  Target: LAMA2; (+) strand; PAM type: NRG; PAM sequence: TAG
tattattatactttaagttt

SEQ ID NO: 121876 - DNA, 20 bp, Artificial Sequence
  Description of Artificial Sequence: Synthetic oligonucleotide
  Target: LAMA2; (+) strand; PAM type: NRG; PAM sequence: AGG
attattatactttaagtttt

SEQ ID NO: 121877 - DNA, 20 bp, Artificial Sequence
  Description of Artificial Sequence: Synthetic oligonucleotide
  Target: LAMA2; (+) strand; PAM type: NRG; PAM sequence: GGG
ttattatactttaagtttta

SEQ ID NO: 121878 - DNA, 20 bp, Artificial Sequence
  Description of Artificial Sequence: Synthetic oligonucleotide
  Target: LAMA2; (+) strand; PAM type: NRG; PAM sequence: CAG
gggtacatgtgcacattgtg

SEQ ID NO: 121879 - DNA, 20 bp, Artificial Sequence
  Description of Artificial Sequence: Synthetic oligonucleotide
  Target: LAMA2; (+) strand; PAM type: NRG; PAM sequence: AGG
ggtacatgtgcacattgtgc

SEQ ID NO: 121880 - DNA, 20 bp, Artificial Sequence
  Description of Artificial Sequence: Synthetic oligonucleotide
  Target: LAMA2; (+) strand; PAM type: NRG; PAM sequence: TAG
catgtgcacattgtgcaggt

SEQ ID NO: 121881 - DNA, 20 bp, Artificial Sequence
  Description of Artificial Sequence: Synthetic oligonucleotide
  Target: LAMA2; (+) strand; PAM type: NRG; PAM sequence: TGG
tatgtatacatgtgccatgc

SEQ ID NO: 121882 - DNA, 20 bp, Artificial Sequence
  Description of Artificial Sequence: Synthetic oligonucleotide
  Target: LAMA2; (+) strand; PAM type: NRG; PAM sequence: TAG
gcacccactaactcgtcatc

SEQ ID NO: 121883 - DNA, 20 bp, Artificial Sequence
  Description of Artificial Sequence: Synthetic oligonucleotide
  Target: LAMA2; (+) strand; PAM type: NRG; PAM sequence: TAG
actaactcgtcatctagcat

SEQ ID NO: 121884 - DNA, 20 bp, Artificial Sequence
  Description of Artificial Sequence: Synthetic oligonucleotide
  Target: LAMA2; (+) strand; PAM type: NRG; PAM sequence: AGG
ctaactcgtcatctagcatt

SEQ ID NO: 121885 - DNA, 20 bp, Artificial Sequence
  Description of Artificial Sequence: Synthetic oligonucleotide
  Target: LAMA2; (+) strand; PAM type: NRG; PAM sequence: CAG
ccactccccccaccccacaa

SEQ ID NO: 121886 - DNA, 20 bp, Artificial Sequence
  Description of Artificial Sequence: Synthetic oligonucleotide
  Target: LAMA2; (+) strand; PAM type: NRG; PAM sequence: CAG
ccccaccccacaacagtccc

SEQ ID NO: 121887 - DNA, 20 bp, Artificial Sequence
  Description of Artificial Sequence: Synthetic oligonucleotide
  Target: LAMA2; (+) strand; PAM type: NRG; PAM sequence: GAG
ccaccccacaacagtcccca

SEQ ID NO: 121888 - DNA, 20 bp, Artificial Sequence
  Description of Artificial Sequence: Synthetic oligonucleotide
  Target: LAMA2; (+) strand; PAM type: NRG; PAM sequence: GAG
ttcaattcccacctatgatt

SEQ ID NO: 121889 - DNA, 20 bp, Artificial Sequence
  Description of Artificial Sequence: Synthetic oligonucleotide
  Target: LAMA2; (+) strand; PAM type: NRG; PAM sequence: CGG
cacctatgattgagaacatg

SEQ ID NO: 121890 - DNA, 20 bp, Artificial Sequence
  Description of Artificial Sequence: Synthetic oligonucleotide
  Target: LAMA2; (+) strand; PAM type: NRG; PAM sequence: TGG
gattgagaacatgcggtgtt

SEQ ID NO: 121891 - DNA, 20 bp, Artificial Sequence
  Description of Artificial Sequence: Synthetic oligonucleotide
  Target: LAMA2; (+) strand; PAM type: NRG; PAM sequence: TAG
ttggttttttattcttgtga

SEQ ID NO: 121892 - DNA, 20 bp, Artificial Sequence
  Description of Artificial Sequence: Synthetic oligonucleotide
  Target: LAMA2; (+) strand; PAM type: NRG; PAM sequence: GAG
tattcttgtgatagtttgct

SEQ ID NO: 121893 - DNA, 20 bp, Artificial Sequence
  Description of Artificial Sequence: Synthetic oligonucleotide
  Target: LAMA2; (+) strand; PAM type: NRG; PAM sequence: AAG
atttcatccatgtccctaca

SEQ ID NO: 121894 - DNA, 20 bp, Artificial Sequence
  Description of Artificial Sequence: Synthetic oligonucleotide
  Target: LAMA2; (+) strand; PAM type: NRG; PAM sequence: AGG
tttcatccatgtccctacaa

SEQ ID NO: 121895 - DNA, 20 bp, Artificial Sequence
  Description of Artificial Sequence: Synthetic oligonucleotide
  Target: LAMA2; (+) strand; PAM type: NRG; PAM sequence: TGG
catgaactcatcatttttta

SEQ ID NO: 121896 - DNA, 20 bp, Artificial Sequence
  Description of Artificial Sequence: Synthetic oligonucleotide
  Target: LAMA2; (+) strand; PAM type: NRG; PAM sequence: TAG
catcattttttatggctgca

SEQ ID NO: 121897 - DNA, 20 bp, Artificial Sequence
  Description of Artificial Sequence: Synthetic oligonucleotide
  Target: LAMA2; (+) strand; PAM type: NRG; PAM sequence: TGG
tatggctgcatagtattcca

SEQ ID NO: 121898 - DNA, 20 bp, Artificial Sequence
  Description of Artificial Sequence: Synthetic oligonucleotide
  Target: LAMA2; (+) strand; PAM type: NRG; PAM sequence: CAG
tgtgccacattttcttaatc

SEQ ID NO: 121899 - DNA, 20 bp, Artificial Sequence
  Description of Artificial Sequence: Synthetic oligonucleotide
  Target: LAMA2; (+) strand; PAM type: NRG; PAM sequence: TGG
ttaatccagtctatcgttgt

SEQ ID NO: 121900 - DNA, 20 bp, Artificial Sequence
  Description of Artificial Sequence: Synthetic oligonucleotide
  Target: LAMA2; (+) strand; PAM type: NRG; PAM sequence: TGG
gtctatcgttgttggacatt

SEQ ID NO: 121901 - DNA, 20 bp, Artificial Sequence
  Description of Artificial Sequence: Synthetic oligonucleotide
  Target: LAMA2; (+) strand; PAM type: NRG; PAM sequence: GGG
tctatcgttgttggacattt

SEQ ID NO: 121902 - DNA, 20 bp, Artificial Sequence
  Description of Artificial Sequence: Synthetic oligonucleotide
  Target: LAMA2; (+) strand; PAM type: NRG; PAM sequence: TGG
tcgttgttggacatttgggt

SEQ ID NO: 121903 - DNA, 20 bp, Artificial Sequence
  Description of Artificial Sequence: Synthetic oligonucleotide
  Target: LAMA2; (+) strand; PAM type: NRG; PAM sequence: AAG
tggacatttgggttggttcc

SEQ ID NO: 121904 - DNA, 20 bp, Artificial Sequence
  Description of Artificial Sequence: Synthetic oligonucleotide
  Target: LAMA2; (+) strand; PAM type: NRG; PAM sequence: TAG
caagtctttgctattgtgaa

SEQ ID NO: 121905 - DNA, 20 bp, Artificial Sequence
  Description of Artificial Sequence: Synthetic oligonucleotide
  Target: LAMA2; (+) strand; PAM type: NRG; PAM sequence: TAG
tatgtgtgcatgtgtcttta

SEQ ID NO: 121906 - DNA, 20 bp, Artificial Sequence
  Description of Artificial Sequence: Synthetic oligonucleotide
  Target: LAMA2; (+) strand; PAM type: NRG; PAM sequence: CAG
gtgtgcatgtgtctttatag

SEQ ID NO: 121907 - DNA, 20 bp, Artificial Sequence
  Description of Artificial Sequence: Synthetic oligonucleotide
  Target: LAMA2; (+) strand; PAM type: NRG; PAM sequence: TAG
ctttatagcagcatgattta

SEQ ID NO: 121908 - DNA, 20 bp, Artificial Sequence
  Description of Artificial Sequence: Synthetic oligonucleotide
  Target: LAMA2; (+) strand; PAM type: NRG; PAM sequence: TGG
cagcatgatttatagtcctt

SEQ ID NO: 121909 - DNA, 20 bp, Artificial Sequence
  Description of Artificial Sequence: Synthetic oligonucleotide
  Target: LAMA2; (+) strand; PAM type: NRG; PAM sequence: GGG
agcatgatttatagtccttt

SEQ ID NO: 121910 - DNA, 20 bp, Artificial Sequence
  Description of Artificial Sequence: Synthetic oligonucleotide
  Target: LAMA2; (+) strand; PAM type: NRG; PAM sequence: CAG
tagtcctttgggtatatacc

SEQ ID NO: 121911 - DNA, 20 bp, Artificial Sequence
  Description of Artificial Sequence: Synthetic oligonucleotide
  Target: LAMA2; (+) strand; PAM type: NRG; PAM sequence: TGG
tttgggtatatacccagtaa

SEQ ID NO: 121912 - DNA, 20 bp, Artificial Sequence
  Description of Artificial Sequence: Synthetic oligonucleotide
  Target: LAMA2; (+) strand; PAM type: NRG; PAM sequence: GGG
ttgggtatatacccagtaat

SEQ ID NO: 121913 - DNA, 20 bp, Artificial Sequence
  Description of Artificial Sequence: Synthetic oligonucleotide
  Target: LAMA2; (+) strand; PAM type: NRG; PAM sequence: TGG
gtatatacccagtaatggga

SEQ ID NO: 121914 - DNA, 20 bp, Artificial Sequence
  Description of Artificial Sequence: Synthetic oligonucleotide
  Target: LAMA2; (+) strand; PAM type: NRG; PAM sequence: TGG
atacccagtaatgggatggc

SEQ ID NO: 121915 - DNA, 20 bp, Artificial Sequence
  Description of Artificial Sequence: Synthetic oligonucleotide
  Target: LAMA2; (+) strand; PAM type: NRG; PAM sequence: GGG
tacccagtaatgggatggct

SEQ ID NO: 121916 - DNA, 20 bp, Artificial Sequence
  Description of Artificial Sequence: Synthetic oligonucleotide
  Target: LAMA2; (+) strand; PAM type: NRG; PAM sequence: TGG
aatgggatggctgggtcaaa

SEQ ID NO: 121917 - DNA, 20 bp, Artificial Sequence
  Description of Artificial Sequence: Synthetic oligonucleotide
  Target: LAMA2; (+) strand; PAM type: NRG; PAM sequence: TAG
gctgggtcaaatggtatttc

SEQ ID NO: 121918 - DNA, 20 bp, Artificial Sequence
  Description of Artificial Sequence: Synthetic oligonucleotide
  Target: LAMA2; (+) strand; PAM type: NRG; PAM sequence: TAG
tcaaatggtatttctagttc

SEQ ID NO: 121919 - DNA, 20 bp, Artificial Sequence
  Description of Artificial Sequence: Synthetic oligonucleotide
  Target: LAMA2; (+) strand; PAM type: NRG; PAM sequence: GAG
atttctagttctagatccct

SEQ ID NO: 121920 - DNA, 20 bp, Artificial Sequence
  Description of Artificial Sequence: Synthetic oligonucleotide
  Target: LAMA2; (+) strand; PAM type: NRG; PAM sequence: AGG
tttctagttctagatccctg

SEQ ID NO: 121921 - DNA, 20 bp, Artificial Sequence
  Description of Artificial Sequence: Synthetic oligonucleotide
  Target: LAMA2; (+) strand; PAM type: NRG; PAM sequence: TGG
cgccacactgacttccacaa

SEQ ID NO: 121922 - DNA, 20 bp, Artificial Sequence
  Description of Artificial Sequence: Synthetic oligonucleotide
  Target: LAMA2; (+) strand; PAM type: NRG; PAM sequence: TAG
gacttccacaatggttgaac

SEQ ID NO: 121923 - DNA, 20 bp, Artificial Sequence
  Description of Artificial Sequence: Synthetic oligonucleotide
  Target: LAMA2; (+) strand; PAM type: NRG; PAM sequence: CAG
acaatggttgaactagttta

SEQ ID NO: 121924 - DNA, 20 bp, Artificial Sequence
  Description of Artificial Sequence: Synthetic oligonucleotide
  Target: LAMA2; (+) strand; PAM type: NRG; PAM sequence: CAG
ctagtttacagtcccaccaa

SEQ ID NO: 121925 - DNA, 20 bp, Artificial Sequence
  Description of Artificial Sequence: Synthetic oligonucleotide
  Target: LAMA2; (+) strand; PAM type: NRG; PAM sequence: AAG
cagtcccaccaacagtgtaa

SEQ ID NO: 121926 - DNA, 20 bp, Artificial Sequence
  Description of Artificial Sequence: Synthetic oligonucleotide
  Target: LAMA2; (+) strand; PAM type: NRG; PAM sequence: CAG
ctatttctccacatcctctc

SEQ ID NO: 121927 - DNA, 20 bp, Artificial Sequence
  Description of Artificial Sequence: Synthetic oligonucleotide
  Target: LAMA2; (+) strand; PAM type: NRG; PAM sequence: TGG
ttaatgactgccattctaac

SEQ ID NO: 121928 - DNA, 20 bp, Artificial Sequence
  Description of Artificial Sequence: Synthetic oligonucleotide
  Target: LAMA2; (+) strand; PAM type: NRG; PAM sequence: GAG
actgccattctaactggtgt

SEQ ID NO: 121929 - DNA, 20 bp, Artificial Sequence
  Description of Artificial Sequence: Synthetic oligonucleotide
  Target: LAMA2; (+) strand; PAM type: NRG; PAM sequence: TGG
ccattctaactggtgtgaga

SEQ ID NO: 121930 - DNA, 20 bp, Artificial Sequence
  Description of Artificial Sequence: Synthetic oligonucleotide
  Target: LAMA2; (+) strand; PAM type: NRG; PAM sequence: TGG
tgtgagatggtatctcattg

SEQ ID NO: 121931 - DNA, 20 bp, Artificial Sequence
  Description of Artificial Sequence: Synthetic oligonucleotide
  Target: LAMA2; (+) strand; PAM type: NRG; PAM sequence: TGG
tttgatttgcatttctctga

SEQ ID NO: 121932 - DNA, 20 bp, Artificial Sequence
  Description of Artificial Sequence: Synthetic oligonucleotide
  Target: LAMA2; (+) strand; PAM type: NRG; PAM sequence: CAG
atttgcatttctctgatggc

SEQ ID NO: 121933 - DNA, 20 bp, Artificial Sequence
  Description of Artificial Sequence: Synthetic oligonucleotide
  Target: LAMA2; (+) strand; PAM type: NRG; PAM sequence: GAG
ctctgatggccagtgatgat

SEQ ID NO: 121934 - DNA, 20 bp, Artificial Sequence
  Description of Artificial Sequence: Synthetic oligonucleotide
  Target: LAMA2; (+) strand; PAM type: NRG; PAM sequence: TGG
gcattttttcatgtgttttt

SEQ ID NO: 121935 - DNA, 20 bp, Artificial Sequence
  Description of Artificial Sequence: Synthetic oligonucleotide
  Target: LAMA2; (+) strand; PAM type: NRG; PAM sequence: GAG
ctgcataaatgtcttctttt

SEQ ID NO: 121936 - DNA, 20 bp, Artificial Sequence
  Description of Artificial Sequence: Synthetic oligonucleotide
  Target: LAMA2; (+) strand; PAM type: NRG; PAM sequence: AAG
cataaatgtcttcttttgag

SEQ ID NO: 121937 - DNA, 20 bp, Artificial Sequence
  Description of Artificial Sequence: Synthetic oligonucleotide
  Target: LAMA2; (+) strand; PAM type: NRG; PAM sequence: TGG
gtccttcgcccactttttga

SEQ ID NO: 121938 - DNA, 20 bp, Artificial Sequence
  Description of Artificial Sequence: Synthetic oligonucleotide
  Target: LAMA2; (+) strand; PAM type: NRG; PAM sequence: GGG
tccttcgcccactttttgat

SEQ ID NO: 121939 - DNA, 20 bp, Artificial Sequence
  Description of Artificial Sequence: Synthetic oligonucleotide
  Target: LAMA2; (+) strand; PAM type: NRG; PAM sequence: GGG
ccttcgcccactttttgatg

SEQ ID NO: 121940 - DNA, 20 bp, Artificial Sequence
  Description of Artificial Sequence: Synthetic oligonucleotide
  Target: LAMA2; (+) strand; PAM type: NRG; PAM sequence: GAG
tttttcttgtaaatttgttt

SEQ ID NO: 121941 - DNA, 20 bp, Artificial Sequence
  Description of Artificial Sequence: Synthetic oligonucleotide
  Target: LAMA2; (+) strand; PAM type: NRG; PAM sequence: TAG
aaatttgtttgagttcattg

SEQ ID NO: 121942 - DNA, 20 bp, Artificial Sequence
  Description of Artificial Sequence: Synthetic oligonucleotide
  Target: LAMA2; (+) strand; PAM type: NRG; PAM sequence: TGG
tttgagttcattgtagattc

SEQ ID NO: 121943 - DNA, 20 bp, Artificial Sequence
  Description of Artificial Sequence: Synthetic oligonucleotide
  Target: LAMA2; (+) strand; PAM type: NRG; PAM sequence: TAG
tcattgtagattctggatat

SEQ ID NO: 121944 - DNA, 20 bp, Artificial Sequence
  Description of Artificial Sequence: Synthetic oligonucleotide
  Target: LAMA2; (+) strand; PAM type: NRG; PAM sequence: CAG
tctggatattagccctttgt

SEQ ID NO: 121945 - DNA, 20 bp, Artificial Sequence
  Description of Artificial Sequence: Synthetic oligonucleotide
  Target: LAMA2; (+) strand; PAM type: NRG; PAM sequence: GAG
atattagccctttgtcagat

SEQ ID NO: 121946 - DNA, 20 bp, Artificial Sequence
  Description of Artificial Sequence: Synthetic oligonucleotide
  Target: LAMA2; (+) strand; PAM type: NRG; PAM sequence: TAG
ttagccctttgtcagatgag

SEQ ID NO: 121947 - DNA, 20 bp, Artificial Sequence
  Description of Artificial Sequence: Synthetic oligonucleotide
  Target: LAMA2; (+) strand; PAM type: NRG; PAM sequence: AGG
tagccctttgtcagatgagt

SEQ ID NO: 121948 - DNA, 20 bp, Artificial Sequence
  Description of Artificial Sequence: Synthetic oligonucleotide
  Target: LAMA2; (+) strand; PAM type: NRG; PAM sequence: TAG
gaaaattttctcccattttg

SEQ ID NO: 121949 - DNA, 20 bp, Artificial Sequence
  Description of Artificial Sequence: Synthetic oligonucleotide
  Target: LAMA2; (+) strand; PAM type: NRG; PAM sequence: AGG
aaaattttctcccattttgt

SEQ ID NO: 121950 - DNA, 20 bp, Artificial Sequence
  Description of Artificial Sequence: Synthetic oligonucleotide
  Target: LAMA2; (+) strand; PAM type: NRG; PAM sequence: TGG
aggttgcctgttcactctga

SEQ ID NO: 121951 - DNA, 20 bp, Artificial Sequence
  Description of Artificial Sequence: Synthetic oligonucleotide
  Target: LAMA2; (+) strand; PAM type: NRG; PAM sequence: TAG
ttgcctgttcactctgatgg

SEQ ID NO: 121952 - DNA, 20 bp, Artificial Sequence
  Description of Artificial Sequence: Synthetic oligonucleotide
  Target: LAMA2; (+) strand; PAM type: NRG; PAM sequence: CAG
tggtagtttcttttgctgca

SEQ ID NO: 121953 - DNA, 20 bp, Artificial Sequence
  Description of Artificial Sequence: Synthetic oligonucleotide
  Target: LAMA2; (+) strand; PAM type: NRG; PAM sequence: AAG
tagtttcttttgctgcacag

SEQ ID NO: 121954 - DNA, 20 bp, Artificial Sequence
  Description of Artificial Sequence: Synthetic oligonucleotide
  Target: LAMA2; (+) strand; PAM type: NRG; PAM sequence: TAG
tttgctgcacagaagctctt

SEQ ID NO: 121955 - DNA, 20 bp, Artificial Sequence
  Description of Artificial Sequence: Synthetic oligonucleotide
  Target: LAMA2; (+) strand; PAM type: NRG; PAM sequence: TAG
cagaagctctttagtttaat

SEQ ID NO: 121956 - DNA, 20 bp, Artificial Sequence
  Description of Artificial Sequence: Synthetic oligonucleotide
  Target: LAMA2; (+) strand; PAM type: NRG; PAM sequence: TGG
tagatcccatttgtccattt

SEQ ID NO: 121957 - DNA, 20 bp, Artificial Sequence
  Description of Artificial Sequence: Synthetic oligonucleotide
  Target: LAMA2; (+) strand; PAM type: NRG; PAM sequence: TGG
gcttttgttgccattgcttt

SEQ ID NO: 121958 - DNA, 20 bp, Artificial Sequence
  Description of Artificial Sequence: Synthetic oligonucleotide
  Target: LAMA2; (+) strand; PAM type: NRG; PAM sequence: TAG
tgccattgcttttggtgttt

SEQ ID NO: 121959 - DNA, 20 bp, Artificial Sequence
  Description of Artificial Sequence: Synthetic oligonucleotide
  Target: LAMA2; (+) strand; PAM type: NRG; PAM sequence: AAG
cttttggtgttttagacatg

SEQ ID NO: 121960 - DNA, 20 bp, Artificial Sequence
  Description of Artificial Sequence: Synthetic oligonucleotide
  Target: LAMA2; (+) strand; PAM type: NRG; PAM sequence: TGG
acccatgcctatgtcctgaa

SEQ ID NO: 121961 - DNA, 20 bp, Artificial Sequence
  Description of Artificial Sequence: Synthetic oligonucleotide
  Target: LAMA2; (+) strand; PAM type: NRG; PAM sequence: TAG
atgtcctgaatggtactgcc

SEQ ID NO: 121962 - DNA, 20 bp, Artificial Sequence
  Description of Artificial Sequence: Synthetic oligonucleotide
  Target: LAMA2; (+) strand; PAM type: NRG; PAM sequence: AGG
tgtcctgaatggtactgcct

SEQ ID NO: 121963 - DNA, 20 bp, Artificial Sequence
  Description of Artificial Sequence: Synthetic oligonucleotide
  Target: LAMA2; (+) strand; PAM type: NRG; PAM sequence: TAG
gtactgcctaggttttcttc

SEQ ID NO: 121964 - DNA, 20 bp, Artificial Sequence
  Description of Artificial Sequence: Synthetic oligonucleotide
  Target: LAMA2; (+) strand; PAM type: NRG; PAM sequence: AGG
tactgcctaggttttcttct

SEQ ID NO: 121965 - DNA, 20 bp, Artificial Sequence
  Description of Artificial Sequence: Synthetic oligonucleotide
  Target: LAMA2; (+) strand; PAM type: NRG; PAM sequence: GGG
actgcctaggttttcttcta

SEQ ID NO: 121966 - DNA, 20 bp, Artificial Sequence
  Description of Artificial Sequence: Synthetic oligonucleotide
  Target: LAMA2; (+) strand; PAM type: NRG; PAM sequence: TGG
gttttcttctagggttttta

SEQ ID NO: 121967 - DNA, 20 bp, Artificial Sequence
  Description of Artificial Sequence: Synthetic oligonucleotide
  Target: LAMA2; (+) strand; PAM type: NRG; PAM sequence: TAG
ttctagggtttttatggttt

SEQ ID NO: 121968 - DNA, 20 bp, Artificial Sequence
  Description of Artificial Sequence: Synthetic oligonucleotide
  Target: LAMA2; (+) strand; PAM type: NRG; PAM sequence: AGG
tctagggtttttatggtttt

SEQ ID NO: 121969 - DNA, 20 bp, Artificial Sequence
  Description of Artificial Sequence: Synthetic oligonucleotide
  Target: LAMA2; (+) strand; PAM type: NRG; PAM sequence: AAG
tggttttaggtctaacgttt

SEQ ID NO: 121970 - DNA, 20 bp, Artificial Sequence
  Description of Artificial Sequence: Synthetic oligonucleotide
  Target: LAMA2; (+) strand; PAM type: NRG; PAM sequence: AAG
tcttgaattgatttttgtat

SEQ ID NO: 121971 - DNA, 20 bp, Artificial Sequence
  Description of Artificial Sequence: Synthetic oligonucleotide
  Target: LAMA2; (+) strand; PAM type: NRG; PAM sequence: AGG
cttgaattgatttttgtata

SEQ ID NO: 121972 - DNA, 20 bp, Artificial Sequence
  Description of Artificial Sequence: Synthetic oligonucleotide
  Target: LAMA2; (+) strand; PAM type: NRG; PAM sequence: AAG
ttgatttttgtataaggtgt

SEQ ID NO: 121973 - DNA, 20 bp, Artificial Sequence
  Description of Artificial Sequence: Synthetic oligonucleotide
  Target: LAMA2; (+) strand; PAM type: NRG; PAM sequence: AGG
tgatttttgtataaggtgta

SEQ ID NO: 121974 - DNA, 20 bp, Artificial Sequence
  Description of Artificial Sequence: Synthetic oligonucleotide
  Target: LAMA2; (+) strand; PAM type: NRG; PAM sequence: AAG
tttttgtataaggtgtaagg

SEQ ID NO: 121975 - DNA, 20 bp, Artificial Sequence
  Description of Artificial Sequence: Synthetic oligonucleotide
  Target: LAMA2; (+) strand; PAM type: NRG; PAM sequence: AGG
ttttgtataaggtgtaagga

SEQ ID NO: 121976 - DNA, 20 bp, Artificial Sequence
  Description of Artificial Sequence: Synthetic oligonucleotide
  Target: LAMA2; (+) strand; PAM type: NRG; PAM sequence: GGG
tttgtataaggtgtaaggaa

SEQ ID NO: 121977 - DNA, 20 bp, Artificial Sequence
  Description of Artificial Sequence: Synthetic oligonucleotide
  Target: LAMA2; (+) strand; PAM type: NRG; PAM sequence: CAG
taaggtgtaaggaagggatc

SEQ ID NO: 121978 - DNA, 20 bp, Artificial Sequence
  Description of Artificial Sequence: Synthetic oligonucleotide
  Target: LAMA2; (+) strand; PAM type: NRG; PAM sequence: CAG
gtaaggaagggatccagttt

SEQ ID NO: 121979 - DNA, 20 bp, Artificial Sequence
  Description of Artificial Sequence: Synthetic oligonucleotide
  Target: LAMA2; (+) strand; PAM type: NRG; PAM sequence: TGG
cagtttcagctttctacata

SEQ ID NO: 121980 - DNA, 20 bp, Artificial Sequence
  Description of Artificial Sequence: Synthetic oligonucleotide
  Target: LAMA2; (+) strand; PAM type: NRG; PAM sequence: TAG
ttcagctttctacatatggc

SEQ ID NO: 121981 - DNA, 20 bp, Artificial Sequence
  Description of Artificial Sequence: Synthetic oligonucleotide
  Target: LAMA2; (+) strand; PAM type: NRG; PAM sequence: CAG
gctttctacatatggctagc

SEQ ID NO: 121982 - DNA, 20 bp, Artificial Sequence
  Description of Artificial Sequence: Synthetic oligonucleotide
  Target: LAMA2; (+) strand; PAM type: NRG; PAM sequence: CAG
atatggctagccagtttccc

SEQ ID NO: 121983 - DNA, 20 bp, Artificial Sequence
  Description of Artificial Sequence: Synthetic oligonucleotide
  Target: LAMA2; (+) strand; PAM type: NRG; PAM sequence: TAG
ccccagcaccatttattaaa

SEQ ID NO: 121984 - DNA, 20 bp, Artificial Sequence
  Description of Artificial Sequence: Synthetic oligonucleotide
  Target: LAMA2; (+) strand; PAM type: NRG; PAM sequence: AGG
cccagcaccatttattaaat

SEQ ID NO: 121985 - DNA, 20 bp, Artificial Sequence
  Description of Artificial Sequence: Synthetic oligonucleotide
  Target: LAMA2; (+) strand; PAM type: NRG; PAM sequence: GGG
ccagcaccatttattaaata

SEQ ID NO: 121986 - DNA, 20 bp, Artificial Sequence
  Description of Artificial Sequence: Synthetic oligonucleotide
  Target: LAMA2; (+) strand; PAM type: NRG; PAM sequence: CAG
tccccattgcttgtttttct

SEQ ID NO: 121987 - DNA, 20 bp, Artificial Sequence
  Description of Artificial Sequence: Synthetic oligonucleotide
  Target: LAMA2; (+) strand; PAM type: NRG; PAM sequence: AGG
ccccattgcttgtttttctc

SEQ ID NO: 121988 - DNA, 20 bp, Artificial Sequence
  Description of Artificial Sequence: Synthetic oligonucleotide
  Target: LAMA2; (+) strand; PAM type: NRG; PAM sequence: AAG
tgtttttctcaggtttgtca

SEQ ID NO: 121989 - DNA, 20 bp, Artificial Sequence
  Description of Artificial Sequence: Synthetic oligonucleotide
  Target: LAMA2; (+) strand; PAM type: NRG; PAM sequence: CAG
ttctcaggtttgtcaaagat

SEQ ID NO: 121990 - DNA, 20 bp, Artificial Sequence
  Description of Artificial Sequence: Synthetic oligonucleotide
  Target: LAMA2; (+) strand; PAM type: NRG; PAM sequence: TAG
caggtttgtcaaagatcaga

SEQ ID NO: 121991 - DNA, 20 bp, Artificial Sequence
  Description of Artificial Sequence: Synthetic oligonucleotide
  Target: LAMA2; (+) strand; PAM type: NRG; PAM sequence: TAG
tgtcaaagatcagatagttg

SEQ ID NO: 121992 - DNA, 20 bp, Artificial Sequence
  Description of Artificial Sequence: Synthetic oligonucleotide
  Target: LAMA2; (+) strand; PAM type: NRG; PAM sequence: CAG
atcagatagttgtagatatg

SEQ ID NO: 121993 - DNA, 20 bp, Artificial Sequence
  Description of Artificial Sequence: Synthetic oligonucleotide
  Target: LAMA2; (+) strand; PAM type: NRG; PAM sequence: GAG
agatatgcagtgttatttct

SEQ ID NO: 121994 - DNA, 20 bp, Artificial Sequence
  Description of Artificial Sequence: Synthetic oligonucleotide
  Target: LAMA2; (+) strand; PAM type: NRG; PAM sequence: AGG
gatatgcagtgttatttctg

SEQ ID NO: 121995 - DNA, 20 bp, Artificial Sequence
  Description of Artificial Sequence: Synthetic oligonucleotide
  Target: LAMA2; (+) strand; PAM type: NRG; PAM sequence: GGG
atatgcagtgttatttctga

SEQ ID NO: 121996 - DNA, 20 bp, Artificial Sequence
  Description of Artificial Sequence: Synthetic oligonucleotide
  Target: LAMA2; (+) strand; PAM type: NRG; PAM sequence: TGG
attgatctatatctctgttt

SEQ ID NO: 121997 - DNA, 20 bp, Artificial Sequence
  Description of Artificial Sequence: Synthetic oligonucleotide
  Target: LAMA2; (+) strand; PAM type: NRG; PAM sequence: CAG
ctatatctctgttttggtac

SEQ ID NO: 121998 - DNA, 20 bp, Artificial Sequence
  Description of Artificial Sequence: Synthetic oligonucleotide
  Target: LAMA2; (+) strand; PAM type: NRG; PAM sequence: TGG
gtaccagtaccatgctgttt

SEQ ID NO: 121999 - DNA, 20 bp, Artificial Sequence
  Description of Artificial Sequence: Synthetic oligonucleotide
  Target: LAMA2; (+) strand; PAM type: NRG; PAM sequence: TAG
ccatgctgttttggttactg

SEQ ID NO: 122000 - DNA, 20 bp, Artificial Sequence
  Description of Artificial Sequence: Synthetic oligonucleotide
  Target: LAMA2; (+) strand; PAM type: NRG; PAM sequence: TAG
ttttggttactgtagacttg

SEQ ID NO: 122001 - DNA, 20 bp, Artificial Sequence
  Description of Artificial Sequence: Synthetic oligonucleotide
  Target: LAMA2; (+) strand; PAM type: NRG; PAM sequence: TAG
gttactgtagacttgtagta

SEQ ID NO: 122002 - DNA, 20 bp, Artificial Sequence
  Description of Artificial Sequence: Synthetic oligonucleotide
  Target: LAMA2; (+) strand; PAM type: NRG; PAM sequence: AAG
tagacttgtagtatagtttg

SEQ ID NO: 122003 - DNA, 20 bp, Artificial Sequence
  Description of Artificial Sequence: Synthetic oligonucleotide
  Target: LAMA2; (+) strand; PAM type: NRG; PAM sequence: CAG
cttgtagtatagtttgaagt

SEQ ID NO: 122004 - DNA, 20 bp, Artificial Sequence
  Description of Artificial Sequence: Synthetic oligonucleotide
  Target: LAMA2; (+) strand; PAM type: NRG; PAM sequence: AGG
ttgtagtatagtttgaagtc

SEQ ID NO: 122005 - DNA, 20 bp, Artificial Sequence
  Description of Artificial Sequence: Synthetic oligonucleotide
  Target: LAMA2; (+) strand; PAM type: NRG; PAM sequence: TAG
tagtatagtttgaagtcagg

SEQ ID NO: 122006 - DNA, 20 bp, Artificial Sequence
  Description of Artificial Sequence: Synthetic oligonucleotide
  Target: LAMA2; (+) strand; PAM type: NRG; PAM sequence: CAG
gtcaggtagtgtgatgcctc

SEQ ID NO: 122007 - DNA, 20 bp, Artificial Sequence
  Description of Artificial Sequence: Synthetic oligonucleotide
  Target: LAMA2; (+) strand; PAM type: NRG; PAM sequence: TGG
tgcctccagctttgttcttt

SEQ ID NO: 122008 - DNA, 20 bp, Artificial Sequence
  Description of Artificial Sequence: Synthetic oligonucleotide
  Target: LAMA2; (+) strand; PAM type: NRG; PAM sequence: TAG
ccagctttgttcttttggct

SEQ ID NO: 122009 - DNA, 20 bp, Artificial Sequence
  Description of Artificial Sequence: Synthetic oligonucleotide
  Target: LAMA2; (+) strand; PAM type: NRG; PAM sequence: AGG
cagctttgttcttttggctt

SEQ ID NO: 122010 - DNA, 20 bp, Artificial Sequence
  Description of Artificial Sequence: Synthetic oligonucleotide
  Target: LAMA2; (+) strand; PAM type: NRG; PAM sequence: TGG
cttttggcttaggattgact

SEQ ID NO: 122011 - DNA, 20 bp, Artificial Sequence
  Description of Artificial Sequence: Synthetic oligonucleotide
  Target: LAMA2; (+) strand; PAM type: NRG; PAM sequence: CGG
ttaggattgacttggcgatg

SEQ ID NO: 122012 - DNA, 20 bp, Artificial Sequence
  Description of Artificial Sequence: Synthetic oligonucleotide
  Target: LAMA2; (+) strand; PAM type: NRG; PAM sequence: GGG
taggattgacttggcgatgc

SEQ ID NO: 122013 - DNA, 20 bp, Artificial Sequence
  Description of Artificial Sequence: Synthetic oligonucleotide
  Target: LAMA2; (+) strand; PAM type: NRG; PAM sequence: TGG
tggcgatgcgggctcttttt

SEQ ID NO: 122014 - DNA, 20 bp, Artificial Sequence
  Description of Artificial Sequence: Synthetic oligonucleotide
  Target: LAMA2; (+) strand; PAM type: NRG; PAM sequence: AAG
ttggttccatatgaacttta

SEQ ID NO: 122015 - DNA, 20 bp, Artificial Sequence
  Description of Artificial Sequence: Synthetic oligonucleotide
  Target: LAMA2; (+) strand; PAM type: NRG; PAM sequence: TAG
gttccatatgaactttaaag

SEQ ID NO: 122016 - DNA, 20 bp, Artificial Sequence
  Description of Artificial Sequence: Synthetic oligonucleotide
  Target: LAMA2; (+) strand; PAM type: NRG; PAM sequence: AAG
tagttttttccaattctgtg

SEQ ID NO: 122017 - DNA, 20 bp, Artificial Sequence
  Description of Artificial Sequence: Synthetic oligonucleotide
  Target: LAMA2; (+) strand; PAM type: NRG; PAM sequence: AAG
tttttccaattctgtgaaga

SEQ ID NO: 122018 - DNA, 20 bp, Artificial Sequence
  Description of Artificial Sequence: Synthetic oligonucleotide
  Target: LAMA2; (+) strand; PAM type: NRG; PAM sequence: AGG
ttttccaattctgtgaagaa

SEQ ID NO: 122019 - DNA, 20 bp, Artificial Sequence
  Description of Artificial Sequence: Synthetic oligonucleotide
  Target: LAMA2; (+) strand; PAM type: NRG; PAM sequence: TGG
aattctgtgaagaaaggcat

SEQ ID NO: 122020 - DNA, 20 bp, Artificial Sequence
  Description of Artificial Sequence: Synthetic oligonucleotide
  Target: LAMA2; (+) strand; PAM type: NRG; PAM sequence: TAG
tctgtgaagaaaggcattgg

SEQ ID NO: 122021 - DNA, 20 bp, Artificial Sequence
  Description of Artificial Sequence: Synthetic oligonucleotide
  Target: LAMA2; (+) strand; PAM type: NRG; PAM sequence: TGG
gaaaggcattggtagcttga

SEQ ID NO: 122022 - DNA, 20 bp, Artificial Sequence
  Description of Artificial Sequence: Synthetic oligonucleotide
  Target: LAMA2; (+) strand; PAM type: NRG; PAM sequence: GGG
aaaggcattggtagcttgat

SEQ ID NO: 122023 - DNA, 20 bp, Artificial Sequence
  Description of Artificial Sequence: Synthetic oligonucleotide
  Target: LAMA2; (+) strand; PAM type: NRG; PAM sequence: GGG
aaggcattggtagcttgatg

SEQ ID NO: 122024 - DNA, 20 bp, Artificial Sequence
  Description of Artificial Sequence: Synthetic oligonucleotide
  Target: LAMA2; (+) strand; PAM type: NRG; PAM sequence: TGG
cattggtagcttgatgggga

SEQ ID NO: 122025 - DNA, 20 bp, Artificial Sequence
  Description of Artificial Sequence: Synthetic oligonucleotide
  Target: LAMA2; (+) strand; PAM type: NRG; PAM sequence: TGG
attgaatctgtaaattacct

SEQ ID NO: 122026 - DNA, 20 bp, Artificial Sequence
  Description of Artificial Sequence: Synthetic oligonucleotide
  Target: LAMA2; (+) strand; PAM type: NRG; PAM sequence: GGG
ttgaatctgtaaattacctt

SEQ ID NO: 122027 - DNA, 20 bp, Artificial Sequence
  Description of Artificial Sequence: Synthetic oligonucleotide
  Target: LAMA2; (+) strand; PAM type: NRG; PAM sequence: CAG
aatctgtaaattaccttggg

SEQ ID NO: 122028 - DNA, 20 bp, Artificial Sequence
  Description of Artificial Sequence: Synthetic oligonucleotide
  Target: LAMA2; (+) strand; PAM type: NRG; PAM sequence: TGG
gtaaattaccttgggcagta

SEQ ID NO: 122029 - DNA, 20 bp, Artificial Sequence
  Description of Artificial Sequence: Synthetic oligonucleotide
  Target: LAMA2; (+) strand; PAM type: NRG; PAM sequence: GAG
tattgattcttcctacccat

SEQ ID NO: 122030 - DNA, 20 bp, Artificial Sequence
  Description of Artificial Sequence: Synthetic oligonucleotide
  Target: LAMA2; (+) strand; PAM type: NRG; PAM sequence: TGG
attcttcctacccatgagca

SEQ ID NO: 122031 - DNA, 20 bp, Artificial Sequence
  Description of Artificial Sequence: Synthetic oligonucleotide
  Target: LAMA2; (+) strand; PAM type: NRG; PAM sequence: GAG
gtatcctcttttatttcctt

SEQ ID NO: 122032 - DNA, 20 bp, Artificial Sequence
  Description of Artificial Sequence: Synthetic oligonucleotide
  Target: LAMA2; (+) strand; PAM type: NRG; PAM sequence: CAG
tcctcttttatttccttgag

SEQ ID NO: 122033 - DNA, 20 bp, Artificial Sequence
  Description of Artificial Sequence: Synthetic oligonucleotide
  Target: LAMA2; (+) strand; PAM type: NRG; PAM sequence: TGG
tcttttatttccttgagcag

SEQ ID NO: 122034 - DNA, 20 bp, Artificial Sequence
  Description of Artificial Sequence: Synthetic oligonucleotide
  Target: LAMA2; (+) strand; PAM type: NRG; PAM sequence: TAG
tttccttgagcagtggtttg

SEQ ID NO: 122035 - DNA, 20 bp, Artificial Sequence
  Description of Artificial Sequence: Synthetic oligonucleotide
  Target: LAMA2; (+) strand; PAM type: NRG; PAM sequence: AAG
gtggtttgtagttctccttg

SEQ ID NO: 122036 - DNA, 20 bp, Artificial Sequence
  Description of Artificial Sequence: Synthetic oligonucleotide
  Target: LAMA2; (+) strand; PAM type: NRG; PAM sequence: GAG
ggtttgtagttctccttgaa

SEQ ID NO: 122037 - DNA, 20 bp, Artificial Sequence
  Description of Artificial Sequence: Synthetic oligonucleotide
  Target: LAMA2; (+) strand; PAM type: NRG; PAM sequence: AGG
gtttgtagttctccttgaag

SEQ ID NO: 122038 - DNA, 20 bp, Artificial Sequence
  Description of Artificial Sequence: Synthetic oligonucleotide
  Target: LAMA2; (+) strand; PAM type: NRG; PAM sequence: AAG
aggtccttcacatcccttgt

SEQ ID NO: 122039 - DNA, 20 bp, Artificial Sequence
  Description of Artificial Sequence: Synthetic oligonucleotide
  Target: LAMA2; (+) strand; PAM type: NRG; PAM sequence: TGG
ccttcacatcccttgtaagt

SEQ ID NO: 122040 - DNA, 20 bp, Artificial Sequence
  Description of Artificial Sequence: Synthetic oligonucleotide
  Target: LAMA2; (+) strand; PAM type: NRG; PAM sequence: TAG
tcccttgtaagttggattcc

SEQ ID NO: 122041 - DNA, 20 bp, Artificial Sequence
  Description of Artificial Sequence: Synthetic oligonucleotide
  Target: LAMA2; (+) strand; PAM type: NRG; PAM sequence: AGG
cccttgtaagttggattcct

SEQ ID NO: 122042 - DNA, 20 bp, Artificial Sequence
  Description of Artificial Sequence: Synthetic oligonucleotide
  Target: LAMA2; (+) strand; PAM type: NRG; PAM sequence: AAG
taggtattttattctctttg

SEQ ID NO: 122043 - DNA, 20 bp, Artificial Sequence
  Description of Artificial Sequence: Synthetic oligonucleotide
  Target: LAMA2; (+) strand; PAM type: NRG; PAM sequence: TGG
ctctttgaagcaattgtgaa

SEQ ID NO: 122044 - DNA, 20 bp, Artificial Sequence
  Description of Artificial Sequence: Synthetic oligonucleotide
  Target: LAMA2; (+) strand; PAM type: NRG; PAM sequence: GGG
tctttgaagcaattgtgaat

SEQ ID NO: 122045 - DNA, 20 bp, Artificial Sequence
  Description of Artificial Sequence: Synthetic oligonucleotide
  Target: LAMA2; (+) strand; PAM type: NRG; PAM sequence: GAG
tttgaagcaattgtgaatgg

SEQ ID NO: 122046 - DNA, 20 bp, Artificial Sequence
  Description of Artificial Sequence: Synthetic oligonucleotide
  Target: LAMA2; (+) strand; PAM type: NRG; PAM sequence: TGG
atgggagttcactcatgatt

SEQ ID NO: 122047 - DNA, 20 bp, Artificial Sequence
  Description of Artificial Sequence: Synthetic oligonucleotide
  Target: LAMA2; (+) strand; PAM type: NRG; PAM sequence: TGG
tggctctgtttgtctgttgt

SEQ ID NO: 122048 - DNA, 20 bp, Artificial Sequence
  Description of Artificial Sequence: Synthetic oligonucleotide
  Target: LAMA2; (+) strand; PAM type: NRG; PAM sequence: AAG
tttgtctgttgttggtgtat

SEQ ID NO: 122049 - DNA, 20 bp, Artificial Sequence
  Description of Artificial Sequence: Synthetic oligonucleotide
  Target: LAMA2; (+) strand; PAM type: NRG; PAM sequence: GAG
gcacattgattttgtatcct

SEQ ID NO: 122050 - DNA, 20 bp, Artificial Sequence
  Description of Artificial Sequence: Synthetic oligonucleotide
  Target: LAMA2; (+) strand; PAM type: NRG; PAM sequence: AAG
tgtatcctgagactttgctg

SEQ ID NO: 122051 - DNA, 20 bp, Artificial Sequence
  Description of Artificial Sequence: Synthetic oligonucleotide
  Target: LAMA2; (+) strand; PAM type: NRG; PAM sequence: CAG
actttgctgaagttgcttat

SEQ ID NO: 122052 - DNA, 20 bp, Artificial Sequence
  Description of Artificial Sequence: Synthetic oligonucleotide
  Target: LAMA2; (+) strand; PAM type: NRG; PAM sequence: AAG
ctgaagttgcttatcagctt

SEQ ID NO: 122053 - DNA, 20 bp, Artificial Sequence
  Description of Artificial Sequence: Synthetic oligonucleotide
  Target: LAMA2; (+) strand; PAM type: NRG; PAM sequence: AGG
tgaagttgcttatcagctta

SEQ ID NO: 122054 - DNA, 20 bp, Artificial Sequence
  Description of Artificial Sequence: Synthetic oligonucleotide
  Target: LAMA2; (+) strand; PAM type: NRG; PAM sequence: GAG
aagttgcttatcagcttaag

SEQ ID NO: 122055 - DNA, 20 bp, Artificial Sequence
  Description of Artificial Sequence: Synthetic oligonucleotide
  Target: LAMA2; (+) strand; PAM type: NRG; PAM sequence: TGG
ttatcagcttaaggagattt

SEQ ID NO: 122056 - DNA, 20 bp, Artificial Sequence
  Description of Artificial Sequence: Synthetic oligonucleotide
  Target: LAMA2; (+) strand; PAM type: NRG; PAM sequence: GAG
gcttaaggagattttggact

SEQ ID NO: 122057 - DNA, 20 bp, Artificial Sequence
  Description of Artificial Sequence: Synthetic oligonucleotide
  Target: LAMA2; (+) strand; PAM type: NRG; PAM sequence: TGG
gagattttggactgagacaa

SEQ ID NO: 122058 - DNA, 20 bp, Artificial Sequence
  Description of Artificial Sequence: Synthetic oligonucleotide
  Target: LAMA2; (+) strand; PAM type: NRG; PAM sequence: GGG
agattttggactgagacaat

SEQ ID NO: 122059 - DNA, 20 bp, Artificial Sequence
  Description of Artificial Sequence: Synthetic oligonucleotide
  Target: LAMA2; (+) strand; PAM type: NRG; PAM sequence: GGG
gattttggactgagacaatg

SEQ ID NO: 122060 - DNA, 20 bp, Artificial Sequence
  Description of Artificial Sequence: Synthetic oligonucleotide
  Target: LAMA2; (+) strand; PAM type: NRG; PAM sequence: TAG
actgagacaatggggttttc

SEQ ID NO: 122061 - DNA, 20 bp, Artificial Sequence
  Description of Artificial Sequence: Synthetic oligonucleotide
  Target: LAMA2; (+) strand; PAM type: NRG; PAM sequence: AAG
atacaatcatgtcgtctgca

SEQ ID NO: 122062 - DNA, 20 bp, Artificial Sequence
  Description of Artificial Sequence: Synthetic oligonucleotide
  Target: LAMA2; (+) strand; PAM type: NRG; PAM sequence: GAG
acaatcatgtcgtctgcaaa

SEQ ID NO: 122063 - DNA, 20 bp, Artificial Sequence
  Description of Artificial Sequence: Synthetic oligonucleotide
  Target: LAMA2; (+) strand; PAM type: NRG; PAM sequence: AGG
caatcatgtcgtctgcaaag

SEQ ID NO: 122064 - DNA, 20 bp, Artificial Sequence
  Description of Artificial Sequence: Synthetic oligonucleotide
  Target: LAMA2; (+) strand; PAM type: NRG; PAM sequence: GGG
aatcatgtcgtctgcaaaga

SEQ ID NO: 122065 - DNA, 20 bp, Artificial Sequence
  Description of Artificial Sequence: Synthetic oligonucleotide
  Target: LAMA2; (+) strand; PAM type: NRG; PAM sequence: TGG
cttctcctgcctaattgccc

SEQ ID NO: 122066 - DNA, 20 bp, Artificial Sequence
  Description of Artificial Sequence: Synthetic oligonucleotide
  Target: LAMA2; (+) strand; PAM type: NRG; PAM sequence: CAG
tcctgcctaattgccctggc

SEQ ID NO: 122067 - DNA, 20 bp, Artificial Sequence
  Description of Artificial Sequence: Synthetic oligonucleotide
  Target: LAMA2; (+) strand; PAM type: NRG; PAM sequence: TAG
acttccaacactatattgaa

SEQ ID NO: 122068 - DNA, 20 bp, Artificial Sequence
  Description of Artificial Sequence: Synthetic oligonucleotide
  Target: LAMA2; (+) strand; PAM type: NRG; PAM sequence: AGG
cttccaacactatattgaat

SEQ ID NO: 122069 - DNA, 20 bp, Artificial Sequence
  Description of Artificial Sequence: Synthetic oligonucleotide
  Target: LAMA2; (+) strand; PAM type: NRG; PAM sequence: GAG
tccaacactatattgaatag

SEQ ID NO: 122070 - DNA, 20 bp, Artificial Sequence
  Description of Artificial Sequence: Synthetic oligonucleotide
  Target: LAMA2; (+) strand; PAM type: NRG; PAM sequence: TGG
aacactatattgaataggag

SEQ ID NO: 122071 - DNA, 20 bp, Artificial Sequence
  Description of Artificial Sequence: Synthetic oligonucleotide
  Target: LAMA2; (+) strand; PAM type: NRG; PAM sequence: GAG
ctatattgaataggagtggt

SEQ ID NO: 122072 - DNA, 20 bp, Artificial Sequence
  Description of Artificial Sequence: Synthetic oligonucleotide
  Target: LAMA2; (+) strand; PAM type: NRG; PAM sequence: GAG
atattgaataggagtggtga

SEQ ID NO: 122073 - DNA, 20 bp, Artificial Sequence
  Description of Artificial Sequence: Synthetic oligonucleotide
  Target: LAMA2; (+) strand; PAM type: NRG; PAM sequence: GAG
attgaataggagtggtgaga

SEQ ID NO: 122074 - DNA, 20 bp, Artificial Sequence
  Description of Artificial Sequence: Synthetic oligonucleotide
  Target: LAMA2; (+) strand; PAM type: NRG; PAM sequence: AGG
ttgaataggagtggtgagag

SEQ ID NO: 122075 - DNA, 20 bp, Artificial Sequence
  Description of Artificial Sequence: Synthetic oligonucleotide
  Target: LAMA2; (+) strand; PAM type: NRG; PAM sequence: GGG
tgaataggagtggtgagaga

SEQ ID NO: 122076 - DNA, 20 bp, Artificial Sequence
  Description of Artificial Sequence: Synthetic oligonucleotide
  Target: LAMA2; (+) strand; PAM type: NRG; PAM sequence: CAG
agggcatccctgtcttgtgc

SEQ ID NO: 122077 - DNA, 20 bp, Artificial Sequence
  Description of Artificial Sequence: Synthetic oligonucleotide
  Target: LAMA2; (+) strand; PAM type: NRG; PAM sequence: AAG
ctgtcttgtgccagttttca

SEQ ID NO: 122078 - DNA, 20 bp, Artificial Sequence
  Description of Artificial Sequence: Synthetic oligonucleotide
  Target: LAMA2; (+) strand; PAM type: NRG; PAM sequence: AGG
tgtcttgtgccagttttcaa

SEQ ID NO: 122079 - DNA, 20 bp, Artificial Sequence
  Description of Artificial Sequence: Synthetic oligonucleotide
  Target: LAMA2; (+) strand; PAM type: NRG; PAM sequence: GGG
gtcttgtgccagttttcaaa

SEQ ID NO: 122080 - DNA, 20 bp, Artificial Sequence
  Description of Artificial Sequence: Synthetic oligonucleotide
  Target: LAMA2; (+) strand; PAM type: NRG; PAM sequence: CAG
gttttcaaagggaatgcttc

SEQ ID NO: 122081 - DNA, 20 bp, Artificial Sequence
  Description of Artificial Sequence: Synthetic oligonucleotide
  Target: LAMA2; (+) strand; PAM type: NRG; PAM sequence: CAG
gcttccagtttttgccaatt

SEQ ID NO: 122082 - DNA, 20 bp, Artificial Sequence
  Description of Artificial Sequence: Synthetic oligonucleotide
  Target: LAMA2; (+) strand; PAM type: NRG; PAM sequence: TGG
attcagtatgatattcgctg

SEQ ID NO: 122083 - DNA, 20 bp, Artificial Sequence
  Description of Artificial Sequence: Synthetic oligonucleotide
  Target: LAMA2; (+) strand; PAM type: NRG; PAM sequence: GGG
ttcagtatgatattcgctgt

SEQ ID NO: 122084 - DNA, 20 bp, Artificial Sequence
  Description of Artificial Sequence: Synthetic oligonucleotide
  Target: LAMA2; (+) strand; PAM type: NRG; PAM sequence: TAG
tattcgctgtgggtttgtca

SEQ ID NO: 122085 - DNA, 20 bp, Artificial Sequence
  Description of Artificial Sequence: Synthetic oligonucleotide
  Target: LAMA2; (+) strand; PAM type: NRG; PAM sequence: TAG
cgctgtgggtttgtcataga

SEQ ID NO: 122086 - DNA, 20 bp, Artificial Sequence
  Description of Artificial Sequence: Synthetic oligonucleotide
  Target: LAMA2; (+) strand; PAM type: NRG; PAM sequence: GAG
ccatcaatacctaatttatt

SEQ ID NO: 122087 - DNA, 20 bp, Artificial Sequence
  Description of Artificial Sequence: Synthetic oligonucleotide
  Target: LAMA2; (+) strand; PAM type: NRG; PAM sequence: GAG
atcaatacctaatttattga

SEQ ID NO: 122088 - DNA, 20 bp, Artificial Sequence
  Description of Artificial Sequence: Synthetic oligonucleotide
  Target: LAMA2; (+) strand; PAM type: NRG; PAM sequence: TAG
cctaatttattgagagtttt

SEQ ID NO: 122089 - DNA, 20 bp, Artificial Sequence
  Description of Artificial Sequence: Synthetic oligonucleotide
  Target: LAMA2; (+) strand; PAM type: NRG; PAM sequence: AAG
tattgagagtttttagcatg

SEQ ID NO: 122090 - DNA, 20 bp, Artificial Sequence
  Description of Artificial Sequence: Synthetic oligonucleotide
  Target: LAMA2; (+) strand; PAM type: NRG; PAM sequence: TGG
agagtttttagcatgaagtg

SEQ ID NO: 122091 - DNA, 20 bp, Artificial Sequence
  Description of Artificial Sequence: Synthetic oligonucleotide
  Target: LAMA2; (+) strand; PAM type: NRG; PAM sequence: CGG
gtgtggttgaattttgtcaa

SEQ ID NO: 122092 - DNA, 20 bp, Artificial Sequence
  Description of Artificial Sequence: Synthetic oligonucleotide
  Target: LAMA2; (+) strand; PAM type: NRG; PAM sequence: GAG
cggccttttctgcatctatt

SEQ ID NO: 122093 - DNA, 20 bp, Artificial Sequence
  Description of Artificial Sequence: Synthetic oligonucleotide
  Target: LAMA2; (+) strand; PAM type: NRG; PAM sequence: TGG
catctattgagataatcatg

SEQ ID NO: 122094 - DNA, 20 bp, Artificial Sequence
  Description of Artificial Sequence: Synthetic oligonucleotide
  Target: LAMA2; (+) strand; PAM type: NRG; PAM sequence: TGG
aatcatgtggtttttgtctt

SEQ ID NO: 122095 - DNA, 20 bp, Artificial Sequence
  Description of Artificial Sequence: Synthetic oligonucleotide
  Target: LAMA2; (+) strand; PAM type: NRG; PAM sequence: TGG
ctttggccctgtttatatgc

SEQ ID NO: 122096 - DNA, 20 bp, Artificial Sequence
  Description of Artificial Sequence: Synthetic oligonucleotide
  Target: LAMA2; (+) strand; PAM type: NRG; PAM sequence: CAG
ctgatttgcgtatattgaac

SEQ ID NO: 122097 - DNA, 20 bp, Artificial Sequence
  Description of Artificial Sequence: Synthetic oligonucleotide
  Target: LAMA2; (+) strand; PAM type: NRG; PAM sequence: CAG
attgaaccagccttgcatcc

SEQ ID NO: 122098 - DNA, 20 bp, Artificial Sequence
  Description of Artificial Sequence: Synthetic oligonucleotide
  Target: LAMA2; (+) strand; PAM type: NRG; PAM sequence: AGG
ttgaaccagccttgcatccc

SEQ ID NO: 122099 - DNA, 20 bp, Artificial Sequence
  Description of Artificial Sequence: Synthetic oligonucleotide
  Target: LAMA2; (+) strand; PAM type: NRG; PAM sequence: GGG
tgaaccagccttgcatccca

SEQ ID NO: 122100 - DNA, 20 bp, Artificial Sequence
  Description of Artificial Sequence: Synthetic oligonucleotide
  Target: LAMA2; (+) strand; PAM type: NRG; PAM sequence: AAG
agccttgcatcccagggatg

SEQ ID NO: 122101 - DNA, 20 bp, Artificial Sequence
  Description of Artificial Sequence: Synthetic oligonucleotide
  Target: LAMA2; (+) strand; PAM type: NRG; PAM sequence: TGG
ggatgaagcccacttgatca

SEQ ID NO: 122102 - DNA, 20 bp, Artificial Sequence
  Description of Artificial Sequence: Synthetic oligonucleotide
  Target: LAMA2; (+) strand; PAM type: NRG; PAM sequence: TGG
tgaagcccacttgatcatgg

SEQ ID NO: 122103 - DNA, 20 bp, Artificial Sequence
  Description of Artificial Sequence: Synthetic oligonucleotide
  Target: LAMA2; (+) strand; PAM type: NRG; PAM sequence: AAG
cccacttgatcatggtggat

SEQ ID NO: 122104 - DNA, 20 bp, Artificial Sequence
  Description of Artificial Sequence: Synthetic oligonucleotide
  Target: LAMA2; (+) strand; PAM type: NRG; PAM sequence: TGG
taagctttttgatgtgctgc

SEQ ID NO: 122105 - DNA, 20 bp, Artificial Sequence
  Description of Artificial Sequence: Synthetic oligonucleotide
  Target: LAMA2; (+) strand; PAM type: NRG; PAM sequence: CAG
tgctgctggatttgttttgc

SEQ ID NO: 122106 - DNA, 20 bp, Artificial Sequence
  Description of Artificial Sequence: Synthetic oligonucleotide
  Target: LAMA2; (+) strand; PAM type: NRG; PAM sequence: GAG
tgttttgccagtattttatt

SEQ ID NO: 122107 - DNA, 20 bp, Artificial Sequence
  Description of Artificial Sequence: Synthetic oligonucleotide
  Target: LAMA2; (+) strand; PAM type: NRG; PAM sequence: AGG
gttttgccagtattttattg

SEQ ID NO: 122108 - DNA, 20 bp, Artificial Sequence
  Description of Artificial Sequence: Synthetic oligonucleotide
  Target: LAMA2; (+) strand; PAM type: NRG; PAM sequence: AAG
tttttgcatcaatgttcatc

SEQ ID NO: 122109 - DNA, 20 bp, Artificial Sequence
  Description of Artificial Sequence: Synthetic oligonucleotide
  Target: LAMA2; (+) strand; PAM type: NRG; PAM sequence: AGG
ttttgcatcaatgttcatca

SEQ ID NO: 122110 - DNA, 20 bp, Artificial Sequence
  Description of Artificial Sequence: Synthetic oligonucleotide
  Target: LAMA2; (+) strand; PAM type: NRG; PAM sequence: TGG
tcaatgttcatcaaggatat

SEQ ID NO: 122111 - DNA, 20 bp, Artificial Sequence
  Description of Artificial Sequence: Synthetic oligonucleotide
  Target: LAMA2; (+) strand; PAM type: NRG; PAM sequence: TGG
tggtctaaaattctcttttt

SEQ ID NO: 122112 - DNA, 20 bp, Artificial Sequence
  Description of Artificial Sequence: Synthetic oligonucleotide
  Target: LAMA2; (+) strand; PAM type: NRG; PAM sequence: TGG
tttttggttgtgtctctgcc

SEQ ID NO: 122113 - DNA, 20 bp, Artificial Sequence
  Description of Artificial Sequence: Synthetic oligonucleotide
  Target: LAMA2; (+) strand; PAM type: NRG; PAM sequence: TGG
gttgtgtctctgcctggctt

SEQ ID NO: 122114 - DNA, 20 bp, Artificial Sequence
  Description of Artificial Sequence: Synthetic oligonucleotide
  Target: LAMA2; (+) strand; PAM type: NRG; PAM sequence: CAG
tctctgcctggctttggtat

SEQ ID NO: 122115 - DNA, 20 bp, Artificial Sequence
  Description of Artificial Sequence: Synthetic oligonucleotide
  Target: LAMA2; (+) strand; PAM type: NRG; PAM sequence: TGG
ctttggtatcagaatgatgc

SEQ ID NO: 122116 - DNA, 20 bp, Artificial Sequence
  Description of Artificial Sequence: Synthetic oligonucleotide
  Target: LAMA2; (+) strand; PAM type: NRG; PAM sequence: GAG
tgatgctggcctcataaaat

SEQ ID NO: 122117 - DNA, 20 bp, Artificial Sequence
  Description of Artificial Sequence: Synthetic oligonucleotide
  Target: LAMA2; (+) strand; PAM type: NRG; PAM sequence: TAG
gctggcctcataaaatgagt

SEQ ID NO: 122118 - DNA, 20 bp, Artificial Sequence
  Description of Artificial Sequence: Synthetic oligonucleotide
  Target: LAMA2; (+) strand; PAM type: NRG; PAM sequence: AGG
ctggcctcataaaatgagtt

SEQ ID NO: 122119 - DNA, 20 bp, Artificial Sequence
  Description of Artificial Sequence: Synthetic oligonucleotide
  Target: LAMA2; (+) strand; PAM type: NRG; PAM sequence: GGG
tggcctcataaaatgagtta

SEQ ID NO: 122120 - DNA, 20 bp, Artificial Sequence
  Description of Artificial Sequence: Synthetic oligonucleotide
  Target: LAMA2; (+) strand; PAM type: NRG; PAM sequence: GAG
gcctcataaaatgagttagg

SEQ ID NO: 122121 - DNA, 20 bp, Artificial Sequence
  Description of Artificial Sequence: Synthetic oligonucleotide
  Target: LAMA2; (+) strand; PAM type: NRG; PAM sequence: AGG
cctcataaaatgagttaggg

SEQ ID NO: 122122 - DNA, 20 bp, Artificial Sequence
  Description of Artificial Sequence: Synthetic oligonucleotide
  Target: LAMA2; (+) strand; PAM type: NRG; PAM sequence: TGG
ttccctctttttctattgat

SEQ ID NO: 122123 - DNA, 20 bp, Artificial Sequence
  Description of Artificial Sequence: Synthetic oligonucleotide
  Target: LAMA2; (+) strand; PAM type: NRG; PAM sequence: TAG
tctttttctattgattggaa

SEQ ID NO: 122124 - DNA, 20 bp, Artificial Sequence
  Description of Artificial Sequence: Synthetic oligonucleotide
  Target: LAMA2; (+) strand; PAM type: NRG; PAM sequence: CAG
tctattgattggaatagttt

SEQ ID NO: 122125 - DNA, 20 bp, Artificial Sequence
  Description of Artificial Sequence: Synthetic oligonucleotide
  Target: LAMA2; (+) strand; PAM type: NRG; PAM sequence: AAG
attgattggaatagtttcag

SEQ ID NO: 122126 - DNA, 20 bp, Artificial Sequence
  Description of Artificial Sequence: Synthetic oligonucleotide
  Target: LAMA2; (+) strand; PAM type: NRG; PAM sequence: AGG
ttgattggaatagtttcaga

SEQ ID NO: 122127 - DNA, 20 bp, Artificial Sequence
  Description of Artificial Sequence: Synthetic oligonucleotide
  Target: LAMA2; (+) strand; PAM type: NRG; PAM sequence: TGG
tggaatagtttcagaaggaa

SEQ ID NO: 122128 - DNA, 20 bp, Artificial Sequence
  Description of Artificial Sequence: Synthetic oligonucleotide
  Target: LAMA2; (+) strand; PAM type: NRG; PAM sequence: CAG
agtttcagaaggaatggtac

SEQ ID NO: 122129 - DNA, 20 bp, Artificial Sequence
  Description of Artificial Sequence: Synthetic oligonucleotide
  Target: LAMA2; (+) strand; PAM type: NRG; PAM sequence: TGG
ccagttcctccttgtacctc

SEQ ID NO: 122130 - DNA, 20 bp, Artificial Sequence
  Description of Artificial Sequence: Synthetic oligonucleotide
  Target: LAMA2; (+) strand; PAM type: NRG; PAM sequence: TAG
gttcctccttgtacctctgg

SEQ ID NO: 122131 - DNA, 20 bp, Artificial Sequence
  Description of Artificial Sequence: Synthetic oligonucleotide
  Target: LAMA2; (+) strand; PAM type: NRG; PAM sequence: CGG
cttgtacctctggtagaatt

SEQ ID NO: 122132 - DNA, 20 bp, Artificial Sequence
  Description of Artificial Sequence: Synthetic oligonucleotide
  Target: LAMA2; (+) strand; PAM type: NRG; PAM sequence: TGG
aattcggctgtgaatccatc

SEQ ID NO: 122133 - DNA, 20 bp, Artificial Sequence
  Description of Artificial Sequence: Synthetic oligonucleotide
  Target: LAMA2; (+) strand; PAM type: NRG; PAM sequence: TGG
gctgtgaatccatctggtcc

SEQ ID NO: 122134 - DNA, 20 bp, Artificial Sequence
  Description of Artificial Sequence: Synthetic oligonucleotide
  Target: LAMA2; (+) strand; PAM type: NRG; PAM sequence: TGG
atctggtcctggactctttt

SEQ ID NO: 122135 - DNA, 20 bp, Artificial Sequence
  Description of Artificial Sequence: Synthetic oligonucleotide
  Target: LAMA2; (+) strand; PAM type: NRG; PAM sequence: TGG
ggtcctggactctttttggt

SEQ ID NO: 122136 - DNA, 20 bp, Artificial Sequence
  Description of Artificial Sequence: Synthetic oligonucleotide
  Target: LAMA2; (+) strand; PAM type: NRG; PAM sequence: AAG
ctggactctttttggttggt

SEQ ID NO: 122137 - DNA, 20 bp, Artificial Sequence
  Description of Artificial Sequence: Synthetic oligonucleotide
  Target: LAMA2; (+) strand; PAM type: NRG; PAM sequence: CAG
attgattattgtcacaattt

SEQ ID NO: 122138 - DNA, 20 bp, Artificial Sequence
  Description of Artificial Sequence: Synthetic oligonucleotide
  Target: LAMA2; (+) strand; PAM type: NRG; PAM sequence: CAG
gatcctgttatttgtctatt

SEQ ID NO: 122139 - DNA, 20 bp, Artificial Sequence
  Description of Artificial Sequence: Synthetic oligonucleotide
  Target: LAMA2; (+) strand; PAM type: NRG; PAM sequence: GAG
tcctgttatttgtctattca

SEQ ID NO: 122140 - DNA, 20 bp, Artificial Sequence
  Description of Artificial Sequence: Synthetic oligonucleotide
  Target: LAMA2; (+) strand; PAM type: NRG; PAM sequence: TGG
tcagagattcaacttcttcc

SEQ ID NO: 122141 - DNA, 20 bp, Artificial Sequence
  Description of Artificial Sequence: Synthetic oligonucleotide
  Target: LAMA2; (+) strand; PAM type: NRG; PAM sequence: TAG
gattcaacttcttcctggtt

SEQ ID NO: 122142 - DNA, 20 bp, Artificial Sequence
  Description of Artificial Sequence: Synthetic oligonucleotide
  Target: LAMA2; (+) strand; PAM type: NRG; PAM sequence: TGG
acttcttcctggtttagtct

SEQ ID NO: 122143 - DNA, 20 bp, Artificial Sequence
  Description of Artificial Sequence: Synthetic oligonucleotide
  Target: LAMA2; (+) strand; PAM type: NRG; PAM sequence: GGG
cttcttcctggtttagtctt

SEQ ID NO: 122144 - DNA, 20 bp, Artificial Sequence
  Description of Artificial Sequence: Synthetic oligonucleotide
  Target: LAMA2; (+) strand; PAM type: NRG; PAM sequence: GAG
tcttcctggtttagtcttgg

SEQ ID NO: 122145 - DNA, 20 bp, Artificial Sequence
  Description of Artificial Sequence: Synthetic oligonucleotide
  Target: LAMA2; (+) strand; PAM type: NRG; PAM sequence: GAG
ttcctggtttagtcttggga

SEQ ID NO: 122146 - DNA, 20 bp, Artificial Sequence
  Description of Artificial Sequence: Synthetic oligonucleotide
  Target: LAMA2; (+) strand; PAM type: NRG; PAM sequence: GAG
cttgggagagtgtatgtgtc

SEQ ID NO: 122147 - DNA, 20 bp, Artificial Sequence
  Description of Artificial Sequence: Synthetic oligonucleotide
  Target: LAMA2; (+) strand; PAM type: NRG; PAM sequence: AGG
ttgggagagtgtatgtgtcg

SEQ ID NO: 122148 - DNA, 20 bp, Artificial Sequence
  Description of Artificial Sequence: Synthetic oligonucleotide
  Target: LAMA2; (+) strand; PAM type: NRG; PAM sequence: TAG
aggaatttatccatttcttc

SEQ ID NO: 122149 - DNA, 20 bp, Artificial Sequence
  Description of Artificial Sequence: Synthetic oligonucleotide
  Target: LAMA2; (+) strand; PAM type: NRG; PAM sequence: TAG
tccatttcttctagattttc

SEQ ID NO: 122150 - DNA, 20 bp, Artificial Sequence
  Description of Artificial Sequence: Synthetic oligonucleotide
  Target: LAMA2; (+) strand; PAM type: NRG; PAM sequence: TAG
gattttctagtttatttgcg

SEQ ID NO: 122151 - DNA, 20 bp, Artificial Sequence
  Description of Artificial Sequence: Synthetic oligonucleotide
  Target: LAMA2; (+) strand; PAM type: NRG; PAM sequence: GAG
ttttctagtttatttgcgta

SEQ ID NO: 122152 - DNA, 20 bp, Artificial Sequence
  Description of Artificial Sequence: Synthetic oligonucleotide
  Target: LAMA2; (+) strand; PAM type: NRG; PAM sequence: AGG
tttctagtttatttgcgtag

SEQ ID NO: 122153 - DNA, 20 bp, Artificial Sequence
  Description of Artificial Sequence: Synthetic oligonucleotide
  Target: LAMA2; (+) strand; PAM type: NRG; PAM sequence: TAG
tatttgcgtagaggtgttta

SEQ ID NO: 122154 - DNA, 20 bp, Artificial Sequence
  Description of Artificial Sequence: Synthetic oligonucleotide
  Target: LAMA2; (+) strand; PAM type: NRG; PAM sequence: TGG
gtgtttatagtattctctga

SEQ ID NO: 122155 - DNA, 20 bp, Artificial Sequence
  Description of Artificial Sequence: Synthetic oligonucleotide
  Target: LAMA2; (+) strand; PAM type: NRG; PAM sequence: TAG
tttatagtattctctgatgg

SEQ ID NO: 122156 - DNA, 20 bp, Artificial Sequence
  Description of Artificial Sequence: Synthetic oligonucleotide
  Target: LAMA2; (+) strand; PAM type: NRG; PAM sequence: TGG
gatggtagtttgtatttctg

SEQ ID NO: 122157 - DNA, 20 bp, Artificial Sequence
  Description of Artificial Sequence: Synthetic oligonucleotide
  Target: LAMA2; (+) strand; PAM type: NRG; PAM sequence: GGG
atggtagtttgtatttctgt

SEQ ID NO: 122158 - DNA, 20 bp, Artificial Sequence
  Description of Artificial Sequence: Synthetic oligonucleotide
  Target: LAMA2; (+) strand; PAM type: NRG; PAM sequence: CGG
agtttgtatttctgtgggat

SEQ ID NO: 122159 - DNA, 20 bp, Artificial Sequence
  Description of Artificial Sequence: Synthetic oligonucleotide
  Target: LAMA2; (+) strand; PAM type: NRG; PAM sequence: TGG
ttgtatttctgtgggatcgg

SEQ ID NO: 122160 - DNA, 20 bp, Artificial Sequence
  Description of Artificial Sequence: Synthetic oligonucleotide
  Target: LAMA2; (+) strand; PAM type: NRG; PAM sequence: TAG
ttctctctttttttctttat

SEQ ID NO: 122161 - DNA, 20 bp, Artificial Sequence
  Description of Artificial Sequence: Synthetic oligonucleotide
  Target: LAMA2; (+) strand; PAM type: NRG; PAM sequence: TAG
tttttctttattagtcttgc

SEQ ID NO: 122162 - DNA, 20 bp, Artificial Sequence
  Description of Artificial Sequence: Synthetic oligonucleotide
  Target: LAMA2; (+) strand; PAM type: NRG; PAM sequence: CGG
ttctttattagtcttgctag

SEQ ID NO: 122163 - DNA, 20 bp, Artificial Sequence
  Description of Artificial Sequence: Synthetic oligonucleotide
  Target: LAMA2; (+) strand; PAM type: NRG; PAM sequence: CAG
tgttgatcctttcaaaaaac

SEQ ID NO: 122164 - DNA, 20 bp, Artificial Sequence
  Description of Artificial Sequence: Synthetic oligonucleotide
  Target: LAMA2; (+) strand; PAM type: NRG; PAM sequence: TGG
cctttcaaaaaaccagctcc

SEQ ID NO: 122165 - DNA, 20 bp, Artificial Sequence
  Description of Artificial Sequence: Synthetic oligonucleotide
  Target: LAMA2; (+) strand; PAM type: NRG; PAM sequence: AAG
ctggattcattaattttttg

SEQ ID NO: 122166 - DNA, 20 bp, Artificial Sequence
  Description of Artificial Sequence: Synthetic oligonucleotide
  Target: LAMA2; (+) strand; PAM type: NRG; PAM sequence: AGG
tggattcattaattttttga

SEQ ID NO: 122167 - DNA, 20 bp, Artificial Sequence
  Description of Artificial Sequence: Synthetic oligonucleotide
  Target: LAMA2; (+) strand; PAM type: NRG; PAM sequence: GGG
ggattcattaattttttgaa

SEQ ID NO: 122168 - DNA, 20 bp, Artificial Sequence
  Description of Artificial Sequence: Synthetic oligonucleotide
  Target: LAMA2; (+) strand; PAM type: NRG; PAM sequence: CAG
ttttgtgtctctatttcctt

SEQ ID NO: 122169 - DNA, 20 bp, Artificial Sequence
  Description of Artificial Sequence: Synthetic oligonucleotide
  Target: LAMA2; (+) strand; PAM type: NRG; PAM sequence: TAG
cttcagttctgctctgattt

SEQ ID NO: 122170 - DNA, 20 bp, Artificial Sequence
  Description of Artificial Sequence: Synthetic oligonucleotide
  Target: LAMA2; (+) strand; PAM type: NRG; PAM sequence: TAG
agttatttcttgccttctgc

SEQ ID NO: 122171 - DNA, 20 bp, Artificial Sequence
  Description of Artificial Sequence: Synthetic oligonucleotide
  Target: LAMA2; (+) strand; PAM type: NRG; PAM sequence: TAG
tgtgtttgctcttgcttttc

SEQ ID NO: 122172 - DNA, 20 bp, Artificial Sequence
  Description of Artificial Sequence: Synthetic oligonucleotide
  Target: LAMA2; (+) strand; PAM type: NRG; PAM sequence: TAG
agttcttttaattgtgatgt

SEQ ID NO: 122173 - DNA, 20 bp, Artificial Sequence
  Description of Artificial Sequence: Synthetic oligonucleotide
  Target: LAMA2; (+) strand; PAM type: NRG; PAM sequence: AGG
gttcttttaattgtgatgtt

SEQ ID NO: 122174 - DNA, 20 bp, Artificial Sequence
  Description of Artificial Sequence: Synthetic oligonucleotide
  Target: LAMA2; (+) strand; PAM type: NRG; PAM sequence: GGG
ttcttttaattgtgatgtta

SEQ ID NO: 122175 - DNA, 20 bp, Artificial Sequence
  Description of Artificial Sequence: Synthetic oligonucleotide
  Target: LAMA2; (+) strand; PAM type: NRG; PAM sequence: TGG
tgatgttagggtgtcaattt

SEQ ID NO: 122176 - DNA, 20 bp, Artificial Sequence
  Description of Artificial Sequence: Synthetic oligonucleotide
  Target: LAMA2; (+) strand; PAM type: NRG; PAM sequence: TGG
atctttcctgctgtctcttg

SEQ ID NO: 122177 - DNA, 20 bp, Artificial Sequence
  Description of Artificial Sequence: Synthetic oligonucleotide
  Target: LAMA2; (+) strand; PAM type: NRG; PAM sequence: GGG
tctttcctgctgtctcttgt

SEQ ID NO: 122178 - DNA, 20 bp, Artificial Sequence
  Description of Artificial Sequence: Synthetic oligonucleotide
  Target: LAMA2; (+) strand; PAM type: NRG; PAM sequence: TAG
tgctgtctcttgtgggcatt

SEQ ID NO: 122179 - DNA, 20 bp, Artificial Sequence
  Description of Artificial Sequence: Synthetic oligonucleotide
  Target: LAMA2; (+) strand; PAM type: NRG; PAM sequence: CAG
acactgctttgaatgtgtcc

SEQ ID NO: 122180 - DNA, 20 bp, Artificial Sequence
  Description of Artificial Sequence: Synthetic oligonucleotide
  Target: LAMA2; (+) strand; PAM type: NRG; PAM sequence: GAG
actgctttgaatgtgtccca

SEQ ID NO: 122181 - DNA, 20 bp, Artificial Sequence
  Description of Artificial Sequence: Synthetic oligonucleotide
  Target: LAMA2; (+) strand; PAM type: NRG; PAM sequence: TGG
tgaatgtgtcccagagattc

SEQ ID NO: 122182 - DNA, 20 bp, Artificial Sequence
  Description of Artificial Sequence: Synthetic oligonucleotide
  Target: LAMA2; (+) strand; PAM type: NRG; PAM sequence: CGG
tgttgtgtctttgttcttgt

SEQ ID NO: 122183 - DNA, 20 bp, Artificial Sequence
  Description of Artificial Sequence: Synthetic oligonucleotide
  Target: LAMA2; (+) strand; PAM type: NRG; PAM sequence: AAG
ctttgttcttgtcggtttca

SEQ ID NO: 122184 - DNA, 20 bp, Artificial Sequence
  Description of Artificial Sequence: Synthetic oligonucleotide
  Target: LAMA2; (+) strand; PAM type: NRG; PAM sequence: CAG
ccttcatttcgttatgtacc

SEQ ID NO: 122185 - DNA, 20 bp, Artificial Sequence
  Description of Artificial Sequence: Synthetic oligonucleotide
  Target: LAMA2; (+) strand; PAM type: NRG; PAM sequence: TAG
tcatttcgttatgtacccag

SEQ ID NO: 122186 - DNA, 20 bp, Artificial Sequence
  Description of Artificial Sequence: Synthetic oligonucleotide
  Target: LAMA2; (+) strand; PAM type: NRG; PAM sequence: CAG
ttatgtacccagtagtcatt

SEQ ID NO: 122187 - DNA, 20 bp, Artificial Sequence
  Description of Artificial Sequence: Synthetic oligonucleotide
  Target: LAMA2; (+) strand; PAM type: NRG; PAM sequence: AGG
tatgtacccagtagtcattc

SEQ ID NO: 122188 - DNA, 20 bp, Artificial Sequence
  Description of Artificial Sequence: Synthetic oligonucleotide
  Target: LAMA2; (+) strand; PAM type: NRG; PAM sequence: GAG
tgtacccagtagtcattcag

SEQ ID NO: 122189 - DNA, 20 bp, Artificial Sequence
  Description of Artificial Sequence: Synthetic oligonucleotide
  Target: LAMA2; (+) strand; PAM type: NRG; PAM sequence: CAG
acccagtagtcattcaggag

SEQ ID NO: 122190 - DNA, 20 bp, Artificial Sequence
  Description of Artificial Sequence: Synthetic oligonucleotide
  Target: LAMA2; (+) strand; PAM type: NRG; PAM sequence: AGG
cccagtagtcattcaggagc

SEQ ID NO: 122191 - DNA, 20 bp, Artificial Sequence
  Description of Artificial Sequence: Synthetic oligonucleotide
  Target: LAMA2; (+) strand; PAM type: NRG; PAM sequence: CAG
tcattcaggagcaggttgtt

SEQ ID NO: 122192 - DNA, 20 bp, Artificial Sequence
  Description of Artificial Sequence: Synthetic oligonucleotide
  Target: LAMA2; (+) strand; PAM type: NRG; PAM sequence: TAG
caggttgttcagtttccatg

SEQ ID NO: 122193 - DNA, 20 bp, Artificial Sequence
  Description of Artificial Sequence: Synthetic oligonucleotide
  Target: LAMA2; (+) strand; PAM type: NRG; PAM sequence: GAG
tgttcagtttccatgtagtt

SEQ ID NO: 122194 - DNA, 20 bp, Artificial Sequence
  Description of Artificial Sequence: Synthetic oligonucleotide
  Target: LAMA2; (+) strand; PAM type: NRG; PAM sequence: CAG
tcagtttccatgtagttgag

SEQ ID NO: 122195 - DNA, 20 bp, Artificial Sequence
  Description of Artificial Sequence: Synthetic oligonucleotide
  Target: LAMA2; (+) strand; PAM type: NRG; PAM sequence: GAG
ccatgtagttgagcagtttt

SEQ ID NO: 122196 - DNA, 20 bp, Artificial Sequence
  Description of Artificial Sequence: Synthetic oligonucleotide
  Target: LAMA2; (+) strand; PAM type: NRG; PAM sequence: GAG
gtagttgagcagttttgagt

SEQ ID NO: 122197 - DNA, 20 bp, Artificial Sequence
  Description of Artificial Sequence: Synthetic oligonucleotide
  Target: LAMA2; (+) strand; PAM type: NRG; PAM sequence: GAG
tgagtgagattcttaatcct

SEQ ID NO: 122198 - DNA, 20 bp, Artificial Sequence
  Description of Artificial Sequence: Synthetic oligonucleotide
  Target: LAMA2; (+) strand; PAM type: NRG; PAM sequence: TAG
agattcttaatcctgagttc

SEQ ID NO: 122199 - DNA, 20 bp, Artificial Sequence
  Description of Artificial Sequence: Synthetic oligonucleotide
  Target: LAMA2; (+) strand; PAM type: NRG; PAM sequence: TGG
gttctagtttgattgcactg

SEQ ID NO: 122200 - DNA, 20 bp, Artificial Sequence
  Description of Artificial Sequence: Synthetic oligonucleotide
  Target: LAMA2; (+) strand; PAM type: NRG; PAM sequence: GAG
gtttgattgcactgtggtct

SEQ ID NO: 122201 - DNA, 20 bp, Artificial Sequence
  Description of Artificial Sequence: Synthetic oligonucleotide
  Target: LAMA2; (+) strand; PAM type: NRG; PAM sequence: GAG
ttgattgcactgtggtctga

SEQ ID NO: 122202 - DNA, 20 bp, Artificial Sequence
  Description of Artificial Sequence: Synthetic oligonucleotide
  Target: LAMA2; (+) strand; PAM type: NRG; PAM sequence: TAG
ttgcactgtggtctgagaga

SEQ ID NO: 122203 - DNA, 20 bp, Artificial Sequence
  Description of Artificial Sequence: Synthetic oligonucleotide
  Target: LAMA2; (+) strand; PAM type: NRG; PAM sequence: GAG
tctgttcttttacatttgct

SEQ ID NO: 122204 - DNA, 20 bp, Artificial Sequence
  Description of Artificial Sequence: Synthetic oligonucleotide
  Target: LAMA2; (+) strand; PAM type: NRG; PAM sequence: AGG
ctgttcttttacatttgctg

SEQ ID NO: 122205 - DNA, 20 bp, Artificial Sequence
  Description of Artificial Sequence: Synthetic oligonucleotide
  Target: LAMA2; (+) strand; PAM type: NRG; PAM sequence: GAG
gttcttttacatttgctgag

SEQ ID NO: 122206 - DNA, 20 bp, Artificial Sequence
  Description of Artificial Sequence: Synthetic oligonucleotide
  Target: LAMA2; (+) strand; PAM type: NRG; PAM sequence: GAG
tcttttacatttgctgagga

SEQ ID NO: 122207 - DNA, 20 bp, Artificial Sequence
  Description of Artificial Sequence: Synthetic oligonucleotide
  Target: LAMA2; (+) strand; PAM type: NRG; PAM sequence: AAG
ctgaggagagctttacttcc

SEQ ID NO: 122208 - DNA, 20 bp, Artificial Sequence
  Description of Artificial Sequence: Synthetic oligonucleotide
  Target: LAMA2; (+) strand; PAM type: NRG; PAM sequence: TGG
gagctttacttccaagtatg

SEQ ID NO: 122209 - DNA, 20 bp, Artificial Sequence
  Description of Artificial Sequence: Synthetic oligonucleotide
  Target: LAMA2; (+) strand; PAM type: NRG; PAM sequence: TGG
tccaagtatgtggtcaattt

SEQ ID NO: 122210 - DNA, 20 bp, Artificial Sequence
  Description of Artificial Sequence: Synthetic oligonucleotide
  Target: LAMA2; (+) strand; PAM type: NRG; PAM sequence: TAG
gtatgtggtcaattttggaa

SEQ ID NO: 122211 - DNA, 20 bp, Artificial Sequence
  Description of Artificial Sequence: Synthetic oligonucleotide
  Target: LAMA2; (+) strand; PAM type: NRG; PAM sequence: AGG
tatgtggtcaattttggaat

SEQ ID NO: 122212 - DNA, 20 bp, Artificial Sequence
  Description of Artificial Sequence: Synthetic oligonucleotide
  Target: LAMA2; (+) strand; PAM type: NRG; PAM sequence: TGG
ggtcaattttggaataggtg

SEQ ID NO: 122213 - DNA, 20 bp, Artificial Sequence
  Description of Artificial Sequence: Synthetic oligonucleotide
  Target: LAMA2; (+) strand; PAM type: NRG; PAM sequence: TGG
attttggaataggtgtggtg

SEQ ID NO: 122214 - DNA, 20 bp, Artificial Sequence
  Description of Artificial Sequence: Synthetic oligonucleotide
  Target: LAMA2; (+) strand; PAM type: NRG; PAM sequence: TGG
aaatgtatattctgttgatt

SEQ ID NO: 122215 - DNA, 20 bp, Artificial Sequence
  Description of Artificial Sequence: Synthetic oligonucleotide
  Target: LAMA2; (+) strand; PAM type: NRG; PAM sequence: GGG
aatgtatattctgttgattt

SEQ ID NO: 122216 - DNA, 20 bp, Artificial Sequence
  Description of Artificial Sequence: Synthetic oligonucleotide
  Target: LAMA2; (+) strand; PAM type: NRG; PAM sequence: GGG
atgtatattctgttgatttg

SEQ ID NO: 122217 - DNA, 20 bp, Artificial Sequence
  Description of Artificial Sequence: Synthetic oligonucleotide
  Target: LAMA2; (+) strand; PAM type: NRG; PAM sequence: TGG
tatattctgttgatttgggg

SEQ ID NO: 122218 - DNA, 20 bp, Artificial Sequence
  Description of Artificial Sequence: Synthetic oligonucleotide
  Target: LAMA2; (+) strand; PAM type: NRG; PAM sequence: GAG
tattctgttgatttggggtg

SEQ ID NO: 122219 - DNA, 20 bp, Artificial Sequence
  Description of Artificial Sequence: Synthetic oligonucleotide
  Target: LAMA2; (+) strand; PAM type: NRG; PAM sequence: GAG
ttctgttgatttggggtgga

SEQ ID NO: 122220 - DNA, 20 bp, Artificial Sequence
  Description of Artificial Sequence: Synthetic oligonucleotide
  Target: LAMA2; (+) strand; PAM type: NRG; PAM sequence: TAG
atttggggtggagagttctg

SEQ ID NO: 122221 - DNA, 20 bp, Artificial Sequence
  Description of Artificial Sequence: Synthetic oligonucleotide
  Target: LAMA2; (+) strand; PAM type: NRG; PAM sequence: CAG
agagttctgtagatgtctat

SEQ ID NO: 122222 - DNA, 20 bp, Artificial Sequence
  Description of Artificial Sequence: Synthetic oligonucleotide
  Target: LAMA2; (+) strand; PAM type: NRG; PAM sequence: AGG
gagttctgtagatgtctatc

SEQ ID NO: 122223 - DNA, 20 bp, Artificial Sequence
  Description of Artificial Sequence: Synthetic oligonucleotide
  Target: LAMA2; (+) strand; PAM type: NRG; PAM sequence: TGG
agatgtctatcaggtccgct

SEQ ID NO: 122224 - DNA, 20 bp, Artificial Sequence
  Description of Artificial Sequence: Synthetic oligonucleotide
  Target: LAMA2; (+) strand; PAM type: NRG; PAM sequence: CAG
tctatcaggtccgcttggtg

SEQ ID NO: 122225 - DNA, 20 bp, Artificial Sequence
  Description of Artificial Sequence: Synthetic oligonucleotide
  Target: LAMA2; (+) strand; PAM type: NRG; PAM sequence: GAG
tatcaggtccgcttggtgca

SEQ ID NO: 122226 - DNA, 20 bp, Artificial Sequence
  Description of Artificial Sequence: Synthetic oligonucleotide
  Target: LAMA2; (+) strand; PAM type: NRG; PAM sequence: GAG
ggtccgcttggtgcagagct

SEQ ID NO: 122227 - DNA, 20 bp, Artificial Sequence
  Description of Artificial Sequence: Synthetic oligonucleotide
  Target: LAMA2; (+) strand; PAM type: NRG; PAM sequence: TGG
gcagagctgagttcaattcc

SEQ ID NO: 122228 - DNA, 20 bp, Artificial Sequence
  Description of Artificial Sequence: Synthetic oligonucleotide
  Target: LAMA2; (+) strand; PAM type: NRG; PAM sequence: GGG
cagagctgagttcaattcct

SEQ ID NO: 122229 - DNA, 20 bp, Artificial Sequence
  Description of Artificial Sequence: Synthetic oligonucleotide
  Target: LAMA2; (+) strand; PAM type: NRG; PAM sequence: TAG
ttctgtctcgttgatctgtc

SEQ ID NO: 122230 - DNA, 20 bp, Artificial Sequence
  Description of Artificial Sequence: Synthetic oligonucleotide
  Target: LAMA2; (+) strand; PAM type: NRG; PAM sequence: CAG
gttgatctgtctagtgttga

SEQ ID NO: 122231 - DNA, 20 bp, Artificial Sequence
  Description of Artificial Sequence: Synthetic oligonucleotide
  Target: LAMA2; (+) strand; PAM type: NRG; PAM sequence: TGG
gatctgtctagtgttgacag

SEQ ID NO: 122232 - DNA, 20 bp, Artificial Sequence
  Description of Artificial Sequence: Synthetic oligonucleotide
  Target: LAMA2; (+) strand; PAM type: NRG; PAM sequence: GGG
atctgtctagtgttgacagt

SEQ ID NO: 122233 - DNA, 20 bp, Artificial Sequence
  Description of Artificial Sequence: Synthetic oligonucleotide
  Target: LAMA2; (+) strand; PAM type: NRG; PAM sequence: GGG
tctgtctagtgttgacagtg

SEQ ID NO: 122234 - DNA, 20 bp, Artificial Sequence
  Description of Artificial Sequence: Synthetic oligonucleotide
  Target: LAMA2; (+) strand; PAM type: NRG; PAM sequence: AAG
gtgttgacagtggggtatta

SEQ ID NO: 122235 - DNA, 20 bp, Artificial Sequence
  Description of Artificial Sequence: Synthetic oligonucleotide
  Target: LAMA2; (+) strand; PAM type: NRG; PAM sequence: TGG
agtctcccattattaatgtg

SEQ ID NO: 122236 - DNA, 20 bp, Artificial Sequence
  Description of Artificial Sequence: Synthetic oligonucleotide
  Target: LAMA2; (+) strand; PAM type: NRG; PAM sequence: GGG
gtctcccattattaatgtgt

SEQ ID NO: 122237 - DNA, 20 bp, Artificial Sequence
  Description of Artificial Sequence: Synthetic oligonucleotide
  Target: LAMA2; (+) strand; PAM type: NRG; PAM sequence: GAG
ctcccattattaatgtgtgg

SEQ ID NO: 122238 - DNA, 20 bp, Artificial Sequence
  Description of Artificial Sequence: Synthetic oligonucleotide
  Target: LAMA2; (+) strand; PAM type: NRG; PAM sequence: AAG
ttattaatgtgtgggagtct

SEQ ID NO: 122239 - DNA, 20 bp, Artificial Sequence
  Description of Artificial Sequence: Synthetic oligonucleotide
  Target: LAMA2; (+) strand; PAM type: NRG; PAM sequence: TAG
tgggagtctaagtctctttg

SEQ ID NO: 122240 - DNA, 20 bp, Artificial Sequence
  Description of Artificial Sequence: Synthetic oligonucleotide
  Target: LAMA2; (+) strand; PAM type: NRG; PAM sequence: AGG
gggagtctaagtctctttgt

SEQ ID NO: 122241 - DNA, 20 bp, Artificial Sequence
  Description of Artificial Sequence: Synthetic oligonucleotide
  Target: LAMA2; (+) strand; PAM type: NRG; PAM sequence: CAG
aagtctctttgtaggtcact

SEQ ID NO: 122242 - DNA, 20 bp, Artificial Sequence
  Description of Artificial Sequence: Synthetic oligonucleotide
  Target: LAMA2; (+) strand; PAM type: NRG; PAM sequence: AGG
agtctctttgtaggtcactc

SEQ ID NO: 122243 - DNA, 20 bp, Artificial Sequence
  Description of Artificial Sequence: Synthetic oligonucleotide
  Target: LAMA2; (+) strand; PAM type: NRG; PAM sequence: TGG
caggacttgctttatgaatc

SEQ ID NO: 122244 - DNA, 20 bp, Artificial Sequence
  Description of Artificial Sequence: Synthetic oligonucleotide
  Target: LAMA2; (+) strand; PAM type: NRG; PAM sequence: GGG
aggacttgctttatgaatct

SEQ ID NO: 122245 - DNA, 20 bp, Artificial Sequence
  Description of Artificial Sequence: Synthetic oligonucleotide
  Target: LAMA2; (+) strand; PAM type: NRG; PAM sequence: TGG
gaatctgggtgctcctgtgt

SEQ ID NO: 122246 - DNA, 20 bp, Artificial Sequence
  Description of Artificial Sequence: Synthetic oligonucleotide
  Target: LAMA2; (+) strand; PAM type: NRG; PAM sequence: GGG
aatctgggtgctcctgtgtt

SEQ ID NO: 122247 - DNA, 20 bp, Artificial Sequence
  Description of Artificial Sequence: Synthetic oligonucleotide
  Target: LAMA2; (+) strand; PAM type: NRG; PAM sequence: TAG
gtgttgggtgcgtatatatt

SEQ ID NO: 122248 - DNA, 20 bp, Artificial Sequence
  Description of Artificial Sequence: Synthetic oligonucleotide
  Target: LAMA2; (+) strand; PAM type: NRG; PAM sequence: AGG
tgttgggtgcgtatatattt

SEQ ID NO: 122249 - DNA, 20 bp, Artificial Sequence
  Description of Artificial Sequence: Synthetic oligonucleotide
  Target: LAMA2; (+) strand; PAM type: NRG; PAM sequence: TAG
gggtgcgtatatatttaggt

SEQ ID NO: 122250 - DNA, 20 bp, Artificial Sequence
  Description of Artificial Sequence: Synthetic oligonucleotide
  Target: LAMA2; (+) strand; PAM type: NRG; PAM sequence: TAG
gcgtatatatttaggttagt

SEQ ID NO: 122251 - DNA, 20 bp, Artificial Sequence
  Description of Artificial Sequence: Synthetic oligonucleotide
  Target: LAMA2; (+) strand; PAM type: NRG; PAM sequence: TGG
atccctttaccattatgtaa

SEQ ID NO: 122252 - DNA, 20 bp, Artificial Sequence
  Description of Artificial Sequence: Synthetic oligonucleotide
  Target: LAMA2; (+) strand; PAM type: NRG; PAM sequence: TGG
ttgtctcttttgatctttgt

SEQ ID NO: 122253 - DNA, 20 bp, Artificial Sequence
  Description of Artificial Sequence: Synthetic oligonucleotide
  Target: LAMA2; (+) strand; PAM type: NRG; PAM sequence: CAG
tggtttaaaatctgttttat

SEQ ID NO: 122254 - DNA, 20 bp, Artificial Sequence
  Description of Artificial Sequence: Synthetic oligonucleotide
  Target: LAMA2; (+) strand; PAM type: NRG; PAM sequence: GAG
gtttaaaatctgttttatca

SEQ ID NO: 122255 - DNA, 20 bp, Artificial Sequence
  Description of Artificial Sequence: Synthetic oligonucleotide
  Target: LAMA2; (+) strand; PAM type: NRG; PAM sequence: TAG
aaatctgttttatcagagac

SEQ ID NO: 122256 - DNA, 20 bp, Artificial Sequence
  Description of Artificial Sequence: Synthetic oligonucleotide
  Target: LAMA2; (+) strand; PAM type: NRG; PAM sequence: AGG
aatctgttttatcagagact

SEQ ID NO: 122257 - DNA, 20 bp, Artificial Sequence
  Description of Artificial Sequence: Synthetic oligonucleotide
  Target: LAMA2; (+) strand; PAM type: NRG; PAM sequence: TGG
ttttttgttttccatttgct

SEQ ID NO: 122258 - DNA, 20 bp, Artificial Sequence
  Description of Artificial Sequence: Synthetic oligonucleotide
  Target: LAMA2; (+) strand; PAM type: NRG; PAM sequence: TAG
tttgttttccatttgcttgg

SEQ ID NO: 122259 - DNA, 20 bp, Artificial Sequence
  Description of Artificial Sequence: Synthetic oligonucleotide
  Target: LAMA2; (+) strand; PAM type: NRG; PAM sequence: GAG
ttcctccatccttttatttt

SEQ ID NO: 122260 - DNA, 20 bp, Artificial Sequence
  Description of Artificial Sequence: Synthetic oligonucleotide
  Target: LAMA2; (+) strand; PAM type: NRG; PAM sequence: GAG
ctatgtgtgtctctgcacgt

SEQ ID NO: 122261 - DNA, 20 bp, Artificial Sequence
  Description of Artificial Sequence: Synthetic oligonucleotide
  Target: LAMA2; (+) strand; PAM type: NRG; PAM sequence: TGG
gtgtgtctctgcacgtgaga

SEQ ID NO: 122262 - DNA, 20 bp, Artificial Sequence
  Description of Artificial Sequence: Synthetic oligonucleotide
  Target: LAMA2; (+) strand; PAM type: NRG; PAM sequence: GGG
tgtgtctctgcacgtgagat

SEQ ID NO: 122263 - DNA, 20 bp, Artificial Sequence
  Description of Artificial Sequence: Synthetic oligonucleotide
  Target: LAMA2; (+) strand; PAM type: NRG; PAM sequence: CAG
tgagatgggtttcctgaata

SEQ ID NO: 122264 - DNA, 20 bp, Artificial Sequence
  Description of Artificial Sequence: Synthetic oligonucleotide
  Target: LAMA2; (+) strand; PAM type: NRG; PAM sequence: TGG
tcctgaatacagcacactga

SEQ ID NO: 122265 - DNA, 20 bp, Artificial Sequence
  Description of Artificial Sequence: Synthetic oligonucleotide
  Target: LAMA2; (+) strand; PAM type: NRG; PAM sequence: GGG
cctgaatacagcacactgat

SEQ ID NO: 122266 - DNA, 20 bp, Artificial Sequence
  Description of Artificial Sequence: Synthetic oligonucleotide
  Target: LAMA2; (+) strand; PAM type: NRG; PAM sequence: CAG
tgactctttatccaatttgc

SEQ ID NO: 122267 - DNA, 20 bp, Artificial Sequence
  Description of Artificial Sequence: Synthetic oligonucleotide
  Target: LAMA2; (+) strand; PAM type: NRG; PAM sequence: TGG
gccagtctgtgtcttttaat

SEQ ID NO: 122268 - DNA, 20 bp, Artificial Sequence
  Description of Artificial Sequence: Synthetic oligonucleotide
  Target: LAMA2; (+) strand; PAM type: NRG; PAM sequence: GAG
cagtctgtgtcttttaattg

SEQ ID NO: 122269 - DNA, 20 bp, Artificial Sequence
  Description of Artificial Sequence: Synthetic oligonucleotide
  Target: LAMA2; (+) strand; PAM type: NRG; PAM sequence: TAG
tgtcttttaattggagcatt

SEQ ID NO: 122270 - DNA, 20 bp, Artificial Sequence
  Description of Artificial Sequence: Synthetic oligonucleotide
  Target: LAMA2; (+) strand; PAM type: NRG; PAM sequence: AAG
atttagtccatttacattta

SEQ ID NO: 122271 - DNA, 20 bp, Artificial Sequence
  Description of Artificial Sequence: Synthetic oligonucleotide
  Target: LAMA2; (+) strand; PAM type: NRG; PAM sequence: TAG
tgatcctgtcatgatgatgt

SEQ ID NO: 122272 - DNA, 20 bp, Artificial Sequence
  Description of Artificial Sequence: Synthetic oligonucleotide
  Target: LAMA2; (+) strand; PAM type: NRG; PAM sequence: TGG
cctgtcatgatgatgttagc

SEQ ID NO: 122273 - DNA, 20 bp, Artificial Sequence
  Description of Artificial Sequence: Synthetic oligonucleotide
  Target: LAMA2; (+) strand; PAM type: NRG; PAM sequence: TAG
tagctggttattttgctcgt

SEQ ID NO: 122274 - DNA, 20 bp, Artificial Sequence
  Description of Artificial Sequence: Synthetic oligonucleotide
  Target: LAMA2; (+) strand; PAM type: NRG; PAM sequence: CAG
attttgctcgttagttgatg

SEQ ID NO: 122275 - DNA, 20 bp, Artificial Sequence
  Description of Artificial Sequence: Synthetic oligonucleotide
  Target: LAMA2; (+) strand; PAM type: NRG; PAM sequence: TAG
tagttgatgcagtttcttcc

SEQ ID NO: 122276 - DNA, 20 bp, Artificial Sequence
  Description of Artificial Sequence: Synthetic oligonucleotide
  Target: LAMA2; (+) strand; PAM type: NRG; PAM sequence: TGG
cagtttcttcctagtctcga

SEQ ID NO: 122277 - DNA, 20 bp, Artificial Sequence
  Description of Artificial Sequence: Synthetic oligonucleotide
  Target: LAMA2; (+) strand; PAM type: NRG; PAM sequence: TGG
tctcgatggtctttacattt

SEQ ID NO: 122278 - DNA, 20 bp, Artificial Sequence
  Description of Artificial Sequence: Synthetic oligonucleotide
  Target: LAMA2; (+) strand; PAM type: NRG; PAM sequence: CAG
tacattttggcatgattttg

SEQ ID NO: 122279 - DNA, 20 bp, Artificial Sequence
  Description of Artificial Sequence: Synthetic oligonucleotide
  Target: LAMA2; (+) strand; PAM type: NRG; PAM sequence: TGG
attttggcatgattttgcag

SEQ ID NO: 122280 - DNA, 20 bp, Artificial Sequence
  Description of Artificial Sequence: Synthetic oligonucleotide
  Target: LAMA2; (+) strand; PAM type: NRG; PAM sequence: TGG
gattttgcagtggcttgtac

SEQ ID NO: 122281 - DNA, 20 bp, Artificial Sequence
  Description of Artificial Sequence: Synthetic oligonucleotide
  Target: LAMA2; (+) strand; PAM type: NRG; PAM sequence: TAG
tggttgttcctttccatgtt

SEQ ID NO: 122282 - DNA, 20 bp, Artificial Sequence
  Description of Artificial Sequence: Synthetic oligonucleotide
  Target: LAMA2; (+) strand; PAM type: NRG; PAM sequence: CAG
tccatgtttagtgcttcctt

SEQ ID NO: 122283 - DNA, 20 bp, Artificial Sequence
  Description of Artificial Sequence: Synthetic oligonucleotide
  Target: LAMA2; (+) strand; PAM type: NRG; PAM sequence: AGG
ccatgtttagtgcttccttc

SEQ ID NO: 122284 - DNA, 20 bp, Artificial Sequence
  Description of Artificial Sequence: Synthetic oligonucleotide
  Target: LAMA2; (+) strand; PAM type: NRG; PAM sequence: GAG
atgtttagtgcttccttcag

SEQ ID NO: 122285 - DNA, 20 bp, Artificial Sequence
  Description of Artificial Sequence: Synthetic oligonucleotide
  Target: LAMA2; (+) strand; PAM type: NRG; PAM sequence: TAG
gcttccttcaggagctcttt

SEQ ID NO: 122286 - DNA, 20 bp, Artificial Sequence
  Description of Artificial Sequence: Synthetic oligonucleotide
  Target: LAMA2; (+) strand; PAM type: NRG; PAM sequence: AGG
cttccttcaggagctctttt

SEQ ID NO: 122287 - DNA, 20 bp, Artificial Sequence
  Description of Artificial Sequence: Synthetic oligonucleotide
  Target: LAMA2; (+) strand; PAM type: NRG; PAM sequence: GGG
ttccttcaggagctctttta

SEQ ID NO: 122288 - DNA, 20 bp, Artificial Sequence
  Description of Artificial Sequence: Synthetic oligonucleotide
  Target: LAMA2; (+) strand; PAM type: NRG; PAM sequence: CAG
cttcaggagctcttttaggg

SEQ ID NO: 122289 - DNA, 20 bp, Artificial Sequence
  Description of Artificial Sequence: Synthetic oligonucleotide
  Target: LAMA2; (+) strand; PAM type: NRG; PAM sequence: AGG
ttcaggagctcttttagggc

SEQ ID NO: 122290 - DNA, 20 bp, Artificial Sequence
  Description of Artificial Sequence: Synthetic oligonucleotide
  Target: LAMA2; (+) strand; PAM type: NRG; PAM sequence: TGG
gagctcttttagggcaggcc

SEQ ID NO: 122291 - DNA, 20 bp, Artificial Sequence
  Description of Artificial Sequence: Synthetic oligonucleotide
  Target: LAMA2; (+) strand; PAM type: NRG; PAM sequence: TGG
ctcttttagggcaggcctgg

SEQ ID NO: 122292 - DNA, 20 bp, Artificial Sequence
  Description of Artificial Sequence: Synthetic oligonucleotide
  Target: LAMA2; (+) strand; PAM type: NRG; PAM sequence: CAG
ctggtggtgacaaaatctct

SEQ ID NO: 122293 - DNA, 20 bp, Artificial Sequence
  Description of Artificial Sequence: Synthetic oligonucleotide
  Target: LAMA2; (+) strand; PAM type: NRG; PAM sequence: AAG
tcagcatttgcttgtctgta

SEQ ID NO: 122294 - DNA, 20 bp, Artificial Sequence
  Description of Artificial Sequence: Synthetic oligonucleotide
  Target: LAMA2; (+) strand; PAM type: NRG; PAM sequence: AAG
ttatttctccttcgcttatg

SEQ ID NO: 122295 - DNA, 20 bp, Artificial Sequence
  Description of Artificial Sequence: Synthetic oligonucleotide
  Target: LAMA2; (+) strand; PAM type: NRG; PAM sequence: TAG
tctccttcgcttatgaagct

SEQ ID NO: 122296 - DNA, 20 bp, Artificial Sequence
  Description of Artificial Sequence: Synthetic oligonucleotide
  Target: LAMA2; (+) strand; PAM type: NRG; PAM sequence: TGG
ttcgcttatgaagcttagtt

SEQ ID NO: 122297 - DNA, 20 bp, Artificial Sequence
  Description of Artificial Sequence: Synthetic oligonucleotide
  Target: LAMA2; (+) strand; PAM type: NRG; PAM sequence: TGG
cttatgaagcttagtttggc

SEQ ID NO: 122298 - DNA, 20 bp, Artificial Sequence
  Description of Artificial Sequence: Synthetic oligonucleotide
  Target: LAMA2; (+) strand; PAM type: NRG; PAM sequence: TGG
tttggctggatatgaaattc

SEQ ID NO: 122299 - DNA, 20 bp, Artificial Sequence
  Description of Artificial Sequence: Synthetic oligonucleotide
  Target: LAMA2; (+) strand; PAM type: NRG; PAM sequence: GGG
ttggctggatatgaaattct

SEQ ID NO: 122300 - DNA, 20 bp, Artificial Sequence
  Description of Artificial Sequence: Synthetic oligonucleotide
  Target: LAMA2; (+) strand; PAM type: NRG; PAM sequence: AAG
ggttgaaaattcttttcttt

SEQ ID NO: 122301 - DNA, 20 bp, Artificial Sequence
  Description of Artificial Sequence: Synthetic oligonucleotide
  Target: LAMA2; (+) strand; PAM type: NRG; PAM sequence: TGG
tctttaagaatgttgaatat

SEQ ID NO: 122302 - DNA, 20 bp, Artificial Sequence
  Description of Artificial Sequence: Synthetic oligonucleotide
  Target: LAMA2; (+) strand; PAM type: NRG; PAM sequence: TGG
tattggcccccactctcttc

SEQ ID NO: 122303 - DNA, 20 bp, Artificial Sequence
  Description of Artificial Sequence: Synthetic oligonucleotide
  Target: LAMA2; (+) strand; PAM type: NRG; PAM sequence: TAG
ccccactctcttctggcttg

SEQ ID NO: 122304 - DNA, 20 bp, Artificial Sequence
  Description of Artificial Sequence: Synthetic oligonucleotide
  Target: LAMA2; (+) strand; PAM type: NRG; PAM sequence: AGG
cccactctcttctggcttgt

SEQ ID NO: 122305 - DNA, 20 bp, Artificial Sequence
  Description of Artificial Sequence: Synthetic oligonucleotide
  Target: LAMA2; (+) strand; PAM type: NRG; PAM sequence: GGG
ccactctcttctggcttgta

SEQ ID NO: 122306 - DNA, 20 bp, Artificial Sequence
  Description of Artificial Sequence: Synthetic oligonucleotide
  Target: LAMA2; (+) strand; PAM type: NRG; PAM sequence: GAG
tggcttgtagggtttctgcc

SEQ ID NO: 122307 - DNA, 20 bp, Artificial Sequence
  Description of Artificial Sequence: Synthetic oligonucleotide
  Target: LAMA2; (+) strand; PAM type: NRG; PAM sequence: GAG
gcttgtagggtttctgccga

SEQ ID NO: 122308 - DNA, 20 bp, Artificial Sequence
  Description of Artificial Sequence: Synthetic oligonucleotide
  Target: LAMA2; (+) strand; PAM type: NRG; PAM sequence: TAG
tctgccgagagatctgctgt

SEQ ID NO: 122309 - DNA, 20 bp, Artificial Sequence
  Description of Artificial Sequence: Synthetic oligonucleotide
  Target: LAMA2; (+) strand; PAM type: NRG; PAM sequence: TGG
gagatctgctgttagtctga

SEQ ID NO: 122310 - DNA, 20 bp, Artificial Sequence
  Description of Artificial Sequence: Synthetic oligonucleotide
  Target: LAMA2; (+) strand; PAM type: NRG; PAM sequence: GGG
agatctgctgttagtctgat

SEQ ID NO: 122311 - DNA, 20 bp, Artificial Sequence
  Description of Artificial Sequence: Synthetic oligonucleotide
  Target: LAMA2; (+) strand; PAM type: NRG; PAM sequence: CAG
agtctgatgggcttcccttc

SEQ ID NO: 122312 - DNA, 20 bp, Artificial Sequence
  Description of Artificial Sequence: Synthetic oligonucleotide
  Target: LAMA2; (+) strand; PAM type: NRG; PAM sequence: AGG
gtctgatgggcttcccttcc

SEQ ID NO: 122313 - DNA, 20 bp, Artificial Sequence
  Description of Artificial Sequence: Synthetic oligonucleotide
  Target: LAMA2; (+) strand; PAM type: NRG; PAM sequence: GGG
tctgatgggcttcccttcca

SEQ ID NO: 122314 - DNA, 20 bp, Artificial Sequence
  Description of Artificial Sequence: Synthetic oligonucleotide
  Target: LAMA2; (+) strand; PAM type: NRG; PAM sequence: TGG
ggtaacccgtgctttctctc

SEQ ID NO: 122315 - DNA, 20 bp, Artificial Sequence
  Description of Artificial Sequence: Synthetic oligonucleotide
  Target: LAMA2; (+) strand; PAM type: NRG; PAM sequence: TGG
tttttccttcatttcaactt

SEQ ID NO: 122316 - DNA, 20 bp, Artificial Sequence
  Description of Artificial Sequence: Synthetic oligonucleotide
  Target: LAMA2; (+) strand; PAM type: NRG; PAM sequence: TGG
aatctgacaattatgtgtct

SEQ ID NO: 122317 - DNA, 20 bp, Artificial Sequence
  Description of Artificial Sequence: Synthetic oligonucleotide
  Target: LAMA2; (+) strand; PAM type: NRG; PAM sequence: GAG
tctgacaattatgtgtcttg

SEQ ID NO: 122318 - DNA, 20 bp, Artificial Sequence
  Description of Artificial Sequence: Synthetic oligonucleotide
  Target: LAMA2; (+) strand; PAM type: NRG; PAM sequence: GAG
gtcttggagttgcttttctc

SEQ ID NO: 122319 - DNA, 20 bp, Artificial Sequence
  Description of Artificial Sequence: Synthetic oligonucleotide
  Target: LAMA2; (+) strand; PAM type: NRG; PAM sequence: AAG
ttggagttgcttttctcgag

SEQ ID NO: 122320 - DNA, 20 bp, Artificial Sequence
  Description of Artificial Sequence: Synthetic oligonucleotide
  Target: LAMA2; (+) strand; PAM type: NRG; PAM sequence: TGG
tttctcgagaagtatctttg

SEQ ID NO: 122321 - DNA, 20 bp, Artificial Sequence
  Description of Artificial Sequence: Synthetic oligonucleotide
  Target: LAMA2; (+) strand; PAM type: NRG; PAM sequence: TGG
tatttcctgaatctgaacgt

SEQ ID NO: 122322 - DNA, 20 bp, Artificial Sequence
  Description of Artificial Sequence: Synthetic oligonucleotide
  Target: LAMA2; (+) strand; PAM type: NRG; PAM sequence: TAG
tgaacgttggcctgccttgc

SEQ ID NO: 122323 - DNA, 20 bp, Artificial Sequence
  Description of Artificial Sequence: Synthetic oligonucleotide
  Target: LAMA2; (+) strand; PAM type: NRG; PAM sequence: TGG
gttggcctgccttgctagat

SEQ ID NO: 122324 - DNA, 20 bp, Artificial Sequence
  Description of Artificial Sequence: Synthetic oligonucleotide
  Target: LAMA2; (+) strand; PAM type: NRG; PAM sequence: GGG
ttggcctgccttgctagatt

SEQ ID NO: 122325 - DNA, 20 bp, Artificial Sequence
  Description of Artificial Sequence: Synthetic oligonucleotide
  Target: LAMA2; (+) strand; PAM type: NRG; PAM sequence: GGG
tggcctgccttgctagattg

SEQ ID NO: 122326 - DNA, 20 bp, Artificial Sequence
  Description of Artificial Sequence: Synthetic oligonucleotide
  Target: LAMA2; (+) strand; PAM type: NRG; PAM sequence: AAG
cctgccttgctagattgggg

SEQ ID NO: 122327 - DNA, 20 bp, Artificial Sequence
  Description of Artificial Sequence: Synthetic oligonucleotide
  Target: LAMA2; (+) strand; PAM type: NRG; PAM sequence: TGG
ctagattggggaagttctcc

SEQ ID NO: 122328 - DNA, 20 bp, Artificial Sequence
  Description of Artificial Sequence: Synthetic oligonucleotide
  Target: LAMA2; (+) strand; PAM type: NRG; PAM sequence: CAG
ttctcctggataatatcctg

SEQ ID NO: 122329 - DNA, 20 bp, Artificial Sequence
  Description of Artificial Sequence: Synthetic oligonucleotide
  Target: LAMA2; (+) strand; PAM type: NRG; PAM sequence: GAG
ctcctggataatatcctgca

SEQ ID NO: 122330 - DNA, 20 bp, Artificial Sequence
  Description of Artificial Sequence: Synthetic oligonucleotide
  Target: LAMA2; (+) strand; PAM type: NRG; PAM sequence: TGG
ctgcagagtgttttccaact

SEQ ID NO: 122331 - DNA, 20 bp, Artificial Sequence
  Description of Artificial Sequence: Synthetic oligonucleotide
  Target: LAMA2; (+) strand; PAM type: NRG; PAM sequence: CAG
ttcattctccccgtcacttt

SEQ ID NO: 122332 - DNA, 20 bp, Artificial Sequence
  Description of Artificial Sequence: Synthetic oligonucleotide
  Target: LAMA2; (+) strand; PAM type: NRG; PAM sequence: AGG
tcattctccccgtcactttc

SEQ ID NO: 122333 - DNA, 20 bp, Artificial Sequence
  Description of Artificial Sequence: Synthetic oligonucleotide
  Target: LAMA2; (+) strand; PAM type: NRG; PAM sequence: CAG
tcactttcaggtacaccaat

SEQ ID NO: 122334 - DNA, 20 bp, Artificial Sequence
  Description of Artificial Sequence: Synthetic oligonucleotide
  Target: LAMA2; (+) strand; PAM type: NRG; PAM sequence: TGG
tcaggtacaccaatcagacg

SEQ ID NO: 122335 - DNA, 20 bp, Artificial Sequence
  Description of Artificial Sequence: Synthetic oligonucleotide
  Target: LAMA2; (+) strand; PAM type: NRG; PAM sequence: TGG
acaccaatcagacgtggatt

SEQ ID NO: 122336 - DNA, 20 bp, Artificial Sequence
  Description of Artificial Sequence: Synthetic oligonucleotide
  Target: LAMA2; (+) strand; PAM type: NRG; PAM sequence: TAG
gtggatttggtcttttcaca

SEQ ID NO: 122337 - DNA, 20 bp, Artificial Sequence
  Description of Artificial Sequence: Synthetic oligonucleotide
  Target: LAMA2; (+) strand; PAM type: NRG; PAM sequence: TGG
tcacatagtcccatatttct

SEQ ID NO: 122338 - DNA, 20 bp, Artificial Sequence
  Description of Artificial Sequence: Synthetic oligonucleotide
  Target: LAMA2; (+) strand; PAM type: NRG; PAM sequence: GAG
acatagtcccatatttcttg

SEQ ID NO: 122339 - DNA, 20 bp, Artificial Sequence
  Description of Artificial Sequence: Synthetic oligonucleotide
  Target: LAMA2; (+) strand; PAM type: NRG; PAM sequence: AGG
catagtcccatatttcttgg

SEQ ID NO: 122340 - DNA, 20 bp, Artificial Sequence
  Description of Artificial Sequence: Synthetic oligonucleotide
  Target: LAMA2; (+) strand; PAM type: NRG; PAM sequence: CAG
attgctgataccctttcttc

SEQ ID NO: 122341 - DNA, 20 bp, Artificial Sequence
  Description of Artificial Sequence: Synthetic oligonucleotide
  Target: LAMA2; (+) strand; PAM type: NRG; PAM sequence: CGG
tttcttccagttgatcgcat

SEQ ID NO: 122342 - DNA, 20 bp, Artificial Sequence
  Description of Artificial Sequence: Synthetic oligonucleotide
  Target: LAMA2; (+) strand; PAM type: NRG; PAM sequence: GAG
agttgatcgcatcggctcct

SEQ ID NO: 122343 - DNA, 20 bp, Artificial Sequence
  Description of Artificial Sequence: Synthetic oligonucleotide
  Target: LAMA2; (+) strand; PAM type: NRG; PAM sequence: AGG
gttgatcgcatcggctcctg

SEQ ID NO: 122344 - DNA, 20 bp, Artificial Sequence
  Description of Artificial Sequence: Synthetic oligonucleotide
  Target: LAMA2; (+) strand; PAM type: NRG; PAM sequence: TAG
aggcttctgcattcttcacg

SEQ ID NO: 122345 - DNA, 20 bp, Artificial Sequence
  Description of Artificial Sequence: Synthetic oligonucleotide
  Target: LAMA2; (+) strand; PAM type: NRG; PAM sequence: GAG
gcattcttcacgtagttctc

SEQ ID NO: 122346 - DNA, 20 bp, Artificial Sequence
  Description of Artificial Sequence: Synthetic oligonucleotide
  Target: LAMA2; (+) strand; PAM type: NRG; PAM sequence: TGG
ttcacgtagttctcgagcct

SEQ ID NO: 122347 - DNA, 20 bp, Artificial Sequence
  Description of Artificial Sequence: Synthetic oligonucleotide
  Target: LAMA2; (+) strand; PAM type: NRG; PAM sequence: CAG
agttctcgagccttggtttt

SEQ ID NO: 122348 - DNA, 20 bp, Artificial Sequence
  Description of Artificial Sequence: Synthetic oligonucleotide
  Target: LAMA2; (+) strand; PAM type: NRG; PAM sequence: CAG
gccttggttttcagctccat

SEQ ID NO: 122349 - DNA, 20 bp, Artificial Sequence
  Description of Artificial Sequence: Synthetic oligonucleotide
  Target: LAMA2; (+) strand; PAM type: NRG; PAM sequence: AAG
tcagctccatcagctccttt

SEQ ID NO: 122350 - DNA, 20 bp, Artificial Sequence
  Description of Artificial Sequence: Synthetic oligonucleotide
  Target: LAMA2; (+) strand; PAM type: NRG; PAM sequence: TGG
ctttaagcatttctctgtat

SEQ ID NO: 122351 - DNA, 20 bp, Artificial Sequence
  Description of Artificial Sequence: Synthetic oligonucleotide
  Target: LAMA2; (+) strand; PAM type: NRG; PAM sequence: TAG
tttctctgtattggttattc

SEQ ID NO: 122352 - DNA, 20 bp, Artificial Sequence
  Description of Artificial Sequence: Synthetic oligonucleotide
  Target: LAMA2; (+) strand; PAM type: NRG; PAM sequence: AAG
attcttctaaatttttttca

SEQ ID NO: 122353 - DNA, 20 bp, Artificial Sequence
  Description of Artificial Sequence: Synthetic oligonucleotide
  Target: LAMA2; (+) strand; PAM type: NRG; PAM sequence: TGG
gttttcaacttctttgcctt

SEQ ID NO: 122354 - DNA, 20 bp, Artificial Sequence
  Description of Artificial Sequence: Synthetic oligonucleotide
  Target: LAMA2; (+) strand; PAM type: NRG; PAM sequence: TAG
ttggtttgaatgtcctcccg

SEQ ID NO: 122355 - DNA, 20 bp, Artificial Sequence
  Description of Artificial Sequence: Synthetic oligonucleotide
  Target: LAMA2; (+) strand; PAM type: NRG; PAM sequence: CAG
ttgaatgtcctcccgtagct

SEQ ID NO: 122356 - DNA, 20 bp, Artificial Sequence
  Description of Artificial Sequence: Synthetic oligonucleotide
  Target: LAMA2; (+) strand; PAM type: NRG; PAM sequence: GAG
gaatgtcctcccgtagctca

SEQ ID NO: 122357 - DNA, 20 bp, Artificial Sequence
  Description of Artificial Sequence: Synthetic oligonucleotide
  Target: LAMA2; (+) strand; PAM type: NRG; PAM sequence: AAG
cagagtaatttgatcatctg

SEQ ID NO: 122358 - DNA, 20 bp, Artificial Sequence
  Description of Artificial Sequence: Synthetic oligonucleotide
  Target: LAMA2; (+) strand; PAM type: NRG; PAM sequence: CAG
catctgaagccttcttctct

SEQ ID NO: 122359 - DNA, 20 bp, Artificial Sequence
  Description of Artificial Sequence: Synthetic oligonucleotide
  Target: LAMA2; (+) strand; PAM type: NRG; PAM sequence: AAG
cttcttctctcagctcgtca

SEQ ID NO: 122360 - DNA, 20 bp, Artificial Sequence
  Description of Artificial Sequence: Synthetic oligonucleotide
  Target: LAMA2; (+) strand; PAM type: NRG; PAM sequence: TAG
cgtcaaagtcgttctccgtc

SEQ ID NO: 122361 - DNA, 20 bp, Artificial Sequence
  Description of Artificial Sequence: Synthetic oligonucleotide
  Target: LAMA2; (+) strand; PAM type: NRG; PAM sequence: TGG
gtctagcttcgttctgttgt

SEQ ID NO: 122362 - DNA, 20 bp, Artificial Sequence
  Description of Artificial Sequence: Synthetic oligonucleotide
  Target: LAMA2; (+) strand; PAM type: NRG; PAM sequence: GAG
agcttcgttctgttgttggt

SEQ ID NO: 122363 - DNA, 20 bp, Artificial Sequence
  Description of Artificial Sequence: Synthetic oligonucleotide
  Target: LAMA2; (+) strand; PAM type: NRG; PAM sequence: AGG
gcttcgttctgttgttggtg

SEQ ID NO: 122364 - DNA, 20 bp, Artificial Sequence
  Description of Artificial Sequence: Synthetic oligonucleotide
  Target: LAMA2; (+) strand; PAM type: NRG; PAM sequence: TGG
ggtgaggaactgcgttcctt

SEQ ID NO: 122365 - DNA, 20 bp, Artificial Sequence
  Description of Artificial Sequence: Synthetic oligonucleotide
  Target: LAMA2; (+) strand; PAM type: NRG; PAM sequence: GAG
tgaggaactgcgttcctttg

SEQ ID NO: 122366 - DNA, 20 bp, Artificial Sequence
  Description of Artificial Sequence: Synthetic oligonucleotide
  Target: LAMA2; (+) strand; PAM type: NRG; PAM sequence: AGG
gaggaactgcgttcctttgg

SEQ ID NO: 122367 - DNA, 20 bp, Artificial Sequence
  Description of Artificial Sequence: Synthetic oligonucleotide
  Target: LAMA2; (+) strand; PAM type: NRG; PAM sequence: GAG
ggaactgcgttcctttggag

SEQ ID NO: 122368 - DNA, 20 bp, Artificial Sequence
  Description of Artificial Sequence: Synthetic oligonucleotide
  Target: LAMA2; (+) strand; PAM type: NRG; PAM sequence: AGG
gaactgcgttcctttggagg

SEQ ID NO: 122369 - DNA, 20 bp, Artificial Sequence
  Description of Artificial Sequence: Synthetic oligonucleotide
  Target: LAMA2; (+) strand; PAM type: NRG; PAM sequence: GAG
actgcgttcctttggaggag

SEQ ID NO: 122370 - DNA, 20 bp, Artificial Sequence
  Description of Artificial Sequence: Synthetic oligonucleotide
  Target: LAMA2; (+) strand; PAM type: NRG; PAM sequence: GAG
tgcgttcctttggaggagga

SEQ ID NO: 122371 - DNA, 20 bp, Artificial Sequence
  Description of Artificial Sequence: Synthetic oligonucleotide
  Target: LAMA2; (+) strand; PAM type: NRG; PAM sequence: AGG
gcgttcctttggaggaggag

SEQ ID NO: 122372 - DNA, 20 bp, Artificial Sequence
  Description of Artificial Sequence: Synthetic oligonucleotide
  Target: LAMA2; (+) strand; PAM type: NRG; PAM sequence: TAG
aggagaggcgctctgctttt

SEQ ID NO: 122373 - DNA, 20 bp, Artificial Sequence
  Description of Artificial Sequence: Synthetic oligonucleotide
  Target: LAMA2; (+) strand; PAM type: NRG; PAM sequence: GAG
gagaggcgctctgcttttta

SEQ ID NO: 122374 - DNA, 20 bp, Artificial Sequence
  Description of Artificial Sequence: Synthetic oligonucleotide
  Target: LAMA2; (+) strand; PAM type: NRG; PAM sequence: CAG
gctctgctttttagagtttc

SEQ ID NO: 122375 - DNA, 20 bp, Artificial Sequence
  Description of Artificial Sequence: Synthetic oligonucleotide
  Target: LAMA2; (+) strand; PAM type: NRG; PAM sequence: TGG
ctgttttttccccatctttg

SEQ ID NO: 122376 - DNA, 20 bp, Artificial Sequence
  Description of Artificial Sequence: Synthetic oligonucleotide
  Target: LAMA2; (+) strand; PAM type: NRG; PAM sequence: TGG
tttgtggttttatctacttt

SEQ ID NO: 122377 - DNA, 20 bp, Artificial Sequence
  Description of Artificial Sequence: Synthetic oligonucleotide
  Target: LAMA2; (+) strand; PAM type: NRG; PAM sequence: TGG
ctacttttggtctttgatga

SEQ ID NO: 122378 - DNA, 20 bp, Artificial Sequence
  Description of Artificial Sequence: Synthetic oligonucleotide
  Target: LAMA2; (+) strand; PAM type: NRG; PAM sequence: CAG
tctttgatgatggtgatgta

SEQ ID NO: 122379 - DNA, 20 bp, Artificial Sequence
  Description of Artificial Sequence: Synthetic oligonucleotide
  Target: LAMA2; (+) strand; PAM type: NRG; PAM sequence: TGG
tgatgatggtgatgtacaga

SEQ ID NO: 122380 - DNA, 20 bp, Artificial Sequence
  Description of Artificial Sequence: Synthetic oligonucleotide
  Target: LAMA2; (+) strand; PAM type: NRG; PAM sequence: GGG
gatgatggtgatgtacagat

SEQ ID NO: 122381 - DNA, 20 bp, Artificial Sequence
  Description of Artificial Sequence: Synthetic oligonucleotide
  Target: LAMA2; (+) strand; PAM type: NRG; PAM sequence: TGG
gtgatgtacagatgggttct

SEQ ID NO: 122382 - DNA, 20 bp, Artificial Sequence
  Description of Artificial Sequence: Synthetic oligonucleotide
  Target: LAMA2; (+) strand; PAM type: NRG; PAM sequence: TGG
gtacagatgggttcttggtg

SEQ ID NO: 122383 - DNA, 20 bp, Artificial Sequence
  Description of Artificial Sequence: Synthetic oligonucleotide
  Target: LAMA2; (+) strand; PAM type: NRG; PAM sequence: TAG
tggatgtcctttctgtttat

SEQ ID NO: 122384 - DNA, 20 bp, Artificial Sequence
  Description of Artificial Sequence: Synthetic oligonucleotide
  Target: LAMA2; (+) strand; PAM type: NRG; PAM sequence: CAG
tttattagttttccttctaa

SEQ ID NO: 122385 - DNA, 20 bp, Artificial Sequence
  Description of Artificial Sequence: Synthetic oligonucleotide
  Target: LAMA2; (+) strand; PAM type: NRG; PAM sequence: CAG
ttagttttccttctaacaga

SEQ ID NO: 122386 - DNA, 20 bp, Artificial Sequence
  Description of Artificial Sequence: Synthetic oligonucleotide
  Target: LAMA2; (+) strand; PAM type: NRG; PAM sequence: AGG
tagttttccttctaacagac

SEQ ID NO: 122387 - DNA, 20 bp, Artificial Sequence
  Description of Artificial Sequence: Synthetic oligonucleotide
  Target: LAMA2; (+) strand; PAM type: NRG; PAM sequence: CAG
acagacaggaccctcaactg

SEQ ID NO: 122388 - DNA, 20 bp, Artificial Sequence
  Description of Artificial Sequence: Synthetic oligonucleotide
  Target: LAMA2; (+) strand; PAM type: NRG; PAM sequence: AGG
cagacaggaccctcaactgc

SEQ ID NO: 122389 - DNA, 20 bp, Artificial Sequence
  Description of Artificial Sequence: Synthetic oligonucleotide
  Target: LAMA2; (+) strand; PAM type: NRG; PAM sequence: TGG
accctcaactgcaggtctgt

SEQ ID NO: 122390 - DNA, 20 bp, Artificial Sequence
  Description of Artificial Sequence: Synthetic oligonucleotide
  Target: LAMA2; (+) strand; PAM type: NRG; PAM sequence: GAG
cctcaactgcaggtctgttg

SEQ ID NO: 122391 - DNA, 20 bp, Artificial Sequence
  Description of Artificial Sequence: Synthetic oligonucleotide
  Target: LAMA2; (+) strand; PAM type: NRG; PAM sequence: GAG
gttggagtaccctgccatgt

SEQ ID NO: 122392 - DNA, 20 bp, Artificial Sequence
  Description of Artificial Sequence: Synthetic oligonucleotide
  Target: LAMA2; (+) strand; PAM type: NRG; PAM sequence: AGG
ttggagtaccctgccatgtg

SEQ ID NO: 122393 - DNA, 20 bp, Artificial Sequence
  Description of Artificial Sequence: Synthetic oligonucleotide
  Target: LAMA2; (+) strand; PAM type: NRG; PAM sequence: CAG
taccctgccatgtgaggtgt

SEQ ID NO: 122394 - DNA, 20 bp, Artificial Sequence
  Description of Artificial Sequence: Synthetic oligonucleotide
  Target: LAMA2; (+) strand; PAM type: NRG; PAM sequence: TGG
aggtgtcagtgtgcccctgc

SEQ ID NO: 122395 - DNA, 20 bp, Artificial Sequence
  Description of Artificial Sequence: Synthetic oligonucleotide
  Target: LAMA2; (+) strand; PAM type: NRG; PAM sequence: GGG
ggtgtcagtgtgcccctgct

SEQ ID NO: 122396 - DNA, 20 bp, Artificial Sequence
  Description of Artificial Sequence: Synthetic oligonucleotide
  Target: LAMA2; (+) strand; PAM type: NRG; PAM sequence: GGG
gtgtcagtgtgcccctgctg

SEQ ID NO: 122397 - DNA, 20 bp, Artificial Sequence
  Description of Artificial Sequence: Synthetic oligonucleotide
  Target: LAMA2; (+) strand; PAM type: NRG; PAM sequence: GGG
tgtcagtgtgcccctgctgg

SEQ ID NO: 122398 - DNA, 20 bp, Artificial Sequence
  Description of Artificial Sequence: Synthetic oligonucleotide
  Target: LAMA2; (+) strand; PAM type: NRG; PAM sequence: GGG
gtcagtgtgcccctgctggg

SEQ ID NO: 122399 - DNA, 20 bp, Artificial Sequence
  Description of Artificial Sequence: Synthetic oligonucleotide
  Target: LAMA2; (+) strand; PAM type: NRG; PAM sequence: CAG
ccctgctggggggtgcctcc

SEQ ID NO: 122400 - DNA, 20 bp, Artificial Sequence
  Description of Artificial Sequence: Synthetic oligonucleotide
  Target: LAMA2; (+) strand; PAM type: NRG; PAM sequence: TAG
gctggggggtgcctcccagt

SEQ ID NO: 122401 - DNA, 20 bp, Artificial Sequence
  Description of Artificial Sequence: Synthetic oligonucleotide
  Target: LAMA2; (+) strand; PAM type: NRG; PAM sequence: AGG
ctggggggtgcctcccagtt

SEQ ID NO: 122402 - DNA, 20 bp, Artificial Sequence
  Description of Artificial Sequence: Synthetic oligonucleotide
  Target: LAMA2; (+) strand; PAM type: NRG; PAM sequence: CGG
tgcctcccagttaggctgct

SEQ ID NO: 122403 - DNA, 20 bp, Artificial Sequence
  Description of Artificial Sequence: Synthetic oligonucleotide
  Target: LAMA2; (+) strand; PAM type: NRG; PAM sequence: GGG
gcctcccagttaggctgctc

SEQ ID NO: 122404 - DNA, 20 bp, Artificial Sequence
  Description of Artificial Sequence: Synthetic oligonucleotide
  Target: LAMA2; (+) strand; PAM type: NRG; PAM sequence: GGG
cctcccagttaggctgctcg

SEQ ID NO: 122405 - DNA, 20 bp, Artificial Sequence
  Description of Artificial Sequence: Synthetic oligonucleotide
  Target: LAMA2; (+) strand; PAM type: NRG; PAM sequence: GGG
ctcccagttaggctgctcgg

SEQ ID NO: 122406 - DNA, 20 bp, Artificial Sequence
  Description of Artificial Sequence: Synthetic oligonucleotide
  Target: LAMA2; (+) strand; PAM type: NRG; PAM sequence: CAG
cagttaggctgctcgggggt

SEQ ID NO: 122407 - DNA, 20 bp, Artificial Sequence
  Description of Artificial Sequence: Synthetic oligonucleotide
  Target: LAMA2; (+) strand; PAM type: NRG; PAM sequence: AGG
agttaggctgctcgggggtc

SEQ ID NO: 122408 - DNA, 20 bp, Artificial Sequence
  Description of Artificial Sequence: Synthetic oligonucleotide
  Target: LAMA2; (+) strand; PAM type: NRG; PAM sequence: GGG
gttaggctgctcgggggtca

SEQ ID NO: 122409 - DNA, 20 bp, Artificial Sequence
  Description of Artificial Sequence: Synthetic oligonucleotide
  Target: LAMA2; (+) strand; PAM type: NRG; PAM sequence: GGG
ttaggctgctcgggggtcag

SEQ ID NO: 122410 - DNA, 20 bp, Artificial Sequence
  Description of Artificial Sequence: Synthetic oligonucleotide
  Target: LAMA2; (+) strand; PAM type: NRG; PAM sequence: CAG
gctgctcgggggtcaggggt

SEQ ID NO: 122411 - DNA, 20 bp, Artificial Sequence
  Description of Artificial Sequence: Synthetic oligonucleotide
  Target: LAMA2; (+) strand; PAM type: NRG; PAM sequence: AGG
ctgctcgggggtcaggggtc

SEQ ID NO: 122412 - DNA, 20 bp, Artificial Sequence
  Description of Artificial Sequence: Synthetic oligonucleotide
  Target: LAMA2; (+) strand; PAM type: NRG; PAM sequence: GGG
tgctcgggggtcaggggtca

SEQ ID NO: 122413 - DNA, 20 bp, Artificial Sequence
  Description of Artificial Sequence: Synthetic oligonucleotide
  Target: LAMA2; (+) strand; PAM type: NRG; PAM sequence: GAG
caggggtcagggacccactt

SEQ ID NO: 122414 - DNA, 20 bp, Artificial Sequence
  Description of Artificial Sequence: Synthetic oligonucleotide
  Target: LAMA2; (+) strand; PAM type: NRG; PAM sequence: AGG
aggggtcagggacccacttg

SEQ ID NO: 122415 - DNA, 20 bp, Artificial Sequence
  Description of Artificial Sequence: Synthetic oligonucleotide
  Target: LAMA2; (+) strand; PAM type: NRG; PAM sequence: GAG
gggtcagggacccacttgag

SEQ ID NO: 122416 - DNA, 20 bp, Artificial Sequence
  Description of Artificial Sequence: Synthetic oligonucleotide
  Target: LAMA2; (+) strand; PAM type: NRG; PAM sequence: AGG
ggtcagggacccacttgagg

SEQ ID NO: 122417 - DNA, 20 bp, Artificial Sequence
  Description of Artificial Sequence: Synthetic oligonucleotide
  Target: LAMA2; (+) strand; PAM type: NRG; PAM sequence: CAG
cagggacccacttgaggagg

SEQ ID NO: 122418 - DNA, 20 bp, Artificial Sequence
  Description of Artificial Sequence: Synthetic oligonucleotide
  Target: LAMA2; (+) strand; PAM type: NRG; PAM sequence: TAG
ggaggcagtctgcccgttct

SEQ ID NO: 122419 - DNA, 20 bp, Artificial Sequence
  Description of Artificial Sequence: Synthetic oligonucleotide
  Target: LAMA2; (+) strand; PAM type: NRG; PAM sequence: CAG
tctgcccgttcttagatctc

SEQ ID NO: 122420 - DNA, 20 bp, Artificial Sequence
  Description of Artificial Sequence: Synthetic oligonucleotide
  Target: LAMA2; (+) strand; PAM type: NRG; PAM sequence: TGG
ttagatctccagctgcgtac

SEQ ID NO: 122421 - DNA, 20 bp, Artificial Sequence
  Description of Artificial Sequence: Synthetic oligonucleotide
  Target: LAMA2; (+) strand; PAM type: NRG; PAM sequence: GGG
tagatctccagctgcgtact

SEQ ID NO: 122422 - DNA, 20 bp, Artificial Sequence
  Description of Artificial Sequence: Synthetic oligonucleotide
  Target: LAMA2; (+) strand; PAM type: NRG; PAM sequence: GAG
gatctccagctgcgtactgg

SEQ ID NO: 122423 - DNA, 20 bp, Artificial Sequence
  Description of Artificial Sequence: Synthetic oligonucleotide
  Target: LAMA2; (+) strand; PAM type: NRG; PAM sequence: AAG
gagaaccactgctctcttca

SEQ ID NO: 122424 - DNA, 20 bp, Artificial Sequence
  Description of Artificial Sequence: Synthetic oligonucleotide
  Target: LAMA2; (+) strand; PAM type: NRG; PAM sequence: CAG
actgctctcttcaaagctgt

SEQ ID NO: 122425 - DNA, 20 bp, Artificial Sequence
  Description of Artificial Sequence: Synthetic oligonucleotide
  Target: LAMA2; (+) strand; PAM type: NRG; PAM sequence: CAG
ctctcttcaaagctgtcaga

SEQ ID NO: 122426 - DNA, 20 bp, Artificial Sequence
  Description of Artificial Sequence: Synthetic oligonucleotide
  Target: LAMA2; (+) strand; PAM type: NRG; PAM sequence: AGG
tctcttcaaagctgtcagac

SEQ ID NO: 122427 - DNA, 20 bp, Artificial Sequence
  Description of Artificial Sequence: Synthetic oligonucleotide
  Target: LAMA2; (+) strand; PAM type: NRG; PAM sequence: GGG
ctcttcaaagctgtcagaca

SEQ ID NO: 122428 - DNA, 20 bp, Artificial Sequence
  Description of Artificial Sequence: Synthetic oligonucleotide
  Target: LAMA2; (+) strand; PAM type: NRG; PAM sequence: AAG
gctgtcagacagggacattt

SEQ ID NO: 122429 - DNA, 20 bp, Artificial Sequence
  Description of Artificial Sequence: Synthetic oligonucleotide
  Target: LAMA2; (+) strand; PAM type: NRG; PAM sequence: CAG
gacagggacatttaagtctg

SEQ ID NO: 122430 - DNA, 20 bp, Artificial Sequence
  Description of Artificial Sequence: Synthetic oligonucleotide
  Target: LAMA2; (+) strand; PAM type: NRG; PAM sequence: GAG
cagggacatttaagtctgca

SEQ ID NO: 122431 - DNA, 20 bp, Artificial Sequence
  Description of Artificial Sequence: Synthetic oligonucleotide
  Target: LAMA2; (+) strand; PAM type: NRG; PAM sequence: AGG
agggacatttaagtctgcag

SEQ ID NO: 122432 - DNA, 20 bp, Artificial Sequence
  Description of Artificial Sequence: Synthetic oligonucleotide
  Target: LAMA2; (+) strand; PAM type: NRG; PAM sequence: CAG
gtttgtctgtgccctgcccc

SEQ ID NO: 122433 - DNA, 20 bp, Artificial Sequence
  Description of Artificial Sequence: Synthetic oligonucleotide
  Target: LAMA2; (+) strand; PAM type: NRG; PAM sequence: GAG
ttgtctgtgccctgccccca

SEQ ID NO: 122434 - DNA, 20 bp, Artificial Sequence
  Description of Artificial Sequence: Synthetic oligonucleotide
  Target: LAMA2; (+) strand; PAM type: NRG; PAM sequence: AGG
tgtctgtgccctgcccccag

SEQ ID NO: 122435 - DNA, 20 bp, Artificial Sequence
  Description of Artificial Sequence: Synthetic oligonucleotide
  Target: LAMA2; (+) strand; PAM type: NRG; PAM sequence: TGG
ctgtgccctgcccccagagg

SEQ ID NO: 122436 - DNA, 20 bp, Artificial Sequence
  Description of Artificial Sequence: Synthetic oligonucleotide
  Target: LAMA2; (+) strand; PAM type: NRG; PAM sequence: GAG
gtgccctgcccccagaggtg

SEQ ID NO: 122437 - DNA, 20 bp, Artificial Sequence
  Description of Artificial Sequence: Synthetic oligonucleotide
  Target: LAMA2; (+) strand; PAM type: NRG; PAM sequence: AAG
ccccagaggtggagcctaca

SEQ ID NO: 122438 - DNA, 20 bp, Artificial Sequence
  Description of Artificial Sequence: Synthetic oligonucleotide
  Target: LAMA2; (+) strand; PAM type: NRG; PAM sequence: AGG
cccagaggtggagcctacaa

SEQ ID NO: 122439 - DNA, 20 bp, Artificial Sequence
  Description of Artificial Sequence: Synthetic oligonucleotide
  Target: LAMA2; (+) strand; PAM type: NRG; PAM sequence: CAG
agaggtggagcctacaaagg

SEQ ID NO: 122440 - DNA, 20 bp, Artificial Sequence
  Description of Artificial Sequence: Synthetic oligonucleotide
  Target: LAMA2; (+) strand; PAM type: NRG; PAM sequence: AGG
gaggtggagcctacaaaggc

SEQ ID NO: 122441 - DNA, 20 bp, Artificial Sequence
  Description of Artificial Sequence: Synthetic oligonucleotide
  Target: LAMA2; (+) strand; PAM type: NRG; PAM sequence: CAG
gtggagcctacaaaggcagg

SEQ ID NO: 122442 - DNA, 20 bp, Artificial Sequence
  Description of Artificial Sequence: Synthetic oligonucleotide
  Target: LAMA2; (+) strand; PAM type: NRG; PAM sequence: AGG
tggagcctacaaaggcaggc

SEQ ID NO: 122443 - DNA, 20 bp, Artificial Sequence
  Description of Artificial Sequence: Synthetic oligonucleotide
  Target: LAMA2; (+) strand; PAM type: NRG; PAM sequence: GAG
aaaggcaggcaggcctcctt

SEQ ID NO: 122444 - DNA, 20 bp, Artificial Sequence
  Description of Artificial Sequence: Synthetic oligonucleotide
  Target: LAMA2; (+) strand; PAM type: NRG; PAM sequence: TGG
aggcaggcctccttgagctg

SEQ ID NO: 122445 - DNA, 20 bp, Artificial Sequence
  Description of Artificial Sequence: Synthetic oligonucleotide
  Target: LAMA2; (+) strand; PAM type: NRG; PAM sequence: TGG
caggcctccttgagctgtgg

SEQ ID NO: 122446 - DNA, 20 bp, Artificial Sequence
  Description of Artificial Sequence: Synthetic oligonucleotide
  Target: LAMA2; (+) strand; PAM type: NRG; PAM sequence: GGG
aggcctccttgagctgtggt

SEQ ID NO: 122447 - DNA, 20 bp, Artificial Sequence
  Description of Artificial Sequence: Synthetic oligonucleotide
  Target: LAMA2; (+) strand; PAM type: NRG; PAM sequence: CAG
gagctgtggtgggctacacc

SEQ ID NO: 122448 - DNA, 20 bp, Artificial Sequence
  Description of Artificial Sequence: Synthetic oligonucleotide
  Target: LAMA2; (+) strand; PAM type: NRG; PAM sequence: GAG
tggtgggctacacccagttc

SEQ ID NO: 122449 - DNA, 20 bp, Artificial Sequence
  Description of Artificial Sequence: Synthetic oligonucleotide
  Target: LAMA2; (+) strand; PAM type: NRG; PAM sequence: CGG
tacacccagttcgagcttcc

SEQ ID NO: 122450 - DNA, 20 bp, Artificial Sequence
  Description of Artificial Sequence: Synthetic oligonucleotide
  Target: LAMA2; (+) strand; PAM type: NRG; PAM sequence: AAG
gctgctttgtttacctaatc

SEQ ID NO: 122451 - DNA, 20 bp, Artificial Sequence
  Description of Artificial Sequence: Synthetic oligonucleotide
  Target: LAMA2; (+) strand; PAM type: NRG; PAM sequence: TGG
tttgtttacctaatcaagcc

SEQ ID NO: 122452 - DNA, 20 bp, Artificial Sequence
  Description of Artificial Sequence: Synthetic oligonucleotide
  Target: LAMA2; (+) strand; PAM type: NRG; PAM sequence: GGG
ttgtttacctaatcaagcct

SEQ ID NO: 122453 - DNA, 20 bp, Artificial Sequence
  Description of Artificial Sequence: Synthetic oligonucleotide
  Target: LAMA2; (+) strand; PAM type: NRG; PAM sequence: TGG
acctaatcaagcctgggcaa

SEQ ID NO: 122454 - DNA, 20 bp, Artificial Sequence
  Description of Artificial Sequence: Synthetic oligonucleotide
  Target: LAMA2; (+) strand; PAM type: NRG; PAM sequence: CAG
taatcaagcctgggcaatgg

SEQ ID NO: 122455 - DNA, 20 bp, Artificial Sequence
  Description of Artificial Sequence: Synthetic oligonucleotide
  Target: LAMA2; (+) strand; PAM type: NRG; PAM sequence: CAG
aatggcagacgcccctcccc

SEQ ID NO: 122456 - DNA, 20 bp, Artificial Sequence
  Description of Artificial Sequence: Synthetic oligonucleotide
  Target: LAMA2; (+) strand; PAM type: NRG; PAM sequence: CAG
ccagcctcgctgccgccttg

SEQ ID NO: 122457 - DNA, 20 bp, Artificial Sequence
  Description of Artificial Sequence: Synthetic oligonucleotide
  Target: LAMA2; (+) strand; PAM type: NRG; PAM sequence: CAG
gccgccttgcagtttgatct

SEQ ID NO: 122458 - DNA, 20 bp, Artificial Sequence
  Description of Artificial Sequence: Synthetic oligonucleotide
  Target: LAMA2; (+) strand; PAM type: NRG; PAM sequence: TAG
ttgatctcagactgctgtgc

SEQ ID NO: 122459 - DNA, 20 bp, Artificial Sequence
  Description of Artificial Sequence: Synthetic oligonucleotide
  Target: LAMA2; (+) strand; PAM type: NRG; PAM sequence: CAG
cagactgctgtgctagcaat

SEQ ID NO: 122460 - DNA, 20 bp, Artificial Sequence
  Description of Artificial Sequence: Synthetic oligonucleotide
  Target: LAMA2; (+) strand; PAM type: NRG; PAM sequence: GAG
ctgctgtgctagcaatcagt

SEQ ID NO: 122461 - DNA, 20 bp, Artificial Sequence
  Description of Artificial Sequence: Synthetic oligonucleotide
  Target: LAMA2; (+) strand; PAM type: NRG; PAM sequence: TGG
tagcaatcagtgagactccg

SEQ ID NO: 122462 - DNA, 20 bp, Artificial Sequence
  Description of Artificial Sequence: Synthetic oligonucleotide
  Target: LAMA2; (+) strand; PAM type: NRG; PAM sequence: GGG
agcaatcagtgagactccgt

SEQ ID NO: 122463 - DNA, 20 bp, Artificial Sequence
  Description of Artificial Sequence: Synthetic oligonucleotide
  Target: LAMA2; (+) strand; PAM type: NRG; PAM sequence: TAG
tcagtgagactccgtgggcg

SEQ ID NO: 122464 - DNA, 20 bp, Artificial Sequence
  Description of Artificial Sequence: Synthetic oligonucleotide
  Target: LAMA2; (+) strand; PAM type: NRG; PAM sequence: CAG
ccgtgggcgtagtaccttcc

SEQ ID NO: 122465 - DNA, 20 bp, Artificial Sequence
  Description of Artificial Sequence: Synthetic oligonucleotide
  Target: LAMA2; (+) strand; PAM type: NRG; PAM sequence: CAG
gggcgtagtaccttcccagc

SEQ ID NO: 122466 - DNA, 20 bp, Artificial Sequence
  Description of Artificial Sequence: Synthetic oligonucleotide
  Target: LAMA2; (+) strand; PAM type: NRG; PAM sequence: AGG
ggcgtagtaccttcccagcc

SEQ ID NO: 122467 - DNA, 20 bp, Artificial Sequence
  Description of Artificial Sequence: Synthetic oligonucleotide
  Target: LAMA2; (+) strand; PAM type: NRG; PAM sequence: CAG
agtaccttcccagccaggtg

SEQ ID NO: 122468 - DNA, 20 bp, Artificial Sequence
  Description of Artificial Sequence: Synthetic oligonucleotide
  Target: LAMA2; (+) strand; PAM type: NRG; PAM sequence: AGG
gtaccttcccagccaggtgc

SEQ ID NO: 122469 - DNA, 20 bp, Artificial Sequence
  Description of Artificial Sequence: Synthetic oligonucleotide
  Target: LAMA2; (+) strand; PAM type: NRG; PAM sequence: TGG
aggtgcaggatataatctcg

SEQ ID NO: 122470 - DNA, 20 bp, Artificial Sequence
  Description of Artificial Sequence: Synthetic oligonucleotide
  Target: LAMA2; (+) strand; PAM type: NRG; PAM sequence: AAG
ctcgtggttcgccgtttttt

SEQ ID NO: 122471 - DNA, 20 bp, Artificial Sequence
  Description of Artificial Sequence: Synthetic oligonucleotide
  Target: LAMA2; (+) strand; PAM type: NRG; PAM sequence: CGG
tcgccgttttttaagcccgt

SEQ ID NO: 122472 - DNA, 20 bp, Artificial Sequence
  Description of Artificial Sequence: Synthetic oligonucleotide
  Target: LAMA2; (+) strand; PAM type: NRG; PAM sequence: AAG
cgttttttaagcccgtcgga

SEQ ID NO: 122473 - DNA, 20 bp, Artificial Sequence
  Description of Artificial Sequence: Synthetic oligonucleotide
  Target: LAMA2; (+) strand; PAM type: NRG; PAM sequence: AGG
gttttttaagcccgtcggaa

SEQ ID NO: 122474 - DNA, 20 bp, Artificial Sequence
  Description of Artificial Sequence: Synthetic oligonucleotide
  Target: LAMA2; (+) strand; PAM type: NRG; PAM sequence: CAG
ttaagcccgtcggaaaggcg

SEQ ID NO: 122475 - DNA, 20 bp, Artificial Sequence
  Description of Artificial Sequence: Synthetic oligonucleotide
  Target: LAMA2; (+) strand; PAM type: NRG; PAM sequence: CGG
cgtcggaaaggcgcagtatt

SEQ ID NO: 122476 - DNA, 20 bp, Artificial Sequence
  Description of Artificial Sequence: Synthetic oligonucleotide
  Target: LAMA2; (+) strand; PAM type: NRG; PAM sequence: GGG
gtcggaaaggcgcagtattc

SEQ ID NO: 122477 - DNA, 20 bp, Artificial Sequence
  Description of Artificial Sequence: Synthetic oligonucleotide
  Target: LAMA2; (+) strand; PAM type: NRG; PAM sequence: TGG
ggaaaggcgcagtattcggg

SEQ ID NO: 122478 - DNA, 20 bp, Artificial Sequence
  Description of Artificial Sequence: Synthetic oligonucleotide
  Target: LAMA2; (+) strand; PAM type: NRG; PAM sequence: GGG
gaaaggcgcagtattcgggt

SEQ ID NO: 122479 - DNA, 20 bp, Artificial Sequence
  Description of Artificial Sequence: Synthetic oligonucleotide
  Target: LAMA2; (+) strand; PAM type: NRG; PAM sequence: GAG
aaggcgcagtattcgggtgg

SEQ ID NO: 122480 - DNA, 20 bp, Artificial Sequence
  Description of Artificial Sequence: Synthetic oligonucleotide
  Target: LAMA2; (+) strand; PAM type: NRG; PAM sequence: CAG
agtattcgggtgggagtgac

SEQ ID NO: 122481 - DNA, 20 bp, Artificial Sequence
  Description of Artificial Sequence: Synthetic oligonucleotide
  Target: LAMA2; (+) strand; PAM type: NRG; PAM sequence: CAG
gtgggagtgaccagattttc

SEQ ID NO: 122482 - DNA, 20 bp, Artificial Sequence
  Description of Artificial Sequence: Synthetic oligonucleotide
  Target: LAMA2; (+) strand; PAM type: NRG; PAM sequence: AGG
tgggagtgaccagattttcc

SEQ ID NO: 122483 - DNA, 20 bp, Artificial Sequence
  Description of Artificial Sequence: Synthetic oligonucleotide
  Target: LAMA2; (+) strand; PAM type: NRG; PAM sequence: TAG
ccatcacccctttctttgac

SEQ ID NO: 122484 - DNA, 20 bp, Artificial Sequence
  Description of Artificial Sequence: Synthetic oligonucleotide
  Target: LAMA2; (+) strand; PAM type: NRG; PAM sequence: AGG
catcacccctttctttgact

SEQ ID NO: 122485 - DNA, 20 bp, Artificial Sequence
  Description of Artificial Sequence: Synthetic oligonucleotide
  Target: LAMA2; (+) strand; PAM type: NRG; PAM sequence: AAG
acccctttctttgactagga

SEQ ID NO: 122486 - DNA, 20 bp, Artificial Sequence
  Description of Artificial Sequence: Synthetic oligonucleotide
  Target: LAMA2; (+) strand; PAM type: NRG; PAM sequence: AGG
cccctttctttgactaggaa

SEQ ID NO: 122487 - DNA, 20 bp, Artificial Sequence
  Description of Artificial Sequence: Synthetic oligonucleotide
  Target: LAMA2; (+) strand; PAM type: NRG; PAM sequence: GGG
ccctttctttgactaggaaa

SEQ ID NO: 122488 - DNA, 20 bp, Artificial Sequence
  Description of Artificial Sequence: Synthetic oligonucleotide
  Target: LAMA2; (+) strand; PAM type: NRG; PAM sequence: GAG
cctgaccccttgcgcttccc

SEQ ID NO: 122489 - DNA, 20 bp, Artificial Sequence
  Description of Artificial Sequence: Synthetic oligonucleotide
  Target: LAMA2; (+) strand; PAM type: NRG; PAM sequence: GAG
accccttgcgcttcccgagt

SEQ ID NO: 122490 - DNA, 20 bp, Artificial Sequence
  Description of Artificial Sequence: Synthetic oligonucleotide
  Target: LAMA2; (+) strand; PAM type: NRG; PAM sequence: AGG
ccccttgcgcttcccgagtg

SEQ ID NO: 122491 - DNA, 20 bp, Artificial Sequence
  Description of Artificial Sequence: Synthetic oligonucleotide
  Target: LAMA2; (+) strand; PAM type: NRG; PAM sequence: CGG
ggcaatgcctcaccctgctt

SEQ ID NO: 122492 - DNA, 20 bp, Artificial Sequence
  Description of Artificial Sequence: Synthetic oligonucleotide
  Target: LAMA2; (+) strand; PAM type: NRG; PAM sequence: CGG
accctgcttcggctcacgca

SEQ ID NO: 122493 - DNA, 20 bp, Artificial Sequence
  Description of Artificial Sequence: Synthetic oligonucleotide
  Target: LAMA2; (+) strand; PAM type: NRG; PAM sequence: TGG
actgacctgcgcccactgtc

SEQ ID NO: 122494 - DNA, 20 bp, Artificial Sequence
  Description of Artificial Sequence: Synthetic oligonucleotide
  Target: LAMA2; (+) strand; PAM type: NRG; PAM sequence: TAG
gcccactgtctggcattcct

SEQ ID NO: 122495 - DNA, 20 bp, Artificial Sequence
  Description of Artificial Sequence: Synthetic oligonucleotide
  Target: LAMA2; (+) strand; PAM type: NRG; PAM sequence: GAG
actgtctggcattccttagt

SEQ ID NO: 122496 - DNA, 20 bp, Artificial Sequence
  Description of Artificial Sequence: Synthetic oligonucleotide
  Target: LAMA2; (+) strand; PAM type: NRG; PAM sequence: CGG
attccttagtgagatgaacc

SEQ ID NO: 122497 - DNA, 20 bp, Artificial Sequence
  Description of Artificial Sequence: Synthetic oligonucleotide
  Target: LAMA2; (+) strand; PAM type: NRG; PAM sequence: CAG
gtgagatgaacccggtacct

SEQ ID NO: 122498 - DNA, 20 bp, Artificial Sequence
  Description of Artificial Sequence: Synthetic oligonucleotide
  Target: LAMA2; (+) strand; PAM type: NRG; PAM sequence: TGG
gatgaacccggtacctcaga

SEQ ID NO: 122499 - DNA, 20 bp, Artificial Sequence
  Description of Artificial Sequence: Synthetic oligonucleotide
  Target: LAMA2; (+) strand; PAM type: NRG; PAM sequence: AAG
acccggtacctcagatggaa

SEQ ID NO: 122500 - DNA, 20 bp, Artificial Sequence
  Description of Artificial Sequence: Synthetic oligonucleotide
  Target: LAMA2; (+) strand; PAM type: NRG; PAM sequence: CAG
cggtacctcagatggaaaag

SEQ ID NO: 122501 - DNA, 20 bp, Artificial Sequence
  Description of Artificial Sequence: Synthetic oligonucleotide
  Target: LAMA2; (+) strand; PAM type: NRG; PAM sequence: TGG
gtcttctgcgtcgctcacgc

SEQ ID NO: 122502 - DNA, 20 bp, Artificial Sequence
  Description of Artificial Sequence: Synthetic oligonucleotide
  Target: LAMA2; (+) strand; PAM type: NRG; PAM sequence: GGG
tcttctgcgtcgctcacgct

SEQ ID NO: 122503 - DNA, 20 bp, Artificial Sequence
  Description of Artificial Sequence: Synthetic oligonucleotide
  Target: LAMA2; (+) strand; PAM type: NRG; PAM sequence: GAG
ttctgcgtcgctcacgctgg

SEQ ID NO: 122504 - DNA, 20 bp, Artificial Sequence
  Description of Artificial Sequence: Synthetic oligonucleotide
  Target: LAMA2; (+) strand; PAM type: NRG; PAM sequence: TAG
gtcgctcacgctgggagctg

SEQ ID NO: 122505 - DNA, 20 bp, Artificial Sequence
  Description of Artificial Sequence: Synthetic oligonucleotide
  Target: LAMA2; (+) strand; PAM type: NRG; PAM sequence: CGG
tcacgctgggagctgtagac

SEQ ID NO: 122506 - DNA, 20 bp, Artificial Sequence
  Description of Artificial Sequence: Synthetic oligonucleotide
  Target: LAMA2; (+) strand; PAM type: NRG; PAM sequence: GAG
acgctgggagctgtagaccg

SEQ ID NO: 122507 - DNA, 20 bp, Artificial Sequence
  Description of Artificial Sequence: Synthetic oligonucleotide
  Target: LAMA2; (+) strand; PAM type: NRG; PAM sequence: CGG
agaccggagctgttcctatt

SEQ ID NO: 122508 - DNA, 20 bp, Artificial Sequence
  Description of Artificial Sequence: Synthetic oligonucleotide
  Target: LAMA2; (+) strand; PAM type: NRG; PAM sequence: TGG
ctgttcctattcggccatct

SEQ ID NO: 122509 - DNA, 20 bp, Artificial Sequence
  Description of Artificial Sequence: Synthetic oligonucleotide
  Target: LAMA2; (+) strand; PAM type: NRG; PAM sequence: AAG
ccatcttggctcctccccta

SEQ ID NO: 122510 - DNA, 20 bp, Artificial Sequence
  Description of Artificial Sequence: Synthetic oligonucleotide
  Target: LAMA2; (+) strand; PAM type: NRG; PAM sequence: AGG
catcttggctcctcccctaa

SEQ ID NO: 122511 - DNA, 20 bp, Artificial Sequence
  Description of Artificial Sequence: Synthetic oligonucleotide
  Target: LAMA2; (+) strand; PAM type: NRG; PAM sequence: AAG
ggtataatttctataaaata

SEQ ID NO: 122512 - DNA, 20 bp, Artificial Sequence
  Description of Artificial Sequence: Synthetic oligonucleotide
  Target: LAMA2; (+) strand; PAM type: NRG; PAM sequence: AAG
aataaagtttttttacacat

SEQ ID NO: 122513 - DNA, 20 bp, Artificial Sequence
  Description of Artificial Sequence: Synthetic oligonucleotide
  Target: LAMA2; (+) strand; PAM type: NRG; PAM sequence: CAG
atatatacccatataaccgt

SEQ ID NO: 122514 - DNA, 20 bp, Artificial Sequence
  Description of Artificial Sequence: Synthetic oligonucleotide
  Target: LAMA2; (+) strand; PAM type: NRG; PAM sequence: TAG
agcccaacaacaacaaaaaa

SEQ ID NO: 122515 - DNA, 20 bp, Artificial Sequence
  Description of Artificial Sequence: Synthetic oligonucleotide
  Target: LAMA2; (+) strand; PAM type: NRG; PAM sequence: CAG
atagaacatttctcctttcc

SEQ ID NO: 122516 - DNA, 20 bp, Artificial Sequence
  Description of Artificial Sequence: Synthetic oligonucleotide
  Target: LAMA2; (+) strand; PAM type: NRG; PAM sequence: AAG
gaacatttctcctttcccag

SEQ ID NO: 122517 - DNA, 20 bp, Artificial Sequence
  Description of Artificial Sequence: Synthetic oligonucleotide
  Target: LAMA2; (+) strand; PAM type: NRG; PAM sequence: AGG
aacatttctcctttcccaga

SEQ ID NO: 122518 - DNA, 20 bp, Artificial Sequence
  Description of Artificial Sequence: Synthetic oligonucleotide
  Target: LAMA2; (+) strand; PAM type: NRG; PAM sequence: CAG
ttttttgctgtcttcttcca

SEQ ID NO: 122519 - DNA, 20 bp, Artificial Sequence
  Description of Artificial Sequence: Synthetic oligonucleotide
  Target: LAMA2; (+) strand; PAM type: NRG; PAM sequence: TAG
ccctgaaactcttatctgat

SEQ ID NO: 122520 - DNA, 20 bp, Artificial Sequence
  Description of Artificial Sequence: Synthetic oligonucleotide
  Target: LAMA2; (+) strand; PAM type: NRG; PAM sequence: TAG
ctgattagtttcatctgtct

SEQ ID NO: 122521 - DNA, 20 bp, Artificial Sequence
  Description of Artificial Sequence: Synthetic oligonucleotide
  Target: LAMA2; (+) strand; PAM type: NRG; PAM sequence: AAG
ctttatatgaaacaccaact

SEQ ID NO: 122522 - DNA, 20 bp, Artificial Sequence
  Description of Artificial Sequence: Synthetic oligonucleotide
  Target: LAMA2; (+) strand; PAM type: NRG; PAM sequence: CAG
tctgtctgccttctttcacc

SEQ ID NO: 122523 - DNA, 20 bp, Artificial Sequence
  Description of Artificial Sequence: Synthetic oligonucleotide
  Target: LAMA2; (+) strand; PAM type: NRG; PAM sequence: TGG
tacctccatttttattttat

SEQ ID NO: 122524 - DNA, 20 bp, Artificial Sequence
  Description of Artificial Sequence: Synthetic oligonucleotide
  Target: LAMA2; (+) strand; PAM type: NRG; PAM sequence: AAG
attggcctgttgatgacatt

SEQ ID NO: 122525 - DNA, 20 bp, Artificial Sequence
  Description of Artificial Sequence: Synthetic oligonucleotide
  Target: LAMA2; (+) strand; PAM type: NRG; PAM sequence: CAG
gatgacattaagactgtttc

SEQ ID NO: 122526 - DNA, 20 bp, Artificial Sequence
  Description of Artificial Sequence: Synthetic oligonucleotide
  Target: LAMA2; (+) strand; PAM type: NRG; PAM sequence: AAG
gtttttaattatcatgaata

SEQ ID NO: 122527 - DNA, 20 bp, Artificial Sequence
  Description of Artificial Sequence: Synthetic oligonucleotide
  Target: LAMA2; (+) strand; PAM type: NRG; PAM sequence: AAG
tgaataaagttgctatatac

SEQ ID NO: 122528 - DNA, 20 bp, Artificial Sequence
  Description of Artificial Sequence: Synthetic oligonucleotide
  Target: LAMA2; (+) strand; PAM type: NRG; PAM sequence: AAG
gctatatacaagtcatgtac

SEQ ID NO: 122529 - DNA, 20 bp, Artificial Sequence
  Description of Artificial Sequence: Synthetic oligonucleotide
  Target: LAMA2; (+) strand; PAM type: NRG; PAM sequence: TGG
gtcatgtacaagctttttta

SEQ ID NO: 122530 - DNA, 20 bp, Artificial Sequence
  Description of Artificial Sequence: Synthetic oligonucleotide
  Target: LAMA2; (+) strand; PAM type: NRG; PAM sequence: TGG
tttcatttgtcatgtttatc

SEQ ID NO: 122531 - DNA, 20 bp, Artificial Sequence
  Description of Artificial Sequence: Synthetic oligonucleotide
  Target: LAMA2; (+) strand; PAM type: NRG; PAM sequence: GGG
ttcatttgtcatgtttatct

SEQ ID NO: 122532 - DNA, 20 bp, Artificial Sequence
  Description of Artificial Sequence: Synthetic oligonucleotide
  Target: LAMA2; (+) strand; PAM type: NRG; PAM sequence: GAG
catttgtcatgtttatctgg

SEQ ID NO: 122533 - DNA, 20 bp, Artificial Sequence
  Description of Artificial Sequence: Synthetic oligonucleotide
  Target: LAMA2; (+) strand; PAM type: NRG; PAM sequence: TGG
ttatctgggagtaaaattcc

SEQ ID NO: 122534 - DNA, 20 bp, Artificial Sequence
  Description of Artificial Sequence: Synthetic oligonucleotide
  Target: LAMA2; (+) strand; PAM type: NRG; PAM sequence: GGG
tatctgggagtaaaattcct

SEQ ID NO: 122535 - DNA, 20 bp, Artificial Sequence
  Description of Artificial Sequence: Synthetic oligonucleotide
  Target: LAMA2; (+) strand; PAM type: NRG; PAM sequence: TGG
agtaaaattcctgggttgca

SEQ ID NO: 122536 - DNA, 20 bp, Artificial Sequence
  Description of Artificial Sequence: Synthetic oligonucleotide
  Target: LAMA2; (+) strand; PAM type: NRG; PAM sequence: TAG
atgttcgtttaattttataa

SEQ ID NO: 122537 - DNA, 20 bp, Artificial Sequence
  Description of Artificial Sequence: Synthetic oligonucleotide
  Target: LAMA2; (+) strand; PAM type: NRG; PAM sequence: AAG
gacaaattgttttctaaatg

SEQ ID NO: 122538 - DNA, 20 bp, Artificial Sequence
  Description of Artificial Sequence: Synthetic oligonucleotide
  Target: LAMA2; (+) strand; PAM type: NRG; PAM sequence: AGG
acaaattgttttctaaatga

SEQ ID NO: 122539 - DNA, 20 bp, Artificial Sequence
  Description of Artificial Sequence: Synthetic oligonucleotide
  Target: LAMA2; (+) strand; PAM type: NRG; PAM sequence: TAG
tctaaatgaaggcatgatct

SEQ ID NO: 122540 - DNA, 20 bp, Artificial Sequence
  Description of Artificial Sequence: Synthetic oligonucleotide
  Target: LAMA2; (+) strand; PAM type: NRG; PAM sequence: TAG
atgaaggcatgatcttagtc

SEQ ID NO: 122541 - DNA, 20 bp, Artificial Sequence
  Description of Artificial Sequence: Synthetic oligonucleotide
  Target: LAMA2; (+) strand; PAM type: NRG; PAM sequence: TGG
cttctatcaacatatgtgtt

SEQ ID NO: 122542 - DNA, 20 bp, Artificial Sequence
  Description of Artificial Sequence: Synthetic oligonucleotide
  Target: LAMA2; (+) strand; PAM type: NRG; PAM sequence: AAG
tatcaacatatgtgtttggt

SEQ ID NO: 122543 - DNA, 20 bp, Artificial Sequence
  Description of Artificial Sequence: Synthetic oligonucleotide
  Target: LAMA2; (+) strand; PAM type: NRG; PAM sequence: TGG
tgtttggtaagttaattttt

SEQ ID NO: 122544 - DNA, 20 bp, Artificial Sequence
  Description of Artificial Sequence: Synthetic oligonucleotide
  Target: LAMA2; (+) strand; PAM type: NRG; PAM sequence: TGG
gataatgaatgataccgtaa

SEQ ID NO: 122545 - DNA, 20 bp, Artificial Sequence
  Description of Artificial Sequence: Synthetic oligonucleotide
  Target: LAMA2; (+) strand; PAM type: NRG; PAM sequence: AAG
tttacacaattaaaaaacta

SEQ ID NO: 122546 - DNA, 20 bp, Artificial Sequence
  Description of Artificial Sequence: Synthetic oligonucleotide
  Target: LAMA2; (+) strand; PAM type: NRG; PAM sequence: AAG
aattaaaaaactaaagataa

SEQ ID NO: 122547 - DNA, 20 bp, Artificial Sequence
  Description of Artificial Sequence: Synthetic oligonucleotide
  Target: LAMA2; (+) strand; PAM type: NRG; PAM sequence: TGG
aaaaaactaaagataaaagt

SEQ ID NO: 122548 - DNA, 20 bp, Artificial Sequence
  Description of Artificial Sequence: Synthetic oligonucleotide
  Target: LAMA2; (+) strand; PAM type: NRG; PAM sequence: TAG
aaagataaaagttggctcta

SEQ ID NO: 122549 - DNA, 20 bp, Artificial Sequence
  Description of Artificial Sequence: Synthetic oligonucleotide
  Target: LAMA2; (+) strand; PAM type: NRG; PAM sequence: AGG
aagataaaagttggctctat

SEQ ID NO: 122550 - DNA, 20 bp, Artificial Sequence
  Description of Artificial Sequence: Synthetic oligonucleotide
  Target: LAMA2; (+) strand; PAM type: NRG; PAM sequence: GGG
agataaaagttggctctata

SEQ ID NO: 122551 - DNA, 20 bp, Artificial Sequence
  Description of Artificial Sequence: Synthetic oligonucleotide
  Target: LAMA2; (+) strand; PAM type: NRG; PAM sequence: AAG
aaaagttggctctataggga

SEQ ID NO: 122552 - DNA, 20 bp, Artificial Sequence
  Description of Artificial Sequence: Synthetic oligonucleotide
  Target: LAMA2; (+) strand; PAM type: NRG; PAM sequence: AGG
aaagttggctctatagggaa

SEQ ID NO: 122553 - DNA, 20 bp, Artificial Sequence
  Description of Artificial Sequence: Synthetic oligonucleotide
  Target: LAMA2; (+) strand; PAM type: NRG; PAM sequence: TGG
ggttttattttttacatttc

SEQ ID NO: 122554 - DNA, 20 bp, Artificial Sequence
  Description of Artificial Sequence: Synthetic oligonucleotide
  Target: LAMA2; (+) strand; PAM type: NRG; PAM sequence: GAG
tttacatttctggcaaattt

SEQ ID NO: 122555 - DNA, 20 bp, Artificial Sequence
  Description of Artificial Sequence: Synthetic oligonucleotide
  Target: LAMA2; (+) strand; PAM type: NRG; PAM sequence: TAG
gatttctataaaattcttca

SEQ ID NO: 122556 - DNA, 20 bp, Artificial Sequence
  Description of Artificial Sequence: Synthetic oligonucleotide
  Target: LAMA2; (+) strand; PAM type: NRG; PAM sequence: AGG
atttctataaaattcttcat

SEQ ID NO: 122557 - DNA, 20 bp, Artificial Sequence
  Description of Artificial Sequence: Synthetic oligonucleotide
  Target: LAMA2; (+) strand; PAM type: NRG; PAM sequence: CAG
ttcttcataggtatataaaa

SEQ ID NO: 122558 - DNA, 20 bp, Artificial Sequence
  Description of Artificial Sequence: Synthetic oligonucleotide
  Target: LAMA2; (+) strand; PAM type: NRG; PAM sequence: GAG
cttcataggtatataaaaca

SEQ ID NO: 122559 - DNA, 20 bp, Artificial Sequence
  Description of Artificial Sequence: Synthetic oligonucleotide
  Target: LAMA2; (+) strand; PAM type: NRG; PAM sequence: AAG
ataggtatataaaacagagt

SEQ ID NO: 122560 - DNA, 20 bp, Artificial Sequence
  Description of Artificial Sequence: Synthetic oligonucleotide
  Target: LAMA2; (+) strand; PAM type: NRG; PAM sequence: AAG
tatattttgtttaactttta

SEQ ID NO: 122561 - DNA, 20 bp, Artificial Sequence
  Description of Artificial Sequence: Synthetic oligonucleotide
  Target: LAMA2; (+) strand; PAM type: NRG; PAM sequence: CAG
attttgtttaacttttaaag

SEQ ID NO: 122562 - DNA, 20 bp, Artificial Sequence
  Description of Artificial Sequence: Synthetic oligonucleotide
  Target: LAMA2; (+) strand; PAM type: NRG; PAM sequence: AGG
ttttgtttaacttttaaagc

SEQ ID NO: 122563 - DNA, 20 bp, Artificial Sequence
  Description of Artificial Sequence: Synthetic oligonucleotide
  Target: LAMA2; (+) strand; PAM type: NRG; PAM sequence: GGG
tttgtttaacttttaaagca

SEQ ID NO: 122564 - DNA, 20 bp, Artificial Sequence
  Description of Artificial Sequence: Synthetic oligonucleotide
  Target: LAMA2; (+) strand; PAM type: NRG; PAM sequence: TAG
gcagggtattattcatttgt

SEQ ID NO: 122565 - DNA, 20 bp, Artificial Sequence
  Description of Artificial Sequence: Synthetic oligonucleotide
  Target: LAMA2; (+) strand; PAM type: NRG; PAM sequence: TGG
tttaaaatctactataatta

SEQ ID NO: 122566 - DNA, 20 bp, Artificial Sequence
  Description of Artificial Sequence: Synthetic oligonucleotide
  Target: LAMA2; (+) strand; PAM type: NRG; PAM sequence: GGG
ttaaaatctactataattat

SEQ ID NO: 122567 - DNA, 20 bp, Artificial Sequence
  Description of Artificial Sequence: Synthetic oligonucleotide
  Target: LAMA2; (+) strand; PAM type: NRG; PAM sequence: AAG
aatctactataattatgggt

SEQ ID NO: 122568 - DNA, 20 bp, Artificial Sequence
  Description of Artificial Sequence: Synthetic oligonucleotide
  Target: LAMA2; (+) strand; PAM type: NRG; PAM sequence: AGG
atctactataattatgggta

SEQ ID NO: 122569 - DNA, 20 bp, Artificial Sequence
  Description of Artificial Sequence: Synthetic oligonucleotide
  Target: LAMA2; (+) strand; PAM type: NRG; PAM sequence: CAG
tactataattatgggtaagg

SEQ ID NO: 122570 - DNA, 20 bp, Artificial Sequence
  Description of Artificial Sequence: Synthetic oligonucleotide
  Target: LAMA2; (+) strand; PAM type: NRG; PAM sequence: AAG
tgggtaaggcagtgatacaa

SEQ ID NO: 122571 - DNA, 20 bp, Artificial Sequence
  Description of Artificial Sequence: Synthetic oligonucleotide
  Target: LAMA2; (+) strand; PAM type: NRG; PAM sequence: AGG
gggtaaggcagtgatacaaa

SEQ ID NO: 122572 - DNA, 20 bp, Artificial Sequence
  Description of Artificial Sequence: Synthetic oligonucleotide
  Target: LAMA2; (+) strand; PAM type: NRG; PAM sequence: AAG
taaggcagtgatacaaaagg

SEQ ID NO: 122573 - DNA, 20 bp, Artificial Sequence
  Description of Artificial Sequence: Synthetic oligonucleotide
  Target: LAMA2; (+) strand; PAM type: NRG; PAM sequence: AAG
cagtgatacaaaaggaagaa

SEQ ID NO: 122574 - DNA, 20 bp, Artificial Sequence
  Description of Artificial Sequence: Synthetic oligonucleotide
  Target: LAMA2; (+) strand; PAM type: NRG; PAM sequence: AAG
tcccaatttattcattaaat

SEQ ID NO: 122575 - DNA, 20 bp, Artificial Sequence
  Description of Artificial Sequence: Synthetic oligonucleotide
  Target: LAMA2; (+) strand; PAM type: NRG; PAM sequence: GAG
tgtgtcaatgcattttgaat

SEQ ID NO: 122576 - DNA, 20 bp, Artificial Sequence
  Description of Artificial Sequence: Synthetic oligonucleotide
  Target: LAMA2; (+) strand; PAM type: NRG; PAM sequence: AAG
gtcaatgcattttgaatgag

SEQ ID NO: 122577 - DNA, 20 bp, Artificial Sequence
  Description of Artificial Sequence: Synthetic oligonucleotide
  Target: LAMA2; (+) strand; PAM type: NRG; PAM sequence: AAG
cattttaaactccaaataca

SEQ ID NO: 122578 - DNA, 20 bp, Artificial Sequence
  Description of Artificial Sequence: Synthetic oligonucleotide
  Target: LAMA2; (+) strand; PAM type: NRG; PAM sequence: GAG
taaactccaaatacaaagat

SEQ ID NO: 122579 - DNA, 20 bp, Artificial Sequence
  Description of Artificial Sequence: Synthetic oligonucleotide
  Target: LAMA2; (+) strand; PAM type: NRG; PAM sequence: AAG
ctccaaatacaaagatgagc

SEQ ID NO: 122580 - DNA, 20 bp, Artificial Sequence
  Description of Artificial Sequence: Synthetic oligonucleotide
  Target: LAMA2; (+) strand; PAM type: NRG; PAM sequence: CAG
gcaagacgattttttaacct

SEQ ID NO: 122581 - DNA, 20 bp, Artificial Sequence
  Description of Artificial Sequence: Synthetic oligonucleotide
  Target: LAMA2; (+) strand; PAM type: NRG; PAM sequence: AGG
caagacgattttttaacctc

SEQ ID NO: 122582 - DNA, 20 bp, Artificial Sequence
  Description of Artificial Sequence: Synthetic oligonucleotide
  Target: LAMA2; (+) strand; PAM type: NRG; PAM sequence: TGG
cgattttttaacctcaggaa

SEQ ID NO: 122583 - DNA, 20 bp, Artificial Sequence
  Description of Artificial Sequence: Synthetic oligonucleotide
  Target: LAMA2; (+) strand; PAM type: NRG; PAM sequence: TAG
ttttaacctcaggaatggca

SEQ ID NO: 122584 - DNA, 20 bp, Artificial Sequence
  Description of Artificial Sequence: Synthetic oligonucleotide
  Target: LAMA2; (+) strand; PAM type: NRG; PAM sequence: TAG
taacctcaggaatggcatag

SEQ ID NO: 122585 - DNA, 20 bp, Artificial Sequence
  Description of Artificial Sequence: Synthetic oligonucleotide
  Target: LAMA2; (+) strand; PAM type: NRG; PAM sequence: AGG
aacctcaggaatggcatagt

SEQ ID NO: 122586 - DNA, 20 bp, Artificial Sequence
  Description of Artificial Sequence: Synthetic oligonucleotide
  Target: LAMA2; (+) strand; PAM type: NRG; PAM sequence: GGG
acctcaggaatggcatagta

SEQ ID NO: 122587 - DNA, 20 bp, Artificial Sequence
  Description of Artificial Sequence: Synthetic oligonucleotide
  Target: LAMA2; (+) strand; PAM type: NRG; PAM sequence: AAG
gaatggcatagtagggaaaa

SEQ ID NO: 122588 - DNA, 20 bp, Artificial Sequence
  Description of Artificial Sequence: Synthetic oligonucleotide
  Target: LAMA2; (+) strand; PAM type: NRG; PAM sequence: AAG
ggcatagtagggaaaaaagt

SEQ ID NO: 122589 - DNA, 20 bp, Artificial Sequence
  Description of Artificial Sequence: Synthetic oligonucleotide
  Target: LAMA2; (+) strand; PAM type: NRG; PAM sequence: TAG
agtaagtgtatgtatatcat

SEQ ID NO: 122590 - DNA, 20 bp, Artificial Sequence
  Description of Artificial Sequence: Synthetic oligonucleotide
  Target: LAMA2; (+) strand; PAM type: NRG; PAM sequence: CAG
tgtatatcattagattcata

SEQ ID NO: 122591 - DNA, 20 bp, Artificial Sequence
  Description of Artificial Sequence: Synthetic oligonucleotide
  Target: LAMA2; (+) strand; PAM type: NRG; PAM sequence: CAG
tatcattagattcatacagt

SEQ ID NO: 122592 - DNA, 20 bp, Artificial Sequence
  Description of Artificial Sequence: Synthetic oligonucleotide
  Target: LAMA2; (+) strand; PAM type: NRG; PAM sequence: AGG
atcattagattcatacagtc

SEQ ID NO: 122593 - DNA, 20 bp, Artificial Sequence
  Description of Artificial Sequence: Synthetic oligonucleotide
  Target: LAMA2; (+) strand; PAM type: NRG; PAM sequence: TGG
tcatacagtcaggctgaatg

SEQ ID NO: 122594 - DNA, 20 bp, Artificial Sequence
  Description of Artificial Sequence: Synthetic oligonucleotide
  Target: LAMA2; (+) strand; PAM type: NRG; PAM sequence: AAG
acagtcaggctgaatgtgga

SEQ ID NO: 122595 - DNA, 20 bp, Artificial Sequence
  Description of Artificial Sequence: Synthetic oligonucleotide
  Target: LAMA2; (+) strand; PAM type: NRG; PAM sequence: AGG
cagtcaggctgaatgtggaa

SEQ ID NO: 122596 - DNA, 20 bp, Artificial Sequence
  Description of Artificial Sequence: Synthetic oligonucleotide
  Target: LAMA2; (+) strand; PAM type: NRG; PAM sequence: GGG
agtcaggctgaatgtggaaa

SEQ ID NO: 122597 - DNA, 20 bp, Artificial Sequence
  Description of Artificial Sequence: Synthetic oligonucleotide
  Target: LAMA2; (+) strand; PAM type: NRG; PAM sequence: AAG
ctgaatgtggaaagggcttt

SEQ ID NO: 122598 - DNA, 20 bp, Artificial Sequence
  Description of Artificial Sequence: Synthetic oligonucleotide
  Target: LAMA2; (+) strand; PAM type: NRG; PAM sequence: AAG
atgtggaaagggctttaaga

SEQ ID NO: 122599 - DNA, 20 bp, Artificial Sequence
  Description of Artificial Sequence: Synthetic oligonucleotide
  Target: LAMA2; (+) strand; PAM type: NRG; PAM sequence: TGG
ttaaaattgtttttacattc

SEQ ID NO: 122600 - DNA, 20 bp, Artificial Sequence
  Description of Artificial Sequence: Synthetic oligonucleotide
  Target: LAMA2; (+) strand; PAM type: NRG; PAM sequence: GGG
taaaattgtttttacattct

SEQ ID NO: 122601 - DNA, 20 bp, Artificial Sequence
  Description of Artificial Sequence: Synthetic oligonucleotide
  Target: LAMA2; (+) strand; PAM type: NRG; PAM sequence: GGG
aaaattgtttttacattctg

SEQ ID NO: 122602 - DNA, 20 bp, Artificial Sequence
  Description of Artificial Sequence: Synthetic oligonucleotide
  Target: LAMA2; (+) strand; PAM type: NRG; PAM sequence: AAG
attgtttttacattctgggg

SEQ ID NO: 122603 - DNA, 20 bp, Artificial Sequence
  Description of Artificial Sequence: Synthetic oligonucleotide
  Target: LAMA2; (+) strand; PAM type: NRG; PAM sequence: TAG
gtttttacattctggggaag

SEQ ID NO: 122604 - DNA, 20 bp, Artificial Sequence
  Description of Artificial Sequence: Synthetic oligonucleotide
  Target: LAMA2; (+) strand; PAM type: NRG; PAM sequence: CAG
gtagaaacatttccatctaa

SEQ ID NO: 122605 - DNA, 20 bp, Artificial Sequence
  Description of Artificial Sequence: Synthetic oligonucleotide
  Target: LAMA2; (+) strand; PAM type: NRG; PAM sequence: AGG
tagaaacatttccatctaac

SEQ ID NO: 122606 - DNA, 20 bp, Artificial Sequence
  Description of Artificial Sequence: Synthetic oligonucleotide
  Target: LAMA2; (+) strand; PAM type: NRG; PAM sequence: CAG
acatttccatctaacaggaa

SEQ ID NO: 122607 - DNA, 20 bp, Artificial Sequence
  Description of Artificial Sequence: Synthetic oligonucleotide
  Target: LAMA2; (+) strand; PAM type: NRG; PAM sequence: AGG
catttccatctaacaggaac

SEQ ID NO: 122608 - DNA, 20 bp, Artificial Sequence
  Description of Artificial Sequence: Synthetic oligonucleotide
  Target: LAMA2; (+) strand; PAM type: NRG; PAM sequence: GGG
atttccatctaacaggaaca

SEQ ID NO: 122609 - DNA, 20 bp, Artificial Sequence
  Description of Artificial Sequence: Synthetic oligonucleotide
  Target: LAMA2; (+) strand; PAM type: NRG; PAM sequence: CAG
tccatctaacaggaacaggg

SEQ ID NO: 122610 - DNA, 20 bp, Artificial Sequence
  Description of Artificial Sequence: Synthetic oligonucleotide
  Target: LAMA2; (+) strand; PAM type: NRG; PAM sequence: CAG
acaggaacagggcagtttca

SEQ ID NO: 122611 - DNA, 20 bp, Artificial Sequence
  Description of Artificial Sequence: Synthetic oligonucleotide
  Target: LAMA2; (+) strand; PAM type: NRG; PAM sequence: GAG
aggaacagggcagtttcaca

SEQ ID NO: 122612 - DNA, 20 bp, Artificial Sequence
  Description of Artificial Sequence: Synthetic oligonucleotide
  Target: LAMA2; (+) strand; PAM type: NRG; PAM sequence: AGG
ggaacagggcagtttcacag

SEQ ID NO: 122613 - DNA, 20 bp, Artificial Sequence
  Description of Artificial Sequence: Synthetic oligonucleotide
  Target: LAMA2; (+) strand; PAM type: NRG; PAM sequence: GAG
aacagggcagtttcacagag

SEQ ID NO: 122614 - DNA, 20 bp, Artificial Sequence
  Description of Artificial Sequence: Synthetic oligonucleotide
  Target: LAMA2; (+) strand; PAM type: NRG; PAM sequence: TGG
gggcagtttcacagaggagt

SEQ ID NO: 122615 - DNA, 20 bp, Artificial Sequence
  Description of Artificial Sequence: Synthetic oligonucleotide
  Target: LAMA2; (+) strand; PAM type: NRG; PAM sequence: TGG
ttcacagaggagttggaatt

SEQ ID NO: 122616 - DNA, 20 bp, Artificial Sequence
  Description of Artificial Sequence: Synthetic oligonucleotide
  Target: LAMA2; (+) strand; PAM type: NRG; PAM sequence: GAG
gaggagttggaatttggact

SEQ ID NO: 122617 - DNA, 20 bp, Artificial Sequence
  Description of Artificial Sequence: Synthetic oligonucleotide
  Target: LAMA2; (+) strand; PAM type: NRG; PAM sequence: CAG
aatttggactgagttttgaa

SEQ ID NO: 122618 - DNA, 20 bp, Artificial Sequence
  Description of Artificial Sequence: Synthetic oligonucleotide
  Target: LAMA2; (+) strand; PAM type: NRG; PAM sequence: AAG
ttggactgagttttgaacag

SEQ ID NO: 122619 - DNA, 20 bp, Artificial Sequence
  Description of Artificial Sequence: Synthetic oligonucleotide
  Target: LAMA2; (+) strand; PAM type: NRG; PAM sequence: GAG
ggactgagttttgaacagaa

SEQ ID NO: 122620 - DNA, 20 bp, Artificial Sequence
  Description of Artificial Sequence: Synthetic oligonucleotide
  Target: LAMA2; (+) strand; PAM type: NRG; PAM sequence: TGG
tgaacagaagagaatttcga

SEQ ID NO: 122621 - DNA, 20 bp, Artificial Sequence
  Description of Artificial Sequence: Synthetic oligonucleotide
  Target: LAMA2; (+) strand; PAM type: NRG; PAM sequence: GGG
gaacagaagagaatttcgat

SEQ ID NO: 122622 - DNA, 20 bp, Artificial Sequence
  Description of Artificial Sequence: Synthetic oligonucleotide
  Target: LAMA2; (+) strand; PAM type: NRG; PAM sequence: CAG
cagaagagaatttcgatggg

SEQ ID NO: 122623 - DNA, 20 bp, Artificial Sequence
  Description of Artificial Sequence: Synthetic oligonucleotide
  Target: LAMA2; (+) strand; PAM type: NRG; PAM sequence: CAG
gagaatttcgatgggcagat

SEQ ID NO: 122624 - DNA, 20 bp, Artificial Sequence
  Description of Artificial Sequence: Synthetic oligonucleotide
  Target: LAMA2; (+) strand; PAM type: NRG; PAM sequence: AGG
agaatttcgatgggcagatc

SEQ ID NO: 122625 - DNA, 20 bp, Artificial Sequence
  Description of Artificial Sequence: Synthetic oligonucleotide
  Target: LAMA2; (+) strand; PAM type: NRG; PAM sequence: AAG
ttcgatgggcagatcaggaa

SEQ ID NO: 122626 - DNA, 20 bp, Artificial Sequence
  Description of Artificial Sequence: Synthetic oligonucleotide
  Target: LAMA2; (+) strand; PAM type: NRG; PAM sequence: GAG
cgatgggcagatcaggaaaa

SEQ ID NO: 122627 - DNA, 20 bp, Artificial Sequence
  Description of Artificial Sequence: Synthetic oligonucleotide
  Target: LAMA2; (+) strand; PAM type: NRG; PAM sequence: CAG
tgggcagatcaggaaaagag

SEQ ID NO: 122628 - DNA, 20 bp, Artificial Sequence
  Description of Artificial Sequence: Synthetic oligonucleotide
  Target: LAMA2; (+) strand; PAM type: NRG; PAM sequence: CAG
agatcaggaaaagagcagtt

SEQ ID NO: 122629 - DNA, 20 bp, Artificial Sequence
  Description of Artificial Sequence: Synthetic oligonucleotide
  Target: LAMA2; (+) strand; PAM type: NRG; PAM sequence: AGG
gatcaggaaaagagcagttc

SEQ ID NO: 122630 - DNA, 20 bp, Artificial Sequence
  Description of Artificial Sequence: Synthetic oligonucleotide
  Target: LAMA2; (+) strand; PAM type: NRG; PAM sequence: GAG
tcaggaaaagagcagttcag

SEQ ID NO: 122631 - DNA, 20 bp, Artificial Sequence
  Description of Artificial Sequence: Synthetic oligonucleotide
  Target: LAMA2; (+) strand; PAM type: NRG; PAM sequence: AGG
caggaaaagagcagttcagg

SEQ ID NO: 122632 - DNA, 20 bp, Artificial Sequence
  Description of Artificial Sequence: Synthetic oligonucleotide
  Target: LAMA2; (+) strand; PAM type: NRG; PAM sequence: GAG
ggaaaagagcagttcaggag

SEQ ID NO: 122633 - DNA, 20 bp, Artificial Sequence
  Description of Artificial Sequence: Synthetic oligonucleotide
  Target: LAMA2; (+) strand; PAM type: NRG; PAM sequence: AGG
gaaaagagcagttcaggagg

SEQ ID NO: 122634 - DNA, 20 bp, Artificial Sequence
  Description of Artificial Sequence: Synthetic oligonucleotide
  Target: LAMA2; (+) strand; PAM type: NRG; PAM sequence: GGG
aaaagagcagttcaggagga

SEQ ID NO: 122635 - DNA, 20 bp, Artificial Sequence
  Description of Artificial Sequence: Synthetic oligonucleotide
  Target: LAMA2; (+) strand; PAM type: NRG; PAM sequence: TGG
agcagttcaggaggagggaa

SEQ ID NO: 122636 - DNA, 20 bp, Artificial Sequence
  Description of Artificial Sequence: Synthetic oligonucleotide
  Target: LAMA2; (+) strand; PAM type: NRG; PAM sequence: TGG
agttcaggaggagggaatgg

SEQ ID NO: 122637 - DNA, 20 bp, Artificial Sequence
  Description of Artificial Sequence: Synthetic oligonucleotide
  Target: LAMA2; (+) strand; PAM type: NRG; PAM sequence: GGG
gttcaggaggagggaatggt

SEQ ID NO: 122638 - DNA, 20 bp, Artificial Sequence
  Description of Artificial Sequence: Synthetic oligonucleotide
  Target: LAMA2; (+) strand; PAM type: NRG; PAM sequence: TGG
gaggagggaatggtgggctg

SEQ ID NO: 122639 - DNA, 20 bp, Artificial Sequence
  Description of Artificial Sequence: Synthetic oligonucleotide
  Target: LAMA2; (+) strand; PAM type: NRG; PAM sequence: GAG
ggagggaatggtgggctgtg

SEQ ID NO: 122640 - DNA, 20 bp, Artificial Sequence
  Description of Artificial Sequence: Synthetic oligonucleotide
  Target: LAMA2; (+) strand; PAM type: NRG; PAM sequence: TGG
gaatggtgggctgtggagca

SEQ ID NO: 122641 - DNA, 20 bp, Artificial Sequence
  Description of Artificial Sequence: Synthetic oligonucleotide
  Target: LAMA2; (+) strand; PAM type: NRG; PAM sequence: GGG
aatggtgggctgtggagcat

SEQ ID NO: 122642 - DNA, 20 bp, Artificial Sequence
  Description of Artificial Sequence: Synthetic oligonucleotide
  Target: LAMA2; (+) strand; PAM type: NRG; PAM sequence: CAG
ggctgtggagcatgggcgac

SEQ ID NO: 122643 - DNA, 20 bp, Artificial Sequence
  Description of Artificial Sequence: Synthetic oligonucleotide
  Target: LAMA2; (+) strand; PAM type: NRG; PAM sequence: AAG
gtggagcatgggcgaccaga

SEQ ID NO: 122644 - DNA, 20 bp, Artificial Sequence
  Description of Artificial Sequence: Synthetic oligonucleotide
  Target: LAMA2; (+) strand; PAM type: NRG; PAM sequence: AGG
tggagcatgggcgaccagaa

SEQ ID NO: 122645 - DNA, 20 bp, Artificial Sequence
  Description of Artificial Sequence: Synthetic oligonucleotide
  Target: LAMA2; (+) strand; PAM type: NRG; PAM sequence: CAG
agcatgggcgaccagaaagg

SEQ ID NO: 122646 - DNA, 20 bp, Artificial Sequence
  Description of Artificial Sequence: Synthetic oligonucleotide
  Target: LAMA2; (+) strand; PAM type: NRG; PAM sequence: AAG
ggcgaccagaaaggcagatt

SEQ ID NO: 122647 - DNA, 20 bp, Artificial Sequence
  Description of Artificial Sequence: Synthetic oligonucleotide
  Target: LAMA2; (+) strand; PAM type: NRG; PAM sequence: CAG
aaaggcagattaagttaaaa

SEQ ID NO: 122648 - DNA, 20 bp, Artificial Sequence
  Description of Artificial Sequence: Synthetic oligonucleotide
  Target: LAMA2; (+) strand; PAM type: NRG; PAM sequence: AGG
aaggcagattaagttaaaac

SEQ ID NO: 122649 - DNA, 20 bp, Artificial Sequence
  Description of Artificial Sequence: Synthetic oligonucleotide
  Target: LAMA2; (+) strand; PAM type: NRG; PAM sequence: GGG
aggcagattaagttaaaaca

SEQ ID NO: 122650 - DNA, 20 bp, Artificial Sequence
  Description of Artificial Sequence: Synthetic oligonucleotide
  Target: LAMA2; (+) strand; PAM type: NRG; PAM sequence: TGG
ttaaaacagggttgacaaat

SEQ ID NO: 122651 - DNA, 20 bp, Artificial Sequence
  Description of Artificial Sequence: Synthetic oligonucleotide
  Target: LAMA2; (+) strand; PAM type: NRG; PAM sequence: GGG
taaaacagggttgacaaatt

SEQ ID NO: 122652 - DNA, 20 bp, Artificial Sequence
  Description of Artificial Sequence: Synthetic oligonucleotide
  Target: LAMA2; (+) strand; PAM type: NRG; PAM sequence: GAG
aaacagggttgacaaattgg

SEQ ID NO: 122653 - DNA, 20 bp, Artificial Sequence
  Description of Artificial Sequence: Synthetic oligonucleotide
  Target: LAMA2; (+) strand; PAM type: NRG; PAM sequence: CAG
gttgacaaattgggagaaca

SEQ ID NO: 122654 - DNA, 20 bp, Artificial Sequence
  Description of Artificial Sequence: Synthetic oligonucleotide
  Target: LAMA2; (+) strand; PAM type: NRG; PAM sequence: AGG
ttgacaaattgggagaacac

SEQ ID NO: 122655 - DNA, 20 bp, Artificial Sequence
  Description of Artificial Sequence: Synthetic oligonucleotide
  Target: LAMA2; (+) strand; PAM type: NRG; PAM sequence: AAG
aattgggagaacacaggatt

SEQ ID NO: 122656 - DNA, 20 bp, Artificial Sequence
  Description of Artificial Sequence: Synthetic oligonucleotide
  Target: LAMA2; (+) strand; PAM type: NRG; PAM sequence: AGG
attgggagaacacaggatta

SEQ ID NO: 122657 - DNA, 20 bp, Artificial Sequence
  Description of Artificial Sequence: Synthetic oligonucleotide
  Target: LAMA2; (+) strand; PAM type: NRG; PAM sequence: GGG
ttgggagaacacaggattaa

SEQ ID NO: 122658 - DNA, 20 bp, Artificial Sequence
  Description of Artificial Sequence: Synthetic oligonucleotide
  Target: LAMA2; (+) strand; PAM type: NRG; PAM sequence: TGG
agaacacaggattaagggac

SEQ ID NO: 122659 - DNA, 20 bp, Artificial Sequence
  Description of Artificial Sequence: Synthetic oligonucleotide
  Target: LAMA2; (+) strand; PAM type: NRG; PAM sequence: AAG
ggattaagggactggaattt

SEQ ID NO: 122660 - DNA, 20 bp, Artificial Sequence
  Description of Artificial Sequence: Synthetic oligonucleotide
  Target: LAMA2; (+) strand; PAM type: NRG; PAM sequence: TAG
aagggactggaatttaagtt

SEQ ID NO: 122661 - DNA, 20 bp, Artificial Sequence
  Description of Artificial Sequence: Synthetic oligonucleotide
  Target: LAMA2; (+) strand; PAM type: NRG; PAM sequence: AAG
agtttagatttgctttaata

SEQ ID NO: 122662 - DNA, 20 bp, Artificial Sequence
  Description of Artificial Sequence: Synthetic oligonucleotide
  Target: LAMA2; (+) strand; PAM type: NRG; PAM sequence: GAG
gaaaaatgttactttgtgat

SEQ ID NO: 122663 - DNA, 20 bp, Artificial Sequence
  Description of Artificial Sequence: Synthetic oligonucleotide
  Target: LAMA2; (+) strand; PAM type: NRG; PAM sequence: GAG
aaaatgttactttgtgatga

SEQ ID NO: 122664 - DNA, 20 bp, Artificial Sequence
  Description of Artificial Sequence: Synthetic oligonucleotide
  Target: LAMA2; (+) strand; PAM type: NRG; PAM sequence: AAG
actttgtgatgagagaaaat

SEQ ID NO: 122665 - DNA, 20 bp, Artificial Sequence
  Description of Artificial Sequence: Synthetic oligonucleotide
  Target: LAMA2; (+) strand; PAM type: NRG; PAM sequence: GAG
tttaaaaaccaatccactct

SEQ ID NO: 122666 - DNA, 20 bp, Artificial Sequence
  Description of Artificial Sequence: Synthetic oligonucleotide
  Target: LAMA2; (+) strand; PAM type: NRG; PAM sequence: GAG
taaaaaccaatccactctga

SEQ ID NO: 122667 - DNA, 20 bp, Artificial Sequence
  Description of Artificial Sequence: Synthetic oligonucleotide
  Target: LAMA2; (+) strand; PAM type: NRG; PAM sequence: AAG
ccactctgagagattaatta

SEQ ID NO: 122668 - DNA, 20 bp, Artificial Sequence
  Description of Artificial Sequence: Synthetic oligonucleotide
  Target: LAMA2; (+) strand; PAM type: NRG; PAM sequence: AAG
ctgagagattaattaaagtg

SEQ ID NO: 122669 - DNA, 20 bp, Artificial Sequence
  Description of Artificial Sequence: Synthetic oligonucleotide
  Target: LAMA2; (+) strand; PAM type: NRG; PAM sequence: TGG
gagattaattaaagtgaaga

SEQ ID NO: 122670 - DNA, 20 bp, Artificial Sequence
  Description of Artificial Sequence: Synthetic oligonucleotide
  Target: LAMA2; (+) strand; PAM type: NRG; PAM sequence: GGG
agattaattaaagtgaagat

SEQ ID NO: 122671 - DNA, 20 bp, Artificial Sequence
  Description of Artificial Sequence: Synthetic oligonucleotide
  Target: LAMA2; (+) strand; PAM type: NRG; PAM sequence: GGG
gattaattaaagtgaagatg

SEQ ID NO: 122672 - DNA, 20 bp, Artificial Sequence
  Description of Artificial Sequence: Synthetic oligonucleotide
  Target: LAMA2; (+) strand; PAM type: NRG; PAM sequence: AAG
ggtctgctaatgtgttactg

SEQ ID NO: 122673 - DNA, 20 bp, Artificial Sequence
  Description of Artificial Sequence: Synthetic oligonucleotide
  Target: LAMA2; (+) strand; PAM type: NRG; PAM sequence: CAG
tgtgttactgaagtgaactg

SEQ ID NO: 122674 - DNA, 20 bp, Artificial Sequence
  Description of Artificial Sequence: Synthetic oligonucleotide
  Target: LAMA2; (+) strand; PAM type: NRG; PAM sequence: GAG
tgttactgaagtgaactgca

SEQ ID NO: 122675 - DNA, 20 bp, Artificial Sequence
  Description of Artificial Sequence: Synthetic oligonucleotide
  Target: LAMA2; (+) strand; PAM type: NRG; PAM sequence: CAG
ctgaagtgaactgcagagta

SEQ ID NO: 122676 - DNA, 20 bp, Artificial Sequence
  Description of Artificial Sequence: Synthetic oligonucleotide
  Target: LAMA2; (+) strand; PAM type: NRG; PAM sequence: TGG
gaactgcagagtacagtcac

SEQ ID NO: 122677 - DNA, 20 bp, Artificial Sequence
  Description of Artificial Sequence: Synthetic oligonucleotide
  Target: LAMA2; (+) strand; PAM type: NRG; PAM sequence: GAG
gtacagtcactggcattgat

SEQ ID NO: 122678 - DNA, 20 bp, Artificial Sequence
  Description of Artificial Sequence: Synthetic oligonucleotide
  Target: LAMA2; (+) strand; PAM type: NRG; PAM sequence: TAG
gtcactggcattgatgagtc

SEQ ID NO: 122679 - DNA, 20 bp, Artificial Sequence
  Description of Artificial Sequence: Synthetic oligonucleotide
  Target: LAMA2; (+) strand; PAM type: NRG; PAM sequence: GAG
ttgatgagtctagatgctgt

SEQ ID NO: 122680 - DNA, 20 bp, Artificial Sequence
  Description of Artificial Sequence: Synthetic oligonucleotide
  Target: LAMA2; (+) strand; PAM type: NRG; PAM sequence: AAG
tgagtctagatgctgtgaga

SEQ ID NO: 122681 - DNA, 20 bp, Artificial Sequence
  Description of Artificial Sequence: Synthetic oligonucleotide
  Target: LAMA2; (+) strand; PAM type: NRG; PAM sequence: TAG
gatgctgtgagaaagatcat

SEQ ID NO: 122682 - DNA, 20 bp, Artificial Sequence
  Description of Artificial Sequence: Synthetic oligonucleotide
  Target: LAMA2; (+) strand; PAM type: NRG; PAM sequence: AAG
attagcgcattgacaattct

SEQ ID NO: 122683 - DNA, 20 bp, Artificial Sequence
  Description of Artificial Sequence: Synthetic oligonucleotide
  Target: LAMA2; (+) strand; PAM type: NRG; PAM sequence: TAG
agcgcattgacaattctaag

SEQ ID NO: 122684 - DNA, 20 bp, Artificial Sequence
  Description of Artificial Sequence: Synthetic oligonucleotide
  Target: LAMA2; (+) strand; PAM type: NRG; PAM sequence: TGG
cattgacaattctaagtagc

SEQ ID NO: 122685 - DNA, 20 bp, Artificial Sequence
  Description of Artificial Sequence: Synthetic oligonucleotide
  Target: LAMA2; (+) strand; PAM type: NRG; PAM sequence: GAG
ttgacaattctaagtagctg

SEQ ID NO: 122686 - DNA, 20 bp, Artificial Sequence
  Description of Artificial Sequence: Synthetic oligonucleotide
  Target: LAMA2; (+) strand; PAM type: NRG; PAM sequence: TAG
actttcaacttccatatttt

SEQ ID NO: 122687 - DNA, 20 bp, Artificial Sequence
  Description of Artificial Sequence: Synthetic oligonucleotide
  Target: LAMA2; (+) strand; PAM type: NRG; PAM sequence: TAG
tttttcaaatgtgattaatt

SEQ ID NO: 122688 - DNA, 20 bp, Artificial Sequence
  Description of Artificial Sequence: Synthetic oligonucleotide
  Target: LAMA2; (+) strand; PAM type: NRG; PAM sequence: TGG
attataattatttattcgac

SEQ ID NO: 122689 - DNA, 20 bp, Artificial Sequence
  Description of Artificial Sequence: Synthetic oligonucleotide
  Target: LAMA2; (+) strand; PAM type: NRG; PAM sequence: AAG
tgacacatttctatgaaaaa

SEQ ID NO: 122690 - DNA, 20 bp, Artificial Sequence
  Description of Artificial Sequence: Synthetic oligonucleotide
  Target: LAMA2; (+) strand; PAM type: NRG; PAM sequence: CAG
catttctatgaaaaaaagat

SEQ ID NO: 122691 - DNA, 20 bp, Artificial Sequence
  Description of Artificial Sequence: Synthetic oligonucleotide
  Target: LAMA2; (+) strand; PAM type: NRG; PAM sequence: CAG
gatcagtttcactaactcct

SEQ ID NO: 122692 - DNA, 20 bp, Artificial Sequence
  Description of Artificial Sequence: Synthetic oligonucleotide
  Target: LAMA2; (+) strand; PAM type: NRG; PAM sequence: AGG
atcagtttcactaactcctc

SEQ ID NO: 122693 - DNA, 20 bp, Artificial Sequence
  Description of Artificial Sequence: Synthetic oligonucleotide
  Target: LAMA2; (+) strand; PAM type: NRG; PAM sequence: TGG
tcactaactcctcaggcttc

SEQ ID NO: 122694 - DNA, 20 bp, Artificial Sequence
  Description of Artificial Sequence: Synthetic oligonucleotide
  Target: LAMA2; (+) strand; PAM type: NRG; PAM sequence: AAG
ataaatgtctgtatgaacgt

SEQ ID NO: 122695 - DNA, 20 bp, Artificial Sequence
  Description of Artificial Sequence: Synthetic oligonucleotide
  Target: LAMA2; (+) strand; PAM type: NRG; PAM sequence: TAG
aactttgcttcattgttgtt

SEQ ID NO: 122696 - DNA, 20 bp, Artificial Sequence
  Description of Artificial Sequence: Synthetic oligonucleotide
  Target: LAMA2; (+) strand; PAM type: NRG; PAM sequence: TGG
gtttagatgacattaataat

SEQ ID NO: 122697 - DNA, 20 bp, Artificial Sequence
  Description of Artificial Sequence: Synthetic oligonucleotide
  Target: LAMA2; (+) strand; PAM type: NRG; PAM sequence: TGG
ttggttttacttactgacta

SEQ ID NO: 122698 - DNA, 20 bp, Artificial Sequence
  Description of Artificial Sequence: Synthetic oligonucleotide
  Target: LAMA2; (+) strand; PAM type: NRG; PAM sequence: GGG
tggttttacttactgactat

SEQ ID NO: 122699 - DNA, 20 bp, Artificial Sequence
  Description of Artificial Sequence: Synthetic oligonucleotide
  Target: LAMA2; (+) strand; PAM type: NRG; PAM sequence: AAG
gactatgggcattttaatac

SEQ ID NO: 122700 - DNA, 20 bp, Artificial Sequence
  Description of Artificial Sequence: Synthetic oligonucleotide
  Target: LAMA2; (+) strand; PAM type: NRG; PAM sequence: AAG
aatacaagattccattttaa

SEQ ID NO: 122701 - DNA, 20 bp, Artificial Sequence
  Description of Artificial Sequence: Synthetic oligonucleotide
  Target: LAMA2; (+) strand; PAM type: NRG; PAM sequence: TAG
attttaaaagtgtgtacttg

SEQ ID NO: 122702 - DNA, 20 bp, Artificial Sequence
  Description of Artificial Sequence: Synthetic oligonucleotide
  Target: LAMA2; (+) strand; PAM type: NRG; PAM sequence: CAG
acttgtagcttattgcaaca

SEQ ID NO: 122703 - DNA, 20 bp, Artificial Sequence
  Description of Artificial Sequence: Synthetic oligonucleotide
  Target: LAMA2; (+) strand; PAM type: NRG; PAM sequence: AAG
ttattgcaacacagtgacca

SEQ ID NO: 122704 - DNA, 20 bp, Artificial Sequence
  Description of Artificial Sequence: Synthetic oligonucleotide
  Target: LAMA2; (+) strand; PAM type: NRG; PAM sequence: TGG
agacaccatattcttacttc

SEQ ID NO: 122705 - DNA, 20 bp, Artificial Sequence
  Description of Artificial Sequence: Synthetic oligonucleotide
  Target: LAMA2; (+) strand; PAM type: NRG; PAM sequence: TGG
ttacttctggaatcaatttg

SEQ ID NO: 122706 - DNA, 20 bp, Artificial Sequence
  Description of Artificial Sequence: Synthetic oligonucleotide
  Target: LAMA2; (+) strand; PAM type: NRG; PAM sequence: GGG
tacttctggaatcaatttgt

SEQ ID NO: 122707 - DNA, 20 bp, Artificial Sequence
  Description of Artificial Sequence: Synthetic oligonucleotide
  Target: LAMA2; (+) strand; PAM type: NRG; PAM sequence: CAG
caatttgtgggcattgttaa

SEQ ID NO: 122708 - DNA, 20 bp, Artificial Sequence
  Description of Artificial Sequence: Synthetic oligonucleotide
  Target: LAMA2; (+) strand; PAM type: NRG; PAM sequence: TAG
cagtatcttcacaactgcac

SEQ ID NO: 122709 - DNA, 20 bp, Artificial Sequence
  Description of Artificial Sequence: Synthetic oligonucleotide
  Target: LAMA2; (+) strand; PAM type: NRG; PAM sequence: AAG
tcttcacaactgcactagtc

SEQ ID NO: 122710 - DNA, 20 bp, Artificial Sequence
  Description of Artificial Sequence: Synthetic oligonucleotide
  Target: LAMA2; (+) strand; PAM type: NRG; PAM sequence: CAG
aactgcactagtcaagcaat

SEQ ID NO: 122711 - DNA, 20 bp, Artificial Sequence
  Description of Artificial Sequence: Synthetic oligonucleotide
  Target: LAMA2; (+) strand; PAM type: NRG; PAM sequence: GAG
ctgcactagtcaagcaatca

SEQ ID NO: 122712 - DNA, 20 bp, Artificial Sequence
  Description of Artificial Sequence: Synthetic oligonucleotide
  Target: LAMA2; (+) strand; PAM type: NRG; PAM sequence: AAG
ctagtcaagcaatcagagct

SEQ ID NO: 122713 - DNA, 20 bp, Artificial Sequence
  Description of Artificial Sequence: Synthetic oligonucleotide
  Target: LAMA2; (+) strand; PAM type: NRG; PAM sequence: AAG
caatcagagctaagctttca

SEQ ID NO: 122714 - DNA, 20 bp, Artificial Sequence
  Description of Artificial Sequence: Synthetic oligonucleotide
  Target: LAMA2; (+) strand; PAM type: NRG; PAM sequence: CAG
tcagagctaagctttcaaag

SEQ ID NO: 122715 - DNA, 20 bp, Artificial Sequence
  Description of Artificial Sequence: Synthetic oligonucleotide
  Target: LAMA2; (+) strand; PAM type: NRG; PAM sequence: TAG
gctaagctttcaaagcagat

SEQ ID NO: 122716 - DNA, 20 bp, Artificial Sequence
  Description of Artificial Sequence: Synthetic oligonucleotide
  Target: LAMA2; (+) strand; PAM type: NRG; PAM sequence: GAG
taagctttcaaagcagatta

SEQ ID NO: 122717 - DNA, 20 bp, Artificial Sequence
  Description of Artificial Sequence: Synthetic oligonucleotide
  Target: LAMA2; (+) strand; PAM type: NRG; PAM sequence: AGG
aagctttcaaagcagattag

SEQ ID NO: 122718 - DNA, 20 bp, Artificial Sequence
  Description of Artificial Sequence: Synthetic oligonucleotide
  Target: LAMA2; (+) strand; PAM type: NRG; PAM sequence: AAG
ctttcaaagcagattagagg

SEQ ID NO: 122719 - DNA, 20 bp, Artificial Sequence
  Description of Artificial Sequence: Synthetic oligonucleotide
  Target: LAMA2; (+) strand; PAM type: NRG; PAM sequence: TAG
gcagattagaggaagcttat

SEQ ID NO: 122720 - DNA, 20 bp, Artificial Sequence
  Description of Artificial Sequence: Synthetic oligonucleotide
  Target: LAMA2; (+) strand; PAM type: NRG; PAM sequence: TAG
agcttattagcaataaaata

SEQ ID NO: 122721 - DNA, 20 bp, Artificial Sequence
  Description of Artificial Sequence: Synthetic oligonucleotide
  Target: LAMA2; (+) strand; PAM type: NRG; PAM sequence: CAG
aaaatatagtcaaaatatac

SEQ ID NO: 122722 - DNA, 20 bp, Artificial Sequence
  Description of Artificial Sequence: Synthetic oligonucleotide
  Target: LAMA2; (+) strand; PAM type: NRG; PAM sequence: AGG
aaatatagtcaaaatatacc

SEQ ID NO: 122723 - DNA, 20 bp, Artificial Sequence
  Description of Artificial Sequence: Synthetic oligonucleotide
  Target: LAMA2; (+) strand; PAM type: NRG; PAM sequence: TAG
ggcataatcatatttttatg

SEQ ID NO: 122724 - DNA, 20 bp, Artificial Sequence
  Description of Artificial Sequence: Synthetic oligonucleotide
  Target: LAMA2; (+) strand; PAM type: NRG; PAM sequence: TGG
ataatcatatttttatgtag

SEQ ID NO: 122725 - DNA, 20 bp, Artificial Sequence
  Description of Artificial Sequence: Synthetic oligonucleotide
  Target: LAMA2; (+) strand; PAM type: NRG; PAM sequence: CAG
tttatgtagtggaattacct

SEQ ID NO: 122726 - DNA, 20 bp, Artificial Sequence
  Description of Artificial Sequence: Synthetic oligonucleotide
  Target: LAMA2; (+) strand; PAM type: NRG; PAM sequence: TGG
agtggaattacctcagcaca

SEQ ID NO: 122727 - DNA, 20 bp, Artificial Sequence
  Description of Artificial Sequence: Synthetic oligonucleotide
  Target: LAMA2; (+) strand; PAM type: NRG; PAM sequence: GAG
tggaattacctcagcacatg

SEQ ID NO: 122728 - DNA, 20 bp, Artificial Sequence
  Description of Artificial Sequence: Synthetic oligonucleotide
  Target: LAMA2; (+) strand; PAM type: NRG; PAM sequence: GAG
atggagaatctaaattaaat

SEQ ID NO: 122729 - DNA, 20 bp, Artificial Sequence
  Description of Artificial Sequence: Synthetic oligonucleotide
  Target: LAMA2; (+) strand; PAM type: NRG; PAM sequence: GAG
aattaaatgagtttataatt

SEQ ID NO: 122730 - DNA, 20 bp, Artificial Sequence
  Description of Artificial Sequence: Synthetic oligonucleotide
  Target: LAMA2; (+) strand; PAM type: NRG; PAM sequence: AGG
attaaatgagtttataattg

SEQ ID NO: 122731 - DNA, 20 bp, Artificial Sequence
  Description of Artificial Sequence: Synthetic oligonucleotide
  Target: LAMA2; (+) strand; PAM type: NRG; PAM sequence: AAG
tataattgaggtttgtgtgc

SEQ ID NO: 122732 - DNA, 20 bp, Artificial Sequence
  Description of Artificial Sequence: Synthetic oligonucleotide
  Target: LAMA2; (+) strand; PAM type: NRG; PAM sequence: AGG
ataattgaggtttgtgtgca

SEQ ID NO: 122733 - DNA, 20 bp, Artificial Sequence
  Description of Artificial Sequence: Synthetic oligonucleotide
  Target: LAMA2; (+) strand; PAM type: NRG; PAM sequence: GGG
taattgaggtttgtgtgcaa

SEQ ID NO: 122734 - DNA, 20 bp, Artificial Sequence
  Description of Artificial Sequence: Synthetic oligonucleotide
  Target: LAMA2; (+) strand; PAM type: NRG; PAM sequence: AAG
gaggtttgtgtgcaagggaa

SEQ ID NO: 122735 - DNA, 20 bp, Artificial Sequence
  Description of Artificial Sequence: Synthetic oligonucleotide
  Target: LAMA2; (+) strand; PAM type: NRG; PAM sequence: TGG
aaaagaaaattcgtctgtta

SEQ ID NO: 122736 - DNA, 20 bp, Artificial Sequence
  Description of Artificial Sequence: Synthetic oligonucleotide
  Target: LAMA2; (+) strand; PAM type: NRG; PAM sequence: TAG
gctctatattttttacatta

SEQ ID NO: 122737 - DNA, 20 bp, Artificial Sequence
  Description of Artificial Sequence: Synthetic oligonucleotide
  Target: LAMA2; (+) strand; PAM type: NRG; PAM sequence: AAG
tattttttacattatagcca

SEQ ID NO: 122738 - DNA, 20 bp, Artificial Sequence
  Description of Artificial Sequence: Synthetic oligonucleotide
  Target: LAMA2; (+) strand; PAM type: NRG; PAM sequence: TAG
ttacattatagccaaagtct

SEQ ID NO: 122739 - DNA, 20 bp, Artificial Sequence
  Description of Artificial Sequence: Synthetic oligonucleotide
  Target: LAMA2; (+) strand; PAM type: NRG; PAM sequence: GAG
caaagtcttagttacctttt

SEQ ID NO: 122740 - DNA, 20 bp, Artificial Sequence
  Description of Artificial Sequence: Synthetic oligonucleotide
  Target: LAMA2; (+) strand; PAM type: NRG; PAM sequence: AGG
aaagtcttagttaccttttg

SEQ ID NO: 122741 - DNA, 20 bp, Artificial Sequence
  Description of Artificial Sequence: Synthetic oligonucleotide
  Target: LAMA2; (+) strand; PAM type: NRG; PAM sequence: GGG
aagtcttagttaccttttga

SEQ ID NO: 122742 - DNA, 20 bp, Artificial Sequence
  Description of Artificial Sequence: Synthetic oligonucleotide
  Target: LAMA2; (+) strand; PAM type: NRG; PAM sequence: TAG
ttaccttttgagggtatctg

SEQ ID NO: 122743 - DNA, 20 bp, Artificial Sequence
  Description of Artificial Sequence: Synthetic oligonucleotide
  Target: LAMA2; (+) strand; PAM type: NRG; PAM sequence: AGG
taccttttgagggtatctgt

SEQ ID NO: 122744 - DNA, 20 bp, Artificial Sequence
  Description of Artificial Sequence: Synthetic oligonucleotide
  Target: LAMA2; (+) strand; PAM type: NRG; PAM sequence: CAG
tctgtaggtgccattaaatt

SEQ ID NO: 122745 - DNA, 20 bp, Artificial Sequence
  Description of Artificial Sequence: Synthetic oligonucleotide
  Target: LAMA2; (+) strand; PAM type: NRG; PAM sequence: TGG
tcagctatcctcttctgctg

SEQ ID NO: 122746 - DNA, 20 bp, Artificial Sequence
  Description of Artificial Sequence: Synthetic oligonucleotide
  Target: LAMA2; (+) strand; PAM type: NRG; PAM sequence: GGG
cagctatcctcttctgctgt

SEQ ID NO: 122747 - DNA, 20 bp, Artificial Sequence
  Description of Artificial Sequence: Synthetic oligonucleotide
  Target: LAMA2; (+) strand; PAM type: NRG; PAM sequence: AAG
tcctcttctgctgtgggtat

SEQ ID NO: 122748 - DNA, 20 bp, Artificial Sequence
  Description of Artificial Sequence: Synthetic oligonucleotide
  Target: LAMA2; (+) strand; PAM type: NRG; PAM sequence: TGG
ctgctgtgggtataagcaca

SEQ ID NO: 122749 - DNA, 20 bp, Artificial Sequence
  Description of Artificial Sequence: Synthetic oligonucleotide
  Target: LAMA2; (+) strand; PAM type: NRG; PAM sequence: CAG
gtataagcacatggcaaacc

SEQ ID NO: 122750 - DNA, 20 bp, Artificial Sequence
  Description of Artificial Sequence: Synthetic oligonucleotide
  Target: LAMA2; (+) strand; PAM type: NRG; PAM sequence: AGG
tataagcacatggcaaaccc

SEQ ID NO: 122751 - DNA, 20 bp, Artificial Sequence
  Description of Artificial Sequence: Synthetic oligonucleotide
  Target: LAMA2; (+) strand; PAM type: NRG; PAM sequence: TAG
tggcaaacccaggcaaaaat

SEQ ID NO: 122752 - DNA, 20 bp, Artificial Sequence
  Description of Artificial Sequence: Synthetic oligonucleotide
  Target: LAMA2; (+) strand; PAM type: NRG; PAM sequence: AAG
gcaaaaattagaaaaataaa

SEQ ID NO: 122753 - DNA, 20 bp, Artificial Sequence
  Description of Artificial Sequence: Synthetic oligonucleotide
  Target: LAMA2; (+) strand; PAM type: NRG; PAM sequence: AGG
caaaaattagaaaaataaaa

SEQ ID NO: 122754 - DNA, 20 bp, Artificial Sequence
  Description of Artificial Sequence: Synthetic oligonucleotide
  Target: LAMA2; (+) strand; PAM type: NRG; PAM sequence: TAG
tagaaaaataaaaaggattg

SEQ ID NO: 122755 - DNA, 20 bp, Artificial Sequence
  Description of Artificial Sequence: Synthetic oligonucleotide
  Target: LAMA2; (+) strand; PAM type: NRG; PAM sequence: GAG
gaaaaataaaaaggattgta

SEQ ID NO: 122756 - DNA, 20 bp, Artificial Sequence
  Description of Artificial Sequence: Synthetic oligonucleotide
  Target: LAMA2; (+) strand; PAM type: NRG; PAM sequence: TGG
taaaaaggattgtagagaaa

SEQ ID NO: 122757 - DNA, 20 bp, Artificial Sequence
  Description of Artificial Sequence: Synthetic oligonucleotide
  Target: LAMA2; (+) strand; PAM type: NRG; PAM sequence: GAG
aaaaggattgtagagaaatg

SEQ ID NO: 122758 - DNA, 20 bp, Artificial Sequence
  Description of Artificial Sequence: Synthetic oligonucleotide
  Target: LAMA2; (+) strand; PAM type: NRG; PAM sequence: AAG
tggagatataaaaaattaat

SEQ ID NO: 122759 - DNA, 20 bp, Artificial Sequence
  Description of Artificial Sequence: Synthetic oligonucleotide
  Target: LAMA2; (+) strand; PAM type: NRG; PAM sequence: GAG
gagatataaaaaattaataa

SEQ ID NO: 122760 - DNA, 20 bp, Artificial Sequence
  Description of Artificial Sequence: Synthetic oligonucleotide
  Target: LAMA2; (+) strand; PAM type: NRG; PAM sequence: AAG
atataaaaaattaataagag

SEQ ID NO: 122761 - DNA, 20 bp, Artificial Sequence
  Description of Artificial Sequence: Synthetic oligonucleotide
  Target: LAMA2; (+) strand; PAM type: NRG; PAM sequence: GAG
ataaaaaattaataagagaa

SEQ ID NO: 122762 - DNA, 20 bp, Artificial Sequence
  Description of Artificial Sequence: Synthetic oligonucleotide
  Target: LAMA2; (+) strand; PAM type: NRG; PAM sequence: AGG
taaaaaattaataagagaag

SEQ ID NO: 122763 - DNA, 20 bp, Artificial Sequence
  Description of Artificial Sequence: Synthetic oligonucleotide
  Target: LAMA2; (+) strand; PAM type: NRG; PAM sequence: AAG
aaattaataagagaagaggc

SEQ ID NO: 122764 - DNA, 20 bp, Artificial Sequence
  Description of Artificial Sequence: Synthetic oligonucleotide
  Target: LAMA2; (+) strand; PAM type: NRG; PAM sequence: AAG
ccttatccatttttttcctc

SEQ ID NO: 122765 - DNA, 20 bp, Artificial Sequence
  Description of Artificial Sequence: Synthetic oligonucleotide
  Target: LAMA2; (+) strand; PAM type: NRG; PAM sequence: AGG
cttatccatttttttcctca

SEQ ID NO: 122766 - DNA, 20 bp, Artificial Sequence
  Description of Artificial Sequence: Synthetic oligonucleotide
  Target: LAMA2; (+) strand; PAM type: NRG; PAM sequence: CAG
tttttcctcaaggttattaa

SEQ ID NO: 122767 - DNA, 20 bp, Artificial Sequence
  Description of Artificial Sequence: Synthetic oligonucleotide
  Target: LAMA2; (+) strand; PAM type: NRG; PAM sequence: TAG
cataaataattttgaaaatc

SEQ ID NO: 122768 - DNA, 20 bp, Artificial Sequence
  Description of Artificial Sequence: Synthetic oligonucleotide
  Target: LAMA2; (+) strand; PAM type: NRG; PAM sequence: AAG
aataattttgaaaatctaga

SEQ ID NO: 122769 - DNA, 20 bp, Artificial Sequence
  Description of Artificial Sequence: Synthetic oligonucleotide
  Target: LAMA2; (+) strand; PAM type: NRG; PAM sequence: TAG
ttgcatttctactttaaaaa

SEQ ID NO: 122770 - DNA, 20 bp, Artificial Sequence
  Description of Artificial Sequence: Synthetic oligonucleotide
  Target: LAMA2; (+) strand; PAM type: NRG; PAM sequence: TGG
actttaaaaatagctttcta

SEQ ID NO: 122771 - DNA, 20 bp, Artificial Sequence
  Description of Artificial Sequence: Synthetic oligonucleotide
  Target: LAMA2; (+) strand; PAM type: NRG; PAM sequence: AAG
aaaatagctttctatggctg

SEQ ID NO: 122772 - DNA, 20 bp, Artificial Sequence
  Description of Artificial Sequence: Synthetic oligonucleotide
  Target: LAMA2; (+) strand; PAM type: NRG; PAM sequence: AGG
aaatagctttctatggctga

SEQ ID NO: 122773 - DNA, 20 bp, Artificial Sequence
  Description of Artificial Sequence: Synthetic oligonucleotide
  Target: LAMA2; (+) strand; PAM type: NRG; PAM sequence: CAG
ctatggctgaaggtttgctt

SEQ ID NO: 122774 - DNA, 20 bp, Artificial Sequence
  Description of Artificial Sequence: Synthetic oligonucleotide
  Target: LAMA2; (+) strand; PAM type: NRG; PAM sequence: CAG
ctgtcacaactcccaaaaac

SEQ ID NO: 122775 - DNA, 20 bp, Artificial Sequence
  Description of Artificial Sequence: Synthetic oligonucleotide
  Target: LAMA2; (+) strand; PAM type: NRG; PAM sequence: TGG
cacaactcccaaaaaccagc

SEQ ID NO: 122776 - DNA, 20 bp, Artificial Sequence
  Description of Artificial Sequence: Synthetic oligonucleotide
  Target: LAMA2; (+) strand; PAM type: NRG; PAM sequence: TGG
tcccaaaaaccagctggttc

SEQ ID NO: 122777 - DNA, 20 bp, Artificial Sequence
  Description of Artificial Sequence: Synthetic oligonucleotide
  Target: LAMA2; (+) strand; PAM type: NRG; PAM sequence: GGG
cccaaaaaccagctggttct

SEQ ID NO: 122778 - DNA, 20 bp, Artificial Sequence
  Description of Artificial Sequence: Synthetic oligonucleotide
  Target: LAMA2; (+) strand; PAM type: NRG; PAM sequence: TGG
aatttgatacttcaaaccaa

SEQ ID NO: 122779 - DNA, 20 bp, Artificial Sequence
  Description of Artificial Sequence: Synthetic oligonucleotide
  Target: LAMA2; (+) strand; PAM type: NRG; PAM sequence: TGG
aaccaatggtttgtgctcat

SEQ ID NO: 122780 - DNA, 20 bp, Artificial Sequence
  Description of Artificial Sequence: Synthetic oligonucleotide
  Target: LAMA2; (+) strand; PAM type: NRG; PAM sequence: TGG
gtttgtgctcattggctccc

SEQ ID NO: 122781 - DNA, 20 bp, Artificial Sequence
  Description of Artificial Sequence: Synthetic oligonucleotide
  Target: LAMA2; (+) strand; PAM type: NRG; PAM sequence: CAG
cattggctccctggtgcaaa

SEQ ID NO: 122782 - DNA, 20 bp, Artificial Sequence
  Description of Artificial Sequence: Synthetic oligonucleotide
  Target: LAMA2; (+) strand; PAM type: NRG; PAM sequence: AGG
attggctccctggtgcaaac

SEQ ID NO: 122783 - DNA, 20 bp, Artificial Sequence
  Description of Artificial Sequence: Synthetic oligonucleotide
  Target: LAMA2; (+) strand; PAM type: NRG; PAM sequence: GGG
ttggctccctggtgcaaaca

SEQ ID NO: 122784 - DNA, 20 bp, Artificial Sequence
  Description of Artificial Sequence: Synthetic oligonucleotide
  Target: LAMA2; (+) strand; PAM type: NRG; PAM sequence: GAG
ggctccctggtgcaaacagg

SEQ ID NO: 122785 - DNA, 20 bp, Artificial Sequence
  Description of Artificial Sequence: Synthetic oligonucleotide
  Target: LAMA2; (+) strand; PAM type: NRG; PAM sequence: TAG
ggagataaatgctacttaaa

SEQ ID NO: 122786 - DNA, 20 bp, Artificial Sequence
  Description of Artificial Sequence: Synthetic oligonucleotide
  Target: LAMA2; (+) strand; PAM type: NRG; PAM sequence: TAG
gataaatgctacttaaatag

SEQ ID NO: 122787 - DNA, 20 bp, Artificial Sequence
  Description of Artificial Sequence: Synthetic oligonucleotide
  Target: LAMA2; (+) strand; PAM type: NRG; PAM sequence: AGG
ataaatgctacttaaatagt

SEQ ID NO: 122788 - DNA, 20 bp, Artificial Sequence
  Description of Artificial Sequence: Synthetic oligonucleotide
  Target: LAMA2; (+) strand; PAM type: NRG; PAM sequence: TAG
gtgaatgtaattttgcactt

SEQ ID NO: 122789 - DNA, 20 bp, Artificial Sequence
  Description of Artificial Sequence: Synthetic oligonucleotide
  Target: LAMA2; (+) strand; PAM type: NRG; PAM sequence: TAG
gaaaatgtctgcatgtttat

SEQ ID NO: 122790 - DNA, 20 bp, Artificial Sequence
  Description of Artificial Sequence: Synthetic oligonucleotide
  Target: LAMA2; (+) strand; PAM type: NRG; PAM sequence: GAG
aaatgtctgcatgtttatta

SEQ ID NO: 122791 - DNA, 20 bp, Artificial Sequence
  Description of Artificial Sequence: Synthetic oligonucleotide
  Target: LAMA2; (+) strand; PAM type: NRG; PAM sequence: AAG
tgtctgcatgtttattagag

SEQ ID NO: 122792 - DNA, 20 bp, Artificial Sequence
  Description of Artificial Sequence: Synthetic oligonucleotide
  Target: LAMA2; (+) strand; PAM type: NRG; PAM sequence: CAG
agagaagtgaatgctgaaat

SEQ ID NO: 122793 - DNA, 20 bp, Artificial Sequence
  Description of Artificial Sequence: Synthetic oligonucleotide
  Target: LAMA2; (+) strand; PAM type: NRG; PAM sequence: AAG
aaatcagcgaacaaaatgta

SEQ ID NO: 122794 - DNA, 20 bp, Artificial Sequence
  Description of Artificial Sequence: Synthetic oligonucleotide
  Target: LAMA2; (+) strand; PAM type: NRG; PAM sequence: GAG
cagcgaacaaaatgtaaagt

SEQ ID NO: 122795 - DNA, 20 bp, Artificial Sequence
  Description of Artificial Sequence: Synthetic oligonucleotide
  Target: LAMA2; (+) strand; PAM type: NRG; PAM sequence: AAG
aaaatgtaaagtgagcaact

SEQ ID NO: 122796 - DNA, 20 bp, Artificial Sequence
  Description of Artificial Sequence: Synthetic oligonucleotide
  Target: LAMA2; (+) strand; PAM type: NRG; PAM sequence: AAG
agcaactaagaaatacttat

SEQ ID NO: 122797 - DNA, 20 bp, Artificial Sequence
  Description of Artificial Sequence: Synthetic oligonucleotide
  Target: LAMA2; (+) strand; PAM type: NRG; PAM sequence: AGG
gcaactaagaaatacttata

SEQ ID NO: 122798 - DNA, 20 bp, Artificial Sequence
  Description of Artificial Sequence: Synthetic oligonucleotide
  Target: LAMA2; (+) strand; PAM type: NRG; PAM sequence: GGG
caactaagaaatacttataa

SEQ ID NO: 122799 - DNA, 20 bp, Artificial Sequence
  Description of Artificial Sequence: Synthetic oligonucleotide
  Target: LAMA2; (+) strand; PAM type: NRG; PAM sequence: AAG
atatatgtaatactttcttc

SEQ ID NO: 122800 - DNA, 20 bp, Artificial Sequence
  Description of Artificial Sequence: Synthetic oligonucleotide
  Target: LAMA2; (+) strand; PAM type: NRG; PAM sequence: TAG
tactttcttcaagttcatta

SEQ ID NO: 122801 - DNA, 20 bp, Artificial Sequence
  Description of Artificial Sequence: Synthetic oligonucleotide
  Target: LAMA2; (+) strand; PAM type: NRG; PAM sequence: CGG
ttcaagttcattatagctcc

SEQ ID NO: 122802 - DNA, 20 bp, Artificial Sequence
  Description of Artificial Sequence: Synthetic oligonucleotide
  Target: LAMA2; (+) strand; PAM type: NRG; PAM sequence: GGG
tcaagttcattatagctccc

SEQ ID NO: 122803 - DNA, 20 bp, Artificial Sequence
  Description of Artificial Sequence: Synthetic oligonucleotide
  Target: LAMA2; (+) strand; PAM type: NRG; PAM sequence: CAG
ttcattatagctcccgggcc

SEQ ID NO: 122804 - DNA, 20 bp, Artificial Sequence
  Description of Artificial Sequence: Synthetic oligonucleotide
  Target: LAMA2; (+) strand; PAM type: NRG; PAM sequence: TAG
ctcccgggcccagtacatcc

SEQ ID NO: 122805 - DNA, 20 bp, Artificial Sequence
  Description of Artificial Sequence: Synthetic oligonucleotide
  Target: LAMA2; (+) strand; PAM type: NRG; PAM sequence: CAG
gggcccagtacatcctagtc

SEQ ID NO: 122806 - DNA, 20 bp, Artificial Sequence
  Description of Artificial Sequence: Synthetic oligonucleotide
  Target: LAMA2; (+) strand; PAM type: NRG; PAM sequence: TAG
aaccatgtctaattttaaaa

SEQ ID NO: 122807 - DNA, 20 bp, Artificial Sequence
  Description of Artificial Sequence: Synthetic oligonucleotide
  Target: LAMA2; (+) strand; PAM type: NRG; PAM sequence: AAG
agctatgctcacttcaaacg

SEQ ID NO: 122808 - DNA, 20 bp, Artificial Sequence
  Description of Artificial Sequence: Synthetic oligonucleotide
  Target: LAMA2; (+) strand; PAM type: NRG; PAM sequence: TAG
ttcaaacgaagatgttgcta

SEQ ID NO: 122809 - DNA, 20 bp, Artificial Sequence
  Description of Artificial Sequence: Synthetic oligonucleotide
  Target: LAMA2; (+) strand; PAM type: NRG; PAM sequence: TAG
tatagctttattttatttta

SEQ ID NO: 122810 - DNA, 20 bp, Artificial Sequence
  Description of Artificial Sequence: Synthetic oligonucleotide
  Target: LAMA2; (+) strand; PAM type: NRG; PAM sequence: AGG
atagctttattttattttat

SEQ ID NO: 122811 - DNA, 20 bp, Artificial Sequence
  Description of Artificial Sequence: Synthetic oligonucleotide
  Target: LAMA2; (+) strand; PAM type: NRG; PAM sequence: AAG
ttttataggcttcaatttta

SEQ ID NO: 122812 - DNA, 20 bp, Artificial Sequence
  Description of Artificial Sequence: Synthetic oligonucleotide
  Target: LAMA2; (+) strand; PAM type: NRG; PAM sequence: TAG
ttttaaagttgtatcaccta

SEQ ID NO: 122813 - DNA, 20 bp, Artificial Sequence
  Description of Artificial Sequence: Synthetic oligonucleotide
  Target: LAMA2; (+) strand; PAM type: NRG; PAM sequence: AAG
tgtatcacctatagataaca

SEQ ID NO: 122814 - DNA, 20 bp, Artificial Sequence
  Description of Artificial Sequence: Synthetic oligonucleotide
  Target: LAMA2; (+) strand; PAM type: NRG; PAM sequence: CAG
tcacctatagataacaaaga

SEQ ID NO: 122815 - DNA, 20 bp, Artificial Sequence
  Description of Artificial Sequence: Synthetic oligonucleotide
  Target: LAMA2; (+) strand; PAM type: NRG; PAM sequence: TGG
gataacaaagacagctttca

SEQ ID NO: 122816 - DNA, 20 bp, Artificial Sequence
  Description of Artificial Sequence: Synthetic oligonucleotide
  Target: LAMA2; (+) strand; PAM type: NRG; PAM sequence: TAG
ctttcatggacacctcaatt

SEQ ID NO: 122817 - DNA, 20 bp, Artificial Sequence
  Description of Artificial Sequence: Synthetic oligonucleotide
  Target: LAMA2; (+) strand; PAM type: NRG; PAM sequence: AAG
tcatggacacctcaatttag

SEQ ID NO: 122818 - DNA, 20 bp, Artificial Sequence
  Description of Artificial Sequence: Synthetic oligonucleotide
  Target: LAMA2; (+) strand; PAM type: NRG; PAM sequence: GAG
atggacacctcaatttagaa

SEQ ID NO: 122819 - DNA, 20 bp, Artificial Sequence
  Description of Artificial Sequence: Synthetic oligonucleotide
  Target: LAMA2; (+) strand; PAM type: NRG; PAM sequence: TAG
ctcaatttagaagagtctta

SEQ ID NO: 122820 - DNA, 20 bp, Artificial Sequence
  Description of Artificial Sequence: Synthetic oligonucleotide
  Target: LAMA2; (+) strand; PAM type: NRG; PAM sequence: AGG
tcaatttagaagagtcttat

SEQ ID NO: 122821 - DNA, 20 bp, Artificial Sequence
  Description of Artificial Sequence: Synthetic oligonucleotide
  Target: LAMA2; (+) strand; PAM type: NRG; PAM sequence: GAG
gagtcttataggcactttgt

SEQ ID NO: 122822 - DNA, 20 bp, Artificial Sequence
  Description of Artificial Sequence: Synthetic oligonucleotide
  Target: LAMA2; (+) strand; PAM type: NRG; PAM sequence: AAG
cactttgtgagataaactgt

SEQ ID NO: 122823 - DNA, 20 bp, Artificial Sequence
  Description of Artificial Sequence: Synthetic oligonucleotide
  Target: LAMA2; (+) strand; PAM type: NRG; PAM sequence: CAG
ctgtaagtgtatgtgctaat

SEQ ID NO: 122824 - DNA, 20 bp, Artificial Sequence
  Description of Artificial Sequence: Synthetic oligonucleotide
  Target: LAMA2; (+) strand; PAM type: NRG; PAM sequence: TAG
taatcagataattcttttac

SEQ ID NO: 122825 - DNA, 20 bp, Artificial Sequence
  Description of Artificial Sequence: Synthetic oligonucleotide
  Target: LAMA2; (+) strand; PAM type: NRG; PAM sequence: GAG
atcagataattcttttacta

SEQ ID NO: 122826 - DNA, 20 bp, Artificial Sequence
  Description of Artificial Sequence: Synthetic oligonucleotide
  Target: LAMA2; (+) strand; PAM type: NRG; PAM sequence: TAG
aattcttttactagagactt

SEQ ID NO: 122827 - DNA, 20 bp, Artificial Sequence
  Description of Artificial Sequence: Synthetic oligonucleotide
  Target: LAMA2; (+) strand; PAM type: NRG; PAM sequence: AGG
attcttttactagagacttt

SEQ ID NO: 122828 - DNA, 20 bp, Artificial Sequence
  Description of Artificial Sequence: Synthetic oligonucleotide
  Target: LAMA2; (+) strand; PAM type: NRG; PAM sequence: AAG
tttactagagactttaggtg

SEQ ID NO: 122829 - DNA, 20 bp, Artificial Sequence
  Description of Artificial Sequence: Synthetic oligonucleotide
  Target: LAMA2; (+) strand; PAM type: NRG; PAM sequence: TAG
ctagagactttaggtgaaga

SEQ ID NO: 122830 - DNA, 20 bp, Artificial Sequence
  Description of Artificial Sequence: Synthetic oligonucleotide
  Target: LAMA2; (+) strand; PAM type: NRG; PAM sequence: CAG
agatagcaaatcttctaaaa

SEQ ID NO: 122831 - DNA, 20 bp, Artificial Sequence
  Description of Artificial Sequence: Synthetic oligonucleotide
  Target: LAMA2; (+) strand; PAM type: NRG; PAM sequence: TGG
aaacagactgataattaaac

SEQ ID NO: 122832 - DNA, 20 bp, Artificial Sequence
  Description of Artificial Sequence: Synthetic oligonucleotide
  Target: LAMA2; (+) strand; PAM type: NRG; PAM sequence: GGG
aacagactgataattaaact

SEQ ID NO: 122833 - DNA, 20 bp, Artificial Sequence
  Description of Artificial Sequence: Synthetic oligonucleotide
  Target: LAMA2; (+) strand; PAM type: NRG; PAM sequence: TGG
taaactgggttgatcattat

SEQ ID NO: 122834 - DNA, 20 bp, Artificial Sequence
  Description of Artificial Sequence: Synthetic oligonucleotide
  Target: LAMA2; (+) strand; PAM type: NRG; PAM sequence: GGG
aaactgggttgatcattatt

SEQ ID NO: 122835 - DNA, 20 bp, Artificial Sequence
  Description of Artificial Sequence: Synthetic oligonucleotide
  Target: LAMA2; (+) strand; PAM type: NRG; PAM sequence: CAG
ttaaaatgtgttcttaaatt

SEQ ID NO: 122836 - DNA, 20 bp, Artificial Sequence
  Description of Artificial Sequence: Synthetic oligonucleotide
  Target: LAMA2; (+) strand; PAM type: NRG; PAM sequence: TAG
aaatgtgttcttaaattcag

SEQ ID NO: 122837 - DNA, 20 bp, Artificial Sequence
  Description of Artificial Sequence: Synthetic oligonucleotide
  Target: LAMA2; (+) strand; PAM type: NRG; PAM sequence: TAG
tttttaaatcatattaaaaa

SEQ ID NO: 122838 - DNA, 20 bp, Artificial Sequence
  Description of Artificial Sequence: Synthetic oligonucleotide
  Target: LAMA2; (+) strand; PAM type: NRG; PAM sequence: AAG
tcatgtatattactgatttt

SEQ ID NO: 122839 - DNA, 20 bp, Artificial Sequence
  Description of Artificial Sequence: Synthetic oligonucleotide
  Target: LAMA2; (+) strand; PAM type: NRG; PAM sequence: AAG
atattactgattttaagtaa

SEQ ID NO: 122840 - DNA, 20 bp, Artificial Sequence
  Description of Artificial Sequence: Synthetic oligonucleotide
  Target: LAMA2; (+) strand; PAM type: NRG; PAM sequence: AAG
ttttaagtaaaagtacaatt

SEQ ID NO: 122841 - DNA, 20 bp, Artificial Sequence
  Description of Artificial Sequence: Synthetic oligonucleotide
  Target: LAMA2; (+) strand; PAM type: NRG; PAM sequence: TAG
aaaagtacaattaagacaat

SEQ ID NO: 122842 - DNA, 20 bp, Artificial Sequence
  Description of Artificial Sequence: Synthetic oligonucleotide
  Target: LAMA2; (+) strand; PAM type: NRG; PAM sequence: CAG
gtacaattaagacaattagc

SEQ ID NO: 122843 - DNA, 20 bp, Artificial Sequence
  Description of Artificial Sequence: Synthetic oligonucleotide
  Target: LAMA2; (+) strand; PAM type: NRG; PAM sequence: GAG
aattagccagacctatttat

SEQ ID NO: 122844 - DNA, 20 bp, Artificial Sequence
  Description of Artificial Sequence: Synthetic oligonucleotide
  Target: LAMA2; (+) strand; PAM type: NRG; PAM sequence: TAG
tagccagacctatttatgag

SEQ ID NO: 122845 - DNA, 20 bp, Artificial Sequence
  Description of Artificial Sequence: Synthetic oligonucleotide
  Target: LAMA2; (+) strand; PAM type: NRG; PAM sequence: TGG
tatttatgagtagctctaat

SEQ ID NO: 122846 - DNA, 20 bp, Artificial Sequence
  Description of Artificial Sequence: Synthetic oligonucleotide
  Target: LAMA2; (+) strand; PAM type: NRG; PAM sequence: GAG
tttatgagtagctctaattg

SEQ ID NO: 122847 - DNA, 20 bp, Artificial Sequence
  Description of Artificial Sequence: Synthetic oligonucleotide
  Target: LAMA2; (+) strand; PAM type: NRG; PAM sequence: CAG
atgagtagctctaattggag

SEQ ID NO: 122848 - DNA, 20 bp, Artificial Sequence
  Description of Artificial Sequence: Synthetic oligonucleotide
  Target: LAMA2; (+) strand; PAM type: NRG; PAM sequence: TGG
taattggagcagcttgttgc

SEQ ID NO: 122849 - DNA, 20 bp, Artificial Sequence
  Description of Artificial Sequence: Synthetic oligonucleotide
  Target: LAMA2; (+) strand; PAM type: NRG; PAM sequence: CAG
gcttgttgctggaccctatt

SEQ ID NO: 122850 - DNA, 20 bp, Artificial Sequence
  Description of Artificial Sequence: Synthetic oligonucleotide
  Target: LAMA2; (+) strand; PAM type: NRG; PAM sequence: TGG
tgttgctggaccctattcag

SEQ ID NO: 122851 - DNA, 20 bp, Artificial Sequence
  Description of Artificial Sequence: Synthetic oligonucleotide
  Target: LAMA2; (+) strand; PAM type: NRG; PAM sequence: TAG
tgctggaccctattcagtgg

SEQ ID NO: 122852 - DNA, 20 bp, Artificial Sequence
  Description of Artificial Sequence: Synthetic oligonucleotide
  Target: LAMA2; (+) strand; PAM type: NRG; PAM sequence: GAG
ctggaccctattcagtggta

SEQ ID NO: 122853 - DNA, 20 bp, Artificial Sequence
  Description of Artificial Sequence: Synthetic oligonucleotide
  Target: LAMA2; (+) strand; PAM type: NRG; PAM sequence: AAG
ccctattcagtggtagagat

SEQ ID NO: 122854 - DNA, 20 bp, Artificial Sequence
  Description of Artificial Sequence: Synthetic oligonucleotide
  Target: LAMA2; (+) strand; PAM type: NRG; PAM sequence: AGG
cctattcagtggtagagata

SEQ ID NO: 122855 - DNA, 20 bp, Artificial Sequence
  Description of Artificial Sequence: Synthetic oligonucleotide
  Target: LAMA2; (+) strand; PAM type: NRG; PAM sequence: GAG
tcagtggtagagataaggtt

SEQ ID NO: 122856 - DNA, 20 bp, Artificial Sequence
  Description of Artificial Sequence: Synthetic oligonucleotide
  Target: LAMA2; (+) strand; PAM type: NRG; PAM sequence: TGG
tggtagagataaggttgaga

SEQ ID NO: 122857 - DNA, 20 bp, Artificial Sequence
  Description of Artificial Sequence: Synthetic oligonucleotide
  Target: LAMA2; (+) strand; PAM type: NRG; PAM sequence: TAG
ataaggttgagatggctgaa

SEQ ID NO: 122858 - DNA, 20 bp, Artificial Sequence
  Description of Artificial Sequence: Synthetic oligonucleotide
  Target: LAMA2; (+) strand; PAM type: NRG; PAM sequence: TGG
tcatctaatttgaaatactt

SEQ ID NO: 122859 - DNA, 20 bp, Artificial Sequence
  Description of Artificial Sequence: Synthetic oligonucleotide
  Target: LAMA2; (+) strand; PAM type: NRG; PAM sequence: TGG
tgaaatactttggtgtcaca

SEQ ID NO: 122860 - DNA, 20 bp, Artificial Sequence
  Description of Artificial Sequence: Synthetic oligonucleotide
  Target: LAMA2; (+) strand; PAM type: NRG; PAM sequence: TGG
ggaccttttcctgaatacca

SEQ ID NO: 122861 - DNA, 20 bp, Artificial Sequence
  Description of Artificial Sequence: Synthetic oligonucleotide
  Target: LAMA2; (+) strand; PAM type: NRG; PAM sequence: TGG
atggctatgtactcactatt

SEQ ID NO: 122862 - DNA, 20 bp, Artificial Sequence
  Description of Artificial Sequence: Synthetic oligonucleotide
  Target: LAMA2; (+) strand; PAM type: NRG; PAM sequence: CAG
atgttttgtaaatgttcact

SEQ ID NO: 122863 - DNA, 20 bp, Artificial Sequence
  Description of Artificial Sequence: Synthetic oligonucleotide
  Target: LAMA2; (+) strand; PAM type: NRG; PAM sequence: AAG
actcagacattgacataaac

SEQ ID NO: 122864 - DNA, 20 bp, Artificial Sequence
  Description of Artificial Sequence: Synthetic oligonucleotide
  Target: LAMA2; (+) strand; PAM type: NRG; PAM sequence: AGG
ctcagacattgacataaaca

SEQ ID NO: 122865 - DNA, 20 bp, Artificial Sequence
  Description of Artificial Sequence: Synthetic oligonucleotide
  Target: LAMA2; (+) strand; PAM type: NRG; PAM sequence: CAG
agacattgacataaacaagg

SEQ ID NO: 122866 - DNA, 20 bp, Artificial Sequence
  Description of Artificial Sequence: Synthetic oligonucleotide
  Target: LAMA2; (+) strand; PAM type: NRG; PAM sequence: AAG
attgacataaacaaggcaga

SEQ ID NO: 122867 - DNA, 20 bp, Artificial Sequence
  Description of Artificial Sequence: Synthetic oligonucleotide
  Target: LAMA2; (+) strand; PAM type: NRG; PAM sequence: AGG
ttgacataaacaaggcagaa

SEQ ID NO: 122868 - DNA, 20 bp, Artificial Sequence
  Description of Artificial Sequence: Synthetic oligonucleotide
  Target: LAMA2; (+) strand; PAM type: NRG; PAM sequence: TGG
aaacaaggcagaaaggttaa

SEQ ID NO: 122869 - DNA, 20 bp, Artificial Sequence
  Description of Artificial Sequence: Synthetic oligonucleotide
  Target: LAMA2; (+) strand; PAM type: NRG; PAM sequence: TAG
catacgaattttctctcttt

SEQ ID NO: 122870 - DNA, 20 bp, Artificial Sequence
  Description of Artificial Sequence: Synthetic oligonucleotide
  Target: LAMA2; (+) strand; PAM type: NRG; PAM sequence: TAG
ttagttgctaacctgctttt

SEQ ID NO: 122871 - DNA, 20 bp, Artificial Sequence
  Description of Artificial Sequence: Synthetic oligonucleotide
  Target: LAMA2; (+) strand; PAM type: NRG; PAM sequence: TAG
tgctaacctgctttttagat

SEQ ID NO: 122872 - DNA, 20 bp, Artificial Sequence
  Description of Artificial Sequence: Synthetic oligonucleotide
  Target: LAMA2; (+) strand; PAM type: NRG; PAM sequence: TGG
ctgctttttagattagtcca

SEQ ID NO: 122873 - DNA, 20 bp, Artificial Sequence
  Description of Artificial Sequence: Synthetic oligonucleotide
  Target: LAMA2; (+) strand; PAM type: NRG; PAM sequence: TGG
agattagtccatggttatct

SEQ ID NO: 122874 - DNA, 20 bp, Artificial Sequence
  Description of Artificial Sequence: Synthetic oligonucleotide
  Target: LAMA2; (+) strand; PAM type: NRG; PAM sequence: AAG
ttagtccatggttatcttgg

SEQ ID NO: 122875 - DNA, 20 bp, Artificial Sequence
  Description of Artificial Sequence: Synthetic oligonucleotide
  Target: LAMA2; (+) strand; PAM type: NRG; PAM sequence: GAG
agtccatggttatcttggaa

SEQ ID NO: 122876 - DNA, 20 bp, Artificial Sequence
  Description of Artificial Sequence: Synthetic oligonucleotide
  Target: LAMA2; (+) strand; PAM type: NRG; PAM sequence: AGG
gtccatggttatcttggaag

SEQ ID NO: 122877 - DNA, 20 bp, Artificial Sequence
  Description of Artificial Sequence: Synthetic oligonucleotide
  Target: LAMA2; (+) strand; PAM type: NRG; PAM sequence: TGG
tggttatcttggaagaggtg

SEQ ID NO: 122878 - DNA, 20 bp, Artificial Sequence
  Description of Artificial Sequence: Synthetic oligonucleotide
  Target: LAMA2; (+) strand; PAM type: NRG; PAM sequence: GGG
ggttatcttggaagaggtgt

SEQ ID NO: 122879 - DNA, 20 bp, Artificial Sequence
  Description of Artificial Sequence: Synthetic oligonucleotide
  Target: LAMA2; (+) strand; PAM type: NRG; PAM sequence: GAG
ttatcttggaagaggtgtgg

SEQ ID NO: 122880 - DNA, 20 bp, Artificial Sequence
  Description of Artificial Sequence: Synthetic oligonucleotide
  Target: LAMA2; (+) strand; PAM type: NRG; PAM sequence: AAG
tggaagaggtgtgggagaac

SEQ ID NO: 122881 - DNA, 20 bp, Artificial Sequence
  Description of Artificial Sequence: Synthetic oligonucleotide
  Target: LAMA2; (+) strand; PAM type: NRG; PAM sequence: AGG
ggaagaggtgtgggagaaca

SEQ ID NO: 122882 - DNA, 20 bp, Artificial Sequence
  Description of Artificial Sequence: Synthetic oligonucleotide
  Target: LAMA2; (+) strand; PAM type: NRG; PAM sequence: GAG
gaggtgtgggagaacaaggt

SEQ ID NO: 122883 - DNA, 20 bp, Artificial Sequence
  Description of Artificial Sequence: Synthetic oligonucleotide
  Target: LAMA2; (+) strand; PAM type: NRG; PAM sequence: GAG
ggtgtgggagaacaaggtga

SEQ ID NO: 122884 - DNA, 20 bp, Artificial Sequence
  Description of Artificial Sequence: Synthetic oligonucleotide
  Target: LAMA2; (+) strand; PAM type: NRG; PAM sequence: AAG
gggagaacaaggtgagagct

SEQ ID NO: 122885 - DNA, 20 bp, Artificial Sequence
  Description of Artificial Sequence: Synthetic oligonucleotide
  Target: LAMA2; (+) strand; PAM type: NRG; PAM sequence: AGG
ggagaacaaggtgagagcta

SEQ ID NO: 122886 - DNA, 20 bp, Artificial Sequence
  Description of Artificial Sequence: Synthetic oligonucleotide
  Target: LAMA2; (+) strand; PAM type: NRG; PAM sequence: AAG
gaacaaggtgagagctaagg

SEQ ID NO: 122887 - DNA, 20 bp, Artificial Sequence
  Description of Artificial Sequence: Synthetic oligonucleotide
  Target: LAMA2; (+) strand; PAM type: NRG; PAM sequence: AGG
aacaaggtgagagctaagga

SEQ ID NO: 122888 - DNA, 20 bp, Artificial Sequence
  Description of Artificial Sequence: Synthetic oligonucleotide
  Target: LAMA2; (+) strand; PAM type: NRG; PAM sequence: AAG
taaggaaggaattctatgca

SEQ ID NO: 122889 - DNA, 20 bp, Artificial Sequence
  Description of Artificial Sequence: Synthetic oligonucleotide
  Target: LAMA2; (+) strand; PAM type: NRG; PAM sequence: TAG
caaagcgtttctgattctct

SEQ ID NO: 122890 - DNA, 20 bp, Artificial Sequence
  Description of Artificial Sequence: Synthetic oligonucleotide
  Target: LAMA2; (+) strand; PAM type: NRG; PAM sequence: TGG
ctgattctcttagtattttg

SEQ ID NO: 122891 - DNA, 20 bp, Artificial Sequence
  Description of Artificial Sequence: Synthetic oligonucleotide
  Target: LAMA2; (+) strand; PAM type: NRG; PAM sequence: CAG
tctcttagtattttgtggaa

SEQ ID NO: 122892 - DNA, 20 bp, Artificial Sequence
  Description of Artificial Sequence: Synthetic oligonucleotide
  Target: LAMA2; (+) strand; PAM type: NRG; PAM sequence: GAG
agtattttgtggaacagcat

SEQ ID NO: 122893 - DNA, 20 bp, Artificial Sequence
  Description of Artificial Sequence: Synthetic oligonucleotide
  Target: LAMA2; (+) strand; PAM type: NRG; PAM sequence: CAG
acagcatgagacatgtcttc

SEQ ID NO: 122894 - DNA, 20 bp, Artificial Sequence
  Description of Artificial Sequence: Synthetic oligonucleotide
  Target: LAMA2; (+) strand; PAM type: NRG; PAM sequence: TAG
agacatgtcttccagttgtg

SEQ ID NO: 122895 - DNA, 20 bp, Artificial Sequence
  Description of Artificial Sequence: Synthetic oligonucleotide
  Target: LAMA2; (+) strand; PAM type: NRG; PAM sequence: AGG
gacatgtcttccagttgtgt

SEQ ID NO: 122896 - DNA, 20 bp, Artificial Sequence
  Description of Artificial Sequence: Synthetic oligonucleotide
  Target: LAMA2; (+) strand; PAM type: NRG; PAM sequence: AAG
gtcttccagttgtgtaggat

SEQ ID NO: 122897 - DNA, 20 bp, Artificial Sequence
  Description of Artificial Sequence: Synthetic oligonucleotide
  Target: LAMA2; (+) strand; PAM type: NRG; PAM sequence: CAG
ccagttgtgtaggataagta

SEQ ID NO: 122898 - DNA, 20 bp, Artificial Sequence
  Description of Artificial Sequence: Synthetic oligonucleotide
  Target: LAMA2; (+) strand; PAM type: NRG; PAM sequence: CAG
gcccactgaacactgcttac

SEQ ID NO: 122899 - DNA, 20 bp, Artificial Sequence
  Description of Artificial Sequence: Synthetic oligonucleotide
  Target: LAMA2; (+) strand; PAM type: NRG; PAM sequence: CAG
cactgaacactgcttaccag

SEQ ID NO: 122900 - DNA, 20 bp, Artificial Sequence
  Description of Artificial Sequence: Synthetic oligonucleotide
  Target: LAMA2; (+) strand; PAM type: NRG; PAM sequence: AAG
gcttaccagcagtttaccac

SEQ ID NO: 122901 - DNA, 20 bp, Artificial Sequence
  Description of Artificial Sequence: Synthetic oligonucleotide
  Target: LAMA2; (+) strand; PAM type: NRG; PAM sequence: CAG
accagcagtttaccacaagc

SEQ ID NO: 122902 - DNA, 20 bp, Artificial Sequence
  Description of Artificial Sequence: Synthetic oligonucleotide
  Target: LAMA2; (+) strand; PAM type: NRG; PAM sequence: CGG
agttataacatcaaaaacat

SEQ ID NO: 122903 - DNA, 20 bp, Artificial Sequence
  Description of Artificial Sequence: Synthetic oligonucleotide
  Target: LAMA2; (+) strand; PAM type: NRG; PAM sequence: GAG
taaatgccttcatgctgtgt

SEQ ID NO: 122904 - DNA, 20 bp, Artificial Sequence
  Description of Artificial Sequence: Synthetic oligonucleotide
  Target: LAMA2; (+) strand; PAM type: NRG; PAM sequence: AAG
atgctgtgtgagcactattg

SEQ ID NO: 122905 - DNA, 20 bp, Artificial Sequence
  Description of Artificial Sequence: Synthetic oligonucleotide
  Target: LAMA2; (+) strand; PAM type: NRG; PAM sequence: CAG
tattgaagtgtgtttctctg

SEQ ID NO: 122906 - DNA, 20 bp, Artificial Sequence
  Description of Artificial Sequence: Synthetic oligonucleotide
  Target: LAMA2; (+) strand; PAM type: NRG; PAM sequence: AGG
attgaagtgtgtttctctgc

SEQ ID NO: 122907 - DNA, 20 bp, Artificial Sequence
  Description of Artificial Sequence: Synthetic oligonucleotide
  Target: LAMA2; (+) strand; PAM type: NRG; PAM sequence: TGG
tgtttctctgcaggtaaact

SEQ ID NO: 122908 - DNA, 20 bp, Artificial Sequence
  Description of Artificial Sequence: Synthetic oligonucleotide
  Target: LAMA2; (+) strand; PAM type: NRG; PAM sequence: CAG
ttctctgcaggtaaacttgg

SEQ ID NO: 122909 - DNA, 20 bp, Artificial Sequence
  Description of Artificial Sequence: Synthetic oligonucleotide
  Target: LAMA2; (+) strand; PAM type: NRG; PAM sequence: TGG
tcttatataactacactcga

SEQ ID NO: 122910 - DNA, 20 bp, Artificial Sequence
  Description of Artificial Sequence: Synthetic oligonucleotide
  Target: LAMA2; (+) strand; PAM type: NRG; PAM sequence: GGG
cttatataactacactcgat

SEQ ID NO: 122911 - DNA, 20 bp, Artificial Sequence
  Description of Artificial Sequence: Synthetic oligonucleotide
  Target: LAMA2; (+) strand; PAM type: NRG; PAM sequence: GAG
tatataactacactcgatgg

SEQ ID NO: 122912 - DNA, 20 bp, Artificial Sequence
  Description of Artificial Sequence: Synthetic oligonucleotide
  Target: LAMA2; (+) strand; PAM type: NRG; PAM sequence: CAG
cgatgggagtattacttaaa

SEQ ID NO: 122913 - DNA, 20 bp, Artificial Sequence
  Description of Artificial Sequence: Synthetic oligonucleotide
  Target: LAMA2; (+) strand; PAM type: NRG; PAM sequence: TGG
ataaaaattgtatcacaatt

SEQ ID NO: 122914 - DNA, 20 bp, Artificial Sequence
  Description of Artificial Sequence: Synthetic oligonucleotide
  Target: LAMA2; (+) strand; PAM type: NRG; PAM sequence: AAG
atttggaatgacgtttatgc

SEQ ID NO: 122915 - DNA, 20 bp, Artificial Sequence
  Description of Artificial Sequence: Synthetic oligonucleotide
  Target: LAMA2; (+) strand; PAM type: NRG; PAM sequence: TGG
tggaatgacgtttatgcaag

SEQ ID NO: 122916 - DNA, 20 bp, Artificial Sequence
  Description of Artificial Sequence: Synthetic oligonucleotide
  Target: LAMA2; (+) strand; PAM type: NRG; PAM sequence: TAG
atgacgtttatgcaagtgga

SEQ ID NO: 122917 - DNA, 20 bp, Artificial Sequence
  Description of Artificial Sequence: Synthetic oligonucleotide
  Target: LAMA2; (+) strand; PAM type: NRG; PAM sequence: CAG
tatgcaagtggatagtctgc

SEQ ID NO: 122918 - DNA, 20 bp, Artificial Sequence
  Description of Artificial Sequence: Synthetic oligonucleotide
  Target: LAMA2; (+) strand; PAM type: NRG; PAM sequence: TAG
atagtctgccagttatttta

SEQ ID NO: 122919 - DNA, 20 bp, Artificial Sequence
  Description of Artificial Sequence: Synthetic oligonucleotide
  Target: LAMA2; (+) strand; PAM type: NRG; PAM sequence: AAG
gtctaaaaaaatgaacctgt

SEQ ID NO: 122920 - DNA, 20 bp, Artificial Sequence
  Description of Artificial Sequence: Synthetic oligonucleotide
  Target: LAMA2; (+) strand; PAM type: NRG; PAM sequence: AGG
tctaaaaaaatgaacctgta

SEQ ID NO: 122921 - DNA, 20 bp, Artificial Sequence
  Description of Artificial Sequence: Synthetic oligonucleotide
  Target: LAMA2; (+) strand; PAM type: NRG; PAM sequence: CAG
aaaatgaacctgtaaggcta

SEQ ID NO: 122922 - DNA, 20 bp, Artificial Sequence
  Description of Artificial Sequence: Synthetic oligonucleotide
  Target: LAMA2; (+) strand; PAM type: NRG; PAM sequence: AAG
aaggctacagtataaaatcc

SEQ ID NO: 122923 - DNA, 20 bp, Artificial Sequence
  Description of Artificial Sequence: Synthetic oligonucleotide
  Target: LAMA2; (+) strand; PAM type: NRG; PAM sequence: TAG
gtataaaatccaagtcttta

SEQ ID NO: 122924 - DNA, 20 bp, Artificial Sequence
  Description of Artificial Sequence: Synthetic oligonucleotide
  Target: LAMA2; (+) strand; PAM type: NRG; PAM sequence: TAG
tctttatagttgtatatttg

SEQ ID NO: 122925 - DNA, 20 bp, Artificial Sequence
  Description of Artificial Sequence: Synthetic oligonucleotide
  Target: LAMA2; (+) strand; PAM type: NRG; PAM sequence: TGG
atttgtagtgaaaacaaccg

SEQ ID NO: 122926 - DNA, 20 bp, Artificial Sequence
  Description of Artificial Sequence: Synthetic oligonucleotide
  Target: LAMA2; (+) strand; PAM type: NRG; PAM sequence: GGG
tttgtagtgaaaacaaccgt

SEQ ID NO: 122927 - DNA, 20 bp, Artificial Sequence
  Description of Artificial Sequence: Synthetic oligonucleotide
  Target: LAMA2; (+) strand; PAM type: NRG; PAM sequence: GGG
ttgtagtgaaaacaaccgtg

SEQ ID NO: 122928 - DNA, 20 bp, Artificial Sequence
  Description of Artificial Sequence: Synthetic oligonucleotide
  Target: LAMA2; (+) strand; PAM type: NRG; PAM sequence: GGG
tgtagtgaaaacaaccgtgg

SEQ ID NO: 122929 - DNA, 20 bp, Artificial Sequence
  Description of Artificial Sequence: Synthetic oligonucleotide
  Target: LAMA2; (+) strand; PAM type: NRG; PAM sequence: AAG
caaccgtgggggaataatat

SEQ ID NO: 122930 - DNA, 20 bp, Artificial Sequence
  Description of Artificial Sequence: Synthetic oligonucleotide
  Target: LAMA2; (+) strand; PAM type: NRG; PAM sequence: TGG
ataatataagcttaatcatt

SEQ ID NO: 122931 - DNA, 20 bp, Artificial Sequence
  Description of Artificial Sequence: Synthetic oligonucleotide
  Target: LAMA2; (+) strand; PAM type: NRG; PAM sequence: TAG
aagcttaatcatttggtgat

SEQ ID NO: 122932 - DNA, 20 bp, Artificial Sequence
  Description of Artificial Sequence: Synthetic oligonucleotide
  Target: LAMA2; (+) strand; PAM type: NRG; PAM sequence: GAG
gtctaccaactattaatgat

SEQ ID NO: 122933 - DNA, 20 bp, Artificial Sequence
  Description of Artificial Sequence: Synthetic oligonucleotide
  Target: LAMA2; (+) strand; PAM type: NRG; PAM sequence: GAG
ctaccaactattaatgatga

SEQ ID NO: 122934 - DNA, 20 bp, Artificial Sequence
  Description of Artificial Sequence: Synthetic oligonucleotide
  Target: LAMA2; (+) strand; PAM type: NRG; PAM sequence: AAG
ctgttctttatttctaaaat

SEQ ID NO: 122935 - DNA, 20 bp, Artificial Sequence
  Description of Artificial Sequence: Synthetic oligonucleotide
  Target: LAMA2; (+) strand; PAM type: NRG; PAM sequence: CAG
ctaaaataagatgtgtaata

SEQ ID NO: 122936 - DNA, 20 bp, Artificial Sequence
  Description of Artificial Sequence: Synthetic oligonucleotide
  Target: LAMA2; (+) strand; PAM type: NRG; PAM sequence: TAG
agatgtgtaatacagctaat

SEQ ID NO: 122937 - DNA, 20 bp, Artificial Sequence
  Description of Artificial Sequence: Synthetic oligonucleotide
  Target: LAMA2; (+) strand; PAM type: NRG; PAM sequence: AAG
ctaattagtcactattttaa

SEQ ID NO: 122938 - DNA, 20 bp, Artificial Sequence
  Description of Artificial Sequence: Synthetic oligonucleotide
  Target: LAMA2; (+) strand; PAM type: NRG; PAM sequence: AGG
taattagtcactattttaaa

SEQ ID NO: 122939 - DNA, 20 bp, Artificial Sequence
  Description of Artificial Sequence: Synthetic oligonucleotide
  Target: LAMA2; (+) strand; PAM type: NRG; PAM sequence: TAG
ttttaaaaggaatttaaata

SEQ ID NO: 122940 - DNA, 20 bp, Artificial Sequence
  Description of Artificial Sequence: Synthetic oligonucleotide
  Target: LAMA2; (+) strand; PAM type: NRG; PAM sequence: TGG
atgcctaattatttacatgt

SEQ ID NO: 122941 - DNA, 20 bp, Artificial Sequence
  Description of Artificial Sequence: Synthetic oligonucleotide
  Target: LAMA2; (+) strand; PAM type: NRG; PAM sequence: TAG
gtgctgttcttaattgctgc

SEQ ID NO: 122942 - DNA, 20 bp, Artificial Sequence
  Description of Artificial Sequence: Synthetic oligonucleotide
  Target: LAMA2; (+) strand; PAM type: NRG; PAM sequence: TGG
tcatctccgcccatctccct

SEQ ID NO: 122943 - DNA, 20 bp, Artificial Sequence
  Description of Artificial Sequence: Synthetic oligonucleotide
  Target: LAMA2; (+) strand; PAM type: NRG; PAM sequence: TAG
cccatctcccttggtgatga

SEQ ID NO: 122944 - DNA, 20 bp, Artificial Sequence
  Description of Artificial Sequence: Synthetic oligonucleotide
  Target: LAMA2; (+) strand; PAM type: NRG; PAM sequence: TGG
gatgatagtcctgcatttca

SEQ ID NO: 122945 - DNA, 20 bp, Artificial Sequence
  Description of Artificial Sequence: Synthetic oligonucleotide
  Target: LAMA2; (+) strand; PAM type: NRG; PAM sequence: TAG
catttcatggcaattttcaa

SEQ ID NO: 122946 - DNA, 20 bp, Artificial Sequence
  Description of Artificial Sequence: Synthetic oligonucleotide
  Target: LAMA2; (+) strand; PAM type: NRG; PAM sequence: CAG
ttcatggcaattttcaatag

SEQ ID NO: 122947 - DNA, 20 bp, Artificial Sequence
  Description of Artificial Sequence: Synthetic oligonucleotide
  Target: LAMA2; (+) strand; PAM type: NRG; PAM sequence: TGG
aattttcaatagcagtttaa

SEQ ID NO: 122948 - DNA, 20 bp, Artificial Sequence
  Description of Artificial Sequence: Synthetic oligonucleotide
  Target: LAMA2; (+) strand; PAM type: NRG; PAM sequence: AAG
aatagcagtttaatggtctt

SEQ ID NO: 122949 - DNA, 20 bp, Artificial Sequence
  Description of Artificial Sequence: Synthetic oligonucleotide
  Target: LAMA2; (+) strand; PAM type: NRG; PAM sequence: TGG
agcagtttaatggtcttaag

SEQ ID NO: 122950 - DNA, 20 bp, Artificial Sequence
  Description of Artificial Sequence: Synthetic oligonucleotide
  Target: LAMA2; (+) strand; PAM type: NRG; PAM sequence: GGG
gcagtttaatggtcttaagt

SEQ ID NO: 122951 - DNA, 20 bp, Artificial Sequence
  Description of Artificial Sequence: Synthetic oligonucleotide
  Target: LAMA2; (+) strand; PAM type: NRG; PAM sequence: TAG
gtttaatggtcttaagtggg

SEQ ID NO: 122952 - DNA, 20 bp, Artificial Sequence
  Description of Artificial Sequence: Synthetic oligonucleotide
  Target: LAMA2; (+) strand; PAM type: NRG; PAM sequence: TAG
gtcttaagtgggtagcataa

SEQ ID NO: 122953 - DNA, 20 bp, Artificial Sequence
  Description of Artificial Sequence: Synthetic oligonucleotide
  Target: LAMA2; (+) strand; PAM type: NRG; PAM sequence: CAG
taagtgggtagcataatagc

SEQ ID NO: 122954 - DNA, 20 bp, Artificial Sequence
  Description of Artificial Sequence: Synthetic oligonucleotide
  Target: LAMA2; (+) strand; PAM type: NRG; PAM sequence: AGG
aagtgggtagcataatagcc

SEQ ID NO: 122955 - DNA, 20 bp, Artificial Sequence
  Description of Artificial Sequence: Synthetic oligonucleotide
  Target: LAMA2; (+) strand; PAM type: NRG; PAM sequence: TGG
acaaaaacaaaaaaactatt

SEQ ID NO: 122956 - DNA, 20 bp, Artificial Sequence
  Description of Artificial Sequence: Synthetic oligonucleotide
  Target: LAMA2; (+) strand; PAM type: NRG; PAM sequence: TGG
aaaaaaactatttggcaaat

SEQ ID NO: 122957 - DNA, 20 bp, Artificial Sequence
  Description of Artificial Sequence: Synthetic oligonucleotide
  Target: LAMA2; (+) strand; PAM type: NRG; PAM sequence: GGG
aaaaaactatttggcaaatt

SEQ ID NO: 122958 - DNA, 20 bp, Artificial Sequence
  Description of Artificial Sequence: Synthetic oligonucleotide
  Target: LAMA2; (+) strand; PAM type: NRG; PAM sequence: GAG
tatttggcaaattgggatat

SEQ ID NO: 122959 - DNA, 20 bp, Artificial Sequence
  Description of Artificial Sequence: Synthetic oligonucleotide
  Target: LAMA2; (+) strand; PAM type: NRG; PAM sequence: GAG
caaattgggatatgagaatt

SEQ ID NO: 122960 - DNA, 20 bp, Artificial Sequence
  Description of Artificial Sequence: Synthetic oligonucleotide
  Target: LAMA2; (+) strand; PAM type: NRG; PAM sequence: AGG
aaattgggatatgagaattg

SEQ ID NO: 122961 - DNA, 20 bp, Artificial Sequence
  Description of Artificial Sequence: Synthetic oligonucleotide
  Target: LAMA2; (+) strand; PAM type: NRG; PAM sequence: TAG
agaattgaggccaaaacttt

SEQ ID NO: 122962 - DNA, 20 bp, Artificial Sequence
  Description of Artificial Sequence: Synthetic oligonucleotide
  Target: LAMA2; (+) strand; PAM type: NRG; PAM sequence: TGG
tgattcatattcccatttgt

SEQ ID NO: 122963 - DNA, 20 bp, Artificial Sequence
  Description of Artificial Sequence: Synthetic oligonucleotide
  Target: LAMA2; (+) strand; PAM type: NRG; PAM sequence: GGG
gattcatattcccatttgtt

SEQ ID NO: 122964 - DNA, 20 bp, Artificial Sequence
  Description of Artificial Sequence: Synthetic oligonucleotide
  Target: LAMA2; (+) strand; PAM type: NRG; PAM sequence: TGG
catattcccatttgttgggt

SEQ ID NO: 122965 - DNA, 20 bp, Artificial Sequence
  Description of Artificial Sequence: Synthetic oligonucleotide
  Target: LAMA2; (+) strand; PAM type: NRG; PAM sequence: TAG
attcccatttgttgggttgg

SEQ ID NO: 122966 - DNA, 20 bp, Artificial Sequence
  Description of Artificial Sequence: Synthetic oligonucleotide
  Target: LAMA2; (+) strand; PAM type: NRG; PAM sequence: AGG
ttcccatttgttgggttggt

SEQ ID NO: 122967 - DNA, 20 bp, Artificial Sequence
  Description of Artificial Sequence: Synthetic oligonucleotide
  Target: LAMA2; (+) strand; PAM type: NRG; PAM sequence: CAG
tccaaaataaatataataat

SEQ ID NO: 122968 - DNA, 20 bp, Artificial Sequence
  Description of Artificial Sequence: Synthetic oligonucleotide
  Target: LAMA2; (+) strand; PAM type: NRG; PAM sequence: GAG
caaaataaatataataatca

SEQ ID NO: 122969 - DNA, 20 bp, Artificial Sequence
  Description of Artificial Sequence: Synthetic oligonucleotide
  Target: LAMA2; (+) strand; PAM type: NRG; PAM sequence: GAG
aaataaatataataatcaga

SEQ ID NO: 122970 - DNA, 20 bp, Artificial Sequence
  Description of Artificial Sequence: Synthetic oligonucleotide
  Target: LAMA2; (+) strand; PAM type: NRG; PAM sequence: TAG
atcagagagaacaccaactg

SEQ ID NO: 122971 - DNA, 20 bp, Artificial Sequence
  Description of Artificial Sequence: Synthetic oligonucleotide
  Target: LAMA2; (+) strand; PAM type: NRG; PAM sequence: AGG
tcagagagaacaccaactgt

SEQ ID NO: 122972 - DNA, 20 bp, Artificial Sequence
  Description of Artificial Sequence: Synthetic oligonucleotide
  Target: LAMA2; (+) strand; PAM type: NRG; PAM sequence: TAG
agaacaccaactgtaggtac

SEQ ID NO: 122973 - DNA, 20 bp, Artificial Sequence
  Description of Artificial Sequence: Synthetic oligonucleotide
  Target: LAMA2; (+) strand; PAM type: NRG; PAM sequence: TAG
ccaactgtaggtactagttt

SEQ ID NO: 122974 - DNA, 20 bp, Artificial Sequence
  Description of Artificial Sequence: Synthetic oligonucleotide
  Target: LAMA2; (+) strand; PAM type: NRG; PAM sequence: TGG
gttttagcaactgaaacaac

SEQ ID NO: 122975 - DNA, 20 bp, Artificial Sequence
  Description of Artificial Sequence: Synthetic oligonucleotide
  Target: LAMA2; (+) strand; PAM type: NRG; PAM sequence: GAG
caactggcgttaaaatcact

SEQ ID NO: 122976 - DNA, 20 bp, Artificial Sequence
  Description of Artificial Sequence: Synthetic oligonucleotide
  Target: LAMA2; (+) strand; PAM type: NRG; PAM sequence: GAG
cttctgttacatgaatacct

SEQ ID NO: 122977 - DNA, 20 bp, Artificial Sequence
  Description of Artificial Sequence: Synthetic oligonucleotide
  Target: LAMA2; (+) strand; PAM type: NRG; PAM sequence: TGG
atgaatacctgagtattatg

SEQ ID NO: 122978 - DNA, 20 bp, Artificial Sequence
  Description of Artificial Sequence: Synthetic oligonucleotide
  Target: LAMA2; (+) strand; PAM type: NRG; PAM sequence: TGG
ttatgtggctacttctgaaa

SEQ ID NO: 122979 - DNA, 20 bp, Artificial Sequence
  Description of Artificial Sequence: Synthetic oligonucleotide
  Target: LAMA2; (+) strand; PAM type: NRG; PAM sequence: GAG
atgtggctacttctgaaatg

SEQ ID NO: 122980 - DNA, 20 bp, Artificial Sequence
  Description of Artificial Sequence: Synthetic oligonucleotide
  Target: LAMA2; (+) strand; PAM type: NRG; PAM sequence: CAG
tacttctgaaatggagtatg

SEQ ID NO: 122981 - DNA, 20 bp, Artificial Sequence
  Description of Artificial Sequence: Synthetic oligonucleotide
  Target: LAMA2; (+) strand; PAM type: NRG; PAM sequence: TGG
gtatgcagtgctcttataat

SEQ ID NO: 122982 - DNA, 20 bp, Artificial Sequence
  Description of Artificial Sequence: Synthetic oligonucleotide
  Target: LAMA2; (+) strand; PAM type: NRG; PAM sequence: GGG
tatgcagtgctcttataatt

SEQ ID NO: 122983 - DNA, 20 bp, Artificial Sequence
  Description of Artificial Sequence: Synthetic oligonucleotide
  Target: LAMA2; (+) strand; PAM type: NRG; PAM sequence: CAG
gctcttataattgggcattt

SEQ ID NO: 122984 - DNA, 20 bp, Artificial Sequence
  Description of Artificial Sequence: Synthetic oligonucleotide
  Target: LAMA2; (+) strand; PAM type: NRG; PAM sequence: CAG
atttcagttgaacactgctt

SEQ ID NO: 122985 - DNA, 20 bp, Artificial Sequence
  Description of Artificial Sequence: Synthetic oligonucleotide
  Target: LAMA2; (+) strand; PAM type: NRG; PAM sequence: AAG
agttgaacactgcttcagta

SEQ ID NO: 122986 - DNA, 20 bp, Artificial Sequence
  Description of Artificial Sequence: Synthetic oligonucleotide
  Target: LAMA2; (+) strand; PAM type: NRG; PAM sequence: TGG
cactgcttcagtaaagtaac

SEQ ID NO: 122987 - DNA, 20 bp, Artificial Sequence
  Description of Artificial Sequence: Synthetic oligonucleotide
  Target: LAMA2; (+) strand; PAM type: NRG; PAM sequence: AAG
agtaaagtaactggcatttc

SEQ ID NO: 122988 - DNA, 20 bp, Artificial Sequence
  Description of Artificial Sequence: Synthetic oligonucleotide
  Target: LAMA2; (+) strand; PAM type: NRG; PAM sequence: TAG
catttcaagtcttccttctg

SEQ ID NO: 122989 - DNA, 20 bp, Artificial Sequence
  Description of Artificial Sequence: Synthetic oligonucleotide
  Target: LAMA2; (+) strand; PAM type: NRG; PAM sequence: AAG
tattcaatgattgctttttt

SEQ ID NO: 122990 - DNA, 20 bp, Artificial Sequence
  Description of Artificial Sequence: Synthetic oligonucleotide
  Target: LAMA2; (+) strand; PAM type: NRG; PAM sequence: TAG
caatgattgcttttttaagt

SEQ ID NO: 122991 - DNA, 20 bp, Artificial Sequence
  Description of Artificial Sequence: Synthetic oligonucleotide
  Target: LAMA2; (+) strand; PAM type: NRG; PAM sequence: TGG
tgcttttttaagttagaatc

SEQ ID NO: 122992 - DNA, 20 bp, Artificial Sequence
  Description of Artificial Sequence: Synthetic oligonucleotide
  Target: LAMA2; (+) strand; PAM type: NRG; PAM sequence: TAG
taagttagaatctggttgca

SEQ ID NO: 122993 - DNA, 20 bp, Artificial Sequence
  Description of Artificial Sequence: Synthetic oligonucleotide
  Target: LAMA2; (+) strand; PAM type: NRG; PAM sequence: TGG
tctggttgcatagtgctcca

SEQ ID NO: 122994 - DNA, 20 bp, Artificial Sequence
  Description of Artificial Sequence: Synthetic oligonucleotide
  Target: LAMA2; (+) strand; PAM type: NRG; PAM sequence: CAG
ctccatggttctttcctatg

SEQ ID NO: 122995 - DNA, 20 bp, Artificial Sequence
  Description of Artificial Sequence: Synthetic oligonucleotide
  Target: LAMA2; (+) strand; PAM type: NRG; PAM sequence: TGG
catggttctttcctatgcag

SEQ ID NO: 122996 - DNA, 20 bp, Artificial Sequence
  Description of Artificial Sequence: Synthetic oligonucleotide
  Target: LAMA2; (+) strand; PAM type: NRG; PAM sequence: CAG
tcctatgcagtggtgtttct

SEQ ID NO: 122997 - DNA, 20 bp, Artificial Sequence
  Description of Artificial Sequence: Synthetic oligonucleotide
  Target: LAMA2; (+) strand; PAM type: NRG; PAM sequence: TGG
ggtgtttctcagtgttgatg

SEQ ID NO: 122998 - DNA, 20 bp, Artificial Sequence
  Description of Artificial Sequence: Synthetic oligonucleotide
  Target: LAMA2; (+) strand; PAM type: NRG; PAM sequence: GAG
tgtttctcagtgttgatgtg

SEQ ID NO: 122999 - DNA, 20 bp, Artificial Sequence
  Description of Artificial Sequence: Synthetic oligonucleotide
  Target: LAMA2; (+) strand; PAM type: NRG; PAM sequence: AAG
ttctcagtgttgatgtggag

SEQ ID NO: 123000 - DNA, 20 bp, Artificial Sequence
  Description of Artificial Sequence: Synthetic oligonucleotide
  Target: LAMA2; (+) strand; PAM type: NRG; PAM sequence: CAG
cagtgttgatgtggagaagc

SEQ ID NO: 123001 - DNA, 20 bp, Artificial Sequence
  Description of Artificial Sequence: Synthetic oligonucleotide
  Target: LAMA2; (+) strand; PAM type: NRG; PAM sequence: AGG
agtgttgatgtggagaagcc

SEQ ID NO: 123002 - DNA, 20 bp, Artificial Sequence
  Description of Artificial Sequence: Synthetic oligonucleotide
  Target: LAMA2; (+) strand; PAM type: NRG; PAM sequence: GAG
tgttgatgtggagaagccag

SEQ ID NO: 123003 - DNA, 20 bp, Artificial Sequence
  Description of Artificial Sequence: Synthetic oligonucleotide
  Target: LAMA2; (+) strand; PAM type: NRG; PAM sequence: GAG
aggagacatcctacaactct

SEQ ID NO: 123004 - DNA, 20 bp, Artificial Sequence
  Description of Artificial Sequence: Synthetic oligonucleotide
  Target: LAMA2; (+) strand; PAM type: NRG; PAM sequence: AAG
agacatcctacaactctgag

SEQ ID NO: 123005 - DNA, 20 bp, Artificial Sequence
  Description of Artificial Sequence: Synthetic oligonucleotide
  Target: LAMA2; (+) strand; PAM type: NRG; PAM sequence: TGG
ctctgagaagcatttgatgt

SEQ ID NO: 123006 - DNA, 20 bp, Artificial Sequence
  Description of Artificial Sequence: Synthetic oligonucleotide
  Target: LAMA2; (+) strand; PAM type: NRG; PAM sequence: CAG
tgagaagcatttgatgttgg

SEQ ID NO: 123007 - DNA, 20 bp, Artificial Sequence
  Description of Artificial Sequence: Synthetic oligonucleotide
  Target: LAMA2; (+) strand; PAM type: NRG; PAM sequence: CAG
gaagcatttgatgttggcag

SEQ ID NO: 123008 - DNA, 20 bp, Artificial Sequence
  Description of Artificial Sequence: Synthetic oligonucleotide
  Target: LAMA2; (+) strand; PAM type: NRG; PAM sequence: TGG
gcatttgatgttggcagcag

SEQ ID NO: 123009 - DNA, 20 bp, Artificial Sequence
  Description of Artificial Sequence: Synthetic oligonucleotide
  Target: LAMA2; (+) strand; PAM type: NRG; PAM sequence: GAG
atgttggcagcagtggctgt

SEQ ID NO: 123010 - DNA, 20 bp, Artificial Sequence
  Description of Artificial Sequence: Synthetic oligonucleotide
  Target: LAMA2; (+) strand; PAM type: NRG; PAM sequence: AGG
tgttggcagcagtggctgtg

SEQ ID NO: 123011 - DNA, 20 bp, Artificial Sequence
  Description of Artificial Sequence: Synthetic oligonucleotide
  Target: LAMA2; (+) strand; PAM type: NRG; PAM sequence: TAG
ggcagcagtggctgtgaggt

SEQ ID NO: 123012 - DNA, 20 bp, Artificial Sequence
  Description of Artificial Sequence: Synthetic oligonucleotide
  Target: LAMA2; (+) strand; PAM type: NRG; PAM sequence: TAG
gtgaggttagcccatgaact

SEQ ID NO: 123013 - DNA, 20 bp, Artificial Sequence
  Description of Artificial Sequence: Synthetic oligonucleotide
  Target: LAMA2; (+) strand; PAM type: NRG; PAM sequence: AGG
tgaggttagcccatgaactt

SEQ ID NO: 123014 - DNA, 20 bp, Artificial Sequence
  Description of Artificial Sequence: Synthetic oligonucleotide
  Target: LAMA2; (+) strand; PAM type: NRG; PAM sequence: GGG
gaggttagcccatgaactta

SEQ ID NO: 123015 - DNA, 20 bp, Artificial Sequence
  Description of Artificial Sequence: Synthetic oligonucleotide
  Target: LAMA2; (+) strand; PAM type: NRG; PAM sequence: TAG
ttagcccatgaacttagggc

SEQ ID NO: 123016 - DNA, 20 bp, Artificial Sequence
  Description of Artificial Sequence: Synthetic oligonucleotide
  Target: LAMA2; (+) strand; PAM type: NRG; PAM sequence: GAG
agcccatgaacttagggcta

SEQ ID NO: 123017 - DNA, 20 bp, Artificial Sequence
  Description of Artificial Sequence: Synthetic oligonucleotide
  Target: LAMA2; (+) strand; PAM type: NRG; PAM sequence: AGG
gcccatgaacttagggctag

SEQ ID NO: 123018 - DNA, 20 bp, Artificial Sequence
  Description of Artificial Sequence: Synthetic oligonucleotide
  Target: LAMA2; (+) strand; PAM type: NRG; PAM sequence: GAG
atgaacttagggctagaggt

SEQ ID NO: 123019 - DNA, 20 bp, Artificial Sequence
  Description of Artificial Sequence: Synthetic oligonucleotide
  Target: LAMA2; (+) strand; PAM type: NRG; PAM sequence: CAG
tgagtcttaaccttccaatt

SEQ ID NO: 123020 - DNA, 20 bp, Artificial Sequence
  Description of Artificial Sequence: Synthetic oligonucleotide
  Target: LAMA2; (+) strand; PAM type: NRG; PAM sequence: AAG
tcttttccatctgaacattc

SEQ ID NO: 123021 - DNA, 20 bp, Artificial Sequence
  Description of Artificial Sequence: Synthetic oligonucleotide
  Target: LAMA2; (+) strand; PAM type: NRG; PAM sequence: TGG
atctgaacattcaagtcaaa

SEQ ID NO: 123022 - DNA, 20 bp, Artificial Sequence
  Description of Artificial Sequence: Synthetic oligonucleotide
  Target: LAMA2; (+) strand; PAM type: NRG; PAM sequence: GGG
tctgaacattcaagtcaaat

SEQ ID NO: 123023 - DNA, 20 bp, Artificial Sequence
  Description of Artificial Sequence: Synthetic oligonucleotide
  Target: LAMA2; (+) strand; PAM type: NRG; PAM sequence: TGG
aagtcaaatgggaaacctgt

SEQ ID NO: 123024 - DNA, 20 bp, Artificial Sequence
  Description of Artificial Sequence: Synthetic oligonucleotide
  Target: LAMA2; (+) strand; PAM type: NRG; PAM sequence: CAG
tgggaaacctgttggccctc

SEQ ID NO: 123025 - DNA, 20 bp, Artificial Sequence
  Description of Artificial Sequence: Synthetic oligonucleotide
  Target: LAMA2; (+) strand; PAM type: NRG; PAM sequence: TGG
aaacctgttggccctccagc

SEQ ID NO: 123026 - DNA, 20 bp, Artificial Sequence
  Description of Artificial Sequence: Synthetic oligonucleotide
  Target: LAMA2; (+) strand; PAM type: NRG; PAM sequence: TGG
gatctttccactgttttaac

SEQ ID NO: 123027 - DNA, 20 bp, Artificial Sequence
  Description of Artificial Sequence: Synthetic oligonucleotide
  Target: LAMA2; (+) strand; PAM type: NRG; PAM sequence: TGG
ctgttttaactggaatgaat

SEQ ID NO: 123028 - DNA, 20 bp, Artificial Sequence
  Description of Artificial Sequence: Synthetic oligonucleotide
  Target: LAMA2; (+) strand; PAM type: NRG; PAM sequence: AAG
ttaactggaatgaattggat

SEQ ID NO: 123029 - DNA, 20 bp, Artificial Sequence
  Description of Artificial Sequence: Synthetic oligonucleotide
  Target: LAMA2; (+) strand; PAM type: NRG; PAM sequence: AAG
gaatgaattggataagttat

SEQ ID NO: 123030 - DNA, 20 bp, Artificial Sequence
  Description of Artificial Sequence: Synthetic oligonucleotide
  Target: LAMA2; (+) strand; PAM type: NRG; PAM sequence: AGG
aatgaattggataagttata

SEQ ID NO: 123031 - DNA, 20 bp, Artificial Sequence
  Description of Artificial Sequence: Synthetic oligonucleotide
  Target: LAMA2; (+) strand; PAM type: NRG; PAM sequence: CAG
gaattggataagttataagg

SEQ ID NO: 123032 - DNA, 20 bp, Artificial Sequence
  Description of Artificial Sequence: Synthetic oligonucleotide
  Target: LAMA2; (+) strand; PAM type: NRG; PAM sequence: TGG
tggataagttataaggcaga

SEQ ID NO: 123033 - DNA, 20 bp, Artificial Sequence
  Description of Artificial Sequence: Synthetic oligonucleotide
  Target: LAMA2; (+) strand; PAM type: NRG; PAM sequence: AAG
taagttataaggcagatggt

SEQ ID NO: 123034 - DNA, 20 bp, Artificial Sequence
  Description of Artificial Sequence: Synthetic oligonucleotide
  Target: LAMA2; (+) strand; PAM type: NRG; PAM sequence: TGG
tataaggcagatggtaagat

SEQ ID NO: 123035 - DNA, 20 bp, Artificial Sequence
  Description of Artificial Sequence: Synthetic oligonucleotide
  Target: LAMA2; (+) strand; PAM type: NRG; PAM sequence: TGG
gatggtaagattggatctga

SEQ ID NO: 123036 - DNA, 20 bp, Artificial Sequence
  Description of Artificial Sequence: Synthetic oligonucleotide
  Target: LAMA2; (+) strand; PAM type: NRG; PAM sequence: GGG
atggtaagattggatctgat

SEQ ID NO: 123037 - DNA, 20 bp, Artificial Sequence
  Description of Artificial Sequence: Synthetic oligonucleotide
  Target: LAMA2; (+) strand; PAM type: NRG; PAM sequence: TGG
taagattggatctgatggga

SEQ ID NO: 123038 - DNA, 20 bp, Artificial Sequence
  Description of Artificial Sequence: Synthetic oligonucleotide
  Target: LAMA2; (+) strand; PAM type: NRG; PAM sequence: GAG
agattggatctgatgggatg

SEQ ID NO: 123039 - DNA, 20 bp, Artificial Sequence
  Description of Artificial Sequence: Synthetic oligonucleotide
  Target: LAMA2; (+) strand; PAM type: NRG; PAM sequence: TGG
ggatctgatgggatggagtt

SEQ ID NO: 123040 - DNA, 20 bp, Artificial Sequence
  Description of Artificial Sequence: Synthetic oligonucleotide
  Target: LAMA2; (+) strand; PAM type: NRG; PAM sequence: AAG
tgatgggatggagtttggtg

SEQ ID NO: 123041 - DNA, 20 bp, Artificial Sequence
  Description of Artificial Sequence: Synthetic oligonucleotide
  Target: LAMA2; (+) strand; PAM type: NRG; PAM sequence: TGG
tgggatggagtttggtgaag

SEQ ID NO: 123042 - DNA, 20 bp, Artificial Sequence
  Description of Artificial Sequence: Synthetic oligonucleotide
  Target: LAMA2; (+) strand; PAM type: NRG; PAM sequence: AAG
ttggtgaagtggaaactttt

SEQ ID NO: 123043 - DNA, 20 bp, Artificial Sequence
  Description of Artificial Sequence: Synthetic oligonucleotide
  Target: LAMA2; (+) strand; PAM type: NRG; PAM sequence: TAG
aagtggaaacttttaagcat

SEQ ID NO: 123044 - DNA, 20 bp, Artificial Sequence
  Description of Artificial Sequence: Synthetic oligonucleotide
  Target: LAMA2; (+) strand; PAM type: NRG; PAM sequence: AGG
agtggaaacttttaagcatt

SEQ ID NO: 123045 - DNA, 20 bp, Artificial Sequence
  Description of Artificial Sequence: Synthetic oligonucleotide
  Target: LAMA2; (+) strand; PAM type: NRG; PAM sequence: GAG
aacttttaagcattaggttt

SEQ ID NO: 123046 - DNA, 20 bp, Artificial Sequence
  Description of Artificial Sequence: Synthetic oligonucleotide
  Target: LAMA2; (+) strand; PAM type: NRG; PAM sequence: TAG
tttaagcattaggtttgaga

SEQ ID NO: 123047 - DNA, 20 bp, Artificial Sequence
  Description of Artificial Sequence: Synthetic oligonucleotide
  Target: LAMA2; (+) strand; PAM type: NRG; PAM sequence: TAG
agcattaggtttgagatagc

SEQ ID NO: 123048 - DNA, 20 bp, Artificial Sequence
  Description of Artificial Sequence: Synthetic oligonucleotide
  Target: LAMA2; (+) strand; PAM type: NRG; PAM sequence: AGG
gcattaggtttgagatagct

SEQ ID NO: 123049 - DNA, 20 bp, Artificial Sequence
  Description of Artificial Sequence: Synthetic oligonucleotide
  Target: LAMA2; (+) strand; PAM type: NRG; PAM sequence: GGG
cattaggtttgagatagcta

SEQ ID NO: 123050 - DNA, 20 bp, Artificial Sequence
  Description of Artificial Sequence: Synthetic oligonucleotide
  Target: LAMA2; (+) strand; PAM type: NRG; PAM sequence: GAG
ttaggtttgagatagctagg

SEQ ID NO: 123051 - DNA, 20 bp, Artificial Sequence
  Description of Artificial Sequence: Synthetic oligonucleotide
  Target: LAMA2; (+) strand; PAM type: NRG; PAM sequence: TGG
ttctttcattctctttgtgc

SEQ ID NO: 123052 - DNA, 20 bp, Artificial Sequence
  Description of Artificial Sequence: Synthetic oligonucleotide
  Target: LAMA2; (+) strand; PAM type: NRG; PAM sequence: TGG
tttccttttttaaaatccca

SEQ ID NO: 123053 - DNA, 20 bp, Artificial Sequence
  Description of Artificial Sequence: Synthetic oligonucleotide
  Target: LAMA2; (+) strand; PAM type: NRG; PAM sequence: TAG
ttgtcctcccattctacaaa

SEQ ID NO: 123054 - DNA, 20 bp, Artificial Sequence
  Description of Artificial Sequence: Synthetic oligonucleotide
  Target: LAMA2; (+) strand; PAM type: NRG; PAM sequence: AAG
acaaatagaacatgaaattg

SEQ ID NO: 123055 - DNA, 20 bp, Artificial Sequence
  Description of Artificial Sequence: Synthetic oligonucleotide
  Target: LAMA2; (+) strand; PAM type: NRG; PAM sequence: CAG
aaaaaaaaaaaaactaatta

SEQ ID NO: 123056 - DNA, 20 bp, Artificial Sequence
  Description of Artificial Sequence: Synthetic oligonucleotide
  Target: LAMA2; (+) strand; PAM type: NRG; PAM sequence: TAG
tactatgtacttactacaat

SEQ ID NO: 123057 - DNA, 20 bp, Artificial Sequence
  Description of Artificial Sequence: Synthetic oligonucleotide
  Target: LAMA2; (+) strand; PAM type: NRG; PAM sequence: AAG
gaaactatatataaacaaaa

SEQ ID NO: 123058 - DNA, 20 bp, Artificial Sequence
  Description of Artificial Sequence: Synthetic oligonucleotide
  Target: LAMA2; (+) strand; PAM type: NRG; PAM sequence: GAG
aactatatataaacaaaaaa

SEQ ID NO: 123059 - DNA, 20 bp, Artificial Sequence
  Description of Artificial Sequence: Synthetic oligonucleotide
  Target: LAMA2; (+) strand; PAM type: NRG; PAM sequence: GAG
ctatatataaacaaaaaaga

SEQ ID NO: 123060 - DNA, 20 bp, Artificial Sequence
  Description of Artificial Sequence: Synthetic oligonucleotide
  Target: LAMA2; (+) strand; PAM type: NRG; PAM sequence: TGG
catcaatccacatgcaaaat

SEQ ID NO: 123061 - DNA, 20 bp, Artificial Sequence
  Description of Artificial Sequence: Synthetic oligonucleotide
  Target: LAMA2; (+) strand; PAM type: NRG; PAM sequence: GAG
atccacatgcaaaattggtt

SEQ ID NO: 123062 - DNA, 20 bp, Artificial Sequence
  Description of Artificial Sequence: Synthetic oligonucleotide
  Target: LAMA2; (+) strand; PAM type: NRG; PAM sequence: AAG
aaaattggttgagtaccttg

SEQ ID NO: 123063 - DNA, 20 bp, Artificial Sequence
  Description of Artificial Sequence: Synthetic oligonucleotide
  Target: LAMA2; (+) strand; PAM type: NRG; PAM sequence: TAG
agtaccttgaagatttgtaa

SEQ ID NO: 123064 - DNA, 20 bp, Artificial Sequence
  Description of Artificial Sequence: Synthetic oligonucleotide
  Target: LAMA2; (+) strand; PAM type: NRG; PAM sequence: TAG
tgaagatttgtaatagtata

SEQ ID NO: 123065 - DNA, 20 bp, Artificial Sequence
  Description of Artificial Sequence: Synthetic oligonucleotide
  Target: LAMA2; (+) strand; PAM type: NRG; PAM sequence: GAG
aagatttgtaatagtatata

SEQ ID NO: 123066 - DNA, 20 bp, Artificial Sequence
  Description of Artificial Sequence: Synthetic oligonucleotide
  Target: LAMA2; (+) strand; PAM type: NRG; PAM sequence: AAG
atttgtaatagtatatagag

SEQ ID NO: 123067 - DNA, 20 bp, Artificial Sequence
  Description of Artificial Sequence: Synthetic oligonucleotide
  Target: LAMA2; (+) strand; PAM type: NRG; PAM sequence: AAG
tatttttcttaactatttaa

SEQ ID NO: 123068 - DNA, 20 bp, Artificial Sequence
  Description of Artificial Sequence: Synthetic oligonucleotide
  Target: LAMA2; (+) strand; PAM type: NRG; PAM sequence: AAG
tattctgcattctcaattaa

SEQ ID NO: 123069 - DNA, 20 bp, Artificial Sequence
  Description of Artificial Sequence: Synthetic oligonucleotide
  Target: LAMA2; (+) strand; PAM type: NRG; PAM sequence: AAG
tttttcttttattccttttt

SEQ ID NO: 123070 - DNA, 20 bp, Artificial Sequence
  Description of Artificial Sequence: Synthetic oligonucleotide
  Target: LAMA2; (+) strand; PAM type: NRG; PAM sequence: TGG
atatgacctattaacctcaa

SEQ ID NO: 123071 - DNA, 20 bp, Artificial Sequence
  Description of Artificial Sequence: Synthetic oligonucleotide
  Target: LAMA2; (+) strand; PAM type: NRG; PAM sequence: GAG
atgacctattaacctcaatg

SEQ ID NO: 123072 - DNA, 20 bp, Artificial Sequence
  Description of Artificial Sequence: Synthetic oligonucleotide
  Target: LAMA2; (+) strand; PAM type: NRG; PAM sequence: AAG
cctattaacctcaatggaga

SEQ ID NO: 123073 - DNA, 20 bp, Artificial Sequence
  Description of Artificial Sequence: Synthetic oligonucleotide
  Target: LAMA2; (+) strand; PAM type: NRG; PAM sequence: GAG
tattaacctcaatggagaaa

SEQ ID NO: 123074 - DNA, 20 bp, Artificial Sequence
  Description of Artificial Sequence: Synthetic oligonucleotide
  Target: LAMA2; (+) strand; PAM type: NRG; PAM sequence: AGG
attaacctcaatggagaaag

SEQ ID NO: 123075 - DNA, 20 bp, Artificial Sequence
  Description of Artificial Sequence: Synthetic oligonucleotide
  Target: LAMA2; (+) strand; PAM type: NRG; PAM sequence: CAG
gaggctccctttgtttgctt

SEQ ID NO: 123076 - DNA, 20 bp, Artificial Sequence
  Description of Artificial Sequence: Synthetic oligonucleotide
  Target: LAMA2; (+) strand; PAM type: NRG; PAM sequence: AGG
aggctccctttgtttgcttc

SEQ ID NO: 123077 - DNA, 20 bp, Artificial Sequence
  Description of Artificial Sequence: Synthetic oligonucleotide
  Target: LAMA2; (+) strand; PAM type: NRG; PAM sequence: CAG
tcaggacttacatattgtta

SEQ ID NO: 123078 - DNA, 20 bp, Artificial Sequence
  Description of Artificial Sequence: Synthetic oligonucleotide
  Target: LAMA2; (+) strand; PAM type: NRG; PAM sequence: TAG
gacttacatattgttacagt

SEQ ID NO: 123079 - DNA, 20 bp, Artificial Sequence
  Description of Artificial Sequence: Synthetic oligonucleotide
  Target: LAMA2; (+) strand; PAM type: NRG; PAM sequence: TAG
atattgttacagttagtcct

SEQ ID NO: 123080 - DNA, 20 bp, Artificial Sequence
  Description of Artificial Sequence: Synthetic oligonucleotide
  Target: LAMA2; (+) strand; PAM type: NRG; PAM sequence: AGG
tattgttacagttagtcctt

SEQ ID NO: 123081 - DNA, 20 bp, Artificial Sequence
  Description of Artificial Sequence: Synthetic oligonucleotide
  Target: LAMA2; (+) strand; PAM type: NRG; PAM sequence: GAG
agtccttaggtaaatgaaat

SEQ ID NO: 123082 - DNA, 20 bp, Artificial Sequence
  Description of Artificial Sequence: Synthetic oligonucleotide
  Target: LAMA2; (+) strand; PAM type: NRG; PAM sequence: AAG
ccttaggtaaatgaaatgag

SEQ ID NO: 123083 - DNA, 20 bp, Artificial Sequence
  Description of Artificial Sequence: Synthetic oligonucleotide
  Target: LAMA2; (+) strand; PAM type: NRG; PAM sequence: GAG
ttaggtaaatgaaatgagaa

SEQ ID NO: 123084 - DNA, 20 bp, Artificial Sequence
  Description of Artificial Sequence: Synthetic oligonucleotide
  Target: LAMA2; (+) strand; PAM type: NRG; PAM sequence: CAG
aaatgagaagagcttcacat

SEQ ID NO: 123085 - DNA, 20 bp, Artificial Sequence
  Description of Artificial Sequence: Synthetic oligonucleotide
  Target: LAMA2; (+) strand; PAM type: NRG; PAM sequence: TAG
gaagagcttcacatcagcac

SEQ ID NO: 123086 - DNA, 20 bp, Artificial Sequence
  Description of Artificial Sequence: Synthetic oligonucleotide
  Target: LAMA2; (+) strand; PAM type: NRG; PAM sequence: TGG
tcagcactagttcttcccca

SEQ ID NO: 123087 - DNA, 20 bp, Artificial Sequence
  Description of Artificial Sequence: Synthetic oligonucleotide
  Target: LAMA2; (+) strand; PAM type: NRG; PAM sequence: TAG
agttcttccccatggaattt

SEQ ID NO: 123088 - DNA, 20 bp, Artificial Sequence
  Description of Artificial Sequence: Synthetic oligonucleotide
  Target: LAMA2; (+) strand; PAM type: NRG; PAM sequence: AAG
tactgaatgtgtataattat

SEQ ID NO: 123089 - DNA, 20 bp, Artificial Sequence
  Description of Artificial Sequence: Synthetic oligonucleotide
  Target: LAMA2; (+) strand; PAM type: NRG; PAM sequence: GAG
ttcttttttttttttttttt

SEQ ID NO: 123090 - DNA, 20 bp, Artificial Sequence
  Description of Artificial Sequence: Synthetic oligonucleotide
  Target: LAMA2; (+) strand; PAM type: NRG; PAM sequence: CAG
ttttttttttttttttgaga

SEQ ID NO: 123091 - DNA, 20 bp, Artificial Sequence
  Description of Artificial Sequence: Synthetic oligonucleotide
  Target: LAMA2; (+) strand; PAM type: NRG; PAM sequence: AGG
tttttttttttttttgagac

SEQ ID NO: 123092 - DNA, 20 bp, Artificial Sequence
  Description of Artificial Sequence: Synthetic oligonucleotide
  Target: LAMA2; (+) strand; PAM type: NRG; PAM sequence: CAG
caggctcttactccgttgcc

SEQ ID NO: 123093 - DNA, 20 bp, Artificial Sequence
  Description of Artificial Sequence: Synthetic oligonucleotide
  Target: LAMA2; (+) strand; PAM type: NRG; PAM sequence: AGG
aggctcttactccgttgccc

SEQ ID NO: 123094 - DNA, 20 bp, Artificial Sequence
  Description of Artificial Sequence: Synthetic oligonucleotide
  Target: LAMA2; (+) strand; PAM type: NRG; PAM sequence: AAG
ttactccgttgcccaggctg

SEQ ID NO: 123095 - DNA, 20 bp, Artificial Sequence
  Description of Artificial Sequence: Synthetic oligonucleotide
  Target: LAMA2; (+) strand; PAM type: NRG; PAM sequence: CAG
ccgttgcccaggctgaagtg

SEQ ID NO: 123096 - DNA, 20 bp, Artificial Sequence
  Description of Artificial Sequence: Synthetic oligonucleotide
  Target: LAMA2; (+) strand; PAM type: NRG; PAM sequence: TGG
ttgcccaggctgaagtgcag

SEQ ID NO: 123097 - DNA, 20 bp, Artificial Sequence
  Description of Artificial Sequence: Synthetic oligonucleotide
  Target: LAMA2; (+) strand; PAM type: NRG; PAM sequence: CAG
cccaggctgaagtgcagtgg

SEQ ID NO: 123098 - DNA, 20 bp, Artificial Sequence
  Description of Artificial Sequence: Synthetic oligonucleotide
  Target: LAMA2; (+) strand; PAM type: NRG; PAM sequence: AGG
ccaggctgaagtgcagtggc

SEQ ID NO: 123099 - DNA, 20 bp, Artificial Sequence
  Description of Artificial Sequence: Synthetic oligonucleotide
  Target: LAMA2; (+) strand; PAM type: NRG; PAM sequence: TGG
gaagtgcagtggcaggatca

SEQ ID NO: 123100 - DNA, 20 bp, Artificial Sequence
  Description of Artificial Sequence: Synthetic oligonucleotide
  Target: LAMA2; (+) strand; PAM type: NRG; PAM sequence: CAG
ttattgtgcccttgacatct

SEQ ID NO: 123101 - DNA, 20 bp, Artificial Sequence
  Description of Artificial Sequence: Synthetic oligonucleotide
  Target: LAMA2; (+) strand; PAM type: NRG; PAM sequence: AAG
gcccttgacatctcagtttc

SEQ ID NO: 123102 - DNA, 20 bp, Artificial Sequence
  Description of Artificial Sequence: Synthetic oligonucleotide
  Target: LAMA2; (+) strand; PAM type: NRG; PAM sequence: CAG
ttcaagtgatactcccactt

SEQ ID NO: 123103 - DNA, 20 bp, Artificial Sequence
  Description of Artificial Sequence: Synthetic oligonucleotide
  Target: LAMA2; (+) strand; PAM type: NRG; PAM sequence: TAG
tcccacttcagcctcttcac

SEQ ID NO: 123104 - DNA, 20 bp, Artificial Sequence
  Description of Artificial Sequence: Synthetic oligonucleotide
  Target: LAMA2; (+) strand; PAM type: NRG; PAM sequence: TGG
acttcagcctcttcactagc

SEQ ID NO: 123105 - DNA, 20 bp, Artificial Sequence
  Description of Artificial Sequence: Synthetic oligonucleotide
  Target: LAMA2; (+) strand; PAM type: NRG; PAM sequence: GGG
cttcagcctcttcactagct

SEQ ID NO: 123106 - DNA, 20 bp, Artificial Sequence
  Description of Artificial Sequence: Synthetic oligonucleotide
  Target: LAMA2; (+) strand; PAM type: NRG; PAM sequence: CAG
ctcttcactagctgggacta

SEQ ID NO: 123107 - DNA, 20 bp, Artificial Sequence
  Description of Artificial Sequence: Synthetic oligonucleotide
  Target: LAMA2; (+) strand; PAM type: NRG; PAM sequence: AGG
tcttcactagctgggactac

SEQ ID NO: 123108 - DNA, 20 bp, Artificial Sequence
  Description of Artificial Sequence: Synthetic oligonucleotide
  Target: LAMA2; (+) strand; PAM type: NRG; PAM sequence: TGG
caggctcttgccaccccacc

SEQ ID NO: 123109 - DNA, 20 bp, Artificial Sequence
  Description of Artificial Sequence: Synthetic oligonucleotide
  Target: LAMA2; (+) strand; PAM type: NRG; PAM sequence: AAG
atttttctattttttttgta

SEQ ID NO: 123110 - DNA, 20 bp, Artificial Sequence
  Description of Artificial Sequence: Synthetic oligonucleotide
  Target: LAMA2; (+) strand; PAM type: NRG; PAM sequence: TGG
ttctattttttttgtaaaga

SEQ ID NO: 123111 - DNA, 20 bp, Artificial Sequence
  Description of Artificial Sequence: Synthetic oligonucleotide
  Target: LAMA2; (+) strand; PAM type: NRG; PAM sequence: CAG
tggtactttgccatgttgct

SEQ ID NO: 123112 - DNA, 20 bp, Artificial Sequence
  Description of Artificial Sequence: Synthetic oligonucleotide
  Target: LAMA2; (+) strand; PAM type: NRG; PAM sequence: TGG
tgttgctcagactgaactcc

SEQ ID NO: 123113 - DNA, 20 bp, Artificial Sequence
  Description of Artificial Sequence: Synthetic oligonucleotide
  Target: LAMA2; (+) strand; PAM type: NRG; PAM sequence: GGG
gttgctcagactgaactcct

SEQ ID NO: 123114 - DNA, 20 bp, Artificial Sequence
  Description of Artificial Sequence: Synthetic oligonucleotide
  Target: LAMA2; (+) strand; PAM type: NRG; PAM sequence: CGG
tcaaacaatcctccccacct

SEQ ID NO: 123115 - DNA, 20 bp, Artificial Sequence
  Description of Artificial Sequence: Synthetic oligonucleotide
  Target: LAMA2; (+) strand; PAM type: NRG; PAM sequence: TAG
ctccccacctcggcctccca

SEQ ID NO: 123116 - DNA, 20 bp, Artificial Sequence
  Description of Artificial Sequence: Synthetic oligonucleotide
  Target: LAMA2; (+) strand; PAM type: NRG; PAM sequence: TAG
acctcggcctcccatagtgc

SEQ ID NO: 123117 - DNA, 20 bp, Artificial Sequence
  Description of Artificial Sequence: Synthetic oligonucleotide
  Target: LAMA2; (+) strand; PAM type: NRG; PAM sequence: AGG
cctcggcctcccatagtgct

SEQ ID NO: 123118 - DNA, 20 bp, Artificial Sequence
  Description of Artificial Sequence: Synthetic oligonucleotide
  Target: LAMA2; (+) strand; PAM type: NRG; PAM sequence: TAG
ctcccatagtgctaggatta

SEQ ID NO: 123119 - DNA, 20 bp, Artificial Sequence
  Description of Artificial Sequence: Synthetic oligonucleotide
  Target: LAMA2; (+) strand; PAM type: NRG; PAM sequence: AGG
tcccatagtgctaggattat

SEQ ID NO: 123120 - DNA, 20 bp, Artificial Sequence
  Description of Artificial Sequence: Synthetic oligonucleotide
  Target: LAMA2; (+) strand; PAM type: NRG; PAM sequence: GAG
agtgctaggattataggcat

SEQ ID NO: 123121 - DNA, 20 bp, Artificial Sequence
  Description of Artificial Sequence: Synthetic oligonucleotide
  Target: LAMA2; (+) strand; PAM type: NRG; PAM sequence: TGG
taggcatgagccactgcacc

SEQ ID NO: 123122 - DNA, 20 bp, Artificial Sequence
  Description of Artificial Sequence: Synthetic oligonucleotide
  Target: LAMA2; (+) strand; PAM type: NRG; PAM sequence: AAG
actttaaactcgttgttata

SEQ ID NO: 123123 - DNA, 20 bp, Artificial Sequence
  Description of Artificial Sequence: Synthetic oligonucleotide
  Target: LAMA2; (+) strand; PAM type: NRG; PAM sequence: TGG
ttaaactcgttgttataaag

SEQ ID NO: 123124 - DNA, 20 bp, Artificial Sequence
  Description of Artificial Sequence: Synthetic oligonucleotide
  Target: LAMA2; (+) strand; PAM type: NRG; PAM sequence: TGG
ctcgttgttataaagtggta

SEQ ID NO: 123125 - DNA, 20 bp, Artificial Sequence
  Description of Artificial Sequence: Synthetic oligonucleotide
  Target: LAMA2; (+) strand; PAM type: NRG; PAM sequence: GGG
tcgttgttataaagtggtat

SEQ ID NO: 123126 - DNA, 20 bp, Artificial Sequence
  Description of Artificial Sequence: Synthetic oligonucleotide
  Target: LAMA2; (+) strand; PAM type: NRG; PAM sequence: AAG
taaagtggtatgggttaatc

SEQ ID NO: 123127 - DNA, 20 bp, Artificial Sequence
  Description of Artificial Sequence: Synthetic oligonucleotide
  Target: LAMA2; (+) strand; PAM type: NRG; PAM sequence: GAG
aagtggtatgggttaatcaa

SEQ ID NO: 123128 - DNA, 20 bp, Artificial Sequence
  Description of Artificial Sequence: Synthetic oligonucleotide
  Target: LAMA2; (+) strand; PAM type: NRG; PAM sequence: TGG
tatgggttaatcaagagtga

SEQ ID NO: 123129 - DNA, 20 bp, Artificial Sequence
  Description of Artificial Sequence: Synthetic oligonucleotide
  Target: LAMA2; (+) strand; PAM type: NRG; PAM sequence: AAG
ggttaatcaagagtgatgga

SEQ ID NO: 123130 - DNA, 20 bp, Artificial Sequence
  Description of Artificial Sequence: Synthetic oligonucleotide
  Target: LAMA2; (+) strand; PAM type: NRG; PAM sequence: TAG
atcaagagtgatggaaagat

SEQ ID NO: 123131 - DNA, 20 bp, Artificial Sequence
  Description of Artificial Sequence: Synthetic oligonucleotide
  Target: LAMA2; (+) strand; PAM type: NRG; PAM sequence: GAG
agctctgtttttctgtgtgt

SEQ ID NO: 123132 - DNA, 20 bp, Artificial Sequence
  Description of Artificial Sequence: Synthetic oligonucleotide
  Target: LAMA2; (+) strand; PAM type: NRG; PAM sequence: AAG
gtttttctgtgtgtgagtga

SEQ ID NO: 123133 - DNA, 20 bp, Artificial Sequence
  Description of Artificial Sequence: Synthetic oligonucleotide
  Target: LAMA2; (+) strand; PAM type: NRG; PAM sequence: TAG
ctgtgtgtgagtgaaagatt

SEQ ID NO: 123134 - DNA, 20 bp, Artificial Sequence
  Description of Artificial Sequence: Synthetic oligonucleotide
  Target: LAMA2; (+) strand; PAM type: NRG; PAM sequence: AAG
tgtgtgagtgaaagatttag

SEQ ID NO: 123135 - DNA, 20 bp, Artificial Sequence
  Description of Artificial Sequence: Synthetic oligonucleotide
  Target: LAMA2; (+) strand; PAM type: NRG; PAM sequence: AAG
tgagtgaaagatttagaagt

SEQ ID NO: 123136 - DNA, 20 bp, Artificial Sequence
  Description of Artificial Sequence: Synthetic oligonucleotide
  Target: LAMA2; (+) strand; PAM type: NRG; PAM sequence: AAG
tataattattcttcttccca

SEQ ID NO: 123137 - DNA, 20 bp, Artificial Sequence
  Description of Artificial Sequence: Synthetic oligonucleotide
  Target: LAMA2; (+) strand; PAM type: NRG; PAM sequence: TGG
aatgatgtttaccaaaacac

SEQ ID NO: 123138 - DNA, 20 bp, Artificial Sequence
  Description of Artificial Sequence: Synthetic oligonucleotide
  Target: LAMA2; (+) strand; PAM type: NRG; PAM sequence: TAG
cctaaatttataattcaatt

SEQ ID NO: 123139 - DNA, 20 bp, Artificial Sequence
  Description of Artificial Sequence: Synthetic oligonucleotide
  Target: LAMA2; (+) strand; PAM type: NRG; PAM sequence: AAG
atttataattcaatttagta

SEQ ID NO: 123140 - DNA, 20 bp, Artificial Sequence
  Description of Artificial Sequence: Synthetic oligonucleotide
  Target: LAMA2; (+) strand; PAM type: NRG; PAM sequence: TAG
tataattcaatttagtaaag

SEQ ID NO: 123141 - DNA, 20 bp, Artificial Sequence
  Description of Artificial Sequence: Synthetic oligonucleotide
  Target: LAMA2; (+) strand; PAM type: NRG; PAM sequence: AGG
ataattcaatttagtaaagt

SEQ ID NO: 123142 - DNA, 20 bp, Artificial Sequence
  Description of Artificial Sequence: Synthetic oligonucleotide
  Target: LAMA2; (+) strand; PAM type: NRG; PAM sequence: TGG
gtaaagtaggacttctgaaa

SEQ ID NO: 123143 - DNA, 20 bp, Artificial Sequence
  Description of Artificial Sequence: Synthetic oligonucleotide
  Target: LAMA2; (+) strand; PAM type: NRG; PAM sequence: TAG
ggacttctgaaatggatttt

SEQ ID NO: 123144 - DNA, 20 bp, Artificial Sequence
  Description of Artificial Sequence: Synthetic oligonucleotide
  Target: LAMA2; (+) strand; PAM type: NRG; PAM sequence: TGG
aaatggatttttagatatat

SEQ ID NO: 123145 - DNA, 20 bp, Artificial Sequence
  Description of Artificial Sequence: Synthetic oligonucleotide
  Target: LAMA2; (+) strand; PAM type: NRG; PAM sequence: GGG
aatggatttttagatatatt

SEQ ID NO: 123146 - DNA, 20 bp, Artificial Sequence
  Description of Artificial Sequence: Synthetic oligonucleotide
  Target: LAMA2; (+) strand; PAM type: NRG; PAM sequence: GGG
atggatttttagatatattg

SEQ ID NO: 123147 - DNA, 20 bp, Artificial Sequence
  Description of Artificial Sequence: Synthetic oligonucleotide
  Target: LAMA2; (+) strand; PAM type: NRG; PAM sequence: CAG
tatattggggaaaaacaatt

SEQ ID NO: 123148 - DNA, 20 bp, Artificial Sequence
  Description of Artificial Sequence: Synthetic oligonucleotide
  Target: LAMA2; (+) strand; PAM type: NRG; PAM sequence: AGG
atattggggaaaaacaattc

SEQ ID NO: 123149 - DNA, 20 bp, Artificial Sequence
  Description of Artificial Sequence: Synthetic oligonucleotide
  Target: LAMA2; (+) strand; PAM type: NRG; PAM sequence: AAG
ggaaaaacaattcaggatct

SEQ ID NO: 123150 - DNA, 20 bp, Artificial Sequence
  Description of Artificial Sequence: Synthetic oligonucleotide
  Target: LAMA2; (+) strand; PAM type: NRG; PAM sequence: AGG
gaaaaacaattcaggatcta

SEQ ID NO: 123151 - DNA, 20 bp, Artificial Sequence
  Description of Artificial Sequence: Synthetic oligonucleotide
  Target: LAMA2; (+) strand; PAM type: NRG; PAM sequence: TAG
aggatctaaggtaaactttt

SEQ ID NO: 123152 - DNA, 20 bp, Artificial Sequence
  Description of Artificial Sequence: Synthetic oligonucleotide
  Target: LAMA2; (+) strand; PAM type: NRG; PAM sequence: AGG
ggatctaaggtaaacttttt

SEQ ID NO: 123153 - DNA, 20 bp, Artificial Sequence
  Description of Artificial Sequence: Synthetic oligonucleotide
  Target: LAMA2; (+) strand; PAM type: NRG; PAM sequence: TGG
atatatttgcatgccattca

SEQ ID NO: 123154 - DNA, 20 bp, Artificial Sequence
  Description of Artificial Sequence: Synthetic oligonucleotide
  Target: LAMA2; (+) strand; PAM type: NRG; PAM sequence: AAG
acataattctaaatcatctc

SEQ ID NO: 123155 - DNA, 20 bp, Artificial Sequence
  Description of Artificial Sequence: Synthetic oligonucleotide
  Target: LAMA2; (+) strand; PAM type: NRG; PAM sequence: TAG
taaatcatctcaagtgaaat

SEQ ID NO: 123156 - DNA, 20 bp, Artificial Sequence
  Description of Artificial Sequence: Synthetic oligonucleotide
  Target: LAMA2; (+) strand; PAM type: NRG; PAM sequence: AAG
gtgaaattagaattaatata

SEQ ID NO: 123157 - DNA, 20 bp, Artificial Sequence
  Description of Artificial Sequence: Synthetic oligonucleotide
  Target: LAMA2; (+) strand; PAM type: NRG; PAM sequence: TGG
ataaagaaataaacaaatat

SEQ ID NO: 123158 - DNA, 20 bp, Artificial Sequence
  Description of Artificial Sequence: Synthetic oligonucleotide
  Target: LAMA2; (+) strand; PAM type: NRG; PAM sequence: AAG
aagaaataaacaaatattgg

SEQ ID NO: 123159 - DNA, 20 bp, Artificial Sequence
  Description of Artificial Sequence: Synthetic oligonucleotide
  Target: LAMA2; (+) strand; PAM type: NRG; PAM sequence: CAG
atattggaagttaaaatttt

SEQ ID NO: 123160 - DNA, 20 bp, Artificial Sequence
  Description of Artificial Sequence: Synthetic oligonucleotide
  Target: LAMA2; (+) strand; PAM type: NRG; PAM sequence: TAG
gttaaaattttcagatttat

SEQ ID NO: 123161 - DNA, 20 bp, Artificial Sequence
  Description of Artificial Sequence: Synthetic oligonucleotide
  Target: LAMA2; (+) strand; PAM type: NRG; PAM sequence: AGG
ttaaaattttcagatttatt

SEQ ID NO: 123162 - DNA, 20 bp, Artificial Sequence
  Description of Artificial Sequence: Synthetic oligonucleotide
  Target: LAMA2; (+) strand; PAM type: NRG; PAM sequence: TAG
atcctcccgtaaacactatc

SEQ ID NO: 123163 - DNA, 20 bp, Artificial Sequence
  Description of Artificial Sequence: Synthetic oligonucleotide
  Target: LAMA2; (+) strand; PAM type: NRG; PAM sequence: TAG
aattgtcacccaacctattg

SEQ ID NO: 123164 - DNA, 20 bp, Artificial Sequence
  Description of Artificial Sequence: Synthetic oligonucleotide
  Target: LAMA2; (+) strand; PAM type: NRG; PAM sequence: TAG
ctattgtagaactaaaaacc

SEQ ID NO: 123165 - DNA, 20 bp, Artificial Sequence
  Description of Artificial Sequence: Synthetic oligonucleotide
  Target: LAMA2; (+) strand; PAM type: NRG; PAM sequence: TGG
ttgtagaactaaaaacctag

SEQ ID NO: 123166 - DNA, 20 bp, Artificial Sequence
  Description of Artificial Sequence: Synthetic oligonucleotide
  Target: LAMA2; (+) strand; PAM type: NRG; PAM sequence: CAG
tgtaacaaatataatattca

SEQ ID NO: 123167 - DNA, 20 bp, Artificial Sequence
  Description of Artificial Sequence: Synthetic oligonucleotide
  Target: LAMA2; (+) strand; PAM type: NRG; PAM sequence: TAG
aaatgtacattttaaatttc

SEQ ID NO: 123168 - DNA, 20 bp, Artificial Sequence
  Description of Artificial Sequence: Synthetic oligonucleotide
  Target: LAMA2; (+) strand; PAM type: NRG; PAM sequence: GAG
aaaatttgatttgtgactct

SEQ ID NO: 123169 - DNA, 20 bp, Artificial Sequence
  Description of Artificial Sequence: Synthetic oligonucleotide
  Target: LAMA2; (+) strand; PAM type: NRG; PAM sequence: CAG
gatttgtgactctgagcccc

SEQ ID NO: 123170 - DNA, 20 bp, Artificial Sequence
  Description of Artificial Sequence: Synthetic oligonucleotide
  Target: LAMA2; (+) strand; PAM type: NRG; PAM sequence: TAG
ctctgagcccccagtttcct

SEQ ID NO: 123171 - DNA, 20 bp, Artificial Sequence
  Description of Artificial Sequence: Synthetic oligonucleotide
  Target: LAMA2; (+) strand; PAM type: NRG; PAM sequence: AGG
tctgagcccccagtttcctt

SEQ ID NO: 123172 - DNA, 20 bp, Artificial Sequence
  Description of Artificial Sequence: Synthetic oligonucleotide
  Target: LAMA2; (+) strand; PAM type: NRG; PAM sequence: GGG
ctgagcccccagtttcctta

SEQ ID NO: 123173 - DNA, 20 bp, Artificial Sequence
  Description of Artificial Sequence: Synthetic oligonucleotide
  Target: LAMA2; (+) strand; PAM type: NRG; PAM sequence: TGG
tttccttagggcaaacaata

SEQ ID NO: 123174 - DNA, 20 bp, Artificial Sequence
  Description of Artificial Sequence: Synthetic oligonucleotide
  Target: LAMA2; (+) strand; PAM type: NRG; PAM sequence: GGG
ttccttagggcaaacaatat

SEQ ID NO: 123175 - DNA, 20 bp, Artificial Sequence
  Description of Artificial Sequence: Synthetic oligonucleotide
  Target: LAMA2; (+) strand; PAM type: NRG; PAM sequence: CAG
gcaaacaatatgggtgcttt

SEQ ID NO: 123176 - DNA, 20 bp, Artificial Sequence
  Description of Artificial Sequence: Synthetic oligonucleotide
  Target: LAMA2; (+) strand; PAM type: NRG; PAM sequence: TAG
tgggtgctttcagttaattt

SEQ ID NO: 123177 - DNA, 20 bp, Artificial Sequence
  Description of Artificial Sequence: Synthetic oligonucleotide
  Target: LAMA2; (+) strand; PAM type: NRG; PAM sequence: CAG
cagttaattttagtccaatc

SEQ ID NO: 123178 - DNA, 20 bp, Artificial Sequence
  Description of Artificial Sequence: Synthetic oligonucleotide
  Target: LAMA2; (+) strand; PAM type: NRG; PAM sequence: CAG
agtccaatccagtaattttt

SEQ ID NO: 123179 - DNA, 20 bp, Artificial Sequence
  Description of Artificial Sequence: Synthetic oligonucleotide
  Target: LAMA2; (+) strand; PAM type: NRG; PAM sequence: AAG
gttacttttccatttaaaac

SEQ ID NO: 123180 - DNA, 20 bp, Artificial Sequence
  Description of Artificial Sequence: Synthetic oligonucleotide
  Target: LAMA2; (+) strand; PAM type: NRG; PAM sequence: TAG
acttttccatttaaaacaag

SEQ ID NO: 123181 - DNA, 20 bp, Artificial Sequence
  Description of Artificial Sequence: Synthetic oligonucleotide
  Target: LAMA2; (+) strand; PAM type: NRG; PAM sequence: GAG
ccatttaaaacaagtagttc

SEQ ID NO: 123182 - DNA, 20 bp, Artificial Sequence
  Description of Artificial Sequence: Synthetic oligonucleotide
  Target: LAMA2; (+) strand; PAM type: NRG; PAM sequence: AGG
catttaaaacaagtagttcg

SEQ ID NO: 123183 - DNA, 20 bp, Artificial Sequence
  Description of Artificial Sequence: Synthetic oligonucleotide
  Target: LAMA2; (+) strand; PAM type: NRG; PAM sequence: CAG
aaaacaagtagttcgaggtt

SEQ ID NO: 123184 - DNA, 20 bp, Artificial Sequence
  Description of Artificial Sequence: Synthetic oligonucleotide
  Target: LAMA2; (+) strand; PAM type: NRG; PAM sequence: TGG
ttctgatcattttcctgata

SEQ ID NO: 123185 - DNA, 20 bp, Artificial Sequence
  Description of Artificial Sequence: Synthetic oligonucleotide
  Target: LAMA2; (+) strand; PAM type: NRG; PAM sequence: TGG
cattttcctgatatggaatc

SEQ ID NO: 123186 - DNA, 20 bp, Artificial Sequence
  Description of Artificial Sequence: Synthetic oligonucleotide
  Target: LAMA2; (+) strand; PAM type: NRG; PAM sequence: GGG
attttcctgatatggaatct

SEQ ID NO: 123187 - DNA, 20 bp, Artificial Sequence
  Description of Artificial Sequence: Synthetic oligonucleotide
  Target: LAMA2; (+) strand; PAM type: NRG; PAM sequence: GAG
tttcctgatatggaatctgg

SEQ ID NO: 123188 - DNA, 20 bp, Artificial Sequence
  Description of Artificial Sequence: Synthetic oligonucleotide
  Target: LAMA2; (+) strand; PAM type: NRG; PAM sequence: CAG
cctgatatggaatctgggag

SEQ ID NO: 123189 - DNA, 20 bp, Artificial Sequence
  Description of Artificial Sequence: Synthetic oligonucleotide
  Target: LAMA2; (+) strand; PAM type: NRG; PAM sequence: CAG
gatatggaatctgggagcag

SEQ ID NO: 123190 - DNA, 20 bp, Artificial Sequence
  Description of Artificial Sequence: Synthetic oligonucleotide
  Target: LAMA2; (+) strand; PAM type: NRG; PAM sequence: AGG
atatggaatctgggagcagc

SEQ ID NO: 123191 - DNA, 20 bp, Artificial Sequence
  Description of Artificial Sequence: Synthetic oligonucleotide
  Target: LAMA2; (+) strand; PAM type: NRG; PAM sequence: GGG
tatggaatctgggagcagca

SEQ ID NO: 123192 - DNA, 20 bp, Artificial Sequence
  Description of Artificial Sequence: Synthetic oligonucleotide
  Target: LAMA2; (+) strand; PAM type: NRG; PAM sequence: AAG
ctgggagcagcagggaacat

SEQ ID NO: 123193 - DNA, 20 bp, Artificial Sequence
  Description of Artificial Sequence: Synthetic oligonucleotide
  Target: LAMA2; (+) strand; PAM type: NRG; PAM sequence: CGG
agggaacataagtaatgtca

SEQ ID NO: 123194 - DNA, 20 bp, Artificial Sequence
  Description of Artificial Sequence: Synthetic oligonucleotide
  Target: LAMA2; (+) strand; PAM type: NRG; PAM sequence: CAG
cataagtaatgtcacggtgt

SEQ ID NO: 123195 - DNA, 20 bp, Artificial Sequence
  Description of Artificial Sequence: Synthetic oligonucleotide
  Target: LAMA2; (+) strand; PAM type: NRG; PAM sequence: AGG
ataagtaatgtcacggtgtc

SEQ ID NO: 123196 - DNA, 20 bp, Artificial Sequence
  Description of Artificial Sequence: Synthetic oligonucleotide
  Target: LAMA2; (+) strand; PAM type: NRG; PAM sequence: TGG
taatgtcacggtgtcaggat

SEQ ID NO: 123197 - DNA, 20 bp, Artificial Sequence
  Description of Artificial Sequence: Synthetic oligonucleotide
  Target: LAMA2; (+) strand; PAM type: NRG; PAM sequence: GGG
aatgtcacggtgtcaggatt

SEQ ID NO: 123198 - DNA, 20 bp, Artificial Sequence
  Description of Artificial Sequence: Synthetic oligonucleotide
  Target: LAMA2; (+) strand; PAM type: NRG; PAM sequence: GAG
tgtcacggtgtcaggattgg

SEQ ID NO: 123199 - DNA, 20 bp, Artificial Sequence
  Description of Artificial Sequence: Synthetic oligonucleotide
  Target: LAMA2; (+) strand; PAM type: NRG; PAM sequence: AGG
gtcacggtgtcaggattggg

SEQ ID NO: 123200 - DNA, 20 bp, Artificial Sequence
  Description of Artificial Sequence: Synthetic oligonucleotide
  Target: LAMA2; (+) strand; PAM type: NRG; PAM sequence: TGG
ggattgggaggtgtgcattt

SEQ ID NO: 123201 - DNA, 20 bp, Artificial Sequence
  Description of Artificial Sequence: Synthetic oligonucleotide
  Target: LAMA2; (+) strand; PAM type: NRG; PAM sequence: TAG
cctgattaaatgtatcaacg

SEQ ID NO: 123202 - DNA, 20 bp, Artificial Sequence
  Description of Artificial Sequence: Synthetic oligonucleotide
  Target: LAMA2; (+) strand; PAM type: NRG; PAM sequence: AGG
ctgattaaatgtatcaacgt

SEQ ID NO: 123203 - DNA, 20 bp, Artificial Sequence
  Description of Artificial Sequence: Synthetic oligonucleotide
  Target: LAMA2; (+) strand; PAM type: NRG; PAM sequence: TAG
tatattgtgattgtttcaaa

SEQ ID NO: 123204 - DNA, 20 bp, Artificial Sequence
  Description of Artificial Sequence: Synthetic oligonucleotide
  Target: LAMA2; (+) strand; PAM type: NRG; PAM sequence: TGG
attgtgattgtttcaaatag

SEQ ID NO: 123205 - DNA, 20 bp, Artificial Sequence
  Description of Artificial Sequence: Synthetic oligonucleotide
  Target: LAMA2; (+) strand; PAM type: NRG; PAM sequence: GAG
tgtgattgtttcaaatagtg

SEQ ID NO: 123206 - DNA, 20 bp, Artificial Sequence
  Description of Artificial Sequence: Synthetic oligonucleotide
  Target: LAMA2; (+) strand; PAM type: NRG; PAM sequence: CAG
ttgtttcaaatagtggagat

SEQ ID NO: 123207 - DNA, 20 bp, Artificial Sequence
  Description of Artificial Sequence: Synthetic oligonucleotide
  Target: LAMA2; (+) strand; PAM type: NRG; PAM sequence: AGG
tgtttcaaatagtggagatc

SEQ ID NO: 123208 - DNA, 20 bp, Artificial Sequence
  Description of Artificial Sequence: Synthetic oligonucleotide
  Target: LAMA2; (+) strand; PAM type: NRG; PAM sequence: TGG
tggagatcaggaatccttcc

SEQ ID NO: 123209 - DNA, 20 bp, Artificial Sequence
  Description of Artificial Sequence: Synthetic oligonucleotide
  Target: LAMA2; (+) strand; PAM type: NRG; PAM sequence: CAG
aatccttcctggtacaaatt

SEQ ID NO: 123210 - DNA, 20 bp, Artificial Sequence
  Description of Artificial Sequence: Synthetic oligonucleotide
  Target: LAMA2; (+) strand; PAM type: NRG; PAM sequence: CAG
ggtacaaattcagttcccca

SEQ ID NO: 123211 - DNA, 20 bp, Artificial Sequence
  Description of Artificial Sequence: Synthetic oligonucleotide
  Target: LAMA2; (+) strand; PAM type: NRG; PAM sequence: TGG
ccatactgtttcctcaatga

SEQ ID NO: 123212 - DNA, 20 bp, Artificial Sequence
  Description of Artificial Sequence: Synthetic oligonucleotide
  Target: LAMA2; (+) strand; PAM type: NRG; PAM sequence: GGG
catactgtttcctcaatgat

SEQ ID NO: 123213 - DNA, 20 bp, Artificial Sequence
  Description of Artificial Sequence: Synthetic oligonucleotide
  Target: LAMA2; (+) strand; PAM type: NRG; PAM sequence: TGG
atgatgggcccaaaaaatgc

SEQ ID NO: 123214 - DNA, 20 bp, Artificial Sequence
  Description of Artificial Sequence: Synthetic oligonucleotide
  Target: LAMA2; (+) strand; PAM type: NRG; PAM sequence: AAG
atgggcccaaaaaatgctgg

SEQ ID NO: 123215 - DNA, 20 bp, Artificial Sequence
  Description of Artificial Sequence: Synthetic oligonucleotide
  Target: LAMA2; (+) strand; PAM type: NRG; PAM sequence: GAG
tttcttctatttctctcttt

SEQ ID NO: 123216 - DNA, 20 bp, Artificial Sequence
  Description of Artificial Sequence: Synthetic oligonucleotide
  Target: LAMA2; (+) strand; PAM type: NRG; PAM sequence: GAG
tttctctctttgagaatcat

SEQ ID NO: 123217 - DNA, 20 bp, Artificial Sequence
  Description of Artificial Sequence: Synthetic oligonucleotide
  Target: LAMA2; (+) strand; PAM type: NRG; PAM sequence: AGG
ttctctctttgagaatcatg

SEQ ID NO: 123218 - DNA, 20 bp, Artificial Sequence
  Description of Artificial Sequence: Synthetic oligonucleotide
  Target: LAMA2; (+) strand; PAM type: NRG; PAM sequence: TGG
gagaatcatgaggcactcat

SEQ ID NO: 123219 - DNA, 20 bp, Artificial Sequence
  Description of Artificial Sequence: Synthetic oligonucleotide
  Target: LAMA2; (+) strand; PAM type: NRG; PAM sequence: GGG
agaatcatgaggcactcatt

SEQ ID NO: 123220 - DNA, 20 bp, Artificial Sequence
  Description of Artificial Sequence: Synthetic oligonucleotide
  Target: LAMA2; (+) strand; PAM type: NRG; PAM sequence: TGG
tgaggcactcattgggattg

SEQ ID NO: 123221 - DNA, 20 bp, Artificial Sequence
  Description of Artificial Sequence: Synthetic oligonucleotide
  Target: LAMA2; (+) strand; PAM type: NRG; PAM sequence: TGG
ctcattgggattgtggttct

SEQ ID NO: 123222 - DNA, 20 bp, Artificial Sequence
  Description of Artificial Sequence: Synthetic oligonucleotide
  Target: LAMA2; (+) strand; PAM type: NRG; PAM sequence: GAG
ctttgtatgtatttatgtat

SEQ ID NO: 123223 - DNA, 20 bp, Artificial Sequence
  Description of Artificial Sequence: Synthetic oligonucleotide
  Target: LAMA2; (+) strand; PAM type: NRG; PAM sequence: AAG
tcaactgttctctcaatatc

SEQ ID NO: 123224 - DNA, 20 bp, Artificial Sequence
  Description of Artificial Sequence: Synthetic oligonucleotide
  Target: LAMA2; (+) strand; PAM type: NRG; PAM sequence: GAG
aactgttctctcaatatcaa

SEQ ID NO: 123225 - DNA, 20 bp, Artificial Sequence
  Description of Artificial Sequence: Synthetic oligonucleotide
  Target: LAMA2; (+) strand; PAM type: NRG; PAM sequence: AGG
actgttctctcaatatcaag

SEQ ID NO: 123226 - DNA, 20 bp, Artificial Sequence
  Description of Artificial Sequence: Synthetic oligonucleotide
  Target: LAMA2; (+) strand; PAM type: NRG; PAM sequence: TAG
gttctctcaatatcaagagg

SEQ ID NO: 123227 - DNA, 20 bp, Artificial Sequence
  Description of Artificial Sequence: Synthetic oligonucleotide
  Target: LAMA2; (+) strand; PAM type: NRG; PAM sequence: CAG
ctttaatgtataacttacgt

SEQ ID NO: 123228 - DNA, 20 bp, Artificial Sequence
  Description of Artificial Sequence: Synthetic oligonucleotide
  Target: LAMA2; (+) strand; PAM type: NRG; PAM sequence: TAG
gataataccactattctcac

SEQ ID NO: 123229 - DNA, 20 bp, Artificial Sequence
  Description of Artificial Sequence: Synthetic oligonucleotide
  Target: LAMA2; (+) strand; PAM type: NRG; PAM sequence: TGG
atcatgtaacaattatataa

SEQ ID NO: 123230 - DNA, 20 bp, Artificial Sequence
  Description of Artificial Sequence: Synthetic oligonucleotide
  Target: LAMA2; (+) strand; PAM type: NRG; PAM sequence: TGG
aattatataatggttaatat

SEQ ID NO: 123231 - DNA, 20 bp, Artificial Sequence
  Description of Artificial Sequence: Synthetic oligonucleotide
  Target: LAMA2; (+) strand; PAM type: NRG; PAM sequence: TAG
tattggccacaaatcaatcc

SEQ ID NO: 123232 - DNA, 20 bp, Artificial Sequence
  Description of Artificial Sequence: Synthetic oligonucleotide
  Target: LAMA2; (+) strand; PAM type: NRG; PAM sequence: TAG
cctagttccttaaaatctat

SEQ ID NO: 123233 - DNA, 20 bp, Artificial Sequence
  Description of Artificial Sequence: Synthetic oligonucleotide
  Target: LAMA2; (+) strand; PAM type: NRG; PAM sequence: GAG
ttccttaaaatctattagtt

SEQ ID NO: 123234 - DNA, 20 bp, Artificial Sequence
  Description of Artificial Sequence: Synthetic oligonucleotide
  Target: LAMA2; (+) strand; PAM type: NRG; PAM sequence: CGG
tatgaaactgccctttttgt

SEQ ID NO: 123235 - DNA, 20 bp, Artificial Sequence
  Description of Artificial Sequence: Synthetic oligonucleotide
  Target: LAMA2; (+) strand; PAM type: NRG; PAM sequence: TGG
gccctttttgtcggttcaaa

SEQ ID NO: 123236 - DNA, 20 bp, Artificial Sequence
  Description of Artificial Sequence: Synthetic oligonucleotide
  Target: LAMA2; (+) strand; PAM type: NRG; PAM sequence: GAG
tttttgtcggttcaaatggt

SEQ ID NO: 123237 - DNA, 20 bp, Artificial Sequence
  Description of Artificial Sequence: Synthetic oligonucleotide
  Target: LAMA2; (+) strand; PAM type: NRG; PAM sequence: TAG
ttgtcggttcaaatggtgag

SEQ ID NO: 123238 - DNA, 20 bp, Artificial Sequence
  Description of Artificial Sequence: Synthetic oligonucleotide
  Target: LAMA2; (+) strand; PAM type: NRG; PAM sequence: AAG
tcggttcaaatggtgagtag

SEQ ID NO: 123239 - DNA, 20 bp, Artificial Sequence
  Description of Artificial Sequence: Synthetic oligonucleotide
  Target: LAMA2; (+) strand; PAM type: NRG; PAM sequence: TGG
tgagtagaagcaatttcata

SEQ ID NO: 123240 - DNA, 20 bp, Artificial Sequence
  Description of Artificial Sequence: Synthetic oligonucleotide
  Target: LAMA2; (+) strand; PAM type: NRG; PAM sequence: CAG
ttattacttcaatttcctta

SEQ ID NO: 123241 - DNA, 20 bp, Artificial Sequence
  Description of Artificial Sequence: Synthetic oligonucleotide
  Target: LAMA2; (+) strand; PAM type: NRG; PAM sequence: AGG
tattacttcaatttccttac

SEQ ID NO: 123242 - DNA, 20 bp, Artificial Sequence
  Description of Artificial Sequence: Synthetic oligonucleotide
  Target: LAMA2; (+) strand; PAM type: NRG; PAM sequence: CAG
tcaatttccttacaggctta

SEQ ID NO: 123243 - DNA, 20 bp, Artificial Sequence
  Description of Artificial Sequence: Synthetic oligonucleotide
  Target: LAMA2; (+) strand; PAM type: NRG; PAM sequence: CAG
ttacaggcttacagccaaca

SEQ ID NO: 123244 - DNA, 20 bp, Artificial Sequence
  Description of Artificial Sequence: Synthetic oligonucleotide
  Target: LAMA2; (+) strand; PAM type: NRG; PAM sequence: CAG
ttacagccaacacagtgatt

SEQ ID NO: 123245 - DNA, 20 bp, Artificial Sequence
  Description of Artificial Sequence: Synthetic oligonucleotide
  Target: LAMA2; (+) strand; PAM type: NRG; PAM sequence: AGG
tacagccaacacagtgattc

SEQ ID NO: 123246 - DNA, 20 bp, Artificial Sequence
  Description of Artificial Sequence: Synthetic oligonucleotide
  Target: LAMA2; (+) strand; PAM type: NRG; PAM sequence: TAG
ggccaccatcatctcacaac

SEQ ID NO: 123247 - DNA, 20 bp, Artificial Sequence
  Description of Artificial Sequence: Synthetic oligonucleotide
  Target: LAMA2; (+) strand; PAM type: NRG; PAM sequence: TGG
acaactagaaatcatcactg

SEQ ID NO: 123248 - DNA, 20 bp, Artificial Sequence
  Description of Artificial Sequence: Synthetic oligonucleotide
  Target: LAMA2; (+) strand; PAM type: NRG; PAM sequence: TGG
tcatcactgtggccttctaa

SEQ ID NO: 123249 - DNA, 20 bp, Artificial Sequence
  Description of Artificial Sequence: Synthetic oligonucleotide
  Target: LAMA2; (+) strand; PAM type: NRG; PAM sequence: TAG
ggatattcttgcttgcaatt

SEQ ID NO: 123250 - DNA, 20 bp, Artificial Sequence
  Description of Artificial Sequence: Synthetic oligonucleotide
  Target: LAMA2; (+) strand; PAM type: NRG; PAM sequence: CAG
cccatttgtttgttgtactt

SEQ ID NO: 123251 - DNA, 20 bp, Artificial Sequence
  Description of Artificial Sequence: Synthetic oligonucleotide
  Target: LAMA2; (+) strand; PAM type: NRG; PAM sequence: TAG
tttgtttgttgtacttcagc

SEQ ID NO: 123252 - DNA, 20 bp, Artificial Sequence
  Description of Artificial Sequence: Synthetic oligonucleotide
  Target: LAMA2; (+) strand; PAM type: NRG; PAM sequence: AGG
ttgtttgttgtacttcagct

SEQ ID NO: 123253 - DNA, 20 bp, Artificial Sequence
  Description of Artificial Sequence: Synthetic oligonucleotide
  Target: LAMA2; (+) strand; PAM type: NRG; PAM sequence: AAG
tgttgtacttcagctaggtt

SEQ ID NO: 123254 - DNA, 20 bp, Artificial Sequence
  Description of Artificial Sequence: Synthetic oligonucleotide
  Target: LAMA2; (+) strand; PAM type: NRG; PAM sequence: TAG
ttaagctttataaaacacaa

SEQ ID NO: 123255 - DNA, 20 bp, Artificial Sequence
  Description of Artificial Sequence: Synthetic oligonucleotide
  Target: LAMA2; (+) strand; PAM type: NRG; PAM sequence: GAG
ttataaaacacaatagtatt

SEQ ID NO: 123256 - DNA, 20 bp, Artificial Sequence
  Description of Artificial Sequence: Synthetic oligonucleotide
  Target: LAMA2; (+) strand; PAM type: NRG; PAM sequence: TGG
ctctctctaaaatgctgtca

SEQ ID NO: 123257 - DNA, 20 bp, Artificial Sequence
  Description of Artificial Sequence: Synthetic oligonucleotide
  Target: LAMA2; (+) strand; PAM type: NRG; PAM sequence: TAG
tcatggcatctgattgacct

SEQ ID NO: 123258 - DNA, 20 bp, Artificial Sequence
  Description of Artificial Sequence: Synthetic oligonucleotide
  Target: LAMA2; (+) strand; PAM type: NRG; PAM sequence: AAG
ttgaccttagtataaaatcc

SEQ ID NO: 123259 - DNA, 20 bp, Artificial Sequence
  Description of Artificial Sequence: Synthetic oligonucleotide
  Target: LAMA2; (+) strand; PAM type: NRG; PAM sequence: AAG
gctctgttaatgtgatttat

SEQ ID NO: 123260 - DNA, 20 bp, Artificial Sequence
  Description of Artificial Sequence: Synthetic oligonucleotide
  Target: LAMA2; (+) strand; PAM type: NRG; PAM sequence: TAG
aatgtgatttataagtcatg

SEQ ID NO: 123261 - DNA, 20 bp, Artificial Sequence
  Description of Artificial Sequence: Synthetic oligonucleotide
  Target: LAMA2; (+) strand; PAM type: NRG; PAM sequence: CAG
agtcatgtagccgtacatcc

SEQ ID NO: 123262 - DNA, 20 bp, Artificial Sequence
  Description of Artificial Sequence: Synthetic oligonucleotide
  Target: LAMA2; (+) strand; PAM type: NRG; PAM sequence: TAG
atgtagccgtacatcccagt

SEQ ID NO: 123263 - DNA, 20 bp, Artificial Sequence
  Description of Artificial Sequence: Synthetic oligonucleotide
  Target: LAMA2; (+) strand; PAM type: NRG; PAM sequence: CAG
acatcccagttagtctctga

SEQ ID NO: 123264 - DNA, 20 bp, Artificial Sequence
  Description of Artificial Sequence: Synthetic oligonucleotide
  Target: LAMA2; (+) strand; PAM type: NRG; PAM sequence: TGG
cagttagtctctgacagccc

SEQ ID NO: 123265 - DNA, 20 bp, Artificial Sequence
  Description of Artificial Sequence: Synthetic oligonucleotide
  Target: LAMA2; (+) strand; PAM type: NRG; PAM sequence: CAG
ctggtttacaactgctgccc

SEQ ID NO: 123266 - DNA, 20 bp, Artificial Sequence
  Description of Artificial Sequence: Synthetic oligonucleotide
  Target: LAMA2; (+) strand; PAM type: NRG; PAM sequence: TAG
tgctgccccagcctaattaa

SEQ ID NO: 123267 - DNA, 20 bp, Artificial Sequence
  Description of Artificial Sequence: Synthetic oligonucleotide
  Target: LAMA2; (+) strand; PAM type: NRG; PAM sequence: TGG
tgccccagcctaattaatag

SEQ ID NO: 123268 - DNA, 20 bp, Artificial Sequence
  Description of Artificial Sequence: Synthetic oligonucleotide
  Target: LAMA2; (+) strand; PAM type: NRG; PAM sequence: CAG
agtggtgttccctttattct

SEQ ID NO: 123269 - DNA, 20 bp, Artificial Sequence
  Description of Artificial Sequence: Synthetic oligonucleotide
  Target: LAMA2; (+) strand; PAM type: NRG; PAM sequence: AAG
ggtgttccctttattctcag

SEQ ID NO: 123270 - DNA, 20 bp, Artificial Sequence
  Description of Artificial Sequence: Synthetic oligonucleotide
  Target: LAMA2; (+) strand; PAM type: NRG; PAM sequence: TGG
gttccctttattctcagaag

SEQ ID NO: 123271 - DNA, 20 bp, Artificial Sequence
  Description of Artificial Sequence: Synthetic oligonucleotide
  Target: LAMA2; (+) strand; PAM type: NRG; PAM sequence: TGG
ctttattctcagaagtggac

SEQ ID NO: 123272 - DNA, 20 bp, Artificial Sequence
  Description of Artificial Sequence: Synthetic oligonucleotide
  Target: LAMA2; (+) strand; PAM type: NRG; PAM sequence: TAG
ttctcagaagtggactggtt

SEQ ID NO: 123273 - DNA, 20 bp, Artificial Sequence
  Description of Artificial Sequence: Synthetic oligonucleotide
  Target: LAMA2; (+) strand; PAM type: NRG; PAM sequence: CAG
acctcatgctctgccctgtg

SEQ ID NO: 123274 - DNA, 20 bp, Artificial Sequence
  Description of Artificial Sequence: Synthetic oligonucleotide
  Target: LAMA2; (+) strand; PAM type: NRG; PAM sequence: CAG
ctgccctgtgcagttctctc

SEQ ID NO: 123275 - DNA, 20 bp, Artificial Sequence
  Description of Artificial Sequence: Synthetic oligonucleotide
  Target: LAMA2; (+) strand; PAM type: NRG; PAM sequence: GAG
actttttaaatcataaaaat

SEQ ID NO: 123276 - DNA, 20 bp, Artificial Sequence
  Description of Artificial Sequence: Synthetic oligonucleotide
  Target: LAMA2; (+) strand; PAM type: NRG; PAM sequence: TGG
gtatccattctgaattcctt

SEQ ID NO: 123277 - DNA, 20 bp, Artificial Sequence
  Description of Artificial Sequence: Synthetic oligonucleotide
  Target: LAMA2; (+) strand; PAM type: NRG; PAM sequence: TGG
tctgaattcctttggattta

SEQ ID NO: 123278 - DNA, 20 bp, Artificial Sequence
  Description of Artificial Sequence: Synthetic oligonucleotide
  Target: LAMA2; (+) strand; PAM type: NRG; PAM sequence: CAG
gaatatatcactgtctcttt

SEQ ID NO: 123279 - DNA, 20 bp, Artificial Sequence
  Description of Artificial Sequence: Synthetic oligonucleotide
  Target: LAMA2; (+) strand; PAM type: NRG; PAM sequence: AAG
tcactgtctctttcagttca

SEQ ID NO: 123280 - DNA, 20 bp, Artificial Sequence
  Description of Artificial Sequence: Synthetic oligonucleotide
  Target: LAMA2; (+) strand; PAM type: NRG; PAM sequence: CGG
tttcttttttttttttttga

SEQ ID NO: 123281 - DNA, 20 bp, Artificial Sequence
  Description of Artificial Sequence: Synthetic oligonucleotide
  Target: LAMA2; (+) strand; PAM type: NRG; PAM sequence: GAG
tcttttttttttttttgacg

SEQ ID NO: 123282 - DNA, 20 bp, Artificial Sequence
  Description of Artificial Sequence: Synthetic oligonucleotide
  Target: LAMA2; (+) strand; PAM type: NRG; PAM sequence: CAG
cggagtcctgctctgtcacc

SEQ ID NO: 123283 - DNA, 20 bp, Artificial Sequence
  Description of Artificial Sequence: Synthetic oligonucleotide
  Target: LAMA2; (+) strand; PAM type: NRG; PAM sequence: AGG
ggagtcctgctctgtcaccc

SEQ ID NO: 123284 - DNA, 20 bp, Artificial Sequence
  Description of Artificial Sequence: Synthetic oligonucleotide
  Target: LAMA2; (+) strand; PAM type: NRG; PAM sequence: TGG
tcctgctctgtcacccaggc

SEQ ID NO: 123285 - DNA, 20 bp, Artificial Sequence
  Description of Artificial Sequence: Synthetic oligonucleotide
  Target: LAMA2; (+) strand; PAM type: NRG; PAM sequence: GAG
ctgctctgtcacccaggctg

SEQ ID NO: 123286 - DNA, 20 bp, Artificial Sequence
  Description of Artificial Sequence: Synthetic oligonucleotide
  Target: LAMA2; (+) strand; PAM type: NRG; PAM sequence: CAG
ctgtcacccaggctggagtg

SEQ ID NO: 123287 - DNA, 20 bp, Artificial Sequence
  Description of Artificial Sequence: Synthetic oligonucleotide
  Target: LAMA2; (+) strand; PAM type: NRG; PAM sequence: CAG
ggagtgcagtgctgcgatct

SEQ ID NO: 123288 - DNA, 20 bp, Artificial Sequence
  Description of Artificial Sequence: Synthetic oligonucleotide
  Target: LAMA2; (+) strand; PAM type: NRG; PAM sequence: CGG
tcactgcaacctccacctcc

SEQ ID NO: 123289 - DNA, 20 bp, Artificial Sequence
  Description of Artificial Sequence: Synthetic oligonucleotide
  Target: LAMA2; (+) strand; PAM type: NRG; PAM sequence: GGG
cactgcaacctccacctccc

SEQ ID NO: 123290 - DNA, 20 bp, Artificial Sequence
  Description of Artificial Sequence: Synthetic oligonucleotide
  Target: LAMA2; (+) strand; PAM type: NRG; PAM sequence: AAG
aacctccacctcccgggttc

SEQ ID NO: 123291 - DNA, 20 bp, Artificial Sequence
  Description of Artificial Sequence: Synthetic oligonucleotide
  Target: LAMA2; (+) strand; PAM type: NRG; PAM sequence: CAG
ttcaagcgattctccttcct

SEQ ID NO: 123292 - DNA, 20 bp, Artificial Sequence
  Description of Artificial Sequence: Synthetic oligonucleotide
  Target: LAMA2; (+) strand; PAM type: NRG; PAM sequence: TAG
gattctccttcctcagcctc

SEQ ID NO: 123293 - DNA, 20 bp, Artificial Sequence
  Description of Artificial Sequence: Synthetic oligonucleotide
  Target: LAMA2; (+) strand; PAM type: NRG; PAM sequence: GAG
ttctccttcctcagcctcta

SEQ ID NO: 123294 - DNA, 20 bp, Artificial Sequence
  Description of Artificial Sequence: Synthetic oligonucleotide
  Target: LAMA2; (+) strand; PAM type: NRG; PAM sequence: TAG
tccttcctcagcctctagag

SEQ ID NO: 123295 - DNA, 20 bp, Artificial Sequence
  Description of Artificial Sequence: Synthetic oligonucleotide
  Target: LAMA2; (+) strand; PAM type: NRG; PAM sequence: TGG
tcctcagcctctagagtagc

SEQ ID NO: 123296 - DNA, 20 bp, Artificial Sequence
  Description of Artificial Sequence: Synthetic oligonucleotide
  Target: LAMA2; (+) strand; PAM type: NRG; PAM sequence: GGG
cctcagcctctagagtagct

SEQ ID NO: 123297 - DNA, 20 bp, Artificial Sequence
  Description of Artificial Sequence: Synthetic oligonucleotide
  Target: LAMA2; (+) strand; PAM type: NRG; PAM sequence: CAG
ctctagagtagctgggacta

SEQ ID NO: 123298 - DNA, 20 bp, Artificial Sequence
  Description of Artificial Sequence: Synthetic oligonucleotide
  Target: LAMA2; (+) strand; PAM type: NRG; PAM sequence: AGG
tctagagtagctgggactac

SEQ ID NO: 123299 - DNA, 20 bp, Artificial Sequence
  Description of Artificial Sequence: Synthetic oligonucleotide
  Target: LAMA2; (+) strand; PAM type: NRG; PAM sequence: CAG
caggcgtgtgccaccacgcc

SEQ ID NO: 123300 - DNA, 20 bp, Artificial Sequence
  Description of Artificial Sequence: Synthetic oligonucleotide
  Target: LAMA2; (+) strand; PAM type: NRG; PAM sequence: TAG
ccagctaatttttgtatttt

SEQ ID NO: 123301 - DNA, 20 bp, Artificial Sequence
  Description of Artificial Sequence: Synthetic oligonucleotide
  Target: LAMA2; (+) strand; PAM type: NRG; PAM sequence: TAG
gctaatttttgtatttttag

SEQ ID NO: 123302 - DNA, 20 bp, Artificial Sequence
  Description of Artificial Sequence: Synthetic oligonucleotide
  Target: LAMA2; (+) strand; PAM type: NRG; PAM sequence: GAG
taatttttgtatttttagta

SEQ ID NO: 123303 - DNA, 20 bp, Artificial Sequence
  Description of Artificial Sequence: Synthetic oligonucleotide
  Target: LAMA2; (+) strand; PAM type: NRG; PAM sequence: CAG
ttttgtatttttagtagaga

SEQ ID NO: 123304 - DNA, 20 bp, Artificial Sequence
  Description of Artificial Sequence: Synthetic oligonucleotide
  Target: LAMA2; (+) strand; PAM type: NRG; PAM sequence: AGG
tttgtatttttagtagagac

SEQ ID NO: 123305 - DNA, 20 bp, Artificial Sequence
  Description of Artificial Sequence: Synthetic oligonucleotide
  Target: LAMA2; (+) strand; PAM type: NRG; PAM sequence: TGG
gagacaggatttcaccatgt

SEQ ID NO: 123306 - DNA, 20 bp, Artificial Sequence
  Description of Artificial Sequence: Synthetic oligonucleotide
  Target: LAMA2; (+) strand; PAM type: NRG; PAM sequence: TGG
tttcaccatgttggccatgt

SEQ ID NO: 123307 - DNA, 20 bp, Artificial Sequence
  Description of Artificial Sequence: Synthetic oligonucleotide
  Target: LAMA2; (+) strand; PAM type: NRG; PAM sequence: CAG
acctcgcaattcgcccgcct

SEQ ID NO: 123308 - DNA, 20 bp, Artificial Sequence
  Description of Artificial Sequence: Synthetic oligonucleotide
  Target: LAMA2; (+) strand; PAM type: NRG; PAM sequence: AGG
cctcgcaattcgcccgcctc

SEQ ID NO: 123309 - DNA, 20 bp, Artificial Sequence
  Description of Artificial Sequence: Synthetic oligonucleotide
  Target: LAMA2; (+) strand; PAM type: NRG; PAM sequence: AAG
tcgcccgcctcaggctccca

SEQ ID NO: 123310 - DNA, 20 bp, Artificial Sequence
  Description of Artificial Sequence: Synthetic oligonucleotide
  Target: LAMA2; (+) strand; PAM type: NRG; PAM sequence: TGG
gcctcaggctcccaaagtgc

SEQ ID NO: 123311 - DNA, 20 bp, Artificial Sequence
  Description of Artificial Sequence: Synthetic oligonucleotide
  Target: LAMA2; (+) strand; PAM type: NRG; PAM sequence: GGG
cctcaggctcccaaagtgct

SEQ ID NO: 123312 - DNA, 20 bp, Artificial Sequence
  Description of Artificial Sequence: Synthetic oligonucleotide
  Target: LAMA2; (+) strand; PAM type: NRG; PAM sequence: CAG
ctcccaaagtgctgggatta

SEQ ID NO: 123313 - DNA, 20 bp, Artificial Sequence
  Description of Artificial Sequence: Synthetic oligonucleotide
  Target: LAMA2; (+) strand; PAM type: NRG; PAM sequence: AGG
tcccaaagtgctgggattac

SEQ ID NO: 123314 - DNA, 20 bp, Artificial Sequence
  Description of Artificial Sequence: Synthetic oligonucleotide
  Target: LAMA2; (+) strand; PAM type: NRG; PAM sequence: GAG
agtgctgggattacaggcgt

SEQ ID NO: 123315 - DNA, 20 bp, Artificial Sequence
  Description of Artificial Sequence: Synthetic oligonucleotide
  Target: LAMA2; (+) strand; PAM type: NRG; PAM sequence: CGG
acaggcgtgagccaccgtgc

SEQ ID NO: 123316 - DNA, 20 bp, Artificial Sequence
  Description of Artificial Sequence: Synthetic oligonucleotide
  Target: LAMA2; (+) strand; PAM type: NRG; PAM sequence: TAG
tccctcatgctccattttta

SEQ ID NO: 123317 - DNA, 20 bp, Artificial Sequence
  Description of Artificial Sequence: Synthetic oligonucleotide
  Target: LAMA2; (+) strand; PAM type: NRG; PAM sequence: AAG
tccatttttatagtttctcc

SEQ ID NO: 123318 - DNA, 20 bp, Artificial Sequence
  Description of Artificial Sequence: Synthetic oligonucleotide
  Target: LAMA2; (+) strand; PAM type: NRG; PAM sequence: AAG
atttttatagtttctccaag

SEQ ID NO: 123319 - DNA, 20 bp, Artificial Sequence
  Description of Artificial Sequence: Synthetic oligonucleotide
  Target: LAMA2; (+) strand; PAM type: NRG; PAM sequence: TAG
aagaagcactttctgacctc

SEQ ID NO: 123320 - DNA, 20 bp, Artificial Sequence
  Description of Artificial Sequence: Synthetic oligonucleotide
  Target: LAMA2; (+) strand; PAM type: NRG; PAM sequence: TAG
gcactttctgacctctagac

SEQ ID NO: 123321 - DNA, 20 bp, Artificial Sequence
  Description of Artificial Sequence: Synthetic oligonucleotide
  Target: LAMA2; (+) strand; PAM type: NRG; PAM sequence: TGG
tcctatttctgtacccatat

SEQ ID NO: 123322 - DNA, 20 bp, Artificial Sequence
  Description of Artificial Sequence: Synthetic oligonucleotide
  Target: LAMA2; (+) strand; PAM type: NRG; PAM sequence: TAG
aattaaccatgtttatatcc

SEQ ID NO: 123323 - DNA, 20 bp, Artificial Sequence
  Description of Artificial Sequence: Synthetic oligonucleotide
  Target: LAMA2; (+) strand; PAM type: NRG; PAM sequence: TAG
ctagtttatgtgcttccttt

SEQ ID NO: 123324 - DNA, 20 bp, Artificial Sequence
  Description of Artificial Sequence: Synthetic oligonucleotide
  Target: LAMA2; (+) strand; PAM type: NRG; PAM sequence: TAG
agcatgtaccattgtttctc

SEQ ID NO: 123325 - DNA, 20 bp, Artificial Sequence
  Description of Artificial Sequence: Synthetic oligonucleotide
  Target: LAMA2; (+) strand; PAM type: NRG; PAM sequence: AGG
gcatgtaccattgtttctct

SEQ ID NO: 123326 - DNA, 20 bp, Artificial Sequence
  Description of Artificial Sequence: Synthetic oligonucleotide
  Target: LAMA2; (+) strand; PAM type: NRG; PAM sequence: GGG
catgtaccattgtttctcta

SEQ ID NO: 123327 - DNA, 20 bp, Artificial Sequence
  Description of Artificial Sequence: Synthetic oligonucleotide
  Target: LAMA2; (+) strand; PAM type: NRG; PAM sequence: AAG
ttgtttctctagggccttat

SEQ ID NO: 123328 - DNA, 20 bp, Artificial Sequence
  Description of Artificial Sequence: Synthetic oligonucleotide
  Target: LAMA2; (+) strand; PAM type: NRG; PAM sequence: CAG
ccttataagtatttgttata

SEQ ID NO: 123329 - DNA, 20 bp, Artificial Sequence
  Description of Artificial Sequence: Synthetic oligonucleotide
  Target: LAMA2; (+) strand; PAM type: NRG; PAM sequence: GAG
atatatgcacacatgtatat

SEQ ID NO: 123330 - DNA, 20 bp, Artificial Sequence
  Description of Artificial Sequence: Synthetic oligonucleotide
  Target: LAMA2; (+) strand; PAM type: NRG; PAM sequence: GAG
atatgcacacatgtatatga

SEQ ID NO: 123331 - DNA, 20 bp, Artificial Sequence
  Description of Artificial Sequence: Synthetic oligonucleotide
  Target: LAMA2; (+) strand; PAM type: NRG; PAM sequence: GAG
cacatgttgaacaaattcat

SEQ ID NO: 123332 - DNA, 20 bp, Artificial Sequence
  Description of Artificial Sequence: Synthetic oligonucleotide
  Target: LAMA2; (+) strand; PAM type: NRG; PAM sequence: TAG
catgagacaaaatacaactt

SEQ ID NO: 123333 - DNA, 20 bp, Artificial Sequence
  Description of Artificial Sequence: Synthetic oligonucleotide
  Target: LAMA2; (+) strand; PAM type: NRG; PAM sequence: AGG
atgagacaaaatacaacttt

SEQ ID NO: 123334 - DNA, 20 bp, Artificial Sequence
  Description of Artificial Sequence: Synthetic oligonucleotide
  Target: LAMA2; (+) strand; PAM type: NRG; PAM sequence: TGG
atacaactttaggttgcttt

SEQ ID NO: 123335 - DNA, 20 bp, Artificial Sequence
  Description of Artificial Sequence: Synthetic oligonucleotide
  Target: LAMA2; (+) strand; PAM type: NRG; PAM sequence: GAG
tgctcttgactttttatgtt

SEQ ID NO: 123336 - DNA, 20 bp, Artificial Sequence
  Description of Artificial Sequence: Synthetic oligonucleotide
  Target: LAMA2; (+) strand; PAM type: NRG; PAM sequence: AAG
cttgactttttatgttgaga

SEQ ID NO: 123337 - DNA, 20 bp, Artificial Sequence
  Description of Artificial Sequence: Synthetic oligonucleotide
  Target: LAMA2; (+) strand; PAM type: NRG; PAM sequence: AGG
ttgactttttatgttgagaa

SEQ ID NO: 123338 - DNA, 20 bp, Artificial Sequence
  Description of Artificial Sequence: Synthetic oligonucleotide
  Target: LAMA2; (+) strand; PAM type: NRG; PAM sequence: GGG
tgactttttatgttgagaaa

SEQ ID NO: 123339 - DNA, 20 bp, Artificial Sequence
  Description of Artificial Sequence: Synthetic oligonucleotide
  Target: LAMA2; (+) strand; PAM type: NRG; PAM sequence: GAG
tatgttgagaaagggatgtt

SEQ ID NO: 123340 - DNA, 20 bp, Artificial Sequence
  Description of Artificial Sequence: Synthetic oligonucleotide
  Target: LAMA2; (+) strand; PAM type: NRG; PAM sequence: GAG
tgttgagaaagggatgttga

SEQ ID NO: 123341 - DNA, 20 bp, Artificial Sequence
  Description of Artificial Sequence: Synthetic oligonucleotide
  Target: LAMA2; (+) strand; PAM type: NRG; PAM sequence: AAG
aaagggatgttgagagtatg

SEQ ID NO: 123342 - DNA, 20 bp, Artificial Sequence
  Description of Artificial Sequence: Synthetic oligonucleotide
  Target: LAMA2; (+) strand; PAM type: NRG; PAM sequence: TAG
gttgagagtatgaagcacta

SEQ ID NO: 123343 - DNA, 20 bp, Artificial Sequence
  Description of Artificial Sequence: Synthetic oligonucleotide
  Target: LAMA2; (+) strand; PAM type: NRG; PAM sequence: AAG
agagtatgaagcactatagc

SEQ ID NO: 123344 - DNA, 20 bp, Artificial Sequence
  Description of Artificial Sequence: Synthetic oligonucleotide
  Target: LAMA2; (+) strand; PAM type: NRG; PAM sequence: AGG
gagtatgaagcactatagca

SEQ ID NO: 123345 - DNA, 20 bp, Artificial Sequence
  Description of Artificial Sequence: Synthetic oligonucleotide
  Target: LAMA2; (+) strand; PAM type: NRG; PAM sequence: GGG
agtatgaagcactatagcaa

SEQ ID NO: 123346 - DNA, 20 bp, Artificial Sequence
  Description of Artificial Sequence: Synthetic oligonucleotide
  Target: LAMA2; (+) strand; PAM type: NRG; PAM sequence: GAG
tatgaagcactatagcaagg

SEQ ID NO: 123347 - DNA, 20 bp, Artificial Sequence
  Description of Artificial Sequence: Synthetic oligonucleotide
  Target: LAMA2; (+) strand; PAM type: NRG; PAM sequence: AAG
gaagcactatagcaagggag

SEQ ID NO: 123348 - DNA, 20 bp, Artificial Sequence
  Description of Artificial Sequence: Synthetic oligonucleotide
  Target: LAMA2; (+) strand; PAM type: NRG; PAM sequence: AAG
actatagcaagggagaagaa

SEQ ID NO: 123349 - DNA, 20 bp, Artificial Sequence
  Description of Artificial Sequence: Synthetic oligonucleotide
  Target: LAMA2; (+) strand; PAM type: NRG; PAM sequence: AAG
tagcaagggagaagaaaaga

SEQ ID NO: 123350 - DNA, 20 bp, Artificial Sequence
  Description of Artificial Sequence: Synthetic oligonucleotide
  Target: LAMA2; (+) strand; PAM type: NRG; PAM sequence: GAG
gcaagggagaagaaaagaaa

SEQ ID NO: 123351 - DNA, 20 bp, Artificial Sequence
  Description of Artificial Sequence: Synthetic oligonucleotide
  Target: LAMA2; (+) strand; PAM type: NRG; PAM sequence: GAG
aagggagaagaaaagaaaga

SEQ ID NO: 123352 - DNA, 20 bp, Artificial Sequence
  Description of Artificial Sequence: Synthetic oligonucleotide
  Target: LAMA2; (+) strand; PAM type: NRG; PAM sequence: CAG
agaagaaaagaaagagagac

SEQ ID NO: 123353 - DNA, 20 bp, Artificial Sequence
  Description of Artificial Sequence: Synthetic oligonucleotide
  Target: LAMA2; (+) strand; PAM type: NRG; PAM sequence: AAG
aaaagaaagagagaccagaa

SEQ ID NO: 123354 - DNA, 20 bp, Artificial Sequence
  Description of Artificial Sequence: Synthetic oligonucleotide
  Target: LAMA2; (+) strand; PAM type: NRG; PAM sequence: AGG
aaagaaagagagaccagaaa

SEQ ID NO: 123355 - DNA, 20 bp, Artificial Sequence
  Description of Artificial Sequence: Synthetic oligonucleotide
  Target: LAMA2; (+) strand; PAM type: NRG; PAM sequence: GGG
aagaaagagagaccagaaaa

SEQ ID NO: 123356 - DNA, 20 bp, Artificial Sequence
  Description of Artificial Sequence: Synthetic oligonucleotide
  Target: LAMA2; (+) strand; PAM type: NRG; PAM sequence: AAG
agggctgattattgaatatc

SEQ ID NO: 123357 - DNA, 20 bp, Artificial Sequence
  Description of Artificial Sequence: Synthetic oligonucleotide
  Target: LAMA2; (+) strand; PAM type: NRG; PAM sequence: AAG
ctgattattgaatatcaaga

SEQ ID NO: 123358 - DNA, 20 bp, Artificial Sequence
  Description of Artificial Sequence: Synthetic oligonucleotide
  Target: LAMA2; (+) strand; PAM type: NRG; PAM sequence: AGG
tgattattgaatatcaagaa

SEQ ID NO: 123359 - DNA, 20 bp, Artificial Sequence
  Description of Artificial Sequence: Synthetic oligonucleotide
  Target: LAMA2; (+) strand; PAM type: NRG; PAM sequence: TAG
aatatcaagaaaggaacaca

SEQ ID NO: 123360 - DNA, 20 bp, Artificial Sequence
  Description of Artificial Sequence: Synthetic oligonucleotide
  Target: LAMA2; (+) strand; PAM type: NRG; PAM sequence: AAG
gaaaggaacacatagaaaac

SEQ ID NO: 123361 - DNA, 20 bp, Artificial Sequence
  Description of Artificial Sequence: Synthetic oligonucleotide
  Target: LAMA2; (+) strand; PAM type: NRG; PAM sequence: AAG
ggaacacatagaaaacaagt

SEQ ID NO: 123362 - DNA, 20 bp, Artificial Sequence
  Description of Artificial Sequence: Synthetic oligonucleotide
  Target: LAMA2; (+) strand; PAM type: NRG; PAM sequence: GAG
aacacatagaaaacaagtaa

SEQ ID NO: 123363 - DNA, 20 bp, Artificial Sequence
  Description of Artificial Sequence: Synthetic oligonucleotide
  Target: LAMA2; (+) strand; PAM type: NRG; PAM sequence: AGG
acacatagaaaacaagtaag

SEQ ID NO: 123364 - DNA, 20 bp, Artificial Sequence
  Description of Artificial Sequence: Synthetic oligonucleotide
  Target: LAMA2; (+) strand; PAM type: NRG; PAM sequence: TGG
gaggctttgaactgacaatt

SEQ ID NO: 123365 - DNA, 20 bp, Artificial Sequence
  Description of Artificial Sequence: Synthetic oligonucleotide
  Target: LAMA2; (+) strand; PAM type: NRG; PAM sequence: TGG
ctttgaactgacaatttgga

SEQ ID NO: 123366 - DNA, 20 bp, Artificial Sequence
  Description of Artificial Sequence: Synthetic oligonucleotide
  Target: LAMA2; (+) strand; PAM type: NRG; PAM sequence: TAG
actattgcttgcacttatct

SEQ ID NO: 123367 - DNA, 20 bp, Artificial Sequence
  Description of Artificial Sequence: Synthetic oligonucleotide
  Target: LAMA2; (+) strand; PAM type: NRG; PAM sequence: CAG
attgcttgcacttatcttag

SEQ ID NO: 123368 - DNA, 20 bp, Artificial Sequence
  Description of Artificial Sequence: Synthetic oligonucleotide
  Target: LAMA2; (+) strand; PAM type: NRG; PAM sequence: AGG
ttgcttgcacttatcttagc

SEQ ID NO: 123369 - DNA, 20 bp, Artificial Sequence
  Description of Artificial Sequence: Synthetic oligonucleotide
  Target: LAMA2; (+) strand; PAM type: NRG; PAM sequence: GGG
tgcttgcacttatcttagca

SEQ ID NO: 123370 - DNA, 20 bp, Artificial Sequence
  Description of Artificial Sequence: Synthetic oligonucleotide
  Target: LAMA2; (+) strand; PAM type: NRG; PAM sequence: GGG
gcttgcacttatcttagcag

SEQ ID NO: 123371 - DNA, 20 bp, Artificial Sequence
  Description of Artificial Sequence: Synthetic oligonucleotide
  Target: LAMA2; (+) strand; PAM type: NRG; PAM sequence: AAG
tcttagcaggggcacttaaa

SEQ ID NO: 123372 - DNA, 20 bp, Artificial Sequence
  Description of Artificial Sequence: Synthetic oligonucleotide
  Target: LAMA2; (+) strand; PAM type: NRG; PAM sequence: CAG
cctgcaatgtacaaacttat

SEQ ID NO: 123373 - DNA, 20 bp, Artificial Sequence
  Description of Artificial Sequence: Synthetic oligonucleotide
  Target: LAMA2; (+) strand; PAM type: NRG; PAM sequence: TAG
acttatcagaacatctcata

SEQ ID NO: 123374 - DNA, 20 bp, Artificial Sequence
  Description of Artificial Sequence: Synthetic oligonucleotide
  Target: LAMA2; (+) strand; PAM type: NRG; PAM sequence: CAG
tcatatagtaacataatttt

SEQ ID NO: 123375 - DNA, 20 bp, Artificial Sequence
  Description of Artificial Sequence: Synthetic oligonucleotide
  Target: LAMA2; (+) strand; PAM type: NRG; PAM sequence: AAG
agtaacataattttcagtat

SEQ ID NO: 123376 - DNA, 20 bp, Artificial Sequence
  Description of Artificial Sequence: Synthetic oligonucleotide
  Target: LAMA2; (+) strand; PAM type: NRG; PAM sequence: TAG
cataattttcagtataagta

SEQ ID NO: 123377 - DNA, 20 bp, Artificial Sequence
  Description of Artificial Sequence: Synthetic oligonucleotide
  Target: LAMA2; (+) strand; PAM type: NRG; PAM sequence: TAG
attttcagtataagtataga

SEQ ID NO: 123378 - DNA, 20 bp, Artificial Sequence
  Description of Artificial Sequence: Synthetic oligonucleotide
  Target: LAMA2; (+) strand; PAM type: NRG; PAM sequence: AGG
ttttcagtataagtatagat

SEQ ID NO: 123379 - DNA, 20 bp, Artificial Sequence
  Description of Artificial Sequence: Synthetic oligonucleotide
  Target: LAMA2; (+) strand; PAM type: NRG; PAM sequence: GAG
taggaattacgtttaaattt

SEQ ID NO: 123380 - DNA, 20 bp, Artificial Sequence
  Description of Artificial Sequence: Synthetic oligonucleotide
  Target: LAMA2; (+) strand; PAM type: NRG; PAM sequence: AAG
aattacgtttaaatttgagt

SEQ ID NO: 123381 - DNA, 20 bp, Artificial Sequence
  Description of Artificial Sequence: Synthetic oligonucleotide
  Target: LAMA2; (+) strand; PAM type: NRG; PAM sequence: TGG
gtttaaatttgagtaagtat

SEQ ID NO: 123382 - DNA, 20 bp, Artificial Sequence
  Description of Artificial Sequence: Synthetic oligonucleotide
  Target: LAMA2; (+) strand; PAM type: NRG; PAM sequence: AAG
atttgagtaagtattggact

SEQ ID NO: 123383 - DNA, 20 bp, Artificial Sequence
  Description of Artificial Sequence: Synthetic oligonucleotide
  Target: LAMA2; (+) strand; PAM type: NRG; PAM sequence: AAG
gattatctctccttttttaa

SEQ ID NO: 123384 - DNA, 20 bp, Artificial Sequence
  Description of Artificial Sequence: Synthetic oligonucleotide
  Target: LAMA2; (+) strand; PAM type: NRG; PAM sequence: TGG
atctctccttttttaaaagt

SEQ ID NO: 123385 - DNA, 20 bp, Artificial Sequence
  Description of Artificial Sequence: Synthetic oligonucleotide
  Target: LAMA2; (+) strand; PAM type: NRG; PAM sequence: AAG
ctccttttttaaaagttggt

SEQ ID NO: 123386 - DNA, 20 bp, Artificial Sequence
  Description of Artificial Sequence: Synthetic oligonucleotide
  Target: LAMA2; (+) strand; PAM type: NRG; PAM sequence: AAG
atttctaaaatgatgactaa

SEQ ID NO: 123387 - DNA, 20 bp, Artificial Sequence
  Description of Artificial Sequence: Synthetic oligonucleotide
  Target: LAMA2; (+) strand; PAM type: NRG; PAM sequence: AAG
ctaaaatgatgactaaaagt

SEQ ID NO: 123388 - DNA, 20 bp, Artificial Sequence
  Description of Artificial Sequence: Synthetic oligonucleotide
  Target: LAMA2; (+) strand; PAM type: NRG; PAM sequence: AGG
taaaatgatgactaaaagta

SEQ ID NO: 123389 - DNA, 20 bp, Artificial Sequence
  Description of Artificial Sequence: Synthetic oligonucleotide
  Target: LAMA2; (+) strand; PAM type: NRG; PAM sequence: GGG
aaaatgatgactaaaagtaa

SEQ ID NO: 123390 - DNA, 20 bp, Artificial Sequence
  Description of Artificial Sequence: Synthetic oligonucleotide
  Target: LAMA2; (+) strand; PAM type: NRG; PAM sequence: AAG
gttgtttaaatccattttat

SEQ ID NO: 123391 - DNA, 20 bp, Artificial Sequence
  Description of Artificial Sequence: Synthetic oligonucleotide
  Target: LAMA2; (+) strand; PAM type: NRG; PAM sequence: CAG
cattttataagatttacttc

SEQ ID NO: 123392 - DNA, 20 bp, Artificial Sequence
  Description of Artificial Sequence: Synthetic oligonucleotide
  Target: LAMA2; (+) strand; PAM type: NRG; PAM sequence: AAG
tttataagatttacttccag

SEQ ID NO: 123393 - DNA, 20 bp, Artificial Sequence
  Description of Artificial Sequence: Synthetic oligonucleotide
  Target: LAMA2; (+) strand; PAM type: NRG; PAM sequence: AAG
gatttacttccagaagatga

SEQ ID NO: 123394 - DNA, 20 bp, Artificial Sequence
  Description of Artificial Sequence: Synthetic oligonucleotide
  Target: LAMA2; (+) strand; PAM type: NRG; PAM sequence: TGG
ttacttccagaagatgaaag

SEQ ID NO: 123395 - DNA, 20 bp, Artificial Sequence
  Description of Artificial Sequence: Synthetic oligonucleotide
  Target: LAMA2; (+) strand; PAM type: NRG; PAM sequence: GGG
tacttccagaagatgaaagt

SEQ ID NO: 123396 - DNA, 20 bp, Artificial Sequence
  Description of Artificial Sequence: Synthetic oligonucleotide
  Target: LAMA2; (+) strand; PAM type: NRG; PAM sequence: AAG
ttccagaagatgaaagtggg

SEQ ID NO: 123397 - DNA, 20 bp, Artificial Sequence
  Description of Artificial Sequence: Synthetic oligonucleotide
  Target: LAMA2; (+) strand; PAM type: NRG; PAM sequence: AAG
aagatgaaagtgggaagctg

SEQ ID NO: 123398 - DNA, 20 bp, Artificial Sequence
  Description of Artificial Sequence: Synthetic oligonucleotide
  Target: LAMA2; (+) strand; PAM type: NRG; PAM sequence: TGG
atgaaagtgggaagctgaag

SEQ ID NO: 123399 - DNA, 20 bp, Artificial Sequence
  Description of Artificial Sequence: Synthetic oligonucleotide
  Target: LAMA2; (+) strand; PAM type: NRG; PAM sequence: AAG
tgaagtggcatatcatttct

SEQ ID NO: 123400 - DNA, 20 bp, Artificial Sequence
  Description of Artificial Sequence: Synthetic oligonucleotide
  Target: LAMA2; (+) strand; PAM type: NRG; PAM sequence: TAG
tcatttctaagctatttttg

SEQ ID NO: 123401 - DNA, 20 bp, Artificial Sequence
  Description of Artificial Sequence: Synthetic oligonucleotide
  Target: LAMA2; (+) strand; PAM type: NRG; PAM sequence: AGG
catttctaagctatttttgt

SEQ ID NO: 123402 - DNA, 20 bp, Artificial Sequence
  Description of Artificial Sequence: Synthetic oligonucleotide
  Target: LAMA2; (+) strand; PAM type: NRG; PAM sequence: AAG
gttgaattgcatccttcaaa

SEQ ID NO: 123403 - DNA, 20 bp, Artificial Sequence
  Description of Artificial Sequence: Synthetic oligonucleotide
  Target: LAMA2; (+) strand; PAM type: NRG; PAM sequence: AAG
tccttcaaaaagaaatgttg

SEQ ID NO: 123404 - DNA, 20 bp, Artificial Sequence
  Description of Artificial Sequence: Synthetic oligonucleotide
  Target: LAMA2; (+) strand; PAM type: NRG; PAM sequence: CAG
aaatgttgaagtcttaaccc

SEQ ID NO: 123405 - DNA, 20 bp, Artificial Sequence
  Description of Artificial Sequence: Synthetic oligonucleotide
  Target: LAMA2; (+) strand; PAM type: NRG; PAM sequence: AGG
aatgttgaagtcttaacccc

SEQ ID NO: 123406 - DNA, 20 bp, Artificial Sequence
  Description of Artificial Sequence: Synthetic oligonucleotide
  Target: LAMA2; (+) strand; PAM type: NRG; PAM sequence: TAG
aatgtgaccttatttgcaaa

SEQ ID NO: 123407 - DNA, 20 bp, Artificial Sequence
  Description of Artificial Sequence: Synthetic oligonucleotide
  Target: LAMA2; (+) strand; PAM type: NRG; PAM sequence: AGG
atgtgaccttatttgcaaat

SEQ ID NO: 123408 - DNA, 20 bp, Artificial Sequence
  Description of Artificial Sequence: Synthetic oligonucleotide
  Target: LAMA2; (+) strand; PAM type: NRG; PAM sequence: GGG
tgtgaccttatttgcaaata

SEQ ID NO: 123409 - DNA, 20 bp, Artificial Sequence
  Description of Artificial Sequence: Synthetic oligonucleotide
  Target: LAMA2; (+) strand; PAM type: NRG; PAM sequence: AAG
gggtctttgcaaatataatt

SEQ ID NO: 123410 - DNA, 20 bp, Artificial Sequence
  Description of Artificial Sequence: Synthetic oligonucleotide
  Target: LAMA2; (+) strand; PAM type: NRG; PAM sequence: AAG
tttgcaaatataattaagtt

SEQ ID NO: 123411 - DNA, 20 bp, Artificial Sequence
  Description of Artificial Sequence: Synthetic oligonucleotide
  Target: LAMA2; (+) strand; PAM type: NRG; PAM sequence: AGG
ttgcaaatataattaagtta

SEQ ID NO: 123412 - DNA, 20 bp, Artificial Sequence
  Description of Artificial Sequence: Synthetic oligonucleotide
  Target: LAMA2; (+) strand; PAM type: NRG; PAM sequence: TGG
aagttaaggtgatgtcatac

SEQ ID NO: 123413 - DNA, 20 bp, Artificial Sequence
  Description of Artificial Sequence: Synthetic oligonucleotide
  Target: LAMA2; (+) strand; PAM type: NRG; PAM sequence: TAG
aaggtgatgtcatactggtt

SEQ ID NO: 123414 - DNA, 20 bp, Artificial Sequence
  Description of Artificial Sequence: Synthetic oligonucleotide
  Target: LAMA2; (+) strand; PAM type: NRG; PAM sequence: AGG
aggtgatgtcatactggttt

SEQ ID NO: 123415 - DNA, 20 bp, Artificial Sequence
  Description of Artificial Sequence: Synthetic oligonucleotide
  Target: LAMA2; (+) strand; PAM type: NRG; PAM sequence: GGG
ggtgatgtcatactggttta

SEQ ID NO: 123416 - DNA, 20 bp, Artificial Sequence
  Description of Artificial Sequence: Synthetic oligonucleotide
  Target: LAMA2; (+) strand; PAM type: NRG; PAM sequence: TGG
gatgtcatactggtttaggg

SEQ ID NO: 123417 - DNA, 20 bp, Artificial Sequence
  Description of Artificial Sequence: Synthetic oligonucleotide
  Target: LAMA2; (+) strand; PAM type: NRG; PAM sequence: TGG
ggaccctgatccaatatgac

SEQ ID NO: 123418 - DNA, 20 bp, Artificial Sequence
  Description of Artificial Sequence: Synthetic oligonucleotide
  Target: LAMA2; (+) strand; PAM type: NRG; PAM sequence: TAG
atccaatatgactggtatca

SEQ ID NO: 123419 - DNA, 20 bp, Artificial Sequence
  Description of Artificial Sequence: Synthetic oligonucleotide
  Target: LAMA2; (+) strand; PAM type: NRG; PAM sequence: AAG
caatatgactggtatcatag

SEQ ID NO: 123420 - DNA, 20 bp, Artificial Sequence
  Description of Artificial Sequence: Synthetic oligonucleotide
  Target: LAMA2; (+) strand; PAM type: NRG; PAM sequence: GAG
atatgactggtatcatagaa

SEQ ID NO: 123421 - DNA, 20 bp, Artificial Sequence
  Description of Artificial Sequence: Synthetic oligonucleotide
  Target: LAMA2; (+) strand; PAM type: NRG; PAM sequence: AGG
tatgactggtatcatagaag

SEQ ID NO: 123422 - DNA, 20 bp, Artificial Sequence
  Description of Artificial Sequence: Synthetic oligonucleotide
  Target: LAMA2; (+) strand; PAM type: NRG; PAM sequence: GGG
atgactggtatcatagaaga

SEQ ID NO: 123423 - DNA, 20 bp, Artificial Sequence
  Description of Artificial Sequence: Synthetic oligonucleotide
  Target: LAMA2; (+) strand; PAM type: NRG; PAM sequence: GGG
tgactggtatcatagaagag

SEQ ID NO: 123424 - DNA, 20 bp, Artificial Sequence
  Description of Artificial Sequence: Synthetic oligonucleotide
  Target: LAMA2; (+) strand; PAM type: NRG; PAM sequence: GAG
actggtatcatagaagaggg

SEQ ID NO: 123425 - DNA, 20 bp, Artificial Sequence
  Description of Artificial Sequence: Synthetic oligonucleotide
  Target: LAMA2; (+) strand; PAM type: NRG; PAM sequence: AGG
ctggtatcatagaagagggg

SEQ ID NO: 123426 - DNA, 20 bp, Artificial Sequence
  Description of Artificial Sequence: Synthetic oligonucleotide
  Target: LAMA2; (+) strand; PAM type: NRG; PAM sequence: GAG
ggtatcatagaagaggggag

SEQ ID NO: 123427 - DNA, 20 bp, Artificial Sequence
  Description of Artificial Sequence: Synthetic oligonucleotide
  Target: LAMA2; (+) strand; PAM type: NRG; PAM sequence: CAG
atagaagaggggaggagata

SEQ ID NO: 123428 - DNA, 20 bp, Artificial Sequence
  Description of Artificial Sequence: Synthetic oligonucleotide
  Target: LAMA2; (+) strand; PAM type: NRG; PAM sequence: CAG
ggggaggagatacagaaata

SEQ ID NO: 123429 - DNA, 20 bp, Artificial Sequence
  Description of Artificial Sequence: Synthetic oligonucleotide
  Target: LAMA2; (+) strand; PAM type: NRG; PAM sequence: AGG
gggaggagatacagaaatac

SEQ ID NO: 123430 - DNA, 20 bp, Artificial Sequence
  Description of Artificial Sequence: Synthetic oligonucleotide
  Target: LAMA2; (+) strand; PAM type: NRG; PAM sequence: GGG
ggaggagatacagaaataca

SEQ ID NO: 123431 - DNA, 20 bp, Artificial Sequence
  Description of Artificial Sequence: Synthetic oligonucleotide
  Target: LAMA2; (+) strand; PAM type: NRG; PAM sequence: GAG
aggagatacagaaatacagg

SEQ ID NO: 123432 - DNA, 20 bp, Artificial Sequence
  Description of Artificial Sequence: Synthetic oligonucleotide
  Target: LAMA2; (+) strand; PAM type: NRG; PAM sequence: AAG
gatacagaaatacagggaga

SEQ ID NO: 123433 - DNA, 20 bp, Artificial Sequence
  Description of Artificial Sequence: Synthetic oligonucleotide
  Target: LAMA2; (+) strand; PAM type: NRG; PAM sequence: AAG
tacagggagaaagctgtgta

SEQ ID NO: 123434 - DNA, 20 bp, Artificial Sequence
  Description of Artificial Sequence: Synthetic oligonucleotide
  Target: LAMA2; (+) strand; PAM type: NRG; PAM sequence: TGG
gggagaaagctgtgtaaaga

SEQ ID NO: 123435 - DNA, 20 bp, Artificial Sequence
  Description of Artificial Sequence: Synthetic oligonucleotide
  Target: LAMA2; (+) strand; PAM type: NRG; PAM sequence: GAG
gagaaagctgtgtaaagatg

SEQ ID NO: 123436 - DNA, 20 bp, Artificial Sequence
  Description of Artificial Sequence: Synthetic oligonucleotide
  Target: LAMA2; (+) strand; PAM type: NRG; PAM sequence: AGG
agaaagctgtgtaaagatgg

SEQ ID NO: 123437 - DNA, 20 bp, Artificial Sequence
  Description of Artificial Sequence: Synthetic oligonucleotide
  Target: LAMA2; (+) strand; PAM type: NRG; PAM sequence: CAG
aagctgtgtaaagatggagg

SEQ ID NO: 123438 - DNA, 20 bp, Artificial Sequence
  Description of Artificial Sequence: Synthetic oligonucleotide
  Target: LAMA2; (+) strand; PAM type: NRG; PAM sequence: GAG
gctgtgtaaagatggaggca

SEQ ID NO: 123439 - DNA, 20 bp, Artificial Sequence
  Description of Artificial Sequence: Synthetic oligonucleotide
  Target: LAMA2; (+) strand; PAM type: NRG; PAM sequence: TGG
tgtaaagatggaggcagaga

SEQ ID NO: 123440 - DNA, 20 bp, Artificial Sequence
  Description of Artificial Sequence: Synthetic oligonucleotide
  Target: LAMA2; (+) strand; PAM type: NRG; PAM sequence: GGG
gtaaagatggaggcagagat

SEQ ID NO: 123441 - DNA, 20 bp, Artificial Sequence
  Description of Artificial Sequence: Synthetic oligonucleotide
  Target: LAMA2; (+) strand; PAM type: NRG; PAM sequence: GAG
aaagatggaggcagagatgg

SEQ ID NO: 123442 - DNA, 20 bp, Artificial Sequence
  Description of Artificial Sequence: Synthetic oligonucleotide
  Target: LAMA2; (+) strand; PAM type: NRG; PAM sequence: TGG
gatggaggcagagatgggag

SEQ ID NO: 123443 - DNA, 20 bp, Artificial Sequence
  Description of Artificial Sequence: Synthetic oligonucleotide
  Target: LAMA2; (+) strand; PAM type: NRG; PAM sequence: AAG
gatgggagtggtgcatccac

SEQ ID NO: 123444 - DNA, 20 bp, Artificial Sequence
  Description of Artificial Sequence: Synthetic oligonucleotide
  Target: LAMA2; (+) strand; PAM type: NRG; PAM sequence: AAG
gagtggtgcatccacaagcc

SEQ ID NO: 123445 - DNA, 20 bp, Artificial Sequence
  Description of Artificial Sequence: Synthetic oligonucleotide
  Target: LAMA2; (+) strand; PAM type: NRG; PAM sequence: AAG
tccacaagccaagcaatgcc

SEQ ID NO: 123446 - DNA, 20 bp, Artificial Sequence
  Description of Artificial Sequence: Synthetic oligonucleotide
  Target: LAMA2; (+) strand; PAM type: NRG; PAM sequence: AGG
ccacaagccaagcaatgcca

SEQ ID NO: 123447 - DNA, 20 bp, Artificial Sequence
  Description of Artificial Sequence: Synthetic oligonucleotide
  Target: LAMA2; (+) strand; PAM type: NRG; PAM sequence: AAG
aagccaagcaatgccaagga

SEQ ID NO: 123448 - DNA, 20 bp, Artificial Sequence
  Description of Artificial Sequence: Synthetic oligonucleotide
  Target: LAMA2; (+) strand; PAM type: NRG; PAM sequence: AAG
ccaagcaatgccaaggaaag

SEQ ID NO: 123449 - DNA, 20 bp, Artificial Sequence
  Description of Artificial Sequence: Synthetic oligonucleotide
  Target: LAMA2; (+) strand; PAM type: NRG; PAM sequence: TGG
caatgccaaggaaagaagca

SEQ ID NO: 123450 - DNA, 20 bp, Artificial Sequence
  Description of Artificial Sequence: Synthetic oligonucleotide
  Target: LAMA2; (+) strand; PAM type: NRG; PAM sequence: TAG
acattttttcttactgtgtc

SEQ ID NO: 123451 - DNA, 20 bp, Artificial Sequence
  Description of Artificial Sequence: Synthetic oligonucleotide
  Target: LAMA2; (+) strand; PAM type: NRG; PAM sequence: AAG
ttttttcttactgtgtctag

SEQ ID NO: 123452 - DNA, 20 bp, Artificial Sequence
  Description of Artificial Sequence: Synthetic oligonucleotide
  Target: LAMA2; (+) strand; PAM type: NRG; PAM sequence: AGG
tttttcttactgtgtctaga

SEQ ID NO: 123453 - DNA, 20 bp, Artificial Sequence
  Description of Artificial Sequence: Synthetic oligonucleotide
  Target: LAMA2; (+) strand; PAM type: NRG; PAM sequence: TAG
tgtgtctagaaggaaccaac

SEQ ID NO: 123454 - DNA, 20 bp, Artificial Sequence
  Description of Artificial Sequence: Synthetic oligonucleotide
  Target: LAMA2; (+) strand; PAM type: NRG; PAM sequence: AGG
gtgtctagaaggaaccaact

SEQ ID NO: 123455 - DNA, 20 bp, Artificial Sequence
  Description of Artificial Sequence: Synthetic oligonucleotide
  Target: LAMA2; (+) strand; PAM type: NRG; PAM sequence: TGG
aaccaactaggctgacattt

SEQ ID NO: 123456 - DNA, 20 bp, Artificial Sequence
  Description of Artificial Sequence: Synthetic oligonucleotide
  Target: LAMA2; (+) strand; PAM type: NRG; PAM sequence: CAG
ctaggctgacattttggttt

SEQ ID NO: 123457 - DNA, 20 bp, Artificial Sequence
  Description of Artificial Sequence: Synthetic oligonucleotide
  Target: LAMA2; (+) strand; PAM type: NRG; PAM sequence: GAG
aggctgacattttggtttca

SEQ ID NO: 123458 - DNA, 20 bp, Artificial Sequence
  Description of Artificial Sequence: Synthetic oligonucleotide
  Target: LAMA2; (+) strand; PAM type: NRG; PAM sequence: CAG
acattttggtttcagagtta

SEQ ID NO: 123459 - DNA, 20 bp, Artificial Sequence
  Description of Artificial Sequence: Synthetic oligonucleotide
  Target: LAMA2; (+) strand; PAM type: NRG; PAM sequence: AAG
ttttattattattatacttt

SEQ ID NO: 123460 - DNA, 20 bp, Artificial Sequence
  Description of Artificial Sequence: Synthetic oligonucleotide
  Target: LAMA2; (+) strand; PAM type: NRG; PAM sequence: TAG
tattattatactttaagttt

SEQ ID NO: 123461 - DNA, 20 bp, Artificial Sequence
  Description of Artificial Sequence: Synthetic oligonucleotide
  Target: LAMA2; (+) strand; PAM type: NRG; PAM sequence: AGG
attattatactttaagtttt

SEQ ID NO: 123462 - DNA, 20 bp, Artificial Sequence
  Description of Artificial Sequence: Synthetic oligonucleotide
  Target: LAMA2; (+) strand; PAM type: NRG; PAM sequence: GGG
ttattatactttaagtttta

SEQ ID NO: 123463 - DNA, 20 bp, Artificial Sequence
  Description of Artificial Sequence: Synthetic oligonucleotide
  Target: LAMA2; (+) strand; PAM type: NRG; PAM sequence: TAG
catgtgcacaatgtgccgat

SEQ ID NO: 123464 - DNA, 20 bp, Artificial Sequence
  Description of Artificial Sequence: Synthetic oligonucleotide
  Target: LAMA2; (+) strand; PAM type: NRG; PAM sequence: TAG
gcacccactaactcgtcatc

SEQ ID NO: 123465 - DNA, 20 bp, Artificial Sequence
  Description of Artificial Sequence: Synthetic oligonucleotide
  Target: LAMA2; (+) strand; PAM type: NRG; PAM sequence: TAG
actaactcgtcatctagcat

SEQ ID NO: 123466 - DNA, 20 bp, Artificial Sequence
  Description of Artificial Sequence: Synthetic oligonucleotide
  Target: LAMA2; (+) strand; PAM type: NRG; PAM sequence: AGG
ctaactcgtcatctagcatt

SEQ ID NO: 123467 - DNA, 20 bp, Artificial Sequence
  Description of Artificial Sequence: Synthetic oligonucleotide
  Target: LAMA2; (+) strand; PAM type: NRG; PAM sequence: CAG
cccctccccccaccccacaa

SEQ ID NO: 123468 - DNA, 20 bp, Artificial Sequence
  Description of Artificial Sequence: Synthetic oligonucleotide
  Target: LAMA2; (+) strand; PAM type: NRG; PAM sequence: CAG
ccccaccccacaacagtccc

SEQ ID NO: 123469 - DNA, 20 bp, Artificial Sequence
  Description of Artificial Sequence: Synthetic oligonucleotide
  Target: LAMA2; (+) strand; PAM type: NRG; PAM sequence: GAG
ccaccccacaacagtcccca

SEQ ID NO: 123470 - DNA, 20 bp, Artificial Sequence
  Description of Artificial Sequence: Synthetic oligonucleotide
  Target: LAMA2; (+) strand; PAM type: NRG; PAM sequence: GAG
attgttcaattcccacctat

SEQ ID NO: 123471 - DNA, 20 bp, Artificial Sequence
  Description of Artificial Sequence: Synthetic oligonucleotide
  Target: LAMA2; (+) strand; PAM type: NRG; PAM sequence: GAG
ttcaattcccacctatgagt

SEQ ID NO: 123472 - DNA, 20 bp, Artificial Sequence
  Description of Artificial Sequence: Synthetic oligonucleotide
  Target: LAMA2; (+) strand; PAM type: NRG; PAM sequence: CGG
cacctatgagtgagaatatg

SEQ ID NO: 123473 - DNA, 20 bp, Artificial Sequence
  Description of Artificial Sequence: Synthetic oligonucleotide
  Target: LAMA2; (+) strand; PAM type: NRG; PAM sequence: TGG
gagtgagaatatgcggtgtt

SEQ ID NO: 123474 - DNA, 20 bp, Artificial Sequence
  Description of Artificial Sequence: Synthetic oligonucleotide
  Target: LAMA2; (+) strand; PAM type: NRG; PAM sequence: TAG
ttggttttttgtccttgtga

SEQ ID NO: 123475 - DNA, 20 bp, Artificial Sequence
  Description of Artificial Sequence: Synthetic oligonucleotide
  Target: LAMA2; (+) strand; PAM type: NRG; PAM sequence: GAG
tgtccttgtgatagtttact

SEQ ID NO: 123476 - DNA, 20 bp, Artificial Sequence
  Description of Artificial Sequence: Synthetic oligonucleotide
  Target: LAMA2; (+) strand; PAM type: NRG; PAM sequence: CAG
ttactgagaatgatgatttc

SEQ ID NO: 123477 - DNA, 20 bp, Artificial Sequence
  Description of Artificial Sequence: Synthetic oligonucleotide
  Target: LAMA2; (+) strand; PAM type: NRG; PAM sequence: TGG
atgatttccagtttcatcca

SEQ ID NO: 123478 - DNA, 20 bp, Artificial Sequence
  Description of Artificial Sequence: Synthetic oligonucleotide
  Target: LAMA2; (+) strand; PAM type: NRG; PAM sequence: AAG
gtttcatccatggccctaca

SEQ ID NO: 123479 - DNA, 20 bp, Artificial Sequence
  Description of Artificial Sequence: Synthetic oligonucleotide
  Target: LAMA2; (+) strand; PAM type: NRG; PAM sequence: TGG
catgaactcatcatttttta

SEQ ID NO: 123480 - DNA, 20 bp, Artificial Sequence
  Description of Artificial Sequence: Synthetic oligonucleotide
  Target: LAMA2; (+) strand; PAM type: NRG; PAM sequence: TAG
catcattttttatggctgca

SEQ ID NO: 123481 - DNA, 20 bp, Artificial Sequence
  Description of Artificial Sequence: Synthetic oligonucleotide
  Target: LAMA2; (+) strand; PAM type: NRG; PAM sequence: TGG
tatggctgcatagtattcca

SEQ ID NO: 123482 - DNA, 20 bp, Artificial Sequence
  Description of Artificial Sequence: Synthetic oligonucleotide
  Target: LAMA2; (+) strand; PAM type: NRG; PAM sequence: TAG
tgtgccacattttcttaatc

SEQ ID NO: 123483 - DNA, 20 bp, Artificial Sequence
  Description of Artificial Sequence: Synthetic oligonucleotide
  Target: LAMA2; (+) strand; PAM type: NRG; PAM sequence: TGG
ttaatctagtctatctttgt

SEQ ID NO: 123484 - DNA, 20 bp, Artificial Sequence
  Description of Artificial Sequence: Synthetic oligonucleotide
  Target: LAMA2; (+) strand; PAM type: NRG; PAM sequence: TGG
gtctatctttgttggacatt

SEQ ID NO: 123485 - DNA, 20 bp, Artificial Sequence
  Description of Artificial Sequence: Synthetic oligonucleotide
  Target: LAMA2; (+) strand; PAM type: NRG; PAM sequence: GGG
tctatctttgttggacattt

SEQ ID NO: 123486 - DNA, 20 bp, Artificial Sequence
  Description of Artificial Sequence: Synthetic oligonucleotide
  Target: LAMA2; (+) strand; PAM type: NRG; PAM sequence: TGG
tctttgttggacatttgggt

SEQ ID NO: 123487 - DNA, 20 bp, Artificial Sequence
  Description of Artificial Sequence: Synthetic oligonucleotide
  Target: LAMA2; (+) strand; PAM type: NRG; PAM sequence: AAG
tggacatttgggttggttcc

SEQ ID NO: 123488 - DNA, 20 bp, Artificial Sequence
  Description of Artificial Sequence: Synthetic oligonucleotide
  Target: LAMA2; (+) strand; PAM type: NRG; PAM sequence: TAG
tacctgtgtatgtgtcttta

SEQ ID NO: 123489 - DNA, 20 bp, Artificial Sequence
  Description of Artificial Sequence: Synthetic oligonucleotide
  Target: LAMA2; (+) strand; PAM type: NRG; PAM sequence: CAG
ctgtgtatgtgtctttatag

SEQ ID NO: 123490 - DNA, 20 bp, Artificial Sequence
  Description of Artificial Sequence: Synthetic oligonucleotide
  Target: LAMA2; (+) strand; PAM type: NRG; PAM sequence: TAG
ctttatagcagcatgattta

SEQ ID NO: 123491 - DNA, 20 bp, Artificial Sequence
  Description of Artificial Sequence: Synthetic oligonucleotide
  Target: LAMA2; (+) strand; PAM type: NRG; PAM sequence: TGG
cagcatgatttatagtcctt

SEQ ID NO: 123492 - DNA, 20 bp, Artificial Sequence
  Description of Artificial Sequence: Synthetic oligonucleotide
  Target: LAMA2; (+) strand; PAM type: NRG; PAM sequence: GGG
agcatgatttatagtccttt

SEQ ID NO: 123493 - DNA, 20 bp, Artificial Sequence
  Description of Artificial Sequence: Synthetic oligonucleotide
  Target: LAMA2; (+) strand; PAM type: NRG; PAM sequence: CAG
tagtcctttgggtatatacc

SEQ ID NO: 123494 - DNA, 20 bp, Artificial Sequence
  Description of Artificial Sequence: Synthetic oligonucleotide
  Target: LAMA2; (+) strand; PAM type: NRG; PAM sequence: TGG
tttgggtatatacccagtaa

SEQ ID NO: 123495 - DNA, 20 bp, Artificial Sequence
  Description of Artificial Sequence: Synthetic oligonucleotide
  Target: LAMA2; (+) strand; PAM type: NRG; PAM sequence: GGG
ttgggtatatacccagtaat

SEQ ID NO: 123496 - DNA, 20 bp, Artificial Sequence
  Description of Artificial Sequence: Synthetic oligonucleotide
  Target: LAMA2; (+) strand; PAM type: NRG; PAM sequence: TGG
gtatatacccagtaatggga

SEQ ID NO: 123497 - DNA, 20 bp, Artificial Sequence
  Description of Artificial Sequence: Synthetic oligonucleotide
  Target: LAMA2; (+) strand; PAM type: NRG; PAM sequence: TGG
atacccagtaatgggatggc

SEQ ID NO: 123498 - DNA, 20 bp, Artificial Sequence
  Description of Artificial Sequence: Synthetic oligonucleotide
  Target: LAMA2; (+) strand; PAM type: NRG; PAM sequence: GGG
tacccagtaatgggatggct

SEQ ID NO: 123499 - DNA, 20 bp, Artificial Sequence
  Description of Artificial Sequence: Synthetic oligonucleotide
  Target: LAMA2; (+) strand; PAM type: NRG; PAM sequence: TGG
aatgggatggctgggtcaaa

SEQ ID NO: 123500 - DNA, 20 bp, Artificial Sequence
  Description of Artificial Sequence: Synthetic oligonucleotide
  Target: LAMA2; (+) strand; PAM type: NRG; PAM sequence: TAG
gctgggtcaaatggtatttc

SEQ ID NO: 123501 - DNA, 20 bp, Artificial Sequence
  Description of Artificial Sequence: Synthetic oligonucleotide
  Target: LAMA2; (+) strand; PAM type: NRG; PAM sequence: TAG
tcaaatggtatttctagttc

SEQ ID NO: 123502 - DNA, 20 bp, Artificial Sequence
  Description of Artificial Sequence: Synthetic oligonucleotide
  Target: LAMA2; (+) strand; PAM type: NRG; PAM sequence: GAG
atttctagttctagatccct

SEQ ID NO: 123503 - DNA, 20 bp, Artificial Sequence
  Description of Artificial Sequence: Synthetic oligonucleotide
  Target: LAMA2; (+) strand; PAM type: NRG; PAM sequence: AGG
tttctagttctagatccctg

SEQ ID NO: 123504 - DNA, 20 bp, Artificial Sequence
  Description of Artificial Sequence: Synthetic oligonucleotide
  Target: LAMA2; (+) strand; PAM type: NRG; PAM sequence: TGG
cgccacactgacttccacaa

SEQ ID NO: 123505 - DNA, 20 bp, Artificial Sequence
  Description of Artificial Sequence: Synthetic oligonucleotide
  Target: LAMA2; (+) strand; PAM type: NRG; PAM sequence: TAG
gacttccacaatggttgaac

SEQ ID NO: 123506 - DNA, 20 bp, Artificial Sequence
  Description of Artificial Sequence: Synthetic oligonucleotide
  Target: LAMA2; (+) strand; PAM type: NRG; PAM sequence: CAG
acaatggttgaactagttta

SEQ ID NO: 123507 - DNA, 20 bp, Artificial Sequence
  Description of Artificial Sequence: Synthetic oligonucleotide
  Target: LAMA2; (+) strand; PAM type: NRG; PAM sequence: CAG
ctagtttacagtcccaccaa

SEQ ID NO: 123508 - DNA, 20 bp, Artificial Sequence
  Description of Artificial Sequence: Synthetic oligonucleotide
  Target: LAMA2; (+) strand; PAM type: NRG; PAM sequence: AAG
cagtcccaccaacagtgtaa

SEQ ID NO: 123509 - DNA, 20 bp, Artificial Sequence
  Description of Artificial Sequence: Synthetic oligonucleotide
  Target: LAMA2; (+) strand; PAM type: NRG; PAM sequence: CAG
ctatttctccacatcctctc

SEQ ID NO: 123510 - DNA, 20 bp, Artificial Sequence
  Description of Artificial Sequence: Synthetic oligonucleotide
  Target: LAMA2; (+) strand; PAM type: NRG; PAM sequence: TGG
ttaatgattgccattctaac

SEQ ID NO: 123511 - DNA, 20 bp, Artificial Sequence
  Description of Artificial Sequence: Synthetic oligonucleotide
  Target: LAMA2; (+) strand; PAM type: NRG; PAM sequence: GAG
attgccattctaactggtgt

SEQ ID NO: 123512 - DNA, 20 bp, Artificial Sequence
  Description of Artificial Sequence: Synthetic oligonucleotide
  Target: LAMA2; (+) strand; PAM type: NRG; PAM sequence: TGG
ccattctaactggtgtgaga

SEQ ID NO: 123513 - DNA, 20 bp, Artificial Sequence
  Description of Artificial Sequence: Synthetic oligonucleotide
  Target: LAMA2; (+) strand; PAM type: NRG; PAM sequence: TGG
tgtgagatggtatctcattg

SEQ ID NO: 123514 - DNA, 20 bp, Artificial Sequence
  Description of Artificial Sequence: Synthetic oligonucleotide
  Target: LAMA2; (+) strand; PAM type: NRG; PAM sequence: TGG
tttgatttgcatttctctga

SEQ ID NO: 123515 - DNA, 20 bp, Artificial Sequence
  Description of Artificial Sequence: Synthetic oligonucleotide
  Target: LAMA2; (+) strand; PAM type: NRG; PAM sequence: CAG
atttgcatttctctgatggc

SEQ ID NO: 123516 - DNA, 20 bp, Artificial Sequence
  Description of Artificial Sequence: Synthetic oligonucleotide
  Target: LAMA2; (+) strand; PAM type: NRG; PAM sequence: TGG
atttctctgatggccagtga

SEQ ID NO: 123517 - DNA, 20 bp, Artificial Sequence
  Description of Artificial Sequence: Synthetic oligonucleotide
  Target: LAMA2; (+) strand; PAM type: NRG; PAM sequence: GAG
ctctgatggccagtgatggt

SEQ ID NO: 123518 - DNA, 20 bp, Artificial Sequence
  Description of Artificial Sequence: Synthetic oligonucleotide
  Target: LAMA2; (+) strand; PAM type: NRG; PAM sequence: TGG
gcattttttcatgtgtcttt

SEQ ID NO: 123519 - DNA, 20 bp, Artificial Sequence
  Description of Artificial Sequence: Synthetic oligonucleotide
  Target: LAMA2; (+) strand; PAM type: NRG; PAM sequence: GAG
ctgcataaatgtcttctttt

SEQ ID NO: 123520 - DNA, 20 bp, Artificial Sequence
  Description of Artificial Sequence: Synthetic oligonucleotide
  Target: LAMA2; (+) strand; PAM type: NRG; PAM sequence: AAG
cataaatgtcttcttttgag

SEQ ID NO: 123521 - DNA, 20 bp, Artificial Sequence
  Description of Artificial Sequence: Synthetic oligonucleotide
  Target: LAMA2; (+) strand; PAM type: NRG; PAM sequence: TGG
gtccttcgcccacttgttga

SEQ ID NO: 123522 - DNA, 20 bp, Artificial Sequence
  Description of Artificial Sequence: Synthetic oligonucleotide
  Target: LAMA2; (+) strand; PAM type: NRG; PAM sequence: GGG
tccttcgcccacttgttgat

SEQ ID NO: 123523 - DNA, 20 bp, Artificial Sequence
  Description of Artificial Sequence: Synthetic oligonucleotide
  Target: LAMA2; (+) strand; PAM type: NRG; PAM sequence: GGG
ccttcgcccacttgttgatg

SEQ ID NO: 123524 - DNA, 20 bp, Artificial Sequence
  Description of Artificial Sequence: Synthetic oligonucleotide
  Target: LAMA2; (+) strand; PAM type: NRG; PAM sequence: GAG
tttttcttgtaaatttgttt

SEQ ID NO: 123525 - DNA, 20 bp, Artificial Sequence
  Description of Artificial Sequence: Synthetic oligonucleotide
  Target: LAMA2; (+) strand; PAM type: NRG; PAM sequence: TAG
aaatttgtttgagttcattg

SEQ ID NO: 123526 - DNA, 20 bp, Artificial Sequence
  Description of Artificial Sequence: Synthetic oligonucleotide
  Target: LAMA2; (+) strand; PAM type: NRG; PAM sequence: TGG
tttgagttcattgtagattc

SEQ ID NO: 123527 - DNA, 20 bp, Artificial Sequence
  Description of Artificial Sequence: Synthetic oligonucleotide
  Target: LAMA2; (+) strand; PAM type: NRG; PAM sequence: TAG
tcattgtagattctggatat

SEQ ID NO: 123528 - DNA, 20 bp, Artificial Sequence
  Description of Artificial Sequence: Synthetic oligonucleotide
  Target: LAMA2; (+) strand; PAM type: NRG; PAM sequence: CAG
tctggatattagccctttgt

SEQ ID NO: 123529 - DNA, 20 bp, Artificial Sequence
  Description of Artificial Sequence: Synthetic oligonucleotide
  Target: LAMA2; (+) strand; PAM type: NRG; PAM sequence: GAG
atattagccctttgtcagat

SEQ ID NO: 123530 - DNA, 20 bp, Artificial Sequence
  Description of Artificial Sequence: Synthetic oligonucleotide
  Target: LAMA2; (+) strand; PAM type: NRG; PAM sequence: CAG
ttagccctttgtcagatgag

SEQ ID NO: 123531 - DNA, 20 bp, Artificial Sequence
  Description of Artificial Sequence: Synthetic oligonucleotide
  Target: LAMA2; (+) strand; PAM type: NRG; PAM sequence: AGG
tagccctttgtcagatgagc

SEQ ID NO: 123532 - DNA, 20 bp, Artificial Sequence
  Description of Artificial Sequence: Synthetic oligonucleotide
  Target: LAMA2; (+) strand; PAM type: NRG; PAM sequence: CGG
aaaattttctcccattttgt

SEQ ID NO: 123533 - DNA, 20 bp, Artificial Sequence
  Description of Artificial Sequence: Synthetic oligonucleotide
  Target: LAMA2; (+) strand; PAM type: NRG; PAM sequence: TGG
cggttgcctgttcactctgc

SEQ ID NO: 123534 - DNA, 20 bp, Artificial Sequence
  Description of Artificial Sequence: Synthetic oligonucleotide
  Target: LAMA2; (+) strand; PAM type: NRG; PAM sequence: TAG
ttgcctgttcactctgctgg

SEQ ID NO: 123535 - DNA, 20 bp, Artificial Sequence
  Description of Artificial Sequence: Synthetic oligonucleotide
  Target: LAMA2; (+) strand; PAM type: NRG; PAM sequence: CAG
tggtagtttcttttgctgtg

SEQ ID NO: 123536 - DNA, 20 bp, Artificial Sequence
  Description of Artificial Sequence: Synthetic oligonucleotide
  Target: LAMA2; (+) strand; PAM type: NRG; PAM sequence: AAG
tagtttcttttgctgtgcag

SEQ ID NO: 123537 - DNA, 20 bp, Artificial Sequence
  Description of Artificial Sequence: Synthetic oligonucleotide
  Target: LAMA2; (+) strand; PAM type: NRG; PAM sequence: TAG
tttgctgtgcagaagctctt

SEQ ID NO: 123538 - DNA, 20 bp, Artificial Sequence
  Description of Artificial Sequence: Synthetic oligonucleotide
  Target: LAMA2; (+) strand; PAM type: NRG; PAM sequence: TAG
cagaagctctttagtttaat

SEQ ID NO: 123539 - DNA, 20 bp, Artificial Sequence
  Description of Artificial Sequence: Synthetic oligonucleotide
  Target: LAMA2; (+) strand; PAM type: NRG; PAM sequence: TGG
tagatcccatttgtccattt

SEQ ID NO: 123540 - DNA, 20 bp, Artificial Sequence
  Description of Artificial Sequence: Synthetic oligonucleotide
  Target: LAMA2; (+) strand; PAM type: NRG; PAM sequence: TGG
gcttttgttgccattgcttt

SEQ ID NO: 123541 - DNA, 20 bp, Artificial Sequence
  Description of Artificial Sequence: Synthetic oligonucleotide
  Target: LAMA2; (+) strand; PAM type: NRG; PAM sequence: TAG
tgccattgcttttggtgttt

SEQ ID NO: 123542 - DNA, 20 bp, Artificial Sequence
  Description of Artificial Sequence: Synthetic oligonucleotide
  Target: LAMA2; (+) strand; PAM type: NRG; PAM sequence: AAG
cttttggtgttttagacatg

SEQ ID NO: 123543 - DNA, 20 bp, Artificial Sequence
  Description of Artificial Sequence: Synthetic oligonucleotide
  Target: LAMA2; (+) strand; PAM type: NRG; PAM sequence: TGG
gcccatgcctatgtcctgaa

SEQ ID NO: 123544 - DNA, 20 bp, Artificial Sequence
  Description of Artificial Sequence: Synthetic oligonucleotide
  Target: LAMA2; (+) strand; PAM type: NRG; PAM sequence: TAG
atgtcctgaatggtaatgcc

SEQ ID NO: 123545 - DNA, 20 bp, Artificial Sequence
  Description of Artificial Sequence: Synthetic oligonucleotide
  Target: LAMA2; (+) strand; PAM type: NRG; PAM sequence: AGG
tgtcctgaatggtaatgcct

SEQ ID NO: 123546 - DNA, 20 bp, Artificial Sequence
  Description of Artificial Sequence: Synthetic oligonucleotide
  Target: LAMA2; (+) strand; PAM type: NRG; PAM sequence: TAG
gtaatgcctaggttttcttc

SEQ ID NO: 123547 - DNA, 20 bp, Artificial Sequence
  Description of Artificial Sequence: Synthetic oligonucleotide
  Target: LAMA2; (+) strand; PAM type: NRG; PAM sequence: TGG
gttttcttctagtgttttta

SEQ ID NO: 123548 - DNA, 20 bp, Artificial Sequence
  Description of Artificial Sequence: Synthetic oligonucleotide
  Target: LAMA2; (+) strand; PAM type: NRG; PAM sequence: TAG
ttctagtgtttttatggttt

SEQ ID NO: 123549 - DNA, 20 bp, Artificial Sequence
  Description of Artificial Sequence: Synthetic oligonucleotide
  Target: LAMA2; (+) strand; PAM type: NRG; PAM sequence: AGG
tctagtgtttttatggtttt

SEQ ID NO: 123550 - DNA, 20 bp, Artificial Sequence
  Description of Artificial Sequence: Synthetic oligonucleotide
  Target: LAMA2; (+) strand; PAM type: NRG; PAM sequence: AAG
tcttgaattgatttttgtat

SEQ ID NO: 123551 - DNA, 20 bp, Artificial Sequence
  Description of Artificial Sequence: Synthetic oligonucleotide
  Target: LAMA2; (+) strand; PAM type: NRG; PAM sequence: AGG
cttgaattgatttttgtata

SEQ ID NO: 123552 - DNA, 20 bp, Artificial Sequence
  Description of Artificial Sequence: Synthetic oligonucleotide
  Target: LAMA2; (+) strand; PAM type: NRG; PAM sequence: AAG
ttgatttttgtataaggtgt

SEQ ID NO: 123553 - DNA, 20 bp, Artificial Sequence
  Description of Artificial Sequence: Synthetic oligonucleotide
  Target: LAMA2; (+) strand; PAM type: NRG; PAM sequence: AGG
tgatttttgtataaggtgta

SEQ ID NO: 123554 - DNA, 20 bp, Artificial Sequence
  Description of Artificial Sequence: Synthetic oligonucleotide
  Target: LAMA2; (+) strand; PAM type: NRG; PAM sequence: AAG
tttttgtataaggtgtaagg

SEQ ID NO: 123555 - DNA, 20 bp, Artificial Sequence
  Description of Artificial Sequence: Synthetic oligonucleotide
  Target: LAMA2; (+) strand; PAM type: NRG; PAM sequence: AGG
ttttgtataaggtgtaagga

SEQ ID NO: 123556 - DNA, 20 bp, Artificial Sequence
  Description of Artificial Sequence: Synthetic oligonucleotide
  Target: LAMA2; (+) strand; PAM type: NRG; PAM sequence: GGG
tttgtataaggtgtaaggaa

SEQ ID NO: 123557 - DNA, 20 bp, Artificial Sequence
  Description of Artificial Sequence: Synthetic oligonucleotide
  Target: LAMA2; (+) strand; PAM type: NRG; PAM sequence: CAG
taaggtgtaaggaagggatc

SEQ ID NO: 123558 - DNA, 20 bp, Artificial Sequence
  Description of Artificial Sequence: Synthetic oligonucleotide
  Target: LAMA2; (+) strand; PAM type: NRG; PAM sequence: CAG
gtaaggaagggatccagttt

SEQ ID NO: 123559 - DNA, 20 bp, Artificial Sequence
  Description of Artificial Sequence: Synthetic oligonucleotide
  Target: LAMA2; (+) strand; PAM type: NRG; PAM sequence: TGG
cagtttcagctttctacata

SEQ ID NO: 123560 - DNA, 20 bp, Artificial Sequence
  Description of Artificial Sequence: Synthetic oligonucleotide
  Target: LAMA2; (+) strand; PAM type: NRG; PAM sequence: TAG
ttcagctttctacatatggc

SEQ ID NO: 123561 - DNA, 20 bp, Artificial Sequence
  Description of Artificial Sequence: Synthetic oligonucleotide
  Target: LAMA2; (+) strand; PAM type: NRG; PAM sequence: CAG
gctttctacatatggctagc

SEQ ID NO: 123562 - DNA, 20 bp, Artificial Sequence
  Description of Artificial Sequence: Synthetic oligonucleotide
  Target: LAMA2; (+) strand; PAM type: NRG; PAM sequence: CAG
atatggctagccagttttcc

SEQ ID NO: 123563 - DNA, 20 bp, Artificial Sequence
  Description of Artificial Sequence: Synthetic oligonucleotide
  Target: LAMA2; (+) strand; PAM type: NRG; PAM sequence: TAG
tcccagcaccatttattaaa

SEQ ID NO: 123564 - DNA, 20 bp, Artificial Sequence
  Description of Artificial Sequence: Synthetic oligonucleotide
  Target: LAMA2; (+) strand; PAM type: NRG; PAM sequence: AGG
cccagcaccatttattaaat

SEQ ID NO: 123565 - DNA, 20 bp, Artificial Sequence
  Description of Artificial Sequence: Synthetic oligonucleotide
  Target: LAMA2; (+) strand; PAM type: NRG; PAM sequence: GGG
ccagcaccatttattaaata

SEQ ID NO: 123566 - DNA, 20 bp, Artificial Sequence
  Description of Artificial Sequence: Synthetic oligonucleotide
  Target: LAMA2; (+) strand; PAM type: NRG; PAM sequence: CAG
tccgcattgcttgtttttct

SEQ ID NO: 123567 - DNA, 20 bp, Artificial Sequence
  Description of Artificial Sequence: Synthetic oligonucleotide
  Target: LAMA2; (+) strand; PAM type: NRG; PAM sequence: AGG
ccgcattgcttgtttttctc

SEQ ID NO: 123568 - DNA, 20 bp, Artificial Sequence
  Description of Artificial Sequence: Synthetic oligonucleotide
  Target: LAMA2; (+) strand; PAM type: NRG; PAM sequence: AAG
tgtttttctcaggtttgtca

SEQ ID NO: 123569 - DNA, 20 bp, Artificial Sequence
  Description of Artificial Sequence: Synthetic oligonucleotide
  Target: LAMA2; (+) strand; PAM type: NRG; PAM sequence: CAG
ttctcaggtttgtcaaagat

SEQ ID NO: 123570 - DNA, 20 bp, Artificial Sequence
  Description of Artificial Sequence: Synthetic oligonucleotide
  Target: LAMA2; (+) strand; PAM type: NRG; PAM sequence: TAG
caggtttgtcaaagatcaga

SEQ ID NO: 123571 - DNA, 20 bp, Artificial Sequence
  Description of Artificial Sequence: Synthetic oligonucleotide
  Target: LAMA2; (+) strand; PAM type: NRG; PAM sequence: TAG
tgtcaaagatcagatagttg

SEQ ID NO: 123572 - DNA, 20 bp, Artificial Sequence
  Description of Artificial Sequence: Synthetic oligonucleotide
  Target: LAMA2; (+) strand; PAM type: NRG; PAM sequence: CGG
atcagatagttgtagatatg

SEQ ID NO: 123573 - DNA, 20 bp, Artificial Sequence
  Description of Artificial Sequence: Synthetic oligonucleotide
  Target: LAMA2; (+) strand; PAM type: NRG; PAM sequence: GAG
agatatgcggcattatttct

SEQ ID NO: 123574 - DNA, 20 bp, Artificial Sequence
  Description of Artificial Sequence: Synthetic oligonucleotide
  Target: LAMA2; (+) strand; PAM type: NRG; PAM sequence: AGG
gatatgcggcattatttctg

SEQ ID NO: 123575 - DNA, 20 bp, Artificial Sequence
  Description of Artificial Sequence: Synthetic oligonucleotide
  Target: LAMA2; (+) strand; PAM type: NRG; PAM sequence: GGG
atatgcggcattatttctga

SEQ ID NO: 123576 - DNA, 20 bp, Artificial Sequence
  Description of Artificial Sequence: Synthetic oligonucleotide
  Target: LAMA2; (+) strand; PAM type: NRG; PAM sequence: TGG
attgatctatatctctgttt

SEQ ID NO: 123577 - DNA, 20 bp, Artificial Sequence
  Description of Artificial Sequence: Synthetic oligonucleotide
  Target: LAMA2; (+) strand; PAM type: NRG; PAM sequence: CAG
ctatatctctgttttggtac

SEQ ID NO: 123578 - DNA, 20 bp, Artificial Sequence
  Description of Artificial Sequence: Synthetic oligonucleotide
  Target: LAMA2; (+) strand; PAM type: NRG; PAM sequence: TGG
gtaccagtaccatgctgttt

SEQ ID NO: 123579 - DNA, 20 bp, Artificial Sequence
  Description of Artificial Sequence: Synthetic oligonucleotide
  Target: LAMA2; (+) strand; PAM type: NRG; PAM sequence: TAG
ccatgctgttttggttactg

SEQ ID NO: 123580 - DNA, 20 bp, Artificial Sequence
  Description of Artificial Sequence: Synthetic oligonucleotide
  Target: LAMA2; (+) strand; PAM type: NRG; PAM sequence: TAG
ttttggttactgtagccttg

SEQ ID NO: 123581 - DNA, 20 bp, Artificial Sequence
  Description of Artificial Sequence: Synthetic oligonucleotide
  Target: LAMA2; (+) strand; PAM type: NRG; PAM sequence: TAG
gttactgtagccttgtagta

SEQ ID NO: 123582 - DNA, 20 bp, Artificial Sequence
  Description of Artificial Sequence: Synthetic oligonucleotide
  Target: LAMA2; (+) strand; PAM type: NRG; PAM sequence: AAG
tagccttgtagtatagtttg

SEQ ID NO: 123583 - DNA, 20 bp, Artificial Sequence
  Description of Artificial Sequence: Synthetic oligonucleotide
  Target: LAMA2; (+) strand; PAM type: NRG; PAM sequence: CAG
cttgtagtatagtttgaagt

SEQ ID NO: 123584 - DNA, 20 bp, Artificial Sequence
  Description of Artificial Sequence: Synthetic oligonucleotide
  Target: LAMA2; (+) strand; PAM type: NRG; PAM sequence: AGG
ttgtagtatagtttgaagtc

SEQ ID NO: 123585 - DNA, 20 bp, Artificial Sequence
  Description of Artificial Sequence: Synthetic oligonucleotide
  Target: LAMA2; (+) strand; PAM type: NRG; PAM sequence: TAG
tagtatagtttgaagtcagg

SEQ ID NO: 123586 - DNA, 20 bp, Artificial Sequence
  Description of Artificial Sequence: Synthetic oligonucleotide
  Target: LAMA2; (+) strand; PAM type: NRG; PAM sequence: CAG
gtcaggtagtgtgatgcctc

SEQ ID NO: 123587 - DNA, 20 bp, Artificial Sequence
  Description of Artificial Sequence: Synthetic oligonucleotide
  Target: LAMA2; (+) strand; PAM type: NRG; PAM sequence: TGG
tgcctccagctttgttcttt

SEQ ID NO: 123588 - DNA, 20 bp, Artificial Sequence
  Description of Artificial Sequence: Synthetic oligonucleotide
  Target: LAMA2; (+) strand; PAM type: NRG; PAM sequence: TAG
ccagctttgttcttttggct

SEQ ID NO: 123589 - DNA, 20 bp, Artificial Sequence
  Description of Artificial Sequence: Synthetic oligonucleotide
  Target: LAMA2; (+) strand; PAM type: NRG; PAM sequence: AGG
cagctttgttcttttggctt

SEQ ID NO: 123590 - DNA, 20 bp, Artificial Sequence
  Description of Artificial Sequence: Synthetic oligonucleotide
  Target: LAMA2; (+) strand; PAM type: NRG; PAM sequence: TGG
cttttggcttaggattgact

SEQ ID NO: 123591 - DNA, 20 bp, Artificial Sequence
  Description of Artificial Sequence: Synthetic oligonucleotide
  Target: LAMA2; (+) strand; PAM type: NRG; PAM sequence: CGG
ttaggattgacttggcgatg

SEQ ID NO: 123592 - DNA, 20 bp, Artificial Sequence
  Description of Artificial Sequence: Synthetic oligonucleotide
  Target: LAMA2; (+) strand; PAM type: NRG; PAM sequence: GGG
taggattgacttggcgatgc

SEQ ID NO: 123593 - DNA, 20 bp, Artificial Sequence
  Description of Artificial Sequence: Synthetic oligonucleotide
  Target: LAMA2; (+) strand; PAM type: NRG; PAM sequence: TGG
tggcgatgcgggctcttttt

SEQ ID NO: 123594 - DNA, 20 bp, Artificial Sequence
  Description of Artificial Sequence: Synthetic oligonucleotide
  Target: LAMA2; (+) strand; PAM type: NRG; PAM sequence: AAG
ttggttccatatgaacttta

SEQ ID NO: 123595 - DNA, 20 bp, Artificial Sequence
  Description of Artificial Sequence: Synthetic oligonucleotide
  Target: LAMA2; (+) strand; PAM type: NRG; PAM sequence: TAG
gttccatatgaactttaaag

SEQ ID NO: 123596 - DNA, 20 bp, Artificial Sequence
  Description of Artificial Sequence: Synthetic oligonucleotide
  Target: LAMA2; (+) strand; PAM type: NRG; PAM sequence: AAG
tagttttttccaactctgtg

SEQ ID NO: 123597 - DNA, 20 bp, Artificial Sequence
  Description of Artificial Sequence: Synthetic oligonucleotide
  Target: LAMA2; (+) strand; PAM type: NRG; PAM sequence: AAG
tttttccaactctgtgaaga

SEQ ID NO: 123598 - DNA, 20 bp, Artificial Sequence
  Description of Artificial Sequence: Synthetic oligonucleotide
  Target: LAMA2; (+) strand; PAM type: NRG; PAM sequence: TGG
aactctgtgaagaaagtcat

SEQ ID NO: 123599 - DNA, 20 bp, Artificial Sequence
  Description of Artificial Sequence: Synthetic oligonucleotide
  Target: LAMA2; (+) strand; PAM type: NRG; PAM sequence: TAG
tctgtgaagaaagtcattgg

SEQ ID NO: 123600 - DNA, 20 bp, Artificial Sequence
  Description of Artificial Sequence: Synthetic oligonucleotide
  Target: LAMA2; (+) strand; PAM type: NRG; PAM sequence: TGG
gaaagtcattggtagcttga

SEQ ID NO: 123601 - DNA, 20 bp, Artificial Sequence
  Description of Artificial Sequence: Synthetic oligonucleotide
  Target: LAMA2; (+) strand; PAM type: NRG; PAM sequence: GGG
aaagtcattggtagcttgat

SEQ ID NO: 123602 - DNA, 20 bp, Artificial Sequence
  Description of Artificial Sequence: Synthetic oligonucleotide
  Target: LAMA2; (+) strand; PAM type: NRG; PAM sequence: TGG
cattggtagcttgatgggaa

SEQ ID NO: 123603 - DNA, 20 bp, Artificial Sequence
  Description of Artificial Sequence: Synthetic oligonucleotide
  Target: LAMA2; (+) strand; PAM type: NRG; PAM sequence: TGG
attgaatctgtaaattacct

SEQ ID NO: 123604 - DNA, 20 bp, Artificial Sequence
  Description of Artificial Sequence: Synthetic oligonucleotide
  Target: LAMA2; (+) strand; PAM type: NRG; PAM sequence: GGG
ttgaatctgtaaattacctt

SEQ ID NO: 123605 - DNA, 20 bp, Artificial Sequence
  Description of Artificial Sequence: Synthetic oligonucleotide
  Target: LAMA2; (+) strand; PAM type: NRG; PAM sequence: CAG
aatctgtaaattaccttggg

SEQ ID NO: 123606 - DNA, 20 bp, Artificial Sequence
  Description of Artificial Sequence: Synthetic oligonucleotide
  Target: LAMA2; (+) strand; PAM type: NRG; PAM sequence: TGG
gtaaattaccttgggcagta

SEQ ID NO: 123607 - DNA, 20 bp, Artificial Sequence
  Description of Artificial Sequence: Synthetic oligonucleotide
  Target: LAMA2; (+) strand; PAM type: NRG; PAM sequence: GAG
tattgattcttcctacccat

SEQ ID NO: 123608 - DNA, 20 bp, Artificial Sequence
  Description of Artificial Sequence: Synthetic oligonucleotide
  Target: LAMA2; (+) strand; PAM type: NRG; PAM sequence: TGG
attcttcctacccatgagca

SEQ ID NO: 123609 - DNA, 20 bp, Artificial Sequence
  Description of Artificial Sequence: Synthetic oligonucleotide
  Target: LAMA2; (+) strand; PAM type: NRG; PAM sequence: GAG
gtatcctcttttatttcctt

SEQ ID NO: 123610 - DNA, 20 bp, Artificial Sequence
  Description of Artificial Sequence: Synthetic oligonucleotide
  Target: LAMA2; (+) strand; PAM type: NRG; PAM sequence: CAG
tcctcttttatttccttgag

SEQ ID NO: 123611 - DNA, 20 bp, Artificial Sequence
  Description of Artificial Sequence: Synthetic oligonucleotide
  Target: LAMA2; (+) strand; PAM type: NRG; PAM sequence: TGG
tcttttatttccttgagcag

SEQ ID NO: 123612 - DNA, 20 bp, Artificial Sequence
  Description of Artificial Sequence: Synthetic oligonucleotide
  Target: LAMA2; (+) strand; PAM type: NRG; PAM sequence: TAG
tttccttgagcagtggtttg

SEQ ID NO: 123613 - DNA, 20 bp, Artificial Sequence
  Description of Artificial Sequence: Synthetic oligonucleotide
  Target: LAMA2; (+) strand; PAM type: NRG; PAM sequence: AAG
gtggtttgtagttctccttg

SEQ ID NO: 123614 - DNA, 20 bp, Artificial Sequence
  Description of Artificial Sequence: Synthetic oligonucleotide
  Target: LAMA2; (+) strand; PAM type: NRG; PAM sequence: GAG
ggtttgtagttctccttgaa

SEQ ID NO: 123615 - DNA, 20 bp, Artificial Sequence
  Description of Artificial Sequence: Synthetic oligonucleotide
  Target: LAMA2; (+) strand; PAM type: NRG; PAM sequence: AGG
gtttgtagttctccttgaag

SEQ ID NO: 123616 - DNA, 20 bp, Artificial Sequence
  Description of Artificial Sequence: Synthetic oligonucleotide
  Target: LAMA2; (+) strand; PAM type: NRG; PAM sequence: AAG
aggtccttcacatcccttgt

SEQ ID NO: 123617 - DNA, 20 bp, Artificial Sequence
  Description of Artificial Sequence: Synthetic oligonucleotide
  Target: LAMA2; (+) strand; PAM type: NRG; PAM sequence: TGG
ccttcacatcccttgtaagt

SEQ ID NO: 123618 - DNA, 20 bp, Artificial Sequence
  Description of Artificial Sequence: Synthetic oligonucleotide
  Target: LAMA2; (+) strand; PAM type: NRG; PAM sequence: TAG
tcccttgtaagttggattcc

SEQ ID NO: 123619 - DNA, 20 bp, Artificial Sequence
  Description of Artificial Sequence: Synthetic oligonucleotide
  Target: LAMA2; (+) strand; PAM type: NRG; PAM sequence: AGG
cccttgtaagttggattcct

SEQ ID NO: 123620 - DNA, 20 bp, Artificial Sequence
  Description of Artificial Sequence: Synthetic oligonucleotide
  Target: LAMA2; (+) strand; PAM type: NRG; PAM sequence: TAG
agttggattcctaggtattt

SEQ ID NO: 123621 - DNA, 20 bp, Artificial Sequence
  Description of Artificial Sequence: Synthetic oligonucleotide
  Target: LAMA2; (+) strand; PAM type: NRG; PAM sequence: AAG
tttagaatgtctgttgtttt

SEQ ID NO: 123622 - DNA, 20 bp, Artificial Sequence
  Description of Artificial Sequence: Synthetic oligonucleotide
  Target: LAMA2; (+) strand; PAM type: NRG; PAM sequence: TAG
gtctgttgttttaagccacc

SEQ ID NO: 123623 - DNA, 20 bp, Artificial Sequence
  Description of Artificial Sequence: Synthetic oligonucleotide
  Target: LAMA2; (+) strand; PAM type: NRG; PAM sequence: TGG
gttttaagccacctagtttg

SEQ ID NO: 123624 - DNA, 20 bp, Artificial Sequence
  Description of Artificial Sequence: Synthetic oligonucleotide
  Target: LAMA2; (+) strand; PAM type: NRG; PAM sequence: TGG
tagtttgtggtcatttatta

SEQ ID NO: 123625 - DNA, 20 bp, Artificial Sequence
  Description of Artificial Sequence: Synthetic oligonucleotide
  Target: LAMA2; (+) strand; PAM type: NRG; PAM sequence: CAG
tttgtggtcatttattatgg

SEQ ID NO: 123626 - DNA, 20 bp, Artificial Sequence
  Description of Artificial Sequence: Synthetic oligonucleotide
  Target: LAMA2; (+) strand; PAM type: NRG; PAM sequence: TAG
gtcatttattatggcagtcc

SEQ ID NO: 123627 - DNA, 20 bp, Artificial Sequence
  Description of Artificial Sequence: Synthetic oligonucleotide
  Target: LAMA2; (+) strand; PAM type: NRG; PAM sequence: AAG
tatggcagtcctagaaaact

SEQ ID NO: 123628 - DNA, 20 bp, Artificial Sequence
  Description of Artificial Sequence: Synthetic oligonucleotide
  Target: LAMA2; (+) strand; PAM type: NRG; PAM sequence: TAG
gaaaactaagatacctaaat

SEQ ID NO: 123629 - DNA, 20 bp, Artificial Sequence
  Description of Artificial Sequence: Synthetic oligonucleotide
  Target: LAMA2; (+) strand; PAM type: NRG; PAM sequence: AGG
aaaactaagatacctaaatt

SEQ ID NO: 123630 - DNA, 20 bp, Artificial Sequence
  Description of Artificial Sequence: Synthetic oligonucleotide
  Target: LAMA2; (+) strand; PAM type: NRG; PAM sequence: AAG
aacaaatataactatattaa

SEQ ID NO: 123631 - DNA, 20 bp, Artificial Sequence
  Description of Artificial Sequence: Synthetic oligonucleotide
  Target: LAMA2; (+) strand; PAM type: NRG; PAM sequence: AGG
acaaatataactatattaaa

SEQ ID NO: 123632 - DNA, 20 bp, Artificial Sequence
  Description of Artificial Sequence: Synthetic oligonucleotide
  Target: LAMA2; (+) strand; PAM type: NRG; PAM sequence: GGG
caaatataactatattaaaa

SEQ ID NO: 123633 - DNA, 20 bp, Artificial Sequence
  Description of Artificial Sequence: Synthetic oligonucleotide
  Target: LAMA2; (+) strand; PAM type: NRG; PAM sequence: GGG
aaatataactatattaaaag

SEQ ID NO: 123634 - DNA, 20 bp, Artificial Sequence
  Description of Artificial Sequence: Synthetic oligonucleotide
  Target: LAMA2; (+) strand; PAM type: NRG; PAM sequence: TAG
ataactatattaaaagggga

SEQ ID NO: 123635 - DNA, 20 bp, Artificial Sequence
  Description of Artificial Sequence: Synthetic oligonucleotide
  Target: LAMA2; (+) strand; PAM type: NRG; PAM sequence: CAG
tatatccaatatatttaata

SEQ ID NO: 123636 - DNA, 20 bp, Artificial Sequence
  Description of Artificial Sequence: Synthetic oligonucleotide
  Target: LAMA2; (+) strand; PAM type: NRG; PAM sequence: AAG
tccaatatatttaatacaga

SEQ ID NO: 123637 - DNA, 20 bp, Artificial Sequence
  Description of Artificial Sequence: Synthetic oligonucleotide
  Target: LAMA2; (+) strand; PAM type: NRG; PAM sequence: AGG
ccaatatatttaatacagaa

SEQ ID NO: 123638 - DNA, 20 bp, Artificial Sequence
  Description of Artificial Sequence: Synthetic oligonucleotide
  Target: LAMA2; (+) strand; PAM type: NRG; PAM sequence: AAG
tatttaatacagaaaggatg

SEQ ID NO: 123639 - DNA, 20 bp, Artificial Sequence
  Description of Artificial Sequence: Synthetic oligonucleotide
  Target: LAMA2; (+) strand; PAM type: NRG; PAM sequence: TAG
atacagaaaggatgaagata

SEQ ID NO: 123640 - DNA, 20 bp, Artificial Sequence
  Description of Artificial Sequence: Synthetic oligonucleotide
  Target: LAMA2; (+) strand; PAM type: NRG; PAM sequence: TAG
agaaaggatgaagatataga

SEQ ID NO: 123641 - DNA, 20 bp, Artificial Sequence
  Description of Artificial Sequence: Synthetic oligonucleotide
  Target: LAMA2; (+) strand; PAM type: NRG; PAM sequence: TAG
aaggatgaagatatagatag

SEQ ID NO: 123642 - DNA, 20 bp, Artificial Sequence
  Description of Artificial Sequence: Synthetic oligonucleotide
  Target: LAMA2; (+) strand; PAM type: NRG; PAM sequence: CAG
gatatagatagtagaatgat

SEQ ID NO: 123643 - DNA, 20 bp, Artificial Sequence
  Description of Artificial Sequence: Synthetic oligonucleotide
  Target: LAMA2; (+) strand; PAM type: NRG; PAM sequence: GAG
tatagatagtagaatgatca

SEQ ID NO: 123644 - DNA, 20 bp, Artificial Sequence
  Description of Artificial Sequence: Synthetic oligonucleotide
  Target: LAMA2; (+) strand; PAM type: NRG; PAM sequence: AGG
atagatagtagaatgatcag

SEQ ID NO: 123645 - DNA, 20 bp, Artificial Sequence
  Description of Artificial Sequence: Synthetic oligonucleotide
  Target: LAMA2; (+) strand; PAM type: NRG; PAM sequence: AAG
atatcactgctaattcctat

SEQ ID NO: 123646 - DNA, 20 bp, Artificial Sequence
  Description of Artificial Sequence: Synthetic oligonucleotide
  Target: LAMA2; (+) strand; PAM type: NRG; PAM sequence: TAG
actcaatcactaatctgctg

SEQ ID NO: 123647 - DNA, 20 bp, Artificial Sequence
  Description of Artificial Sequence: Synthetic oligonucleotide
  Target: LAMA2; (+) strand; PAM type: NRG; PAM sequence: TAG
caatcactaatctgctgtag

SEQ ID NO: 123648 - DNA, 20 bp, Artificial Sequence
  Description of Artificial Sequence: Synthetic oligonucleotide
  Target: LAMA2; (+) strand; PAM type: NRG; PAM sequence: AAG
gtagtagtctgattgatgct

SEQ ID NO: 123649 - DNA, 20 bp, Artificial Sequence
  Description of Artificial Sequence: Synthetic oligonucleotide
  Target: LAMA2; (+) strand; PAM type: NRG; PAM sequence: CAG
attgatgctaagccatgctg

SEQ ID NO: 123650 - DNA, 20 bp, Artificial Sequence
  Description of Artificial Sequence: Synthetic oligonucleotide
  Target: LAMA2; (+) strand; PAM type: NRG; PAM sequence: AGG
ttgatgctaagccatgctgc

SEQ ID NO: 123651 - DNA, 20 bp, Artificial Sequence
  Description of Artificial Sequence: Synthetic oligonucleotide
  Target: LAMA2; (+) strand; PAM type: NRG; PAM sequence: TAG
acccccaaatcttaaaatct

SEQ ID NO: 123652 - DNA, 20 bp, Artificial Sequence
  Description of Artificial Sequence: Synthetic oligonucleotide
  Target: LAMA2; (+) strand; PAM type: NRG; PAM sequence: TAG
atcttaaaatcttagcatta

SEQ ID NO: 123653 - DNA, 20 bp, Artificial Sequence
  Description of Artificial Sequence: Synthetic oligonucleotide
  Target: LAMA2; (+) strand; PAM type: NRG; PAM sequence: GAG
cttaaaatcttagcattata

SEQ ID NO: 123654 - DNA, 20 bp, Artificial Sequence
  Description of Artificial Sequence: Synthetic oligonucleotide
  Target: LAMA2; (+) strand; PAM type: NRG; PAM sequence: AGG
ttaaaatcttagcattatag

SEQ ID NO: 123655 - DNA, 20 bp, Artificial Sequence
  Description of Artificial Sequence: Synthetic oligonucleotide
  Target: LAMA2; (+) strand; PAM type: NRG; PAM sequence: CAG
caatgatgcaatgacaaata

SEQ ID NO: 123656 - DNA, 20 bp, Artificial Sequence
  Description of Artificial Sequence: Synthetic oligonucleotide
  Target: LAMA2; (+) strand; PAM type: NRG; PAM sequence: AGG
aatgatgcaatgacaaatac

SEQ ID NO: 123657 - DNA, 20 bp, Artificial Sequence
  Description of Artificial Sequence: Synthetic oligonucleotide
  Target: LAMA2; (+) strand; PAM type: NRG; PAM sequence: TGG
atgacaaatacaggtccatc

SEQ ID NO: 123658 - DNA, 20 bp, Artificial Sequence
  Description of Artificial Sequence: Synthetic oligonucleotide
  Target: LAMA2; (+) strand; PAM type: NRG; PAM sequence: CAG
tacaggtccatctggtgact

SEQ ID NO: 123659 - DNA, 20 bp, Artificial Sequence
  Description of Artificial Sequence: Synthetic oligonucleotide
  Target: LAMA2; (+) strand; PAM type: NRG; PAM sequence: AGG
acaggtccatctggtgactc

SEQ ID NO: 123660 - DNA, 20 bp, Artificial Sequence
  Description of Artificial Sequence: Synthetic oligonucleotide
  Target: LAMA2; (+) strand; PAM type: NRG; PAM sequence: GGG
caggtccatctggtgactca

SEQ ID NO: 123661 - DNA, 20 bp, Artificial Sequence
  Description of Artificial Sequence: Synthetic oligonucleotide
  Target: LAMA2; (+) strand; PAM type: NRG; PAM sequence: CAG
catctggtgactcagggtcc

SEQ ID NO: 123662 - DNA, 20 bp, Artificial Sequence
  Description of Artificial Sequence: Synthetic oligonucleotide
  Target: LAMA2; (+) strand; PAM type: NRG; PAM sequence: CAG
cgcttatgatgtttccaact

SEQ ID NO: 123663 - DNA, 20 bp, Artificial Sequence
  Description of Artificial Sequence: Synthetic oligonucleotide
  Target: LAMA2; (+) strand; PAM type: NRG; PAM sequence: AGG
gcttatgatgtttccaactc

SEQ ID NO: 123664 - DNA, 20 bp, Artificial Sequence
  Description of Artificial Sequence: Synthetic oligonucleotide
  Target: LAMA2; (+) strand; PAM type: NRG; PAM sequence: TGG
aactcaggaaatgcctttta

SEQ ID NO: 123665 - DNA, 20 bp, Artificial Sequence
  Description of Artificial Sequence: Synthetic oligonucleotide
  Target: LAMA2; (+) strand; PAM type: NRG; PAM sequence: TGG
aatgccttttatggttgcta

SEQ ID NO: 123666 - DNA, 20 bp, Artificial Sequence
  Description of Artificial Sequence: Synthetic oligonucleotide
  Target: LAMA2; (+) strand; PAM type: NRG; PAM sequence: CAG
gccttttatggttgctatgg

SEQ ID NO: 123667 - DNA, 20 bp, Artificial Sequence
  Description of Artificial Sequence: Synthetic oligonucleotide
  Target: LAMA2; (+) strand; PAM type: NRG; PAM sequence: GAG
cttttatggttgctatggca

SEQ ID NO: 123668 - DNA, 20 bp, Artificial Sequence
  Description of Artificial Sequence: Synthetic oligonucleotide
  Target: LAMA2; (+) strand; PAM type: NRG; PAM sequence: AGG
ttttatggttgctatggcag

SEQ ID NO: 123669 - DNA, 20 bp, Artificial Sequence
  Description of Artificial Sequence: Synthetic oligonucleotide
  Target: LAMA2; (+) strand; PAM type: NRG; PAM sequence: AAG
tatggttgctatggcagagg

SEQ ID NO: 123670 - DNA, 20 bp, Artificial Sequence
  Description of Artificial Sequence: Synthetic oligonucleotide
  Target: LAMA2; (+) strand; PAM type: NRG; PAM sequence: GAG
tggttgctatggcagaggaa

SEQ ID NO: 123671 - DNA, 20 bp, Artificial Sequence
  Description of Artificial Sequence: Synthetic oligonucleotide
  Target: LAMA2; (+) strand; PAM type: NRG; PAM sequence: GAG
gttgctatggcagaggaaga

SEQ ID NO: 123672 - DNA, 20 bp, Artificial Sequence
  Description of Artificial Sequence: Synthetic oligonucleotide
  Target: LAMA2; (+) strand; PAM type: NRG; PAM sequence: AGG
ttgctatggcagaggaagag

SEQ ID NO: 123673 - DNA, 20 bp, Artificial Sequence
  Description of Artificial Sequence: Synthetic oligonucleotide
  Target: LAMA2; (+) strand; PAM type: NRG; PAM sequence: GAG
gctatggcagaggaagagag

SEQ ID NO: 123674 - DNA, 20 bp, Artificial Sequence
  Description of Artificial Sequence: Synthetic oligonucleotide
  Target: LAMA2; (+) strand; PAM type: NRG; PAM sequence: TGG
atggcagaggaagagaggag

SEQ ID NO: 123675 - DNA, 20 bp, Artificial Sequence
  Description of Artificial Sequence: Synthetic oligonucleotide
  Target: LAMA2; (+) strand; PAM type: NRG; PAM sequence: GGG
tggcagaggaagagaggagt

SEQ ID NO: 123676 - DNA, 20 bp, Artificial Sequence
  Description of Artificial Sequence: Synthetic oligonucleotide
  Target: LAMA2; (+) strand; PAM type: NRG; PAM sequence: GGG
ggcagaggaagagaggagtg

SEQ ID NO: 123677 - DNA, 20 bp, Artificial Sequence
  Description of Artificial Sequence: Synthetic oligonucleotide
  Target: LAMA2; (+) strand; PAM type: NRG; PAM sequence: GAG
cagaggaagagaggagtggg

SEQ ID NO: 123678 - DNA, 20 bp, Artificial Sequence
  Description of Artificial Sequence: Synthetic oligonucleotide
  Target: LAMA2; (+) strand; PAM type: NRG; PAM sequence: TGG
ggaagagaggagtggggagc

SEQ ID NO: 123679 - DNA, 20 bp, Artificial Sequence
  Description of Artificial Sequence: Synthetic oligonucleotide
  Target: LAMA2; (+) strand; PAM type: NRG; PAM sequence: TAG
aggagtggggagctggcacc

SEQ ID NO: 123680 - DNA, 20 bp, Artificial Sequence
  Description of Artificial Sequence: Synthetic oligonucleotide
  Target: LAMA2; (+) strand; PAM type: NRG; PAM sequence: AGG
ggagtggggagctggcacct

SEQ ID NO: 123681 - DNA, 20 bp, Artificial Sequence
  Description of Artificial Sequence: Synthetic oligonucleotide
  Target: LAMA2; (+) strand; PAM type: NRG; PAM sequence: CAG
ggagctggcacctaggtctt

SEQ ID NO: 123682 - DNA, 20 bp, Artificial Sequence
  Description of Artificial Sequence: Synthetic oligonucleotide
  Target: LAMA2; (+) strand; PAM type: NRG; PAM sequence: CAG
cacctaggtcttcagtgctt

SEQ ID NO: 123683 - DNA, 20 bp, Artificial Sequence
  Description of Artificial Sequence: Synthetic oligonucleotide
  Target: LAMA2; (+) strand; PAM type: NRG; PAM sequence: TAG
taggtcttcagtgcttcagc

SEQ ID NO: 123684 - DNA, 20 bp, Artificial Sequence
  Description of Artificial Sequence: Synthetic oligonucleotide
  Target: LAMA2; (+) strand; PAM type: NRG; PAM sequence: AGG
aggtcttcagtgcttcagct

SEQ ID NO: 123685 - DNA, 20 bp, Artificial Sequence
  Description of Artificial Sequence: Synthetic oligonucleotide
  Target: LAMA2; (+) strand; PAM type: NRG; PAM sequence: AAG
tcttcagtgcttcagctagg

SEQ ID NO: 123686 - DNA, 20 bp, Artificial Sequence
  Description of Artificial Sequence: Synthetic oligonucleotide
  Target: LAMA2; (+) strand; PAM type: NRG; PAM sequence: TAG
gtgcttcagctaggaagtca

SEQ ID NO: 123687 - DNA, 20 bp, Artificial Sequence
  Description of Artificial Sequence: Synthetic oligonucleotide
  Target: LAMA2; (+) strand; PAM type: NRG; PAM sequence: AAG
gctccacatttttacaatct

SEQ ID NO: 123688 - DNA, 20 bp, Artificial Sequence
  Description of Artificial Sequence: Synthetic oligonucleotide
  Target: LAMA2; (+) strand; PAM type: NRG; PAM sequence: TAG
acatttttacaatctaagaa

SEQ ID NO: 123689 - DNA, 20 bp, Artificial Sequence
  Description of Artificial Sequence: Synthetic oligonucleotide
  Target: LAMA2; (+) strand; PAM type: NRG; PAM sequence: CAG
ttttacaatctaagaatagt

SEQ ID NO: 123690 - DNA, 20 bp, Artificial Sequence
  Description of Artificial Sequence: Synthetic oligonucleotide
  Target: LAMA2; (+) strand; PAM type: NRG; PAM sequence: AAG
cagatgcccctcttaactgc

SEQ ID NO: 123691 - DNA, 20 bp, Artificial Sequence
  Description of Artificial Sequence: Synthetic oligonucleotide
  Target: LAMA2; (+) strand; PAM type: NRG; PAM sequence: AGG
agatgcccctcttaactgca

SEQ ID NO: 123692 - DNA, 20 bp, Artificial Sequence
  Description of Artificial Sequence: Synthetic oligonucleotide
  Target: LAMA2; (+) strand; PAM type: NRG; PAM sequence: GGG
gatgcccctcttaactgcaa

SEQ ID NO: 123693 - DNA, 20 bp, Artificial Sequence
  Description of Artificial Sequence: Synthetic oligonucleotide
  Target: LAMA2; (+) strand; PAM type: NRG; PAM sequence: GGG
atgcccctcttaactgcaag

SEQ ID NO: 123694 - DNA, 20 bp, Artificial Sequence
  Description of Artificial Sequence: Synthetic oligonucleotide
  Target: LAMA2; (+) strand; PAM type: NRG; PAM sequence: GAG
cctcttaactgcaaggggct

SEQ ID NO: 123695 - DNA, 20 bp, Artificial Sequence
  Description of Artificial Sequence: Synthetic oligonucleotide
  Target: LAMA2; (+) strand; PAM type: NRG; PAM sequence: AAG
cttaactgcaaggggctgag

SEQ ID NO: 123696 - DNA, 20 bp, Artificial Sequence
  Description of Artificial Sequence: Synthetic oligonucleotide
  Target: LAMA2; (+) strand; PAM type: NRG; PAM sequence: TAG
ctgcaaggggctgagaagtg

SEQ ID NO: 123697 - DNA, 20 bp, Artificial Sequence
  Description of Artificial Sequence: Synthetic oligonucleotide
  Target: LAMA2; (+) strand; PAM type: NRG; PAM sequence: AGG
tgcaaggggctgagaagtgt

SEQ ID NO: 123698 - DNA, 20 bp, Artificial Sequence
  Description of Artificial Sequence: Synthetic oligonucleotide
  Target: LAMA2; (+) strand; PAM type: NRG; PAM sequence: GGG
gcaaggggctgagaagtgta

SEQ ID NO: 123699 - DNA, 20 bp, Artificial Sequence
  Description of Artificial Sequence: Synthetic oligonucleotide
  Target: LAMA2; (+) strand; PAM type: NRG; PAM sequence: AAG
ctgagaagtgtagggaacac

SEQ ID NO: 123700 - DNA, 20 bp, Artificial Sequence
  Description of Artificial Sequence: Synthetic oligonucleotide
  Target: LAMA2; (+) strand; PAM type: NRG; PAM sequence: GAG
ggaacacaagaatatttttt

SEQ ID NO: 123701 - DNA, 20 bp, Artificial Sequence
  Description of Artificial Sequence: Synthetic oligonucleotide
  Target: LAMA2; (+) strand; PAM type: NRG; PAM sequence: GAG
aacacaagaatattttttga

SEQ ID NO: 123702 - DNA, 20 bp, Artificial Sequence
  Description of Artificial Sequence: Synthetic oligonucleotide
  Target: LAMA2; (+) strand; PAM type: NRG; PAM sequence: TGG
ctatctctgcttacatataa

SEQ ID NO: 123703 - DNA, 20 bp, Artificial Sequence
  Description of Artificial Sequence: Synthetic oligonucleotide
  Target: LAMA2; (+) strand; PAM type: NRG; PAM sequence: CAG
tctctgcttacatataatgg

SEQ ID NO: 123704 - DNA, 20 bp, Artificial Sequence
  Description of Artificial Sequence: Synthetic oligonucleotide
  Target: LAMA2; (+) strand; PAM type: NRG; PAM sequence: AAG
ctgcttacatataatggcag

SEQ ID NO: 123705 - DNA, 20 bp, Artificial Sequence
  Description of Artificial Sequence: Synthetic oligonucleotide
  Target: LAMA2; (+) strand; PAM type: NRG; PAM sequence: AAG
aaaatcatactatgctctca

SEQ ID NO: 123706 - DNA, 20 bp, Artificial Sequence
  Description of Artificial Sequence: Synthetic oligonucleotide
  Target: LAMA2; (+) strand; PAM type: NRG; PAM sequence: TAG
tactatgctctcaaagattc

SEQ ID NO: 123707 - DNA, 20 bp, Artificial Sequence
  Description of Artificial Sequence: Synthetic oligonucleotide
  Target: LAMA2; (+) strand; PAM type: NRG; PAM sequence: AAG
atccctgctataatttttac

SEQ ID NO: 123708 - DNA, 20 bp, Artificial Sequence
  Description of Artificial Sequence: Synthetic oligonucleotide
  Target: LAMA2; (+) strand; PAM type: NRG; PAM sequence: TAG
atgtgtgatgtatgtataca

SEQ ID NO: 123709 - DNA, 20 bp, Artificial Sequence
  Description of Artificial Sequence: Synthetic oligonucleotide
  Target: LAMA2; (+) strand; PAM type: NRG; PAM sequence: AAG
tgtatacatagctattaccc

SEQ ID NO: 123710 - DNA, 20 bp, Artificial Sequence
  Description of Artificial Sequence: Synthetic oligonucleotide
  Target: LAMA2; (+) strand; PAM type: NRG; PAM sequence: TGG
cccaagtctttccattaaca

SEQ ID NO: 123711 - DNA, 20 bp, Artificial Sequence
  Description of Artificial Sequence: Synthetic oligonucleotide
  Target: LAMA2; (+) strand; PAM type: NRG; PAM sequence: CAG
ggtgttatatttgtccttac

SEQ ID NO: 123712 - DNA, 20 bp, Artificial Sequence
  Description of Artificial Sequence: Synthetic oligonucleotide
  Target: LAMA2; (+) strand; PAM type: NRG; PAM sequence: TAG
attcctatttaaacatttat

SEQ ID NO: 123713 - DNA, 20 bp, Artificial Sequence
  Description of Artificial Sequence: Synthetic oligonucleotide
  Target: LAMA2; (+) strand; PAM type: NRG; PAM sequence: AAG
ataccattcaactgctcata

SEQ ID NO: 123714 - DNA, 20 bp, Artificial Sequence
  Description of Artificial Sequence: Synthetic oligonucleotide
  Target: LAMA2; (+) strand; PAM type: NRG; PAM sequence: AGG
taccattcaactgctcataa

SEQ ID NO: 123715 - DNA, 20 bp, Artificial Sequence
  Description of Artificial Sequence: Synthetic oligonucleotide
  Target: LAMA2; (+) strand; PAM type: NRG; PAM sequence: GAG
ccattcaactgctcataaag

SEQ ID NO: 123716 - DNA, 20 bp, Artificial Sequence
  Description of Artificial Sequence: Synthetic oligonucleotide
  Target: LAMA2; (+) strand; PAM type: NRG; PAM sequence: AAG
tcaactgctcataaaggaga

SEQ ID NO: 123717 - DNA, 20 bp, Artificial Sequence
  Description of Artificial Sequence: Synthetic oligonucleotide
  Target: LAMA2; (+) strand; PAM type: NRG; PAM sequence: GAG
aactgctcataaaggagaaa

SEQ ID NO: 123718 - DNA, 20 bp, Artificial Sequence
  Description of Artificial Sequence: Synthetic oligonucleotide
  Target: LAMA2; (+) strand; PAM type: NRG; PAM sequence: AGG
actgctcataaaggagaaag

SEQ ID NO: 123719 - DNA, 20 bp, Artificial Sequence
  Description of Artificial Sequence: Synthetic oligonucleotide
  Target: LAMA2; (+) strand; PAM type: NRG; PAM sequence: AAG
gctcataaaggagaaagagg

SEQ ID NO: 123720 - DNA, 20 bp, Artificial Sequence
  Description of Artificial Sequence: Synthetic oligonucleotide
  Target: LAMA2; (+) strand; PAM type: NRG; PAM sequence: GAG
tcataaaggagaaagaggaa

SEQ ID NO: 123721 - DNA, 20 bp, Artificial Sequence
  Description of Artificial Sequence: Synthetic oligonucleotide
  Target: LAMA2; (+) strand; PAM type: NRG; PAM sequence: AAG
taaaggagaaagaggaagag

SEQ ID NO: 123722 - DNA, 20 bp, Artificial Sequence
  Description of Artificial Sequence: Synthetic oligonucleotide
  Target: LAMA2; (+) strand; PAM type: NRG; PAM sequence: AGG
aaaggagaaagaggaagaga

SEQ ID NO: 123723 - DNA, 20 bp, Artificial Sequence
  Description of Artificial Sequence: Synthetic oligonucleotide
  Target: LAMA2; (+) strand; PAM type: NRG; PAM sequence: AAG
ggagaaagaggaagagaagg

SEQ ID NO: 123724 - DNA, 20 bp, Artificial Sequence
  Description of Artificial Sequence: Synthetic oligonucleotide
  Target: LAMA2; (+) strand; PAM type: NRG; PAM sequence: GAG
agaaagaggaagagaaggaa

SEQ ID NO: 123725 - DNA, 20 bp, Artificial Sequence
  Description of Artificial Sequence: Synthetic oligonucleotide
  Target: LAMA2; (+) strand; PAM type: NRG; PAM sequence: AGG
gaaagaggaagagaaggaag

SEQ ID NO: 123726 - DNA, 20 bp, Artificial Sequence
  Description of Artificial Sequence: Synthetic oligonucleotide
  Target: LAMA2; (+) strand; PAM type: NRG; PAM sequence: GAG
aagaggaagagaaggaagag

SEQ ID NO: 123727 - DNA, 20 bp, Artificial Sequence
  Description of Artificial Sequence: Synthetic oligonucleotide
  Target: LAMA2; (+) strand; PAM type: NRG; PAM sequence: AGG
agaggaagagaaggaagagg

SEQ ID NO: 123728 - DNA, 20 bp, Artificial Sequence
  Description of Artificial Sequence: Synthetic oligonucleotide
  Target: LAMA2; (+) strand; PAM type: NRG; PAM sequence: GAG
aggaagagaaggaagaggag

SEQ ID NO: 123729 - DNA, 20 bp, Artificial Sequence
  Description of Artificial Sequence: Synthetic oligonucleotide
  Target: LAMA2; (+) strand; PAM type: NRG; PAM sequence: CAG
gaagaggaggagaaattttc

SEQ ID NO: 123730 - DNA, 20 bp, Artificial Sequence
  Description of Artificial Sequence: Synthetic oligonucleotide
  Target: LAMA2; (+) strand; PAM type: NRG; PAM sequence: AGG
aagaggaggagaaattttcc

SEQ ID NO: 123731 - DNA, 20 bp, Artificial Sequence
  Description of Artificial Sequence: Synthetic oligonucleotide
  Target: LAMA2; (+) strand; PAM type: NRG; PAM sequence: AAG
ggaggagaaattttccaggt

SEQ ID NO: 123732 - DNA, 20 bp, Artificial Sequence
  Description of Artificial Sequence: Synthetic oligonucleotide
  Target: LAMA2; (+) strand; PAM type: NRG; PAM sequence: TAG
aaattttccaggtaagttta

SEQ ID NO: 123733 - DNA, 20 bp, Artificial Sequence
  Description of Artificial Sequence: Synthetic oligonucleotide
  Target: LAMA2; (+) strand; PAM type: NRG; PAM sequence: GAG
attttccaggtaagtttata

SEQ ID NO: 123734 - DNA, 20 bp, Artificial Sequence
  Description of Artificial Sequence: Synthetic oligonucleotide
  Target: LAMA2; (+) strand; PAM type: NRG; PAM sequence: AAG
ccaggtaagtttatagagta

SEQ ID NO: 123735 - DNA, 20 bp, Artificial Sequence
  Description of Artificial Sequence: Synthetic oligonucleotide
  Target: LAMA2; (+) strand; PAM type: NRG; PAM sequence: AGG
caggtaagtttatagagtaa

SEQ ID NO: 123736 - DNA, 20 bp, Artificial Sequence
  Description of Artificial Sequence: Synthetic oligonucleotide
  Target: LAMA2; (+) strand; PAM type: NRG; PAM sequence: GAG
cctgccattttgattgtttt

SEQ ID NO: 123737 - DNA, 20 bp, Artificial Sequence
  Description of Artificial Sequence: Synthetic oligonucleotide
  Target: LAMA2; (+) strand; PAM type: NRG; PAM sequence: CAG
ttgagtatcaattaaattat

SEQ ID NO: 123738 - DNA, 20 bp, Artificial Sequence
  Description of Artificial Sequence: Synthetic oligonucleotide
  Target: LAMA2; (+) strand; PAM type: NRG; PAM sequence: AAG
aaattatcagttaataattc

SEQ ID NO: 123739 - DNA, 20 bp, Artificial Sequence
  Description of Artificial Sequence: Synthetic oligonucleotide
  Target: LAMA2; (+) strand; PAM type: NRG; PAM sequence: CAG
taattcaagaaaatatatcc

SEQ ID NO: 123740 - DNA, 20 bp, Artificial Sequence
  Description of Artificial Sequence: Synthetic oligonucleotide
  Target: LAMA2; (+) strand; PAM type: NRG; PAM sequence: AGG
aattcaagaaaatatatccc

SEQ ID NO: 123741 - DNA, 20 bp, Artificial Sequence
  Description of Artificial Sequence: Synthetic oligonucleotide
  Target: LAMA2; (+) strand; PAM type: NRG; PAM sequence: AAG
atcccctgtataataaacta

SEQ ID NO: 123742 - DNA, 20 bp, Artificial Sequence
  Description of Artificial Sequence: Synthetic oligonucleotide
  Target: LAMA2; (+) strand; PAM type: NRG; PAM sequence: TAG
aaaaatttatactcccctct

SEQ ID NO: 123743 - DNA, 20 bp, Artificial Sequence
  Description of Artificial Sequence: Synthetic oligonucleotide
  Target: LAMA2; (+) strand; PAM type: NRG; PAM sequence: AAG
cccctcttagatattaataa

SEQ ID NO: 123744 - DNA, 20 bp, Artificial Sequence
  Description of Artificial Sequence: Synthetic oligonucleotide
  Target: LAMA2; (+) strand; PAM type: NRG; PAM sequence: CAG
attaataaaagctcaatgta

SEQ ID NO: 123745 - DNA, 20 bp, Artificial Sequence
  Description of Artificial Sequence: Synthetic oligonucleotide
  Target: LAMA2; (+) strand; PAM type: NRG; PAM sequence: AGG
ttaataaaagctcaatgtac

SEQ ID NO: 123746 - DNA, 20 bp, Artificial Sequence
  Description of Artificial Sequence: Synthetic oligonucleotide
  Target: LAMA2; (+) strand; PAM type: NRG; PAM sequence: TAG
ataaaagctcaatgtacagg

SEQ ID NO: 123747 - DNA, 20 bp, Artificial Sequence
  Description of Artificial Sequence: Synthetic oligonucleotide
  Target: LAMA2; (+) strand; PAM type: NRG; PAM sequence: TAG
aagctcaatgtacaggtagc

SEQ ID NO: 123748 - DNA, 20 bp, Artificial Sequence
  Description of Artificial Sequence: Synthetic oligonucleotide
  Target: LAMA2; (+) strand; PAM type: NRG; PAM sequence: AGG
agctcaatgtacaggtagct

SEQ ID NO: 123749 - DNA, 20 bp, Artificial Sequence
  Description of Artificial Sequence: Synthetic oligonucleotide
  Target: LAMA2; (+) strand; PAM type: NRG; PAM sequence: GGG
gctcaatgtacaggtagcta

SEQ ID NO: 123750 - DNA, 20 bp, Artificial Sequence
  Description of Artificial Sequence: Synthetic oligonucleotide
  Target: LAMA2; (+) strand; PAM type: NRG; PAM sequence: TGG
gtgccccccgtcttccctgc

SEQ ID NO: 123751 - DNA, 20 bp, Artificial Sequence
  Description of Artificial Sequence: Synthetic oligonucleotide
  Target: LAMA2; (+) strand; PAM type: NRG; PAM sequence: TAG
cgtcttccctgctggatttg

SEQ ID NO: 123752 - DNA, 20 bp, Artificial Sequence
  Description of Artificial Sequence: Synthetic oligonucleotide
  Target: LAMA2; (+) strand; PAM type: NRG; PAM sequence: AGG
gtcttccctgctggatttgt

SEQ ID NO: 123753 - DNA, 20 bp, Artificial Sequence
  Description of Artificial Sequence: Synthetic oligonucleotide
  Target: LAMA2; (+) strand; PAM type: NRG; PAM sequence: CAG
atttgtaggtcctgctcatg

SEQ ID NO: 123754 - DNA, 20 bp, Artificial Sequence
  Description of Artificial Sequence: Synthetic oligonucleotide
  Target: LAMA2; (+) strand; PAM type: NRG; PAM sequence: GAG
ttgtaggtcctgctcatgca

SEQ ID NO: 123755 - DNA, 20 bp, Artificial Sequence
  Description of Artificial Sequence: Synthetic oligonucleotide
  Target: LAMA2; (+) strand; PAM type: NRG; PAM sequence: AGG
tgtaggtcctgctcatgcag

SEQ ID NO: 123756 - DNA, 20 bp, Artificial Sequence
  Description of Artificial Sequence: Synthetic oligonucleotide
  Target: LAMA2; (+) strand; PAM type: NRG; PAM sequence: GGG
gtaggtcctgctcatgcaga

SEQ ID NO: 123757 - DNA, 20 bp, Artificial Sequence
  Description of Artificial Sequence: Synthetic oligonucleotide
  Target: LAMA2; (+) strand; PAM type: NRG; PAM sequence: GGG
taggtcctgctcatgcagag

SEQ ID NO: 123758 - DNA, 20 bp, Artificial Sequence
  Description of Artificial Sequence: Synthetic oligonucleotide
  Target: LAMA2; (+) strand; PAM type: NRG; PAM sequence: CAG
catgcagaggggttatttcc

SEQ ID NO: 123759 - DNA, 20 bp, Artificial Sequence
  Description of Artificial Sequence: Synthetic oligonucleotide
  Target: LAMA2; (+) strand; PAM type: NRG; PAM sequence: TGG
aggggttatttcccagcatg

SEQ ID NO: 123760 - DNA, 20 bp, Artificial Sequence
  Description of Artificial Sequence: Synthetic oligonucleotide
  Target: LAMA2; (+) strand; PAM type: NRG; PAM sequence: TAG
tgctctatttgactccactg

SEQ ID NO: 123761 - DNA, 20 bp, Artificial Sequence
  Description of Artificial Sequence: Synthetic oligonucleotide
  Target: LAMA2; (+) strand; PAM type: NRG; PAM sequence: AGG
gctctatttgactccactgt

SEQ ID NO: 123762 - DNA, 20 bp, Artificial Sequence
  Description of Artificial Sequence: Synthetic oligonucleotide
  Target: LAMA2; (+) strand; PAM type: NRG; PAM sequence: TAG
tacacaattacgtcttcttt

SEQ ID NO: 123763 - DNA, 20 bp, Artificial Sequence
  Description of Artificial Sequence: Synthetic oligonucleotide
  Target: LAMA2; (+) strand; PAM type: NRG; PAM sequence: GAG
cacaattacgtcttctttta

SEQ ID NO: 123764 - DNA, 20 bp, Artificial Sequence
  Description of Artificial Sequence: Synthetic oligonucleotide
  Target: LAMA2; (+) strand; PAM type: NRG; PAM sequence: AAG
aattacgtcttcttttagag

SEQ ID NO: 123765 - DNA, 20 bp, Artificial Sequence
  Description of Artificial Sequence: Synthetic oligonucleotide
  Target: LAMA2; (+) strand; PAM type: NRG; PAM sequence: GAG
ttacgtcttcttttagagaa

SEQ ID NO: 123766 - DNA, 20 bp, Artificial Sequence
  Description of Artificial Sequence: Synthetic oligonucleotide
  Target: LAMA2; (+) strand; PAM type: NRG; PAM sequence: CAG
agagaagagaattatttaac

SEQ ID NO: 123767 - DNA, 20 bp, Artificial Sequence
  Description of Artificial Sequence: Synthetic oligonucleotide
  Target: LAMA2; (+) strand; PAM type: NRG; PAM sequence: AAG
taaccagaaataacatcaac

SEQ ID NO: 123768 - DNA, 20 bp, Artificial Sequence
  Description of Artificial Sequence: Synthetic oligonucleotide
  Target: LAMA2; (+) strand; PAM type: NRG; PAM sequence: CAG
taacatcaacaagcctttta

SEQ ID NO: 123769 - DNA, 20 bp, Artificial Sequence
  Description of Artificial Sequence: Synthetic oligonucleotide
  Target: LAMA2; (+) strand; PAM type: NRG; PAM sequence: AAG
tttacagaatatacatgctt

SEQ ID NO: 123770 - DNA, 20 bp, Artificial Sequence
  Description of Artificial Sequence: Synthetic oligonucleotide
  Target: LAMA2; (+) strand; PAM type: NRG; PAM sequence: GAG
aagtttcacaccatattgtt

SEQ ID NO: 123771 - DNA, 20 bp, Artificial Sequence
  Description of Artificial Sequence: Synthetic oligonucleotide
  Target: LAMA2; (+) strand; PAM type: NRG; PAM sequence: AAG
ccatattgttgagatatttt

SEQ ID NO: 123772 - DNA, 20 bp, Artificial Sequence
  Description of Artificial Sequence: Synthetic oligonucleotide
  Target: LAMA2; (+) strand; PAM type: NRG; PAM sequence: TAG
tattttaagtgtttaaaaaa

SEQ ID NO: 123773 - DNA, 20 bp, Artificial Sequence
  Description of Artificial Sequence: Synthetic oligonucleotide
  Target: LAMA2; (+) strand; PAM type: NRG; PAM sequence: CGG
aatagtatgtgaatatattt

SEQ ID NO: 123774 - DNA, 20 bp, Artificial Sequence
  Description of Artificial Sequence: Synthetic oligonucleotide
  Target: LAMA2; (+) strand; PAM type: NRG; PAM sequence: AAG
tttcggttgtaaaaaattca

SEQ ID NO: 123775 - DNA, 20 bp, Artificial Sequence
  Description of Artificial Sequence: Synthetic oligonucleotide
  Target: LAMA2; (+) strand; PAM type: NRG; PAM sequence: AGG
ttcggttgtaaaaaattcaa

SEQ ID NO: 123776 - DNA, 20 bp, Artificial Sequence
  Description of Artificial Sequence: Synthetic oligonucleotide
  Target: LAMA2; (+) strand; PAM type: NRG; PAM sequence: AAG
ggttgtaaaaaattcaaagg

SEQ ID NO: 123777 - DNA, 20 bp, Artificial Sequence
  Description of Artificial Sequence: Synthetic oligonucleotide
  Target: LAMA2; (+) strand; PAM type: NRG; PAM sequence: TAG
aaaggaagctttatacccat

SEQ ID NO: 123778 - DNA, 20 bp, Artificial Sequence
  Description of Artificial Sequence: Synthetic oligonucleotide
  Target: LAMA2; (+) strand; PAM type: NRG; PAM sequence: AGG
aaggaagctttatacccatt

SEQ ID NO: 123779 - DNA, 20 bp, Artificial Sequence
  Description of Artificial Sequence: Synthetic oligonucleotide
  Target: LAMA2; (+) strand; PAM type: NRG; PAM sequence: TGG
aagctttatacccattagga

SEQ ID NO: 123780 - DNA, 20 bp, Artificial Sequence
  Description of Artificial Sequence: Synthetic oligonucleotide
  Target: LAMA2; (+) strand; PAM type: NRG; PAM sequence: TGG
ggctgccataattttaaaaa

SEQ ID NO: 123781 - DNA, 20 bp, Artificial Sequence
  Description of Artificial Sequence: Synthetic oligonucleotide
  Target: LAMA2; (+) strand; PAM type: NRG; PAM sequence: AAG
tgccataattttaaaaatgg

SEQ ID NO: 123782 - DNA, 20 bp, Artificial Sequence
  Description of Artificial Sequence: Synthetic oligonucleotide
  Target: LAMA2; (+) strand; PAM type: NRG; PAM sequence: AGG
gccataattttaaaaatgga

SEQ ID NO: 123783 - DNA, 20 bp, Artificial Sequence
  Description of Artificial Sequence: Synthetic oligonucleotide
  Target: LAMA2; (+) strand; PAM type: NRG; PAM sequence: TAG
ataattttaaaaatggaagg

SEQ ID NO: 123784 - DNA, 20 bp, Artificial Sequence
  Description of Artificial Sequence: Synthetic oligonucleotide
  Target: LAMA2; (+) strand; PAM type: NRG; PAM sequence: TGG
taaaaatggaaggtagaaat

SEQ ID NO: 123785 - DNA, 20 bp, Artificial Sequence
  Description of Artificial Sequence: Synthetic oligonucleotide
  Target: LAMA2; (+) strand; PAM type: NRG; PAM sequence: GAG
aatggaaggtagaaattggt

SEQ ID NO: 123786 - DNA, 20 bp, Artificial Sequence
  Description of Artificial Sequence: Synthetic oligonucleotide
  Target: LAMA2; (+) strand; PAM type: NRG; PAM sequence: AGG
atggaaggtagaaattggtg

SEQ ID NO: 123787 - DNA, 20 bp, Artificial Sequence
  Description of Artificial Sequence: Synthetic oligonucleotide
  Target: LAMA2; (+) strand; PAM type: NRG; PAM sequence: AAG
tagaaattggtgaggatgtg

SEQ ID NO: 123788 - DNA, 20 bp, Artificial Sequence
  Description of Artificial Sequence: Synthetic oligonucleotide
  Target: LAMA2; (+) strand; PAM type: NRG; PAM sequence: AGG
agaaattggtgaggatgtga

SEQ ID NO: 123789 - DNA, 20 bp, Artificial Sequence
  Description of Artificial Sequence: Synthetic oligonucleotide
  Target: LAMA2; (+) strand; PAM type: NRG; PAM sequence: TAG
tggtgaggatgtgaaggaat

SEQ ID NO: 123790 - DNA, 20 bp, Artificial Sequence
  Description of Artificial Sequence: Synthetic oligonucleotide
  Target: LAMA2; (+) strand; PAM type: NRG; PAM sequence: AAG
tgaggatgtgaaggaattag

SEQ ID NO: 123791 - DNA, 20 bp, Artificial Sequence
  Description of Artificial Sequence: Synthetic oligonucleotide
  Target: LAMA2; (+) strand; PAM type: NRG; PAM sequence: TGG
gaagccttatgcattgttga

SEQ ID NO: 123792 - DNA, 20 bp, Artificial Sequence
  Description of Artificial Sequence: Synthetic oligonucleotide
  Target: LAMA2; (+) strand; PAM type: NRG; PAM sequence: GGG
aagccttatgcattgttgat

SEQ ID NO: 123793 - DNA, 20 bp, Artificial Sequence
  Description of Artificial Sequence: Synthetic oligonucleotide
  Target: LAMA2; (+) strand; PAM type: NRG; PAM sequence: TGG
ttgttgatgggaatataaaa

SEQ ID NO: 123794 - DNA, 20 bp, Artificial Sequence
  Description of Artificial Sequence: Synthetic oligonucleotide
  Target: LAMA2; (+) strand; PAM type: NRG; PAM sequence: TGG
ataaaatggtgtgacaatca

SEQ ID NO: 123795 - DNA, 20 bp, Artificial Sequence
  Description of Artificial Sequence: Synthetic oligonucleotide
  Target: LAMA2; (+) strand; PAM type: NRG; PAM sequence: CAG
ggtgtgacaatcatggaaaa

SEQ ID NO: 123796 - DNA, 20 bp, Artificial Sequence
  Description of Artificial Sequence: Synthetic oligonucleotide
  Target: LAMA2; (+) strand; PAM type: NRG; PAM sequence: TGG
gacaatcatggaaaacagta

SEQ ID NO: 123797 - DNA, 20 bp, Artificial Sequence
  Description of Artificial Sequence: Synthetic oligonucleotide
  Target: LAMA2; (+) strand; PAM type: NRG; PAM sequence: GAG
caatcatggaaaacagtatg

SEQ ID NO: 123798 - DNA, 20 bp, Artificial Sequence
  Description of Artificial Sequence: Synthetic oligonucleotide
  Target: LAMA2; (+) strand; PAM type: NRG; PAM sequence: AGG
aatcatggaaaacagtatgg

SEQ ID NO: 123799 - DNA, 20 bp, Artificial Sequence
  Description of Artificial Sequence: Synthetic oligonucleotide
  Target: LAMA2; (+) strand; PAM type: NRG; PAM sequence: GGG
atcatggaaaacagtatgga

SEQ ID NO: 123800 - DNA, 20 bp, Artificial Sequence
  Description of Artificial Sequence: Synthetic oligonucleotide
  Target: LAMA2; (+) strand; PAM type: NRG; PAM sequence: TAG
ggtcctcaaaacattacaaa

SEQ ID NO: 123801 - DNA, 20 bp, Artificial Sequence
  Description of Artificial Sequence: Synthetic oligonucleotide
  Target: LAMA2; (+) strand; PAM type: NRG; PAM sequence: TAG
cattacaaatagaattacaa

SEQ ID NO: 123802 - DNA, 20 bp, Artificial Sequence
  Description of Artificial Sequence: Synthetic oligonucleotide
  Target: LAMA2; (+) strand; PAM type: NRG; PAM sequence: AGG
attacaaatagaattacaat

SEQ ID NO: 123803 - DNA, 20 bp, Artificial Sequence
  Description of Artificial Sequence: Synthetic oligonucleotide
  Target: LAMA2; (+) strand; PAM type: NRG; PAM sequence: TGG
ggatccaacaattccacttc

SEQ ID NO: 123804 - DNA, 20 bp, Artificial Sequence
  Description of Artificial Sequence: Synthetic oligonucleotide
  Target: LAMA2; (+) strand; PAM type: NRG; PAM sequence: GGG
gatccaacaattccacttct

SEQ ID NO: 123805 - DNA, 20 bp, Artificial Sequence
  Description of Artificial Sequence: Synthetic oligonucleotide
  Target: LAMA2; (+) strand; PAM type: NRG; PAM sequence: AAG
aatatgccccaaataattaa

SEQ ID NO: 123806 - DNA, 20 bp, Artificial Sequence
  Description of Artificial Sequence: Synthetic oligonucleotide
  Target: LAMA2; (+) strand; PAM type: NRG; PAM sequence: CAG
atgccccaaataattaaaag

SEQ ID NO: 123807 - DNA, 20 bp, Artificial Sequence
  Description of Artificial Sequence: Synthetic oligonucleotide
  Target: LAMA2; (+) strand; PAM type: NRG; PAM sequence: AGG
tgccccaaataattaaaagc

SEQ ID NO: 123808 - DNA, 20 bp, Artificial Sequence
  Description of Artificial Sequence: Synthetic oligonucleotide
  Target: LAMA2; (+) strand; PAM type: NRG; PAM sequence: GGG
gccccaaataattaaaagca

SEQ ID NO: 123809 - DNA, 20 bp, Artificial Sequence
  Description of Artificial Sequence: Synthetic oligonucleotide
  Target: LAMA2; (+) strand; PAM type: NRG; PAM sequence: AAG
attaaaagcagggtcctgaa

SEQ ID NO: 123810 - DNA, 20 bp, Artificial Sequence
  Description of Artificial Sequence: Synthetic oligonucleotide
  Target: LAMA2; (+) strand; PAM type: NRG; PAM sequence: TAG
atatttatacatctctgtca

SEQ ID NO: 123811 - DNA, 20 bp, Artificial Sequence
  Description of Artificial Sequence: Synthetic oligonucleotide
  Target: LAMA2; (+) strand; PAM type: NRG; PAM sequence: TAG
tttatacatctctgtcatag

SEQ ID NO: 123812 - DNA, 20 bp, Artificial Sequence
  Description of Artificial Sequence: Synthetic oligonucleotide
  Target: LAMA2; (+) strand; PAM type: NRG; PAM sequence: TGG
catagtagcattatttacaa

SEQ ID NO: 123813 - DNA, 20 bp, Artificial Sequence
  Description of Artificial Sequence: Synthetic oligonucleotide
  Target: LAMA2; (+) strand; PAM type: NRG; PAM sequence: AAG
gcattatttacaatggccaa

SEQ ID NO: 123814 - DNA, 20 bp, Artificial Sequence
  Description of Artificial Sequence: Synthetic oligonucleotide
  Target: LAMA2; (+) strand; PAM type: NRG; PAM sequence: AGG
cattatttacaatggccaaa

SEQ ID NO: 123815 - DNA, 20 bp, Artificial Sequence
  Description of Artificial Sequence: Synthetic oligonucleotide
  Target: LAMA2; (+) strand; PAM type: NRG; PAM sequence: TGG
tatttacaatggccaaaagg

SEQ ID NO: 123816 - DNA, 20 bp, Artificial Sequence
  Description of Artificial Sequence: Synthetic oligonucleotide
  Target: LAMA2; (+) strand; PAM type: NRG; PAM sequence: GGG
atttacaatggccaaaaggt

SEQ ID NO: 123817 - DNA, 20 bp, Artificial Sequence
  Description of Artificial Sequence: Synthetic oligonucleotide
  Target: LAMA2; (+) strand; PAM type: NRG; PAM sequence: GAG
ttacaatggccaaaaggtgg

SEQ ID NO: 123818 - DNA, 20 bp, Artificial Sequence
  Description of Artificial Sequence: Synthetic oligonucleotide
  Target: LAMA2; (+) strand; PAM type: NRG; PAM sequence: TGG
gccaaaaggtgggagaaacc

SEQ ID NO: 123819 - DNA, 20 bp, Artificial Sequence
  Description of Artificial Sequence: Synthetic oligonucleotide
  Target: LAMA2; (+) strand; PAM type: NRG; PAM sequence: CAG
gggagaaacctggctgttga

SEQ ID NO: 123820 - DNA, 20 bp, Artificial Sequence
  Description of Artificial Sequence: Synthetic oligonucleotide
  Target: LAMA2; (+) strand; PAM type: NRG; PAM sequence: TAG
cctggctgttgacagacgaa

SEQ ID NO: 123821 - DNA, 20 bp, Artificial Sequence
  Description of Artificial Sequence: Synthetic oligonucleotide
  Target: LAMA2; (+) strand; PAM type: NRG; PAM sequence: TGG
aatgttgtgcatgtatacga

SEQ ID NO: 123822 - DNA, 20 bp, Artificial Sequence
  Description of Artificial Sequence: Synthetic oligonucleotide
  Target: LAMA2; (+) strand; PAM type: NRG; PAM sequence: AAG
gaacattattccgtctgtaa

SEQ ID NO: 123823 - DNA, 20 bp, Artificial Sequence
  Description of Artificial Sequence: Synthetic oligonucleotide
  Target: LAMA2; (+) strand; PAM type: NRG; PAM sequence: GAG
acattattccgtctgtaaaa

SEQ ID NO: 123824 - DNA, 20 bp, Artificial Sequence
  Description of Artificial Sequence: Synthetic oligonucleotide
  Target: LAMA2; (+) strand; PAM type: NRG; PAM sequence: GAG
attattccgtctgtaaaaga

SEQ ID NO: 123825 - DNA, 20 bp, Artificial Sequence
  Description of Artificial Sequence: Synthetic oligonucleotide
  Target: LAMA2; (+) strand; PAM type: NRG; PAM sequence: AGG
ttattccgtctgtaaaagag

SEQ ID NO: 123826 - DNA, 20 bp, Artificial Sequence
  Description of Artificial Sequence: Synthetic oligonucleotide
  Target: LAMA2; (+) strand; PAM type: NRG; PAM sequence: TGG
gacacatgctaccatatgaa

SEQ ID NO: 123827 - DNA, 20 bp, Artificial Sequence
  Description of Artificial Sequence: Synthetic oligonucleotide
  Target: LAMA2; (+) strand; PAM type: NRG; PAM sequence: GAG
ctaccatatgaatggacctt

SEQ ID NO: 123828 - DNA, 20 bp, Artificial Sequence
  Description of Artificial Sequence: Synthetic oligonucleotide
  Target: LAMA2; (+) strand; PAM type: NRG; PAM sequence: AGG
taccatatgaatggaccttg

SEQ ID NO: 123829 - DNA, 20 bp, Artificial Sequence
  Description of Artificial Sequence: Synthetic oligonucleotide
  Target: LAMA2; (+) strand; PAM type: NRG; PAM sequence: AAG
gaccttgaggacattctgct

SEQ ID NO: 123830 - DNA, 20 bp, Artificial Sequence
  Description of Artificial Sequence: Synthetic oligonucleotide
  Target: LAMA2; (+) strand; PAM type: NRG; PAM sequence: CAG
ttctgctaagtgaaatatac

SEQ ID NO: 123831 - DNA, 20 bp, Artificial Sequence
  Description of Artificial Sequence: Synthetic oligonucleotide
  Target: LAMA2; (+) strand; PAM type: NRG; PAM sequence: AAG
tgaaatataccagtcacaaa

SEQ ID NO: 123832 - DNA, 20 bp, Artificial Sequence
  Description of Artificial Sequence: Synthetic oligonucleotide
  Target: LAMA2; (+) strand; PAM type: NRG; PAM sequence: TAG
ctgttatgattctacttacc

SEQ ID NO: 123833 - DNA, 20 bp, Artificial Sequence
  Description of Artificial Sequence: Synthetic oligonucleotide
  Target: LAMA2; (+) strand; PAM type: NRG; PAM sequence: GAG
gttatgattctacttaccta

SEQ ID NO: 123834 - DNA, 20 bp, Artificial Sequence
  Description of Artificial Sequence: Synthetic oligonucleotide
  Target: LAMA2; (+) strand; PAM type: NRG; PAM sequence: TAG
atgattctacttacctagag

SEQ ID NO: 123835 - DNA, 20 bp, Artificial Sequence
  Description of Artificial Sequence: Synthetic oligonucleotide
  Target: LAMA2; (+) strand; PAM type: NRG; PAM sequence: CAG
ttctacttacctagagtagt

SEQ ID NO: 123836 - DNA, 20 bp, Artificial Sequence
  Description of Artificial Sequence: Synthetic oligonucleotide
  Target: LAMA2; (+) strand; PAM type: NRG; PAM sequence: TAG
acctagagtagtcagaatca

SEQ ID NO: 123837 - DNA, 20 bp, Artificial Sequence
  Description of Artificial Sequence: Synthetic oligonucleotide
  Target: LAMA2; (+) strand; PAM type: NRG; PAM sequence: GAG
ctagagtagtcagaatcata

SEQ ID NO: 123838 - DNA, 20 bp, Artificial Sequence
  Description of Artificial Sequence: Synthetic oligonucleotide
  Target: LAMA2; (+) strand; PAM type: NRG; PAM sequence: CAG
agtagtcagaatcatagaga

SEQ ID NO: 123839 - DNA, 20 bp, Artificial Sequence
  Description of Artificial Sequence: Synthetic oligonucleotide
  Target: LAMA2; (+) strand; PAM type: NRG; PAM sequence: AAG
gtcagaatcatagagacaga

SEQ ID NO: 123840 - DNA, 20 bp, Artificial Sequence
  Description of Artificial Sequence: Synthetic oligonucleotide
  Target: LAMA2; (+) strand; PAM type: NRG; PAM sequence: TGG
catagagacagaaagtataa

SEQ ID NO: 123841 - DNA, 20 bp, Artificial Sequence
  Description of Artificial Sequence: Synthetic oligonucleotide
  Target: LAMA2; (+) strand; PAM type: NRG; PAM sequence: TAG
gaaagtataatggtgattac

SEQ ID NO: 123842 - DNA, 20 bp, Artificial Sequence
  Description of Artificial Sequence: Synthetic oligonucleotide
  Target: LAMA2; (+) strand; PAM type: NRG; PAM sequence: CGG
agtataatggtgattactag

SEQ ID NO: 123843 - DNA, 20 bp, Artificial Sequence
  Description of Artificial Sequence: Synthetic oligonucleotide
  Target: LAMA2; (+) strand; PAM type: NRG; PAM sequence: CAG
atggtgattactagcggctg

SEQ ID NO: 123844 - DNA, 20 bp, Artificial Sequence
  Description of Artificial Sequence: Synthetic oligonucleotide
  Target: LAMA2; (+) strand; PAM type: NRG; PAM sequence: AGG
tggtgattactagcggctgc

SEQ ID NO: 123845 - DNA, 20 bp, Artificial Sequence
  Description of Artificial Sequence: Synthetic oligonucleotide
  Target: LAMA2; (+) strand; PAM type: NRG; PAM sequence: GGG
ggtgattactagcggctgca

SEQ ID NO: 123846 - DNA, 20 bp, Artificial Sequence
  Description of Artificial Sequence: Synthetic oligonucleotide
  Target: LAMA2; (+) strand; PAM type: NRG; PAM sequence: GAG
tgattactagcggctgcagg

SEQ ID NO: 123847 - DNA, 20 bp, Artificial Sequence
  Description of Artificial Sequence: Synthetic oligonucleotide
  Target: LAMA2; (+) strand; PAM type: NRG; PAM sequence: GAG
attactagcggctgcaggga

SEQ ID NO: 123848 - DNA, 20 bp, Artificial Sequence
  Description of Artificial Sequence: Synthetic oligonucleotide
  Target: LAMA2; (+) strand; PAM type: NRG; PAM sequence: GAG
tactagcggctgcagggaga

SEQ ID NO: 123849 - DNA, 20 bp, Artificial Sequence
  Description of Artificial Sequence: Synthetic oligonucleotide
  Target: LAMA2; (+) strand; PAM type: NRG; PAM sequence: AGG
actagcggctgcagggagag

SEQ ID NO: 123850 - DNA, 20 bp, Artificial Sequence
  Description of Artificial Sequence: Synthetic oligonucleotide
  Target: LAMA2; (+) strand; PAM type: NRG; PAM sequence: TAG
cggctgcagggagagaggaa

SEQ ID NO: 123851 - DNA, 20 bp, Artificial Sequence
  Description of Artificial Sequence: Synthetic oligonucleotide
  Target: LAMA2; (+) strand; PAM type: NRG; PAM sequence: AGG
ggctgcagggagagaggaat

SEQ ID NO: 123852 - DNA, 20 bp, Artificial Sequence
  Description of Artificial Sequence: Synthetic oligonucleotide
  Target: LAMA2; (+) strand; PAM type: NRG; PAM sequence: GGG
gctgcagggagagaggaata

SEQ ID NO: 123853 - DNA, 20 bp, Artificial Sequence
  Description of Artificial Sequence: Synthetic oligonucleotide
  Target: LAMA2; (+) strand; PAM type: NRG; PAM sequence: GAG
tgcagggagagaggaatagg

SEQ ID NO: 123854 - DNA, 20 bp, Artificial Sequence
  Description of Artificial Sequence: Synthetic oligonucleotide
  Target: LAMA2; (+) strand; PAM type: NRG; PAM sequence: GAG
atagggagttattatttaat

SEQ ID NO: 123855 - DNA, 20 bp, Artificial Sequence
  Description of Artificial Sequence: Synthetic oligonucleotide
  Target: LAMA2; (+) strand; PAM type: NRG; PAM sequence: GAG
gttattatttaatgagtacc

SEQ ID NO: 123856 - DNA, 20 bp, Artificial Sequence
  Description of Artificial Sequence: Synthetic oligonucleotide
  Target: LAMA2; (+) strand; PAM type: NRG; PAM sequence: CAG
atttaatgagtaccgagttt

SEQ ID NO: 123857 - DNA, 20 bp, Artificial Sequence
  Description of Artificial Sequence: Synthetic oligonucleotide
  Target: LAMA2; (+) strand; PAM type: NRG; PAM sequence: AAG
gtaccgagtttcagttttgc

SEQ ID NO: 123858 - DNA, 20 bp, Artificial Sequence
  Description of Artificial Sequence: Synthetic oligonucleotide
  Target: LAMA2; (+) strand; PAM type: NRG; PAM sequence: AAG
tttcagttttgcaagatgaa

SEQ ID NO: 123859 - DNA, 20 bp, Artificial Sequence
  Description of Artificial Sequence: Synthetic oligonucleotide
  Target: LAMA2; (+) strand; PAM type: NRG; PAM sequence: TGG
ttgcaagatgaaaagcattc

SEQ ID NO: 123860 - DNA, 20 bp, Artificial Sequence
  Description of Artificial Sequence: Synthetic oligonucleotide
  Target: LAMA2; (+) strand; PAM type: NRG; PAM sequence: TGG
aaaagcattctggatgtgaa

SEQ ID NO: 123861 - DNA, 20 bp, Artificial Sequence
  Description of Artificial Sequence: Synthetic oligonucleotide
  Target: LAMA2; (+) strand; PAM type: NRG; PAM sequence: TGG
ctggatgtgaatggtgttga

SEQ ID NO: 123862 - DNA, 20 bp, Artificial Sequence
  Description of Artificial Sequence: Synthetic oligonucleotide
  Target: LAMA2; (+) strand; PAM type: NRG; PAM sequence: AAG
gatggttgcacaacaatgtg

SEQ ID NO: 123863 - DNA, 20 bp, Artificial Sequence
  Description of Artificial Sequence: Synthetic oligonucleotide
  Target: LAMA2; (+) strand; PAM type: NRG; PAM sequence: AGG
atggttgcacaacaatgtga

SEQ ID NO: 123864 - DNA, 20 bp, Artificial Sequence
  Description of Artificial Sequence: Synthetic oligonucleotide
  Target: LAMA2; (+) strand; PAM type: NRG; PAM sequence: TGG
ctgaactgtatacttaaaaa

SEQ ID NO: 123865 - DNA, 20 bp, Artificial Sequence
  Description of Artificial Sequence: Synthetic oligonucleotide
  Target: LAMA2; (+) strand; PAM type: NRG; PAM sequence: AAG
aatactttaaaataattcaa

SEQ ID NO: 123866 - DNA, 20 bp, Artificial Sequence
  Description of Artificial Sequence: Synthetic oligonucleotide
  Target: LAMA2; (+) strand; PAM type: NRG; PAM sequence: CAG
aaaagtaacatcctcactcc

SEQ ID NO: 123867 - DNA, 20 bp, Artificial Sequence
  Description of Artificial Sequence: Synthetic oligonucleotide
  Target: LAMA2; (+) strand; PAM type: NRG; PAM sequence: CAG
ctcactcccagtgctctata

SEQ ID NO: 123868 - DNA, 20 bp, Artificial Sequence
  Description of Artificial Sequence: Synthetic oligonucleotide
  Target: LAMA2; (+) strand; PAM type: NRG; PAM sequence: GAG
cactcccagtgctctataca

SEQ ID NO: 123869 - DNA, 20 bp, Artificial Sequence
  Description of Artificial Sequence: Synthetic oligonucleotide
  Target: LAMA2; (+) strand; PAM type: NRG; PAM sequence: TAG
aaaccaatgtctttattctt

SEQ ID NO: 123870 - DNA, 20 bp, Artificial Sequence
  Description of Artificial Sequence: Synthetic oligonucleotide
  Target: LAMA2; (+) strand; PAM type: NRG; PAM sequence: TAG
tctttagttctgcgtttaca

SEQ ID NO: 123871 - DNA, 20 bp, Artificial Sequence
  Description of Artificial Sequence: Synthetic oligonucleotide
  Target: LAMA2; (+) strand; PAM type: NRG; PAM sequence: TAG
catagacacaaattctcaca

SEQ ID NO: 123872 - DNA, 20 bp, Artificial Sequence
  Description of Artificial Sequence: Synthetic oligonucleotide
  Target: LAMA2; (+) strand; PAM type: NRG; PAM sequence: TGG
aattctcacatagcaatata

SEQ ID NO: 123873 - DNA, 20 bp, Artificial Sequence
  Description of Artificial Sequence: Synthetic oligonucleotide
  Target: LAMA2; (+) strand; PAM type: NRG; PAM sequence: CAG
ctgcatgttcaacaatgtct

SEQ ID NO: 123874 - DNA, 20 bp, Artificial Sequence
  Description of Artificial Sequence: Synthetic oligonucleotide
  Target: LAMA2; (+) strand; PAM type: NRG; PAM sequence: GAG
caatgtctcagtcttgccat

SEQ ID NO: 123875 - DNA, 20 bp, Artificial Sequence
  Description of Artificial Sequence: Synthetic oligonucleotide
  Target: LAMA2; (+) strand; PAM type: NRG; PAM sequence: CGG
ctcagtcttgccatgagaaa

SEQ ID NO: 123876 - DNA, 20 bp, Artificial Sequence
  Description of Artificial Sequence: Synthetic oligonucleotide
  Target: LAMA2; (+) strand; PAM type: NRG; PAM sequence: GAG
cagtcttgccatgagaaacg

SEQ ID NO: 123877 - DNA, 20 bp, Artificial Sequence
  Description of Artificial Sequence: Synthetic oligonucleotide
  Target: LAMA2; (+) strand; PAM type: NRG; PAM sequence: CAG
tcttgccatgagaaacggag

SEQ ID NO: 123878 - DNA, 20 bp, Artificial Sequence
  Description of Artificial Sequence: Synthetic oligonucleotide
  Target: LAMA2; (+) strand; PAM type: NRG; PAM sequence: AGG
cttgccatgagaaacggagc

SEQ ID NO: 123879 - DNA, 20 bp, Artificial Sequence
  Description of Artificial Sequence: Synthetic oligonucleotide
  Target: LAMA2; (+) strand; PAM type: NRG; PAM sequence: GGG
ttgccatgagaaacggagca

SEQ ID NO: 123880 - DNA, 20 bp, Artificial Sequence
  Description of Artificial Sequence: Synthetic oligonucleotide
  Target: LAMA2; (+) strand; PAM type: NRG; PAM sequence: TGG
aacggagcagggaaacttcc

SEQ ID NO: 123881 - DNA, 20 bp, Artificial Sequence
  Description of Artificial Sequence: Synthetic oligonucleotide
  Target: LAMA2; (+) strand; PAM type: NRG; PAM sequence: GGG
acggagcagggaaacttcct

SEQ ID NO: 123882 - DNA, 20 bp, Artificial Sequence
  Description of Artificial Sequence: Synthetic oligonucleotide
  Target: LAMA2; (+) strand; PAM type: NRG; PAM sequence: TAG
cttcctgggcctaaactgaa

SEQ ID NO: 123883 - DNA, 20 bp, Artificial Sequence
  Description of Artificial Sequence: Synthetic oligonucleotide
  Target: LAMA2; (+) strand; PAM type: NRG; PAM sequence: AGG
ttcctgggcctaaactgaat

SEQ ID NO: 123884 - DNA, 20 bp, Artificial Sequence
  Description of Artificial Sequence: Synthetic oligonucleotide
  Target: LAMA2; (+) strand; PAM type: NRG; PAM sequence: TGG
cttctctgccacattctttg

SEQ ID NO: 123885 - DNA, 20 bp, Artificial Sequence
  Description of Artificial Sequence: Synthetic oligonucleotide
  Target: LAMA2; (+) strand; PAM type: NRG; PAM sequence: TGG
ctttgtggttctgtctccac

SEQ ID NO: 123886 - DNA, 20 bp, Artificial Sequence
  Description of Artificial Sequence: Synthetic oligonucleotide
  Target: LAMA2; (+) strand; PAM type: NRG; PAM sequence: TGG
tggttctgtctccactggac

SEQ ID NO: 123887 - DNA, 20 bp, Artificial Sequence
  Description of Artificial Sequence: Synthetic oligonucleotide
  Target: LAMA2; (+) strand; PAM type: NRG; PAM sequence: GGG
ggttctgtctccactggact

SEQ ID NO: 123888 - DNA, 20 bp, Artificial Sequence
  Description of Artificial Sequence: Synthetic oligonucleotide
  Target: LAMA2; (+) strand; PAM type: NRG; PAM sequence: TGG
actggactgggactctccat

SEQ ID NO: 123889 - DNA, 20 bp, Artificial Sequence
  Description of Artificial Sequence: Synthetic oligonucleotide
  Target: LAMA2; (+) strand; PAM type: NRG; PAM sequence: GAG
tccattggtcctttaccaat

SEQ ID NO: 123890 - DNA, 20 bp, Artificial Sequence
  Description of Artificial Sequence: Synthetic oligonucleotide
  Target: LAMA2; (+) strand; PAM type: NRG; PAM sequence: GAG
tattctcatgaaatattcat

SEQ ID NO: 123891 - DNA, 20 bp, Artificial Sequence
  Description of Artificial Sequence: Synthetic oligonucleotide
  Target: LAMA2; (+) strand; PAM type: NRG; PAM sequence: CAG
tattcatgagaatgtttcac

SEQ ID NO: 123892 - DNA, 20 bp, Artificial Sequence
  Description of Artificial Sequence: Synthetic oligonucleotide
  Target: LAMA2; (+) strand; PAM type: NRG; PAM sequence: TAG
tgagaatgtttcaccagatc

SEQ ID NO: 123893 - DNA, 20 bp, Artificial Sequence
  Description of Artificial Sequence: Synthetic oligonucleotide
  Target: LAMA2; (+) strand; PAM type: NRG; PAM sequence: AGG
gagaatgtttcaccagatct

SEQ ID NO: 123894 - DNA, 20 bp, Artificial Sequence
  Description of Artificial Sequence: Synthetic oligonucleotide
  Target: LAMA2; (+) strand; PAM type: NRG; PAM sequence: AAG
aaattttccattctatttga

SEQ ID NO: 123895 - DNA, 20 bp, Artificial Sequence
  Description of Artificial Sequence: Synthetic oligonucleotide
  Target: LAMA2; (+) strand; PAM type: NRG; PAM sequence: TGG
ttttctttttatcacctaca

SEQ ID NO: 123896 - DNA, 20 bp, Artificial Sequence
  Description of Artificial Sequence: Synthetic oligonucleotide
  Target: LAMA2; (+) strand; PAM type: NRG; PAM sequence: GGG
tttctttttatcacctacat

SEQ ID NO: 123897 - DNA, 20 bp, Artificial Sequence
  Description of Artificial Sequence: Synthetic oligonucleotide
  Target: LAMA2; (+) strand; PAM type: NRG; PAM sequence: GGG
ttctttttatcacctacatg

SEQ ID NO: 123898 - DNA, 20 bp, Artificial Sequence
  Description of Artificial Sequence: Synthetic oligonucleotide
  Target: LAMA2; (+) strand; PAM type: NRG; PAM sequence: GAG
ctttttatcacctacatggg

SEQ ID NO: 123899 - DNA, 20 bp, Artificial Sequence
  Description of Artificial Sequence: Synthetic oligonucleotide
  Target: LAMA2; (+) strand; PAM type: NRG; PAM sequence: AGG
tttttatcacctacatgggg

SEQ ID NO: 123900 - DNA, 20 bp, Artificial Sequence
  Description of Artificial Sequence: Synthetic oligonucleotide
  Target: LAMA2; (+) strand; PAM type: NRG; PAM sequence: TAG
ttatcacctacatggggagg

SEQ ID NO: 123901 - DNA, 20 bp, Artificial Sequence
  Description of Artificial Sequence: Synthetic oligonucleotide
  Target: LAMA2; (+) strand; PAM type: NRG; PAM sequence: GAG
atcacctacatggggaggta

SEQ ID NO: 123902 - DNA, 20 bp, Artificial Sequence
  Description of Artificial Sequence: Synthetic oligonucleotide
  Target: LAMA2; (+) strand; PAM type: NRG; PAM sequence: TGG
tacatggggaggtagagtgt

SEQ ID NO: 123903 - DNA, 20 bp, Artificial Sequence
  Description of Artificial Sequence: Synthetic oligonucleotide
  Target: LAMA2; (+) strand; PAM type: NRG; PAM sequence: AAG
aggtagagtgttggctttca

SEQ ID NO: 123904 - DNA, 20 bp, Artificial Sequence
  Description of Artificial Sequence: Synthetic oligonucleotide
  Target: LAMA2; (+) strand; PAM type: NRG; PAM sequence: AGG
ggtagagtgttggctttcaa

SEQ ID NO: 123905 - DNA, 20 bp, Artificial Sequence
  Description of Artificial Sequence: Synthetic oligonucleotide
  Target: LAMA2; (+) strand; PAM type: NRG; PAM sequence: GAG
ttgcatctttccacaactct

SEQ ID NO: 123906 - DNA, 20 bp, Artificial Sequence
  Description of Artificial Sequence: Synthetic oligonucleotide
  Target: LAMA2; (+) strand; PAM type: NRG; PAM sequence: GAG
tccacaactctgagttttct

SEQ ID NO: 123907 - DNA, 20 bp, Artificial Sequence
  Description of Artificial Sequence: Synthetic oligonucleotide
  Target: LAMA2; (+) strand; PAM type: NRG; PAM sequence: GAG
ctctgagttttctgagtttt

SEQ ID NO: 123908 - DNA, 20 bp, Artificial Sequence
  Description of Artificial Sequence: Synthetic oligonucleotide
  Target: LAMA2; (+) strand; PAM type: NRG; PAM sequence: TGG
tcttttaaaaaaaaactctt

SEQ ID NO: 123909 - DNA, 20 bp, Artificial Sequence
  Description of Artificial Sequence: Synthetic oligonucleotide
  Target: LAMA2; (+) strand; PAM type: NRG; PAM sequence: TGG
aaaaaaaaactctttggtca

SEQ ID NO: 123910 - DNA, 20 bp, Artificial Sequence
  Description of Artificial Sequence: Synthetic oligonucleotide
  Target: LAMA2; (+) strand; PAM type: NRG; PAM sequence: TGG
aaaaaactctttggtcatgg

SEQ ID NO: 123911 - DNA, 20 bp, Artificial Sequence
  Description of Artificial Sequence: Synthetic oligonucleotide
  Target: LAMA2; (+) strand; PAM type: NRG; PAM sequence: TAG
ctctttggtcatggtggcaa

SEQ ID NO: 123912 - DNA, 20 bp, Artificial Sequence
  Description of Artificial Sequence: Synthetic oligonucleotide
  Target: LAMA2; (+) strand; PAM type: NRG; PAM sequence: GAG
ctttggtcatggtggcaata

SEQ ID NO: 123913 - DNA, 20 bp, Artificial Sequence
  Description of Artificial Sequence: Synthetic oligonucleotide
  Target: LAMA2; (+) strand; PAM type: NRG; PAM sequence: AGG
tttggtcatggtggcaatag

SEQ ID NO: 123914 - DNA, 20 bp, Artificial Sequence
  Description of Artificial Sequence: Synthetic oligonucleotide
  Target: LAMA2; (+) strand; PAM type: NRG; PAM sequence: TAG
gtcatggtggcaatagaggt

SEQ ID NO: 123915 - DNA, 20 bp, Artificial Sequence
  Description of Artificial Sequence: Synthetic oligonucleotide
  Target: LAMA2; (+) strand; PAM type: NRG; PAM sequence: GAG
catggtggcaatagaggtta

SEQ ID NO: 123916 - DNA, 20 bp, Artificial Sequence
  Description of Artificial Sequence: Synthetic oligonucleotide
  Target: LAMA2; (+) strand; PAM type: NRG; PAM sequence: TAG
gaataccaactcctctcgtt

SEQ ID NO: 123917 - DNA, 20 bp, Artificial Sequence
  Description of Artificial Sequence: Synthetic oligonucleotide
  Target: LAMA2; (+) strand; PAM type: NRG; PAM sequence: AGG
aataccaactcctctcgttt

SEQ ID NO: 123918 - DNA, 20 bp, Artificial Sequence
  Description of Artificial Sequence: Synthetic oligonucleotide
  Target: LAMA2; (+) strand; PAM type: NRG; PAM sequence: TAG
tcgtttaggcctctgttctt

SEQ ID NO: 123919 - DNA, 20 bp, Artificial Sequence
  Description of Artificial Sequence: Synthetic oligonucleotide
  Target: LAMA2; (+) strand; PAM type: NRG; PAM sequence: TGG
aggcctctgttctttagata

SEQ ID NO: 123920 - DNA, 20 bp, Artificial Sequence
  Description of Artificial Sequence: Synthetic oligonucleotide
  Target: LAMA2; (+) strand; PAM type: NRG; PAM sequence: AAG
tatggtcattttaccgcttc

SEQ ID NO: 123921 - DNA, 20 bp, Artificial Sequence
  Description of Artificial Sequence: Synthetic oligonucleotide
  Target: LAMA2; (+) strand; PAM type: NRG; PAM sequence: AGG
atggtcattttaccgcttca

SEQ ID NO: 123922 - DNA, 20 bp, Artificial Sequence
  Description of Artificial Sequence: Synthetic oligonucleotide
  Target: LAMA2; (+) strand; PAM type: NRG; PAM sequence: CAG
cattttaccgcttcaaggat

SEQ ID NO: 123923 - DNA, 20 bp, Artificial Sequence
  Description of Artificial Sequence: Synthetic oligonucleotide
  Target: LAMA2; (+) strand; PAM type: NRG; PAM sequence: CAG
tatcccaaatttataatccc

SEQ ID NO: 123924 - DNA, 20 bp, Artificial Sequence
  Description of Artificial Sequence: Synthetic oligonucleotide
  Target: LAMA2; (+) strand; PAM type: NRG; PAM sequence: GAG
tcccaaatttataatcccca

SEQ ID NO: 123925 - DNA, 20 bp, Artificial Sequence
  Description of Artificial Sequence: Synthetic oligonucleotide
  Target: LAMA2; (+) strand; PAM type: NRG; PAM sequence: AGG
cccaaatttataatccccag

SEQ ID NO: 123926 - DNA, 20 bp, Artificial Sequence
  Description of Artificial Sequence: Synthetic oligonucleotide
  Target: LAMA2; (+) strand; PAM type: NRG; PAM sequence: CAG
tataatccccagaggtaact

SEQ ID NO: 123927 - DNA, 20 bp, Artificial Sequence
  Description of Artificial Sequence: Synthetic oligonucleotide
  Target: LAMA2; (+) strand; PAM type: NRG; PAM sequence: AAG
tgatttgttctcaatattta

SEQ ID NO: 123928 - DNA, 20 bp, Artificial Sequence
  Description of Artificial Sequence: Synthetic oligonucleotide
  Target: LAMA2; (+) strand; PAM type: NRG; PAM sequence: AAG
tcaatatttaaagtgaaccc

SEQ ID NO: 123929 - DNA, 20 bp, Artificial Sequence
  Description of Artificial Sequence: Synthetic oligonucleotide
  Target: LAMA2; (+) strand; PAM type: NRG; PAM sequence: AAG
tttaaagtgaacccaagatg

SEQ ID NO: 123930 - DNA, 20 bp, Artificial Sequence
  Description of Artificial Sequence: Synthetic oligonucleotide
  Target: LAMA2; (+) strand; PAM type: NRG; PAM sequence: GAG
taaagtgaacccaagatgaa

SEQ ID NO: 123931 - DNA, 20 bp, Artificial Sequence
  Description of Artificial Sequence: Synthetic oligonucleotide
  Target: LAMA2; (+) strand; PAM type: NRG; PAM sequence: TGG
gtgaacccaagatgaagagt

SEQ ID NO: 123932 - DNA, 20 bp, Artificial Sequence
  Description of Artificial Sequence: Synthetic oligonucleotide
  Target: LAMA2; (+) strand; PAM type: NRG; PAM sequence: AAG
acccaagatgaagagttgga

SEQ ID NO: 123933 - DNA, 20 bp, Artificial Sequence
  Description of Artificial Sequence: Synthetic oligonucleotide
  Target: LAMA2; (+) strand; PAM type: NRG; PAM sequence: AGG
cccaagatgaagagttggaa

SEQ ID NO: 123934 - DNA, 20 bp, Artificial Sequence
  Description of Artificial Sequence: Synthetic oligonucleotide
  Target: LAMA2; (+) strand; PAM type: NRG; PAM sequence: TAG
tttttaaaactctaatgctt

SEQ ID NO: 123935 - DNA, 20 bp, Artificial Sequence
  Description of Artificial Sequence: Synthetic oligonucleotide
  Target: LAMA2; (+) strand; PAM type: NRG; PAM sequence: TAG
ttaaaactctaatgctttag

SEQ ID NO: 123936 - DNA, 20 bp, Artificial Sequence
  Description of Artificial Sequence: Synthetic oligonucleotide
  Target: LAMA2; (+) strand; PAM type: NRG; PAM sequence: AGG
taaaactctaatgctttagt

SEQ ID NO: 123937 - DNA, 20 bp, Artificial Sequence
  Description of Artificial Sequence: Synthetic oligonucleotide
  Target: LAMA2; (+) strand; PAM type: NRG; PAM sequence: CAG
gtaggctctcaaactgctga

SEQ ID NO: 123938 - DNA, 20 bp, Artificial Sequence
  Description of Artificial Sequence: Synthetic oligonucleotide
  Target: LAMA2; (+) strand; PAM type: NRG; PAM sequence: AAG
tctcaaactgctgacagctc

SEQ ID NO: 123939 - DNA, 20 bp, Artificial Sequence
  Description of Artificial Sequence: Synthetic oligonucleotide
  Target: LAMA2; (+) strand; PAM type: NRG; PAM sequence: TGG
gctcaagtgttctgtctctt

SEQ ID NO: 123940 - DNA, 20 bp, Artificial Sequence
  Description of Artificial Sequence: Synthetic oligonucleotide
  Target: LAMA2; (+) strand; PAM type: NRG; PAM sequence: CAG
tttggcaacatataaaaatc

SEQ ID NO: 123941 - DNA, 20 bp, Artificial Sequence
  Description of Artificial Sequence: Synthetic oligonucleotide
  Target: LAMA2; (+) strand; PAM type: NRG; PAM sequence: CAG
catataaaaatccagaataa

SEQ ID NO: 123942 - DNA, 20 bp, Artificial Sequence
  Description of Artificial Sequence: Synthetic oligonucleotide
  Target: LAMA2; (+) strand; PAM type: NRG; PAM sequence: CAG
aataacagttaaatattcca

SEQ ID NO: 123943 - DNA, 20 bp, Artificial Sequence
  Description of Artificial Sequence: Synthetic oligonucleotide
  Target: LAMA2; (+) strand; PAM type: NRG; PAM sequence: TGG
ttaatactaatattatgtct

SEQ ID NO: 123944 - DNA, 20 bp, Artificial Sequence
  Description of Artificial Sequence: Synthetic oligonucleotide
  Target: LAMA2; (+) strand; PAM type: NRG; PAM sequence: TGG
taatattatgtcttggttaa

SEQ ID NO: 123945 - DNA, 20 bp, Artificial Sequence
  Description of Artificial Sequence: Synthetic oligonucleotide
  Target: LAMA2; (+) strand; PAM type: NRG; PAM sequence: AAG
tattatgtcttggttaatgg

SEQ ID NO: 123946 - DNA, 20 bp, Artificial Sequence
  Description of Artificial Sequence: Synthetic oligonucleotide
  Target: LAMA2; (+) strand; PAM type: NRG; PAM sequence: TAG
ttggttaatggaagacacca

SEQ ID NO: 123947 - DNA, 20 bp, Artificial Sequence
  Description of Artificial Sequence: Synthetic oligonucleotide
  Target: LAMA2; (+) strand; PAM type: NRG; PAM sequence: TGG
tttgtgctcctttttaatat

SEQ ID NO: 123948 - DNA, 20 bp, Artificial Sequence
  Description of Artificial Sequence: Synthetic oligonucleotide
  Target: LAMA2; (+) strand; PAM type: NRG; PAM sequence: GAG
atattggtaatcctccttct

SEQ ID NO: 123949 - DNA, 20 bp, Artificial Sequence
  Description of Artificial Sequence: Synthetic oligonucleotide
  Target: LAMA2; (+) strand; PAM type: NRG; PAM sequence: CAG
tcctccttctgagataaatt

SEQ ID NO: 123950 - DNA, 20 bp, Artificial Sequence
  Description of Artificial Sequence: Synthetic oligonucleotide
  Target: LAMA2; (+) strand; PAM type: NRG; PAM sequence: AGG
cctccttctgagataaattc

SEQ ID NO: 123951 - DNA, 20 bp, Artificial Sequence
  Description of Artificial Sequence: Synthetic oligonucleotide
  Target: LAMA2; (+) strand; PAM type: NRG; PAM sequence: CAG
ggaaatctgacctttctcct

SEQ ID NO: 123952 - DNA, 20 bp, Artificial Sequence
  Description of Artificial Sequence: Synthetic oligonucleotide
  Target: LAMA2; (+) strand; PAM type: NRG; PAM sequence: AAG
tcctcagcccttttgaaata

SEQ ID NO: 123953 - DNA, 20 bp, Artificial Sequence
  Description of Artificial Sequence: Synthetic oligonucleotide
  Target: LAMA2; (+) strand; PAM type: NRG; PAM sequence: TAG
ataaagaccacttttccaat

SEQ ID NO: 123954 - DNA, 20 bp, Artificial Sequence
  Description of Artificial Sequence: Synthetic oligonucleotide
  Target: LAMA2; (+) strand; PAM type: NRG; PAM sequence: AGG
taaagaccacttttccaatt

SEQ ID NO: 123955 - DNA, 20 bp, Artificial Sequence
  Description of Artificial Sequence: Synthetic oligonucleotide
  Target: LAMA2; (+) strand; PAM type: NRG; PAM sequence: TAG
ccaattaggaatatctaatg

SEQ ID NO: 123956 - DNA, 20 bp, Artificial Sequence
  Description of Artificial Sequence: Synthetic oligonucleotide
  Target: LAMA2; (+) strand; PAM type: NRG; PAM sequence: AAG
gaatatctaatgtagtgtta

SEQ ID NO: 123957 - DNA, 20 bp, Artificial Sequence
  Description of Artificial Sequence: Synthetic oligonucleotide
  Target: LAMA2; (+) strand; PAM type: NRG; PAM sequence: CAG
tctaatgtagtgttaaagct

SEQ ID NO: 123958 - DNA, 20 bp, Artificial Sequence
  Description of Artificial Sequence: Synthetic oligonucleotide
  Target: LAMA2; (+) strand; PAM type: NRG; PAM sequence: GAG
taatgtagtgttaaagctca

SEQ ID NO: 123959 - DNA, 20 bp, Artificial Sequence
  Description of Artificial Sequence: Synthetic oligonucleotide
  Target: LAMA2; (+) strand; PAM type: NRG; PAM sequence: AAG
tgttaaagctcagagttgaa

SEQ ID NO: 123960 - DNA, 20 bp, Artificial Sequence
  Description of Artificial Sequence: Synthetic oligonucleotide
  Target: LAMA2; (+) strand; PAM type: NRG; PAM sequence: TAG
tcagagttgaaaagatgttt

SEQ ID NO: 123961 - DNA, 20 bp, Artificial Sequence
  Description of Artificial Sequence: Synthetic oligonucleotide
  Target: LAMA2; (+) strand; PAM type: NRG; PAM sequence: CAG
aaagatgttttagtattcat

SEQ ID NO: 123962 - DNA, 20 bp, Artificial Sequence
  Description of Artificial Sequence: Synthetic oligonucleotide
  Target: LAMA2; (+) strand; PAM type: NRG; PAM sequence: TAG
attcatcagatataacgttg

SEQ ID NO: 123963 - DNA, 20 bp, Artificial Sequence
  Description of Artificial Sequence: Synthetic oligonucleotide
  Target: LAMA2; (+) strand; PAM type: NRG; PAM sequence: TGG
atataacgttgtagtattat

SEQ ID NO: 123964 - DNA, 20 bp, Artificial Sequence
  Description of Artificial Sequence: Synthetic oligonucleotide
  Target: LAMA2; (+) strand; PAM type: NRG; PAM sequence: CAG
taacattgtgaaacaaattc

SEQ ID NO: 123965 - DNA, 20 bp, Artificial Sequence
  Description of Artificial Sequence: Synthetic oligonucleotide
  Target: LAMA2; (+) strand; PAM type: NRG; PAM sequence: CAG
aaacaaattccagtacactt

SEQ ID NO: 123966 - DNA, 20 bp, Artificial Sequence
  Description of Artificial Sequence: Synthetic oligonucleotide
  Target: LAMA2; (+) strand; PAM type: NRG; PAM sequence: AAG
acacttcagctctgctaaca

SEQ ID NO: 123967 - DNA, 20 bp, Artificial Sequence
  Description of Artificial Sequence: Synthetic oligonucleotide
  Target: LAMA2; (+) strand; PAM type: NRG; PAM sequence: TAG
ctctgctaacaaagatgaaa

SEQ ID NO: 123968 - DNA, 20 bp, Artificial Sequence
  Description of Artificial Sequence: Synthetic oligonucleotide
  Target: LAMA2; (+) strand; PAM type: NRG; PAM sequence: GAG
ctgctaacaaagatgaaata

SEQ ID NO: 123969 - DNA, 20 bp, Artificial Sequence
  Description of Artificial Sequence: Synthetic oligonucleotide
  Target: LAMA2; (+) strand; PAM type: NRG; PAM sequence: AAG
caaagatgaaatagagaata

SEQ ID NO: 123970 - DNA, 20 bp, Artificial Sequence
  Description of Artificial Sequence: Synthetic oligonucleotide
  Target: LAMA2; (+) strand; PAM type: NRG; PAM sequence: TAG
agatgaaatagagaataaag

SEQ ID NO: 123971 - DNA, 20 bp, Artificial Sequence
  Description of Artificial Sequence: Synthetic oligonucleotide
  Target: LAMA2; (+) strand; PAM type: NRG; PAM sequence: AGG
gatgaaatagagaataaagt

SEQ ID NO: 123972 - DNA, 20 bp, Artificial Sequence
  Description of Artificial Sequence: Synthetic oligonucleotide
  Target: LAMA2; (+) strand; PAM type: NRG; PAM sequence: AAG
ggtgtatgctgaatcttatt

SEQ ID NO: 123973 - DNA, 20 bp, Artificial Sequence
  Description of Artificial Sequence: Synthetic oligonucleotide
  Target: LAMA2; (+) strand; PAM type: NRG; PAM sequence: AGG
gtgtatgctgaatcttatta

SEQ ID NO: 123974 - DNA, 20 bp, Artificial Sequence
  Description of Artificial Sequence: Synthetic oligonucleotide
  Target: LAMA2; (+) strand; PAM type: NRG; PAM sequence: CAG
atcttattaaggttgacatc

SEQ ID NO: 123975 - DNA, 20 bp, Artificial Sequence
  Description of Artificial Sequence: Synthetic oligonucleotide
  Target: LAMA2; (+) strand; PAM type: NRG; PAM sequence: AAG
tttgaatacattcatcctct

SEQ ID NO: 123976 - DNA, 20 bp, Artificial Sequence
  Description of Artificial Sequence: Synthetic oligonucleotide
  Target: LAMA2; (+) strand; PAM type: NRG; PAM sequence: AGG
ttgaatacattcatcctcta

SEQ ID NO: 123977 - DNA, 20 bp, Artificial Sequence
  Description of Artificial Sequence: Synthetic oligonucleotide
  Target: LAMA2; (+) strand; PAM type: NRG; PAM sequence: TAG
tacattcatcctctaaggta

SEQ ID NO: 123978 - DNA, 20 bp, Artificial Sequence
  Description of Artificial Sequence: Synthetic oligonucleotide
  Target: LAMA2; (+) strand; PAM type: NRG; PAM sequence: TGG
catcctctaaggtatagttt

SEQ ID NO: 123979 - DNA, 20 bp, Artificial Sequence
  Description of Artificial Sequence: Synthetic oligonucleotide
  Target: LAMA2; (+) strand; PAM type: NRG; PAM sequence: GGG
atcctctaaggtatagtttt

SEQ ID NO: 123980 - DNA, 20 bp, Artificial Sequence
  Description of Artificial Sequence: Synthetic oligonucleotide
  Target: LAMA2; (+) strand; PAM type: NRG; PAM sequence: GAG
agttttgggtataaaccatc

SEQ ID NO: 123981 - DNA, 20 bp, Artificial Sequence
  Description of Artificial Sequence: Synthetic oligonucleotide
  Target: LAMA2; (+) strand; PAM type: NRG; PAM sequence: AAG
ttgggtataaaccatcgagc

SEQ ID NO: 123982 - DNA, 20 bp, Artificial Sequence
  Description of Artificial Sequence: Synthetic oligonucleotide
  Target: LAMA2; (+) strand; PAM type: NRG; PAM sequence: CAG
accatcgagcaagcacaaaa

SEQ ID NO: 123983 - DNA, 20 bp, Artificial Sequence
  Description of Artificial Sequence: Synthetic oligonucleotide
  Target: LAMA2; (+) strand; PAM type: NRG; PAM sequence: AAG
cgagcaagcacaaaacagtg

SEQ ID NO: 123984 - DNA, 20 bp, Artificial Sequence
  Description of Artificial Sequence: Synthetic oligonucleotide
  Target: LAMA2; (+) strand; PAM type: NRG; PAM sequence: GAG
aagcacaaaacagtgaagct

SEQ ID NO: 123985 - DNA, 20 bp, Artificial Sequence
  Description of Artificial Sequence: Synthetic oligonucleotide
  Target: LAMA2; (+) strand; PAM type: NRG; PAM sequence: GAG
gcacaaaacagtgaagctga

SEQ ID NO: 123986 - DNA, 20 bp, Artificial Sequence
  Description of Artificial Sequence: Synthetic oligonucleotide
  Target: LAMA2; (+) strand; PAM type: NRG; PAM sequence: CAG
aacagtgaagctgagagctg

SEQ ID NO: 123987 - DNA, 20 bp, Artificial Sequence
  Description of Artificial Sequence: Synthetic oligonucleotide
  Target: LAMA2; (+) strand; PAM type: NRG; PAM sequence: TAG
aagctgagagctgcagaaca

SEQ ID NO: 123988 - DNA, 20 bp, Artificial Sequence
  Description of Artificial Sequence: Synthetic oligonucleotide
  Target: LAMA2; (+) strand; PAM type: NRG; PAM sequence: GAG
gctgagagctgcagaacata

SEQ ID NO: 123989 - DNA, 20 bp, Artificial Sequence
  Description of Artificial Sequence: Synthetic oligonucleotide
  Target: LAMA2; (+) strand; PAM type: NRG; PAM sequence: TGG
agctgcagaacatagagatc

SEQ ID NO: 123990 - DNA, 20 bp, Artificial Sequence
  Description of Artificial Sequence: Synthetic oligonucleotide
  Target: LAMA2; (+) strand; PAM type: NRG; PAM sequence: TGG
tgcagaacatagagatctgg

SEQ ID NO: 123991 - DNA, 20 bp, Artificial Sequence
  Description of Artificial Sequence: Synthetic oligonucleotide
  Target: LAMA2; (+) strand; PAM type: NRG; PAM sequence: AAG
tagagatctggtggattcta

SEQ ID NO: 123992 - DNA, 20 bp, Artificial Sequence
  Description of Artificial Sequence: Synthetic oligonucleotide
  Target: LAMA2; (+) strand; PAM type: NRG; PAM sequence: AGG
agagatctggtggattctaa

SEQ ID NO: 123993 - DNA, 20 bp, Artificial Sequence
  Description of Artificial Sequence: Synthetic oligonucleotide
  Target: LAMA2; (+) strand; PAM type: NRG; PAM sequence: GAG
ctggtggattctaaaggact

SEQ ID NO: 123994 - DNA, 20 bp, Artificial Sequence
  Description of Artificial Sequence: Synthetic oligonucleotide
  Target: LAMA2; (+) strand; PAM type: NRG; PAM sequence: TGG
aaaggactgagaatgatcga

SEQ ID NO: 123995 - DNA, 20 bp, Artificial Sequence
  Description of Artificial Sequence: Synthetic oligonucleotide
  Target: LAMA2; (+) strand; PAM type: NRG; PAM sequence: AAG
gatcgatggctactgaaatg

SEQ ID NO: 123996 - DNA, 20 bp, Artificial Sequence
  Description of Artificial Sequence: Synthetic oligonucleotide
  Target: LAMA2; (+) strand; PAM type: NRG; PAM sequence: TGG
tactgaaatgaagtgtgaaa

SEQ ID NO: 123997 - DNA, 20 bp, Artificial Sequence
  Description of Artificial Sequence: Synthetic oligonucleotide
  Target: LAMA2; (+) strand; PAM type: NRG; PAM sequence: TAG
gaagtgtgaaatggtatcca

SEQ ID NO: 123998 - DNA, 20 bp, Artificial Sequence
  Description of Artificial Sequence: Synthetic oligonucleotide
  Target: LAMA2; (+) strand; PAM type: NRG; PAM sequence: TGG
tttgtctttaactgataaaa

SEQ ID NO: 123999 - DNA, 20 bp, Artificial Sequence
  Description of Artificial Sequence: Synthetic oligonucleotide
  Target: LAMA2; (+) strand; PAM type: NRG; PAM sequence: AAG
tttaactgataaaatggcta

SEQ ID NO: 124000 - DNA, 20 bp, Artificial Sequence
  Description of Artificial Sequence: Synthetic oligonucleotide
  Target: LAMA2; (+) strand; PAM type: NRG; PAM sequence: TGG
aaaatggctaaagcatttcc

SEQ ID NO: 124001 - DNA, 20 bp, Artificial Sequence
  Description of Artificial Sequence: Synthetic oligonucleotide
  Target: LAMA2; (+) strand; PAM type: NRG; PAM sequence: TAG
ctcctctcttctcattcctc

SEQ ID NO: 124002 - DNA, 20 bp, Artificial Sequence
  Description of Artificial Sequence: Synthetic oligonucleotide
  Target: LAMA2; (+) strand; PAM type: NRG; PAM sequence: CAG
ctcttctcattcctctagaa

SEQ ID NO: 124003 - DNA, 20 bp, Artificial Sequence
  Description of Artificial Sequence: Synthetic oligonucleotide
  Target: LAMA2; (+) strand; PAM type: NRG; PAM sequence: TGG
ttctcattcctctagaacag

SEQ ID NO: 124004 - DNA, 20 bp, Artificial Sequence
  Description of Artificial Sequence: Synthetic oligonucleotide
  Target: LAMA2; (+) strand; PAM type: NRG; PAM sequence: TGG
gataacaaatgcacttaaat

SEQ ID NO: 124005 - DNA, 20 bp, Artificial Sequence
  Description of Artificial Sequence: Synthetic oligonucleotide
  Target: LAMA2; (+) strand; PAM type: NRG; PAM sequence: GAG
taacaaatgcacttaaattg

SEQ ID NO: 124006 - DNA, 20 bp, Artificial Sequence
  Description of Artificial Sequence: Synthetic oligonucleotide
  Target: LAMA2; (+) strand; PAM type: NRG; PAM sequence: GAG
acacataacaaaaatgtcat

SEQ ID NO: 124007 - DNA, 20 bp, Artificial Sequence
  Description of Artificial Sequence: Synthetic oligonucleotide
  Target: LAMA2; (+) strand; PAM type: NRG; PAM sequence: TAG
catgagatgtcttaaatact

SEQ ID NO: 124008 - DNA, 20 bp, Artificial Sequence
  Description of Artificial Sequence: Synthetic oligonucleotide
  Target: LAMA2; (+) strand; PAM type: NRG; PAM sequence: CAG
atacttagacattttacatt

SEQ ID NO: 124009 - DNA, 20 bp, Artificial Sequence
  Description of Artificial Sequence: Synthetic oligonucleotide
  Target: LAMA2; (+) strand; PAM type: NRG; PAM sequence: TGG
ttatattcttttttaaatac

SEQ ID NO: 124010 - DNA, 20 bp, Artificial Sequence
  Description of Artificial Sequence: Synthetic oligonucleotide
  Target: LAMA2; (+) strand; PAM type: NRG; PAM sequence: TGG
actggttttgacctattaaa

SEQ ID NO: 124011 - DNA, 20 bp, Artificial Sequence
  Description of Artificial Sequence: Synthetic oligonucleotide
  Target: LAMA2; (+) strand; PAM type: NRG; PAM sequence: AAG
tgacctattaaatggacttc

SEQ ID NO: 124012 - DNA, 20 bp, Artificial Sequence
  Description of Artificial Sequence: Synthetic oligonucleotide
  Target: LAMA2; (+) strand; PAM type: NRG; PAM sequence: CAG
atggacttcaagaaattttt

SEQ ID NO: 124013 - DNA, 20 bp, Artificial Sequence
  Description of Artificial Sequence: Synthetic oligonucleotide
  Target: LAMA2; (+) strand; PAM type: NRG; PAM sequence: TAG
agaaatttttcagtctcatc

SEQ ID NO: 124014 - DNA, 20 bp, Artificial Sequence
  Description of Artificial Sequence: Synthetic oligonucleotide
  Target: LAMA2; (+) strand; PAM type: NRG; PAM sequence: AGG
gaaatttttcagtctcatct

SEQ ID NO: 124015 - DNA, 20 bp, Artificial Sequence
  Description of Artificial Sequence: Synthetic oligonucleotide
  Target: LAMA2; (+) strand; PAM type: NRG; PAM sequence: CAG
ttcagtctcatctaggcaca

SEQ ID NO: 124016 - DNA, 20 bp, Artificial Sequence
  Description of Artificial Sequence: Synthetic oligonucleotide
  Target: LAMA2; (+) strand; PAM type: NRG; PAM sequence: TAG
tttaaatattacttctatgt

SEQ ID NO: 124017 - DNA, 20 bp, Artificial Sequence
  Description of Artificial Sequence: Synthetic oligonucleotide
  Target: LAMA2; (+) strand; PAM type: NRG; PAM sequence: GAG
atgttagtgacctcttctgt

SEQ ID NO: 124018 - DNA, 20 bp, Artificial Sequence
  Description of Artificial Sequence: Synthetic oligonucleotide
  Target: LAMA2; (+) strand; PAM type: NRG; PAM sequence: AAG
tagtgacctcttctgtgagt

SEQ ID NO: 124019 - DNA, 20 bp, Artificial Sequence
  Description of Artificial Sequence: Synthetic oligonucleotide
  Target: LAMA2; (+) strand; PAM type: NRG; PAM sequence: TGG
ctctaactttctatctcctt

SEQ ID NO: 124020 - DNA, 20 bp, Artificial Sequence
  Description of Artificial Sequence: Synthetic oligonucleotide
  Target: LAMA2; (+) strand; PAM type: NRG; PAM sequence: CAG
ccttattcgcatattccttc

SEQ ID NO: 124021 - DNA, 20 bp, Artificial Sequence
  Description of Artificial Sequence: Synthetic oligonucleotide
  Target: LAMA2; (+) strand; PAM type: NRG; PAM sequence: TGG
ccagaacgtacaacttaacg

SEQ ID NO: 124022 - DNA, 20 bp, Artificial Sequence
  Description of Artificial Sequence: Synthetic oligonucleotide
  Target: LAMA2; (+) strand; PAM type: NRG; PAM sequence: CAG
ttaacgtggcttaaacttaa

SEQ ID NO: 124023 - DNA, 20 bp, Artificial Sequence
  Description of Artificial Sequence: Synthetic oligonucleotide
  Target: LAMA2; (+) strand; PAM type: NRG; PAM sequence: AAG
agctaaacattctccctctg

SEQ ID NO: 124024 - DNA, 20 bp, Artificial Sequence
  Description of Artificial Sequence: Synthetic oligonucleotide
  Target: LAMA2; (+) strand; PAM type: NRG; PAM sequence: CAG
gaagtatcccattctttcca

SEQ ID NO: 124025 - DNA, 20 bp, Artificial Sequence
  Description of Artificial Sequence: Synthetic oligonucleotide
  Target: LAMA2; (+) strand; PAM type: NRG; PAM sequence: AAG
agtcctcacccacctccatc

SEQ ID NO: 124026 - DNA, 20 bp, Artificial Sequence
  Description of Artificial Sequence: Synthetic oligonucleotide
  Target: LAMA2; (+) strand; PAM type: NRG; PAM sequence: GAG
cctgtttccaaatttctgct

SEQ ID NO: 124027 - DNA, 20 bp, Artificial Sequence
  Description of Artificial Sequence: Synthetic oligonucleotide
  Target: LAMA2; (+) strand; PAM type: NRG; PAM sequence: AGG
ctgtttccaaatttctgctg

SEQ ID NO: 124028 - DNA, 20 bp, Artificial Sequence
  Description of Artificial Sequence: Synthetic oligonucleotide
  Target: LAMA2; (+) strand; PAM type: NRG; PAM sequence: GGG
tgtttccaaatttctgctga

SEQ ID NO: 124029 - DNA, 20 bp, Artificial Sequence
  Description of Artificial Sequence: Synthetic oligonucleotide
  Target: LAMA2; (+) strand; PAM type: NRG; PAM sequence: CAG
atttctgctgagggtcccat

SEQ ID NO: 124030 - DNA, 20 bp, Artificial Sequence
  Description of Artificial Sequence: Synthetic oligonucleotide
  Target: LAMA2; (+) strand; PAM type: NRG; PAM sequence: CAG
tgagggtcccatcagtcttc

SEQ ID NO: 124031 - DNA, 20 bp, Artificial Sequence
  Description of Artificial Sequence: Synthetic oligonucleotide
  Target: LAMA2; (+) strand; PAM type: NRG; PAM sequence: AGG
gagggtcccatcagtcttcc

SEQ ID NO: 124032 - DNA, 20 bp, Artificial Sequence
  Description of Artificial Sequence: Synthetic oligonucleotide
  Target: LAMA2; (+) strand; PAM type: NRG; PAM sequence: TAG
gtcttccaggtgtaaaccat

SEQ ID NO: 124033 - DNA, 20 bp, Artificial Sequence
  Description of Artificial Sequence: Synthetic oligonucleotide
  Target: LAMA2; (+) strand; PAM type: NRG; PAM sequence: TAG
gtaaaccattagattcctac

SEQ ID NO: 124034 - DNA, 20 bp, Artificial Sequence
  Description of Artificial Sequence: Synthetic oligonucleotide
  Target: LAMA2; (+) strand; PAM type: NRG; PAM sequence: CAG
ctttcttcccgttactatat

SEQ ID NO: 124035 - DNA, 20 bp, Artificial Sequence
  Description of Artificial Sequence: Synthetic oligonucleotide
  Target: LAMA2; (+) strand; PAM type: NRG; PAM sequence: GAG
cttcccgttactatatcagt

SEQ ID NO: 124036 - DNA, 20 bp, Artificial Sequence
  Description of Artificial Sequence: Synthetic oligonucleotide
  Target: LAMA2; (+) strand; PAM type: NRG; PAM sequence: AAG
ccgttactatatcagtgagc

SEQ ID NO: 124037 - DNA, 20 bp, Artificial Sequence
  Description of Artificial Sequence: Synthetic oligonucleotide
  Target: LAMA2; (+) strand; PAM type: NRG; PAM sequence: AGG
cgttactatatcagtgagca

SEQ ID NO: 124038 - DNA, 20 bp, Artificial Sequence
  Description of Artificial Sequence: Synthetic oligonucleotide
  Target: LAMA2; (+) strand; PAM type: NRG; PAM sequence: TAG
tcacaattaattattattaa

SEQ ID NO: 124039 - DNA, 20 bp, Artificial Sequence
  Description of Artificial Sequence: Synthetic oligonucleotide
  Target: LAMA2; (+) strand; PAM type: NRG; PAM sequence: CAG
tagaaaataaacacttattc

SEQ ID NO: 124040 - DNA, 20 bp, Artificial Sequence
  Description of Artificial Sequence: Synthetic oligonucleotide
  Target: LAMA2; (+) strand; PAM type: NRG; PAM sequence: AAG
aaacacttattccagtttca

SEQ ID NO: 124041 - DNA, 20 bp, Artificial Sequence
  Description of Artificial Sequence: Synthetic oligonucleotide
  Target: LAMA2; (+) strand; PAM type: NRG; PAM sequence: AAG
tttcaaagttgttataattg

SEQ ID NO: 124042 - DNA, 20 bp, Artificial Sequence
  Description of Artificial Sequence: Synthetic oligonucleotide
  Target: LAMA2; (+) strand; PAM type: NRG; PAM sequence: AAG
ttaataatccttctttgact

SEQ ID NO: 124043 - DNA, 20 bp, Artificial Sequence
  Description of Artificial Sequence: Synthetic oligonucleotide
  Target: LAMA2; (+) strand; PAM type: NRG; PAM sequence: TGG
ttgactaagacaatgaaatg

SEQ ID NO: 124044 - DNA, 20 bp, Artificial Sequence
  Description of Artificial Sequence: Synthetic oligonucleotide
  Target: LAMA2; (+) strand; PAM type: NRG; PAM sequence: AAG
atgaaatgtggctttaaaaa

SEQ ID NO: 124045 - DNA, 20 bp, Artificial Sequence
  Description of Artificial Sequence: Synthetic oligonucleotide
  Target: LAMA2; (+) strand; PAM type: NRG; PAM sequence: CAG
gtggctttaaaaaaagtaat

SEQ ID NO: 124046 - DNA, 20 bp, Artificial Sequence
  Description of Artificial Sequence: Synthetic oligonucleotide
  Target: LAMA2; (+) strand; PAM type: NRG; PAM sequence: TAG
taatcagcaccatttgctta

SEQ ID NO: 124047 - DNA, 20 bp, Artificial Sequence
  Description of Artificial Sequence: Synthetic oligonucleotide
  Target: LAMA2; (+) strand; PAM type: NRG; PAM sequence: AGG
aatcagcaccatttgcttat

SEQ ID NO: 124048 - DNA, 20 bp, Artificial Sequence
  Description of Artificial Sequence: Synthetic oligonucleotide
  Target: LAMA2; (+) strand; PAM type: NRG; PAM sequence: CAG
ccatttgcttataggtcttt

SEQ ID NO: 124049 - DNA, 20 bp, Artificial Sequence
  Description of Artificial Sequence: Synthetic oligonucleotide
  Target: LAMA2; (+) strand; PAM type: NRG; PAM sequence: AAG
tctttcagaatttgttctta

SEQ ID NO: 124050 - DNA, 20 bp, Artificial Sequence
  Description of Artificial Sequence: Synthetic oligonucleotide
  Target: LAMA2; (+) strand; PAM type: NRG; PAM sequence: TGG
gaatttgttcttaaagtttc

SEQ ID NO: 124051 - DNA, 20 bp, Artificial Sequence
  Description of Artificial Sequence: Synthetic oligonucleotide
  Target: LAMA2; (+) strand; PAM type: NRG; PAM sequence: AAG
ctggaactttcctctctgta

SEQ ID NO: 124052 - DNA, 20 bp, Artificial Sequence
  Description of Artificial Sequence: Synthetic oligonucleotide
  Target: LAMA2; (+) strand; PAM type: NRG; PAM sequence: CAG
actttcctctctgtaaagta

SEQ ID NO: 124053 - DNA, 20 bp, Artificial Sequence
  Description of Artificial Sequence: Synthetic oligonucleotide
  Target: LAMA2; (+) strand; PAM type: NRG; PAM sequence: AGG
ctttcctctctgtaaagtac

SEQ ID NO: 124054 - DNA, 20 bp, Artificial Sequence
  Description of Artificial Sequence: Synthetic oligonucleotide
  Target: LAMA2; (+) strand; PAM type: NRG; PAM sequence: GAG
tgtaaagtacaggaaatact

SEQ ID NO: 124055 - DNA, 20 bp, Artificial Sequence
  Description of Artificial Sequence: Synthetic oligonucleotide
  Target: LAMA2; (+) strand; PAM type: NRG; PAM sequence: TGG
caggaaatactgagctacac

SEQ ID NO: 124056 - DNA, 20 bp, Artificial Sequence
  Description of Artificial Sequence: Synthetic oligonucleotide
  Target: LAMA2; (+) strand; PAM type: NRG; PAM sequence: AAG
aaatactgagctacactgga

SEQ ID NO: 124057 - DNA, 20 bp, Artificial Sequence
  Description of Artificial Sequence: Synthetic oligonucleotide
  Target: LAMA2; (+) strand; PAM type: NRG; PAM sequence: TGG
gctacactggaaagcctctc

SEQ ID NO: 124058 - DNA, 20 bp, Artificial Sequence
  Description of Artificial Sequence: Synthetic oligonucleotide
  Target: LAMA2; (+) strand; PAM type: NRG; PAM sequence: GGG
ctacactggaaagcctctct

SEQ ID NO: 124059 - DNA, 20 bp, Artificial Sequence
  Description of Artificial Sequence: Synthetic oligonucleotide
  Target: LAMA2; (+) strand; PAM type: NRG; PAM sequence: CAG
actggaaagcctctctggga

SEQ ID NO: 124060 - DNA, 20 bp, Artificial Sequence
  Description of Artificial Sequence: Synthetic oligonucleotide
  Target: LAMA2; (+) strand; PAM type: NRG; PAM sequence: AGG
ctggaaagcctctctgggac

SEQ ID NO: 124061 - DNA, 20 bp, Artificial Sequence
  Description of Artificial Sequence: Synthetic oligonucleotide
  Target: LAMA2; (+) strand; PAM type: NRG; PAM sequence: TGG
agcctctctgggacaggcaa

SEQ ID NO: 124062 - DNA, 20 bp, Artificial Sequence
  Description of Artificial Sequence: Synthetic oligonucleotide
  Target: LAMA2; (+) strand; PAM type: NRG; PAM sequence: GGG
gcctctctgggacaggcaat

SEQ ID NO: 124063 - DNA, 20 bp, Artificial Sequence
  Description of Artificial Sequence: Synthetic oligonucleotide
  Target: LAMA2; (+) strand; PAM type: NRG; PAM sequence: GGG
cctctctgggacaggcaatg

SEQ ID NO: 124064 - DNA, 20 bp, Artificial Sequence
  Description of Artificial Sequence: Synthetic oligonucleotide
  Target: LAMA2; (+) strand; PAM type: NRG; PAM sequence: GAG
tctctgggacaggcaatggg

SEQ ID NO: 124065 - DNA, 20 bp, Artificial Sequence
  Description of Artificial Sequence: Synthetic oligonucleotide
  Target: LAMA2; (+) strand; PAM type: NRG; PAM sequence: AAG
gggacaggcaatggggagtt

SEQ ID NO: 124066 - DNA, 20 bp, Artificial Sequence
  Description of Artificial Sequence: Synthetic oligonucleotide
  Target: LAMA2; (+) strand; PAM type: NRG; PAM sequence: CAG
acaggcaatggggagttaag

SEQ ID NO: 124067 - DNA, 20 bp, Artificial Sequence
  Description of Artificial Sequence: Synthetic oligonucleotide
  Target: LAMA2; (+) strand; PAM type: NRG; PAM sequence: AAG
ggagttaagcagtcatcata

SEQ ID NO: 124068 - DNA, 20 bp, Artificial Sequence
  Description of Artificial Sequence: Synthetic oligonucleotide
  Target: LAMA2; (+) strand; PAM type: NRG; PAM sequence: AGG
gagttaagcagtcatcataa

SEQ ID NO: 124069 - DNA, 20 bp, Artificial Sequence
  Description of Artificial Sequence: Synthetic oligonucleotide
  Target: LAMA2; (+) strand; PAM type: NRG; PAM sequence: CAG
taaaggaatcaatgtacatt

SEQ ID NO: 124070 - DNA, 20 bp, Artificial Sequence
  Description of Artificial Sequence: Synthetic oligonucleotide
  Target: LAMA2; (+) strand; PAM type: NRG; PAM sequence: TAG
gaatcaatgtacattcagca

SEQ ID NO: 124071 - DNA, 20 bp, Artificial Sequence
  Description of Artificial Sequence: Synthetic oligonucleotide
  Target: LAMA2; (+) strand; PAM type: NRG; PAM sequence: TGG
gtacattcagcatagtgact

SEQ ID NO: 124072 - DNA, 20 bp, Artificial Sequence
  Description of Artificial Sequence: Synthetic oligonucleotide
  Target: LAMA2; (+) strand; PAM type: NRG; PAM sequence: CGG
caacaattccttctcctcta

SEQ ID NO: 124073 - DNA, 20 bp, Artificial Sequence
  Description of Artificial Sequence: Synthetic oligonucleotide
  Target: LAMA2; (+) strand; PAM type: NRG; PAM sequence: TAG
caattccttctcctctacgg

SEQ ID NO: 124074 - DNA, 20 bp, Artificial Sequence
  Description of Artificial Sequence: Synthetic oligonucleotide
  Target: LAMA2; (+) strand; PAM type: NRG; PAM sequence: AAG
cttctcctctacggtagctc

SEQ ID NO: 124075 - DNA, 20 bp, Artificial Sequence
  Description of Artificial Sequence: Synthetic oligonucleotide
  Target: LAMA2; (+) strand; PAM type: NRG; PAM sequence: GAG
tctcctctacggtagctcaa

SEQ ID NO: 124076 - DNA, 20 bp, Artificial Sequence
  Description of Artificial Sequence: Synthetic oligonucleotide
  Target: LAMA2; (+) strand; PAM type: NRG; PAM sequence: GAG
tcctctacggtagctcaaga

SEQ ID NO: 124077 - DNA, 20 bp, Artificial Sequence
  Description of Artificial Sequence: Synthetic oligonucleotide
  Target: LAMA2; (+) strand; PAM type: NRG; PAM sequence: AAG
ctcaagagagacatgcttct

SEQ ID NO: 124078 - DNA, 20 bp, Artificial Sequence
  Description of Artificial Sequence: Synthetic oligonucleotide
  Target: LAMA2; (+) strand; PAM type: NRG; PAM sequence: CAG
gagagacatgcttctaagca

SEQ ID NO: 124079 - DNA, 20 bp, Artificial Sequence
  Description of Artificial Sequence: Synthetic oligonucleotide
  Target: LAMA2; (+) strand; PAM type: NRG; PAM sequence: GAG
gagacatgcttctaagcaca

SEQ ID NO: 124080 - DNA, 20 bp, Artificial Sequence
  Description of Artificial Sequence: Synthetic oligonucleotide
  Target: LAMA2; (+) strand; PAM type: NRG; PAM sequence: AGG
agacatgcttctaagcacag

SEQ ID NO: 124081 - DNA, 20 bp, Artificial Sequence
  Description of Artificial Sequence: Synthetic oligonucleotide
  Target: LAMA2; (+) strand; PAM type: NRG; PAM sequence: GAG
gcttctaagcacagaggtat

SEQ ID NO: 124082 - DNA, 20 bp, Artificial Sequence
  Description of Artificial Sequence: Synthetic oligonucleotide
  Target: LAMA2; (+) strand; PAM type: NRG; PAM sequence: AAG
tctaagcacagaggtatgag

SEQ ID NO: 124083 - DNA, 20 bp, Artificial Sequence
  Description of Artificial Sequence: Synthetic oligonucleotide
  Target: LAMA2; (+) strand; PAM type: NRG; PAM sequence: CAG
cacagaggtatgagaagtct

SEQ ID NO: 124084 - DNA, 20 bp, Artificial Sequence
  Description of Artificial Sequence: Synthetic oligonucleotide
  Target: LAMA2; (+) strand; PAM type: NRG; PAM sequence: TAG
ctcagactgttatttgctgt

SEQ ID NO: 124085 - DNA, 20 bp, Artificial Sequence
  Description of Artificial Sequence: Synthetic oligonucleotide
  Target: LAMA2; (+) strand; PAM type: NRG; PAM sequence: TGG
ctgttatttgctgttagaat

SEQ ID NO: 124086 - DNA, 20 bp, Artificial Sequence
  Description of Artificial Sequence: Synthetic oligonucleotide
  Target: LAMA2; (+) strand; PAM type: NRG; PAM sequence: CAG
ttggtctccccatctaataa

SEQ ID NO: 124087 - DNA, 20 bp, Artificial Sequence
  Description of Artificial Sequence: Synthetic oligonucleotide
  Target: LAMA2; (+) strand; PAM type: NRG; PAM sequence: TGG
atctaataacagtaaatctc

SEQ ID NO: 124088 - DNA, 20 bp, Artificial Sequence
  Description of Artificial Sequence: Synthetic oligonucleotide
  Target: LAMA2; (+) strand; PAM type: NRG; PAM sequence: CAG
ataacagtaaatctctggca

SEQ ID NO: 124089 - DNA, 20 bp, Artificial Sequence
  Description of Artificial Sequence: Synthetic oligonucleotide
  Target: LAMA2; (+) strand; PAM type: NRG; PAM sequence: TGG
atctctggcacagatgctat

SEQ ID NO: 124090 - DNA, 20 bp, Artificial Sequence
  Description of Artificial Sequence: Synthetic oligonucleotide
  Target: LAMA2; (+) strand; PAM type: NRG; PAM sequence: TAG
tccttaatgtcctgtgattt

SEQ ID NO: 124091 - DNA, 20 bp, Artificial Sequence
  Description of Artificial Sequence: Synthetic oligonucleotide
  Target: LAMA2; (+) strand; PAM type: NRG; PAM sequence: AGG
ccttaatgtcctgtgatttt

SEQ ID NO: 124092 - DNA, 20 bp, Artificial Sequence
  Description of Artificial Sequence: Synthetic oligonucleotide
  Target: LAMA2; (+) strand; PAM type: NRG; PAM sequence: TAG
tgtcctgtgattttaggaaa

SEQ ID NO: 124093 - DNA, 20 bp, Artificial Sequence
  Description of Artificial Sequence: Synthetic oligonucleotide
  Target: LAMA2; (+) strand; PAM type: NRG; PAM sequence: TGG
tgtgattttaggaaatagtt

SEQ ID NO: 124094 - DNA, 20 bp, Artificial Sequence
  Description of Artificial Sequence: Synthetic oligonucleotide
  Target: LAMA2; (+) strand; PAM type: NRG; PAM sequence: TAG
tttaggaaatagtttggatt

SEQ ID NO: 124095 - DNA, 20 bp, Artificial Sequence
  Description of Artificial Sequence: Synthetic oligonucleotide
  Target: LAMA2; (+) strand; PAM type: NRG; PAM sequence: CAG
tggatttagtttaatttatt

SEQ ID NO: 124096 - DNA, 20 bp, Artificial Sequence
  Description of Artificial Sequence: Synthetic oligonucleotide
  Target: LAMA2; (+) strand; PAM type: NRG; PAM sequence: TAG
agaaatcaaacatgtttaat

SEQ ID NO: 124097 - DNA, 20 bp, Artificial Sequence
  Description of Artificial Sequence: Synthetic oligonucleotide
  Target: LAMA2; (+) strand; PAM type: NRG; PAM sequence: AGG
gaaatcaaacatgtttaatt

SEQ ID NO: 124098 - DNA, 20 bp, Artificial Sequence
  Description of Artificial Sequence: Synthetic oligonucleotide
  Target: LAMA2; (+) strand; PAM type: NRG; PAM sequence: TGG
tttaattaggttcactgctc

SEQ ID NO: 124099 - DNA, 20 bp, Artificial Sequence
  Description of Artificial Sequence: Synthetic oligonucleotide
  Target: LAMA2; (+) strand; PAM type: NRG; PAM sequence: CAG
aattaggttcactgctctgg

SEQ ID NO: 124100 - DNA, 20 bp, Artificial Sequence
  Description of Artificial Sequence: Synthetic oligonucleotide
  Target: LAMA2; (+) strand; PAM type: NRG; PAM sequence: GAG
ttaggttcactgctctggca

SEQ ID NO: 124101 - DNA, 20 bp, Artificial Sequence
  Description of Artificial Sequence: Synthetic oligonucleotide
  Target: LAMA2; (+) strand; PAM type: NRG; PAM sequence: AAG
gttcactgctctggcagagt

SEQ ID NO: 124102 - DNA, 20 bp, Artificial Sequence
  Description of Artificial Sequence: Synthetic oligonucleotide
  Target: LAMA2; (+) strand; PAM type: NRG; PAM sequence: AGG
ttcactgctctggcagagta

SEQ ID NO: 124103 - DNA, 20 bp, Artificial Sequence
  Description of Artificial Sequence: Synthetic oligonucleotide
  Target: LAMA2; (+) strand; PAM type: NRG; PAM sequence: GGG
tcactgctctggcagagtaa

SEQ ID NO: 124104 - DNA, 20 bp, Artificial Sequence
  Description of Artificial Sequence: Synthetic oligonucleotide
  Target: LAMA2; (+) strand; PAM type: NRG; PAM sequence: TGG
ctggcagagtaagggtatgc

SEQ ID NO: 124105 - DNA, 20 bp, Artificial Sequence
  Description of Artificial Sequence: Synthetic oligonucleotide
  Target: LAMA2; (+) strand; PAM type: NRG; PAM sequence: TAG
agagtaagggtatgctggtt

SEQ ID NO: 124106 - DNA, 20 bp, Artificial Sequence
  Description of Artificial Sequence: Synthetic oligonucleotide
  Target: LAMA2; (+) strand; PAM type: NRG; PAM sequence: GAG
ctttataatatatatataat

SEQ ID NO: 124107 - DNA, 20 bp, Artificial Sequence
  Description of Artificial Sequence: Synthetic oligonucleotide
  Target: LAMA2; (+) strand; PAM type: NRG; PAM sequence: TAG
tataatatatatataatgag

SEQ ID NO: 124108 - DNA, 20 bp, Artificial Sequence
  Description of Artificial Sequence: Synthetic oligonucleotide
  Target: LAMA2; (+) strand; PAM type: NRG; PAM sequence: AGG
ataatatatatataatgagt

SEQ ID NO: 124109 - DNA, 20 bp, Artificial Sequence
  Description of Artificial Sequence: Synthetic oligonucleotide
  Target: LAMA2; (+) strand; PAM type: NRG; PAM sequence: TAG
tataatgagtaggtaaatca

SEQ ID NO: 124110 - DNA, 20 bp, Artificial Sequence
  Description of Artificial Sequence: Synthetic oligonucleotide
  Target: LAMA2; (+) strand; PAM type: NRG; PAM sequence: TAG
tcatagtcttaaatcatact

SEQ ID NO: 124111 - DNA, 20 bp, Artificial Sequence
  Description of Artificial Sequence: Synthetic oligonucleotide
  Target: LAMA2; (+) strand; PAM type: NRG; PAM sequence: CAG
aaaatgtttataaataaaaa

SEQ ID NO: 124112 - DNA, 20 bp, Artificial Sequence
  Description of Artificial Sequence: Synthetic oligonucleotide
  Target: LAMA2; (+) strand; PAM type: NRG; PAM sequence: AAG
agctgatgaaactaaatcca

SEQ ID NO: 124113 - DNA, 20 bp, Artificial Sequence
  Description of Artificial Sequence: Synthetic oligonucleotide
  Target: LAMA2; (+) strand; PAM type: NRG; PAM sequence: AGG
gctgatgaaactaaatccaa

SEQ ID NO: 124114 - DNA, 20 bp, Artificial Sequence
  Description of Artificial Sequence: Synthetic oligonucleotide
  Target: LAMA2; (+) strand; PAM type: NRG; PAM sequence: AAG
ctaaatccaaaggtatgaca

SEQ ID NO: 124115 - DNA, 20 bp, Artificial Sequence
  Description of Artificial Sequence: Synthetic oligonucleotide
  Target: LAMA2; (+) strand; PAM type: NRG; PAM sequence: CAG
aaggtatgacaaagacgact

SEQ ID NO: 124116 - DNA, 20 bp, Artificial Sequence
  Description of Artificial Sequence: Synthetic oligonucleotide
  Target: LAMA2; (+) strand; PAM type: NRG; PAM sequence: AAG
actcagctctatgttgctta

SEQ ID NO: 124117 - DNA, 20 bp, Artificial Sequence
  Description of Artificial Sequence: Synthetic oligonucleotide
  Target: LAMA2; (+) strand; PAM type: NRG; PAM sequence: AAG
gttgcttaaagaactttaaa

SEQ ID NO: 124118 - DNA, 20 bp, Artificial Sequence
  Description of Artificial Sequence: Synthetic oligonucleotide
  Target: LAMA2; (+) strand; PAM type: NRG; PAM sequence: AAG
ttaaaaagcatgtgcccata

SEQ ID NO: 124119 - DNA, 20 bp, Artificial Sequence
  Description of Artificial Sequence: Synthetic oligonucleotide
  Target: LAMA2; (+) strand; PAM type: NRG; PAM sequence: AAG
atgtgcccataaagccgttc

SEQ ID NO: 124120 - DNA, 20 bp, Artificial Sequence
  Description of Artificial Sequence: Synthetic oligonucleotide
  Target: LAMA2; (+) strand; PAM type: NRG; PAM sequence: AGG
tgtgcccataaagccgttca

SEQ ID NO: 124121 - DNA, 20 bp, Artificial Sequence
  Description of Artificial Sequence: Synthetic oligonucleotide
  Target: LAMA2; (+) strand; PAM type: NRG; PAM sequence: GAG
tgcccataaagccgttcaag

SEQ ID NO: 124122 - DNA, 20 bp, Artificial Sequence
  Description of Artificial Sequence: Synthetic oligonucleotide
  Target: LAMA2; (+) strand; PAM type: NRG; PAM sequence: GAG
cccataaagccgttcaagga

SEQ ID NO: 124123 - DNA, 20 bp, Artificial Sequence
  Description of Artificial Sequence: Synthetic oligonucleotide
  Target: LAMA2; (+) strand; PAM type: NRG; PAM sequence: AGG
ccataaagccgttcaaggag

SEQ ID NO: 124124 - DNA, 20 bp, Artificial Sequence
  Description of Artificial Sequence: Synthetic oligonucleotide
  Target: LAMA2; (+) strand; PAM type: NRG; PAM sequence: GGG
cataaagccgttcaaggaga

SEQ ID NO: 124125 - DNA, 20 bp, Artificial Sequence
  Description of Artificial Sequence: Synthetic oligonucleotide
  Target: LAMA2; (+) strand; PAM type: NRG; PAM sequence: AAG
aaagccgttcaaggagaggg

SEQ ID NO: 124126 - DNA, 20 bp, Artificial Sequence
  Description of Artificial Sequence: Synthetic oligonucleotide
  Target: LAMA2; (+) strand; PAM type: NRG; PAM sequence: AGG
aagccgttcaaggagaggga

SEQ ID NO: 124127 - DNA, 20 bp, Artificial Sequence
  Description of Artificial Sequence: Synthetic oligonucleotide
  Target: LAMA2; (+) strand; PAM type: NRG; PAM sequence: GAG
gccgttcaaggagagggaag

SEQ ID NO: 124128 - DNA, 20 bp, Artificial Sequence
  Description of Artificial Sequence: Synthetic oligonucleotide
  Target: LAMA2; (+) strand; PAM type: NRG; PAM sequence: AGG
ccgttcaaggagagggaagg

SEQ ID NO: 124129 - DNA, 20 bp, Artificial Sequence
  Description of Artificial Sequence: Synthetic oligonucleotide
  Target: LAMA2; (+) strand; PAM type: NRG; PAM sequence: TAG
ccttctccttattcttacga

SEQ ID NO: 124130 - DNA, 20 bp, Artificial Sequence
  Description of Artificial Sequence: Synthetic oligonucleotide
  Target: LAMA2; (+) strand; PAM type: NRG; PAM sequence: TGG
tcttacgatagaattcctat

SEQ ID NO: 124131 - DNA, 20 bp, Artificial Sequence
  Description of Artificial Sequence: Synthetic oligonucleotide
  Target: LAMA2; (+) strand; PAM type: NRG; PAM sequence: GGG
cttacgatagaattcctatt

SEQ ID NO: 124132 - DNA, 20 bp, Artificial Sequence
  Description of Artificial Sequence: Synthetic oligonucleotide
  Target: LAMA2; (+) strand; PAM type: NRG; PAM sequence: GGG
ttacgatagaattcctattg

SEQ ID NO: 124133 - DNA, 20 bp, Artificial Sequence
  Description of Artificial Sequence: Synthetic oligonucleotide
  Target: LAMA2; (+) strand; PAM type: NRG; PAM sequence: CAG
aattcctattggggctgtgc

SEQ ID NO: 124134 - DNA, 20 bp, Artificial Sequence
  Description of Artificial Sequence: Synthetic oligonucleotide
  Target: LAMA2; (+) strand; PAM type: NRG; PAM sequence: GAG
attggggctgtgccagaaat

SEQ ID NO: 124135 - DNA, 20 bp, Artificial Sequence
  Description of Artificial Sequence: Synthetic oligonucleotide
  Target: LAMA2; (+) strand; PAM type: NRG; PAM sequence: AAG
tgccagaaatgagcacttct

SEQ ID NO: 124136 - DNA, 20 bp, Artificial Sequence
  Description of Artificial Sequence: Synthetic oligonucleotide
  Target: LAMA2; (+) strand; PAM type: NRG; PAM sequence: CAG
atgagcacttctaagtattt

SEQ ID NO: 124137 - DNA, 20 bp, Artificial Sequence
  Description of Artificial Sequence: Synthetic oligonucleotide
  Target: LAMA2; (+) strand; PAM type: NRG; PAM sequence: GAG
gagcacttctaagtatttca

SEQ ID NO: 124138 - DNA, 20 bp, Artificial Sequence
  Description of Artificial Sequence: Synthetic oligonucleotide
  Target: LAMA2; (+) strand; PAM type: NRG; PAM sequence: AAG
cacttctaagtatttcagag

SEQ ID NO: 124139 - DNA, 20 bp, Artificial Sequence
  Description of Artificial Sequence: Synthetic oligonucleotide
  Target: LAMA2; (+) strand; PAM type: NRG; PAM sequence: AAG
aagtatttcagagaagtcca

SEQ ID NO: 124140 - DNA, 20 bp, Artificial Sequence
  Description of Artificial Sequence: Synthetic oligonucleotide
  Target: LAMA2; (+) strand; PAM type: NRG; PAM sequence: AAG
gagaagtccaaagtgttaaa

SEQ ID NO: 124141 - DNA, 20 bp, Artificial Sequence
  Description of Artificial Sequence: Synthetic oligonucleotide
  Target: LAMA2; (+) strand; PAM type: NRG; PAM sequence: AAG
ttaaaaagtcttttatgcaa

SEQ ID NO: 124142 - DNA, 20 bp, Artificial Sequence
  Description of Artificial Sequence: Synthetic oligonucleotide
  Target: LAMA2; (+) strand; PAM type: NRG; PAM sequence: CAG
aaaagaacgtctttctgaat

SEQ ID NO: 124143 - DNA, 20 bp, Artificial Sequence
  Description of Artificial Sequence: Synthetic oligonucleotide
  Target: LAMA2; (+) strand; PAM type: NRG; PAM sequence: TAG
cgtctttctgaatcagtgaa

SEQ ID NO: 124144 - DNA, 20 bp, Artificial Sequence
  Description of Artificial Sequence: Synthetic oligonucleotide
  Target: LAMA2; (+) strand; PAM type: NRG; PAM sequence: CAG
cagtgaatagtaatgctcat

SEQ ID NO: 124145 - DNA, 20 bp, Artificial Sequence
  Description of Artificial Sequence: Synthetic oligonucleotide
  Target: LAMA2; (+) strand; PAM type: NRG; PAM sequence: AAG
tttctaataacacaaaaaca

SEQ ID NO: 124146 - DNA, 20 bp, Artificial Sequence
  Description of Artificial Sequence: Synthetic oligonucleotide
  Target: LAMA2; (+) strand; PAM type: NRG; PAM sequence: AAG
aataacacaaaaacaaagcc

SEQ ID NO: 124147 - DNA, 20 bp, Artificial Sequence
  Description of Artificial Sequence: Synthetic oligonucleotide
  Target: LAMA2; (+) strand; PAM type: NRG; PAM sequence: CAG
gccaagtccatacatttgat

SEQ ID NO: 124148 - DNA, 20 bp, Artificial Sequence
  Description of Artificial Sequence: Synthetic oligonucleotide
  Target: LAMA2; (+) strand; PAM type: NRG; PAM sequence: AAG
atacatttgatcagttgtca

SEQ ID NO: 124149 - DNA, 20 bp, Artificial Sequence
  Description of Artificial Sequence: Synthetic oligonucleotide
  Target: LAMA2; (+) strand; PAM type: NRG; PAM sequence: TGG
ttgatcagttgtcaaagtaa

SEQ ID NO: 124150 - DNA, 20 bp, Artificial Sequence
  Description of Artificial Sequence: Synthetic oligonucleotide
  Target: LAMA2; (+) strand; PAM type: NRG; PAM sequence: GGG
tgatcagttgtcaaagtaat

SEQ ID NO: 124151 - DNA, 20 bp, Artificial Sequence
  Description of Artificial Sequence: Synthetic oligonucleotide
  Target: LAMA2; (+) strand; PAM type: NRG; PAM sequence: GAG
atcagttgtcaaagtaatgg

SEQ ID NO: 124152 - DNA, 20 bp, Artificial Sequence
  Description of Artificial Sequence: Synthetic oligonucleotide
  Target: LAMA2; (+) strand; PAM type: NRG; PAM sequence: AGG
tcagttgtcaaagtaatggg

SEQ ID NO: 124153 - DNA, 20 bp, Artificial Sequence
  Description of Artificial Sequence: Synthetic oligonucleotide
  Target: LAMA2; (+) strand; PAM type: NRG; PAM sequence: TGG
gttgtcaaagtaatgggagg

SEQ ID NO: 124154 - DNA, 20 bp, Artificial Sequence
  Description of Artificial Sequence: Synthetic oligonucleotide
  Target: LAMA2; (+) strand; PAM type: NRG; PAM sequence: TAG
gtggactattatgtcaacct

SEQ ID NO: 124155 - DNA, 20 bp, Artificial Sequence
  Description of Artificial Sequence: Synthetic oligonucleotide
  Target: LAMA2; (+) strand; PAM type: NRG; PAM sequence: CAG
actattatgtcaaccttagt

SEQ ID NO: 124156 - DNA, 20 bp, Artificial Sequence
  Description of Artificial Sequence: Synthetic oligonucleotide
  Target: LAMA2; (+) strand; PAM type: NRG; PAM sequence: GAG
tattatgtcaaccttagtca

SEQ ID NO: 124157 - DNA, 20 bp, Artificial Sequence
  Description of Artificial Sequence: Synthetic oligonucleotide
  Target: LAMA2; (+) strand; PAM type: NRG; PAM sequence: TGG
accttagtcagagctcctgc

SEQ ID NO: 124158 - DNA, 20 bp, Artificial Sequence
  Description of Artificial Sequence: Synthetic oligonucleotide
  Target: LAMA2; (+) strand; PAM type: NRG; PAM sequence: GAG
tatacactgttcaccaattt

SEQ ID NO: 124159 - DNA, 20 bp, Artificial Sequence
  Description of Artificial Sequence: Synthetic oligonucleotide
  Target: LAMA2; (+) strand; PAM type: NRG; PAM sequence: AAG
actgttcaccaatttgagta

SEQ ID NO: 124160 - DNA, 20 bp, Artificial Sequence
  Description of Artificial Sequence: Synthetic oligonucleotide
  Target: LAMA2; (+) strand; PAM type: NRG; PAM sequence: TGG
gttcaccaatttgagtaaag

SEQ ID NO: 124161 - DNA, 20 bp, Artificial Sequence
  Description of Artificial Sequence: Synthetic oligonucleotide
  Target: LAMA2; (+) strand; PAM type: NRG; PAM sequence: GAG
ttgagtaaagtggactttgt

SEQ ID NO: 124162 - DNA, 20 bp, Artificial Sequence
  Description of Artificial Sequence: Synthetic oligonucleotide
  Target: LAMA2; (+) strand; PAM type: NRG; PAM sequence: GAG
gagtaaagtggactttgtga

SEQ ID NO: 124163 - DNA, 20 bp, Artificial Sequence
  Description of Artificial Sequence: Synthetic oligonucleotide
  Target: LAMA2; (+) strand; PAM type: NRG; PAM sequence: TAG
aagtggactttgtgagagaa

SEQ ID NO: 124164 - DNA, 20 bp, Artificial Sequence
  Description of Artificial Sequence: Synthetic oligonucleotide
  Target: LAMA2; (+) strand; PAM type: NRG; PAM sequence: TGG
tgtgagagaatagtgtttga

SEQ ID NO: 124165 - DNA, 20 bp, Artificial Sequence
  Description of Artificial Sequence: Synthetic oligonucleotide
  Target: LAMA2; (+) strand; PAM type: NRG; PAM sequence: CAG
agagaatagtgtttgatggc

SEQ ID NO: 124166 - DNA, 20 bp, Artificial Sequence
  Description of Artificial Sequence: Synthetic oligonucleotide
  Target: LAMA2; (+) strand; PAM type: NRG; PAM sequence: AGG
gagaatagtgtttgatggcc

SEQ ID NO: 124167 - DNA, 20 bp, Artificial Sequence
  Description of Artificial Sequence: Synthetic oligonucleotide
  Target: LAMA2; (+) strand; PAM type: NRG; PAM sequence: TGG
ttgatggccaggacctcttt

SEQ ID NO: 124168 - DNA, 20 bp, Artificial Sequence
  Description of Artificial Sequence: Synthetic oligonucleotide
  Target: LAMA2; (+) strand; PAM type: NRG; PAM sequence: GGG
tgatggccaggacctctttt

SEQ ID NO: 124169 - DNA, 20 bp, Artificial Sequence
  Description of Artificial Sequence: Synthetic oligonucleotide
  Target: LAMA2; (+) strand; PAM type: NRG; PAM sequence: AAG
tcttttgggcatttcttcct

SEQ ID NO: 124170 - DNA, 20 bp, Artificial Sequence
  Description of Artificial Sequence: Synthetic oligonucleotide
  Target: LAMA2; (+) strand; PAM type: NRG; PAM sequence: TGG
tttgggcatttcttcctaag

SEQ ID NO: 124171 - DNA, 20 bp, Artificial Sequence
  Description of Artificial Sequence: Synthetic oligonucleotide
  Target: LAMA2; (+) strand; PAM type: NRG; PAM sequence: CAG
ttcctaagtggaatacacaa

SEQ ID NO: 124172 - DNA, 20 bp, Artificial Sequence
  Description of Artificial Sequence: Synthetic oligonucleotide
  Target: LAMA2; (+) strand; PAM type: NRG; PAM sequence: AAG
aagtggaatacacaacagat

SEQ ID NO: 124173 - DNA, 20 bp, Artificial Sequence
  Description of Artificial Sequence: Synthetic oligonucleotide
  Target: LAMA2; (+) strand; PAM type: NRG; PAM sequence: AGG
agtggaatacacaacagata

SEQ ID NO: 124174 - DNA, 20 bp, Artificial Sequence
  Description of Artificial Sequence: Synthetic oligonucleotide
  Target: LAMA2; (+) strand; PAM type: NRG; PAM sequence: GGG
gtggaatacacaacagataa

SEQ ID NO: 124175 - DNA, 20 bp, Artificial Sequence
  Description of Artificial Sequence: Synthetic oligonucleotide
  Target: LAMA2; (+) strand; PAM type: NRG; PAM sequence: GAG
ggaatacacaacagataagg

SEQ ID NO: 124176 - DNA, 20 bp, Artificial Sequence
  Description of Artificial Sequence: Synthetic oligonucleotide
  Target: LAMA2; (+) strand; PAM type: NRG; PAM sequence: TAG
atacacaacagataagggag

SEQ ID NO: 124177 - DNA, 20 bp, Artificial Sequence
  Description of Artificial Sequence: Synthetic oligonucleotide
  Target: LAMA2; (+) strand; PAM type: NRG; PAM sequence: GAG
acacaacagataagggagta

SEQ ID NO: 124178 - DNA, 20 bp, Artificial Sequence
  Description of Artificial Sequence: Synthetic oligonucleotide
  Target: LAMA2; (+) strand; PAM type: NRG; PAM sequence: AGG
cacaacagataagggagtag

SEQ ID NO: 124179 - DNA, 20 bp, Artificial Sequence
  Description of Artificial Sequence: Synthetic oligonucleotide
  Target: LAMA2; (+) strand; PAM type: NRG; PAM sequence: GAG
caacagataagggagtagag

SEQ ID NO: 124180 - DNA, 20 bp, Artificial Sequence
  Description of Artificial Sequence: Synthetic oligonucleotide
  Target: LAMA2; (+) strand; PAM type: NRG; PAM sequence: AGG
aacagataagggagtagagg

SEQ ID NO: 124181 - DNA, 20 bp, Artificial Sequence
  Description of Artificial Sequence: Synthetic oligonucleotide
  Target: LAMA2; (+) strand; PAM type: NRG; PAM sequence: CAG
agggagtagaggaggtaata

SEQ ID NO: 124182 - DNA, 20 bp, Artificial Sequence
  Description of Artificial Sequence: Synthetic oligonucleotide
  Target: LAMA2; (+) strand; PAM type: NRG; PAM sequence: AGG
gggagtagaggaggtaatac

SEQ ID NO: 124183 - DNA, 20 bp, Artificial Sequence
  Description of Artificial Sequence: Synthetic oligonucleotide
  Target: LAMA2; (+) strand; PAM type: NRG; PAM sequence: GGG
ggagtagaggaggtaataca

SEQ ID NO: 124184 - DNA, 20 bp, Artificial Sequence
  Description of Artificial Sequence: Synthetic oligonucleotide
  Target: LAMA2; (+) strand; PAM type: NRG; PAM sequence: AAG
gtagaggaggtaatacaggg

SEQ ID NO: 124185 - DNA, 20 bp, Artificial Sequence
  Description of Artificial Sequence: Synthetic oligonucleotide
  Target: LAMA2; (+) strand; PAM type: NRG; PAM sequence: CAG
tacagggaagctactcattc

SEQ ID NO: 124186 - DNA, 20 bp, Artificial Sequence
  Description of Artificial Sequence: Synthetic oligonucleotide
  Target: LAMA2; (+) strand; PAM type: NRG; PAM sequence: CAG
ggaagctactcattccagct

SEQ ID NO: 124187 - DNA, 20 bp, Artificial Sequence
  Description of Artificial Sequence: Synthetic oligonucleotide
  Target: LAMA2; (+) strand; PAM type: NRG; PAM sequence: AAG
agctactcattccagctcag

SEQ ID NO: 124188 - DNA, 20 bp, Artificial Sequence
  Description of Artificial Sequence: Synthetic oligonucleotide
  Target: LAMA2; (+) strand; PAM type: NRG; PAM sequence: AGG
gctactcattccagctcaga

SEQ ID NO: 124189 - DNA, 20 bp, Artificial Sequence
  Description of Artificial Sequence: Synthetic oligonucleotide
  Target: LAMA2; (+) strand; PAM type: NRG; PAM sequence: GAG
tactcattccagctcagaag

SEQ ID NO: 124190 - DNA, 20 bp, Artificial Sequence
  Description of Artificial Sequence: Synthetic oligonucleotide
  Target: LAMA2; (+) strand; PAM type: NRG; PAM sequence: CAG
tcattccagctcagaaggag

SEQ ID NO: 124191 - DNA, 20 bp, Artificial Sequence
  Description of Artificial Sequence: Synthetic oligonucleotide
  Target: LAMA2; (+) strand; PAM type: NRG; PAM sequence: AAG
ttccagctcagaaggagcag

SEQ ID NO: 124192 - DNA, 20 bp, Artificial Sequence
  Description of Artificial Sequence: Synthetic oligonucleotide
  Target: LAMA2; (+) strand; PAM type: NRG; PAM sequence: AGG
tccagctcagaaggagcaga

SEQ ID NO: 124193 - DNA, 20 bp, Artificial Sequence
  Description of Artificial Sequence: Synthetic oligonucleotide
  Target: LAMA2; (+) strand; PAM type: NRG; PAM sequence: GAG
cagctcagaaggagcagaag

SEQ ID NO: 124194 - DNA, 20 bp, Artificial Sequence
  Description of Artificial Sequence: Synthetic oligonucleotide
  Target: LAMA2; (+) strand; PAM type: NRG; PAM sequence: TAG
tcagaaggagcagaaggagt

SEQ ID NO: 124195 - DNA, 20 bp, Artificial Sequence
  Description of Artificial Sequence: Synthetic oligonucleotide
  Target: LAMA2; (+) strand; PAM type: NRG; PAM sequence: AAG
ggagcagaaggagttagatg

SEQ ID NO: 124196 - DNA, 20 bp, Artificial Sequence
  Description of Artificial Sequence: Synthetic oligonucleotide
  Target: LAMA2; (+) strand; PAM type: NRG; PAM sequence: AAG
tgaagcccatatatgcattc

SEQ ID NO: 124197 - DNA, 20 bp, Artificial Sequence
  Description of Artificial Sequence: Synthetic oligonucleotide
  Target: LAMA2; (+) strand; PAM type: NRG; PAM sequence: AAG
agcccatatatgcattcaag

SEQ ID NO: 124198 - DNA, 20 bp, Artificial Sequence
  Description of Artificial Sequence: Synthetic oligonucleotide
  Target: LAMA2; (+) strand; PAM type: NRG; PAM sequence: TGG
atatgcattcaagaagccaa

SEQ ID NO: 124199 - DNA, 20 bp, Artificial Sequence
  Description of Artificial Sequence: Synthetic oligonucleotide
  Target: LAMA2; (+) strand; PAM type: NRG; PAM sequence: TAG
aagaagccaatggtatcctc

SEQ ID NO: 124200 - DNA, 20 bp, Artificial Sequence
  Description of Artificial Sequence: Synthetic oligonucleotide
  Target: LAMA2; (+) strand; PAM type: NRG; PAM sequence: TGG
ccaatggtatcctctagctg

SEQ ID NO: 124201 - DNA, 20 bp, Artificial Sequence
  Description of Artificial Sequence: Synthetic oligonucleotide
  Target: LAMA2; (+) strand; PAM type: NRG; PAM sequence: TAG
tggtatcctctagctgtgga

SEQ ID NO: 124202 - DNA, 20 bp, Artificial Sequence
  Description of Artificial Sequence: Synthetic oligonucleotide
  Target: LAMA2; (+) strand; PAM type: NRG; PAM sequence: TGG
tatcctctagctgtggatag

SEQ ID NO: 124203 - DNA, 20 bp, Artificial Sequence
  Description of Artificial Sequence: Synthetic oligonucleotide
  Target: LAMA2; (+) strand; PAM type: NRG; PAM sequence: TGG
gctgtggatagtggctaatg

SEQ ID NO: 124204 - DNA, 20 bp, Artificial Sequence
  Description of Artificial Sequence: Synthetic oligonucleotide
  Target: LAMA2; (+) strand; PAM type: NRG; PAM sequence: CAG
tagtggctaatgtggtcatc

SEQ ID NO: 124205 - DNA, 20 bp, Artificial Sequence
  Description of Artificial Sequence: Synthetic oligonucleotide
  Target: LAMA2; (+) strand; PAM type: NRG; PAM sequence: TGG
gtcatccagaatccacactg

SEQ ID NO: 124206 - DNA, 20 bp, Artificial Sequence
  Description of Artificial Sequence: Synthetic oligonucleotide
  Target: LAMA2; (+) strand; PAM type: NRG; PAM sequence: CAG
agaatccacactgtggaccg

SEQ ID NO: 124207 - DNA, 20 bp, Artificial Sequence
  Description of Artificial Sequence: Synthetic oligonucleotide
  Target: LAMA2; (+) strand; PAM type: NRG; PAM sequence: CAG
atccacactgtggaccgcag

SEQ ID NO: 124208 - DNA, 20 bp, Artificial Sequence
  Description of Artificial Sequence: Synthetic oligonucleotide
  Target: LAMA2; (+) strand; PAM type: NRG; PAM sequence: CAG
cgcagcagcgttttcccgta

SEQ ID NO: 124209 - DNA, 20 bp, Artificial Sequence
  Description of Artificial Sequence: Synthetic oligonucleotide
  Target: LAMA2; (+) strand; PAM type: NRG; PAM sequence: TGG
ccgtacagatccaaaaactc

SEQ ID NO: 124210 - DNA, 20 bp, Artificial Sequence
  Description of Artificial Sequence: Synthetic oligonucleotide
  Target: LAMA2; (+) strand; PAM type: NRG; PAM sequence: TAG
acagatccaaaaactctgga

SEQ ID NO: 124211 - DNA, 20 bp, Artificial Sequence
  Description of Artificial Sequence: Synthetic oligonucleotide
  Target: LAMA2; (+) strand; PAM type: NRG; PAM sequence: AGG
cagatccaaaaactctggat

SEQ ID NO: 124212 - DNA, 20 bp, Artificial Sequence
  Description of Artificial Sequence: Synthetic oligonucleotide
  Target: LAMA2; (+) strand; PAM type: NRG; PAM sequence: GGG
agatccaaaaactctggata

SEQ ID NO: 124213 - DNA, 20 bp, Artificial Sequence
  Description of Artificial Sequence: Synthetic oligonucleotide
  Target: LAMA2; (+) strand; PAM type: NRG; PAM sequence: CAG
aaactctggatagggattta

SEQ ID NO: 124214 - DNA, 20 bp, Artificial Sequence
  Description of Artificial Sequence: Synthetic oligonucleotide
  Target: LAMA2; (+) strand; PAM type: NRG; PAM sequence: AGG
aactctggatagggatttac

SEQ ID NO: 124215 - DNA, 20 bp, Artificial Sequence
  Description of Artificial Sequence: Synthetic oligonucleotide
  Target: LAMA2; (+) strand; PAM type: NRG; PAM sequence: TGG
tagggatttacaggatccaa

SEQ ID NO: 124216 - DNA, 20 bp, Artificial Sequence
  Description of Artificial Sequence: Synthetic oligonucleotide
  Target: LAMA2; (+) strand; PAM type: NRG; PAM sequence: CGG
gatttacaggatccaatggc

SEQ ID NO: 124217 - DNA, 20 bp, Artificial Sequence
  Description of Artificial Sequence: Synthetic oligonucleotide
  Target: LAMA2; (+) strand; PAM type: NRG; PAM sequence: TAG
ttacaggatccaatggccgg

SEQ ID NO: 124218 - DNA, 20 bp, Artificial Sequence
  Description of Artificial Sequence: Synthetic oligonucleotide
  Target: LAMA2; (+) strand; PAM type: NRG; PAM sequence: TGG
tggccggtagataaaatgaa

SEQ ID NO: 124219 - DNA, 20 bp, Artificial Sequence
  Description of Artificial Sequence: Synthetic oligonucleotide
  Target: LAMA2; (+) strand; PAM type: NRG; PAM sequence: GGG
ggccggtagataaaatgaat

SEQ ID NO: 124220 - DNA, 20 bp, Artificial Sequence
  Description of Artificial Sequence: Synthetic oligonucleotide
  Target: LAMA2; (+) strand; PAM type: NRG; PAM sequence: GGG
gccggtagataaaatgaatg

SEQ ID NO: 124221 - DNA, 20 bp, Artificial Sequence
  Description of Artificial Sequence: Synthetic oligonucleotide
  Target: LAMA2; (+) strand; PAM type: NRG; PAM sequence: TAG
gtagataaaatgaatgggga

SEQ ID NO: 124222 - DNA, 20 bp, Artificial Sequence
  Description of Artificial Sequence: Synthetic oligonucleotide
  Target: LAMA2; (+) strand; PAM type: NRG; PAM sequence: CAG
aaaatgaatggggatagtta

SEQ ID NO: 124223 - DNA, 20 bp, Artificial Sequence
  Description of Artificial Sequence: Synthetic oligonucleotide
  Target: LAMA2; (+) strand; PAM type: NRG; PAM sequence: GAG
aatgaatggggatagttaca

SEQ ID NO: 124224 - DNA, 20 bp, Artificial Sequence
  Description of Artificial Sequence: Synthetic oligonucleotide
  Target: LAMA2; (+) strand; PAM type: NRG; PAM sequence: AGG
atgaatggggatagttacag

SEQ ID NO: 124225 - DNA, 20 bp, Artificial Sequence
  Description of Artificial Sequence: Synthetic oligonucleotide
  Target: LAMA2; (+) strand; PAM type: NRG; PAM sequence: AAG
atggggatagttacagaggc

SEQ ID NO: 124226 - DNA, 20 bp, Artificial Sequence
  Description of Artificial Sequence: Synthetic oligonucleotide
  Target: LAMA2; (+) strand; PAM type: NRG; PAM sequence: GAG
ggggatagttacagaggcaa

SEQ ID NO: 124227 - DNA, 20 bp, Artificial Sequence
  Description of Artificial Sequence: Synthetic oligonucleotide
  Target: LAMA2; (+) strand; PAM type: NRG; PAM sequence: CAG
cagaggcaagagctcccacc

SEQ ID NO: 124228 - DNA, 20 bp, Artificial Sequence
  Description of Artificial Sequence: Synthetic oligonucleotide
  Target: LAMA2; (+) strand; PAM type: NRG; PAM sequence: GAG
gctcccacccagcgccttct

SEQ ID NO: 124229 - DNA, 20 bp, Artificial Sequence
  Description of Artificial Sequence: Synthetic oligonucleotide
  Target: LAMA2; (+) strand; PAM type: NRG; PAM sequence: AAG
tcctctgattgatgtactgt

SEQ ID NO: 124230 - DNA, 20 bp, Artificial Sequence
  Description of Artificial Sequence: Synthetic oligonucleotide
  Target: LAMA2; (+) strand; PAM type: NRG; PAM sequence: GAG
ctctgattgatgtactgtaa

SEQ ID NO: 124231 - DNA, 20 bp, Artificial Sequence
  Description of Artificial Sequence: Synthetic oligonucleotide
  Target: LAMA2; (+) strand; PAM type: NRG; PAM sequence: TGG
gtactgtaagagaccgtcaa

SEQ ID NO: 124232 - DNA, 20 bp, Artificial Sequence
  Description of Artificial Sequence: Synthetic oligonucleotide
  Target: LAMA2; (+) strand; PAM type: NRG; PAM sequence: AAG
gtaagagaccgtcaatggct

SEQ ID NO: 124233 - DNA, 20 bp, Artificial Sequence
  Description of Artificial Sequence: Synthetic oligonucleotide
  Target: LAMA2; (+) strand; PAM type: NRG; PAM sequence: CGG
ctaagttcccgtcattgatg

SEQ ID NO: 124234 - DNA, 20 bp, Artificial Sequence
  Description of Artificial Sequence: Synthetic oligonucleotide
  Target: LAMA2; (+) strand; PAM type: NRG; PAM sequence: CAG
atccctgcccacatgtccca

SEQ ID NO: 124235 - DNA, 20 bp, Artificial Sequence
  Description of Artificial Sequence: Synthetic oligonucleotide
  Target: LAMA2; (+) strand; PAM type: NRG; PAM sequence: CAG
tgtcccacagctcactctca

SEQ ID NO: 124236 - DNA, 20 bp, Artificial Sequence
  Description of Artificial Sequence: Synthetic oligonucleotide
  Target: LAMA2; (+) strand; PAM type: NRG; PAM sequence: GAG
tcccacagctcactctcaca

SEQ ID NO: 124237 - DNA, 20 bp, Artificial Sequence
  Description of Artificial Sequence: Synthetic oligonucleotide
  Target: LAMA2; (+) strand; PAM type: NRG; PAM sequence: AAG
cagctcactctcacagagcc

SEQ ID NO: 124238 - DNA, 20 bp, Artificial Sequence
  Description of Artificial Sequence: Synthetic oligonucleotide
  Target: LAMA2; (+) strand; PAM type: NRG; PAM sequence: CGG
ctctcacagagccaagtaca

SEQ ID NO: 124239 - DNA, 20 bp, Artificial Sequence
  Description of Artificial Sequence: Synthetic oligonucleotide
  Target: LAMA2; (+) strand; PAM type: NRG; PAM sequence: AAG
agagccaagtacacggccca

SEQ ID NO: 124240 - DNA, 20 bp, Artificial Sequence
  Description of Artificial Sequence: Synthetic oligonucleotide
  Target: LAMA2; (+) strand; PAM type: NRG; PAM sequence: TGG
caagtacacggcccaaagac

SEQ ID NO: 124241 - DNA, 20 bp, Artificial Sequence
  Description of Artificial Sequence: Synthetic oligonucleotide
  Target: LAMA2; (+) strand; PAM type: NRG; PAM sequence: GGG
aagtacacggcccaaagact

SEQ ID NO: 124242 - DNA, 20 bp, Artificial Sequence
  Description of Artificial Sequence: Synthetic oligonucleotide
  Target: LAMA2; (+) strand; PAM type: NRG; PAM sequence: GGG
agtacacggcccaaagactg

SEQ ID NO: 124243 - DNA, 20 bp, Artificial Sequence
  Description of Artificial Sequence: Synthetic oligonucleotide
  Target: LAMA2; (+) strand; PAM type: NRG; PAM sequence: GAG
cacggcccaaagactggggt

SEQ ID NO: 124244 - DNA, 20 bp, Artificial Sequence
  Description of Artificial Sequence: Synthetic oligonucleotide
  Target: LAMA2; (+) strand; PAM type: NRG; PAM sequence: GAG
aaagactggggtgagacctc

SEQ ID NO: 124245 - DNA, 20 bp, Artificial Sequence
  Description of Artificial Sequence: Synthetic oligonucleotide
  Target: LAMA2; (+) strand; PAM type: NRG; PAM sequence: GAG
agactggggtgagacctcga

SEQ ID NO: 124246 - DNA, 20 bp, Artificial Sequence
  Description of Artificial Sequence: Synthetic oligonucleotide
  Target: LAMA2; (+) strand; PAM type: NRG; PAM sequence: AAG
tgagacctcgagagaataca

SEQ ID NO: 124247 - DNA, 20 bp, Artificial Sequence
  Description of Artificial Sequence: Synthetic oligonucleotide
  Target: LAMA2; (+) strand; PAM type: NRG; PAM sequence: AAG
gacctcgagagaatacaaag

SEQ ID NO: 124248 - DNA, 20 bp, Artificial Sequence
  Description of Artificial Sequence: Synthetic oligonucleotide
  Target: LAMA2; (+) strand; PAM type: NRG; PAM sequence: CAG
gagaatacaaagaagttcat

SEQ ID NO: 124249 - DNA, 20 bp, Artificial Sequence
  Description of Artificial Sequence: Synthetic oligonucleotide
  Target: LAMA2; (+) strand; PAM type: NRG; PAM sequence: GAG
aagaagttcatcagtcatgt

SEQ ID NO: 124250 - DNA, 20 bp, Artificial Sequence
  Description of Artificial Sequence: Synthetic oligonucleotide
  Target: LAMA2; (+) strand; PAM type: NRG; PAM sequence: AGG
agaagttcatcagtcatgtg

SEQ ID NO: 124251 - DNA, 20 bp, Artificial Sequence
  Description of Artificial Sequence: Synthetic oligonucleotide
  Target: LAMA2; (+) strand; PAM type: NRG; PAM sequence: GAG
ttcatcagtcatgtgaggat

SEQ ID NO: 124252 - DNA, 20 bp, Artificial Sequence
  Description of Artificial Sequence: Synthetic oligonucleotide
  Target: LAMA2; (+) strand; PAM type: NRG; PAM sequence: TAG
agtcatgtgaggatgagtga

SEQ ID NO: 124253 - DNA, 20 bp, Artificial Sequence
  Description of Artificial Sequence: Synthetic oligonucleotide
  Target: LAMA2; (+) strand; PAM type: NRG; PAM sequence: GAG
gatagcacacctccatcttt

SEQ ID NO: 124254 - DNA, 20 bp, Artificial Sequence
  Description of Artificial Sequence: Synthetic oligonucleotide
  Target: LAMA2; (+) strand; PAM type: NRG; PAM sequence: TAG
agcacacctccatctttgag

SEQ ID NO: 124255 - DNA, 20 bp, Artificial Sequence
  Description of Artificial Sequence: Synthetic oligonucleotide
  Target: LAMA2; (+) strand; PAM type: NRG; PAM sequence: TGG
ctccatctttgagtagcttt

SEQ ID NO: 124256 - DNA, 20 bp, Artificial Sequence
  Description of Artificial Sequence: Synthetic oligonucleotide
  Target: LAMA2; (+) strand; PAM type: NRG; PAM sequence: GAG
ccatctttgagtagcttttg

SEQ ID NO: 124257 - DNA, 20 bp, Artificial Sequence
  Description of Artificial Sequence: Synthetic oligonucleotide
  Target: LAMA2; (+) strand; PAM type: NRG; PAM sequence: AAG
tctttgagtagcttttggag

SEQ ID NO: 124258 - DNA, 20 bp, Artificial Sequence
  Description of Artificial Sequence: Synthetic oligonucleotide
  Target: LAMA2; (+) strand; PAM type: NRG; PAM sequence: AGG
ctttgagtagcttttggaga

SEQ ID NO: 124259 - DNA, 20 bp, Artificial Sequence
  Description of Artificial Sequence: Synthetic oligonucleotide
  Target: LAMA2; (+) strand; PAM type: NRG; PAM sequence: GAG
ttgagtagcttttggagaag

SEQ ID NO: 124260 - DNA, 20 bp, Artificial Sequence
  Description of Artificial Sequence: Synthetic oligonucleotide
  Target: LAMA2; (+) strand; PAM type: NRG; PAM sequence: TGG
agtagcttttggagaaggag

SEQ ID NO: 124261 - DNA, 20 bp, Artificial Sequence
  Description of Artificial Sequence: Synthetic oligonucleotide
  Target: LAMA2; (+) strand; PAM type: NRG; PAM sequence: CGG
gcttttggagaaggagtgga

SEQ ID NO: 124262 - DNA, 20 bp, Artificial Sequence
  Description of Artificial Sequence: Synthetic oligonucleotide
  Target: LAMA2; (+) strand; PAM type: NRG; PAM sequence: GAG
ttggagaaggagtggacggt

SEQ ID NO: 124263 - DNA, 20 bp, Artificial Sequence
  Description of Artificial Sequence: Synthetic oligonucleotide
  Target: LAMA2; (+) strand; PAM type: NRG; PAM sequence: CAG
aaggagtggacggtgagtct

SEQ ID NO: 124264 - DNA, 20 bp, Artificial Sequence
  Description of Artificial Sequence: Synthetic oligonucleotide
  Target: LAMA2; (+) strand; PAM type: NRG; PAM sequence: AGG
aggagtggacggtgagtctc

SEQ ID NO: 124265 - DNA, 20 bp, Artificial Sequence
  Description of Artificial Sequence: Synthetic oligonucleotide
  Target: LAMA2; (+) strand; PAM type: NRG; PAM sequence: AAG
gtggacggtgagtctcagga

SEQ ID NO: 124266 - DNA, 20 bp, Artificial Sequence
  Description of Artificial Sequence: Synthetic oligonucleotide
  Target: LAMA2; (+) strand; PAM type: NRG; PAM sequence: CAG
ggaaagatacctccatttga

SEQ ID NO: 124267 - DNA, 20 bp, Artificial Sequence
  Description of Artificial Sequence: Synthetic oligonucleotide
  Target: LAMA2; (+) strand; PAM type: NRG; PAM sequence: CAG
agatacctccatttgacaga

SEQ ID NO: 124268 - DNA, 20 bp, Artificial Sequence
  Description of Artificial Sequence: Synthetic oligonucleotide
  Target: LAMA2; (+) strand; PAM type: NRG; PAM sequence: TGG
tttgacagacagactcttta

SEQ ID NO: 124269 - DNA, 20 bp, Artificial Sequence
  Description of Artificial Sequence: Synthetic oligonucleotide
  Target: LAMA2; (+) strand; PAM type: NRG; PAM sequence: CAG
actctttatggtatgccgac

SEQ ID NO: 124270 - DNA, 20 bp, Artificial Sequence
  Description of Artificial Sequence: Synthetic oligonucleotide
  Target: LAMA2; (+) strand; PAM type: NRG; PAM sequence: TAG
atcgattctgcttgtacctg

SEQ ID NO: 124271 - DNA, 20 bp, Artificial Sequence
  Description of Artificial Sequence: Synthetic oligonucleotide
  Target: LAMA2; (+) strand; PAM type: NRG; PAM sequence: GAG
cgattctgcttgtacctgta

SEQ ID NO: 124272 - DNA, 20 bp, Artificial Sequence
  Description of Artificial Sequence: Synthetic oligonucleotide
  Target: LAMA2; (+) strand; PAM type: NRG; PAM sequence: GAG
gtacctgtagagaaactcct

SEQ ID NO: 124273 - DNA, 20 bp, Artificial Sequence
  Description of Artificial Sequence: Synthetic oligonucleotide
  Target: LAMA2; (+) strand; PAM type: NRG; PAM sequence: TAG
ctgagcgacaattatctcca

SEQ ID NO: 124274 - DNA, 20 bp, Artificial Sequence
  Description of Artificial Sequence: Synthetic oligonucleotide
  Target: LAMA2; (+) strand; PAM type: NRG; PAM sequence: GAG
acaattatctccatagtcat

SEQ ID NO: 124275 - DNA, 20 bp, Artificial Sequence
  Description of Artificial Sequence: Synthetic oligonucleotide
  Target: LAMA2; (+) strand; PAM type: NRG; PAM sequence: CAG
agtcatgagacttgatcctg

SEQ ID NO: 124276 - DNA, 20 bp, Artificial Sequence
  Description of Artificial Sequence: Synthetic oligonucleotide
  Target: LAMA2; (+) strand; PAM type: NRG; PAM sequence: TGG
gagacttgatcctgcagttc

SEQ ID NO: 124277 - DNA, 20 bp, Artificial Sequence
  Description of Artificial Sequence: Synthetic oligonucleotide
  Target: LAMA2; (+) strand; PAM type: NRG; PAM sequence: GAG
gacttgatcctgcagttctg

SEQ ID NO: 124278 - DNA, 20 bp, Artificial Sequence
  Description of Artificial Sequence: Synthetic oligonucleotide
  Target: LAMA2; (+) strand; PAM type: NRG; PAM sequence: CAG
atcctgcagttctggagccc

SEQ ID NO: 124279 - DNA, 20 bp, Artificial Sequence
  Description of Artificial Sequence: Synthetic oligonucleotide
  Target: LAMA2; (+) strand; PAM type: NRG; PAM sequence: AAG
tggagccccagatgccgcaa

SEQ ID NO: 124280 - DNA, 20 bp, Artificial Sequence
  Description of Artificial Sequence: Synthetic oligonucleotide
  Target: LAMA2; (+) strand; PAM type: NRG; PAM sequence: TGG
gatgctgacctgctcaaata

SEQ ID NO: 124281 - DNA, 20 bp, Artificial Sequence
  Description of Artificial Sequence: Synthetic oligonucleotide
  Target: LAMA2; (+) strand; PAM type: NRG; PAM sequence: TAG
tgacctgctcaaatatggaa

SEQ ID NO: 124282 - DNA, 20 bp, Artificial Sequence
  Description of Artificial Sequence: Synthetic oligonucleotide
  Target: LAMA2; (+) strand; PAM type: NRG; PAM sequence: CGG
tcaaatatggaatagtgatg

SEQ ID NO: 124283 - DNA, 20 bp, Artificial Sequence
  Description of Artificial Sequence: Synthetic oligonucleotide
  Target: LAMA2; (+) strand; PAM type: NRG; PAM sequence: CGG
atggaatagtgatgcggtct

SEQ ID NO: 124284 - DNA, 20 bp, Artificial Sequence
  Description of Artificial Sequence: Synthetic oligonucleotide
  Target: LAMA2; (+) strand; PAM type: NRG; PAM sequence: AAG
gcggtctcggtttgtcactg

SEQ ID NO: 124285 - DNA, 20 bp, Artificial Sequence
  Description of Artificial Sequence: Synthetic oligonucleotide
  Target: LAMA2; (+) strand; PAM type: NRG; PAM sequence: AAG
ttgtcactgaagccaacgcc

SEQ ID NO: 124286 - DNA, 20 bp, Artificial Sequence
  Description of Artificial Sequence: Synthetic oligonucleotide
  Target: LAMA2; (+) strand; PAM type: NRG; PAM sequence: AAG
gaagccaacgccaagaaatc

SEQ ID NO: 124287 - DNA, 20 bp, Artificial Sequence
  Description of Artificial Sequence: Synthetic oligonucleotide
  Target: LAMA2; (+) strand; PAM type: NRG; PAM sequence: AGG
aagccaacgccaagaaatca

SEQ ID NO: 124288 - DNA, 20 bp, Artificial Sequence
  Description of Artificial Sequence: Synthetic oligonucleotide
  Target: LAMA2; (+) strand; PAM type: NRG; PAM sequence: GGG
agccaacgccaagaaatcaa

SEQ ID NO: 124289 - DNA, 20 bp, Artificial Sequence
  Description of Artificial Sequence: Synthetic oligonucleotide
  Target: LAMA2; (+) strand; PAM type: NRG; PAM sequence: AAG
caatcacccgatgaaacctc

SEQ ID NO: 124290 - DNA, 20 bp, Artificial Sequence
  Description of Artificial Sequence: Synthetic oligonucleotide
  Target: LAMA2; (+) strand; PAM type: NRG; PAM sequence: AGG
aatcacccgatgaaacctca

SEQ ID NO: 124291 - DNA, 20 bp, Artificial Sequence
  Description of Artificial Sequence: Synthetic oligonucleotide
  Target: LAMA2; (+) strand; PAM type: NRG; PAM sequence: CAG
acccgatgaaacctcaaggt

SEQ ID NO: 124292 - DNA, 20 bp, Artificial Sequence
  Description of Artificial Sequence: Synthetic oligonucleotide
  Target: LAMA2; (+) strand; PAM type: NRG; PAM sequence: TAG
cccaattcttgtaccaatcg

SEQ ID NO: 124293 - DNA, 20 bp, Artificial Sequence
  Description of Artificial Sequence: Synthetic oligonucleotide
  Target: LAMA2; (+) strand; PAM type: NRG; PAM sequence: TGG
attcttgtaccaatcgtagc

SEQ ID NO: 124294 - DNA, 20 bp, Artificial Sequence
  Description of Artificial Sequence: Synthetic oligonucleotide
  Target: LAMA2; (+) strand; PAM type: NRG; PAM sequence: TGG
taccaatcgtagctggatat

SEQ ID NO: 124295 - DNA, 20 bp, Artificial Sequence
  Description of Artificial Sequence: Synthetic oligonucleotide
  Target: LAMA2; (+) strand; PAM type: NRG; PAM sequence: CAG
ctgacttccaaccacaccca

SEQ ID NO: 124296 - DNA, 20 bp, Artificial Sequence
  Description of Artificial Sequence: Synthetic oligonucleotide
  Target: LAMA2; (+) strand; PAM type: NRG; PAM sequence: GAG
gacttccaaccacacccaca

SEQ ID NO: 124297 - DNA, 20 bp, Artificial Sequence
  Description of Artificial Sequence: Synthetic oligonucleotide
  Target: LAMA2; (+) strand; PAM type: NRG; PAM sequence: TGG
caaccacacccacagagtct

SEQ ID NO: 124298 - DNA, 20 bp, Artificial Sequence
  Description of Artificial Sequence: Synthetic oligonucleotide
  Target: LAMA2; (+) strand; PAM type: NRG; PAM sequence: TAG
ccacacccacagagtcttgg

SEQ ID NO: 124299 - DNA, 20 bp, Artificial Sequence
  Description of Artificial Sequence: Synthetic oligonucleotide
  Target: LAMA2; (+) strand; PAM type: NRG; PAM sequence: AAG
cacccacagagtcttggtag

SEQ ID NO: 124300 - DNA, 20 bp, Artificial Sequence
  Description of Artificial Sequence: Synthetic oligonucleotide
  Target: LAMA2; (+) strand; PAM type: NRG; PAM sequence: CAG
gagtcttggtagaagatacg

SEQ ID NO: 124301 - DNA, 20 bp, Artificial Sequence
  Description of Artificial Sequence: Synthetic oligonucleotide
  Target: LAMA2; (+) strand; PAM type: NRG; PAM sequence: AAG
gaagatacgcagtcccttgt

SEQ ID NO: 124302 - DNA, 20 bp, Artificial Sequence
  Description of Artificial Sequence: Synthetic oligonucleotide
  Target: LAMA2; (+) strand; PAM type: NRG; PAM sequence: AAG
gtaagtgaaaaacttgcctg

SEQ ID NO: 124303 - DNA, 20 bp, Artificial Sequence
  Description of Artificial Sequence: Synthetic oligonucleotide
  Target: LAMA2; (+) strand; PAM type: NRG; PAM sequence: GAG
acttgcctgaagacttccac

SEQ ID NO: 124304 - DNA, 20 bp, Artificial Sequence
  Description of Artificial Sequence: Synthetic oligonucleotide
  Target: LAMA2; (+) strand; PAM type: NRG; PAM sequence: AAG
cctgaagacttccacgagtg

SEQ ID NO: 124305 - DNA, 20 bp, Artificial Sequence
  Description of Artificial Sequence: Synthetic oligonucleotide
  Target: LAMA2; (+) strand; PAM type: NRG; PAM sequence: CAG
agacttccacgagtgaagat

SEQ ID NO: 124306 - DNA, 20 bp, Artificial Sequence
  Description of Artificial Sequence: Synthetic oligonucleotide
  Target: LAMA2; (+) strand; PAM type: NRG; PAM sequence: AGG
gacttccacgagtgaagatc

SEQ ID NO: 124307 - DNA, 20 bp, Artificial Sequence
  Description of Artificial Sequence: Synthetic oligonucleotide
  Target: LAMA2; (+) strand; PAM type: NRG; PAM sequence: CAG
cacgagtgaagatcaggtga

SEQ ID NO: 124308 - DNA, 20 bp, Artificial Sequence
  Description of Artificial Sequence: Synthetic oligonucleotide
  Target: LAMA2; (+) strand; PAM type: NRG; PAM sequence: GAG
gtgaagatcaggtgacagct

SEQ ID NO: 124309 - DNA, 20 bp, Artificial Sequence
  Description of Artificial Sequence: Synthetic oligonucleotide
  Target: LAMA2; (+) strand; PAM type: NRG; PAM sequence: TGG
tcaggtgacagctgagtgta

SEQ ID NO: 124310 - DNA, 20 bp, Artificial Sequence
  Description of Artificial Sequence: Synthetic oligonucleotide
  Target: LAMA2; (+) strand; PAM type: NRG; PAM sequence: GGG
caggtgacagctgagtgtat

SEQ ID NO: 124311 - DNA, 20 bp, Artificial Sequence
  Description of Artificial Sequence: Synthetic oligonucleotide
  Target: LAMA2; (+) strand; PAM type: NRG; PAM sequence: CAG
agctgagtgtatgggatgtg

SEQ ID NO: 124312 - DNA, 20 bp, Artificial Sequence
  Description of Artificial Sequence: Synthetic oligonucleotide
  Target: LAMA2; (+) strand; PAM type: NRG; PAM sequence: AGG
gctgagtgtatgggatgtgc

SEQ ID NO: 124313 - DNA, 20 bp, Artificial Sequence
  Description of Artificial Sequence: Synthetic oligonucleotide
  Target: LAMA2; (+) strand; PAM type: NRG; PAM sequence: CAG
gtatgggatgtgcaggtacg

SEQ ID NO: 124314 - DNA, 20 bp, Artificial Sequence
  Description of Artificial Sequence: Synthetic oligonucleotide
  Target: LAMA2; (+) strand; PAM type: NRG; PAM sequence: AAG
gggatgtgcaggtacgcagc

SEQ ID NO: 124315 - DNA, 20 bp, Artificial Sequence
  Description of Artificial Sequence: Synthetic oligonucleotide
  Target: LAMA2; (+) strand; PAM type: NRG; PAM sequence: CAG
atgtgcaggtacgcagcaag

SEQ ID NO: 124316 - DNA, 20 bp, Artificial Sequence
  Description of Artificial Sequence: Synthetic oligonucleotide
  Target: LAMA2; (+) strand; PAM type: NRG; PAM sequence: AGG
tgtgcaggtacgcagcaagc

SEQ ID NO: 124317 - DNA, 20 bp, Artificial Sequence
  Description of Artificial Sequence: Synthetic oligonucleotide
  Target: LAMA2; (+) strand; PAM type: NRG; PAM sequence: GAG
tgcaggtacgcagcaagcag

SEQ ID NO: 124318 - DNA, 20 bp, Artificial Sequence
  Description of Artificial Sequence: Synthetic oligonucleotide
  Target: LAMA2; (+) strand; PAM type: NRG; PAM sequence: CGG
gtacgcagcaagcaggagcg

SEQ ID NO: 124319 - DNA, 20 bp, Artificial Sequence
  Description of Artificial Sequence: Synthetic oligonucleotide
  Target: LAMA2; (+) strand; PAM type: NRG; PAM sequence: CAG
gcaagcaggagcgcggccca

SEQ ID NO: 124320 - DNA, 20 bp, Artificial Sequence
  Description of Artificial Sequence: Synthetic oligonucleotide
  Target: LAMA2; (+) strand; PAM type: NRG; PAM sequence: TGG
gcgcggcccacagccccacc

SEQ ID NO: 124321 - DNA, 20 bp, Artificial Sequence
  Description of Artificial Sequence: Synthetic oligonucleotide
  Target: LAMA2; (+) strand; PAM type: NRG; PAM sequence: CGG
cccaccactccctcatcctg

SEQ ID NO: 124322 - DNA, 20 bp, Artificial Sequence
  Description of Artificial Sequence: Synthetic oligonucleotide
  Target: LAMA2; (+) strand; PAM type: NRG; PAM sequence: GAG
caccactccctcatcctgcg

SEQ ID NO: 124323 - DNA, 20 bp, Artificial Sequence
  Description of Artificial Sequence: Synthetic oligonucleotide
  Target: LAMA2; (+) strand; PAM type: NRG; PAM sequence: AGG
accactccctcatcctgcgg

SEQ ID NO: 124324 - DNA, 20 bp, Artificial Sequence
  Description of Artificial Sequence: Synthetic oligonucleotide
  Target: LAMA2; (+) strand; PAM type: NRG; PAM sequence: CGG
gcggaggcgatctttgcgca

SEQ ID NO: 124325 - DNA, 20 bp, Artificial Sequence
  Description of Artificial Sequence: Synthetic oligonucleotide
  Target: LAMA2; (+) strand; PAM type: NRG; PAM sequence: CGG
gaggcgatctttgcgcacgg

SEQ ID NO: 124326 - DNA, 20 bp, Artificial Sequence
  Description of Artificial Sequence: Synthetic oligonucleotide
  Target: LAMA2; (+) strand; PAM type: NRG; PAM sequence: CAG
gcggcgttatcccacgctgc

SEQ ID NO: 124327 - DNA, 20 bp, Artificial Sequence
  Description of Artificial Sequence: Synthetic oligonucleotide
  Target: LAMA2; (+) strand; PAM type: NRG; PAM sequence: CGG
ttatcccacgctgccagcct

SEQ ID NO: 124328 - DNA, 20 bp, Artificial Sequence
  Description of Artificial Sequence: Synthetic oligonucleotide
  Target: LAMA2; (+) strand; PAM type: NRG; PAM sequence: CAG
cgctgccagcctcggcgttg

SEQ ID NO: 124329 - DNA, 20 bp, Artificial Sequence
  Description of Artificial Sequence: Synthetic oligonucleotide
  Target: LAMA2; (+) strand; PAM type: NRG; PAM sequence: GAG
ctgccagcctcggcgttgca

SEQ ID NO: 124330 - DNA, 20 bp, Artificial Sequence
  Description of Artificial Sequence: Synthetic oligonucleotide
  Target: LAMA2; (+) strand; PAM type: NRG; PAM sequence: CGG
agcctcggcgttgcagagca

SEQ ID NO: 124331 - DNA, 20 bp, Artificial Sequence
  Description of Artificial Sequence: Synthetic oligonucleotide
  Target: LAMA2; (+) strand; PAM type: NRG; PAM sequence: GGG
gcctcggcgttgcagagcac

SEQ ID NO: 124332 - DNA, 20 bp, Artificial Sequence
  Description of Artificial Sequence: Synthetic oligonucleotide
  Target: LAMA2; (+) strand; PAM type: NRG; PAM sequence: GGG
cctcggcgttgcagagcacg

SEQ ID NO: 124333 - DNA, 20 bp, Artificial Sequence
  Description of Artificial Sequence: Synthetic oligonucleotide
  Target: LAMA2; (+) strand; PAM type: NRG; PAM sequence: TGG
ttgcagagcacggggcgccg

SEQ ID NO: 124334 - DNA, 20 bp, Artificial Sequence
  Description of Artificial Sequence: Synthetic oligonucleotide
  Target: LAMA2; (+) strand; PAM type: NRG; PAM sequence: CAG
acggggcgccgtggcgcccg

SEQ ID NO: 124335 - DNA, 20 bp, Artificial Sequence
  Description of Artificial Sequence: Synthetic oligonucleotide
  Target: LAMA2; (+) strand; PAM type: NRG; PAM sequence: CAG
ccgtggcgcccgcagccctg

SEQ ID NO: 124336 - DNA, 20 bp, Artificial Sequence
  Description of Artificial Sequence: Synthetic oligonucleotide
  Target: LAMA2; (+) strand; PAM type: NRG; PAM sequence: AGG
cgtggcgcccgcagccctgc

SEQ ID NO: 124337 - DNA, 20 bp, Artificial Sequence
  Description of Artificial Sequence: Synthetic oligonucleotide
  Target: LAMA2; (+) strand; PAM type: NRG; PAM sequence: GGG
gtggcgcccgcagccctgca

SEQ ID NO: 124338 - DNA, 20 bp, Artificial Sequence
  Description of Artificial Sequence: Synthetic oligonucleotide
  Target: LAMA2; (+) strand; PAM type: NRG; PAM sequence: CGG
cgcccgcagccctgcagggc

SEQ ID NO: 124339 - DNA, 20 bp, Artificial Sequence
  Description of Artificial Sequence: Synthetic oligonucleotide
  Target: LAMA2; (+) strand; PAM type: NRG; PAM sequence: CGG
cgcagccctgcagggccggc

SEQ ID NO: 124340 - DNA, 20 bp, Artificial Sequence
  Description of Artificial Sequence: Synthetic oligonucleotide
  Target: LAMA2; (+) strand; PAM type: NRG; PAM sequence: CAG
agccctgcagggccggccgg

SEQ ID NO: 124341 - DNA, 20 bp, Artificial Sequence
  Description of Artificial Sequence: Synthetic oligonucleotide
  Target: LAMA2; (+) strand; PAM type: NRG; PAM sequence: CGG
cctgcagggccggccggcag

SEQ ID NO: 124342 - DNA, 20 bp, Artificial Sequence
  Description of Artificial Sequence: Synthetic oligonucleotide
  Target: LAMA2; (+) strand; PAM type: NRG; PAM sequence: GGG
ctgcagggccggccggcagc

SEQ ID NO: 124343 - DNA, 20 bp, Artificial Sequence
  Description of Artificial Sequence: Synthetic oligonucleotide
  Target: LAMA2; (+) strand; PAM type: NRG; PAM sequence: GGG
tgcagggccggccggcagcg

SEQ ID NO: 124344 - DNA, 20 bp, Artificial Sequence
  Description of Artificial Sequence: Synthetic oligonucleotide
  Target: LAMA2; (+) strand; PAM type: NRG; PAM sequence: CAG
gccggcagcggggtctcaat

SEQ ID NO: 124345 - DNA, 20 bp, Artificial Sequence
  Description of Artificial Sequence: Synthetic oligonucleotide
  Target: LAMA2; (+) strand; PAM type: NRG; PAM sequence: CAG
ggcagcggggtctcaatcag

SEQ ID NO: 124346 - DNA, 20 bp, Artificial Sequence
  Description of Artificial Sequence: Synthetic oligonucleotide
  Target: LAMA2; (+) strand; PAM type: NRG; PAM sequence: CAG
gggtctcaatcagcagccca

SEQ ID NO: 124347 - DNA, 20 bp, Artificial Sequence
  Description of Artificial Sequence: Synthetic oligonucleotide
  Target: LAMA2; (+) strand; PAM type: NRG; PAM sequence: CAG
tcagcagcccacagcccgca

SEQ ID NO: 124348 - DNA, 20 bp, Artificial Sequence
  Description of Artificial Sequence: Synthetic oligonucleotide
  Target: LAMA2; (+) strand; PAM type: NRG; PAM sequence: AGG
cagcagcccacagcccgcac

SEQ ID NO: 124349 - DNA, 20 bp, Artificial Sequence
  Description of Artificial Sequence: Synthetic oligonucleotide
  Target: LAMA2; (+) strand; PAM type: NRG; PAM sequence: GGG
agcagcccacagcccgcaca

SEQ ID NO: 124350 - DNA, 20 bp, Artificial Sequence
  Description of Artificial Sequence: Synthetic oligonucleotide
  Target: LAMA2; (+) strand; PAM type: NRG; PAM sequence: CGG
agcccacagcccgcacaggg

SEQ ID NO: 124351 - DNA, 20 bp, Artificial Sequence
  Description of Artificial Sequence: Synthetic oligonucleotide
  Target: LAMA2; (+) strand; PAM type: NRG; PAM sequence: CGG
gcacagggcggcgccgcgcc

SEQ ID NO: 124352 - DNA, 20 bp, Artificial Sequence
  Description of Artificial Sequence: Synthetic oligonucleotide
  Target: LAMA2; (+) strand; PAM type: NRG; PAM sequence: CAG
cagggcggcgccgcgcccgg

SEQ ID NO: 124353 - DNA, 20 bp, Artificial Sequence
  Description of Artificial Sequence: Synthetic oligonucleotide
  Target: LAMA2; (+) strand; PAM type: NRG; PAM sequence: CAG
ggcgccgcgcccggcagcta

SEQ ID NO: 124354 - DNA, 20 bp, Artificial Sequence
  Description of Artificial Sequence: Synthetic oligonucleotide
  Target: LAMA2; (+) strand; PAM type: NRG; PAM sequence: CGG
tacagccactctgacgtgca

SEQ ID NO: 124355 - DNA, 20 bp, Artificial Sequence
  Description of Artificial Sequence: Synthetic oligonucleotide
  Target: LAMA2; (+) strand; PAM type: NRG; PAM sequence: CGG
agccactctgacgtgcacgg

SEQ ID NO: 124356 - DNA, 20 bp, Artificial Sequence
  Description of Artificial Sequence: Synthetic oligonucleotide
  Target: LAMA2; (+) strand; PAM type: NRG; PAM sequence: TAG
cacggcggcactgcgtttgc

SEQ ID NO: 124357 - DNA, 20 bp, Artificial Sequence
  Description of Artificial Sequence: Synthetic oligonucleotide
  Target: LAMA2; (+) strand; PAM type: NRG; PAM sequence: AGG
acggcggcactgcgtttgct

SEQ ID NO: 124358 - DNA, 20 bp, Artificial Sequence
  Description of Artificial Sequence: Synthetic oligonucleotide
  Target: LAMA2; (+) strand; PAM type: NRG; PAM sequence: AAG
ttgctaggcgcgactgccac

SEQ ID NO: 124359 - DNA, 20 bp, Artificial Sequence
  Description of Artificial Sequence: Synthetic oligonucleotide
  Target: LAMA2; (+) strand; PAM type: NRG; PAM sequence: AGG
tgctaggcgcgactgccaca

SEQ ID NO: 124360 - DNA, 20 bp, Artificial Sequence
  Description of Artificial Sequence: Synthetic oligonucleotide
  Target: LAMA2; (+) strand; PAM type: NRG; PAM sequence: GGG
gctaggcgcgactgccacaa

SEQ ID NO: 124361 - DNA, 20 bp, Artificial Sequence
  Description of Artificial Sequence: Synthetic oligonucleotide
  Target: LAMA2; (+) strand; PAM type: NRG; PAM sequence: AAG
aggcgcgactgccacaaggg

SEQ ID NO: 124362 - DNA, 20 bp, Artificial Sequence
  Description of Artificial Sequence: Synthetic oligonucleotide
  Target: LAMA2; (+) strand; PAM type: NRG; PAM sequence: CGG
actgccacaagggaagtgcc

SEQ ID NO: 124363 - DNA, 20 bp, Artificial Sequence
  Description of Artificial Sequence: Synthetic oligonucleotide
  Target: LAMA2; (+) strand; PAM type: NRG; PAM sequence: GGG
ctgccacaagggaagtgccc

SEQ ID NO: 124364 - DNA, 20 bp, Artificial Sequence
  Description of Artificial Sequence: Synthetic oligonucleotide
  Target: LAMA2; (+) strand; PAM type: NRG; PAM sequence: TGG
agggaagtgcccgggtgtgc

SEQ ID NO: 124365 - DNA, 20 bp, Artificial Sequence
  Description of Artificial Sequence: Synthetic oligonucleotide
  Target: LAMA2; (+) strand; PAM type: NRG; PAM sequence: TGG
cccgggtgtgctggttgccg

SEQ ID NO: 124366 - DNA, 20 bp, Artificial Sequence
  Description of Artificial Sequence: Synthetic oligonucleotide
  Target: LAMA2; (+) strand; PAM type: NRG; PAM sequence: AAG
tgccgtggcctctatttcta

SEQ ID NO: 124367 - DNA, 20 bp, Artificial Sequence
  Description of Artificial Sequence: Synthetic oligonucleotide
  Target: LAMA2; (+) strand; PAM type: NRG; PAM sequence: GAG
aactattgcaaccgcctctt

SEQ ID NO: 124368 - DNA, 20 bp, Artificial Sequence
  Description of Artificial Sequence: Synthetic oligonucleotide
  Target: LAMA2; (+) strand; PAM type: NRG; PAM sequence: AGG
actattgcaaccgcctcttg

SEQ ID NO: 124369 - DNA, 20 bp, Artificial Sequence
  Description of Artificial Sequence: Synthetic oligonucleotide
  Target: LAMA2; (+) strand; PAM type: NRG; PAM sequence: TAG
tgaggtgactgaaatattca

SEQ ID NO: 124370 - DNA, 20 bp, Artificial Sequence
  Description of Artificial Sequence: Synthetic oligonucleotide
  Target: LAMA2; (+) strand; PAM type: NRG; PAM sequence: CAG
tgaaatattcatagatattg

SEQ ID NO: 124371 - DNA, 20 bp, Artificial Sequence
  Description of Artificial Sequence: Synthetic oligonucleotide
  Target: LAMA2; (+) strand; PAM type: NRG; PAM sequence: TGG
tattgcagttattctccttt

SEQ ID NO: 124372 - DNA, 20 bp, Artificial Sequence
  Description of Artificial Sequence: Synthetic oligonucleotide
  Target: LAMA2; (+) strand; PAM type: NRG; PAM sequence: GGG
attgcagttattctcctttt

SEQ ID NO: 124373 - DNA, 20 bp, Artificial Sequence
  Description of Artificial Sequence: Synthetic oligonucleotide
  Target: LAMA2; (+) strand; PAM type: NRG; PAM sequence: TAG
ttattctccttttgggcata

SEQ ID NO: 124374 - DNA, 20 bp, Artificial Sequence
  Description of Artificial Sequence: Synthetic oligonucleotide
  Target: LAMA2; (+) strand; PAM type: NRG; PAM sequence: TAG
ttctccttttgggcatatag

SEQ ID NO: 124375 - DNA, 20 bp, Artificial Sequence
  Description of Artificial Sequence: Synthetic oligonucleotide
  Target: LAMA2; (+) strand; PAM type: NRG; PAM sequence: AGG
tctccttttgggcatatagt

SEQ ID NO: 124376 - DNA, 20 bp, Artificial Sequence
  Description of Artificial Sequence: Synthetic oligonucleotide
  Target: LAMA2; (+) strand; PAM type: NRG; PAM sequence: TAG
catttgctcacccctgaaat

SEQ ID NO: 124377 - DNA, 20 bp, Artificial Sequence
  Description of Artificial Sequence: Synthetic oligonucleotide
  Target: LAMA2; (+) strand; PAM type: NRG; PAM sequence: AGG
atttgctcacccctgaaatt

SEQ ID NO: 124378 - DNA, 20 bp, Artificial Sequence
  Description of Artificial Sequence: Synthetic oligonucleotide
  Target: LAMA2; (+) strand; PAM type: NRG; PAM sequence: TAG
ctcacccctgaaattaggca

SEQ ID NO: 124379 - DNA, 20 bp, Artificial Sequence
  Description of Artificial Sequence: Synthetic oligonucleotide
  Target: LAMA2; (+) strand; PAM type: NRG; PAM sequence: CAG
caccgtcaatgaaatgtgaa

SEQ ID NO: 124380 - DNA, 20 bp, Artificial Sequence
  Description of Artificial Sequence: Synthetic oligonucleotide
  Target: LAMA2; (+) strand; PAM type: NRG; PAM sequence: TAG
gaactgacatgctttactct

SEQ ID NO: 124381 - DNA, 20 bp, Artificial Sequence
  Description of Artificial Sequence: Synthetic oligonucleotide
  Target: LAMA2; (+) strand; PAM type: NRG; PAM sequence: GAG
tttactcttagattgaatac

SEQ ID NO: 124382 - DNA, 20 bp, Artificial Sequence
  Description of Artificial Sequence: Synthetic oligonucleotide
  Target: LAMA2; (+) strand; PAM type: NRG; PAM sequence: AAG
agattgaatacgagttttac

SEQ ID NO: 124383 - DNA, 20 bp, Artificial Sequence
  Description of Artificial Sequence: Synthetic oligonucleotide
  Target: LAMA2; (+) strand; PAM type: NRG; PAM sequence: CAG
tgaatacgagttttacaagc

SEQ ID NO: 124384 - DNA, 20 bp, Artificial Sequence
  Description of Artificial Sequence: Synthetic oligonucleotide
  Target: LAMA2; (+) strand; PAM type: NRG; PAM sequence: TAG
gtgcataattcgccatgcta

SEQ ID NO: 124385 - DNA, 20 bp, Artificial Sequence
  Description of Artificial Sequence: Synthetic oligonucleotide
  Target: LAMA2; (+) strand; PAM type: NRG; PAM sequence: GAG
gcataattcgccatgctata

SEQ ID NO: 124386 - DNA, 20 bp, Artificial Sequence
  Description of Artificial Sequence: Synthetic oligonucleotide
  Target: LAMA2; (+) strand; PAM type: NRG; PAM sequence: CAG
aattcgccatgctatagaga

SEQ ID NO: 124387 - DNA, 20 bp, Artificial Sequence
  Description of Artificial Sequence: Synthetic oligonucleotide
  Target: LAMA2; (+) strand; PAM type: NRG; PAM sequence: CAG
tatagagacagatgatcttc

SEQ ID NO: 124388 - DNA, 20 bp, Artificial Sequence
  Description of Artificial Sequence: Synthetic oligonucleotide
  Target: LAMA2; (+) strand; PAM type: NRG; PAM sequence: TGG
gagacagatgatcttccaga

SEQ ID NO: 124389 - DNA, 20 bp, Artificial Sequence
  Description of Artificial Sequence: Synthetic oligonucleotide
  Target: LAMA2; (+) strand; PAM type: NRG; PAM sequence: GAG
gatcttccagatggatgcct

SEQ ID NO: 124390 - DNA, 20 bp, Artificial Sequence
  Description of Artificial Sequence: Synthetic oligonucleotide
  Target: LAMA2; (+) strand; PAM type: NRG; PAM sequence: TAG
tccagatggatgcctgagtg

SEQ ID NO: 124391 - DNA, 20 bp, Artificial Sequence
  Description of Artificial Sequence: Synthetic oligonucleotide
  Target: LAMA2; (+) strand; PAM type: NRG; PAM sequence: TAG
atgcctgagtgtagaatata

SEQ ID NO: 124392 - DNA, 20 bp, Artificial Sequence
  Description of Artificial Sequence: Synthetic oligonucleotide
  Target: LAMA2; (+) strand; PAM type: NRG; PAM sequence: CAG
tgagtgtagaatatatagat

SEQ ID NO: 124393 - DNA, 20 bp, Artificial Sequence
  Description of Artificial Sequence: Synthetic oligonucleotide
  Target: LAMA2; (+) strand; PAM type: NRG; PAM sequence: TGG
ttccccccacccttcacaca

SEQ ID NO: 124394 - DNA, 20 bp, Artificial Sequence
  Description of Artificial Sequence: Synthetic oligonucleotide
  Target: LAMA2; (+) strand; PAM type: NRG; PAM sequence: GGG
tccccccacccttcacacat

SEQ ID NO: 124395 - DNA, 20 bp, Artificial Sequence
  Description of Artificial Sequence: Synthetic oligonucleotide
  Target: LAMA2; (+) strand; PAM type: NRG; PAM sequence: CGG
acatgggcccaaaatgtaca

SEQ ID NO: 124396 - DNA, 20 bp, Artificial Sequence
  Description of Artificial Sequence: Synthetic oligonucleotide
  Target: LAMA2; (+) strand; PAM type: NRG; PAM sequence: GAG
atgggcccaaaatgtacacg

SEQ ID NO: 124397 - DNA, 20 bp, Artificial Sequence
  Description of Artificial Sequence: Synthetic oligonucleotide
  Target: LAMA2; (+) strand; PAM type: NRG; PAM sequence: CAG
ggcccaaaatgtacacggag

SEQ ID NO: 124398 - DNA, 20 bp, Artificial Sequence
  Description of Artificial Sequence: Synthetic oligonucleotide
  Target: LAMA2; (+) strand; PAM type: NRG; PAM sequence: AGG
gcccaaaatgtacacggagc

SEQ ID NO: 124399 - DNA, 20 bp, Artificial Sequence
  Description of Artificial Sequence: Synthetic oligonucleotide
  Target: LAMA2; (+) strand; PAM type: NRG; PAM sequence: GAG
ccaaaatgtacacggagcag

SEQ ID NO: 124400 - DNA, 20 bp, Artificial Sequence
  Description of Artificial Sequence: Synthetic oligonucleotide
  Target: LAMA2; (+) strand; PAM type: NRG; PAM sequence: AAG
aatgtacacggagcaggagc

SEQ ID NO: 124401 - DNA, 20 bp, Artificial Sequence
  Description of Artificial Sequence: Synthetic oligonucleotide
  Target: LAMA2; (+) strand; PAM type: NRG; PAM sequence: TAG
cacgtccttgctatctttgt

SEQ ID NO: 124402 - DNA, 20 bp, Artificial Sequence
  Description of Artificial Sequence: Synthetic oligonucleotide
  Target: LAMA2; (+) strand; PAM type: NRG; PAM sequence: CAG
atctttgttagtttaatcca

SEQ ID NO: 124403 - DNA, 20 bp, Artificial Sequence
  Description of Artificial Sequence: Synthetic oligonucleotide
  Target: LAMA2; (+) strand; PAM type: NRG; PAM sequence: GAG
ctttgttagtttaatccaca

SEQ ID NO: 124404 - DNA, 20 bp, Artificial Sequence
  Description of Artificial Sequence: Synthetic oligonucleotide
  Target: LAMA2; (+) strand; PAM type: NRG; PAM sequence: TGG
agtttaatccacagagactt

SEQ ID NO: 124405 - DNA, 20 bp, Artificial Sequence
  Description of Artificial Sequence: Synthetic oligonucleotide
  Target: LAMA2; (+) strand; PAM type: NRG; PAM sequence: GAG
tttaatccacagagactttg

SEQ ID NO: 124406 - DNA, 20 bp, Artificial Sequence
  Description of Artificial Sequence: Synthetic oligonucleotide
  Target: LAMA2; (+) strand; PAM type: NRG; PAM sequence: CAG
cacagagactttggagtctg

SEQ ID NO: 124407 - DNA, 20 bp, Artificial Sequence
  Description of Artificial Sequence: Synthetic oligonucleotide
  Target: LAMA2; (+) strand; PAM type: NRG; PAM sequence: CAG
ctttggagtctgcagttata

SEQ ID NO: 124408 - DNA, 20 bp, Artificial Sequence
  Description of Artificial Sequence: Synthetic oligonucleotide
  Target: LAMA2; (+) strand; PAM type: NRG; PAM sequence: TAG
tctgcagttatacagcatcc

SEQ ID NO: 124409 - DNA, 20 bp, Artificial Sequence
  Description of Artificial Sequence: Synthetic oligonucleotide
  Target: LAMA2; (+) strand; PAM type: NRG; PAM sequence: AAG
ttaactgatttttctactca

SEQ ID NO: 124410 - DNA, 20 bp, Artificial Sequence
  Description of Artificial Sequence: Synthetic oligonucleotide
  Target: LAMA2; (+) strand; PAM type: NRG; PAM sequence: TAG
tcatattaatctttctgaaa

SEQ ID NO: 124411 - DNA, 20 bp, Artificial Sequence
  Description of Artificial Sequence: Synthetic oligonucleotide
  Target: LAMA2; (+) strand; PAM type: NRG; PAM sequence: TGG
tatttccctgttatcttcac

SEQ ID NO: 124412 - DNA, 20 bp, Artificial Sequence
  Description of Artificial Sequence: Synthetic oligonucleotide
  Target: LAMA2; (+) strand; PAM type: NRG; PAM sequence: AAG
tgttatcttcactggctttc

SEQ ID NO: 124413 - DNA, 20 bp, Artificial Sequence
  Description of Artificial Sequence: Synthetic oligonucleotide
  Target: LAMA2; (+) strand; PAM type: NRG; PAM sequence: CAG
actggctttcaagaccatca

SEQ ID NO: 124414 - DNA, 20 bp, Artificial Sequence
  Description of Artificial Sequence: Synthetic oligonucleotide
  Target: LAMA2; (+) strand; PAM type: NRG; PAM sequence: CGG
acttccttttaaaacaccca

SEQ ID NO: 124415 - DNA, 20 bp, Artificial Sequence
  Description of Artificial Sequence: Synthetic oligonucleotide
  Target: LAMA2; (+) strand; PAM type: NRG; PAM sequence: AAG
ttttctgttcctatgattct

SEQ ID NO: 124416 - DNA, 20 bp, Artificial Sequence
  Description of Artificial Sequence: Synthetic oligonucleotide
  Target: LAMA2; (+) strand; PAM type: NRG; PAM sequence: TAG
gattctaagatgctctctgc

SEQ ID NO: 124417 - DNA, 20 bp, Artificial Sequence
  Description of Artificial Sequence: Synthetic oligonucleotide
  Target: LAMA2; (+) strand; PAM type: NRG; PAM sequence: AAG
gctctctgctagtcctgtct

SEQ ID NO: 124418 - DNA, 20 bp, Artificial Sequence
  Description of Artificial Sequence: Synthetic oligonucleotide
  Target: LAMA2; (+) strand; PAM type: NRG; PAM sequence: AAG
tctaagtgctacctattctt

SEQ ID NO: 124419 - DNA, 20 bp, Artificial Sequence
  Description of Artificial Sequence: Synthetic oligonucleotide
  Target: LAMA2; (+) strand; PAM type: NRG; PAM sequence: CAG
tgctacctattcttaagtaa

SEQ ID NO: 124420 - DNA, 20 bp, Artificial Sequence
  Description of Artificial Sequence: Synthetic oligonucleotide
  Target: LAMA2; (+) strand; PAM type: NRG; PAM sequence: CAG
ttaagtaacagttcaaatgc

SEQ ID NO: 124421 - DNA, 20 bp, Artificial Sequence
  Description of Artificial Sequence: Synthetic oligonucleotide
  Target: LAMA2; (+) strand; PAM type: NRG; PAM sequence: GAG
tcaaatgccagtatctctat

SEQ ID NO: 124422 - DNA, 20 bp, Artificial Sequence
  Description of Artificial Sequence: Synthetic oligonucleotide
  Target: LAMA2; (+) strand; PAM type: NRG; PAM sequence: AGG
caaatgccagtatctctatg

SEQ ID NO: 124423 - DNA, 20 bp, Artificial Sequence
  Description of Artificial Sequence: Synthetic oligonucleotide
  Target: LAMA2; (+) strand; PAM type: NRG; PAM sequence: TGG
tatctctatgaggctttttc

SEQ ID NO: 124424 - DNA, 20 bp, Artificial Sequence
  Description of Artificial Sequence: Synthetic oligonucleotide
  Target: LAMA2; (+) strand; PAM type: NRG; PAM sequence: AAG
tctggatctctgcaaaaaaa

SEQ ID NO: 124425 - DNA, 20 bp, Artificial Sequence
  Description of Artificial Sequence: Synthetic oligonucleotide
  Target: LAMA2; (+) strand; PAM type: NRG; PAM sequence: AGG
ctggatctctgcaaaaaaaa

SEQ ID NO: 124426 - DNA, 20 bp, Artificial Sequence
  Description of Artificial Sequence: Synthetic oligonucleotide
  Target: LAMA2; (+) strand; PAM type: NRG; PAM sequence: GGG
tggatctctgcaaaaaaaaa

SEQ ID NO: 124427 - DNA, 20 bp, Artificial Sequence
  Description of Artificial Sequence: Synthetic oligonucleotide
  Target: LAMA2; (+) strand; PAM type: NRG; PAM sequence: AAG
ctctgcaaaaaaaaagggac

SEQ ID NO: 124428 - DNA, 20 bp, Artificial Sequence
  Description of Artificial Sequence: Synthetic oligonucleotide
  Target: LAMA2; (+) strand; PAM type: NRG; PAM sequence: AAG
caagaaacaccttcctccca

SEQ ID NO: 124429 - DNA, 20 bp, Artificial Sequence
  Description of Artificial Sequence: Synthetic oligonucleotide
  Target: LAMA2; (+) strand; PAM type: NRG; PAM sequence: AGG
aagaaacaccttcctcccaa

SEQ ID NO: 124430 - DNA, 20 bp, Artificial Sequence
  Description of Artificial Sequence: Synthetic oligonucleotide
  Target: LAMA2; (+) strand; PAM type: NRG; PAM sequence: AAG
accttcctcccaaaggaaca

SEQ ID NO: 124431 - DNA, 20 bp, Artificial Sequence
  Description of Artificial Sequence: Synthetic oligonucleotide
  Target: LAMA2; (+) strand; PAM type: NRG; PAM sequence: TGG
cctcccaaaggaacaaagaa

SEQ ID NO: 124432 - DNA, 20 bp, Artificial Sequence
  Description of Artificial Sequence: Synthetic oligonucleotide
  Target: LAMA2; (+) strand; PAM type: NRG; PAM sequence: AAG
aaagaatggcaattacttat

SEQ ID NO: 124433 - DNA, 20 bp, Artificial Sequence
  Description of Artificial Sequence: Synthetic oligonucleotide
  Target: LAMA2; (+) strand; PAM type: NRG; PAM sequence: AAG
aatggcaattacttataagt

SEQ ID NO: 124434 - DNA, 20 bp, Artificial Sequence
  Description of Artificial Sequence: Synthetic oligonucleotide
  Target: LAMA2; (+) strand; PAM type: NRG; PAM sequence: CAG
gcaattacttataagtaagc

SEQ ID NO: 124435 - DNA, 20 bp, Artificial Sequence
  Description of Artificial Sequence: Synthetic oligonucleotide
  Target: LAMA2; (+) strand; PAM type: NRG; PAM sequence: TAG
cttataagtaagccagattt

SEQ ID NO: 124436 - DNA, 20 bp, Artificial Sequence
  Description of Artificial Sequence: Synthetic oligonucleotide
  Target: LAMA2; (+) strand; PAM type: NRG; PAM sequence: TGG
gtaagccagattttagcaat

SEQ ID NO: 124437 - DNA, 20 bp, Artificial Sequence
  Description of Artificial Sequence: Synthetic oligonucleotide
  Target: LAMA2; (+) strand; PAM type: NRG; PAM sequence: TAG
atataactaacctgtctcta

SEQ ID NO: 124438 - DNA, 20 bp, Artificial Sequence
  Description of Artificial Sequence: Synthetic oligonucleotide
  Target: LAMA2; (+) strand; PAM type: NRG; PAM sequence: AAG
aacctgtctctatagcttac

SEQ ID NO: 124439 - DNA, 20 bp, Artificial Sequence
  Description of Artificial Sequence: Synthetic oligonucleotide
  Target: LAMA2; (+) strand; PAM type: NRG; PAM sequence: AGG
acctgtctctatagcttaca

SEQ ID NO: 124440 - DNA, 20 bp, Artificial Sequence
  Description of Artificial Sequence: Synthetic oligonucleotide
  Target: LAMA2; (+) strand; PAM type: NRG; PAM sequence: AAG
ttcataaattcttcaaacaa

SEQ ID NO: 124441 - DNA, 20 bp, Artificial Sequence
  Description of Artificial Sequence: Synthetic oligonucleotide
  Target: LAMA2; (+) strand; PAM type: NRG; PAM sequence: AAG
aacaaaagaaatttatcata

SEQ ID NO: 124442 - DNA, 20 bp, Artificial Sequence
  Description of Artificial Sequence: Synthetic oligonucleotide
  Target: LAMA2; (+) strand; PAM type: NRG; PAM sequence: AGG
acaaaagaaatttatcataa

SEQ ID NO: 124443 - DNA, 20 bp, Artificial Sequence
  Description of Artificial Sequence: Synthetic oligonucleotide
  Target: LAMA2; (+) strand; PAM type: NRG; PAM sequence: CAG
gaaatttatcataaaggata

SEQ ID NO: 124444 - DNA, 20 bp, Artificial Sequence
  Description of Artificial Sequence: Synthetic oligonucleotide
  Target: LAMA2; (+) strand; PAM type: NRG; PAM sequence: AGG
aaatttatcataaaggatac

SEQ ID NO: 124445 - DNA, 20 bp, Artificial Sequence
  Description of Artificial Sequence: Synthetic oligonucleotide
  Target: LAMA2; (+) strand; PAM type: NRG; PAM sequence: AAG
atcataaaggatacaggtaa

SEQ ID NO: 124446 - DNA, 20 bp, Artificial Sequence
  Description of Artificial Sequence: Synthetic oligonucleotide
  Target: LAMA2; (+) strand; PAM type: NRG; PAM sequence: GAG
atgaattcccaaatgatttt

SEQ ID NO: 124447 - DNA, 20 bp, Artificial Sequence
  Description of Artificial Sequence: Synthetic oligonucleotide
  Target: LAMA2; (+) strand; PAM type: NRG; PAM sequence: TAG
atgattttgagtctttattg

SEQ ID NO: 124448 - DNA, 20 bp, Artificial Sequence
  Description of Artificial Sequence: Synthetic oligonucleotide
  Target: LAMA2; (+) strand; PAM type: NRG; PAM sequence: CAG
gtagttcttatcacactttg

SEQ ID NO: 124449 - DNA, 20 bp, Artificial Sequence
  Description of Artificial Sequence: Synthetic oligonucleotide
  Target: LAMA2; (+) strand; PAM type: NRG; PAM sequence: TGG
gttcttatcacactttgcag

SEQ ID NO: 124450 - DNA, 20 bp, Artificial Sequence
  Description of Artificial Sequence: Synthetic oligonucleotide
  Target: LAMA2; (+) strand; PAM type: NRG; PAM sequence: TAG
cactttgcagtggccatttc

SEQ ID NO: 124451 - DNA, 20 bp, Artificial Sequence
  Description of Artificial Sequence: Synthetic oligonucleotide
  Target: LAMA2; (+) strand; PAM type: NRG; PAM sequence: CAG
tggccatttctagcactttt

SEQ ID NO: 124452 - DNA, 20 bp, Artificial Sequence
  Description of Artificial Sequence: Synthetic oligonucleotide
  Target: LAMA2; (+) strand; PAM type: NRG; PAM sequence: AGG
ggccatttctagcacttttc

SEQ ID NO: 124453 - DNA, 20 bp, Artificial Sequence
  Description of Artificial Sequence: Synthetic oligonucleotide
  Target: LAMA2; (+) strand; PAM type: NRG; PAM sequence: TGG
agcacttttcaggcaataaa

SEQ ID NO: 124454 - DNA, 20 bp, Artificial Sequence
  Description of Artificial Sequence: Synthetic oligonucleotide
  Target: LAMA2; (+) strand; PAM type: NRG; PAM sequence: TAG
aaattcttttgcataatgcc

SEQ ID NO: 124455 - DNA, 20 bp, Artificial Sequence
  Description of Artificial Sequence: Synthetic oligonucleotide
  Target: LAMA2; (+) strand; PAM type: NRG; PAM sequence: AAG
atgaatgaacgaatgaaatt

SEQ ID NO: 124456 - DNA, 20 bp, Artificial Sequence
  Description of Artificial Sequence: Synthetic oligonucleotide
  Target: LAMA2; (+) strand; PAM type: NRG; PAM sequence: AGG
tgaatgaacgaatgaaatta

SEQ ID NO: 124457 - DNA, 20 bp, Artificial Sequence
  Description of Artificial Sequence: Synthetic oligonucleotide
  Target: LAMA2; (+) strand; PAM type: NRG; PAM sequence: CAG
aaaactaccgtttttttctt

SEQ ID NO: 124458 - DNA, 20 bp, Artificial Sequence
  Description of Artificial Sequence: Synthetic oligonucleotide
  Target: LAMA2; (+) strand; PAM type: NRG; PAM sequence: GAG
ttttcttcagaaatcacaac

SEQ ID NO: 124459 - DNA, 20 bp, Artificial Sequence
  Description of Artificial Sequence: Synthetic oligonucleotide
  Target: LAMA2; (+) strand; PAM type: NRG; PAM sequence: AGG
tttcttcagaaatcacaacg

SEQ ID NO: 124460 - DNA, 20 bp, Artificial Sequence
  Description of Artificial Sequence: Synthetic oligonucleotide
  Target: LAMA2; (+) strand; PAM type: NRG; PAM sequence: TAG
ggcaaatgttgccaataaaa

SEQ ID NO: 124461 - DNA, 20 bp, Artificial Sequence
  Description of Artificial Sequence: Synthetic oligonucleotide
  Target: LAMA2; (+) strand; PAM type: NRG; PAM sequence: AAG
ttgccaataaaatagttatt

SEQ ID NO: 124462 - DNA, 20 bp, Artificial Sequence
  Description of Artificial Sequence: Synthetic oligonucleotide
  Target: LAMA2; (+) strand; PAM type: NRG; PAM sequence: GAG
gttaaaaaacataaatatct

SEQ ID NO: 124463 - DNA, 20 bp, Artificial Sequence
  Description of Artificial Sequence: Synthetic oligonucleotide
  Target: LAMA2; (+) strand; PAM type: NRG; PAM sequence: GAG
aaatatctgagaaatgaact

SEQ ID NO: 124464 - DNA, 20 bp, Artificial Sequence
  Description of Artificial Sequence: Synthetic oligonucleotide
  Target: LAMA2; (+) strand; PAM type: NRG; PAM sequence: AAG
tctgagaaatgaactgagaa

SEQ ID NO: 124465 - DNA, 20 bp, Artificial Sequence
  Description of Artificial Sequence: Synthetic oligonucleotide
  Target: LAMA2; (+) strand; PAM type: NRG; PAM sequence: AGG
ctgagaaatgaactgagaaa

SEQ ID NO: 124466 - DNA, 20 bp, Artificial Sequence
  Description of Artificial Sequence: Synthetic oligonucleotide
  Target: LAMA2; (+) strand; PAM type: NRG; PAM sequence: GAG
gagaaatgaactgagaaaag

SEQ ID NO: 124467 - DNA, 20 bp, Artificial Sequence
  Description of Artificial Sequence: Synthetic oligonucleotide
  Target: LAMA2; (+) strand; PAM type: NRG; PAM sequence: CAG
gagaaaaggagaaatcctta

SEQ ID NO: 124468 - DNA, 20 bp, Artificial Sequence
  Description of Artificial Sequence: Synthetic oligonucleotide
  Target: LAMA2; (+) strand; PAM type: NRG; PAM sequence: AGG
agaaaaggagaaatccttac

SEQ ID NO: 124469 - DNA, 20 bp, Artificial Sequence
  Description of Artificial Sequence: Synthetic oligonucleotide
  Target: LAMA2; (+) strand; PAM type: NRG; PAM sequence: TGG
aaatccttacaggacatgaa

SEQ ID NO: 124470 - DNA, 20 bp, Artificial Sequence
  Description of Artificial Sequence: Synthetic oligonucleotide
  Target: LAMA2; (+) strand; PAM type: NRG; PAM sequence: CAG
cttacaggacatgaatggta

SEQ ID NO: 124471 - DNA, 20 bp, Artificial Sequence
  Description of Artificial Sequence: Synthetic oligonucleotide
  Target: LAMA2; (+) strand; PAM type: NRG; PAM sequence: AGG
ttacaggacatgaatggtac

SEQ ID NO: 124472 - DNA, 20 bp, Artificial Sequence
  Description of Artificial Sequence: Synthetic oligonucleotide
  Target: LAMA2; (+) strand; PAM type: NRG; PAM sequence: GAG
acaggacatgaatggtacag

SEQ ID NO: 124473 - DNA, 20 bp, Artificial Sequence
  Description of Artificial Sequence: Synthetic oligonucleotide
  Target: LAMA2; (+) strand; PAM type: NRG; PAM sequence: TAG
acatgaatggtacaggagaa

SEQ ID NO: 124474 - DNA, 20 bp, Artificial Sequence
  Description of Artificial Sequence: Synthetic oligonucleotide
  Target: LAMA2; (+) strand; PAM type: NRG; PAM sequence: AAG
caggagaatagtacatatca

SEQ ID NO: 124475 - DNA, 20 bp, Artificial Sequence
  Description of Artificial Sequence: Synthetic oligonucleotide
  Target: LAMA2; (+) strand; PAM type: NRG; PAM sequence: AGG
aggagaatagtacatatcaa

SEQ ID NO: 124476 - DNA, 20 bp, Artificial Sequence
  Description of Artificial Sequence: Synthetic oligonucleotide
  Target: LAMA2; (+) strand; PAM type: NRG; PAM sequence: GGG
ggagaatagtacatatcaaa

SEQ ID NO: 124477 - DNA, 20 bp, Artificial Sequence
  Description of Artificial Sequence: Synthetic oligonucleotide
  Target: LAMA2; (+) strand; PAM type: NRG; PAM sequence: TGG
acatatcaaagggtgaactc

SEQ ID NO: 124478 - DNA, 20 bp, Artificial Sequence
  Description of Artificial Sequence: Synthetic oligonucleotide
  Target: LAMA2; (+) strand; PAM type: NRG; PAM sequence: GGG
catatcaaagggtgaactct

SEQ ID NO: 124479 - DNA, 20 bp, Artificial Sequence
  Description of Artificial Sequence: Synthetic oligonucleotide
  Target: LAMA2; (+) strand; PAM type: NRG; PAM sequence: CAG
aaagggtgaactctgggtca

SEQ ID NO: 124480 - DNA, 20 bp, Artificial Sequence
  Description of Artificial Sequence: Synthetic oligonucleotide
  Target: LAMA2; (+) strand; PAM type: NRG; PAM sequence: TGG
gaactctgggtcacagcttg

SEQ ID NO: 124481 - DNA, 20 bp, Artificial Sequence
  Description of Artificial Sequence: Synthetic oligonucleotide
  Target: LAMA2; (+) strand; PAM type: NRG; PAM sequence: GGG
aactctgggtcacagcttgt

SEQ ID NO: 124482 - DNA, 20 bp, Artificial Sequence
  Description of Artificial Sequence: Synthetic oligonucleotide
  Target: LAMA2; (+) strand; PAM type: NRG; PAM sequence: CAG
tgggtcacagcttgtgggat

SEQ ID NO: 124483 - DNA, 20 bp, Artificial Sequence
  Description of Artificial Sequence: Synthetic oligonucleotide
  Target: LAMA2; (+) strand; PAM type: NRG; PAM sequence: AGG
gggtcacagcttgtgggatc

SEQ ID NO: 124484 - DNA, 20 bp, Artificial Sequence
  Description of Artificial Sequence: Synthetic oligonucleotide
  Target: LAMA2; (+) strand; PAM type: NRG; PAM sequence: AAG
cacagcttgtgggatcaggc

SEQ ID NO: 124485 - DNA, 20 bp, Artificial Sequence
  Description of Artificial Sequence: Synthetic oligonucleotide
  Target: LAMA2; (+) strand; PAM type: NRG; PAM sequence: TAG
ggatcaggcaagaacatgtc

SEQ ID NO: 124486 - DNA, 20 bp, Artificial Sequence
  Description of Artificial Sequence: Synthetic oligonucleotide
  Target: LAMA2; (+) strand; PAM type: NRG; PAM sequence: TAG
ggcaagaacatgtctagtca

SEQ ID NO: 124487 - DNA, 20 bp, Artificial Sequence
  Description of Artificial Sequence: Synthetic oligonucleotide
  Target: LAMA2; (+) strand; PAM type: NRG; PAM sequence: AAG
tattaaaaattattttttct

SEQ ID NO: 124488 - DNA, 20 bp, Artificial Sequence
  Description of Artificial Sequence: Synthetic oligonucleotide
  Target: LAMA2; (+) strand; PAM type: NRG; PAM sequence: TAG
tttctctgactaattttatt

SEQ ID NO: 124489 - DNA, 20 bp, Artificial Sequence
  Description of Artificial Sequence: Synthetic oligonucleotide
  Target: LAMA2; (+) strand; PAM type: NRG; PAM sequence: AAG
actaattttatttagctttc

SEQ ID NO: 124490 - DNA, 20 bp, Artificial Sequence
  Description of Artificial Sequence: Synthetic oligonucleotide
  Target: LAMA2; (+) strand; PAM type: NRG; PAM sequence: TGG
agctttcaagcatttctttg

SEQ ID NO: 124491 - DNA, 20 bp, Artificial Sequence
  Description of Artificial Sequence: Synthetic oligonucleotide
  Target: LAMA2; (+) strand; PAM type: NRG; PAM sequence: CAG
caagcatttctttgtggctt

SEQ ID NO: 124492 - DNA, 20 bp, Artificial Sequence
  Description of Artificial Sequence: Synthetic oligonucleotide
  Target: LAMA2; (+) strand; PAM type: NRG; PAM sequence: CAG
tgtggcttcagttttgactt

SEQ ID NO: 124493 - DNA, 20 bp, Artificial Sequence
  Description of Artificial Sequence: Synthetic oligonucleotide
  Target: LAMA2; (+) strand; PAM type: NRG; PAM sequence: CAG
aacaaataaaaattacatta

SEQ ID NO: 124494 - DNA, 20 bp, Artificial Sequence
  Description of Artificial Sequence: Synthetic oligonucleotide
  Target: LAMA2; (+) strand; PAM type: NRG; PAM sequence: CGG
ttttaaactcttactttcca

SEQ ID NO: 124495 - DNA, 20 bp, Artificial Sequence
  Description of Artificial Sequence: Synthetic oligonucleotide
  Target: LAMA2; (+) strand; PAM type: NRG; PAM sequence: GGG
tttaaactcttactttccac

SEQ ID NO: 124496 - DNA, 20 bp, Artificial Sequence
  Description of Artificial Sequence: Synthetic oligonucleotide
  Target: LAMA2; (+) strand; PAM type: NRG; PAM sequence: GGG
ttaaactcttactttccacg

SEQ ID NO: 124497 - DNA, 20 bp, Artificial Sequence
  Description of Artificial Sequence: Synthetic oligonucleotide
  Target: LAMA2; (+) strand; PAM type: NRG; PAM sequence: AAG
tttttctccaactgctttaa

SEQ ID NO: 124498 - DNA, 20 bp, Artificial Sequence
  Description of Artificial Sequence: Synthetic oligonucleotide
  Target: LAMA2; (+) strand; PAM type: NRG; PAM sequence: AAG
tctttgctgtatatgtatca

SEQ ID NO: 124499 - DNA, 20 bp, Artificial Sequence
  Description of Artificial Sequence: Synthetic oligonucleotide
  Target: LAMA2; (+) strand; PAM type: NRG; PAM sequence: TAG
aatattctttgacattatcc

SEQ ID NO: 124500 - DNA, 20 bp, Artificial Sequence
  Description of Artificial Sequence: Synthetic oligonucleotide
  Target: LAMA2; (+) strand; PAM type: NRG; PAM sequence: AAG
atcctagccttgaataataa

SEQ ID NO: 124501 - DNA, 20 bp, Artificial Sequence
  Description of Artificial Sequence: Synthetic oligonucleotide
  Target: LAMA2; (+) strand; PAM type: NRG; PAM sequence: AGG
tcctagccttgaataataaa

SEQ ID NO: 124502 - DNA, 20 bp, Artificial Sequence
  Description of Artificial Sequence: Synthetic oligonucleotide
  Target: LAMA2; (+) strand; PAM type: NRG; PAM sequence: CAG
tactgtaaatgtaatcttca

SEQ ID NO: 124503 - DNA, 20 bp, Artificial Sequence
  Description of Artificial Sequence: Synthetic oligonucleotide
  Target: LAMA2; (+) strand; PAM type: NRG; PAM sequence: CAG
aaatgtaatcttcacagcaa

SEQ ID NO: 124504 - DNA, 20 bp, Artificial Sequence
  Description of Artificial Sequence: Synthetic oligonucleotide
  Target: LAMA2; (+) strand; PAM type: NRG; PAM sequence: AAG
taatcttcacagcaacagtc

SEQ ID NO: 124505 - DNA, 20 bp, Artificial Sequence
  Description of Artificial Sequence: Synthetic oligonucleotide
  Target: LAMA2; (+) strand; PAM type: NRG; PAM sequence: GAG
atcttcacagcaacagtcaa

SEQ ID NO: 124506 - DNA, 20 bp, Artificial Sequence
  Description of Artificial Sequence: Synthetic oligonucleotide
  Target: LAMA2; (+) strand; PAM type: NRG; PAM sequence: AAG
acagcaacagtcaagagaac

SEQ ID NO: 124507 - DNA, 20 bp, Artificial Sequence
  Description of Artificial Sequence: Synthetic oligonucleotide
  Target: LAMA2; (+) strand; PAM type: NRG; PAM sequence: GAG
acagtcaagagaacaagact

SEQ ID NO: 124508 - DNA, 20 bp, Artificial Sequence
  Description of Artificial Sequence: Synthetic oligonucleotide
  Target: LAMA2; (+) strand; PAM type: NRG; PAM sequence: AAG
cattcttcatcacacattgc

SEQ ID NO: 124509 - DNA, 20 bp, Artificial Sequence
  Description of Artificial Sequence: Synthetic oligonucleotide
  Target: LAMA2; (+) strand; PAM type: NRG; PAM sequence: AGG
attcttcatcacacattgca

SEQ ID NO: 124510 - DNA, 20 bp, Artificial Sequence
  Description of Artificial Sequence: Synthetic oligonucleotide
  Target: LAMA2; (+) strand; PAM type: NRG; PAM sequence: GGG
ttcttcatcacacattgcaa

SEQ ID NO: 124511 - DNA, 20 bp, Artificial Sequence
  Description of Artificial Sequence: Synthetic oligonucleotide
  Target: LAMA2; (+) strand; PAM type: NRG; PAM sequence: GAG
ggctatgtctcctctgttgt

SEQ ID NO: 124512 - DNA, 20 bp, Artificial Sequence
  Description of Artificial Sequence: Synthetic oligonucleotide
  Target: LAMA2; (+) strand; PAM type: NRG; PAM sequence: AGG
gctatgtctcctctgttgtg

SEQ ID NO: 124513 - DNA, 20 bp, Artificial Sequence
  Description of Artificial Sequence: Synthetic oligonucleotide
  Target: LAMA2; (+) strand; PAM type: NRG; PAM sequence: GAG
tatgtctcctctgttgtgag

SEQ ID NO: 124514 - DNA, 20 bp, Artificial Sequence
  Description of Artificial Sequence: Synthetic oligonucleotide
  Target: LAMA2; (+) strand; PAM type: NRG; PAM sequence: CAG
gtgaggagaatattgccctg

SEQ ID NO: 124515 - DNA, 20 bp, Artificial Sequence
  Description of Artificial Sequence: Synthetic oligonucleotide
  Target: LAMA2; (+) strand; PAM type: NRG; PAM sequence: AAG
ccctgcagcaatattctcac

SEQ ID NO: 124516 - DNA, 20 bp, Artificial Sequence
  Description of Artificial Sequence: Synthetic oligonucleotide
  Target: LAMA2; (+) strand; PAM type: NRG; PAM sequence: TGG
tgcagcaatattctcacaag

SEQ ID NO: 124517 - DNA, 20 bp, Artificial Sequence
  Description of Artificial Sequence: Synthetic oligonucleotide
  Target: LAMA2; (+) strand; PAM type: NRG; PAM sequence: GAG
cagcaatattctcacaagtg

SEQ ID NO: 124518 - DNA, 20 bp, Artificial Sequence
  Description of Artificial Sequence: Synthetic oligonucleotide
  Target: LAMA2; (+) strand; PAM type: NRG; PAM sequence: TGG
tattctcacaagtggagctc

SEQ ID NO: 124519 - DNA, 20 bp, Artificial Sequence
  Description of Artificial Sequence: Synthetic oligonucleotide
  Target: LAMA2; (+) strand; PAM type: NRG; PAM sequence: GGG
attctcacaagtggagctct

SEQ ID NO: 124520 - DNA, 20 bp, Artificial Sequence
  Description of Artificial Sequence: Synthetic oligonucleotide
  Target: LAMA2; (+) strand; PAM type: NRG; PAM sequence: AAG
ttgactgcacttttgctaat

SEQ ID NO: 124521 - DNA, 20 bp, Artificial Sequence
  Description of Artificial Sequence: Synthetic oligonucleotide
  Target: LAMA2; (+) strand; PAM type: NRG; PAM sequence: CAG
ttttgctaataagaaatctt

SEQ ID NO: 124522 - DNA, 20 bp, Artificial Sequence
  Description of Artificial Sequence: Synthetic oligonucleotide
  Target: LAMA2; (+) strand; PAM type: NRG; PAM sequence: TAG
tgctaataagaaatcttcag

SEQ ID NO: 124523 - DNA, 20 bp, Artificial Sequence
  Description of Artificial Sequence: Synthetic oligonucleotide
  Target: LAMA2; (+) strand; PAM type: NRG; PAM sequence: AGG
gctaataagaaatcttcagt

SEQ ID NO: 124524 - DNA, 20 bp, Artificial Sequence
  Description of Artificial Sequence: Synthetic oligonucleotide
  Target: LAMA2; (+) strand; PAM type: NRG; PAM sequence: GAG
taataagaaatcttcagtag

SEQ ID NO: 124525 - DNA, 20 bp, Artificial Sequence
  Description of Artificial Sequence: Synthetic oligonucleotide
  Target: LAMA2; (+) strand; PAM type: NRG; PAM sequence: TGG
aaatcttcagtaggagtgac

SEQ ID NO: 124526 - DNA, 20 bp, Artificial Sequence
  Description of Artificial Sequence: Synthetic oligonucleotide
  Target: LAMA2; (+) strand; PAM type: NRG; PAM sequence: GGG
aatcttcagtaggagtgact

SEQ ID NO: 124527 - DNA, 20 bp, Artificial Sequence
  Description of Artificial Sequence: Synthetic oligonucleotide
  Target: LAMA2; (+) strand; PAM type: NRG; PAM sequence: CAG
gggccttgtgcaaatctctc

SEQ ID NO: 124528 - DNA, 20 bp, Artificial Sequence
  Description of Artificial Sequence: Synthetic oligonucleotide
  Target: LAMA2; (+) strand; PAM type: NRG; PAM sequence: TAG
ccttgtgcaaatctctccag

SEQ ID NO: 124529 - DNA, 20 bp, Artificial Sequence
  Description of Artificial Sequence: Synthetic oligonucleotide
  Target: LAMA2; (+) strand; PAM type: NRG; PAM sequence: TAG
tctccagtagtttcttccac

SEQ ID NO: 124530 - DNA, 20 bp, Artificial Sequence
  Description of Artificial Sequence: Synthetic oligonucleotide
  Target: LAMA2; (+) strand; PAM type: NRG; PAM sequence: TAG
ttcttccactagtgacgcat

SEQ ID NO: 124531 - DNA, 20 bp, Artificial Sequence
  Description of Artificial Sequence: Synthetic oligonucleotide
  Target: LAMA2; (+) strand; PAM type: NRG; PAM sequence: GAG
cttccactagtgacgcatta

SEQ ID NO: 124532 - DNA, 20 bp, Artificial Sequence
  Description of Artificial Sequence: Synthetic oligonucleotide
  Target: LAMA2; (+) strand; PAM type: NRG; PAM sequence: CAG
ctagtgacgcattagagcct

SEQ ID NO: 124533 - DNA, 20 bp, Artificial Sequence
  Description of Artificial Sequence: Synthetic oligonucleotide
  Target: LAMA2; (+) strand; PAM type: NRG; PAM sequence: AAG
ctcagaatcaatcactcaac

SEQ ID NO: 124534 - DNA, 20 bp, Artificial Sequence
  Description of Artificial Sequence: Synthetic oligonucleotide
  Target: LAMA2; (+) strand; PAM type: NRG; PAM sequence: AAG
actcaacaagtgtttactga

SEQ ID NO: 124535 - DNA, 20 bp, Artificial Sequence
  Description of Artificial Sequence: Synthetic oligonucleotide
  Target: LAMA2; (+) strand; PAM type: NRG; PAM sequence: CAG
actgaaagcttactgatacc

SEQ ID NO: 124536 - DNA, 20 bp, Artificial Sequence
  Description of Artificial Sequence: Synthetic oligonucleotide
  Target: LAMA2; (+) strand; PAM type: NRG; PAM sequence: CAG
gaccttaaactgttaccaaa

SEQ ID NO: 124537 - DNA, 20 bp, Artificial Sequence
  Description of Artificial Sequence: Synthetic oligonucleotide
  Target: LAMA2; (+) strand; PAM type: NRG; PAM sequence: CAG
actgttaccaaacagaatgc

SEQ ID NO: 124538 - DNA, 20 bp, Artificial Sequence
  Description of Artificial Sequence: Synthetic oligonucleotide
  Target: LAMA2; (+) strand; PAM type: NRG; PAM sequence: TGG
accaaacagaatgccagata

SEQ ID NO: 124539 - DNA, 20 bp, Artificial Sequence
  Description of Artificial Sequence: Synthetic oligonucleotide
  Target: LAMA2; (+) strand; PAM type: NRG; PAM sequence: GGG
ccaaacagaatgccagatat

SEQ ID NO: 124540 - DNA, 20 bp, Artificial Sequence
  Description of Artificial Sequence: Synthetic oligonucleotide
  Target: LAMA2; (+) strand; PAM type: NRG; PAM sequence: CAG
ccagatatgggatataattc

SEQ ID NO: 124541 - DNA, 20 bp, Artificial Sequence
  Description of Artificial Sequence: Synthetic oligonucleotide
  Target: LAMA2; (+) strand; PAM type: NRG; PAM sequence: AAG
tgggatataattccagcctg

SEQ ID NO: 124542 - DNA, 20 bp, Artificial Sequence
  Description of Artificial Sequence: Synthetic oligonucleotide
  Target: LAMA2; (+) strand; PAM type: NRG; PAM sequence: GAG
ggatataattccagcctgaa

SEQ ID NO: 124543 - DNA, 20 bp, Artificial Sequence
  Description of Artificial Sequence: Synthetic oligonucleotide
  Target: LAMA2; (+) strand; PAM type: NRG; PAM sequence: AAG
agcctgaagagtttatgctc

SEQ ID NO: 124544 - DNA, 20 bp, Artificial Sequence
  Description of Artificial Sequence: Synthetic oligonucleotide
  Target: LAMA2; (+) strand; PAM type: NRG; PAM sequence: AAG
gaagagtttatgctcaagac

SEQ ID NO: 124545 - DNA, 20 bp, Artificial Sequence
  Description of Artificial Sequence: Synthetic oligonucleotide
  Target: LAMA2; (+) strand; PAM type: NRG; PAM sequence: CAG
gacaagacttacatatatta

SEQ ID NO: 124546 - DNA, 20 bp, Artificial Sequence
  Description of Artificial Sequence: Synthetic oligonucleotide
  Target: LAMA2; (+) strand; PAM type: NRG; PAM sequence: GAG
caagacttacatatattaca

SEQ ID NO: 124547 - DNA, 20 bp, Artificial Sequence
  Description of Artificial Sequence: Synthetic oligonucleotide
  Target: LAMA2; (+) strand; PAM type: NRG; PAM sequence: AAG
gacttacatatattacagag

SEQ ID NO: 124548 - DNA, 20 bp, Artificial Sequence
  Description of Artificial Sequence: Synthetic oligonucleotide
  Target: LAMA2; (+) strand; PAM type: NRG; PAM sequence: CAG
tatattacagagaagcgtaa

SEQ ID NO: 124549 - DNA, 20 bp, Artificial Sequence
  Description of Artificial Sequence: Synthetic oligonucleotide
  Target: LAMA2; (+) strand; PAM type: NRG; PAM sequence: GAG
tattacagagaagcgtaaca

SEQ ID NO: 124550 - DNA, 20 bp, Artificial Sequence
  Description of Artificial Sequence: Synthetic oligonucleotide
  Target: LAMA2; (+) strand; PAM type: NRG; PAM sequence: AAG
gcgtaacagagcaaatgatt

SEQ ID NO: 124551 - DNA, 20 bp, Artificial Sequence
  Description of Artificial Sequence: Synthetic oligonucleotide
  Target: LAMA2; (+) strand; PAM type: NRG; PAM sequence: AAG
agagcaaatgattaagttct

SEQ ID NO: 124552 - DNA, 20 bp, Artificial Sequence
  Description of Artificial Sequence: Synthetic oligonucleotide
  Target: LAMA2; (+) strand; PAM type: NRG; PAM sequence: AAG
tcactgtacaccctaaaaaa

SEQ ID NO: 124553 - DNA, 20 bp, Artificial Sequence
  Description of Artificial Sequence: Synthetic oligonucleotide
  Target: LAMA2; (+) strand; PAM type: NRG; PAM sequence: AGG
cactgtacaccctaaaaaaa

SEQ ID NO: 124554 - DNA, 20 bp, Artificial Sequence
  Description of Artificial Sequence: Synthetic oligonucleotide
  Target: LAMA2; (+) strand; PAM type: NRG; PAM sequence: GAG
ctgtacaccctaaaaaaaag

SEQ ID NO: 124555 - DNA, 20 bp, Artificial Sequence
  Description of Artificial Sequence: Synthetic oligonucleotide
  Target: LAMA2; (+) strand; PAM type: NRG; PAM sequence: TGG
aaaaaaaggagaaattgata

SEQ ID NO: 124556 - DNA, 20 bp, Artificial Sequence
  Description of Artificial Sequence: Synthetic oligonucleotide
  Target: LAMA2; (+) strand; PAM type: NRG; PAM sequence: TAG
aaattgatatggaacatgaa

SEQ ID NO: 124557 - DNA, 20 bp, Artificial Sequence
  Description of Artificial Sequence: Synthetic oligonucleotide
  Target: LAMA2; (+) strand; PAM type: NRG; PAM sequence: TAG
gatatggaacatgaatagta

SEQ ID NO: 124558 - DNA, 20 bp, Artificial Sequence
  Description of Artificial Sequence: Synthetic oligonucleotide
  Target: LAMA2; (+) strand; PAM type: NRG; PAM sequence: AGG
atatggaacatgaatagtat

SEQ ID NO: 124559 - DNA, 20 bp, Artificial Sequence
  Description of Artificial Sequence: Synthetic oligonucleotide
  Target: LAMA2; (+) strand; PAM type: NRG; PAM sequence: TGG
acatgaatagtataggaaaa

SEQ ID NO: 124560 - DNA, 20 bp, Artificial Sequence
  Description of Artificial Sequence: Synthetic oligonucleotide
  Target: LAMA2; (+) strand; PAM type: NRG; PAM sequence: TAG
tagtataggaaaatggtcct

SEQ ID NO: 124561 - DNA, 20 bp, Artificial Sequence
  Description of Artificial Sequence: Synthetic oligonucleotide
  Target: LAMA2; (+) strand; PAM type: NRG; PAM sequence: AGG
agtataggaaaatggtcctt

SEQ ID NO: 124562 - DNA, 20 bp, Artificial Sequence
  Description of Artificial Sequence: Synthetic oligonucleotide
  Target: LAMA2; (+) strand; PAM type: NRG; PAM sequence: AAG
ataggaaaatggtccttagg

SEQ ID NO: 124563 - DNA, 20 bp, Artificial Sequence
  Description of Artificial Sequence: Synthetic oligonucleotide
  Target: LAMA2; (+) strand; PAM type: NRG; PAM sequence: AGG
taggaaaatggtccttagga

SEQ ID NO: 124564 - DNA, 20 bp, Artificial Sequence
  Description of Artificial Sequence: Synthetic oligonucleotide
  Target: LAMA2; (+) strand; PAM type: NRG; PAM sequence: CAG
aaaatggtccttaggaaggc

SEQ ID NO: 124565 - DNA, 20 bp, Artificial Sequence
  Description of Artificial Sequence: Synthetic oligonucleotide
  Target: LAMA2; (+) strand; PAM type: NRG; PAM sequence: GAG
tccttaggaaggccagacat

SEQ ID NO: 124566 - DNA, 20 bp, Artificial Sequence
  Description of Artificial Sequence: Synthetic oligonucleotide
  Target: LAMA2; (+) strand; PAM type: NRG; PAM sequence: GAG
cttaggaaggccagacatga

SEQ ID NO: 124567 - DNA, 20 bp, Artificial Sequence
  Description of Artificial Sequence: Synthetic oligonucleotide
  Target: LAMA2; (+) strand; PAM type: NRG; PAM sequence: AGG
ttaggaaggccagacatgag

SEQ ID NO: 124568 - DNA, 20 bp, Artificial Sequence
  Description of Artificial Sequence: Synthetic oligonucleotide
  Target: LAMA2; (+) strand; PAM type: NRG; PAM sequence: GGG
taggaaggccagacatgaga

SEQ ID NO: 124569 - DNA, 20 bp, Artificial Sequence
  Description of Artificial Sequence: Synthetic oligonucleotide
  Target: LAMA2; (+) strand; PAM type: NRG; PAM sequence: GAG
aaggccagacatgagagggt

SEQ ID NO: 124570 - DNA, 20 bp, Artificial Sequence
  Description of Artificial Sequence: Synthetic oligonucleotide
  Target: LAMA2; (+) strand; PAM type: NRG; PAM sequence: TAG
agacatgagagggtgagctc

SEQ ID NO: 124571 - DNA, 20 bp, Artificial Sequence
  Description of Artificial Sequence: Synthetic oligonucleotide
  Target: LAMA2; (+) strand; PAM type: NRG; PAM sequence: AGG
gacatgagagggtgagctct

SEQ ID NO: 124572 - DNA, 20 bp, Artificial Sequence
  Description of Artificial Sequence: Synthetic oligonucleotide
  Target: LAMA2; (+) strand; PAM type: NRG; PAM sequence: TAG
gagctctaggtgaccacctg

SEQ ID NO: 124573 - DNA, 20 bp, Artificial Sequence
  Description of Artificial Sequence: Synthetic oligonucleotide
  Target: LAMA2; (+) strand; PAM type: NRG; PAM sequence: AGG
agctctaggtgaccacctgt

SEQ ID NO: 124574 - DNA, 20 bp, Artificial Sequence
  Description of Artificial Sequence: Synthetic oligonucleotide
  Target: LAMA2; (+) strand; PAM type: NRG; PAM sequence: CAG
taggtgaccacctgtaggat

SEQ ID NO: 124575 - DNA, 20 bp, Artificial Sequence
  Description of Artificial Sequence: Synthetic oligonucleotide
  Target: LAMA2; (+) strand; PAM type: NRG; PAM sequence: AGG
aggtgaccacctgtaggatc

SEQ ID NO: 124576 - DNA, 20 bp, Artificial Sequence
  Description of Artificial Sequence: Synthetic oligonucleotide
  Target: LAMA2; (+) strand; PAM type: NRG; PAM sequence: AAG
gaccacctgtaggatcagga

SEQ ID NO: 124577 - DNA, 20 bp, Artificial Sequence
  Description of Artificial Sequence: Synthetic oligonucleotide
  Target: LAMA2; (+) strand; PAM type: NRG; PAM sequence: TAG
ggatcaggaaagaacatatc

SEQ ID NO: 124578 - DNA, 20 bp, Artificial Sequence
  Description of Artificial Sequence: Synthetic oligonucleotide
  Target: LAMA2; (+) strand; PAM type: NRG; PAM sequence: TGG
ggaaagaacatatctagtcc

SEQ ID NO: 124579 - DNA, 20 bp, Artificial Sequence
  Description of Artificial Sequence: Synthetic oligonucleotide
  Target: LAMA2; (+) strand; PAM type: NRG; PAM sequence: GAG
aaagaacatatctagtcctg

SEQ ID NO: 124580 - DNA, 20 bp, Artificial Sequence
  Description of Artificial Sequence: Synthetic oligonucleotide
  Target: LAMA2; (+) strand; PAM type: NRG; PAM sequence: AAG
acatatctagtcctggagtt

SEQ ID NO: 124581 - DNA, 20 bp, Artificial Sequence
  Description of Artificial Sequence: Synthetic oligonucleotide
  Target: LAMA2; (+) strand; PAM type: NRG; PAM sequence: TAG
gttaagatttctattttttc

SEQ ID NO: 124582 - DNA, 20 bp, Artificial Sequence
  Description of Artificial Sequence: Synthetic oligonucleotide
  Target: LAMA2; (+) strand; PAM type: NRG; PAM sequence: TAG
ttctattttttctagattta

SEQ ID NO: 124583 - DNA, 20 bp, Artificial Sequence
  Description of Artificial Sequence: Synthetic oligonucleotide
  Target: LAMA2; (+) strand; PAM type: NRG; PAM sequence: GAG
ctattttttctagatttata

SEQ ID NO: 124584 - DNA, 20 bp, Artificial Sequence
  Description of Artificial Sequence: Synthetic oligonucleotide
  Target: LAMA2; (+) strand; PAM type: NRG; PAM sequence: AGG
tattttttctagatttatag

SEQ ID NO: 124585 - DNA, 20 bp, Artificial Sequence
  Description of Artificial Sequence: Synthetic oligonucleotide
  Target: LAMA2; (+) strand; PAM type: NRG; PAM sequence: TAG
attaaaaattgtgtatattc

SEQ ID NO: 124586 - DNA, 20 bp, Artificial Sequence
  Description of Artificial Sequence: Synthetic oligonucleotide
  Target: LAMA2; (+) strand; PAM type: NRG; PAM sequence: TAG
aatacgtgtatcacctcaca

SEQ ID NO: 124587 - DNA, 20 bp, Artificial Sequence
  Description of Artificial Sequence: Synthetic oligonucleotide
  Target: LAMA2; (+) strand; PAM type: NRG; PAM sequence: TGG
tgtgcgtgtttgtttatgca

SEQ ID NO: 124588 - DNA, 20 bp, Artificial Sequence
  Description of Artificial Sequence: Synthetic oligonucleotide
  Target: LAMA2; (+) strand; PAM type: NRG; PAM sequence: GAG
tgcgtgtttgtttatgcatg

SEQ ID NO: 124589 - DNA, 20 bp, Artificial Sequence
  Description of Artificial Sequence: Synthetic oligonucleotide
  Target: LAMA2; (+) strand; PAM type: NRG; PAM sequence: AGG
gcgtgtttgtttatgcatgg

SEQ ID NO: 124590 - DNA, 20 bp, Artificial Sequence
  Description of Artificial Sequence: Synthetic oligonucleotide
  Target: LAMA2; (+) strand; PAM type: NRG; PAM sequence: AAG
tttatgcatggaggacattt

SEQ ID NO: 124591 - DNA, 20 bp, Artificial Sequence
  Description of Artificial Sequence: Synthetic oligonucleotide
  Target: LAMA2; (+) strand; PAM type: NRG; PAM sequence: TGG
ggacatttaagatctgtgtt

SEQ ID NO: 124592 - DNA, 20 bp, Artificial Sequence
  Description of Artificial Sequence: Synthetic oligonucleotide
  Target: LAMA2; (+) strand; PAM type: NRG; PAM sequence: CAG
tttggaaaattccaaataaa

SEQ ID NO: 124593 - DNA, 20 bp, Artificial Sequence
  Description of Artificial Sequence: Synthetic oligonucleotide
  Target: LAMA2; (+) strand; PAM type: NRG; PAM sequence: TAG
cagtacaatattattaacta

SEQ ID NO: 124594 - DNA, 20 bp, Artificial Sequence
  Description of Artificial Sequence: Synthetic oligonucleotide
  Target: LAMA2; (+) strand; PAM type: NRG; PAM sequence: TAG
atagttactattctgtacat

SEQ ID NO: 124595 - DNA, 20 bp, Artificial Sequence
  Description of Artificial Sequence: Synthetic oligonucleotide
  Target: LAMA2; (+) strand; PAM type: NRG; PAM sequence: TAG
tattctgtacattagatccc

SEQ ID NO: 124596 - DNA, 20 bp, Artificial Sequence
  Description of Artificial Sequence: Synthetic oligonucleotide
  Target: LAMA2; (+) strand; PAM type: NRG; PAM sequence: TGG
ctctcatttaccccaattcc

SEQ ID NO: 124597 - DNA, 20 bp, Artificial Sequence
  Description of Artificial Sequence: Synthetic oligonucleotide
  Target: LAMA2; (+) strand; PAM type: NRG; PAM sequence: GAG
attctactctctgcttctat

SEQ ID NO: 124598 - DNA, 20 bp, Artificial Sequence
  Description of Artificial Sequence: Synthetic oligonucleotide
  Target: LAMA2; (+) strand; PAM type: NRG; PAM sequence: TAG
cttctatgagttcaactttt

SEQ ID NO: 124599 - DNA, 20 bp, Artificial Sequence
  Description of Artificial Sequence: Synthetic oligonucleotide
  Target: LAMA2; (+) strand; PAM type: NRG; PAM sequence: GAG
actttttagattccacatgt

SEQ ID NO: 124600 - DNA, 20 bp, Artificial Sequence
  Description of Artificial Sequence: Synthetic oligonucleotide
  Target: LAMA2; (+) strand; PAM type: NRG; PAM sequence: GAG
tttagattccacatgtgagt

SEQ ID NO: 124601 - DNA, 20 bp, Artificial Sequence
  Description of Artificial Sequence: Synthetic oligonucleotide
  Target: LAMA2; (+) strand; PAM type: NRG; PAM sequence: TGG
tgtatttgtttttctatgtg

SEQ ID NO: 124602 - DNA, 20 bp, Artificial Sequence
  Description of Artificial Sequence: Synthetic oligonucleotide
  Target: LAMA2; (+) strand; PAM type: NRG; PAM sequence: TAG
tatgtgtggcttatctcacc

SEQ ID NO: 124603 - DNA, 20 bp, Artificial Sequence
  Description of Artificial Sequence: Synthetic oligonucleotide
  Target: LAMA2; (+) strand; PAM type: NRG; PAM sequence: CAG
tcacctagcacaatgccctt

SEQ ID NO: 124604 - DNA, 20 bp, Artificial Sequence
  Description of Artificial Sequence: Synthetic oligonucleotide
  Target: LAMA2; (+) strand; PAM type: NRG; PAM sequence: AGG
cacctagcacaatgcccttc

SEQ ID NO: 124605 - DNA, 20 bp, Artificial Sequence
  Description of Artificial Sequence: Synthetic oligonucleotide
  Target: LAMA2; (+) strand; PAM type: NRG; PAM sequence: TAG
cttatccatgtcattgcaaa

SEQ ID NO: 124606 - DNA, 20 bp, Artificial Sequence
  Description of Artificial Sequence: Synthetic oligonucleotide
  Target: LAMA2; (+) strand; PAM type: NRG; PAM sequence: CAG
atccatgtcattgcaaatag

SEQ ID NO: 124607 - DNA, 20 bp, Artificial Sequence
  Description of Artificial Sequence: Synthetic oligonucleotide
  Target: LAMA2; (+) strand; PAM type: NRG; PAM sequence: AGG
tccatgtcattgcaaatagc

SEQ ID NO: 124608 - DNA, 20 bp, Artificial Sequence
  Description of Artificial Sequence: Synthetic oligonucleotide
  Target: LAMA2; (+) strand; PAM type: NRG; PAM sequence: TGG
caggatttccttctctttta

SEQ ID NO: 124609 - DNA, 20 bp, Artificial Sequence
  Description of Artificial Sequence: Synthetic oligonucleotide
  Target: LAMA2; (+) strand; PAM type: NRG; PAM sequence: TGG
tttatccattcattcactga

SEQ ID NO: 124610 - DNA, 20 bp, Artificial Sequence
  Description of Artificial Sequence: Synthetic oligonucleotide
  Target: LAMA2; (+) strand; PAM type: NRG; PAM sequence: TAG
ttcattcactgatggatact

SEQ ID NO: 124611 - DNA, 20 bp, Artificial Sequence
  Description of Artificial Sequence: Synthetic oligonucleotide
  Target: LAMA2; (+) strand; PAM type: NRG; PAM sequence: AGG
tcattcactgatggatactt

SEQ ID NO: 124612 - DNA, 20 bp, Artificial Sequence
  Description of Artificial Sequence: Synthetic oligonucleotide
  Target: LAMA2; (+) strand; PAM type: NRG; PAM sequence: TGG
atgatgctgctatgaacatg

SEQ ID NO: 124613 - DNA, 20 bp, Artificial Sequence
  Description of Artificial Sequence: Synthetic oligonucleotide
  Target: LAMA2; (+) strand; PAM type: NRG; PAM sequence: CAG
ctgctatgaacatgtggatg

SEQ ID NO: 124614 - DNA, 20 bp, Artificial Sequence
  Description of Artificial Sequence: Synthetic oligonucleotide
  Target: LAMA2; (+) strand; PAM type: NRG; PAM sequence: GAG
gtggatgcagatatctcctt

SEQ ID NO: 124615 - DNA, 20 bp, Artificial Sequence
  Description of Artificial Sequence: Synthetic oligonucleotide
  Target: LAMA2; (+) strand; PAM type: NRG; PAM sequence: TAG
atatcaccttttaaaatata

SEQ ID NO: 124616 - DNA, 20 bp, Artificial Sequence
  Description of Artificial Sequence: Synthetic oligonucleotide
  Target: LAMA2; (+) strand; PAM type: NRG; PAM sequence: TAG
caccttttaaaatatatagc

SEQ ID NO: 124617 - DNA, 20 bp, Artificial Sequence
  Description of Artificial Sequence: Synthetic oligonucleotide
  Target: LAMA2; (+) strand; PAM type: NRG; PAM sequence: TGG
ttaaaatatatagctagaaa

SEQ ID NO: 124618 - DNA, 20 bp, Artificial Sequence
  Description of Artificial Sequence: Synthetic oligonucleotide
  Target: LAMA2; (+) strand; PAM type: NRG; PAM sequence: GGG
taaaatatatagctagaaat

SEQ ID NO: 124619 - DNA, 20 bp, Artificial Sequence
  Description of Artificial Sequence: Synthetic oligonucleotide
  Target: LAMA2; (+) strand; PAM type: NRG; PAM sequence: TGG
atagctagaaatgggattgc

SEQ ID NO: 124620 - DNA, 20 bp, Artificial Sequence
  Description of Artificial Sequence: Synthetic oligonucleotide
  Target: LAMA2; (+) strand; PAM type: NRG; PAM sequence: GGG
tagctagaaatgggattgct

SEQ ID NO: 124621 - DNA, 20 bp, Artificial Sequence
  Description of Artificial Sequence: Synthetic oligonucleotide
  Target: LAMA2; (+) strand; PAM type: NRG; PAM sequence: TAG
gggattgctgggtcatattg

SEQ ID NO: 124622 - DNA, 20 bp, Artificial Sequence
  Description of Artificial Sequence: Synthetic oligonucleotide
  Target: LAMA2; (+) strand; PAM type: NRG; PAM sequence: TGG
tgtagtactattttcatttt

SEQ ID NO: 124623 - DNA, 20 bp, Artificial Sequence
  Description of Artificial Sequence: Synthetic oligonucleotide
  Target: LAMA2; (+) strand; PAM type: NRG; PAM sequence: AAG
agtactattttcatttttgg

SEQ ID NO: 124624 - DNA, 20 bp, Artificial Sequence
  Description of Artificial Sequence: Synthetic oligonucleotide
  Target: LAMA2; (+) strand; PAM type: NRG; PAM sequence: TAG
atgcttaatgctgttttcca

SEQ ID NO: 124625 - DNA, 20 bp, Artificial Sequence
  Description of Artificial Sequence: Synthetic oligonucleotide
  Target: LAMA2; (+) strand; PAM type: NRG; PAM sequence: TGG
cttaatgctgttttccatag

SEQ ID NO: 124626 - DNA, 20 bp, Artificial Sequence
  Description of Artificial Sequence: Synthetic oligonucleotide
  Target: LAMA2; (+) strand; PAM type: NRG; PAM sequence: AAG
cctatttacattcccaccaa

SEQ ID NO: 124627 - DNA, 20 bp, Artificial Sequence
  Description of Artificial Sequence: Synthetic oligonucleotide
  Target: LAMA2; (+) strand; PAM type: NRG; PAM sequence: TAG
ttacattcccaccaaaagtg

SEQ ID NO: 124628 - DNA, 20 bp, Artificial Sequence
  Description of Artificial Sequence: Synthetic oligonucleotide
  Target: LAMA2; (+) strand; PAM type: NRG; PAM sequence: AAG
cattcccaccaaaagtgtag

SEQ ID NO: 124629 - DNA, 20 bp, Artificial Sequence
  Description of Artificial Sequence: Synthetic oligonucleotide
  Target: LAMA2; (+) strand; PAM type: NRG; PAM sequence: AGG
attcccaccaaaagtgtaga

SEQ ID NO: 124630 - DNA, 20 bp, Artificial Sequence
  Description of Artificial Sequence: Synthetic oligonucleotide
  Target: LAMA2; (+) strand; PAM type: NRG; PAM sequence: GGG
ttcccaccaaaagtgtagaa

SEQ ID NO: 124631 - DNA, 20 bp, Artificial Sequence
  Description of Artificial Sequence: Synthetic oligonucleotide
  Target: LAMA2; (+) strand; PAM type: NRG; PAM sequence: TAG
atcttttgtcttttatataa

SEQ ID NO: 124632 - DNA, 20 bp, Artificial Sequence
  Description of Artificial Sequence: Synthetic oligonucleotide
  Target: LAMA2; (+) strand; PAM type: NRG; PAM sequence: TAG
ttatataatagccatgctaa

SEQ ID NO: 124633 - DNA, 20 bp, Artificial Sequence
  Description of Artificial Sequence: Synthetic oligonucleotide
  Target: LAMA2; (+) strand; PAM type: NRG; PAM sequence: AGG
tatataatagccatgctaat

SEQ ID NO: 124634 - DNA, 20 bp, Artificial Sequence
  Description of Artificial Sequence: Synthetic oligonucleotide
  Target: LAMA2; (+) strand; PAM type: NRG; PAM sequence: GAG
atagccatgctaataggtat

SEQ ID NO: 124635 - DNA, 20 bp, Artificial Sequence
  Description of Artificial Sequence: Synthetic oligonucleotide
  Target: LAMA2; (+) strand; PAM type: NRG; PAM sequence: AGG
tagccatgctaataggtatg

SEQ ID NO: 124636 - DNA, 20 bp, Artificial Sequence
  Description of Artificial Sequence: Synthetic oligonucleotide
  Target: LAMA2; (+) strand; PAM type: NRG; PAM sequence: TGG
tatgaggtgatatctcactg

SEQ ID NO: 124637 - DNA, 20 bp, Artificial Sequence
  Description of Artificial Sequence: Synthetic oligonucleotide
  Target: LAMA2; (+) strand; PAM type: NRG; PAM sequence: TGG
acactttttaatatacctgt

SEQ ID NO: 124638 - DNA, 20 bp, Artificial Sequence
  Description of Artificial Sequence: Synthetic oligonucleotide
  Target: LAMA2; (+) strand; PAM type: NRG; PAM sequence: TGG
gccatttgtatgtctctttt

SEQ ID NO: 124639 - DNA, 20 bp, Artificial Sequence
  Description of Artificial Sequence: Synthetic oligonucleotide
  Target: LAMA2; (+) strand; PAM type: NRG; PAM sequence: TAG
ttggaaacatgtctattttt

SEQ ID NO: 124640 - DNA, 20 bp, Artificial Sequence
  Description of Artificial Sequence: Synthetic oligonucleotide
  Target: LAMA2; (+) strand; PAM type: NRG; PAM sequence: TAG
gtctattttttagatatgtt

SEQ ID NO: 124641 - DNA, 20 bp, Artificial Sequence
  Description of Artificial Sequence: Synthetic oligonucleotide
  Target: LAMA2; (+) strand; PAM type: NRG; PAM sequence: AGG
tctattttttagatatgttt

SEQ ID NO: 124642 - DNA, 20 bp, Artificial Sequence
  Description of Artificial Sequence: Synthetic oligonucleotide
  Target: LAMA2; (+) strand; PAM type: NRG; PAM sequence: TGG
tcctttgtccattttgaaat

SEQ ID NO: 124643 - DNA, 20 bp, Artificial Sequence
  Description of Artificial Sequence: Synthetic oligonucleotide
  Target: LAMA2; (+) strand; PAM type: NRG; PAM sequence: GAG
ttttgtgttttcttgctatt

SEQ ID NO: 124644 - DNA, 20 bp, Artificial Sequence
  Description of Artificial Sequence: Synthetic oligonucleotide
  Target: LAMA2; (+) strand; PAM type: NRG; PAM sequence: TGG
ttaactcctgatcatatata

SEQ ID NO: 124645 - DNA, 20 bp, Artificial Sequence
  Description of Artificial Sequence: Synthetic oligonucleotide
  Target: LAMA2; (+) strand; PAM type: NRG; PAM sequence: TAG
gttgattgtatcctctgctg

SEQ ID NO: 124646 - DNA, 20 bp, Artificial Sequence
  Description of Artificial Sequence: Synthetic oligonucleotide
  Target: LAMA2; (+) strand; PAM type: NRG; PAM sequence: AAG
gattgtatcctctgctgtag

SEQ ID NO: 124647 - DNA, 20 bp, Artificial Sequence
  Description of Artificial Sequence: Synthetic oligonucleotide
  Target: LAMA2; (+) strand; PAM type: NRG; PAM sequence: TAG
tcctctgctgtagaagtttt

SEQ ID NO: 124648 - DNA, 20 bp, Artificial Sequence
  Description of Artificial Sequence: Synthetic oligonucleotide
  Target: LAMA2; (+) strand; PAM type: NRG; PAM sequence: CAG
tagaagtttttagtttgctg

SEQ ID NO: 124649 - DNA, 20 bp, Artificial Sequence
  Description of Artificial Sequence: Synthetic oligonucleotide
  Target: LAMA2; (+) strand; PAM type: NRG; PAM sequence: CGG
tgctttcattgcctgtgctt

SEQ ID NO: 124650 - DNA, 20 bp, Artificial Sequence
  Description of Artificial Sequence: Synthetic oligonucleotide
  Target: LAMA2; (+) strand; PAM type: NRG; PAM sequence: GGG
gctttcattgcctgtgcttc

SEQ ID NO: 124651 - DNA, 20 bp, Artificial Sequence
  Description of Artificial Sequence: Synthetic oligonucleotide
  Target: LAMA2; (+) strand; PAM type: NRG; PAM sequence: AAG
gtaccccaaaaatcatgacc

SEQ ID NO: 124652 - DNA, 20 bp, Artificial Sequence
  Description of Artificial Sequence: Synthetic oligonucleotide
  Target: LAMA2; (+) strand; PAM type: NRG; PAM sequence: TGG
aaaatcatgaccaagactga

SEQ ID NO: 124653 - DNA, 20 bp, Artificial Sequence
  Description of Artificial Sequence: Synthetic oligonucleotide
  Target: LAMA2; (+) strand; PAM type: NRG; PAM sequence: AAG
tcatgaccaagactgatggc

SEQ ID NO: 124654 - DNA, 20 bp, Artificial Sequence
  Description of Artificial Sequence: Synthetic oligonucleotide
  Target: LAMA2; (+) strand; PAM type: NRG; PAM sequence: AGG
catgaccaagactgatggca

SEQ ID NO: 124655 - DNA, 20 bp, Artificial Sequence
  Description of Artificial Sequence: Synthetic oligonucleotide
  Target: LAMA2; (+) strand; PAM type: NRG; PAM sequence: GAG
tgaccaagactgatggcaag

SEQ ID NO: 124656 - DNA, 20 bp, Artificial Sequence
  Description of Artificial Sequence: Synthetic oligonucleotide
  Target: LAMA2; (+) strand; PAM type: NRG; PAM sequence: TAG
ccttttctttatatttattt

SEQ ID NO: 124657 - DNA, 20 bp, Artificial Sequence
  Description of Artificial Sequence: Synthetic oligonucleotide
  Target: LAMA2; (+) strand; PAM type: NRG; PAM sequence: AAG
tttctttatatttattttag

SEQ ID NO: 124658 - DNA, 20 bp, Artificial Sequence
  Description of Artificial Sequence: Synthetic oligonucleotide
  Target: LAMA2; (+) strand; PAM type: NRG; PAM sequence: TGG
tatttattttagaagcttta

SEQ ID NO: 124659 - DNA, 20 bp, Artificial Sequence
  Description of Artificial Sequence: Synthetic oligonucleotide
  Target: LAMA2; (+) strand; PAM type: NRG; PAM sequence: CAG
ttttagaagctttatggttt

SEQ ID NO: 124660 - DNA, 20 bp, Artificial Sequence
  Description of Artificial Sequence: Synthetic oligonucleotide
  Target: LAMA2; (+) strand; PAM type: NRG; PAM sequence: AGG
tttagaagctttatggtttc

SEQ ID NO: 124661 - DNA, 20 bp, Artificial Sequence
  Description of Artificial Sequence: Synthetic oligonucleotide
  Target: LAMA2; (+) strand; PAM type: NRG; PAM sequence: CAG
tggtttcaggtcatacattt

SEQ ID NO: 124662 - DNA, 20 bp, Artificial Sequence
  Description of Artificial Sequence: Synthetic oligonucleotide
  Target: LAMA2; (+) strand; PAM type: NRG; PAM sequence: CAG
ttcagtcttgaatccatttt

SEQ ID NO: 124663 - DNA, 20 bp, Artificial Sequence
  Description of Artificial Sequence: Synthetic oligonucleotide
  Target: LAMA2; (+) strand; PAM type: NRG; PAM sequence: TGG
tttcagttgatttttgtata

SEQ ID NO: 124664 - DNA, 20 bp, Artificial Sequence
  Description of Artificial Sequence: Synthetic oligonucleotide
  Target: LAMA2; (+) strand; PAM type: NRG; PAM sequence: AAG
ttgatttttgtatatggaat

SEQ ID NO: 124665 - DNA, 20 bp, Artificial Sequence
  Description of Artificial Sequence: Synthetic oligonucleotide
  Target: LAMA2; (+) strand; PAM type: NRG; PAM sequence: TGG
caaaatcattcttttgcatg

SEQ ID NO: 124666 - DNA, 20 bp, Artificial Sequence
  Description of Artificial Sequence: Synthetic oligonucleotide
  Target: LAMA2; (+) strand; PAM type: NRG; PAM sequence: TAG
ttcttttgcatgtggatatc

SEQ ID NO: 124667 - DNA, 20 bp, Artificial Sequence
  Description of Artificial Sequence: Synthetic oligonucleotide
  Target: LAMA2; (+) strand; PAM type: NRG; PAM sequence: CAG
gatatctagtttccccaata

SEQ ID NO: 124668 - DNA, 20 bp, Artificial Sequence
  Description of Artificial Sequence: Synthetic oligonucleotide
  Target: LAMA2; (+) strand; PAM type: NRG; PAM sequence: AAG
ccccaatacagtttattgaa

SEQ ID NO: 124669 - DNA, 20 bp, Artificial Sequence
  Description of Artificial Sequence: Synthetic oligonucleotide
  Target: LAMA2; (+) strand; PAM type: NRG; PAM sequence: TAG
actatttgttccccattgtg

SEQ ID NO: 124670 - DNA, 20 bp, Artificial Sequence
  Description of Artificial Sequence: Synthetic oligonucleotide
  Target: LAMA2; (+) strand; PAM type: NRG; PAM sequence: TGG
tccccattgtgtagttttaa

SEQ ID NO: 124671 - DNA, 20 bp, Artificial Sequence
  Description of Artificial Sequence: Synthetic oligonucleotide
  Target: LAMA2; (+) strand; PAM type: NRG; PAM sequence: TAG
attgtgtagttttaatggcc

SEQ ID NO: 124672 - DNA, 20 bp, Artificial Sequence
  Description of Artificial Sequence: Synthetic oligonucleotide
  Target: LAMA2; (+) strand; PAM type: NRG; PAM sequence: AAG
tagttttaatggcctagtca

SEQ ID NO: 124673 - DNA, 20 bp, Artificial Sequence
  Description of Artificial Sequence: Synthetic oligonucleotide
  Target: LAMA2; (+) strand; PAM type: NRG; PAM sequence: TAG
ttaatggcctagtcaaagat

SEQ ID NO: 124674 - DNA, 20 bp, Artificial Sequence
  Description of Artificial Sequence: Synthetic oligonucleotide
  Target: LAMA2; (+) strand; PAM type: NRG; PAM sequence: TGG
tggcctagtcaaagattagt

SEQ ID NO: 124675 - DNA, 20 bp, Artificial Sequence
  Description of Artificial Sequence: Synthetic oligonucleotide
  Target: LAMA2; (+) strand; PAM type: NRG; PAM sequence: TGG
attagttggccatatatttg

SEQ ID NO: 124676 - DNA, 20 bp, Artificial Sequence
  Description of Artificial Sequence: Synthetic oligonucleotide
  Target: LAMA2; (+) strand; PAM type: NRG; PAM sequence: GGG
ttagttggccatatatttgt

SEQ ID NO: 124677 - DNA, 20 bp, Artificial Sequence
  Description of Artificial Sequence: Synthetic oligonucleotide
  Target: LAMA2; (+) strand; PAM type: NRG; PAM sequence: TGG
tatatttgtgggtttatttc

SEQ ID NO: 124678 - DNA, 20 bp, Artificial Sequence
  Description of Artificial Sequence: Synthetic oligonucleotide
  Target: LAMA2; (+) strand; PAM type: NRG; PAM sequence: GGG
atatttgtgggtttatttct

SEQ ID NO: 124679 - DNA, 20 bp, Artificial Sequence
  Description of Artificial Sequence: Synthetic oligonucleotide
  Target: LAMA2; (+) strand; PAM type: NRG; PAM sequence: TGG
tctgggctattccgtttcat

SEQ ID NO: 124680 - DNA, 20 bp, Artificial Sequence
  Description of Artificial Sequence: Synthetic oligonucleotide
  Target: LAMA2; (+) strand; PAM type: NRG; PAM sequence: TAG
ggtctatatgtctgttttta

SEQ ID NO: 124681 - DNA, 20 bp, Artificial Sequence
  Description of Artificial Sequence: Synthetic oligonucleotide
  Target: LAMA2; (+) strand; PAM type: NRG; PAM sequence: TGG
tcacactgttttgattacca

SEQ ID NO: 124682 - DNA, 20 bp, Artificial Sequence
  Description of Artificial Sequence: Synthetic oligonucleotide
  Target: LAMA2; (+) strand; PAM type: NRG; PAM sequence: TAG
gattaccatggctttgtata

SEQ ID NO: 124683 - DNA, 20 bp, Artificial Sequence
  Description of Artificial Sequence: Synthetic oligonucleotide
  Target: LAMA2; (+) strand; PAM type: NRG; PAM sequence: CAG
ctttgtatatagtttgaaat

SEQ ID NO: 124684 - DNA, 20 bp, Artificial Sequence
  Description of Artificial Sequence: Synthetic oligonucleotide
  Target: LAMA2; (+) strand; PAM type: NRG; PAM sequence: AGG
tttgtatatagtttgaaatc

SEQ ID NO: 124685 - DNA, 20 bp, Artificial Sequence
  Description of Artificial Sequence: Synthetic oligonucleotide
  Target: LAMA2; (+) strand; PAM type: NRG; PAM sequence: TGG
tagtttgaaatcaggaccca

SEQ ID NO: 124686 - DNA, 20 bp, Artificial Sequence
  Description of Artificial Sequence: Synthetic oligonucleotide
  Target: LAMA2; (+) strand; PAM type: NRG; PAM sequence: TGG
atcaggacccatggtgcttc

SEQ ID NO: 124687 - DNA, 20 bp, Artificial Sequence
  Description of Artificial Sequence: Synthetic oligonucleotide
  Target: LAMA2; (+) strand; PAM type: NRG; PAM sequence: AAG
tggctttgtccttctttctt

SEQ ID NO: 124688 - DNA, 20 bp, Artificial Sequence
  Description of Artificial Sequence: Synthetic oligonucleotide
  Target: LAMA2; (+) strand; PAM type: NRG; PAM sequence: TGG
cttctttcttaagattgctt

SEQ ID NO: 124689 - DNA, 20 bp, Artificial Sequence
  Description of Artificial Sequence: Synthetic oligonucleotide
  Target: LAMA2; (+) strand; PAM type: NRG; PAM sequence: TGG
taagattgctttggatattt

SEQ ID NO: 124690 - DNA, 20 bp, Artificial Sequence
  Description of Artificial Sequence: Synthetic oligonucleotide
  Target: LAMA2; (+) strand; PAM type: NRG; PAM sequence: GGG
aagattgctttggatatttt

SEQ ID NO: 124691 - DNA, 20 bp, Artificial Sequence
  Description of Artificial Sequence: Synthetic oligonucleotide
  Target: LAMA2; (+) strand; PAM type: NRG; PAM sequence: TAG
aaaattcttattcttttttt

SEQ ID NO: 124692 - DNA, 20 bp, Artificial Sequence
  Description of Artificial Sequence: Synthetic oligonucleotide
  Target: LAMA2; (+) strand; PAM type: NRG; PAM sequence: GAG
tttttctttcttttttttct

SEQ ID NO: 124693 - DNA, 20 bp, Artificial Sequence
  Description of Artificial Sequence: Synthetic oligonucleotide
  Target: LAMA2; (+) strand; PAM type: NRG; PAM sequence: AGG
ttttctttcttttttttctg

SEQ ID NO: 124694 - DNA, 20 bp, Artificial Sequence
  Description of Artificial Sequence: Synthetic oligonucleotide
  Target: LAMA2; (+) strand; PAM type: NRG; PAM sequence: TGG
tctttcttttttttctgagg

SEQ ID NO: 124695 - DNA, 20 bp, Artificial Sequence
  Description of Artificial Sequence: Synthetic oligonucleotide
  Target: LAMA2; (+) strand; PAM type: NRG; PAM sequence: AAG
gaatttccctcttttcgctc

SEQ ID NO: 124696 - DNA, 20 bp, Artificial Sequence
  Description of Artificial Sequence: Synthetic oligonucleotide
  Target: LAMA2; (+) strand; PAM type: NRG; PAM sequence: AGG
aatttccctcttttcgctca

SEQ ID NO: 124697 - DNA, 20 bp, Artificial Sequence
  Description of Artificial Sequence: Synthetic oligonucleotide
  Target: LAMA2; (+) strand; PAM type: NRG; PAM sequence: TGG
ttccctcttttcgctcaagg

SEQ ID NO: 124698 - DNA, 20 bp, Artificial Sequence
  Description of Artificial Sequence: Synthetic oligonucleotide
  Target: LAMA2; (+) strand; PAM type: NRG; PAM sequence: GAG
ccctcttttcgctcaaggtg

SEQ ID NO: 124699 - DNA, 20 bp, Artificial Sequence
  Description of Artificial Sequence: Synthetic oligonucleotide
  Target: LAMA2; (+) strand; PAM type: NRG; PAM sequence: TGG
tcgctcaaggtggagtgcaa

SEQ ID NO: 124700 - DNA, 20 bp, Artificial Sequence
  Description of Artificial Sequence: Synthetic oligonucleotide
  Target: LAMA2; (+) strand; PAM type: NRG; PAM sequence: CAG
ggagtgcaatggtgcaatct

SEQ ID NO: 124701 - DNA, 20 bp, Artificial Sequence
  Description of Artificial Sequence: Synthetic oligonucleotide
  Target: LAMA2; (+) strand; PAM type: NRG; PAM sequence: TGG
tcactgcaacctccgtctcc

SEQ ID NO: 124702 - DNA, 20 bp, Artificial Sequence
  Description of Artificial Sequence: Synthetic oligonucleotide
  Target: LAMA2; (+) strand; PAM type: NRG; PAM sequence: GGG
cactgcaacctccgtctcct

SEQ ID NO: 124703 - DNA, 20 bp, Artificial Sequence
  Description of Artificial Sequence: Synthetic oligonucleotide
  Target: LAMA2; (+) strand; PAM type: NRG; PAM sequence: AAG
aacctccgtctcctgggttc

SEQ ID NO: 124704 - DNA, 20 bp, Artificial Sequence
  Description of Artificial Sequence: Synthetic oligonucleotide
  Target: LAMA2; (+) strand; PAM type: NRG; PAM sequence: CAG
ttcaagtgattctcctgcct

SEQ ID NO: 124705 - DNA, 20 bp, Artificial Sequence
  Description of Artificial Sequence: Synthetic oligonucleotide
  Target: LAMA2; (+) strand; PAM type: NRG; PAM sequence: GAG
ttctcctgcctcagcctcct

SEQ ID NO: 124706 - DNA, 20 bp, Artificial Sequence
  Description of Artificial Sequence: Synthetic oligonucleotide
  Target: LAMA2; (+) strand; PAM type: NRG; PAM sequence: TAG
tcctgcctcagcctcctgag

SEQ ID NO: 124707 - DNA, 20 bp, Artificial Sequence
  Description of Artificial Sequence: Synthetic oligonucleotide
  Target: LAMA2; (+) strand; PAM type: NRG; PAM sequence: GAG
cctcagcctcctgagtagct

SEQ ID NO: 124708 - DNA, 20 bp, Artificial Sequence
  Description of Artificial Sequence: Synthetic oligonucleotide
  Target: LAMA2; (+) strand; PAM type: NRG; PAM sequence: CAG
ctcctgagtagctgagatta

SEQ ID NO: 124709 - DNA, 20 bp, Artificial Sequence
  Description of Artificial Sequence: Synthetic oligonucleotide
  Target: LAMA2; (+) strand; PAM type: NRG; PAM sequence: AGG
tcctgagtagctgagattac

SEQ ID NO: 124710 - DNA, 20 bp, Artificial Sequence
  Description of Artificial Sequence: Synthetic oligonucleotide
  Target: LAMA2; (+) strand; PAM type: NRG; PAM sequence: CAG
caggtgcacaccaccatgcc

SEQ ID NO: 124711 - DNA, 20 bp, Artificial Sequence
  Description of Artificial Sequence: Synthetic oligonucleotide
  Target: LAMA2; (+) strand; PAM type: NRG; PAM sequence: TAG
attttattttttgtatttct

SEQ ID NO: 124712 - DNA, 20 bp, Artificial Sequence
  Description of Artificial Sequence: Synthetic oligonucleotide
  Target: LAMA2; (+) strand; PAM type: NRG; PAM sequence: TAG
ttattttttgtatttcttag

SEQ ID NO: 124713 - DNA, 20 bp, Artificial Sequence
  Description of Artificial Sequence: Synthetic oligonucleotide
  Target: LAMA2; (+) strand; PAM type: NRG; PAM sequence: GAG
attttttgtatttcttagta

SEQ ID NO: 124714 - DNA, 20 bp, Artificial Sequence
  Description of Artificial Sequence: Synthetic oligonucleotide
  Target: LAMA2; (+) strand; PAM type: NRG; PAM sequence: TGG
tttgtatttcttagtagaga

SEQ ID NO: 124715 - DNA, 20 bp, Artificial Sequence
  Description of Artificial Sequence: Synthetic oligonucleotide
  Target: LAMA2; (+) strand; PAM type: NRG; PAM sequence: GGG
ttgtatttcttagtagagat

SEQ ID NO: 124716 - DNA, 20 bp, Artificial Sequence
  Description of Artificial Sequence: Synthetic oligonucleotide
  Target: LAMA2; (+) strand; PAM type: NRG; PAM sequence: GGG
tgtatttcttagtagagatg

SEQ ID NO: 124717 - DNA, 20 bp, Artificial Sequence
  Description of Artificial Sequence: Synthetic oligonucleotide
  Target: LAMA2; (+) strand; PAM type: NRG; PAM sequence: TGG
gagatggggttttgctatgt

SEQ ID NO: 124718 - DNA, 20 bp, Artificial Sequence
  Description of Artificial Sequence: Synthetic oligonucleotide
  Target: LAMA2; (+) strand; PAM type: NRG; PAM sequence: CAG
tggggttttgctatgttgga

SEQ ID NO: 124719 - DNA, 20 bp, Artificial Sequence
  Description of Artificial Sequence: Synthetic oligonucleotide
  Target: LAMA2; (+) strand; PAM type: NRG; PAM sequence: AGG
ggggttttgctatgttggac

SEQ ID NO: 124720 - DNA, 20 bp, Artificial Sequence
  Description of Artificial Sequence: Synthetic oligonucleotide
  Target: LAMA2; (+) strand; PAM type: NRG; PAM sequence: TGG
ttttgctatgttggacaggc

SEQ ID NO: 124721 - DNA, 20 bp, Artificial Sequence
  Description of Artificial Sequence: Synthetic oligonucleotide
  Target: LAMA2; (+) strand; PAM type: NRG; PAM sequence: CAG
tggtctcaaactcctgacct

SEQ ID NO: 124722 - DNA, 20 bp, Artificial Sequence
  Description of Artificial Sequence: Synthetic oligonucleotide
  Target: LAMA2; (+) strand; PAM type: NRG; PAM sequence: AGG
ggtctcaaactcctgacctc

SEQ ID NO: 124723 - DNA, 20 bp, Artificial Sequence
  Description of Artificial Sequence: Synthetic oligonucleotide
  Target: LAMA2; (+) strand; PAM type: NRG; PAM sequence: CAG
ctcaggtaatctgcccacct

SEQ ID NO: 124724 - DNA, 20 bp, Artificial Sequence
  Description of Artificial Sequence: Synthetic oligonucleotide
  Target: LAMA2; (+) strand; PAM type: NRG; PAM sequence: AAG
ctgcccacctcagcctccca

SEQ ID NO: 124725 - DNA, 20 bp, Artificial Sequence
  Description of Artificial Sequence: Synthetic oligonucleotide
  Target: LAMA2; (+) strand; PAM type: NRG; PAM sequence: TGG
acctcagcctcccaaagtgc

SEQ ID NO: 124726 - DNA, 20 bp, Artificial Sequence
  Description of Artificial Sequence: Synthetic oligonucleotide
  Target: LAMA2; (+) strand; PAM type: NRG; PAM sequence: GGG
cctcagcctcccaaagtgct

SEQ ID NO: 124727 - DNA, 20 bp, Artificial Sequence
  Description of Artificial Sequence: Synthetic oligonucleotide
  Target: LAMA2; (+) strand; PAM type: NRG; PAM sequence: CAG
ctcccaaagtgctgggatta

SEQ ID NO: 124728 - DNA, 20 bp, Artificial Sequence
  Description of Artificial Sequence: Synthetic oligonucleotide
  Target: LAMA2; (+) strand; PAM type: NRG; PAM sequence: AGG
tcccaaagtgctgggattac

SEQ ID NO: 124729 - DNA, 20 bp, Artificial Sequence
  Description of Artificial Sequence: Synthetic oligonucleotide
  Target: LAMA2; (+) strand; PAM type: NRG; PAM sequence: AAG
agtgctgggattacaggcat

SEQ ID NO: 124730 - DNA, 20 bp, Artificial Sequence
  Description of Artificial Sequence: Synthetic oligonucleotide
  Target: LAMA2; (+) strand; PAM type: NRG; PAM sequence: CGG
caggcataagccactacacc

SEQ ID NO: 124731 - DNA, 20 bp, Artificial Sequence
  Description of Artificial Sequence: Synthetic oligonucleotide
  Target: LAMA2; (+) strand; PAM type: NRG; PAM sequence: GAG
aaaattgccattgaaatgtt

SEQ ID NO: 124732 - DNA, 20 bp, Artificial Sequence
  Description of Artificial Sequence: Synthetic oligonucleotide
  Target: LAMA2; (+) strand; PAM type: NRG; PAM sequence: TAG
gagtgactgcattgactctg

SEQ ID NO: 124733 - DNA, 20 bp, Artificial Sequence
  Description of Artificial Sequence: Synthetic oligonucleotide
  Target: LAMA2; (+) strand; PAM type: NRG; PAM sequence: TGG
attgactctgtagatcattt

SEQ ID NO: 124734 - DNA, 20 bp, Artificial Sequence
  Description of Artificial Sequence: Synthetic oligonucleotide
  Target: LAMA2; (+) strand; PAM type: NRG; PAM sequence: GGG
ttgactctgtagatcatttt

SEQ ID NO: 124735 - DNA, 20 bp, Artificial Sequence
  Description of Artificial Sequence: Synthetic oligonucleotide
  Target: LAMA2; (+) strand; PAM type: NRG; PAM sequence: TGG
gtagatcattttgggtaatg

SEQ ID NO: 124736 - DNA, 20 bp, Artificial Sequence
  Description of Artificial Sequence: Synthetic oligonucleotide
  Target: LAMA2; (+) strand; PAM type: NRG; PAM sequence: TAG
tgtggacattttaacaatat

SEQ ID NO: 124737 - DNA, 20 bp, Artificial Sequence
  Description of Artificial Sequence: Synthetic oligonucleotide
  Target: LAMA2; (+) strand; PAM type: NRG; PAM sequence: CAG
gttcttccaattcatgaaca

SEQ ID NO: 124738 - DNA, 20 bp, Artificial Sequence
  Description of Artificial Sequence: Synthetic oligonucleotide
  Target: LAMA2; (+) strand; PAM type: NRG; PAM sequence: AAG
ttccaattcatgaacacaga

SEQ ID NO: 124739 - DNA, 20 bp, Artificial Sequence
  Description of Artificial Sequence: Synthetic oligonucleotide
  Target: LAMA2; (+) strand; PAM type: NRG; PAM sequence: TAG
tttctttcttcaatgtctta

SEQ ID NO: 124740 - DNA, 20 bp, Artificial Sequence
  Description of Artificial Sequence: Synthetic oligonucleotide
  Target: LAMA2; (+) strand; PAM type: NRG; PAM sequence: CAG
cttcaatgtcttatagtttt

SEQ ID NO: 124741 - DNA, 20 bp, Artificial Sequence
  Description of Artificial Sequence: Synthetic oligonucleotide
  Target: LAMA2; (+) strand; PAM type: NRG; PAM sequence: CAG
gtcttatagttttcagtgta

SEQ ID NO: 124742 - DNA, 20 bp, Artificial Sequence
  Description of Artificial Sequence: Synthetic oligonucleotide
  Target: LAMA2; (+) strand; PAM type: NRG; PAM sequence: TGG
gtacagatctttcacctcct

SEQ ID NO: 124743 - DNA, 20 bp, Artificial Sequence
  Description of Artificial Sequence: Synthetic oligonucleotide
  Target: LAMA2; (+) strand; PAM type: NRG; PAM sequence: TGG
tatttttgacgctattgctt

SEQ ID NO: 124744 - DNA, 20 bp, Artificial Sequence
  Description of Artificial Sequence: Synthetic oligonucleotide
  Target: LAMA2; (+) strand; PAM type: NRG; PAM sequence: GAG
tcttattattattatacttt

SEQ ID NO: 124745 - DNA, 20 bp, Artificial Sequence
  Description of Artificial Sequence: Synthetic oligonucleotide
  Target: LAMA2; (+) strand; PAM type: NRG; PAM sequence: TAG
tattattatactttgagttc

SEQ ID NO: 124746 - DNA, 20 bp, Artificial Sequence
  Description of Artificial Sequence: Synthetic oligonucleotide
  Target: LAMA2; (+) strand; PAM type: NRG; PAM sequence: AGG
attattatactttgagttct

SEQ ID NO: 124747 - DNA, 20 bp, Artificial Sequence
  Description of Artificial Sequence: Synthetic oligonucleotide
  Target: LAMA2; (+) strand; PAM type: NRG; PAM sequence: GGG
ttattatactttgagttcta

SEQ ID NO: 124748 - DNA, 20 bp, Artificial Sequence
  Description of Artificial Sequence: Synthetic oligonucleotide
  Target: LAMA2; (+) strand; PAM type: NRG; PAM sequence: CAG
gggtacttgtgcacaatgtg

SEQ ID NO: 124749 - DNA, 20 bp, Artificial Sequence
  Description of Artificial Sequence: Synthetic oligonucleotide
  Target: LAMA2; (+) strand; PAM type: NRG; PAM sequence: AGG
ggtacttgtgcacaatgtgc

SEQ ID NO: 124750 - DNA, 20 bp, Artificial Sequence
  Description of Artificial Sequence: Synthetic oligonucleotide
  Target: LAMA2; (+) strand; PAM type: NRG; PAM sequence: TAG
caatgtgcaggtttgttaca

SEQ ID NO: 124751 - DNA, 20 bp, Artificial Sequence
  Description of Artificial Sequence: Synthetic oligonucleotide
  Target: LAMA2; (+) strand; PAM type: NRG; PAM sequence: AGG
aatgtgcaggtttgttacat

SEQ ID NO: 124752 - DNA, 20 bp, Artificial Sequence
  Description of Artificial Sequence: Synthetic oligonucleotide
  Target: LAMA2; (+) strand; PAM type: NRG; PAM sequence: TGG
taggtatacatgtgccatgt

SEQ ID NO: 124753 - DNA, 20 bp, Artificial Sequence
  Description of Artificial Sequence: Synthetic oligonucleotide
  Target: LAMA2; (+) strand; PAM type: NRG; PAM sequence: TAG
cgtcaactcatcatttacat

SEQ ID NO: 124754 - DNA, 20 bp, Artificial Sequence
  Description of Artificial Sequence: Synthetic oligonucleotide
  Target: LAMA2; (+) strand; PAM type: NRG; PAM sequence: AGG
gtcaactcatcatttacatt

SEQ ID NO: 124755 - DNA, 20 bp, Artificial Sequence
  Description of Artificial Sequence: Synthetic oligonucleotide
  Target: LAMA2; (+) strand; PAM type: NRG; PAM sequence: CAG
tcctaatgctatccctcccc

SEQ ID NO: 124756 - DNA, 20 bp, Artificial Sequence
  Description of Artificial Sequence: Synthetic oligonucleotide
  Target: LAMA2; (+) strand; PAM type: NRG; PAM sequence: CAG
cagccccacaccccccccaa

SEQ ID NO: 124757 - DNA, 20 bp, Artificial Sequence
  Description of Artificial Sequence: Synthetic oligonucleotide
  Target: LAMA2; (+) strand; PAM type: NRG; PAM sequence: GAG
attgttcaactcccacttat

SEQ ID NO: 124758 - DNA, 20 bp, Artificial Sequence
  Description of Artificial Sequence: Synthetic oligonucleotide
  Target: LAMA2; (+) strand; PAM type: NRG; PAM sequence: GAG
ttcaactcccacttatgagt

SEQ ID NO: 124759 - DNA, 20 bp, Artificial Sequence
  Description of Artificial Sequence: Synthetic oligonucleotide
  Target: LAMA2; (+) strand; PAM type: NRG; PAM sequence: TGG
gagtgagaacacacactgtt

SEQ ID NO: 124760 - DNA, 20 bp, Artificial Sequence
  Description of Artificial Sequence: Synthetic oligonucleotide
  Target: LAMA2; (+) strand; PAM type: NRG; PAM sequence: GAG
tgtccttgtgatattttgct

SEQ ID NO: 124761 - DNA, 20 bp, Artificial Sequence
  Description of Artificial Sequence: Synthetic oligonucleotide
  Target: LAMA2; (+) strand; PAM type: NRG; PAM sequence: TGG
tgatattttgctgagaatgt

SEQ ID NO: 124762 - DNA, 20 bp, Artificial Sequence
  Description of Artificial Sequence: Synthetic oligonucleotide
  Target: LAMA2; (+) strand; PAM type: NRG; PAM sequence: CAG
ttgctgagaatgttggtttc

SEQ ID NO: 124763 - DNA, 20 bp, Artificial Sequence
  Description of Artificial Sequence: Synthetic oligonucleotide
  Target: LAMA2; (+) strand; PAM type: NRG; PAM sequence: AAG
gcttcatccatgtccctgca

SEQ ID NO: 124764 - DNA, 20 bp, Artificial Sequence
  Description of Artificial Sequence: Synthetic oligonucleotide
  Target: LAMA2; (+) strand; PAM type: NRG; PAM sequence: AGG
cttcatccatgtccctgcaa

SEQ ID NO: 124765 - DNA, 20 bp, Artificial Sequence
  Description of Artificial Sequence: Synthetic oligonucleotide
  Target: LAMA2; (+) strand; PAM type: NRG; PAM sequence: TAG
tcatcttttttatgactctg

SEQ ID NO: 124766 - DNA, 20 bp, Artificial Sequence
  Description of Artificial Sequence: Synthetic oligonucleotide
  Target: LAMA2; (+) strand; PAM type: NRG; PAM sequence: TGG
tatgactctgtagtattcca

SEQ ID NO: 124767 - DNA, 20 bp, Artificial Sequence
  Description of Artificial Sequence: Synthetic oligonucleotide
  Target: LAMA2; (+) strand; PAM type: NRG; PAM sequence: CAG
tgtgccacattttctttatc

SEQ ID NO: 124768 - DNA, 20 bp, Artificial Sequence
  Description of Artificial Sequence: Synthetic oligonucleotide
  Target: LAMA2; (+) strand; PAM type: NRG; PAM sequence: TGG
tttatccagtctattattga

SEQ ID NO: 124769 - DNA, 20 bp, Artificial Sequence
  Description of Artificial Sequence: Synthetic oligonucleotide
  Target: LAMA2; (+) strand; PAM type: NRG; PAM sequence: TGG
gtctattattgatggacatt

SEQ ID NO: 124770 - DNA, 20 bp, Artificial Sequence
  Description of Artificial Sequence: Synthetic oligonucleotide
  Target: LAMA2; (+) strand; PAM type: NRG; PAM sequence: GGG
tctattattgatggacattt

SEQ ID NO: 124771 - DNA, 20 bp, Artificial Sequence
  Description of Artificial Sequence: Synthetic oligonucleotide
  Target: LAMA2; (+) strand; PAM type: NRG; PAM sequence: TGG
ttattgatggacatttgggt

SEQ ID NO: 124772 - DNA, 20 bp, Artificial Sequence
  Description of Artificial Sequence: Synthetic oligonucleotide
  Target: LAMA2; (+) strand; PAM type: NRG; PAM sequence: AAG
tggacatttgggttggttcc

SEQ ID NO: 124773 - DNA, 20 bp, Artificial Sequence
  Description of Artificial Sequence: Synthetic oligonucleotide
  Target: LAMA2; (+) strand; PAM type: NRG; PAM sequence: TAG
caagtctttgctattgtgaa

SEQ ID NO: 124774 - DNA, 20 bp, Artificial Sequence
  Description of Artificial Sequence: Synthetic oligonucleotide
  Target: LAMA2; (+) strand; PAM type: NRG; PAM sequence: CAG
tgctattgtgaatagtgctg

SEQ ID NO: 124775 - DNA, 20 bp, Artificial Sequence
  Description of Artificial Sequence: Synthetic oligonucleotide
  Target: LAMA2; (+) strand; PAM type: NRG; PAM sequence: TAG
tacatgtacatgtgtcttta

SEQ ID NO: 124776 - DNA, 20 bp, Artificial Sequence
  Description of Artificial Sequence: Synthetic oligonucleotide
  Target: LAMA2; (+) strand; PAM type: NRG; PAM sequence: TAG
atgtacatgtgtctttatag

SEQ ID NO: 124777 - DNA, 20 bp, Artificial Sequence
  Description of Artificial Sequence: Synthetic oligonucleotide
  Target: LAMA2; (+) strand; PAM type: NRG; PAM sequence: TGG
tagcatgatttataatcctt

SEQ ID NO: 124778 - DNA, 20 bp, Artificial Sequence
  Description of Artificial Sequence: Synthetic oligonucleotide
  Target: LAMA2; (+) strand; PAM type: NRG; PAM sequence: GGG
agcatgatttataatccttt

SEQ ID NO: 124779 - DNA, 20 bp, Artificial Sequence
  Description of Artificial Sequence: Synthetic oligonucleotide
  Target: LAMA2; (+) strand; PAM type: NRG; PAM sequence: TGG
ttgggtacttaattcttttt

SEQ ID NO: 124780 - DNA, 20 bp, Artificial Sequence
  Description of Artificial Sequence: Synthetic oligonucleotide
  Target: LAMA2; (+) strand; PAM type: NRG; PAM sequence: TAG
tggataatttgttgttaata

SEQ ID NO: 124781 - DNA, 20 bp, Artificial Sequence
  Description of Artificial Sequence: Synthetic oligonucleotide
  Target: LAMA2; (+) strand; PAM type: NRG; PAM sequence: TAG
actttattgaatttctttat

SEQ ID NO: 124782 - DNA, 20 bp, Artificial Sequence
  Description of Artificial Sequence: Synthetic oligonucleotide
  Target: LAMA2; (+) strand; PAM type: NRG; PAM sequence: TAG
atttctttattagcttctaa

SEQ ID NO: 124783 - DNA, 20 bp, Artificial Sequence
  Description of Artificial Sequence: Synthetic oligonucleotide
  Target: LAMA2; (+) strand; PAM type: NRG; PAM sequence: TAG
attagcttctaatagcactt

SEQ ID NO: 124784 - DNA, 20 bp, Artificial Sequence
  Description of Artificial Sequence: Synthetic oligonucleotide
  Target: LAMA2; (+) strand; PAM type: NRG; PAM sequence: TGG
gcttctaatagcactttaga

SEQ ID NO: 124785 - DNA, 20 bp, Artificial Sequence
  Description of Artificial Sequence: Synthetic oligonucleotide
  Target: LAMA2; (+) strand; PAM type: NRG; PAM sequence: GAG
ttctaatagcactttagatg

SEQ ID NO: 124786 - DNA, 20 bp, Artificial Sequence
  Description of Artificial Sequence: Synthetic oligonucleotide
  Target: LAMA2; (+) strand; PAM type: NRG; PAM sequence: TAG
atagcactttagatggagtt

SEQ ID NO: 124787 - DNA, 20 bp, Artificial Sequence
  Description of Artificial Sequence: Synthetic oligonucleotide
  Target: LAMA2; (+) strand; PAM type: NRG; PAM sequence: AGG
tagcactttagatggagttt

SEQ ID NO: 124788 - DNA, 20 bp, Artificial Sequence
  Description of Artificial Sequence: Synthetic oligonucleotide
  Target: LAMA2; (+) strand; PAM type: NRG; PAM sequence: GGG
agcactttagatggagttta

SEQ ID NO: 124789 - DNA, 20 bp, Artificial Sequence
  Description of Artificial Sequence: Synthetic oligonucleotide
  Target: LAMA2; (+) strand; PAM type: NRG; PAM sequence: AAG
gtttagggtttccttcatat

SEQ ID NO: 124790 - DNA, 20 bp, Artificial Sequence
  Description of Artificial Sequence: Synthetic oligonucleotide
  Target: LAMA2; (+) strand; PAM type: NRG; PAM sequence: CAG
aagatcatgtcatctgcaaa

SEQ ID NO: 124791 - DNA, 20 bp, Artificial Sequence
  Description of Artificial Sequence: Synthetic oligonucleotide
  Target: LAMA2; (+) strand; PAM type: NRG; PAM sequence: GAG
gatcatgtcatctgcaaaca

SEQ ID NO: 124792 - DNA, 20 bp, Artificial Sequence
  Description of Artificial Sequence: Synthetic oligonucleotide
  Target: LAMA2; (+) strand; PAM type: NRG; PAM sequence: TAG
taccttcttcctttccaatt

SEQ ID NO: 124793 - DNA, 20 bp, Artificial Sequence
  Description of Artificial Sequence: Synthetic oligonucleotide
  Target: LAMA2; (+) strand; PAM type: NRG; PAM sequence: TAG
tcttgccgaattgctctgac

SEQ ID NO: 124794 - DNA, 20 bp, Artificial Sequence
  Description of Artificial Sequence: Synthetic oligonucleotide
  Target: LAMA2; (+) strand; PAM type: NRG; PAM sequence: AGG
cttgccgaattgctctgact

SEQ ID NO: 124795 - DNA, 20 bp, Artificial Sequence
  Description of Artificial Sequence: Synthetic oligonucleotide
  Target: LAMA2; (+) strand; PAM type: NRG; PAM sequence: TAG
attgctctgactaggactca

SEQ ID NO: 124796 - DNA, 20 bp, Artificial Sequence
  Description of Artificial Sequence: Synthetic oligonucleotide
  Target: LAMA2; (+) strand; PAM type: NRG; PAM sequence: TGG
actcatagtactatgttgat

SEQ ID NO: 124797 - DNA, 20 bp, Artificial Sequence
  Description of Artificial Sequence: Synthetic oligonucleotide
  Target: LAMA2; (+) strand; PAM type: NRG; PAM sequence: GGG
ctcatagtactatgttgatt

SEQ ID NO: 124798 - DNA, 20 bp, Artificial Sequence
  Description of Artificial Sequence: Synthetic oligonucleotide
  Target: LAMA2; (+) strand; PAM type: NRG; PAM sequence: GAG
catagtactatgttgattgg

SEQ ID NO: 124799 - DNA, 20 bp, Artificial Sequence
  Description of Artificial Sequence: Synthetic oligonucleotide
  Target: LAMA2; (+) strand; PAM type: NRG; PAM sequence: TGG
agtactatgttgattgggag

SEQ ID NO: 124800 - DNA, 20 bp, Artificial Sequence
  Description of Artificial Sequence: Synthetic oligonucleotide
  Target: LAMA2; (+) strand; PAM type: NRG; PAM sequence: AAG
ctatgttgattgggagtggt

SEQ ID NO: 124801 - DNA, 20 bp, Artificial Sequence
  Description of Artificial Sequence: Synthetic oligonucleotide
  Target: LAMA2; (+) strand; PAM type: NRG; PAM sequence: TGG
ttgattgggagtggtaagac

SEQ ID NO: 124802 - DNA, 20 bp, Artificial Sequence
  Description of Artificial Sequence: Synthetic oligonucleotide
  Target: LAMA2; (+) strand; PAM type: NRG; PAM sequence: GGG
tgattgggagtggtaagact

SEQ ID NO: 124803 - DNA, 20 bp, Artificial Sequence
  Description of Artificial Sequence: Synthetic oligonucleotide
  Target: LAMA2; (+) strand; PAM type: NRG; PAM sequence: AAG
ggtaagactgggcacctgat

SEQ ID NO: 124804 - DNA, 20 bp, Artificial Sequence
  Description of Artificial Sequence: Synthetic oligonucleotide
  Target: LAMA2; (+) strand; PAM type: NRG; PAM sequence: AGG
gtaagactgggcacctgata

SEQ ID NO: 124805 - DNA, 20 bp, Artificial Sequence
  Description of Artificial Sequence: Synthetic oligonucleotide
  Target: LAMA2; (+) strand; PAM type: NRG; PAM sequence: TAG
gactgggcacctgataaggt

SEQ ID NO: 124806 - DNA, 20 bp, Artificial Sequence
  Description of Artificial Sequence: Synthetic oligonucleotide
  Target: LAMA2; (+) strand; PAM type: NRG; PAM sequence: AGG
actgggcacctgataaggtt

SEQ ID NO: 124807 - DNA, 20 bp, Artificial Sequence
  Description of Artificial Sequence: Synthetic oligonucleotide
  Target: LAMA2; (+) strand; PAM type: NRG; PAM sequence: CAG
ccccacccaaatctcatctt

SEQ ID NO: 124808 - DNA, 20 bp, Artificial Sequence
  Description of Artificial Sequence: Synthetic oligonucleotide
  Target: LAMA2; (+) strand; PAM type: NRG; PAM sequence: AAG
cccataatccccaaatgtca

SEQ ID NO: 124809 - DNA, 20 bp, Artificial Sequence
  Description of Artificial Sequence: Synthetic oligonucleotide
  Target: LAMA2; (+) strand; PAM type: NRG; PAM sequence: AGG
ccataatccccaaatgtcaa

SEQ ID NO: 124810 - DNA, 20 bp, Artificial Sequence
  Description of Artificial Sequence: Synthetic oligonucleotide
  Target: LAMA2; (+) strand; PAM type: NRG; PAM sequence: CAG
ccccaaatgtcaaaggaaac

SEQ ID NO: 124811 - DNA, 20 bp, Artificial Sequence
  Description of Artificial Sequence: Synthetic oligonucleotide
  Target: LAMA2; (+) strand; PAM type: NRG; PAM sequence: AAG
atgtcaaaggaaaccagatg

SEQ ID NO: 124812 - DNA, 20 bp, Artificial Sequence
  Description of Artificial Sequence: Synthetic oligonucleotide
  Target: LAMA2; (+) strand; PAM type: NRG; PAM sequence: AGG
tgtcaaaggaaaccagatga

SEQ ID NO: 124813 - DNA, 20 bp, Artificial Sequence
  Description of Artificial Sequence: Synthetic oligonucleotide
  Target: LAMA2; (+) strand; PAM type: NRG; PAM sequence: TGG
agatgaaggtaattgaatca

SEQ ID NO: 124814 - DNA, 20 bp, Artificial Sequence
  Description of Artificial Sequence: Synthetic oligonucleotide
  Target: LAMA2; (+) strand; PAM type: NRG; PAM sequence: GAG
atgaaggtaattgaatcatg

SEQ ID NO: 124815 - DNA, 20 bp, Artificial Sequence
  Description of Artificial Sequence: Synthetic oligonucleotide
  Target: LAMA2; (+) strand; PAM type: NRG; PAM sequence: AGG
tgaaggtaattgaatcatgg

SEQ ID NO: 124816 - DNA, 20 bp, Artificial Sequence
  Description of Artificial Sequence: Synthetic oligonucleotide
  Target: LAMA2; (+) strand; PAM type: NRG; PAM sequence: CAG
ggtaattgaatcatggaggc

SEQ ID NO: 124817 - DNA, 20 bp, Artificial Sequence
  Description of Artificial Sequence: Synthetic oligonucleotide
  Target: LAMA2; (+) strand; PAM type: NRG; PAM sequence: TAG
ccccgatgcttttcttgtga

SEQ ID NO: 124818 - DNA, 20 bp, Artificial Sequence
  Description of Artificial Sequence: Synthetic oligonucleotide
  Target: LAMA2; (+) strand; PAM type: NRG; PAM sequence: GAG
gatgcttttcttgtgatagt

SEQ ID NO: 124819 - DNA, 20 bp, Artificial Sequence
  Description of Artificial Sequence: Synthetic oligonucleotide
  Target: LAMA2; (+) strand; PAM type: NRG; PAM sequence: GAG
cttttcttgtgatagtgagt

SEQ ID NO: 124820 - DNA, 20 bp, Artificial Sequence
  Description of Artificial Sequence: Synthetic oligonucleotide
  Target: LAMA2; (+) strand; PAM type: NRG; PAM sequence: GAG
gatagtgagtgagttctcat

SEQ ID NO: 124821 - DNA, 20 bp, Artificial Sequence
  Description of Artificial Sequence: Synthetic oligonucleotide
  Target: LAMA2; (+) strand; PAM type: NRG; PAM sequence: TAG
tgagttctcatgagctctga

SEQ ID NO: 124822 - DNA, 20 bp, Artificial Sequence
  Description of Artificial Sequence: Synthetic oligonucleotide
  Target: LAMA2; (+) strand; PAM type: NRG; PAM sequence: AAG
atgagctctgatagttttat

SEQ ID NO: 124823 - DNA, 20 bp, Artificial Sequence
  Description of Artificial Sequence: Synthetic oligonucleotide
  Target: LAMA2; (+) strand; PAM type: NRG; PAM sequence: AGG
tgagctctgatagttttata

SEQ ID NO: 124824 - DNA, 20 bp, Artificial Sequence
  Description of Artificial Sequence: Synthetic oligonucleotide
  Target: LAMA2; (+) strand; PAM type: NRG; PAM sequence: GGG
gagctctgatagttttataa

SEQ ID NO: 124825 - DNA, 20 bp, Artificial Sequence
  Description of Artificial Sequence: Synthetic oligonucleotide
  Target: LAMA2; (+) strand; PAM type: NRG; PAM sequence: GGG
agctctgatagttttataag

SEQ ID NO: 124826 - DNA, 20 bp, Artificial Sequence
  Description of Artificial Sequence: Synthetic oligonucleotide
  Target: LAMA2; (+) strand; PAM type: NRG; PAM sequence: TGG
ggggctcttcccccttcgct

SEQ ID NO: 124827 - DNA, 20 bp, Artificial Sequence
  Description of Artificial Sequence: Synthetic oligonucleotide
  Target: LAMA2; (+) strand; PAM type: NRG; PAM sequence: GAG
tcttcttcctgctgccttgt

SEQ ID NO: 124828 - DNA, 20 bp, Artificial Sequence
  Description of Artificial Sequence: Synthetic oligonucleotide
  Target: LAMA2; (+) strand; PAM type: NRG; PAM sequence: AGG
cttcttcctgctgccttgtg

SEQ ID NO: 124829 - DNA, 20 bp, Artificial Sequence
  Description of Artificial Sequence: Synthetic oligonucleotide
  Target: LAMA2; (+) strand; PAM type: NRG; PAM sequence: AAG
cttcctgctgccttgtgagg

SEQ ID NO: 124830 - DNA, 20 bp, Artificial Sequence
  Description of Artificial Sequence: Synthetic oligonucleotide
  Target: LAMA2; (+) strand; PAM type: NRG; PAM sequence: AGG
ttcctgctgccttgtgagga

SEQ ID NO: 124831 - DNA, 20 bp, Artificial Sequence
  Description of Artificial Sequence: Synthetic oligonucleotide
  Target: LAMA2; (+) strand; PAM type: NRG; PAM sequence: TGG
gaaggtaccttgcttcccct

SEQ ID NO: 124832 - DNA, 20 bp, Artificial Sequence
  Description of Artificial Sequence: Synthetic oligonucleotide
  Target: LAMA2; (+) strand; PAM type: NRG; PAM sequence: CGG
ttccccttggccttctgcca

SEQ ID NO: 124833 - DNA, 20 bp, Artificial Sequence
  Description of Artificial Sequence: Synthetic oligonucleotide
  Target: LAMA2; (+) strand; PAM type: NRG; PAM sequence: AAG
tggccttctgccacggttgt

SEQ ID NO: 124834 - DNA, 20 bp, Artificial Sequence
  Description of Artificial Sequence: Synthetic oligonucleotide
  Target: LAMA2; (+) strand; PAM type: NRG; PAM sequence: GAG
gccacggttgtaagcttcct

SEQ ID NO: 124835 - DNA, 20 bp, Artificial Sequence
  Description of Artificial Sequence: Synthetic oligonucleotide
  Target: LAMA2; (+) strand; PAM type: NRG; PAM sequence: AGG
ccacggttgtaagcttcctg

SEQ ID NO: 124836 - DNA, 20 bp, Artificial Sequence
  Description of Artificial Sequence: Synthetic oligonucleotide
  Target: LAMA2; (+) strand; PAM type: NRG; PAM sequence: CAG
taagcttcctgaggtctccc

SEQ ID NO: 124837 - DNA, 20 bp, Artificial Sequence
  Description of Artificial Sequence: Synthetic oligonucleotide
  Target: LAMA2; (+) strand; PAM type: NRG; PAM sequence: CAG
tttttcctttataaatcacc

SEQ ID NO: 124838 - DNA, 20 bp, Artificial Sequence
  Description of Artificial Sequence: Synthetic oligonucleotide
  Target: LAMA2; (+) strand; PAM type: NRG; PAM sequence: CGG
ctttataaatcacccagttt

SEQ ID NO: 124839 - DNA, 20 bp, Artificial Sequence
  Description of Artificial Sequence: Synthetic oligonucleotide
  Target: LAMA2; (+) strand; PAM type: NRG; PAM sequence: GGG
tttataaatcacccagtttc

SEQ ID NO: 124840 - DNA, 20 bp, Artificial Sequence
  Description of Artificial Sequence: Synthetic oligonucleotide
  Target: LAMA2; (+) strand; PAM type: NRG; PAM sequence: CAG
ataaatcacccagtttcggg

SEQ ID NO: 124841 - DNA, 20 bp, Artificial Sequence
  Description of Artificial Sequence: Synthetic oligonucleotide
  Target: LAMA2; (+) strand; PAM type: NRG; PAM sequence: TAG
cagtttcgggcagttcttta

SEQ ID NO: 124842 - DNA, 20 bp, Artificial Sequence
  Description of Artificial Sequence: Synthetic oligonucleotide
  Target: LAMA2; (+) strand; PAM type: NRG; PAM sequence: CAG
ccttgtgaaaacgactaata

SEQ ID NO: 124843 - DNA, 20 bp, Artificial Sequence
  Description of Artificial Sequence: Synthetic oligonucleotide
  Target: LAMA2; (+) strand; PAM type: NRG; PAM sequence: CAG
ccttatcttattcctaatct

SEQ ID NO: 124844 - DNA, 20 bp, Artificial Sequence
  Description of Artificial Sequence: Synthetic oligonucleotide
  Target: LAMA2; (+) strand; PAM type: NRG; PAM sequence: AAG
tcttattcctaatctcagaa

SEQ ID NO: 124845 - DNA, 20 bp, Artificial Sequence
  Description of Artificial Sequence: Synthetic oligonucleotide
  Target: LAMA2; (+) strand; PAM type: NRG; PAM sequence: CAG
gctttcaacttttcactatt

SEQ ID NO: 124846 - DNA, 20 bp, Artificial Sequence
  Description of Artificial Sequence: Synthetic oligonucleotide
  Target: LAMA2; (+) strand; PAM type: NRG; PAM sequence: CAG
ttcactattcagtatgacat

SEQ ID NO: 124847 - DNA, 20 bp, Artificial Sequence
  Description of Artificial Sequence: Synthetic oligonucleotide
  Target: LAMA2; (+) strand; PAM type: NRG; PAM sequence: TAG
attcagtatgacatcagctg

SEQ ID NO: 124848 - DNA, 20 bp, Artificial Sequence
  Description of Artificial Sequence: Synthetic oligonucleotide
  Target: LAMA2; (+) strand; PAM type: NRG; PAM sequence: CAG
tatatgtcctttattatgtt

SEQ ID NO: 124849 - DNA, 20 bp, Artificial Sequence
  Description of Artificial Sequence: Synthetic oligonucleotide
  Target: LAMA2; (+) strand; PAM type: NRG; PAM sequence: TGG
tttttctatacctaatttgt

SEQ ID NO: 124850 - DNA, 20 bp, Artificial Sequence
  Description of Artificial Sequence: Synthetic oligonucleotide
  Target: LAMA2; (+) strand; PAM type: NRG; PAM sequence: GGG
ttttctatacctaatttgtt

SEQ ID NO: 124851 - DNA, 20 bp, Artificial Sequence
  Description of Artificial Sequence: Synthetic oligonucleotide
  Target: LAMA2; (+) strand; PAM type: NRG; PAM sequence: GAG
ttctatacctaatttgttgg

SEQ ID NO: 124852 - DNA, 20 bp, Artificial Sequence
  Description of Artificial Sequence: Synthetic oligonucleotide
  Target: LAMA2; (+) strand; PAM type: NRG; PAM sequence: CAG
gttgggagcttttatcatga

SEQ ID NO: 124853 - DNA, 20 bp, Artificial Sequence
  Description of Artificial Sequence: Synthetic oligonucleotide
  Target: LAMA2; (+) strand; PAM type: NRG; PAM sequence: AGG
ttgggagcttttatcatgac

SEQ ID NO: 124854 - DNA, 20 bp, Artificial Sequence
  Description of Artificial Sequence: Synthetic oligonucleotide
  Target: LAMA2; (+) strand; PAM type: NRG; PAM sequence: GAG
caaatgctttttctacatct

SEQ ID NO: 124855 - DNA, 20 bp, Artificial Sequence
  Description of Artificial Sequence: Synthetic oligonucleotide
  Target: LAMA2; (+) strand; PAM type: NRG; PAM sequence: AAG
ttttattctttattctgtga

SEQ ID NO: 124856 - DNA, 20 bp, Artificial Sequence
  Description of Artificial Sequence: Synthetic oligonucleotide
  Target: LAMA2; (+) strand; PAM type: NRG; PAM sequence: TGG
tattctttattctgtgaaag

SEQ ID NO: 124857 - DNA, 20 bp, Artificial Sequence
  Description of Artificial Sequence: Synthetic oligonucleotide
  Target: LAMA2; (+) strand; PAM type: NRG; PAM sequence: CAG
tattctgtgaaagtggtata

SEQ ID NO: 124858 - DNA, 20 bp, Artificial Sequence
  Description of Artificial Sequence: Synthetic oligonucleotide
  Target: LAMA2; (+) strand; PAM type: NRG; PAM sequence: TAG
tctgtgaaagtggtatacag

SEQ ID NO: 124859 - DNA, 20 bp, Artificial Sequence
  Description of Artificial Sequence: Synthetic oligonucleotide
  Target: LAMA2; (+) strand; PAM type: NRG; PAM sequence: TGG
cagtagtccccctttatgca

SEQ ID NO: 124860 - DNA, 20 bp, Artificial Sequence
  Description of Artificial Sequence: Synthetic oligonucleotide
  Target: LAMA2; (+) strand; PAM type: NRG; PAM sequence: GGG
agtagtccccctttatgcat

SEQ ID NO: 124861 - DNA, 20 bp, Artificial Sequence
  Description of Artificial Sequence: Synthetic oligonucleotide
  Target: LAMA2; (+) strand; PAM type: NRG; PAM sequence: GGG
gtagtccccctttatgcatg

SEQ ID NO: 124862 - DNA, 20 bp, Artificial Sequence
  Description of Artificial Sequence: Synthetic oligonucleotide
  Target: LAMA2; (+) strand; PAM type: NRG; PAM sequence: GGG
tagtccccctttatgcatgg

SEQ ID NO: 124863 - DNA, 20 bp, Artificial Sequence
  Description of Artificial Sequence: Synthetic oligonucleotide
  Target: LAMA2; (+) strand; PAM type: NRG; PAM sequence: CAG
tatgcatgggggatacattc

SEQ ID NO: 124864 - DNA, 20 bp, Artificial Sequence
  Description of Artificial Sequence: Synthetic oligonucleotide
  Target: LAMA2; (+) strand; PAM type: NRG; PAM sequence: AGG
atgcatgggggatacattcc

SEQ ID NO: 124865 - DNA, 20 bp, Artificial Sequence
  Description of Artificial Sequence: Synthetic oligonucleotide
  Target: LAMA2; (+) strand; PAM type: NRG; PAM sequence: CAG
gggatacattccaggacccc

SEQ ID NO: 124866 - DNA, 20 bp, Artificial Sequence
  Description of Artificial Sequence: Synthetic oligonucleotide
  Target: LAMA2; (+) strand; PAM type: NRG; PAM sequence: GAG
gatacattccaggaccccca

SEQ ID NO: 124867 - DNA, 20 bp, Artificial Sequence
  Description of Artificial Sequence: Synthetic oligonucleotide
  Target: LAMA2; (+) strand; PAM type: NRG; PAM sequence: CAG
ccagagtatgtctgaaactg

SEQ ID NO: 124868 - DNA, 20 bp, Artificial Sequence
  Description of Artificial Sequence: Synthetic oligonucleotide
  Target: LAMA2; (+) strand; PAM type: NRG; PAM sequence: TAG
attgtactgacacctacata

SEQ ID NO: 124869 - DNA, 20 bp, Artificial Sequence
  Description of Artificial Sequence: Synthetic oligonucleotide
  Target: LAMA2; (+) strand; PAM type: NRG; PAM sequence: AAG
ctatgtatatacctatgaaa

SEQ ID NO: 124870 - DNA, 20 bp, Artificial Sequence
  Description of Artificial Sequence: Synthetic oligonucleotide
  Target: LAMA2; (+) strand; PAM type: NRG; PAM sequence: TAG
tgaaaaagtttaatttatgt

SEQ ID NO: 124871 - DNA, 20 bp, Artificial Sequence
  Description of Artificial Sequence: Synthetic oligonucleotide
  Target: LAMA2; (+) strand; PAM type: NRG; PAM sequence: AGG
gaaaaagtttaatttatgtt

SEQ ID NO: 124872 - DNA, 20 bp, Artificial Sequence
  Description of Artificial Sequence: Synthetic oligonucleotide
  Target: LAMA2; (+) strand; PAM type: NRG; PAM sequence: CAG
agtttaatttatgttaggca

SEQ ID NO: 124873 - DNA, 20 bp, Artificial Sequence
  Description of Artificial Sequence: Synthetic oligonucleotide
  Target: LAMA2; (+) strand; PAM type: NRG; PAM sequence: AAG
taatttatgttaggcacagc

SEQ ID NO: 124874 - DNA, 20 bp, Artificial Sequence
  Description of Artificial Sequence: Synthetic oligonucleotide
  Target: LAMA2; (+) strand; PAM type: NRG; PAM sequence: GAG
atttatgttaggcacagcaa

SEQ ID NO: 124875 - DNA, 20 bp, Artificial Sequence
  Description of Artificial Sequence: Synthetic oligonucleotide
  Target: LAMA2; (+) strand; PAM type: NRG; PAM sequence: TAG
cagcaagagattaacaacaa

SEQ ID NO: 124876 - DNA, 20 bp, Artificial Sequence
  Description of Artificial Sequence: Synthetic oligonucleotide
  Target: LAMA2; (+) strand; PAM type: NRG; PAM sequence: GAG
gcaagagattaacaacaata

SEQ ID NO: 124877 - DNA, 20 bp, Artificial Sequence
  Description of Artificial Sequence: Synthetic oligonucleotide
  Target: LAMA2; (+) strand; PAM type: NRG; PAM sequence: AAG
ttataacaatttactataat

SEQ ID NO: 124878 - DNA, 20 bp, Artificial Sequence
  Description of Artificial Sequence: Synthetic oligonucleotide
  Target: LAMA2; (+) strand; PAM type: NRG; PAM sequence: GAG
ataacaatttactataataa

SEQ ID NO: 124879 - DNA, 20 bp, Artificial Sequence
  Description of Artificial Sequence: Synthetic oligonucleotide
  Target: LAMA2; (+) strand; PAM type: NRG; PAM sequence: GAG
ctttctccttgtgatgatgt

SEQ ID NO: 124880 - DNA, 20 bp, Artificial Sequence
  Description of Artificial Sequence: Synthetic oligonucleotide
  Target: LAMA2; (+) strand; PAM type: NRG; PAM sequence: AAG
gtgatgatgtgagatgataa

SEQ ID NO: 124881 - DNA, 20 bp, Artificial Sequence
  Description of Artificial Sequence: Synthetic oligonucleotide
  Target: LAMA2; (+) strand; PAM type: NRG; PAM sequence: AGG
tgatgatgtgagatgataaa

SEQ ID NO: 124882 - DNA, 20 bp, Artificial Sequence
  Description of Artificial Sequence: Synthetic oligonucleotide
  Target: LAMA2; (+) strand; PAM type: NRG; PAM sequence: TAG
tgataaaaggccaccatgat

SEQ ID NO: 124883 - DNA, 20 bp, Artificial Sequence
  Description of Artificial Sequence: Synthetic oligonucleotide
  Target: LAMA2; (+) strand; PAM type: NRG; PAM sequence: TGG
caccatgattagatgaaata

SEQ ID NO: 124884 - DNA, 20 bp, Artificial Sequence
  Description of Artificial Sequence: Synthetic oligonucleotide
  Target: LAMA2; (+) strand; PAM type: NRG; PAM sequence: TAG
atgaaatatggtgaacgaca

SEQ ID NO: 124885 - DNA, 20 bp, Artificial Sequence
  Description of Artificial Sequence: Synthetic oligonucleotide
  Target: LAMA2; (+) strand; PAM type: NRG; PAM sequence: AGG
tgaaatatggtgaacgacat

SEQ ID NO: 124886 - DNA, 20 bp, Artificial Sequence
  Description of Artificial Sequence: Synthetic oligonucleotide
  Target: LAMA2; (+) strand; PAM type: NRG; PAM sequence: AAG
gacataggcattgtaacata

SEQ ID NO: 124887 - DNA, 20 bp, Artificial Sequence
  Description of Artificial Sequence: Synthetic oligonucleotide
  Target: LAMA2; (+) strand; PAM type: NRG; PAM sequence: TAG
taggcattgtaacataaagt

SEQ ID NO: 124888 - DNA, 20 bp, Artificial Sequence
  Description of Artificial Sequence: Synthetic oligonucleotide
  Target: LAMA2; (+) strand; PAM type: NRG; PAM sequence: AGG
aggcattgtaacataaagtt

SEQ ID NO: 124889 - DNA, 20 bp, Artificial Sequence
  Description of Artificial Sequence: Synthetic oligonucleotide
  Target: LAMA2; (+) strand; PAM type: NRG; PAM sequence: CAG
ttgattttctgatgatgcat

SEQ ID NO: 124890 - DNA, 20 bp, Artificial Sequence
  Description of Artificial Sequence: Synthetic oligonucleotide
  Target: LAMA2; (+) strand; PAM type: NRG; PAM sequence: AAG
attttctgatgatgcatcag

SEQ ID NO: 124891 - DNA, 20 bp, Artificial Sequence
  Description of Artificial Sequence: Synthetic oligonucleotide
  Target: LAMA2; (+) strand; PAM type: NRG; PAM sequence: AGG
ttttctgatgatgcatcaga

SEQ ID NO: 124892 - DNA, 20 bp, Artificial Sequence
  Description of Artificial Sequence: Synthetic oligonucleotide
  Target: LAMA2; (+) strand; PAM type: NRG; PAM sequence: AAG
tctgatgatgcatcagaagg

SEQ ID NO: 124893 - DNA, 20 bp, Artificial Sequence
  Description of Artificial Sequence: Synthetic oligonucleotide
  Target: LAMA2; (+) strand; PAM type: NRG; PAM sequence: GAG
gaaggaagaccatctgcttt

SEQ ID NO: 124894 - DNA, 20 bp, Artificial Sequence
  Description of Artificial Sequence: Synthetic oligonucleotide
  Target: LAMA2; (+) strand; PAM type: NRG; PAM sequence: GAG
ttgagcgacccttgattatt

SEQ ID NO: 124895 - DNA, 20 bp, Artificial Sequence
  Description of Artificial Sequence: Synthetic oligonucleotide
  Target: LAMA2; (+) strand; PAM type: NRG; PAM sequence: TGG
ttgagctatgacaatgttga

SEQ ID NO: 124896 - DNA, 20 bp, Artificial Sequence
  Description of Artificial Sequence: Synthetic oligonucleotide
  Target: LAMA2; (+) strand; PAM type: NRG; PAM sequence: TGG
gctatgacaatgttgatggt

SEQ ID NO: 124897 - DNA, 20 bp, Artificial Sequence
  Description of Artificial Sequence: Synthetic oligonucleotide
  Target: LAMA2; (+) strand; PAM type: NRG; PAM sequence: CAG
caatgttgatggttggatgc

SEQ ID NO: 124898 - DNA, 20 bp, Artificial Sequence
  Description of Artificial Sequence: Synthetic oligonucleotide
  Target: LAMA2; (+) strand; PAM type: NRG; PAM sequence: AGG
aatgttgatggttggatgcc

SEQ ID NO: 124899 - DNA, 20 bp, Artificial Sequence
  Description of Artificial Sequence: Synthetic oligonucleotide
  Target: LAMA2; (+) strand; PAM type: NRG; PAM sequence: CAG
catatgatatcaatgtccaa

SEQ ID NO: 124900 - DNA, 20 bp, Artificial Sequence
  Description of Artificial Sequence: Synthetic oligonucleotide
  Target: LAMA2; (+) strand; PAM type: NRG; PAM sequence: AGG
atatgatatcaatgtccaac

SEQ ID NO: 124901 - DNA, 20 bp, Artificial Sequence
  Description of Artificial Sequence: Synthetic oligonucleotide
  Target: LAMA2; (+) strand; PAM type: NRG; PAM sequence: CGG
gatatcaatgtccaacaggt

SEQ ID NO: 124902 - DNA, 20 bp, Artificial Sequence
  Description of Artificial Sequence: Synthetic oligonucleotide
  Target: LAMA2; (+) strand; PAM type: NRG; PAM sequence: CAG
ccaacaggtcggttgtgata

SEQ ID NO: 124903 - DNA, 20 bp, Artificial Sequence
  Description of Artificial Sequence: Synthetic oligonucleotide
  Target: LAMA2; (+) strand; PAM type: NRG; PAM sequence: TGG
aggtcggttgtgatacagtt

SEQ ID NO: 124904 - DNA, 20 bp, Artificial Sequence
  Description of Artificial Sequence: Synthetic oligonucleotide
  Target: LAMA2; (+) strand; PAM type: NRG; PAM sequence: TAG
gtgatacagtttggataccc

SEQ ID NO: 124905 - DNA, 20 bp, Artificial Sequence
  Description of Artificial Sequence: Synthetic oligonucleotide
  Target: LAMA2; (+) strand; PAM type: NRG; PAM sequence: AAG
cagtttggataccctagaaa

SEQ ID NO: 124906 - DNA, 20 bp, Artificial Sequence
  Description of Artificial Sequence: Synthetic oligonucleotide
  Target: LAMA2; (+) strand; PAM type: NRG; PAM sequence: AGG
agtttggataccctagaaaa

SEQ ID NO: 124907 - DNA, 20 bp, Artificial Sequence
  Description of Artificial Sequence: Synthetic oligonucleotide
  Target: LAMA2; (+) strand; PAM type: NRG; PAM sequence: TGG
ggataccctagaaaaaggaa

SEQ ID NO: 124908 - DNA, 20 bp, Artificial Sequence
  Description of Artificial Sequence: Synthetic oligonucleotide
  Target: LAMA2; (+) strand; PAM type: NRG; PAM sequence: TGG
aaaaggaatggttcatctcc

SEQ ID NO: 124909 - DNA, 20 bp, Artificial Sequence
  Description of Artificial Sequence: Synthetic oligonucleotide
  Target: LAMA2; (+) strand; PAM type: NRG; PAM sequence: GGG
aaaggaatggttcatctcct

SEQ ID NO: 124910 - DNA, 20 bp, Artificial Sequence
  Description of Artificial Sequence: Synthetic oligonucleotide
  Target: LAMA2; (+) strand; PAM type: NRG; PAM sequence: TGG
ggaatggttcatctcctggg

SEQ ID NO: 124911 - DNA, 20 bp, Artificial Sequence
  Description of Artificial Sequence: Synthetic oligonucleotide
  Target: LAMA2; (+) strand; PAM type: NRG; PAM sequence: GGG
gaatggttcatctcctgggt

SEQ ID NO: 124912 - DNA, 20 bp, Artificial Sequence
  Description of Artificial Sequence: Synthetic oligonucleotide
  Target: LAMA2; (+) strand; PAM type: NRG; PAM sequence: GAG
atggttcatctcctgggtgg

SEQ ID NO: 124913 - DNA, 20 bp, Artificial Sequence
  Description of Artificial Sequence: Synthetic oligonucleotide
  Target: LAMA2; (+) strand; PAM type: NRG; PAM sequence: AGG
tggttcatctcctgggtggg

SEQ ID NO: 124914 - DNA, 20 bp, Artificial Sequence
  Description of Artificial Sequence: Synthetic oligonucleotide
  Target: LAMA2; (+) strand; PAM type: NRG; PAM sequence: CAG
atctcctgggtgggaggaaa

SEQ ID NO: 124915 - DNA, 20 bp, Artificial Sequence
  Description of Artificial Sequence: Synthetic oligonucleotide
  Target: LAMA2; (+) strand; PAM type: NRG; PAM sequence: AGG
tctcctgggtgggaggaaac

SEQ ID NO: 124916 - DNA, 20 bp, Artificial Sequence
  Description of Artificial Sequence: Synthetic oligonucleotide
  Target: LAMA2; (+) strand; PAM type: NRG; PAM sequence: CAG
ctgggtgggaggaaacagga

SEQ ID NO: 124917 - DNA, 20 bp, Artificial Sequence
  Description of Artificial Sequence: Synthetic oligonucleotide
  Target: LAMA2; (+) strand; PAM type: NRG; PAM sequence: AAG
gggaggaaacaggacagtgt

SEQ ID NO: 124918 - DNA, 20 bp, Artificial Sequence
  Description of Artificial Sequence: Synthetic oligonucleotide
  Target: LAMA2; (+) strand; PAM type: NRG; PAM sequence: CAG
aattttccacttaatatttt

SEQ ID NO: 124919 - DNA, 20 bp, Artificial Sequence
  Description of Artificial Sequence: Synthetic oligonucleotide
  Target: LAMA2; (+) strand; PAM type: NRG; PAM sequence: GAG
aatattttcagaccatgatt

SEQ ID NO: 124920 - DNA, 20 bp, Artificial Sequence
  Description of Artificial Sequence: Synthetic oligonucleotide
  Target: LAMA2; (+) strand; PAM type: NRG; PAM sequence: CAG
tttcagaccatgattgagta

SEQ ID NO: 124921 - DNA, 20 bp, Artificial Sequence
  Description of Artificial Sequence: Synthetic oligonucleotide
  Target: LAMA2; (+) strand; PAM type: NRG; PAM sequence: AGG
ttcagaccatgattgagtac

SEQ ID NO: 124922 - DNA, 20 bp, Artificial Sequence
  Description of Artificial Sequence: Synthetic oligonucleotide
  Target: LAMA2; (+) strand; PAM type: NRG; PAM sequence: TGG
agtacaggtaactgaaacca

SEQ ID NO: 124923 - DNA, 20 bp, Artificial Sequence
  Description of Artificial Sequence: Synthetic oligonucleotide
  Target: LAMA2; (+) strand; PAM type: NRG; PAM sequence: AAG
caggtaactgaaaccatgga

SEQ ID NO: 124924 - DNA, 20 bp, Artificial Sequence
  Description of Artificial Sequence: Synthetic oligonucleotide
  Target: LAMA2; (+) strand; PAM type: NRG; PAM sequence: AAG
aaaccatggaaagtgaaaca

SEQ ID NO: 124925 - DNA, 20 bp, Artificial Sequence
  Description of Artificial Sequence: Synthetic oligonucleotide
  Target: LAMA2; (+) strand; PAM type: NRG; PAM sequence: AAG
tggaaagtgaaacaaagcat

SEQ ID NO: 124926 - DNA, 20 bp, Artificial Sequence
  Description of Artificial Sequence: Synthetic oligonucleotide
  Target: LAMA2; (+) strand; PAM type: NRG; PAM sequence: GAG
aagtgaaacaaagcataagt

SEQ ID NO: 124927 - DNA, 20 bp, Artificial Sequence
  Description of Artificial Sequence: Synthetic oligonucleotide
  Target: LAMA2; (+) strand; PAM type: NRG; PAM sequence: AAG
ttgaattatccatttattcc

SEQ ID NO: 124928 - DNA, 20 bp, Artificial Sequence
  Description of Artificial Sequence: Synthetic oligonucleotide
  Target: LAMA2; (+) strand; PAM type: NRG; PAM sequence: AGG
tgaattatccatttattcca

SEQ ID NO: 124929 - DNA, 20 bp, Artificial Sequence
  Description of Artificial Sequence: Synthetic oligonucleotide
  Target: LAMA2; (+) strand; PAM type: NRG; PAM sequence: TGG
ggataaatccctcttaatca

SEQ ID NO: 124930 - DNA, 20 bp, Artificial Sequence
  Description of Artificial Sequence: Synthetic oligonucleotide
  Target: LAMA2; (+) strand; PAM type: NRG; PAM sequence: TAG
tgccgttgaatttgatttgc

SEQ ID NO: 124931 - DNA, 20 bp, Artificial Sequence
  Description of Artificial Sequence: Synthetic oligonucleotide
  Target: LAMA2; (+) strand; PAM type: NRG; PAM sequence: GAG
tgatttgctagtattttttt

SEQ ID NO: 124932 - DNA, 20 bp, Artificial Sequence
  Description of Artificial Sequence: Synthetic oligonucleotide
  Target: LAMA2; (+) strand; PAM type: NRG; PAM sequence: AGG
gatttgctagtatttttttg

SEQ ID NO: 124933 - DNA, 20 bp, Artificial Sequence
  Description of Artificial Sequence: Synthetic oligonucleotide
  Target: LAMA2; (+) strand; PAM type: NRG; PAM sequence: CAG
atttttatatctgtgttctt

SEQ ID NO: 124934 - DNA, 20 bp, Artificial Sequence
  Description of Artificial Sequence: Synthetic oligonucleotide
  Target: LAMA2; (+) strand; PAM type: NRG; PAM sequence: GAG
ttttatatctgtgttcttca

SEQ ID NO: 124935 - DNA, 20 bp, Artificial Sequence
  Description of Artificial Sequence: Synthetic oligonucleotide
  Target: LAMA2; (+) strand; PAM type: NRG; PAM sequence: TGG
tctgtgttcttcagagatat

SEQ ID NO: 124936 - DNA, 20 bp, Artificial Sequence
  Description of Artificial Sequence: Synthetic oligonucleotide
  Target: LAMA2; (+) strand; PAM type: NRG; PAM sequence: TAG
cctgtaattttctttatttg

SEQ ID NO: 124937 - DNA, 20 bp, Artificial Sequence
  Description of Artificial Sequence: Synthetic oligonucleotide
  Target: LAMA2; (+) strand; PAM type: NRG; PAM sequence: TGG
ttatttgtagtgtccttatc

SEQ ID NO: 124938 - DNA, 20 bp, Artificial Sequence
  Description of Artificial Sequence: Synthetic oligonucleotide
  Target: LAMA2; (+) strand; PAM type: NRG; PAM sequence: GGG
tatttgtagtgtccttatct

SEQ ID NO: 124939 - DNA, 20 bp, Artificial Sequence
  Description of Artificial Sequence: Synthetic oligonucleotide
  Target: LAMA2; (+) strand; PAM type: NRG; PAM sequence: TAG
tgtagtgtccttatctgggt

SEQ ID NO: 124940 - DNA, 20 bp, Artificial Sequence
  Description of Artificial Sequence: Synthetic oligonucleotide
  Target: LAMA2; (+) strand; PAM type: NRG; PAM sequence: TAG
tctgggttagcattgtataa

SEQ ID NO: 124941 - DNA, 20 bp, Artificial Sequence
  Description of Artificial Sequence: Synthetic oligonucleotide
  Target: LAMA2; (+) strand; PAM type: NRG; PAM sequence: GAG
taatagttacctcatataat

SEQ ID NO: 124942 - DNA, 20 bp, Artificial Sequence
  Description of Artificial Sequence: Synthetic oligonucleotide
  Target: LAMA2; (+) strand; PAM type: NRG; PAM sequence: TGG
gttacctcatataatgagat

SEQ ID NO: 124943 - DNA, 20 bp, Artificial Sequence
  Description of Artificial Sequence: Synthetic oligonucleotide
  Target: LAMA2; (+) strand; PAM type: NRG; PAM sequence: AAG
acctcatataatgagattgg

SEQ ID NO: 124944 - DNA, 20 bp, Artificial Sequence
  Description of Artificial Sequence: Synthetic oligonucleotide
  Target: LAMA2; (+) strand; PAM type: NRG; PAM sequence: AAG
agattggaagtgttccctcc

SEQ ID NO: 124945 - DNA, 20 bp, Artificial Sequence
  Description of Artificial Sequence: Synthetic oligonucleotide
  Target: LAMA2; (+) strand; PAM type: NRG; PAM sequence: TGG
aagtgttccctccaagtgtc

SEQ ID NO: 124946 - DNA, 20 bp, Artificial Sequence
  Description of Artificial Sequence: Synthetic oligonucleotide
  Target: LAMA2; (+) strand; PAM type: NRG; PAM sequence: TGG
ggtcttgaacttttctttat

SEQ ID NO: 124947 - DNA, 20 bp, Artificial Sequence
  Description of Artificial Sequence: Synthetic oligonucleotide
  Target: LAMA2; (+) strand; PAM type: NRG; PAM sequence: GGG
gtcttgaacttttctttatt

SEQ ID NO: 124948 - DNA, 20 bp, Artificial Sequence
  Description of Artificial Sequence: Synthetic oligonucleotide
  Target: LAMA2; (+) strand; PAM type: NRG; PAM sequence: GAG
cttgaacttttctttattgg

SEQ ID NO: 124949 - DNA, 20 bp, Artificial Sequence
  Description of Artificial Sequence: Synthetic oligonucleotide
  Target: LAMA2; (+) strand; PAM type: NRG; PAM sequence: CAG
ttattctccttactcattat

SEQ ID NO: 124950 - DNA, 20 bp, Artificial Sequence
  Description of Artificial Sequence: Synthetic oligonucleotide
  Target: LAMA2; (+) strand; PAM type: NRG; PAM sequence: AGG
tattctccttactcattatc

SEQ ID NO: 124951 - DNA, 20 bp, Artificial Sequence
  Description of Artificial Sequence: Synthetic oligonucleotide
  Target: LAMA2; (+) strand; PAM type: NRG; PAM sequence: CAG
actcattacccaaatttgtt

SEQ ID NO: 124952 - DNA, 20 bp, Artificial Sequence
  Description of Artificial Sequence: Synthetic oligonucleotide
  Target: LAMA2; (+) strand; PAM type: NRG; PAM sequence: CAG
ttttctatttcttcatcatt

SEQ ID NO: 124953 - DNA, 20 bp, Artificial Sequence
  Description of Artificial Sequence: Synthetic oligonucleotide
  Target: LAMA2; (+) strand; PAM type: NRG; PAM sequence: TGG
atttcttcatcattcagtct

SEQ ID NO: 124954 - DNA, 20 bp, Artificial Sequence
  Description of Artificial Sequence: Synthetic oligonucleotide
  Target: LAMA2; (+) strand; PAM type: NRG; PAM sequence: TAG
cttggtcgattctatgtgtc

SEQ ID NO: 124955 - DNA, 20 bp, Artificial Sequence
  Description of Artificial Sequence: Synthetic oligonucleotide
  Target: LAMA2; (+) strand; PAM type: NRG; PAM sequence: TAG
tagcctttatcaacttcttg

SEQ ID NO: 124956 - DNA, 20 bp, Artificial Sequence
  Description of Artificial Sequence: Synthetic oligonucleotide
  Target: LAMA2; (+) strand; PAM type: NRG; PAM sequence: AGG
agcctttatcaacttcttgt

SEQ ID NO: 124957 - DNA, 20 bp, Artificial Sequence
  Description of Artificial Sequence: Synthetic oligonucleotide
  Target: LAMA2; (+) strand; PAM type: NRG; PAM sequence: TGG
ttgtaggttattgtatttat

SEQ ID NO: 124958 - DNA, 20 bp, Artificial Sequence
  Description of Artificial Sequence: Synthetic oligonucleotide
  Target: LAMA2; (+) strand; PAM type: NRG; PAM sequence: TAG
tattggtgtataattgttca

SEQ ID NO: 124959 - DNA, 20 bp, Artificial Sequence
  Description of Artificial Sequence: Synthetic oligonucleotide
  Target: LAMA2; (+) strand; PAM type: NRG; PAM sequence: CAG
tggtgtataattgttcatag

SEQ ID NO: 124960 - DNA, 20 bp, Artificial Sequence
  Description of Artificial Sequence: Synthetic oligonucleotide
  Target: LAMA2; (+) strand; PAM type: NRG; PAM sequence: TAG
ctttaatttataattttatt

SEQ ID NO: 124961 - DNA, 20 bp, Artificial Sequence
  Description of Artificial Sequence: Synthetic oligonucleotide
  Target: LAMA2; (+) strand; PAM type: NRG; PAM sequence: TAG
aatcctcattccttttttct

SEQ ID NO: 124962 - DNA, 20 bp, Artificial Sequence
  Description of Artificial Sequence: Synthetic oligonucleotide
  Target: LAMA2; (+) strand; PAM type: NRG; PAM sequence: TGG
tcattccttttttcttagtt

SEQ ID NO: 124963 - DNA, 20 bp, Artificial Sequence
  Description of Artificial Sequence: Synthetic oligonucleotide
  Target: LAMA2; (+) strand; PAM type: NRG; PAM sequence: AAG
cttttttcttagtttggctg

SEQ ID NO: 124964 - DNA, 20 bp, Artificial Sequence
  Description of Artificial Sequence: Synthetic oligonucleotide
  Target: LAMA2; (+) strand; PAM type: NRG; PAM sequence: AGG
ttttttcttagtttggctga

SEQ ID NO: 124965 - DNA, 20 bp, Artificial Sequence
  Description of Artificial Sequence: Synthetic oligonucleotide
  Target: LAMA2; (+) strand; PAM type: NRG; PAM sequence: TAG
gatcttttctattctctttc

SEQ ID NO: 124966 - DNA, 20 bp, Artificial Sequence
  Description of Artificial Sequence: Synthetic oligonucleotide
  Target: LAMA2; (+) strand; PAM type: NRG; PAM sequence: TAG
tcccttttctatctttgtct

SEQ ID NO: 124967 - DNA, 20 bp, Artificial Sequence
  Description of Artificial Sequence: Synthetic oligonucleotide
  Target: LAMA2; (+) strand; PAM type: NRG; PAM sequence: GAG
tttttttttcctatttcctt

SEQ ID NO: 124968 - DNA, 20 bp, Artificial Sequence
  Description of Artificial Sequence: Synthetic oligonucleotide
  Target: LAMA2; (+) strand; PAM type: NRG; PAM sequence: AGG
ttttttttcctatttccttg

SEQ ID NO: 124969 - DNA, 20 bp, Artificial Sequence
  Description of Artificial Sequence: Synthetic oligonucleotide
  Target: LAMA2; (+) strand; PAM type: NRG; PAM sequence: AAG
tcctatttccttgaggtata

SEQ ID NO: 124970 - DNA, 20 bp, Artificial Sequence
  Description of Artificial Sequence: Synthetic oligonucleotide
  Target: LAMA2; (+) strand; PAM type: NRG; PAM sequence: AAG
tttccttgaggtataaagtt

SEQ ID NO: 124971 - DNA, 20 bp, Artificial Sequence
  Description of Artificial Sequence: Synthetic oligonucleotide
  Target: LAMA2; (+) strand; PAM type: NRG; PAM sequence: TAG
taaagttaagttgttcattt

SEQ ID NO: 124972 - DNA, 20 bp, Artificial Sequence
  Description of Artificial Sequence: Synthetic oligonucleotide
  Target: LAMA2; (+) strand; PAM type: NRG; PAM sequence: TAG
ttagatctttttttttaata

SEQ ID NO: 124973 - DNA, 20 bp, Artificial Sequence
  Description of Artificial Sequence: Synthetic oligonucleotide
  Target: LAMA2; (+) strand; PAM type: NRG; PAM sequence: AGG
tagatctttttttttaatat

SEQ ID NO: 124974 - DNA, 20 bp, Artificial Sequence
  Description of Artificial Sequence: Synthetic oligonucleotide
  Target: LAMA2; (+) strand; PAM type: NRG; PAM sequence: TAG
atcaatgtaaacttctctct

SEQ ID NO: 124975 - DNA, 20 bp, Artificial Sequence
  Description of Artificial Sequence: Synthetic oligonucleotide
  Target: LAMA2; (+) strand; PAM type: NRG; PAM sequence: CAG
gaacgtcttttgctgcatcc

SEQ ID NO: 124976 - DNA, 20 bp, Artificial Sequence
  Description of Artificial Sequence: Synthetic oligonucleotide
  Target: LAMA2; (+) strand; PAM type: NRG; PAM sequence: AAG
cgtcttttgctgcatcccag

SEQ ID NO: 124977 - DNA, 20 bp, Artificial Sequence
  Description of Artificial Sequence: Synthetic oligonucleotide
  Target: LAMA2; (+) strand; PAM type: NRG; PAM sequence: TGG
ttgctgcatcccagaagttt

SEQ ID NO: 124978 - DNA, 20 bp, Artificial Sequence
  Description of Artificial Sequence: Synthetic oligonucleotide
  Target: LAMA2; (+) strand; PAM type: NRG; PAM sequence: AAG
ttgttattttcatttgtctc

SEQ ID NO: 124979 - DNA, 20 bp, Artificial Sequence
  Description of Artificial Sequence: Synthetic oligonucleotide
  Target: LAMA2; (+) strand; PAM type: NRG; PAM sequence: TGG
agatacttttgatttctctt

SEQ ID NO: 124980 - DNA, 20 bp, Artificial Sequence
  Description of Artificial Sequence: Synthetic oligonucleotide
  Target: LAMA2; (+) strand; PAM type: NRG; PAM sequence: TGG
ggatttcttctttgacccat

SEQ ID NO: 124981 - DNA, 20 bp, Artificial Sequence
  Description of Artificial Sequence: Synthetic oligonucleotide
  Target: LAMA2; (+) strand; PAM type: NRG; PAM sequence: TGG
ctttgacccattggtcattt

SEQ ID NO: 124982 - DNA, 20 bp, Artificial Sequence
  Description of Artificial Sequence: Synthetic oligonucleotide
  Target: LAMA2; (+) strand; PAM type: NRG; PAM sequence: GAG
ttgacccattggtcattttg

SEQ ID NO: 124983 - DNA, 20 bp, Artificial Sequence
  Description of Artificial Sequence: Synthetic oligonucleotide
  Target: LAMA2; (+) strand; PAM type: NRG; PAM sequence: TGG
tactttccatatatctgtgc

SEQ ID NO: 124984 - DNA, 20 bp, Artificial Sequence
  Description of Artificial Sequence: Synthetic oligonucleotide
  Target: LAMA2; (+) strand; PAM type: NRG; PAM sequence: GGG
actttccatatatctgtgct

SEQ ID NO: 124985 - DNA, 20 bp, Artificial Sequence
  Description of Artificial Sequence: Synthetic oligonucleotide
  Target: LAMA2; (+) strand; PAM type: NRG; PAM sequence: TAG
gattaatatttctgactttt

SEQ ID NO: 124986 - DNA, 20 bp, Artificial Sequence
  Description of Artificial Sequence: Synthetic oligonucleotide
  Target: LAMA2; (+) strand; PAM type: NRG; PAM sequence: CAG
aatatttctgactttttagc

SEQ ID NO: 124987 - DNA, 20 bp, Artificial Sequence
  Description of Artificial Sequence: Synthetic oligonucleotide
  Target: LAMA2; (+) strand; PAM type: NRG; PAM sequence: AGG
atatttctgactttttagcc

SEQ ID NO: 124988 - DNA, 20 bp, Artificial Sequence
  Description of Artificial Sequence: Synthetic oligonucleotide
  Target: LAMA2; (+) strand; PAM type: NRG; PAM sequence: AAG
attacaacttcaccacttac

SEQ ID NO: 124989 - DNA, 20 bp, Artificial Sequence
  Description of Artificial Sequence: Synthetic oligonucleotide
  Target: LAMA2; (+) strand; PAM type: NRG; PAM sequence: AGG
ttacaacttcaccacttaca

SEQ ID NO: 124990 - DNA, 20 bp, Artificial Sequence
  Description of Artificial Sequence: Synthetic oligonucleotide
  Target: LAMA2; (+) strand; PAM type: NRG; PAM sequence: TAG
ttcaccacttacaaggtatt

SEQ ID NO: 124991 - DNA, 20 bp, Artificial Sequence
  Description of Artificial Sequence: Synthetic oligonucleotide
  Target: LAMA2; (+) strand; PAM type: NRG; PAM sequence: TAG
acttacaaggtatttagctt

SEQ ID NO: 124992 - DNA, 20 bp, Artificial Sequence
  Description of Artificial Sequence: Synthetic oligonucleotide
  Target: LAMA2; (+) strand; PAM type: NRG; PAM sequence: AGG
cttacaaggtatttagcttt

SEQ ID NO: 124993 - DNA, 20 bp, Artificial Sequence
  Description of Artificial Sequence: Synthetic oligonucleotide
  Target: LAMA2; (+) strand; PAM type: NRG; PAM sequence: AAG
caaggtatttagctttaggt

SEQ ID NO: 124994 - DNA, 20 bp, Artificial Sequence
  Description of Artificial Sequence: Synthetic oligonucleotide
  Target: LAMA2; (+) strand; PAM type: NRG; PAM sequence: CAG
aggtaagccatttaaactct

SEQ ID NO: 124995 - DNA, 20 bp, Artificial Sequence
  Description of Artificial Sequence: Synthetic oligonucleotide
  Target: LAMA2; (+) strand; PAM type: NRG; PAM sequence: CAG
catttaaactctcagtgcct

SEQ ID NO: 124996 - DNA, 20 bp, Artificial Sequence
  Description of Artificial Sequence: Synthetic oligonucleotide
  Target: LAMA2; (+) strand; PAM type: NRG; PAM sequence: GAG
gtccccttatctgtaaaaat

SEQ ID NO: 124997 - DNA, 20 bp, Artificial Sequence
  Description of Artificial Sequence: Synthetic oligonucleotide
  Target: LAMA2; (+) strand; PAM type: NRG; PAM sequence: CAG
atctgtaaaaatgagtaata

SEQ ID NO: 124998 - DNA, 20 bp, Artificial Sequence
  Description of Artificial Sequence: Synthetic oligonucleotide
  Target: LAMA2; (+) strand; PAM type: NRG; PAM sequence: GAG
gtgatattaataataataat

SEQ ID NO: 124999 - DNA, 20 bp, Artificial Sequence
  Description of Artificial Sequence: Synthetic oligonucleotide
  Target: LAMA2; (+) strand; PAM type: NRG; PAM sequence: GAG
gatattaataataataatga

SEQ ID NO: 125000 - DNA, 20 bp, Artificial Sequence
  Description of Artificial Sequence: Synthetic oligonucleotide
  Target: LAMA2; (+) strand; PAM type: NRG; PAM sequence: AAG
tacctccctgactgattgtg

SEQ ID NO: 125001 - DNA, 20 bp, Artificial Sequence
  Description of Artificial Sequence: Synthetic oligonucleotide
  Target: LAMA2; (+) strand; PAM type: NRG; PAM sequence: TAG
attgtgaagatgaaatgaaa

SEQ ID NO: 125002 - DNA, 20 bp, Artificial Sequence
  Description of Artificial Sequence: Synthetic oligonucleotide
  Target: LAMA2; (+) strand; PAM type: NRG; PAM sequence: CAG
tgaagatgaaatgaaatagt

SEQ ID NO: 125003 - DNA, 20 bp, Artificial Sequence
  Description of Artificial Sequence: Synthetic oligonucleotide
  Target: LAMA2; (+) strand; PAM type: NRG; PAM sequence: TAG
agatgaaatgaaatagtcag

SEQ ID NO: 125004 - DNA, 20 bp, Artificial Sequence
  Description of Artificial Sequence: Synthetic oligonucleotide
  Target: LAMA2; (+) strand; PAM type: NRG; PAM sequence: AAG
gaaatgaaatagtcagtaga

SEQ ID NO: 125005 - DNA, 20 bp, Artificial Sequence
  Description of Artificial Sequence: Synthetic oligonucleotide
  Target: LAMA2; (+) strand; PAM type: NRG; PAM sequence: TAG
atgaaatagtcagtagaaag

SEQ ID NO: 125006 - DNA, 20 bp, Artificial Sequence
  Description of Artificial Sequence: Synthetic oligonucleotide
  Target: LAMA2; (+) strand; PAM type: NRG; PAM sequence: TAG
aatagtcagtagaaagtagt

SEQ ID NO: 125007 - DNA, 20 bp, Artificial Sequence
  Description of Artificial Sequence: Synthetic oligonucleotide
  Target: LAMA2; (+) strand; PAM type: NRG; PAM sequence: TAG
tcagtagaaagtagttagaa

SEQ ID NO: 125008 - DNA, 20 bp, Artificial Sequence
  Description of Artificial Sequence: Synthetic oligonucleotide
  Target: LAMA2; (+) strand; PAM type: NRG; PAM sequence: CAG
aaagtagttagaatagttca

SEQ ID NO: 125009 - DNA, 20 bp, Artificial Sequence
  Description of Artificial Sequence: Synthetic oligonucleotide
  Target: LAMA2; (+) strand; PAM type: NRG; PAM sequence: CAG
ttagaatagttcacagcata

SEQ ID NO: 125010 - DNA, 20 bp, Artificial Sequence
  Description of Artificial Sequence: Synthetic oligonucleotide
  Target: LAMA2; (+) strand; PAM type: NRG; PAM sequence: GAG
atgattaactaatgttttat

SEQ ID NO: 125011 - DNA, 20 bp, Artificial Sequence
  Description of Artificial Sequence: Synthetic oligonucleotide
  Target: LAMA2; (+) strand; PAM type: NRG; PAM sequence: AGG
tgattaactaatgttttatg

SEQ ID NO: 125012 - DNA, 20 bp, Artificial Sequence
  Description of Artificial Sequence: Synthetic oligonucleotide
  Target: LAMA2; (+) strand; PAM type: NRG; PAM sequence: TAG
ctaatgttttatgaggtcct

SEQ ID NO: 125013 - DNA, 20 bp, Artificial Sequence
  Description of Artificial Sequence: Synthetic oligonucleotide
  Target: LAMA2; (+) strand; PAM type: NRG; PAM sequence: GAG
aatgttttatgaggtcctta

SEQ ID NO: 125014 - DNA, 20 bp, Artificial Sequence
  Description of Artificial Sequence: Synthetic oligonucleotide
  Target: LAMA2; (+) strand; PAM type: NRG; PAM sequence: TAG
ttatgaggtccttagagtgc

SEQ ID NO: 125015 - DNA, 20 bp, Artificial Sequence
  Description of Artificial Sequence: Synthetic oligonucleotide
  Target: LAMA2; (+) strand; PAM type: NRG; PAM sequence: AAG
ctcaccacaaccttataaaa

SEQ ID NO: 125016 - DNA, 20 bp, Artificial Sequence
  Description of Artificial Sequence: Synthetic oligonucleotide
  Target: LAMA2; (+) strand; PAM type: NRG; PAM sequence: TAG
gtttttattgtccgatgttt

SEQ ID NO: 125017 - DNA, 20 bp, Artificial Sequence
  Description of Artificial Sequence: Synthetic oligonucleotide
  Target: LAMA2; (+) strand; PAM type: NRG; PAM sequence: CGG
ttattgtccgatgttttaga

SEQ ID NO: 125018 - DNA, 20 bp, Artificial Sequence
  Description of Artificial Sequence: Synthetic oligonucleotide
  Target: LAMA2; (+) strand; PAM type: NRG; PAM sequence: TAG
gtccgatgttttagacggcg

SEQ ID NO: 125019 - DNA, 20 bp, Artificial Sequence
  Description of Artificial Sequence: Synthetic oligonucleotide
  Target: LAMA2; (+) strand; PAM type: NRG; PAM sequence: TAG
tgttttagacggcgtagtta

SEQ ID NO: 125020 - DNA, 20 bp, Artificial Sequence
  Description of Artificial Sequence: Synthetic oligonucleotide
  Target: LAMA2; (+) strand; PAM type: NRG; PAM sequence: AGG
gttttagacggcgtagttat

SEQ ID NO: 125021 - DNA, 20 bp, Artificial Sequence
  Description of Artificial Sequence: Synthetic oligonucleotide
  Target: LAMA2; (+) strand; PAM type: NRG; PAM sequence: GAG
tttagacggcgtagttatag

SEQ ID NO: 125022 - DNA, 20 bp, Artificial Sequence
  Description of Artificial Sequence: Synthetic oligonucleotide
  Target: LAMA2; (+) strand; PAM type: NRG; PAM sequence: TAG
gacggcgtagttataggagt

SEQ ID NO: 125023 - DNA, 20 bp, Artificial Sequence
  Description of Artificial Sequence: Synthetic oligonucleotide
  Target: LAMA2; (+) strand; PAM type: NRG; PAM sequence: CAG
gtagttataggagttagttt

SEQ ID NO: 125024 - DNA, 20 bp, Artificial Sequence
  Description of Artificial Sequence: Synthetic oligonucleotide
  Target: LAMA2; (+) strand; PAM type: NRG; PAM sequence: CAG
taggagttagtttcagccac

SEQ ID NO: 125025 - DNA, 20 bp, Artificial Sequence
  Description of Artificial Sequence: Synthetic oligonucleotide
  Target: LAMA2; (+) strand; PAM type: NRG; PAM sequence: TAG
tttcagccaccagttgtata

SEQ ID NO: 125026 - DNA, 20 bp, Artificial Sequence
  Description of Artificial Sequence: Synthetic oligonucleotide
  Target: LAMA2; (+) strand; PAM type: NRG; PAM sequence: GAG
tcagccaccagttgtatata

SEQ ID NO: 125027 - DNA, 20 bp, Artificial Sequence
  Description of Artificial Sequence: Synthetic oligonucleotide
  Target: LAMA2; (+) strand; PAM type: NRG; PAM sequence: AAG
gccaccagttgtatatagag

SEQ ID NO: 125028 - DNA, 20 bp, Artificial Sequence
  Description of Artificial Sequence: Synthetic oligonucleotide
  Target: LAMA2; (+) strand; PAM type: NRG; PAM sequence: TAG
gttgtatatagagaagctgc

SEQ ID NO: 125029 - DNA, 20 bp, Artificial Sequence
  Description of Artificial Sequence: Synthetic oligonucleotide
  Target: LAMA2; (+) strand; PAM type: NRG; PAM sequence: AGG
ttgtatatagagaagctgct

SEQ ID NO: 125030 - DNA, 20 bp, Artificial Sequence
  Description of Artificial Sequence: Synthetic oligonucleotide
  Target: LAMA2; (+) strand; PAM type: NRG; PAM sequence: AAG
agaagctgctaggcaaacat

SEQ ID NO: 125031 - DNA, 20 bp, Artificial Sequence
  Description of Artificial Sequence: Synthetic oligonucleotide
  Target: LAMA2; (+) strand; PAM type: NRG; PAM sequence: TAG
acataagatttttttaaatc

SEQ ID NO: 125032 - DNA, 20 bp, Artificial Sequence
  Description of Artificial Sequence: Synthetic oligonucleotide
  Target: LAMA2; (+) strand; PAM type: NRG; PAM sequence: AAG
gatttttttaaatctagcac

SEQ ID NO: 125033 - DNA, 20 bp, Artificial Sequence
  Description of Artificial Sequence: Synthetic oligonucleotide
  Target: LAMA2; (+) strand; PAM type: NRG; PAM sequence: AGG
atttttttaaatctagcaca

SEQ ID NO: 125034 - DNA, 20 bp, Artificial Sequence
  Description of Artificial Sequence: Synthetic oligonucleotide
  Target: LAMA2; (+) strand; PAM type: NRG; PAM sequence: TAG
ttgactatcaattcaatgcc

SEQ ID NO: 125035 - DNA, 20 bp, Artificial Sequence
  Description of Artificial Sequence: Synthetic oligonucleotide
  Target: LAMA2; (+) strand; PAM type: NRG; PAM sequence: AGG
tgactatcaattcaatgcct

SEQ ID NO: 125036 - DNA, 20 bp, Artificial Sequence
  Description of Artificial Sequence: Synthetic oligonucleotide
  Target: LAMA2; (+) strand; PAM type: NRG; PAM sequence: GAG
attcaatgcctaggtcccat

SEQ ID NO: 125037 - DNA, 20 bp, Artificial Sequence
  Description of Artificial Sequence: Synthetic oligonucleotide
  Target: LAMA2; (+) strand; PAM type: NRG; PAM sequence: AGG
ttcaatgcctaggtcccatg

SEQ ID NO: 125038 - DNA, 20 bp, Artificial Sequence
  Description of Artificial Sequence: Synthetic oligonucleotide
  Target: LAMA2; (+) strand; PAM type: NRG; PAM sequence: GGG
tcaatgcctaggtcccatga

SEQ ID NO: 125039 - DNA, 20 bp, Artificial Sequence
  Description of Artificial Sequence: Synthetic oligonucleotide
  Target: LAMA2; (+) strand; PAM type: NRG; PAM sequence: AAG
atgcctaggtcccatgaggg

SEQ ID NO: 125040 - DNA, 20 bp, Artificial Sequence
  Description of Artificial Sequence: Synthetic oligonucleotide
  Target: LAMA2; (+) strand; PAM type: NRG; PAM sequence: AGG
tgcctaggtcccatgaggga

SEQ ID NO: 125041 - DNA, 20 bp, Artificial Sequence
  Description of Artificial Sequence: Synthetic oligonucleotide
  Target: LAMA2; (+) strand; PAM type: NRG; PAM sequence: GGG
gcctaggtcccatgagggaa

SEQ ID NO: 125042 - DNA, 20 bp, Artificial Sequence
  Description of Artificial Sequence: Synthetic oligonucleotide
  Target: LAMA2; (+) strand; PAM type: NRG; PAM sequence: AAG
gtcccatgagggaagggtca

SEQ ID NO: 125043 - DNA, 20 bp, Artificial Sequence
  Description of Artificial Sequence: Synthetic oligonucleotide
  Target: LAMA2; (+) strand; PAM type: NRG; PAM sequence: CAG
tgatgttaaaatgtacttct

SEQ ID NO: 125044 - DNA, 20 bp, Artificial Sequence
  Description of Artificial Sequence: Synthetic oligonucleotide
  Target: LAMA2; (+) strand; PAM type: NRG; PAM sequence: GAG
atgttaaaatgtacttctca

SEQ ID NO: 125045 - DNA, 20 bp, Artificial Sequence
  Description of Artificial Sequence: Synthetic oligonucleotide
  Target: LAMA2; (+) strand; PAM type: NRG; PAM sequence: AGG
tgttaaaatgtacttctcag

SEQ ID NO: 125046 - DNA, 20 bp, Artificial Sequence
  Description of Artificial Sequence: Synthetic oligonucleotide
  Target: LAMA2; (+) strand; PAM type: NRG; PAM sequence: CGG
acttctcagaggatgtcctt

SEQ ID NO: 125047 - DNA, 20 bp, Artificial Sequence
  Description of Artificial Sequence: Synthetic oligonucleotide
  Target: LAMA2; (+) strand; PAM type: NRG; PAM sequence: GAG
ttctcagaggatgtccttcg

SEQ ID NO: 125048 - DNA, 20 bp, Artificial Sequence
  Description of Artificial Sequence: Synthetic oligonucleotide
  Target: LAMA2; (+) strand; PAM type: NRG; PAM sequence: AAG
tcagaggatgtccttcggag

SEQ ID NO: 125049 - DNA, 20 bp, Artificial Sequence
  Description of Artificial Sequence: Synthetic oligonucleotide
  Target: LAMA2; (+) strand; PAM type: NRG; PAM sequence: TGG
atgttttgttaatttttgct

SEQ ID NO: 125050 - DNA, 20 bp, Artificial Sequence
  Description of Artificial Sequence: Synthetic oligonucleotide
  Target: LAMA2; (+) strand; PAM type: NRG; PAM sequence: TAG
tttttgcttggttttgattg

SEQ ID NO: 125051 - DNA, 20 bp, Artificial Sequence
  Description of Artificial Sequence: Synthetic oligonucleotide
  Target: LAMA2; (+) strand; PAM type: NRG; PAM sequence: CAG
ttggttttgattgtagacat

SEQ ID NO: 125052 - DNA, 20 bp, Artificial Sequence
  Description of Artificial Sequence: Synthetic oligonucleotide
  Target: LAMA2; (+) strand; PAM type: NRG; PAM sequence: CAG
tgtagacatcagtttgtaat

SEQ ID NO: 125053 - DNA, 20 bp, Artificial Sequence
  Description of Artificial Sequence: Synthetic oligonucleotide
  Target: LAMA2; (+) strand; PAM type: NRG; PAM sequence: AAG
tcagtttgtaatcagaaatg

SEQ ID NO: 125054 - DNA, 20 bp, Artificial Sequence
  Description of Artificial Sequence: Synthetic oligonucleotide
  Target: LAMA2; (+) strand; PAM type: NRG; PAM sequence: AGG
cagtttgtaatcagaaatga

SEQ ID NO: 125055 - DNA, 20 bp, Artificial Sequence
  Description of Artificial Sequence: Synthetic oligonucleotide
  Target: LAMA2; (+) strand; PAM type: NRG; PAM sequence: GGG
agtttgtaatcagaaatgaa

SEQ ID NO: 125056 - DNA, 20 bp, Artificial Sequence
  Description of Artificial Sequence: Synthetic oligonucleotide
  Target: LAMA2; (+) strand; PAM type: NRG; PAM sequence: AAG
ttgtaatcagaaatgaaggg

SEQ ID NO: 125057 - DNA, 20 bp, Artificial Sequence
  Description of Artificial Sequence: Synthetic oligonucleotide
  Target: LAMA2; (+) strand; PAM type: NRG; PAM sequence: AGG
tgtaatcagaaatgaaggga

SEQ ID NO: 125058 - DNA, 20 bp, Artificial Sequence
  Description of Artificial Sequence: Synthetic oligonucleotide
  Target: LAMA2; (+) strand; PAM type: NRG; PAM sequence: TGG
cagaaatgaagggaaggtcc

SEQ ID NO: 125059 - DNA, 20 bp, Artificial Sequence
  Description of Artificial Sequence: Synthetic oligonucleotide
  Target: LAMA2; (+) strand; PAM type: NRG; PAM sequence: GGG
agaaatgaagggaaggtcct

SEQ ID NO: 125060 - DNA, 20 bp, Artificial Sequence
  Description of Artificial Sequence: Synthetic oligonucleotide
  Target: LAMA2; (+) strand; PAM type: NRG; PAM sequence: GAG
aaatgaagggaaggtcctgg

SEQ ID NO: 125061 - DNA, 20 bp, Artificial Sequence
  Description of Artificial Sequence: Synthetic oligonucleotide
  Target: LAMA2; (+) strand; PAM type: NRG; PAM sequence: AAG
tcctgggagtaccaacattt

SEQ ID NO: 125062 - DNA, 20 bp, Artificial Sequence
  Description of Artificial Sequence: Synthetic oligonucleotide
  Target: LAMA2; (+) strand; PAM type: NRG; PAM sequence: GAG
ctgggagtaccaacatttaa

SEQ ID NO: 125063 - DNA, 20 bp, Artificial Sequence
  Description of Artificial Sequence: Synthetic oligonucleotide
  Target: LAMA2; (+) strand; PAM type: NRG; PAM sequence: AAG
caacatttaagagtgaccaa

SEQ ID NO: 125064 - DNA, 20 bp, Artificial Sequence
  Description of Artificial Sequence: Synthetic oligonucleotide
  Target: LAMA2; (+) strand; PAM type: NRG; PAM sequence: TGG
tttaagagtgaccaaaagaa

SEQ ID NO: 125065 - DNA, 20 bp, Artificial Sequence
  Description of Artificial Sequence: Synthetic oligonucleotide
  Target: LAMA2; (+) strand; PAM type: NRG; PAM sequence: AAG
aagagtgaccaaaagaatgg

SEQ ID NO: 125066 - DNA, 20 bp, Artificial Sequence
  Description of Artificial Sequence: Synthetic oligonucleotide
  Target: LAMA2; (+) strand; PAM type: NRG; PAM sequence: CAG
gtgaccaaaagaatggaagc

SEQ ID NO: 125067 - DNA, 20 bp, Artificial Sequence
  Description of Artificial Sequence: Synthetic oligonucleotide
  Target: LAMA2; (+) strand; PAM type: NRG; PAM sequence: AAG
aaaagaatggaagccagcaa

SEQ ID NO: 125068 - DNA, 20 bp, Artificial Sequence
  Description of Artificial Sequence: Synthetic oligonucleotide
  Target: LAMA2; (+) strand; PAM type: NRG; PAM sequence: AGG
aaagaatggaagccagcaaa

SEQ ID NO: 125069 - DNA, 20 bp, Artificial Sequence
  Description of Artificial Sequence: Synthetic oligonucleotide
  Target: LAMA2; (+) strand; PAM type: NRG; PAM sequence: GGG
aagaatggaagccagcaaaa

SEQ ID NO: 125070 - DNA, 20 bp, Artificial Sequence
  Description of Artificial Sequence: Synthetic oligonucleotide
  Target: LAMA2; (+) strand; PAM type: NRG; PAM sequence: TAG
atggaagccagcaaaaggga

SEQ ID NO: 125071 - DNA, 20 bp, Artificial Sequence
  Description of Artificial Sequence: Synthetic oligonucleotide
  Target: LAMA2; (+) strand; PAM type: NRG; PAM sequence: TAG
ccaaacctactccatgttga

SEQ ID NO: 125072 - DNA, 20 bp, Artificial Sequence
  Description of Artificial Sequence: Synthetic oligonucleotide
  Target: LAMA2; (+) strand; PAM type: NRG; PAM sequence: TAG
catgttgatagtcttaatct

SEQ ID NO: 125073 - DNA, 20 bp, Artificial Sequence
  Description of Artificial Sequence: Synthetic oligonucleotide
  Target: LAMA2; (+) strand; PAM type: NRG; PAM sequence: CAG
ctgcactgttgttacctctt

SEQ ID NO: 125074 - DNA, 20 bp, Artificial Sequence
  Description of Artificial Sequence: Synthetic oligonucleotide
  Target: LAMA2; (+) strand; PAM type: NRG; PAM sequence: AGG
tgcactgttgttacctcttc

SEQ ID NO: 125075 - DNA, 20 bp, Artificial Sequence
  Description of Artificial Sequence: Synthetic oligonucleotide
  Target: LAMA2; (+) strand; PAM type: NRG; PAM sequence: GGG
gcactgttgttacctcttca

SEQ ID NO: 125076 - DNA, 20 bp, Artificial Sequence
  Description of Artificial Sequence: Synthetic oligonucleotide
  Target: LAMA2; (+) strand; PAM type: NRG; PAM sequence: TAG
aaatttcaatactttccact

SEQ ID NO: 125077 - DNA, 20 bp, Artificial Sequence
  Description of Artificial Sequence: Synthetic oligonucleotide
  Target: LAMA2; (+) strand; PAM type: NRG; PAM sequence: TGG
tctttttgctttctcttatt

SEQ ID NO: 125078 - DNA, 20 bp, Artificial Sequence
  Description of Artificial Sequence: Synthetic oligonucleotide
  Target: LAMA2; (+) strand; PAM type: NRG; PAM sequence: CAG
ttgctttctcttatttggaa

SEQ ID NO: 125079 - DNA, 20 bp, Artificial Sequence
  Description of Artificial Sequence: Synthetic oligonucleotide
  Target: LAMA2; (+) strand; PAM type: NRG; PAM sequence: CAG
tcttatttggaacagttatt

SEQ ID NO: 125080 - DNA, 20 bp, Artificial Sequence
  Description of Artificial Sequence: Synthetic oligonucleotide
  Target: LAMA2; (+) strand; PAM type: NRG; PAM sequence: AAG
acagttattcagcttaccct

SEQ ID NO: 125081 - DNA, 20 bp, Artificial Sequence
  Description of Artificial Sequence: Synthetic oligonucleotide
  Target: LAMA2; (+) strand; PAM type: NRG; PAM sequence: CAG
tattcagcttaccctaagtc

SEQ ID NO: 125082 - DNA, 20 bp, Artificial Sequence
  Description of Artificial Sequence: Synthetic oligonucleotide
  Target: LAMA2; (+) strand; PAM type: NRG; PAM sequence: GAG
ttcagcttaccctaagtcca

SEQ ID NO: 125083 - DNA, 20 bp, Artificial Sequence
  Description of Artificial Sequence: Synthetic oligonucleotide
  Target: LAMA2; (+) strand; PAM type: NRG; PAM sequence: AAG
agtgaatttccaaaaaatca

SEQ ID NO: 125084 - DNA, 20 bp, Artificial Sequence
  Description of Artificial Sequence: Synthetic oligonucleotide
  Target: LAMA2; (+) strand; PAM type: NRG; PAM sequence: AGG
gtgaatttccaaaaaatcaa

SEQ ID NO: 125085 - DNA, 20 bp, Artificial Sequence
  Description of Artificial Sequence: Synthetic oligonucleotide
  Target: LAMA2; (+) strand; PAM type: NRG; PAM sequence: CAG
atttctcttcaattccaact

SEQ ID NO: 125086 - DNA, 20 bp, Artificial Sequence
  Description of Artificial Sequence: Synthetic oligonucleotide
  Target: LAMA2; (+) strand; PAM type: NRG; PAM sequence: AGG
tttctcttcaattccaactc

SEQ ID NO: 125087 - DNA, 20 bp, Artificial Sequence
  Description of Artificial Sequence: Synthetic oligonucleotide
  Target: LAMA2; (+) strand; PAM type: NRG; PAM sequence: TAG
aggttcacacgtttatcacc

SEQ ID NO: 125088 - DNA, 20 bp, Artificial Sequence
  Description of Artificial Sequence: Synthetic oligonucleotide
  Target: LAMA2; (+) strand; PAM type: NRG; PAM sequence: TAG
cacacgtttatcacctagtg

SEQ ID NO: 125089 - DNA, 20 bp, Artificial Sequence
  Description of Artificial Sequence: Synthetic oligonucleotide
  Target: LAMA2; (+) strand; PAM type: NRG; PAM sequence: AAG
acgtttatcacctagtgtag

SEQ ID NO: 125090 - DNA, 20 bp, Artificial Sequence
  Description of Artificial Sequence: Synthetic oligonucleotide
  Target: LAMA2; (+) strand; PAM type: NRG; PAM sequence: AGG
cgtttatcacctagtgtaga

SEQ ID NO: 125091 - DNA, 20 bp, Artificial Sequence
  Description of Artificial Sequence: Synthetic oligonucleotide
  Target: LAMA2; (+) strand; PAM type: NRG; PAM sequence: GGG
gtttatcacctagtgtagaa

SEQ ID NO: 125092 - DNA, 20 bp, Artificial Sequence
  Description of Artificial Sequence: Synthetic oligonucleotide
  Target: LAMA2; (+) strand; PAM type: NRG; PAM sequence: CAG
tgtagaagggctttcctcca

SEQ ID NO: 125093 - DNA, 20 bp, Artificial Sequence
  Description of Artificial Sequence: Synthetic oligonucleotide
  Target: LAMA2; (+) strand; PAM type: NRG; PAM sequence: TGG
ctttcctccacagttttgct

SEQ ID NO: 125094 - DNA, 20 bp, Artificial Sequence
  Description of Artificial Sequence: Synthetic oligonucleotide
  Target: LAMA2; (+) strand; PAM type: NRG; PAM sequence: AAG
caaactccttttcatccttc

SEQ ID NO: 125095 - DNA, 20 bp, Artificial Sequence
  Description of Artificial Sequence: Synthetic oligonucleotide
  Target: LAMA2; (+) strand; PAM type: NRG; PAM sequence: AAG
attgttgccttttcatgaaa

SEQ ID NO: 125096 - DNA, 20 bp, Artificial Sequence
  Description of Artificial Sequence: Synthetic oligonucleotide
  Target: LAMA2; (+) strand; PAM type: NRG; PAM sequence: AGG
ttgttgccttttcatgaaaa

SEQ ID NO: 125097 - DNA, 20 bp, Artificial Sequence
  Description of Artificial Sequence: Synthetic oligonucleotide
  Target: LAMA2; (+) strand; PAM type: NRG; PAM sequence: TAG
ttttgttcttgtgtccatga

SEQ ID NO: 125098 - DNA, 20 bp, Artificial Sequence
  Description of Artificial Sequence: Synthetic oligonucleotide
  Target: LAMA2; (+) strand; PAM type: NRG; PAM sequence: CAG
gactttgtcataatgtatta

SEQ ID NO: 125099 - DNA, 20 bp, Artificial Sequence
  Description of Artificial Sequence: Synthetic oligonucleotide
  Target: LAMA2; (+) strand; PAM type: NRG; PAM sequence: TGG
taatgtattacagtttatcc

SEQ ID NO: 125100 - DNA, 20 bp, Artificial Sequence
  Description of Artificial Sequence: Synthetic oligonucleotide
  Target: LAMA2; (+) strand; PAM type: NRG; PAM sequence: GAG
atgtattacagtttatcctg

SEQ ID NO: 125101 - DNA, 20 bp, Artificial Sequence
  Description of Artificial Sequence: Synthetic oligonucleotide
  Target: LAMA2; (+) strand; PAM type: NRG; PAM sequence: AGG
tgtattacagtttatcctgg

SEQ ID NO: 125102 - DNA, 20 bp, Artificial Sequence
  Description of Artificial Sequence: Synthetic oligonucleotide
  Target: LAMA2; (+) strand; PAM type: NRG; PAM sequence: AAG
ttacagtttatcctggagga

SEQ ID NO: 125103 - DNA, 20 bp, Artificial Sequence
  Description of Artificial Sequence: Synthetic oligonucleotide
  Target: LAMA2; (+) strand; PAM type: NRG; PAM sequence: AAG
atcctggaggaaagcaccac

SEQ ID NO: 125104 - DNA, 20 bp, Artificial Sequence
  Description of Artificial Sequence: Synthetic oligonucleotide
  Target: LAMA2; (+) strand; PAM type: NRG; PAM sequence: AAG
gaggaaagcaccacaagacc

SEQ ID NO: 125105 - DNA, 20 bp, Artificial Sequence
  Description of Artificial Sequence: Synthetic oligonucleotide
  Target: LAMA2; (+) strand; PAM type: NRG; PAM sequence: GAG
ggaaagcaccacaagaccaa

SEQ ID NO: 125106 - DNA, 20 bp, Artificial Sequence
  Description of Artificial Sequence: Synthetic oligonucleotide
  Target: LAMA2; (+) strand; PAM type: NRG; PAM sequence: TAG
tcatcccaatgcttgataca

SEQ ID NO: 125107 - DNA, 20 bp, Artificial Sequence
  Description of Artificial Sequence: Synthetic oligonucleotide
  Target: LAMA2; (+) strand; PAM type: NRG; PAM sequence: TAG
tcccaatgcttgatacatag

SEQ ID NO: 125108 - DNA, 20 bp, Artificial Sequence
  Description of Artificial Sequence: Synthetic oligonucleotide
  Target: LAMA2; (+) strand; PAM type: NRG; PAM sequence: AAG
atacatagtagccatttgat

SEQ ID NO: 125109 - DNA, 20 bp, Artificial Sequence
  Description of Artificial Sequence: Synthetic oligonucleotide
  Target: LAMA2; (+) strand; PAM type: NRG; PAM sequence: AAG
gataagtacatgttgaatga

SEQ ID NO: 125110 - DNA, 20 bp, Artificial Sequence
  Description of Artificial Sequence: Synthetic oligonucleotide
  Target: LAMA2; (+) strand; PAM type: NRG; PAM sequence: TGG
atatataccttcacctgact

SEQ ID NO: 125111 - DNA, 20 bp, Artificial Sequence
  Description of Artificial Sequence: Synthetic oligonucleotide
  Target: LAMA2; (+) strand; PAM type: NRG; PAM sequence: GAG
atataccttcacctgacttg

SEQ ID NO: 125112 - DNA, 20 bp, Artificial Sequence
  Description of Artificial Sequence: Synthetic oligonucleotide
  Target: LAMA2; (+) strand; PAM type: NRG; PAM sequence: AAG
cacctgacttggagtttcat

SEQ ID NO: 125113 - DNA, 20 bp, Artificial Sequence
  Description of Artificial Sequence: Synthetic oligonucleotide
  Target: LAMA2; (+) strand; PAM type: NRG; PAM sequence: AGG
acctgacttggagtttcata

SEQ ID NO: 125114 - DNA, 20 bp, Artificial Sequence
  Description of Artificial Sequence: Synthetic oligonucleotide
  Target: LAMA2; (+) strand; PAM type: NRG; PAM sequence: CAG
gagtttcataaggaatgcaa

SEQ ID NO: 125115 - DNA, 20 bp, Artificial Sequence
  Description of Artificial Sequence: Synthetic oligonucleotide
  Target: LAMA2; (+) strand; PAM type: NRG; PAM sequence: AAG
tactttctttttgcttaaca

SEQ ID NO: 125116 - DNA, 20 bp, Artificial Sequence
  Description of Artificial Sequence: Synthetic oligonucleotide
  Target: LAMA2; (+) strand; PAM type: NRG; PAM sequence: TAG
ttaacaaagtatctgacaca

SEQ ID NO: 125117 - DNA, 20 bp, Artificial Sequence
  Description of Artificial Sequence: Synthetic oligonucleotide
  Target: LAMA2; (+) strand; PAM type: NRG; PAM sequence: AAG
gtatctgacacatagtacaa

SEQ ID NO: 125118 - DNA, 20 bp, Artificial Sequence
  Description of Artificial Sequence: Synthetic oligonucleotide
  Target: LAMA2; (+) strand; PAM type: NRG; PAM sequence: AAG
aagttaaatattataaataa

SEQ ID NO: 125119 - DNA, 20 bp, Artificial Sequence
  Description of Artificial Sequence: Synthetic oligonucleotide
  Target: LAMA2; (+) strand; PAM type: NRG; PAM sequence: CAG
taaataaaagattaattgca

SEQ ID NO: 125120 - DNA, 20 bp, Artificial Sequence
  Description of Artificial Sequence: Synthetic oligonucleotide
  Target: LAMA2; (+) strand; PAM type: NRG; PAM sequence: AAG
taattgcacagatattttta

SEQ ID NO: 125121 - DNA, 20 bp, Artificial Sequence
  Description of Artificial Sequence: Synthetic oligonucleotide
  Target: LAMA2; (+) strand; PAM type: NRG; PAM sequence: AGG
aattgcacagatatttttaa

SEQ ID NO: 125122 - DNA, 20 bp, Artificial Sequence
  Description of Artificial Sequence: Synthetic oligonucleotide
  Target: LAMA2; (+) strand; PAM type: NRG; PAM sequence: GAG
ttgcacagatatttttaaag

SEQ ID NO: 125123 - DNA, 20 bp, Artificial Sequence
  Description of Artificial Sequence: Synthetic oligonucleotide
  Target: LAMA2; (+) strand; PAM type: NRG; PAM sequence: CAG
acagatatttttaaaggaga

SEQ ID NO: 125124 - DNA, 20 bp, Artificial Sequence
  Description of Artificial Sequence: Synthetic oligonucleotide
  Target: LAMA2; (+) strand; PAM type: NRG; PAM sequence: AAG
tatttttaaaggagacagaa

SEQ ID NO: 125125 - DNA, 20 bp, Artificial Sequence
  Description of Artificial Sequence: Synthetic oligonucleotide
  Target: LAMA2; (+) strand; PAM type: NRG; PAM sequence: CAG
acagaaaagatttgaatatc

SEQ ID NO: 125126 - DNA, 20 bp, Artificial Sequence
  Description of Artificial Sequence: Synthetic oligonucleotide
  Target: LAMA2; (+) strand; PAM type: NRG; PAM sequence: AGG
cagaaaagatttgaatatcc

SEQ ID NO: 125127 - DNA, 20 bp, Artificial Sequence
  Description of Artificial Sequence: Synthetic oligonucleotide
  Target: LAMA2; (+) strand; PAM type: NRG; PAM sequence: AAG
ggaattccacccaacgatga

SEQ ID NO: 125128 - DNA, 20 bp, Artificial Sequence
  Description of Artificial Sequence: Synthetic oligonucleotide
  Target: LAMA2; (+) strand; PAM type: NRG; PAM sequence: TAG
acccaacgatgaaagaccta

SEQ ID NO: 125129 - DNA, 20 bp, Artificial Sequence
  Description of Artificial Sequence: Synthetic oligonucleotide
  Target: LAMA2; (+) strand; PAM type: NRG; PAM sequence: AGG
cccaacgatgaaagacctat

SEQ ID NO: 125130 - DNA, 20 bp, Artificial Sequence
  Description of Artificial Sequence: Synthetic oligonucleotide
  Target: LAMA2; (+) strand; PAM type: NRG; PAM sequence: CGG
aacgatgaaagacctatagg

SEQ ID NO: 125131 - DNA, 20 bp, Artificial Sequence
  Description of Artificial Sequence: Synthetic oligonucleotide
  Target: LAMA2; (+) strand; PAM type: NRG; PAM sequence: AAG
aaagacctataggcggttac

SEQ ID NO: 125132 - DNA, 20 bp, Artificial Sequence
  Description of Artificial Sequence: Synthetic oligonucleotide
  Target: LAMA2; (+) strand; PAM type: NRG; PAM sequence: TAG
gacctataggcggttacaag

SEQ ID NO: 125133 - DNA, 20 bp, Artificial Sequence
  Description of Artificial Sequence: Synthetic oligonucleotide
  Target: LAMA2; (+) strand; PAM type: NRG; PAM sequence: AGG
acctataggcggttacaagt

SEQ ID NO: 125134 - DNA, 20 bp, Artificial Sequence
  Description of Artificial Sequence: Synthetic oligonucleotide
  Target: LAMA2; (+) strand; PAM type: NRG; PAM sequence: AAG
ataggcggttacaagtaggt

SEQ ID NO: 125135 - DNA, 20 bp, Artificial Sequence
  Description of Artificial Sequence: Synthetic oligonucleotide
  Target: LAMA2; (+) strand; PAM type: NRG; PAM sequence: CAG
ggcggttacaagtaggtaag

SEQ ID NO: 125136 - DNA, 20 bp, Artificial Sequence
  Description of Artificial Sequence: Synthetic oligonucleotide
  Target: LAMA2; (+) strand; PAM type: NRG; PAM sequence: GAG
cggttacaagtaggtaagca

SEQ ID NO: 125137 - DNA, 20 bp, Artificial Sequence
  Description of Artificial Sequence: Synthetic oligonucleotide
  Target: LAMA2; (+) strand; PAM type: NRG; PAM sequence: TAG
ggtaagcagagtccaaaatg

SEQ ID NO: 125138 - DNA, 20 bp, Artificial Sequence
  Description of Artificial Sequence: Synthetic oligonucleotide
  Target: LAMA2; (+) strand; PAM type: NRG; PAM sequence: AGG
gtaagcagagtccaaaatgt

SEQ ID NO: 125139 - DNA, 20 bp, Artificial Sequence
  Description of Artificial Sequence: Synthetic oligonucleotide
  Target: LAMA2; (+) strand; PAM type: NRG; PAM sequence: GGG
taagcagagtccaaaatgta

SEQ ID NO: 125140 - DNA, 20 bp, Artificial Sequence
  Description of Artificial Sequence: Synthetic oligonucleotide
  Target: LAMA2; (+) strand; PAM type: NRG; PAM sequence: TGG
aaatgtagggtcattttcaa

SEQ ID NO: 125141 - DNA, 20 bp, Artificial Sequence
  Description of Artificial Sequence: Synthetic oligonucleotide
  Target: LAMA2; (+) strand; PAM type: NRG; PAM sequence: CAG
tgtagggtcattttcaatgg

SEQ ID NO: 125142 - DNA, 20 bp, Artificial Sequence
  Description of Artificial Sequence: Synthetic oligonucleotide
  Target: LAMA2; (+) strand; PAM type: NRG; PAM sequence: GAG
tagggtcattttcaatggca

SEQ ID NO: 125143 - DNA, 20 bp, Artificial Sequence
  Description of Artificial Sequence: Synthetic oligonucleotide
  Target: LAMA2; (+) strand; PAM type: NRG; PAM sequence: GAG
gggtcattttcaatggcaga

SEQ ID NO: 125144 - DNA, 20 bp, Artificial Sequence
  Description of Artificial Sequence: Synthetic oligonucleotide
  Target: LAMA2; (+) strand; PAM type: NRG; PAM sequence: AGG
ggtcattttcaatggcagag

SEQ ID NO: 125145 - DNA, 20 bp, Artificial Sequence
  Description of Artificial Sequence: Synthetic oligonucleotide
  Target: LAMA2; (+) strand; PAM type: NRG; PAM sequence: TAG
ttttcaatggcagagaggaa

SEQ ID NO: 125146 - DNA, 20 bp, Artificial Sequence
  Description of Artificial Sequence: Synthetic oligonucleotide
  Target: LAMA2; (+) strand; PAM type: NRG; PAM sequence: AGG
tttcaatggcagagaggaat

SEQ ID NO: 125147 - DNA, 20 bp, Artificial Sequence
  Description of Artificial Sequence: Synthetic oligonucleotide
  Target: LAMA2; (+) strand; PAM type: NRG; PAM sequence: GAG
tcaatggcagagaggaatag

SEQ ID NO: 125148 - DNA, 20 bp, Artificial Sequence
  Description of Artificial Sequence: Synthetic oligonucleotide
  Target: LAMA2; (+) strand; PAM type: NRG; PAM sequence: GAG
aatggcagagaggaatagga

SEQ ID NO: 125149 - DNA, 20 bp, Artificial Sequence
  Description of Artificial Sequence: Synthetic oligonucleotide
  Target: LAMA2; (+) strand; PAM type: NRG; PAM sequence: AAG
agaggaataggagagtcaat

SEQ ID NO: 125150 - DNA, 20 bp, Artificial Sequence
  Description of Artificial Sequence: Synthetic oligonucleotide
  Target: LAMA2; (+) strand; PAM type: NRG; PAM sequence: AAG
ggaataggagagtcaataag

SEQ ID NO: 125151 - DNA, 20 bp, Artificial Sequence
  Description of Artificial Sequence: Synthetic oligonucleotide
  Target: LAMA2; (+) strand; PAM type: NRG; PAM sequence: AAG
tcaataagaagcaaatgctc

SEQ ID NO: 125152 - DNA, 20 bp, Artificial Sequence
  Description of Artificial Sequence: Synthetic oligonucleotide
  Target: LAMA2; (+) strand; PAM type: NRG; PAM sequence: AGG
caataagaagcaaatgctca

SEQ ID NO: 125153 - DNA, 20 bp, Artificial Sequence
  Description of Artificial Sequence: Synthetic oligonucleotide
  Target: LAMA2; (+) strand; PAM type: NRG; PAM sequence: GAG
ataagaagcaaatgctcaag

SEQ ID NO: 125154 - DNA, 20 bp, Artificial Sequence
  Description of Artificial Sequence: Synthetic oligonucleotide
  Target: LAMA2; (+) strand; PAM type: NRG; PAM sequence: GAG
agcaaatgctcaaggagctt

SEQ ID NO: 125155 - DNA, 20 bp, Artificial Sequence
  Description of Artificial Sequence: Synthetic oligonucleotide
  Target: LAMA2; (+) strand; PAM type: NRG; PAM sequence: TAG
aaatgctcaaggagcttgag

SEQ ID NO: 125156 - DNA, 20 bp, Artificial Sequence
  Description of Artificial Sequence: Synthetic oligonucleotide
  Target: LAMA2; (+) strand; PAM type: NRG; PAM sequence: GAG
atgctcaaggagcttgagta

SEQ ID NO: 125157 - DNA, 20 bp, Artificial Sequence
  Description of Artificial Sequence: Synthetic oligonucleotide
  Target: LAMA2; (+) strand; PAM type: NRG; PAM sequence: CGG
tcaaggagcttgagtagaga

SEQ ID NO: 125158 - DNA, 20 bp, Artificial Sequence
  Description of Artificial Sequence: Synthetic oligonucleotide
  Target: LAMA2; (+) strand; PAM type: NRG; PAM sequence: GGG
caaggagcttgagtagagac

SEQ ID NO: 125159 - DNA, 20 bp, Artificial Sequence
  Description of Artificial Sequence: Synthetic oligonucleotide
  Target: LAMA2; (+) strand; PAM type: NRG; PAM sequence: TAG
agcttgagtagagacgggaa

SEQ ID NO: 125160 - DNA, 20 bp, Artificial Sequence
  Description of Artificial Sequence: Synthetic oligonucleotide
  Target: LAMA2; (+) strand; PAM type: NRG; PAM sequence: AGG
gcttgagtagagacgggaat

SEQ ID NO: 125161 - DNA, 20 bp, Artificial Sequence
  Description of Artificial Sequence: Synthetic oligonucleotide
  Target: LAMA2; (+) strand; PAM type: NRG; PAM sequence: TGG
gcatctctttattatcttat

SEQ ID NO: 125162 - DNA, 20 bp, Artificial Sequence
  Description of Artificial Sequence: Synthetic oligonucleotide
  Target: LAMA2; (+) strand; PAM type: NRG; PAM sequence: TAG
tatacttcttgtaaaataat

SEQ ID NO: 125163 - DNA, 20 bp, Artificial Sequence
  Description of Artificial Sequence: Synthetic oligonucleotide
  Target: LAMA2; (+) strand; PAM type: NRG; PAM sequence: AAG
tcttgtaaaataattagctt

SEQ ID NO: 125164 - DNA, 20 bp, Artificial Sequence
  Description of Artificial Sequence: Synthetic oligonucleotide
  Target: LAMA2; (+) strand; PAM type: NRG; PAM sequence: AAG
ttagcttaagctaattatct

SEQ ID NO: 125165 - DNA, 20 bp, Artificial Sequence
  Description of Artificial Sequence: Synthetic oligonucleotide
  Target: LAMA2; (+) strand; PAM type: NRG; PAM sequence: AAG
aagctaattatctaagaaac

SEQ ID NO: 125166 - DNA, 20 bp, Artificial Sequence
  Description of Artificial Sequence: Synthetic oligonucleotide
  Target: LAMA2; (+) strand; PAM type: NRG; PAM sequence: TAG
taagaaacaagaatctctcc

SEQ ID NO: 125167 - DNA, 20 bp, Artificial Sequence
  Description of Artificial Sequence: Synthetic oligonucleotide
  Target: LAMA2; (+) strand; PAM type: NRG; PAM sequence: AGG
aagaaacaagaatctctcct

SEQ ID NO: 125168 - DNA, 20 bp, Artificial Sequence
  Description of Artificial Sequence: Synthetic oligonucleotide
  Target: LAMA2; (+) strand; PAM type: NRG; PAM sequence: CAG
aaacaagaatctctcctagg

SEQ ID NO: 125169 - DNA, 20 bp, Artificial Sequence
  Description of Artificial Sequence: Synthetic oligonucleotide
  Target: LAMA2; (+) strand; PAM type: NRG; PAM sequence: CAG
gaatctctcctaggcagatt

SEQ ID NO: 125170 - DNA, 20 bp, Artificial Sequence
  Description of Artificial Sequence: Synthetic oligonucleotide
  Target: LAMA2; (+) strand; PAM type: NRG; PAM sequence: TGG
gcagattcagttgcctttcc

SEQ ID NO: 125171 - DNA, 20 bp, Artificial Sequence
  Description of Artificial Sequence: Synthetic oligonucleotide
  Target: LAMA2; (+) strand; PAM type: NRG; PAM sequence: GAG
tgcctttcctggttctccct

SEQ ID NO: 125172 - DNA, 20 bp, Artificial Sequence
  Description of Artificial Sequence: Synthetic oligonucleotide
  Target: LAMA2; (+) strand; PAM type: NRG; PAM sequence: GAG
tggttctccctgagtgctct

SEQ ID NO: 125173 - DNA, 20 bp, Artificial Sequence
  Description of Artificial Sequence: Synthetic oligonucleotide
  Target: LAMA2; (+) strand; PAM type: NRG; PAM sequence: AAG
tctccctgagtgctctgagt

SEQ ID NO: 125174 - DNA, 20 bp, Artificial Sequence
  Description of Artificial Sequence: Synthetic oligonucleotide
  Target: LAMA2; (+) strand; PAM type: NRG; PAM sequence: TAG
taagccccaccattgccttc

SEQ ID NO: 125175 - DNA, 20 bp, Artificial Sequence
  Description of Artificial Sequence: Synthetic oligonucleotide
  Target: LAMA2; (+) strand; PAM type: NRG; PAM sequence: CGG
actcccatctgatcccttca

SEQ ID NO: 125176 - DNA, 20 bp, Artificial Sequence
  Description of Artificial Sequence: Synthetic oligonucleotide
  Target: LAMA2; (+) strand; PAM type: NRG; PAM sequence: CAG
tctgatcccttcacggcatc

SEQ ID NO: 125177 - DNA, 20 bp, Artificial Sequence
  Description of Artificial Sequence: Synthetic oligonucleotide
  Target: LAMA2; (+) strand; PAM type: NRG; PAM sequence: AAG
catccagaatgatgatccaa

SEQ ID NO: 125178 - DNA, 20 bp, Artificial Sequence
  Description of Artificial Sequence: Synthetic oligonucleotide
  Target: LAMA2; (+) strand; PAM type: NRG; PAM sequence: TGG
agaatgatgatccaaaagtt

SEQ ID NO: 125179 - DNA, 20 bp, Artificial Sequence
  Description of Artificial Sequence: Synthetic oligonucleotide
  Target: LAMA2; (+) strand; PAM type: NRG; PAM sequence: GGG
gaatgatgatccaaaagttt

SEQ ID NO: 125180 - DNA, 20 bp, Artificial Sequence
  Description of Artificial Sequence: Synthetic oligonucleotide
  Target: LAMA2; (+) strand; PAM type: NRG; PAM sequence: AAG
tgggtccaaatgtgatgcaa

SEQ ID NO: 125181 - DNA, 20 bp, Artificial Sequence
  Description of Artificial Sequence: Synthetic oligonucleotide
  Target: LAMA2; (+) strand; PAM type: NRG; PAM sequence: CAG
aaatgtgatgcaaaagttta

SEQ ID NO: 125182 - DNA, 20 bp, Artificial Sequence
  Description of Artificial Sequence: Synthetic oligonucleotide
  Target: LAMA2; (+) strand; PAM type: NRG; PAM sequence: TGG
tgtgatgcaaaagtttacag

SEQ ID NO: 125183 - DNA, 20 bp, Artificial Sequence
  Description of Artificial Sequence: Synthetic oligonucleotide
  Target: LAMA2; (+) strand; PAM type: NRG; PAM sequence: TGG
aagtttacagtggtctacca

SEQ ID NO: 125184 - DNA, 20 bp, Artificial Sequence
  Description of Artificial Sequence: Synthetic oligonucleotide
  Target: LAMA2; (+) strand; PAM type: NRG; PAM sequence: AAG
ccatggttcctttacaaaaa

SEQ ID NO: 125185 - DNA, 20 bp, Artificial Sequence
  Description of Artificial Sequence: Synthetic oligonucleotide
  Target: LAMA2; (+) strand; PAM type: NRG; PAM sequence: CAG
tgctcatcatgattttgcct

SEQ ID NO: 125186 - DNA, 20 bp, Artificial Sequence
  Description of Artificial Sequence: Synthetic oligonucleotide
  Target: LAMA2; (+) strand; PAM type: NRG; PAM sequence: AAG
tgattttgcctcagtttttc

SEQ ID NO: 125187 - DNA, 20 bp, Artificial Sequence
  Description of Artificial Sequence: Synthetic oligonucleotide
  Target: LAMA2; (+) strand; PAM type: NRG; PAM sequence: TGG
aagttatgttttgttcataa

SEQ ID NO: 125188 - DNA, 20 bp, Artificial Sequence
  Description of Artificial Sequence: Synthetic oligonucleotide
  Target: LAMA2; (+) strand; PAM type: NRG; PAM sequence: AAG
gttccttctactgccttaaa

SEQ ID NO: 125189 - DNA, 20 bp, Artificial Sequence
  Description of Artificial Sequence: Synthetic oligonucleotide
  Target: LAMA2; (+) strand; PAM type: NRG; PAM sequence: GAG
cttaaaaagccctcatcact

SEQ ID NO: 125190 - DNA, 20 bp, Artificial Sequence
  Description of Artificial Sequence: Synthetic oligonucleotide
  Target: LAMA2; (+) strand; PAM type: NRG; PAM sequence: AAG
ctactgaattttcaaactgc

SEQ ID NO: 125191 - DNA, 20 bp, Artificial Sequence
  Description of Artificial Sequence: Synthetic oligonucleotide
  Target: LAMA2; (+) strand; PAM type: NRG; PAM sequence: TAG
caagtcaaatattacttcct

SEQ ID NO: 125192 - DNA, 20 bp, Artificial Sequence
  Description of Artificial Sequence: Synthetic oligonucleotide
  Target: LAMA2; (+) strand; PAM type: NRG; PAM sequence: AGG
aagtcaaatattacttcctt

SEQ ID NO: 125193 - DNA, 20 bp, Artificial Sequence
  Description of Artificial Sequence: Synthetic oligonucleotide
  Target: LAMA2; (+) strand; PAM type: NRG; PAM sequence: GGG
agtcaaatattacttcctta

SEQ ID NO: 125194 - DNA, 20 bp, Artificial Sequence
  Description of Artificial Sequence: Synthetic oligonucleotide
  Target: LAMA2; (+) strand; PAM type: NRG; PAM sequence: GGG
gtcaaatattacttccttag

SEQ ID NO: 125195 - DNA, 20 bp, Artificial Sequence
  Description of Artificial Sequence: Synthetic oligonucleotide
  Target: LAMA2; (+) strand; PAM type: NRG; PAM sequence: CAG
cttccttaggggaatctcat

SEQ ID NO: 125196 - DNA, 20 bp, Artificial Sequence
  Description of Artificial Sequence: Synthetic oligonucleotide
  Target: LAMA2; (+) strand; PAM type: NRG; PAM sequence: TAG
atctcatcagactgtctccc

SEQ ID NO: 125197 - DNA, 20 bp, Artificial Sequence
  Description of Artificial Sequence: Synthetic oligonucleotide
  Target: LAMA2; (+) strand; PAM type: NRG; PAM sequence: TAG
accacaccccacccaacaac

SEQ ID NO: 125198 - DNA, 20 bp, Artificial Sequence
  Description of Artificial Sequence: Synthetic oligonucleotide
  Target: LAMA2; (+) strand; PAM type: NRG; PAM sequence: TAG
actagatcacatccctttat

SEQ ID NO: 125199 - DNA, 20 bp, Artificial Sequence
  Description of Artificial Sequence: Synthetic oligonucleotide
  Target: LAMA2; (+) strand; PAM type: NRG; PAM sequence: AGG
ctagatcacatccctttatt

SEQ ID NO: 125200 - DNA, 20 bp, Artificial Sequence
  Description of Artificial Sequence: Synthetic oligonucleotide
  Target: LAMA2; (+) strand; PAM type: NRG; PAM sequence: GGG
tagatcacatccctttatta

SEQ ID NO: 125201 - DNA, 20 bp, Artificial Sequence
  Description of Artificial Sequence: Synthetic oligonucleotide
  Target: LAMA2; (+) strand; PAM type: NRG; PAM sequence: GGG
agatcacatccctttattag

SEQ ID NO: 125202 - DNA, 20 bp, Artificial Sequence
  Description of Artificial Sequence: Synthetic oligonucleotide
  Target: LAMA2; (+) strand; PAM type: NRG; PAM sequence: CAG
tattaggggtactatgtttt

SEQ ID NO: 125203 - DNA, 20 bp, Artificial Sequence
  Description of Artificial Sequence: Synthetic oligonucleotide
  Target: LAMA2; (+) strand; PAM type: NRG; PAM sequence: GAG
taattattgacccattgaat

SEQ ID NO: 125204 - DNA, 20 bp, Artificial Sequence
  Description of Artificial Sequence: Synthetic oligonucleotide
  Target: LAMA2; (+) strand; PAM type: NRG; PAM sequence: AAG
gtcccttccttctttattat

SEQ ID NO: 125205 - DNA, 20 bp, Artificial Sequence
  Description of Artificial Sequence: Synthetic oligonucleotide
  Target: LAMA2; (+) strand; PAM type: NRG; PAM sequence: AAG
ccttctttattataagcttt

SEQ ID NO: 125206 - DNA, 20 bp, Artificial Sequence
  Description of Artificial Sequence: Synthetic oligonucleotide
  Target: LAMA2; (+) strand; PAM type: NRG; PAM sequence: GAG
ttctttattataagctttaa

SEQ ID NO: 125207 - DNA, 20 bp, Artificial Sequence
  Description of Artificial Sequence: Synthetic oligonucleotide
  Target: LAMA2; (+) strand; PAM type: NRG; PAM sequence: AGG
tctttattataagctttaag

SEQ ID NO: 125208 - DNA, 20 bp, Artificial Sequence
  Description of Artificial Sequence: Synthetic oligonucleotide
  Target: LAMA2; (+) strand; PAM type: NRG; PAM sequence: GGG
ctttattataagctttaaga

SEQ ID NO: 125209 - DNA, 20 bp, Artificial Sequence
  Description of Artificial Sequence: Synthetic oligonucleotide
  Target: LAMA2; (+) strand; PAM type: NRG; PAM sequence: TAG
tcttaccatctttccctctt

SEQ ID NO: 125210 - DNA, 20 bp, Artificial Sequence
  Description of Artificial Sequence: Synthetic oligonucleotide
  Target: LAMA2; (+) strand; PAM type: NRG; PAM sequence: TGG
tttagtgcttccacattgtc

SEQ ID NO: 125211 - DNA, 20 bp, Artificial Sequence
  Description of Artificial Sequence: Synthetic oligonucleotide
  Target: LAMA2; (+) strand; PAM type: NRG; PAM sequence: CAG
ccacattgtctggtacattg

SEQ ID NO: 125212 - DNA, 20 bp, Artificial Sequence
  Description of Artificial Sequence: Synthetic oligonucleotide
  Target: LAMA2; (+) strand; PAM type: NRG; PAM sequence: CGG
gacatctaataaatatttgt

SEQ ID NO: 125213 - DNA, 20 bp, Artificial Sequence
  Description of Artificial Sequence: Synthetic oligonucleotide
  Target: LAMA2; (+) strand; PAM type: NRG; PAM sequence: AAG
atctaataaatatttgtcgg

SEQ ID NO: 125214 - DNA, 20 bp, Artificial Sequence
  Description of Artificial Sequence: Synthetic oligonucleotide
  Target: LAMA2; (+) strand; PAM type: NRG; PAM sequence: AGG
tctaataaatatttgtcgga

SEQ ID NO: 125215 - DNA, 20 bp, Artificial Sequence
  Description of Artificial Sequence: Synthetic oligonucleotide
  Target: LAMA2; (+) strand; PAM type: NRG; PAM sequence: TAG
ttgtcggaaggaataaatat

SEQ ID NO: 125216 - DNA, 20 bp, Artificial Sequence
  Description of Artificial Sequence: Synthetic oligonucleotide
  Target: LAMA2; (+) strand; PAM type: NRG; PAM sequence: GAG
cggaaggaataaatattagt

SEQ ID NO: 125217 - DNA, 20 bp, Artificial Sequence
  Description of Artificial Sequence: Synthetic oligonucleotide
  Target: LAMA2; (+) strand; PAM type: NRG; PAM sequence: GAG
gaaggaataaatattagtga

SEQ ID NO: 125218 - DNA, 20 bp, Artificial Sequence
  Description of Artificial Sequence: Synthetic oligonucleotide
  Target: LAMA2; (+) strand; PAM type: NRG; PAM sequence: TGG
aatattagtgagagaataaa

SEQ ID NO: 125219 - DNA, 20 bp, Artificial Sequence
  Description of Artificial Sequence: Synthetic oligonucleotide
  Target: LAMA2; (+) strand; PAM type: NRG; PAM sequence: GGG
atattagtgagagaataaat

SEQ ID NO: 125220 - DNA, 20 bp, Artificial Sequence
  Description of Artificial Sequence: Synthetic oligonucleotide
  Target: LAMA2; (+) strand; PAM type: NRG; PAM sequence: GAG
taaatgggtaatgcattcat

SEQ ID NO: 125221 - DNA, 20 bp, Artificial Sequence
  Description of Artificial Sequence: Synthetic oligonucleotide
  Target: LAMA2; (+) strand; PAM type: NRG; PAM sequence: AAG
aatgcattcatgagtgaata

SEQ ID NO: 125222 - DNA, 20 bp, Artificial Sequence
  Description of Artificial Sequence: Synthetic oligonucleotide
  Target: LAMA2; (+) strand; PAM type: NRG; PAM sequence: TGG
aagattatatcatatttttg

SEQ ID NO: 125223 - DNA, 20 bp, Artificial Sequence
  Description of Artificial Sequence: Synthetic oligonucleotide
  Target: LAMA2; (+) strand; PAM type: NRG; PAM sequence: AAG
taccttcaatgactgaaaca

SEQ ID NO: 125224 - DNA, 20 bp, Artificial Sequence
  Description of Artificial Sequence: Synthetic oligonucleotide
  Target: LAMA2; (+) strand; PAM type: NRG; PAM sequence: GAG
ccttcaatgactgaaacaaa

SEQ ID NO: 125225 - DNA, 20 bp, Artificial Sequence
  Description of Artificial Sequence: Synthetic oligonucleotide
  Target: LAMA2; (+) strand; PAM type: NRG; PAM sequence: AAG
tatcctgaaatatgacctga

SEQ ID NO: 125226 - DNA, 20 bp, Artificial Sequence
  Description of Artificial Sequence: Synthetic oligonucleotide
  Target: LAMA2; (+) strand; PAM type: NRG; PAM sequence: TGG
gaaatatgacctgaaagcca

SEQ ID NO: 125227 - DNA, 20 bp, Artificial Sequence
  Description of Artificial Sequence: Synthetic oligonucleotide
  Target: LAMA2; (+) strand; PAM type: NRG; PAM sequence: AAG
acctgaaagccatggaatga

SEQ ID NO: 125228 - DNA, 20 bp, Artificial Sequence
  Description of Artificial Sequence: Synthetic oligonucleotide
  Target: LAMA2; (+) strand; PAM type: NRG; PAM sequence: AGG
cctgaaagccatggaatgaa

SEQ ID NO: 125229 - DNA, 20 bp, Artificial Sequence
  Description of Artificial Sequence: Synthetic oligonucleotide
  Target: LAMA2; (+) strand; PAM type: NRG; PAM sequence: AAG
atggaatgaaaggtttgata

SEQ ID NO: 125230 - DNA, 20 bp, Artificial Sequence
  Description of Artificial Sequence: Synthetic oligonucleotide
  Target: LAMA2; (+) strand; PAM type: NRG; PAM sequence: TGG
aatgaaaggtttgataaagc

SEQ ID NO: 125231 - DNA, 20 bp, Artificial Sequence
  Description of Artificial Sequence: Synthetic oligonucleotide
  Target: LAMA2; (+) strand; PAM type: NRG; PAM sequence: TGG
aggtttgataaagctggacg

SEQ ID NO: 125232 - DNA, 20 bp, Artificial Sequence
  Description of Artificial Sequence: Synthetic oligonucleotide
  Target: LAMA2; (+) strand; PAM type: NRG; PAM sequence: TAG
tttgataaagctggacgtgg

SEQ ID NO: 125233 - DNA, 20 bp, Artificial Sequence
  Description of Artificial Sequence: Synthetic oligonucleotide
  Target: LAMA2; (+) strand; PAM type: NRG; PAM sequence: CAG
gtagctcacacctgtgatcc

SEQ ID NO: 125234 - DNA, 20 bp, Artificial Sequence
  Description of Artificial Sequence: Synthetic oligonucleotide
  Target: LAMA2; (+) strand; PAM type: NRG; PAM sequence: TAG
acctgtgatcccagcatttc

SEQ ID NO: 125235 - DNA, 20 bp, Artificial Sequence
  Description of Artificial Sequence: Synthetic oligonucleotide
  Target: LAMA2; (+) strand; PAM type: NRG; PAM sequence: GAG
ctgtgatcccagcatttcta

SEQ ID NO: 125236 - DNA, 20 bp, Artificial Sequence
  Description of Artificial Sequence: Synthetic oligonucleotide
  Target: LAMA2; (+) strand; PAM type: NRG; PAM sequence: CAG
atcccagcatttctagagac

SEQ ID NO: 125237 - DNA, 20 bp, Artificial Sequence
  Description of Artificial Sequence: Synthetic oligonucleotide
  Target: LAMA2; (+) strand; PAM type: NRG; PAM sequence: AGG
tcccagcatttctagagacc

SEQ ID NO: 125238 - DNA, 20 bp, Artificial Sequence
  Description of Artificial Sequence: Synthetic oligonucleotide
  Target: LAMA2; (+) strand; PAM type: NRG; PAM sequence: GGG
cccagcatttctagagacca

SEQ ID NO: 125239 - DNA, 20 bp, Artificial Sequence
  Description of Artificial Sequence: Synthetic oligonucleotide
  Target: LAMA2; (+) strand; PAM type: NRG; PAM sequence: GAG
gcatttctagagaccagggt

SEQ ID NO: 125240 - DNA, 20 bp, Artificial Sequence
  Description of Artificial Sequence: Synthetic oligonucleotide
  Target: LAMA2; (+) strand; PAM type: NRG; PAM sequence: GAG
atttctagagaccagggtga

SEQ ID NO: 125241 - DNA, 20 bp, Artificial Sequence
  Description of Artificial Sequence: Synthetic oligonucleotide
  Target: LAMA2; (+) strand; PAM type: NRG; PAM sequence: GAG
ccagggtgagagaatcgctt

SEQ ID NO: 125242 - DNA, 20 bp, Artificial Sequence
  Description of Artificial Sequence: Synthetic oligonucleotide
  Target: LAMA2; (+) strand; PAM type: NRG; PAM sequence: CAG
gtgagagaatcgcttgagct

SEQ ID NO: 125243 - DNA, 20 bp, Artificial Sequence
  Description of Artificial Sequence: Synthetic oligonucleotide
  Target: LAMA2; (+) strand; PAM type: NRG; PAM sequence: AAG
agagaatcgcttgagctcag

SEQ ID NO: 125244 - DNA, 20 bp, Artificial Sequence
  Description of Artificial Sequence: Synthetic oligonucleotide
  Target: LAMA2; (+) strand; PAM type: NRG; PAM sequence: AAG
tcgcttgagctcagaagttc

SEQ ID NO: 125245 - DNA, 20 bp, Artificial Sequence
  Description of Artificial Sequence: Synthetic oligonucleotide
  Target: LAMA2; (+) strand; PAM type: NRG; PAM sequence: AGG
cgcttgagctcagaagttca

SEQ ID NO: 125246 - DNA, 20 bp, Artificial Sequence
  Description of Artificial Sequence: Synthetic oligonucleotide
  Target: LAMA2; (+) strand; PAM type: NRG; PAM sequence: CAG
tgagctcagaagttcaaggc

SEQ ID NO: 125247 - DNA, 20 bp, Artificial Sequence
  Description of Artificial Sequence: Synthetic oligonucleotide
  Target: LAMA2; (+) strand; PAM type: NRG; PAM sequence: TGG
tcagaagttcaaggccagcc

SEQ ID NO: 125248 - DNA, 20 bp, Artificial Sequence
  Description of Artificial Sequence: Synthetic oligonucleotide
  Target: LAMA2; (+) strand; PAM type: NRG; PAM sequence: GGG
cagaagttcaaggccagcct

SEQ ID NO: 125249 - DNA, 20 bp, Artificial Sequence
  Description of Artificial Sequence: Synthetic oligonucleotide
  Target: LAMA2; (+) strand; PAM type: NRG; PAM sequence: TAG
aagttcaaggccagcctggg

SEQ ID NO: 125250 - DNA, 20 bp, Artificial Sequence
  Description of Artificial Sequence: Synthetic oligonucleotide
  Target: LAMA2; (+) strand; PAM type: NRG; PAM sequence: AAG
ataccttgtctctacaaaaa

SEQ ID NO: 125251 - DNA, 20 bp, Artificial Sequence
  Description of Artificial Sequence: Synthetic oligonucleotide
  Target: LAMA2; (+) strand; PAM type: NRG; PAM sequence: TAG
tacaaaaaaagaaacaaaat

SEQ ID NO: 125252 - DNA, 20 bp, Artificial Sequence
  Description of Artificial Sequence: Synthetic oligonucleotide
  Target: LAMA2; (+) strand; PAM type: NRG; PAM sequence: GAG
aaaaagaaacaaaattagtt

SEQ ID NO: 125253 - DNA, 20 bp, Artificial Sequence
  Description of Artificial Sequence: Synthetic oligonucleotide
  Target: LAMA2; (+) strand; PAM type: NRG; PAM sequence: TGG
gaaacaaaattagttgagca

SEQ ID NO: 125254 - DNA, 20 bp, Artificial Sequence
  Description of Artificial Sequence: Synthetic oligonucleotide
  Target: LAMA2; (+) strand; PAM type: NRG; PAM sequence: TAG
acaaaattagttgagcatgg

SEQ ID NO: 125255 - DNA, 20 bp, Artificial Sequence
  Description of Artificial Sequence: Synthetic oligonucleotide
  Target: LAMA2; (+) strand; PAM type: NRG; PAM sequence: TAG
agcatggtagtacacacctg

SEQ ID NO: 125256 - DNA, 20 bp, Artificial Sequence
  Description of Artificial Sequence: Synthetic oligonucleotide
  Target: LAMA2; (+) strand; PAM type: NRG; PAM sequence: AAG
ctgtagtcccacctactcca

SEQ ID NO: 125257 - DNA, 20 bp, Artificial Sequence
  Description of Artificial Sequence: Synthetic oligonucleotide
  Target: LAMA2; (+) strand; PAM type: NRG; PAM sequence: AGG
tgtagtcccacctactccaa

SEQ ID NO: 125258 - DNA, 20 bp, Artificial Sequence
  Description of Artificial Sequence: Synthetic oligonucleotide
  Target: LAMA2; (+) strand; PAM type: NRG; PAM sequence: AAG
cccacctactccaaaggctg

SEQ ID NO: 125259 - DNA, 20 bp, Artificial Sequence
  Description of Artificial Sequence: Synthetic oligonucleotide
  Target: LAMA2; (+) strand; PAM type: NRG; PAM sequence: TGG
acctactccaaaggctgaag

SEQ ID NO: 125260 - DNA, 20 bp, Artificial Sequence
  Description of Artificial Sequence: Synthetic oligonucleotide
  Target: LAMA2; (+) strand; PAM type: NRG; PAM sequence: GGG
cctactccaaaggctgaagt

SEQ ID NO: 125261 - DNA, 20 bp, Artificial Sequence
  Description of Artificial Sequence: Synthetic oligonucleotide
  Target: LAMA2; (+) strand; PAM type: NRG; PAM sequence: GAG
tactccaaaggctgaagtgg

SEQ ID NO: 125262 - DNA, 20 bp, Artificial Sequence
  Description of Artificial Sequence: Synthetic oligonucleotide
  Target: LAMA2; (+) strand; PAM type: NRG; PAM sequence: AGG
actccaaaggctgaagtggg

SEQ ID NO: 125263 - DNA, 20 bp, Artificial Sequence
  Description of Artificial Sequence: Synthetic oligonucleotide
  Target: LAMA2; (+) strand; PAM type: NRG; PAM sequence: GAG
ctgaagtgggaggattgcat

SEQ ID NO: 125264 - DNA, 20 bp, Artificial Sequence
  Description of Artificial Sequence: Synthetic oligonucleotide
  Target: LAMA2; (+) strand; PAM type: NRG; PAM sequence: CAG
gtgggaggattgcatgagcc

SEQ ID NO: 125265 - DNA, 20 bp, Artificial Sequence
  Description of Artificial Sequence: Synthetic oligonucleotide
  Target: LAMA2; (+) strand; PAM type: NRG; PAM sequence: AGG
tgggaggattgcatgagccc

SEQ ID NO: 125266 - DNA, 20 bp, Artificial Sequence
  Description of Artificial Sequence: Synthetic oligonucleotide
  Target: LAMA2; (+) strand; PAM type: NRG; PAM sequence: GAG
ggaggattgcatgagcccag

SEQ ID NO: 125267 - DNA, 20 bp, Artificial Sequence
  Description of Artificial Sequence: Synthetic oligonucleotide
  Target: LAMA2; (+) strand; PAM type: NRG; PAM sequence: CAG
ttgcatgagcccaggagttc

SEQ ID NO: 125268 - DNA, 20 bp, Artificial Sequence
  Description of Artificial Sequence: Synthetic oligonucleotide
  Target: LAMA2; (+) strand; PAM type: NRG; PAM sequence: AGG
tgcatgagcccaggagttcc

SEQ ID NO: 125269 - DNA, 20 bp, Artificial Sequence
  Description of Artificial Sequence: Synthetic oligonucleotide
  Target: LAMA2; (+) strand; PAM type: NRG; PAM sequence: CAG
agcccaggagttccaggctg

SEQ ID NO: 125270 - DNA, 20 bp, Artificial Sequence
  Description of Artificial Sequence: Synthetic oligonucleotide
  Target: LAMA2; (+) strand; PAM type: NRG; PAM sequence: GAG
gttccaggctgcagcgtgct

SEQ ID NO: 125271 - DNA, 20 bp, Artificial Sequence
  Description of Artificial Sequence: Synthetic oligonucleotide
  Target: LAMA2; (+) strand; PAM type: NRG; PAM sequence: CAG
gagatcatgccactgtgctc

SEQ ID NO: 125272 - DNA, 20 bp, Artificial Sequence
  Description of Artificial Sequence: Synthetic oligonucleotide
  Target: LAMA2; (+) strand; PAM type: NRG; PAM sequence: AGG
agatcatgccactgtgctcc

SEQ ID NO: 125273 - DNA, 20 bp, Artificial Sequence
  Description of Artificial Sequence: Synthetic oligonucleotide
  Target: LAMA2; (+) strand; PAM type: NRG; PAM sequence: TGG
catgccactgtgctccaggc

SEQ ID NO: 125274 - DNA, 20 bp, Artificial Sequence
  Description of Artificial Sequence: Synthetic oligonucleotide
  Target: LAMA2; (+) strand; PAM type: NRG; PAM sequence: GGG
atgccactgtgctccaggct

SEQ ID NO: 125275 - DNA, 20 bp, Artificial Sequence
  Description of Artificial Sequence: Synthetic oligonucleotide
  Target: LAMA2; (+) strand; PAM type: NRG; PAM sequence: CAG
ctgtgctccaggctgggtga

SEQ ID NO: 125276 - DNA, 20 bp, Artificial Sequence
  Description of Artificial Sequence: Synthetic oligonucleotide
  Target: LAMA2; (+) strand; PAM type: NRG; PAM sequence: GAG
gtgctccaggctgggtgaca

SEQ ID NO: 125277 - DNA, 20 bp, Artificial Sequence
  Description of Artificial Sequence: Synthetic oligonucleotide
  Target: LAMA2; (+) strand; PAM type: NRG; PAM sequence: AAG
tccaggctgggtgacagagc

SEQ ID NO: 125278 - DNA, 20 bp, Artificial Sequence
  Description of Artificial Sequence: Synthetic oligonucleotide
  Target: LAMA2; (+) strand; PAM type: NRG; PAM sequence: GAG
caggctgggtgacagagcaa

SEQ ID NO: 125279 - DNA, 20 bp, Artificial Sequence
  Description of Artificial Sequence: Synthetic oligonucleotide
  Target: LAMA2; (+) strand; PAM type: NRG; PAM sequence: AAG
cccccaaaatttttttaaat

SEQ ID NO: 125280 - DNA, 20 bp, Artificial Sequence
  Description of Artificial Sequence: Synthetic oligonucleotide
  Target: LAMA2; (+) strand; PAM type: NRG; PAM sequence: AAG
caaaatttttttaaataaga

SEQ ID NO: 125281 - DNA, 20 bp, Artificial Sequence
  Description of Artificial Sequence: Synthetic oligonucleotide
  Target: LAMA2; (+) strand; PAM type: NRG; PAM sequence: AAG
ttaaataagaaagttttaat

SEQ ID NO: 125282 - DNA, 20 bp, Artificial Sequence
  Description of Artificial Sequence: Synthetic oligonucleotide
  Target: LAMA2; (+) strand; PAM type: NRG; PAM sequence: CAG
aataagaaagttttaataag

SEQ ID NO: 125283 - DNA, 20 bp, Artificial Sequence
  Description of Artificial Sequence: Synthetic oligonucleotide
  Target: LAMA2; (+) strand; PAM type: NRG; PAM sequence: TAG
agttttaataagcagaatat

SEQ ID NO: 125284 - DNA, 20 bp, Artificial Sequence
  Description of Artificial Sequence: Synthetic oligonucleotide
  Target: LAMA2; (+) strand; PAM type: NRG; PAM sequence: GAG
atattagtttaattatgaat

SEQ ID NO: 125285 - DNA, 20 bp, Artificial Sequence
  Description of Artificial Sequence: Synthetic oligonucleotide
  Target: LAMA2; (+) strand; PAM type: NRG; PAM sequence: AAG
ttagtttaattatgaatgag

SEQ ID NO: 125286 - DNA, 20 bp, Artificial Sequence
  Description of Artificial Sequence: Synthetic oligonucleotide
  Target: LAMA2; (+) strand; PAM type: NRG; PAM sequence: GAG
agtttaattatgaatgagaa

SEQ ID NO: 125287 - DNA, 20 bp, Artificial Sequence
  Description of Artificial Sequence: Synthetic oligonucleotide
  Target: LAMA2; (+) strand; PAM type: NRG; PAM sequence: TAG
tatgaatgagaagagatgta

SEQ ID NO: 125288 - DNA, 20 bp, Artificial Sequence
  Description of Artificial Sequence: Synthetic oligonucleotide
  Target: LAMA2; (+) strand; PAM type: NRG; PAM sequence: TAG
gaagagatgtatagcatttg

SEQ ID NO: 125289 - DNA, 20 bp, Artificial Sequence
  Description of Artificial Sequence: Synthetic oligonucleotide
  Target: LAMA2; (+) strand; PAM type: NRG; PAM sequence: AGG
aagagatgtatagcatttgt

SEQ ID NO: 125290 - DNA, 20 bp, Artificial Sequence
  Description of Artificial Sequence: Synthetic oligonucleotide
  Target: LAMA2; (+) strand; PAM type: NRG; PAM sequence: GGG
agagatgtatagcatttgta

SEQ ID NO: 125291 - DNA, 20 bp, Artificial Sequence
  Description of Artificial Sequence: Synthetic oligonucleotide
  Target: LAMA2; (+) strand; PAM type: NRG; PAM sequence: GGG
gagatgtatagcatttgtag

SEQ ID NO: 125292 - DNA, 20 bp, Artificial Sequence
  Description of Artificial Sequence: Synthetic oligonucleotide
  Target: LAMA2; (+) strand; PAM type: NRG; PAM sequence: CAG
gtatagcatttgtaggggta

SEQ ID NO: 125293 - DNA, 20 bp, Artificial Sequence
  Description of Artificial Sequence: Synthetic oligonucleotide
  Target: LAMA2; (+) strand; PAM type: NRG; PAM sequence: AAG
acagaaccatgtattccata

SEQ ID NO: 125294 - DNA, 20 bp, Artificial Sequence
  Description of Artificial Sequence: Synthetic oligonucleotide
  Target: LAMA2; (+) strand; PAM type: NRG; PAM sequence: AGG
cagaaccatgtattccataa

SEQ ID NO: 125295 - DNA, 20 bp, Artificial Sequence
  Description of Artificial Sequence: Synthetic oligonucleotide
  Target: LAMA2; (+) strand; PAM type: NRG; PAM sequence: AAG
aaccatgtattccataaagg

SEQ ID NO: 125296 - DNA, 20 bp, Artificial Sequence
  Description of Artificial Sequence: Synthetic oligonucleotide
  Target: LAMA2; (+) strand; PAM type: NRG; PAM sequence: AAG
catgtattccataaaggaag

SEQ ID NO: 125297 - DNA, 20 bp, Artificial Sequence
  Description of Artificial Sequence: Synthetic oligonucleotide
  Target: LAMA2; (+) strand; PAM type: NRG; PAM sequence: AAG
attccataaaggaagaagtt

SEQ ID NO: 125298 - DNA, 20 bp, Artificial Sequence
  Description of Artificial Sequence: Synthetic oligonucleotide
  Target: LAMA2; (+) strand; PAM type: NRG; PAM sequence: GAG
tccataaaggaagaagttaa

SEQ ID NO: 125299 - DNA, 20 bp, Artificial Sequence
  Description of Artificial Sequence: Synthetic oligonucleotide
  Target: LAMA2; (+) strand; PAM type: NRG; PAM sequence: TGG
agaagttaagagcaatgatg

SEQ ID NO: 125300 - DNA, 20 bp, Artificial Sequence
  Description of Artificial Sequence: Synthetic oligonucleotide
  Target: LAMA2; (+) strand; PAM type: NRG; PAM sequence: AAG
taagagcaatgatgtggaat

SEQ ID NO: 125301 - DNA, 20 bp, Artificial Sequence
  Description of Artificial Sequence: Synthetic oligonucleotide
  Target: LAMA2; (+) strand; PAM type: NRG; PAM sequence: TGG
gcaatgatgtggaataagca

SEQ ID NO: 125302 - DNA, 20 bp, Artificial Sequence
  Description of Artificial Sequence: Synthetic oligonucleotide
  Target: LAMA2; (+) strand; PAM type: NRG; PAM sequence: GGG
caatgatgtggaataagcat

SEQ ID NO: 125303 - DNA, 20 bp, Artificial Sequence
  Description of Artificial Sequence: Synthetic oligonucleotide
  Target: LAMA2; (+) strand; PAM type: NRG; PAM sequence: GGG
aatgatgtggaataagcatg

SEQ ID NO: 125304 - DNA, 20 bp, Artificial Sequence
  Description of Artificial Sequence: Synthetic oligonucleotide
  Target: LAMA2; (+) strand; PAM type: NRG; PAM sequence: AAG
ggaataagcatggggctttt

SEQ ID NO: 125305 - DNA, 20 bp, Artificial Sequence
  Description of Artificial Sequence: Synthetic oligonucleotide
  Target: LAMA2; (+) strand; PAM type: NRG; PAM sequence: AAG
cttttaagaacttgtctgaa

SEQ ID NO: 125306 - DNA, 20 bp, Artificial Sequence
  Description of Artificial Sequence: Synthetic oligonucleotide
  Target: LAMA2; (+) strand; PAM type: NRG; PAM sequence: GAG
tttaagaacttgtctgaaaa

SEQ ID NO: 125307 - DNA, 20 bp, Artificial Sequence
  Description of Artificial Sequence: Synthetic oligonucleotide
  Target: LAMA2; (+) strand; PAM type: NRG; PAM sequence: AGG
ttaagaacttgtctgaaaag

SEQ ID NO: 125308 - DNA, 20 bp, Artificial Sequence
  Description of Artificial Sequence: Synthetic oligonucleotide
  Target: LAMA2; (+) strand; PAM type: NRG; PAM sequence: TGG
tctgaaaagaggatattctt

SEQ ID NO: 125309 - DNA, 20 bp, Artificial Sequence
  Description of Artificial Sequence: Synthetic oligonucleotide
  Target: LAMA2; (+) strand; PAM type: NRG; PAM sequence: TAG
agaggatattctttggtcaa

SEQ ID NO: 125310 - DNA, 20 bp, Artificial Sequence
  Description of Artificial Sequence: Synthetic oligonucleotide
  Target: LAMA2; (+) strand; PAM type: NRG; PAM sequence: AAG
aatagttgaaaaaataaaat

SEQ ID NO: 125311 - DNA, 20 bp, Artificial Sequence
  Description of Artificial Sequence: Synthetic oligonucleotide
  Target: LAMA2; (+) strand; PAM type: NRG; PAM sequence: TGG
aaaaataaaataagccttgc

SEQ ID NO: 125312 - DNA, 20 bp, Artificial Sequence
  Description of Artificial Sequence: Synthetic oligonucleotide
  Target: LAMA2; (+) strand; PAM type: NRG; PAM sequence: GAG
aaataaaataagccttgctg

SEQ ID NO: 125313 - DNA, 20 bp, Artificial Sequence
  Description of Artificial Sequence: Synthetic oligonucleotide
  Target: LAMA2; (+) strand; PAM type: NRG; PAM sequence: TGG
taaaataagccttgctggag

SEQ ID NO: 125314 - DNA, 20 bp, Artificial Sequence
  Description of Artificial Sequence: Synthetic oligonucleotide
  Target: LAMA2; (+) strand; PAM type: NRG; PAM sequence: GAG
aaataagccttgctggagtg

SEQ ID NO: 125315 - DNA, 20 bp, Artificial Sequence
  Description of Artificial Sequence: Synthetic oligonucleotide
  Target: LAMA2; (+) strand; PAM type: NRG; PAM sequence: AAG
aagccttgctggagtggagc

SEQ ID NO: 125316 - DNA, 20 bp, Artificial Sequence
  Description of Artificial Sequence: Synthetic oligonucleotide
  Target: LAMA2; (+) strand; PAM type: NRG; PAM sequence: TGG
gctggagtggagcaagtcaa

SEQ ID NO: 125317 - DNA, 20 bp, Artificial Sequence
  Description of Artificial Sequence: Synthetic oligonucleotide
  Target: LAMA2; (+) strand; PAM type: NRG; PAM sequence: AAG
gagtggagcaagtcaatgga

SEQ ID NO: 125318 - DNA, 20 bp, Artificial Sequence
  Description of Artificial Sequence: Synthetic oligonucleotide
  Target: LAMA2; (+) strand; PAM type: NRG; PAM sequence: CAG
aagtcaatggaaagccttca

SEQ ID NO: 125319 - DNA, 20 bp, Artificial Sequence
  Description of Artificial Sequence: Synthetic oligonucleotide
  Target: LAMA2; (+) strand; PAM type: NRG; PAM sequence: TAG
caatggaaagccttcacagt

SEQ ID NO: 125320 - DNA, 20 bp, Artificial Sequence
  Description of Artificial Sequence: Synthetic oligonucleotide
  Target: LAMA2; (+) strand; PAM type: NRG; PAM sequence: AGG
aatggaaagccttcacagtt

SEQ ID NO: 125321 - DNA, 20 bp, Artificial Sequence
  Description of Artificial Sequence: Synthetic oligonucleotide
  Target: LAMA2; (+) strand; PAM type: NRG; PAM sequence: TGG
ggaaagccttcacagttagg

SEQ ID NO: 125322 - DNA, 20 bp, Artificial Sequence
  Description of Artificial Sequence: Synthetic oligonucleotide
  Target: LAMA2; (+) strand; PAM type: NRG; PAM sequence: GAG
aaagccttcacagttaggtg

SEQ ID NO: 125323 - DNA, 20 bp, Artificial Sequence
  Description of Artificial Sequence: Synthetic oligonucleotide
  Target: LAMA2; (+) strand; PAM type: NRG; PAM sequence: TGG
aacactgactgattgtctat

SEQ ID NO: 125324 - DNA, 20 bp, Artificial Sequence
  Description of Artificial Sequence: Synthetic oligonucleotide
  Target: LAMA2; (+) strand; PAM type: NRG; PAM sequence: TAG
ggttacccgccatataatgt

SEQ ID NO: 125325 - DNA, 20 bp, Artificial Sequence
  Description of Artificial Sequence: Synthetic oligonucleotide
  Target: LAMA2; (+) strand; PAM type: NRG; PAM sequence: AGG
gttacccgccatataatgtt

SEQ ID NO: 125326 - DNA, 20 bp, Artificial Sequence
  Description of Artificial Sequence: Synthetic oligonucleotide
  Target: LAMA2; (+) strand; PAM type: NRG; PAM sequence: TGG
cgccatataatgttaggtgc

SEQ ID NO: 125327 - DNA, 20 bp, Artificial Sequence
  Description of Artificial Sequence: Synthetic oligonucleotide
  Target: LAMA2; (+) strand; PAM type: NRG; PAM sequence: GGG
gccatataatgttaggtgct

SEQ ID NO: 125328 - DNA, 20 bp, Artificial Sequence
  Description of Artificial Sequence: Synthetic oligonucleotide
  Target: LAMA2; (+) strand; PAM type: NRG; PAM sequence: GGG
ccatataatgttaggtgctg

SEQ ID NO: 125329 - DNA, 20 bp, Artificial Sequence
  Description of Artificial Sequence: Synthetic oligonucleotide
  Target: LAMA2; (+) strand; PAM type: NRG; PAM sequence: TAG
aatgttaggtgctggggaaa

SEQ ID NO: 125330 - DNA, 20 bp, Artificial Sequence
  Description of Artificial Sequence: Synthetic oligonucleotide
  Target: LAMA2; (+) strand; PAM type: NRG; PAM sequence: AAG
gttaggtgctggggaaatag

SEQ ID NO: 125331 - DNA, 20 bp, Artificial Sequence
  Description of Artificial Sequence: Synthetic oligonucleotide
  Target: LAMA2; (+) strand; PAM type: NRG; PAM sequence: AAG
ggtgctggggaaatagaagt

SEQ ID NO: 125332 - DNA, 20 bp, Artificial Sequence
  Description of Artificial Sequence: Synthetic oligonucleotide
  Target: LAMA2; (+) strand; PAM type: NRG; PAM sequence: TAG
gctggggaaatagaagtaag

SEQ ID NO: 125333 - DNA, 20 bp, Artificial Sequence
  Description of Artificial Sequence: Synthetic oligonucleotide
  Target: LAMA2; (+) strand; PAM type: NRG; PAM sequence: GAG
gaaatagaagtaagtagaat

SEQ ID NO: 125334 - DNA, 20 bp, Artificial Sequence
  Description of Artificial Sequence: Synthetic oligonucleotide
  Target: LAMA2; (+) strand; PAM type: NRG; PAM sequence: AGG
aaatagaagtaagtagaatg

SEQ ID NO: 125335 - DNA, 20 bp, Artificial Sequence
  Description of Artificial Sequence: Synthetic oligonucleotide
  Target: LAMA2; (+) strand; PAM type: NRG; PAM sequence: TGG
tagaagtaagtagaatgagg

SEQ ID NO: 125336 - DNA, 20 bp, Artificial Sequence
  Description of Artificial Sequence: Synthetic oligonucleotide
  Target: LAMA2; (+) strand; PAM type: NRG; PAM sequence: GGG
agaagtaagtagaatgaggt

SEQ ID NO: 125337 - DNA, 20 bp, Artificial Sequence
  Description of Artificial Sequence: Synthetic oligonucleotide
  Target: LAMA2; (+) strand; PAM type: NRG; PAM sequence: GGG
gaagtaagtagaatgaggtg

SEQ ID NO: 125338 - DNA, 20 bp, Artificial Sequence
  Description of Artificial Sequence: Synthetic oligonucleotide
  Target: LAMA2; (+) strand; PAM type: NRG; PAM sequence: GGG
aagtaagtagaatgaggtgg

SEQ ID NO: 125339 - DNA, 20 bp, Artificial Sequence
  Description of Artificial Sequence: Synthetic oligonucleotide
  Target: LAMA2; (+) strand; PAM type: NRG; PAM sequence: GAG
gtaagtagaatgaggtgggg

SEQ ID NO: 125340 - DNA, 20 bp, Artificial Sequence
  Description of Artificial Sequence: Synthetic oligonucleotide
  Target: LAMA2; (+) strand; PAM type: NRG; PAM sequence: AGG
taagtagaatgaggtggggg

SEQ ID NO: 125341 - DNA, 20 bp, Artificial Sequence
  Description of Artificial Sequence: Synthetic oligonucleotide
  Target: LAMA2; (+) strand; PAM type: NRG; PAM sequence: TGG
gaggtgggggaggttcactg

SEQ ID NO: 125342 - DNA, 20 bp, Artificial Sequence
  Description of Artificial Sequence: Synthetic oligonucleotide
  Target: LAMA2; (+) strand; PAM type: NRG; PAM sequence: TGG
gggaggttcactgtggctct

SEQ ID NO: 125343 - DNA, 20 bp, Artificial Sequence
  Description of Artificial Sequence: Synthetic oligonucleotide
  Target: LAMA2; (+) strand; PAM type: NRG; PAM sequence: AAG
ggttcactgtggctcttgga

SEQ ID NO: 125344 - DNA, 20 bp, Artificial Sequence
  Description of Artificial Sequence: Synthetic oligonucleotide
  Target: LAMA2; (+) strand; PAM type: NRG; PAM sequence: AGG
gttcactgtggctcttggaa

SEQ ID NO: 125345 - DNA, 20 bp, Artificial Sequence
  Description of Artificial Sequence: Synthetic oligonucleotide
  Target: LAMA2; (+) strand; PAM type: NRG; PAM sequence: AAG
gaaaggaaaatacataatca

SEQ ID NO: 125346 - DNA, 20 bp, Artificial Sequence
  Description of Artificial Sequence: Synthetic oligonucleotide
  Target: LAMA2; (+) strand; PAM type: NRG; PAM sequence: TAG
tacataatcaaagtttgtgt

SEQ ID NO: 125347 - DNA, 20 bp, Artificial Sequence
  Description of Artificial Sequence: Synthetic oligonucleotide
  Target: LAMA2; (+) strand; PAM type: NRG; PAM sequence: AAG
ataatcaaagtttgtgttag

SEQ ID NO: 125348 - DNA, 20 bp, Artificial Sequence
  Description of Artificial Sequence: Synthetic oligonucleotide
  Target: LAMA2; (+) strand; PAM type: NRG; PAM sequence: AGG
taatcaaagtttgtgttaga

SEQ ID NO: 125349 - DNA, 20 bp, Artificial Sequence
  Description of Artificial Sequence: Synthetic oligonucleotide
  Target: LAMA2; (+) strand; PAM type: NRG; PAM sequence: GGG
aatcaaagtttgtgttagaa

SEQ ID NO: 125350 - DNA, 20 bp, Artificial Sequence
  Description of Artificial Sequence: Synthetic oligonucleotide
  Target: LAMA2; (+) strand; PAM type: NRG; PAM sequence: AAG
gtgttagaagggtcaatctg

SEQ ID NO: 125351 - DNA, 20 bp, Artificial Sequence
  Description of Artificial Sequence: Synthetic oligonucleotide
  Target: LAMA2; (+) strand; PAM type: NRG; PAM sequence: AGG
tgttagaagggtcaatctga

SEQ ID NO: 125352 - DNA, 20 bp, Artificial Sequence
  Description of Artificial Sequence: Synthetic oligonucleotide
  Target: LAMA2; (+) strand; PAM type: NRG; PAM sequence: TGG
atctgaaggcttttgaaaaa

SEQ ID NO: 125353 - DNA, 20 bp, Artificial Sequence
  Description of Artificial Sequence: Synthetic oligonucleotide
  Target: LAMA2; (+) strand; PAM type: NRG; PAM sequence: TGG
aggcttttgaaaaatggatc

SEQ ID NO: 125354 - DNA, 20 bp, Artificial Sequence
  Description of Artificial Sequence: Synthetic oligonucleotide
  Target: LAMA2; (+) strand; PAM type: NRG; PAM sequence: GGG
ggcttttgaaaaatggatct

SEQ ID NO: 125355 - DNA, 20 bp, Artificial Sequence
  Description of Artificial Sequence: Synthetic oligonucleotide
  Target: LAMA2; (+) strand; PAM type: NRG; PAM sequence: TAG
tttgaaaaatggatctggga

SEQ ID NO: 125356 - DNA, 20 bp, Artificial Sequence
  Description of Artificial Sequence: Synthetic oligonucleotide
  Target: LAMA2; (+) strand; PAM type: NRG; PAM sequence: AGG
ttgaaaaatggatctgggat

SEQ ID NO: 125357 - DNA, 20 bp, Artificial Sequence
  Description of Artificial Sequence: Synthetic oligonucleotide
  Target: LAMA2; (+) strand; PAM type: NRG; PAM sequence: GGG
tgaaaaatggatctgggata

SEQ ID NO: 125358 - DNA, 20 bp, Artificial Sequence
  Description of Artificial Sequence: Synthetic oligonucleotide
  Target: LAMA2; (+) strand; PAM type: NRG; PAM sequence: GAG
aaaaatggatctgggatagg

SEQ ID NO: 125359 - DNA, 20 bp, Artificial Sequence
  Description of Artificial Sequence: Synthetic oligonucleotide
  Target: LAMA2; (+) strand; PAM type: NRG; PAM sequence: AGG
aaaatggatctgggataggg

SEQ ID NO: 125360 - DNA, 20 bp, Artificial Sequence
  Description of Artificial Sequence: Synthetic oligonucleotide
  Target: LAMA2; (+) strand; PAM type: NRG; PAM sequence: TAG
caataaactaatcatgattt

SEQ ID NO: 125361 - DNA, 20 bp, Artificial Sequence
  Description of Artificial Sequence: Synthetic oligonucleotide
  Target: LAMA2; (+) strand; PAM type: NRG; PAM sequence: GAG
aaactaatcatgattttagt

SEQ ID NO: 125362 - DNA, 20 bp, Artificial Sequence
  Description of Artificial Sequence: Synthetic oligonucleotide
  Target: LAMA2; (+) strand; PAM type: NRG; PAM sequence: TAG
gtattctatgaaccctcact

SEQ ID NO: 125363 - DNA, 20 bp, Artificial Sequence
  Description of Artificial Sequence: Synthetic oligonucleotide
  Target: LAMA2; (+) strand; PAM type: NRG; PAM sequence: CAG
ttctttgcttctcttacatt

SEQ ID NO: 125364 - DNA, 20 bp, Artificial Sequence
  Description of Artificial Sequence: Synthetic oligonucleotide
  Target: LAMA2; (+) strand; PAM type: NRG; PAM sequence: AAG
atttttaaaatacaattttc

SEQ ID NO: 125365 - DNA, 20 bp, Artificial Sequence
  Description of Artificial Sequence: Synthetic oligonucleotide
  Target: LAMA2; (+) strand; PAM type: NRG; PAM sequence: AGG
tttttaaaatacaattttca

SEQ ID NO: 125366 - DNA, 20 bp, Artificial Sequence
  Description of Artificial Sequence: Synthetic oligonucleotide
  Target: LAMA2; (+) strand; PAM type: NRG; PAM sequence: CAG
aaaatacaattttcaaggtt

SEQ ID NO: 125367 - DNA, 20 bp, Artificial Sequence
  Description of Artificial Sequence: Synthetic oligonucleotide
  Target: LAMA2; (+) strand; PAM type: NRG; PAM sequence: TGG
aaaaaaaataaatgacattc

SEQ ID NO: 125368 - DNA, 20 bp, Artificial Sequence
  Description of Artificial Sequence: Synthetic oligonucleotide
  Target: LAMA2; (+) strand; PAM type: NRG; PAM sequence: TAG
aaatgacattctggaaaaaa

SEQ ID NO: 125369 - DNA, 20 bp, Artificial Sequence
  Description of Artificial Sequence: Synthetic oligonucleotide
  Target: LAMA2; (+) strand; PAM type: NRG; PAM sequence: CAG
ctggaaaaaatagatgtgct

SEQ ID NO: 125370 - DNA, 20 bp, Artificial Sequence
  Description of Artificial Sequence: Synthetic oligonucleotide
  Target: LAMA2; (+) strand; PAM type: NRG; PAM sequence: TGG
gaactaaaaaataaaaataa

SEQ ID NO: 125371 - DNA, 20 bp, Artificial Sequence
  Description of Artificial Sequence: Synthetic oligonucleotide
  Target: LAMA2; (+) strand; PAM type: NRG; PAM sequence: GAG
actaaaaaataaaaataatg

SEQ ID NO: 125372 - DNA, 20 bp, Artificial Sequence
  Description of Artificial Sequence: Synthetic oligonucleotide
  Target: LAMA2; (+) strand; PAM type: NRG; PAM sequence: TGG
aaaaataaaaataatggaga

SEQ ID NO: 125373 - DNA, 20 bp, Artificial Sequence
  Description of Artificial Sequence: Synthetic oligonucleotide
  Target: LAMA2; (+) strand; PAM type: NRG; PAM sequence: AAG
aatggagatggtaaatatat

SEQ ID NO: 125374 - DNA, 20 bp, Artificial Sequence
  Description of Artificial Sequence: Synthetic oligonucleotide
  Target: LAMA2; (+) strand; PAM type: NRG; PAM sequence: GAG
gagatggtaaatatataagt

SEQ ID NO: 125375 - DNA, 20 bp, Artificial Sequence
  Description of Artificial Sequence: Synthetic oligonucleotide
  Target: LAMA2; (+) strand; PAM type: NRG; PAM sequence: AAG
tgatgatgattttcattaac

SEQ ID NO: 125376 - DNA, 20 bp, Artificial Sequence
  Description of Artificial Sequence: Synthetic oligonucleotide
  Target: LAMA2; (+) strand; PAM type: NRG; PAM sequence: AAG
atatattctcacgtgatcca

SEQ ID NO: 125377 - DNA, 20 bp, Artificial Sequence
  Description of Artificial Sequence: Synthetic oligonucleotide
  Target: LAMA2; (+) strand; PAM type: NRG; PAM sequence: CAG
gtaatttcgttctctgtgcc

SEQ ID NO: 125378 - DNA, 20 bp, Artificial Sequence
  Description of Artificial Sequence: Synthetic oligonucleotide
  Target: LAMA2; (+) strand; PAM type: NRG; PAM sequence: GAG
tttcgttctctgtgcccagc

SEQ ID NO: 125379 - DNA, 20 bp, Artificial Sequence
  Description of Artificial Sequence: Synthetic oligonucleotide
  Target: LAMA2; (+) strand; PAM type: NRG; PAM sequence: TGG
gttctctgtgcccagcgagt

SEQ ID NO: 125380 - DNA, 20 bp, Artificial Sequence
  Description of Artificial Sequence: Synthetic oligonucleotide
  Target: LAMA2; (+) strand; PAM type: NRG; PAM sequence: TGG
agcgagttggtatctactga

SEQ ID NO: 125381 - DNA, 20 bp, Artificial Sequence
  Description of Artificial Sequence: Synthetic oligonucleotide
  Target: LAMA2; (+) strand; PAM type: NRG; PAM sequence: TGG
gagttggtatctactgatgg

SEQ ID NO: 125382 - DNA, 20 bp, Artificial Sequence
  Description of Artificial Sequence: Synthetic oligonucleotide
  Target: LAMA2; (+) strand; PAM type: NRG; PAM sequence: CAG
ggtttttcaaatgcaccgtg

SEQ ID NO: 125383 - DNA, 20 bp, Artificial Sequence
  Description of Artificial Sequence: Synthetic oligonucleotide
  Target: LAMA2; (+) strand; PAM type: NRG; PAM sequence: TAG
tttcaaatgcaccgtgcagt

SEQ ID NO: 125384 - DNA, 20 bp, Artificial Sequence
  Description of Artificial Sequence: Synthetic oligonucleotide
  Target: LAMA2; (+) strand; PAM type: NRG; PAM sequence: GAG
tgcagttagacgtcatcact

SEQ ID NO: 125385 - DNA, 20 bp, Artificial Sequence
  Description of Artificial Sequence: Synthetic oligonucleotide
  Target: LAMA2; (+) strand; PAM type: NRG; PAM sequence: TAG
catcactgagacctcaataa

SEQ ID NO: 125386 - DNA, 20 bp, Artificial Sequence
  Description of Artificial Sequence: Synthetic oligonucleotide
  Target: LAMA2; (+) strand; PAM type: NRG; PAM sequence: GAG
aataatagacctccatcact

SEQ ID NO: 125387 - DNA, 20 bp, Artificial Sequence
  Description of Artificial Sequence: Synthetic oligonucleotide
  Target: LAMA2; (+) strand; PAM type: NRG; PAM sequence: AAG
aatagacctccatcactgag

SEQ ID NO: 125388 - DNA, 20 bp, Artificial Sequence
  Description of Artificial Sequence: Synthetic oligonucleotide
  Target: LAMA2; (+) strand; PAM type: NRG; PAM sequence: CAG
acctccatcactgagaagtt

SEQ ID NO: 125389 - DNA, 20 bp, Artificial Sequence
  Description of Artificial Sequence: Synthetic oligonucleotide
  Target: LAMA2; (+) strand; PAM type: NRG; PAM sequence: GAG
ctccatcactgagaagttca

SEQ ID NO: 125390 - DNA, 20 bp, Artificial Sequence
  Description of Artificial Sequence: Synthetic oligonucleotide
  Target: LAMA2; (+) strand; PAM type: NRG; PAM sequence: AGG
tccatcactgagaagttcag

SEQ ID NO: 125391 - DNA, 20 bp, Artificial Sequence
  Description of Artificial Sequence: Synthetic oligonucleotide
  Target: LAMA2; (+) strand; PAM type: NRG; PAM sequence: TAG
atcactgagaagttcagagg

SEQ ID NO: 125392 - DNA, 20 bp, Artificial Sequence
  Description of Artificial Sequence: Synthetic oligonucleotide
  Target: LAMA2; (+) strand; PAM type: NRG; PAM sequence: AAG
actgagaagttcagaggtag

SEQ ID NO: 125393 - DNA, 20 bp, Artificial Sequence
  Description of Artificial Sequence: Synthetic oligonucleotide
  Target: LAMA2; (+) strand; PAM type: NRG; PAM sequence: CAG
aagttcagaggtagaagatg

SEQ ID NO: 125394 - DNA, 20 bp, Artificial Sequence
  Description of Artificial Sequence: Synthetic oligonucleotide
  Target: LAMA2; (+) strand; PAM type: NRG; PAM sequence: AGG
agttcagaggtagaagatgc

SEQ ID NO: 125395 - DNA, 20 bp, Artificial Sequence
  Description of Artificial Sequence: Synthetic oligonucleotide
  Target: LAMA2; (+) strand; PAM type: NRG; PAM sequence: GGG
gttcagaggtagaagatgca

SEQ ID NO: 125396 - DNA, 20 bp, Artificial Sequence
  Description of Artificial Sequence: Synthetic oligonucleotide
  Target: LAMA2; (+) strand; PAM type: NRG; PAM sequence: GGG
ttcagaggtagaagatgcag

SEQ ID NO: 125397 - DNA, 20 bp, Artificial Sequence
  Description of Artificial Sequence: Synthetic oligonucleotide
  Target: LAMA2; (+) strand; PAM type: NRG; PAM sequence: GGG
tcagaggtagaagatgcagg

SEQ ID NO: 125398 - DNA, 20 bp, Artificial Sequence
  Description of Artificial Sequence: Synthetic oligonucleotide
  Target: LAMA2; (+) strand; PAM type: NRG; PAM sequence: TGG
aagatgcagggggacaatgt

SEQ ID NO: 125399 - DNA, 20 bp, Artificial Sequence
  Description of Artificial Sequence: Synthetic oligonucleotide
  Target: LAMA2; (+) strand; PAM type: NRG; PAM sequence: TAG
atgttggcctgcattaatct

SEQ ID NO: 125400 - DNA, 20 bp, Artificial Sequence
  Description of Artificial Sequence: Synthetic oligonucleotide
  Target: LAMA2; (+) strand; PAM type: NRG; PAM sequence: AAG
tgcattaatcttagcttgaa

SEQ ID NO: 125401 - DNA, 20 bp, Artificial Sequence
  Description of Artificial Sequence: Synthetic oligonucleotide
  Target: LAMA2; (+) strand; PAM type: NRG; PAM sequence: GAG
cattaatcttagcttgaaaa

SEQ ID NO: 125402 - DNA, 20 bp, Artificial Sequence
  Description of Artificial Sequence: Synthetic oligonucleotide
  Target: LAMA2; (+) strand; PAM type: NRG; PAM sequence: AGG
attaatcttagcttgaaaag

SEQ ID NO: 125403 - DNA, 20 bp, Artificial Sequence
  Description of Artificial Sequence: Synthetic oligonucleotide
  Target: LAMA2; (+) strand; PAM type: NRG; PAM sequence: TAG
tagcttgaaaagaggatctt

SEQ ID NO: 125404 - DNA, 20 bp, Artificial Sequence
  Description of Artificial Sequence: Synthetic oligonucleotide
  Target: LAMA2; (+) strand; PAM type: NRG; PAM sequence: TAG
tagataacactatctaaatt

SEQ ID NO: 125405 - DNA, 20 bp, Artificial Sequence
  Description of Artificial Sequence: Synthetic oligonucleotide
  Target: LAMA2; (+) strand; PAM type: NRG; PAM sequence: CAG
gtgttcaaaatgctccacca

SEQ ID NO: 125406 - DNA, 20 bp, Artificial Sequence
  Description of Artificial Sequence: Synthetic oligonucleotide
  Target: LAMA2; (+) strand; PAM type: NRG; PAM sequence: AAG
ttcaaaatgctccaccacag

SEQ ID NO: 125407 - DNA, 20 bp, Artificial Sequence
  Description of Artificial Sequence: Synthetic oligonucleotide
  Target: LAMA2; (+) strand; PAM type: NRG; PAM sequence: GAG
caaaatgctccaccacagaa

SEQ ID NO: 125408 - DNA, 20 bp, Artificial Sequence
  Description of Artificial Sequence: Synthetic oligonucleotide
  Target: LAMA2; (+) strand; PAM type: NRG; PAM sequence: CAG
aatgctccaccacagaagag

SEQ ID NO: 125409 - DNA, 20 bp, Artificial Sequence
  Description of Artificial Sequence: Synthetic oligonucleotide
  Target: LAMA2; (+) strand; PAM type: NRG; PAM sequence: AAG
caccacagaagagcagcaaa

SEQ ID NO: 125410 - DNA, 20 bp, Artificial Sequence
  Description of Artificial Sequence: Synthetic oligonucleotide
  Target: LAMA2; (+) strand; PAM type: NRG; PAM sequence: AAG
aaaagcaatctcattaaaac

SEQ ID NO: 125411 - DNA, 20 bp, Artificial Sequence
  Description of Artificial Sequence: Synthetic oligonucleotide
  Target: LAMA2; (+) strand; PAM type: NRG; PAM sequence: CAG
caatctcattaaaacaagct

SEQ ID NO: 125412 - DNA, 20 bp, Artificial Sequence
  Description of Artificial Sequence: Synthetic oligonucleotide
  Target: LAMA2; (+) strand; PAM type: NRG; PAM sequence: AAG
caagctcagaaaacaattcc

SEQ ID NO: 125413 - DNA, 20 bp, Artificial Sequence
  Description of Artificial Sequence: Synthetic oligonucleotide
  Target: LAMA2; (+) strand; PAM type: NRG; PAM sequence: GAG
aaaacaattccaagatatat

SEQ ID NO: 125414 - DNA, 20 bp, Artificial Sequence
  Description of Artificial Sequence: Synthetic oligonucleotide
  Target: LAMA2; (+) strand; PAM type: NRG; PAM sequence: AAG
attccaagatatatgagtaa

SEQ ID NO: 125415 - DNA, 20 bp, Artificial Sequence
  Description of Artificial Sequence: Synthetic oligonucleotide
  Target: LAMA2; (+) strand; PAM type: NRG; PAM sequence: CGG
agtaaaagcaaactaaacaa

SEQ ID NO: 125416 - DNA, 20 bp, Artificial Sequence
  Description of Artificial Sequence: Synthetic oligonucleotide
  Target: LAMA2; (+) strand; PAM type: NRG; PAM sequence: AAG
aaaagcaaactaaacaacgg

SEQ ID NO: 125417 - DNA, 20 bp, Artificial Sequence
  Description of Artificial Sequence: Synthetic oligonucleotide
  Target: LAMA2; (+) strand; PAM type: NRG; PAM sequence: TAG
ctaaacaacggaagcacaaa

SEQ ID NO: 125418 - DNA, 20 bp, Artificial Sequence
  Description of Artificial Sequence: Synthetic oligonucleotide
  Target: LAMA2; (+) strand; PAM type: NRG; PAM sequence: CAG
tctcttgacttctacttgca

SEQ ID NO: 125419 - DNA, 20 bp, Artificial Sequence
  Description of Artificial Sequence: Synthetic oligonucleotide
  Target: LAMA2; (+) strand; PAM type: NRG; PAM sequence: AAG
ttgcacagctctacttattc

SEQ ID NO: 125420 - DNA, 20 bp, Artificial Sequence
  Description of Artificial Sequence: Synthetic oligonucleotide
  Target: LAMA2; (+) strand; PAM type: NRG; PAM sequence: CGG
tacttattcaagctctgttt

SEQ ID NO: 125421 - DNA, 20 bp, Artificial Sequence
  Description of Artificial Sequence: Synthetic oligonucleotide
  Target: LAMA2; (+) strand; PAM type: NRG; PAM sequence: AAG
caagctctgtttcggacatt

SEQ ID NO: 125422 - DNA, 20 bp, Artificial Sequence
  Description of Artificial Sequence: Synthetic oligonucleotide
  Target: LAMA2; (+) strand; PAM type: NRG; PAM sequence: TAG
cggacattaagcttttttca

SEQ ID NO: 125423 - DNA, 20 bp, Artificial Sequence
  Description of Artificial Sequence: Synthetic oligonucleotide
  Target: LAMA2; (+) strand; PAM type: NRG; PAM sequence: GAG
ttccccttttatcttttatt

SEQ ID NO: 125424 - DNA, 20 bp, Artificial Sequence
  Description of Artificial Sequence: Synthetic oligonucleotide
  Target: LAMA2; (+) strand; PAM type: NRG; PAM sequence: TAG
tatcttttattgagttcttt

SEQ ID NO: 125425 - DNA, 20 bp, Artificial Sequence
  Description of Artificial Sequence: Synthetic oligonucleotide
  Target: LAMA2; (+) strand; PAM type: NRG; PAM sequence: AGG
atcttttattgagttctttt

SEQ ID NO: 125426 - DNA, 20 bp, Artificial Sequence
  Description of Artificial Sequence: Synthetic oligonucleotide
  Target: LAMA2; (+) strand; PAM type: NRG; PAM sequence: GAG
cttttattgagttcttttag

SEQ ID NO: 125427 - DNA, 20 bp, Artificial Sequence
  Description of Artificial Sequence: Synthetic oligonucleotide
  Target: LAMA2; (+) strand; PAM type: NRG; PAM sequence: TGG
gaaaaaaaaatctctataaa

SEQ ID NO: 125428 - DNA, 20 bp, Artificial Sequence
  Description of Artificial Sequence: Synthetic oligonucleotide
  Target: LAMA2; (+) strand; PAM type: NRG; PAM sequence: GAG
aaaaaaaatctctataaatg

SEQ ID NO: 125429 - DNA, 20 bp, Artificial Sequence
  Description of Artificial Sequence: Synthetic oligonucleotide
  Target: LAMA2; (+) strand; PAM type: NRG; PAM sequence: AGG
aaaaaaatctctataaatgg

SEQ ID NO: 125430 - DNA, 20 bp, Artificial Sequence
  Description of Artificial Sequence: Synthetic oligonucleotide
  Target: LAMA2; (+) strand; PAM type: NRG; PAM sequence: AAG
taaatggaggttttttactc

SEQ ID NO: 125431 - DNA, 20 bp, Artificial Sequence
  Description of Artificial Sequence: Synthetic oligonucleotide
  Target: LAMA2; (+) strand; PAM type: NRG; PAM sequence: GAG
aatggaggttttttactcaa

SEQ ID NO: 125432 - DNA, 20 bp, Artificial Sequence
  Description of Artificial Sequence: Synthetic oligonucleotide
  Target: LAMA2; (+) strand; PAM type: NRG; PAM sequence: CAG
ctcaagagcttttaaaataa

SEQ ID NO: 125433 - DNA, 20 bp, Artificial Sequence
  Description of Artificial Sequence: Synthetic oligonucleotide
  Target: LAMA2; (+) strand; PAM type: NRG; PAM sequence: CAG
ttaaaataacagtacatcac

SEQ ID NO: 125434 - DNA, 20 bp, Artificial Sequence
  Description of Artificial Sequence: Synthetic oligonucleotide
  Target: LAMA2; (+) strand; PAM type: NRG; PAM sequence: AAG
atcaccagatcatttttaaa

SEQ ID NO: 125435 - DNA, 20 bp, Artificial Sequence
  Description of Artificial Sequence: Synthetic oligonucleotide
  Target: LAMA2; (+) strand; PAM type: NRG; PAM sequence: TAG
ttttaaaaagtgttctattg

SEQ ID NO: 125436 - DNA, 20 bp, Artificial Sequence
  Description of Artificial Sequence: Synthetic oligonucleotide
  Target: LAMA2; (+) strand; PAM type: NRG; PAM sequence: AAG
aaaagtgttctattgtagtt

SEQ ID NO: 125437 - DNA, 20 bp, Artificial Sequence
  Description of Artificial Sequence: Synthetic oligonucleotide
  Target: LAMA2; (+) strand; PAM type: NRG; PAM sequence: AAG
tttttctcgtcttcccattg

SEQ ID NO: 125438 - DNA, 20 bp, Artificial Sequence
  Description of Artificial Sequence: Synthetic oligonucleotide
  Target: LAMA2; (+) strand; PAM type: NRG; PAM sequence: CAG
cgtcttcccattgaagacta

SEQ ID NO: 125439 - DNA, 20 bp, Artificial Sequence
  Description of Artificial Sequence: Synthetic oligonucleotide
  Target: LAMA2; (+) strand; PAM type: NRG; PAM sequence: CAG
ctacagaaatctctttcttc

SEQ ID NO: 125440 - DNA, 20 bp, Artificial Sequence
  Description of Artificial Sequence: Synthetic oligonucleotide
  Target: LAMA2; (+) strand; PAM type: NRG; PAM sequence: GAG
gaaatctctttcttccagtt

SEQ ID NO: 125441 - DNA, 20 bp, Artificial Sequence
  Description of Artificial Sequence: Synthetic oligonucleotide
  Target: LAMA2; (+) strand; PAM type: NRG; PAM sequence: AAG
tttcttccagttgagctcaa

SEQ ID NO: 125442 - DNA, 20 bp, Artificial Sequence
  Description of Artificial Sequence: Synthetic oligonucleotide
  Target: LAMA2; (+) strand; PAM type: NRG; PAM sequence: AGG
ttcttccagttgagctcaaa

SEQ ID NO: 125443 - DNA, 20 bp, Artificial Sequence
  Description of Artificial Sequence: Synthetic oligonucleotide
  Target: LAMA2; (+) strand; PAM type: NRG; PAM sequence: AAG
ccagttgagctcaaaaggaa

SEQ ID NO: 125444 - DNA, 20 bp, Artificial Sequence
  Description of Artificial Sequence: Synthetic oligonucleotide
  Target: LAMA2; (+) strand; PAM type: NRG; PAM sequence: AAG
ctcaaaaggaaaagcaaaaa

SEQ ID NO: 125445 - DNA, 20 bp, Artificial Sequence
  Description of Artificial Sequence: Synthetic oligonucleotide
  Target: LAMA2; (+) strand; PAM type: NRG; PAM sequence: TGG
aaaggaaaagcaaaaaaaga

SEQ ID NO: 125446 - DNA, 20 bp, Artificial Sequence
  Description of Artificial Sequence: Synthetic oligonucleotide
  Target: LAMA2; (+) strand; PAM type: NRG; PAM sequence: CAG
gaaaagcaaaaaaagatgga

SEQ ID NO: 125447 - DNA, 20 bp, Artificial Sequence
  Description of Artificial Sequence: Synthetic oligonucleotide
  Target: LAMA2; (+) strand; PAM type: NRG; PAM sequence: AAG
aagcaaaaaaagatggacag

SEQ ID NO: 125448 - DNA, 20 bp, Artificial Sequence
  Description of Artificial Sequence: Synthetic oligonucleotide
  Target: LAMA2; (+) strand; PAM type: NRG; PAM sequence: CAG
aaaaaaagatggacagaagc

SEQ ID NO: 125449 - DNA, 20 bp, Artificial Sequence
  Description of Artificial Sequence: Synthetic oligonucleotide
  Target: LAMA2; (+) strand; PAM type: NRG; PAM sequence: TAG
gccagaaatgctgaataaat

SEQ ID NO: 125450 - DNA, 20 bp, Artificial Sequence
  Description of Artificial Sequence: Synthetic oligonucleotide
  Target: LAMA2; (+) strand; PAM type: NRG; PAM sequence: TGG
actttttaaaaactatgaat

SEQ ID NO: 125451 - DNA, 20 bp, Artificial Sequence
  Description of Artificial Sequence: Synthetic oligonucleotide
  Target: LAMA2; (+) strand; PAM type: NRG; PAM sequence: TAG
tatgaattggctcatttaaa

SEQ ID NO: 125452 - DNA, 20 bp, Artificial Sequence
  Description of Artificial Sequence: Synthetic oligonucleotide
  Target: LAMA2; (+) strand; PAM type: NRG; PAM sequence: AAG
ctcatttaaatagattctaa

SEQ ID NO: 125453 - DNA, 20 bp, Artificial Sequence
  Description of Artificial Sequence: Synthetic oligonucleotide
  Target: LAMA2; (+) strand; PAM type: NRG; PAM sequence: TGG
attctaaaagtatttgtatg

SEQ ID NO: 125454 - DNA, 20 bp, Artificial Sequence
  Description of Artificial Sequence: Synthetic oligonucleotide
  Target: LAMA2; (+) strand; PAM type: NRG; PAM sequence: GGG
ttctaaaagtatttgtatgt

SEQ ID NO: 125455 - DNA, 20 bp, Artificial Sequence
  Description of Artificial Sequence: Synthetic oligonucleotide
  Target: LAMA2; (+) strand; PAM type: NRG; PAM sequence: TGG
gggtctgaacactgttgtca

SEQ ID NO: 125456 - DNA, 20 bp, Artificial Sequence
  Description of Artificial Sequence: Synthetic oligonucleotide
  Target: LAMA2; (+) strand; PAM type: NRG; PAM sequence: GAG
gtctgaacactgttgtcatg

SEQ ID NO: 125457 - DNA, 20 bp, Artificial Sequence
  Description of Artificial Sequence: Synthetic oligonucleotide
  Target: LAMA2; (+) strand; PAM type: NRG; PAM sequence: CAG
atttttgttgttgttgtgta

SEQ ID NO: 125458 - DNA, 20 bp, Artificial Sequence
  Description of Artificial Sequence: Synthetic oligonucleotide
  Target: LAMA2; (+) strand; PAM type: NRG; PAM sequence: TGG
tttgttgttgttgtgtacag

SEQ ID NO: 125459 - DNA, 20 bp, Artificial Sequence
  Description of Artificial Sequence: Synthetic oligonucleotide
  Target: LAMA2; (+) strand; PAM type: NRG; PAM sequence: GAG
tgttgttgttgtgtacagtg

SEQ ID NO: 125460 - DNA, 20 bp, Artificial Sequence
  Description of Artificial Sequence: Synthetic oligonucleotide
  Target: LAMA2; (+) strand; PAM type: NRG; PAM sequence: TGG
gttgttgtgtacagtggaga

SEQ ID NO: 125461 - DNA, 20 bp, Artificial Sequence
  Description of Artificial Sequence: Synthetic oligonucleotide
  Target: LAMA2; (+) strand; PAM type: NRG; PAM sequence: CAG
gttgtgtacagtggagatgg

SEQ ID NO: 125462 - DNA, 20 bp, Artificial Sequence
  Description of Artificial Sequence: Synthetic oligonucleotide
  Target: LAMA2; (+) strand; PAM type: NRG; PAM sequence: TAG
tggagatggcagttttcttc

SEQ ID NO: 125463 - DNA, 20 bp, Artificial Sequence
  Description of Artificial Sequence: Synthetic oligonucleotide
  Target: LAMA2; (+) strand; PAM type: NRG; PAM sequence: TAG
tcttctagttgatgcttctg

SEQ ID NO: 125464 - DNA, 20 bp, Artificial Sequence
  Description of Artificial Sequence: Synthetic oligonucleotide
  Target: LAMA2; (+) strand; PAM type: NRG; PAM sequence: AAG
cttctgtagaataaaaaaaa

SEQ ID NO: 125465 - DNA, 20 bp, Artificial Sequence
  Description of Artificial Sequence: Synthetic oligonucleotide
  Target: LAMA2; (+) strand; PAM type: NRG; PAM sequence: TAG
gtagaataaaaaaaaaagtt

SEQ ID NO: 125466 - DNA, 20 bp, Artificial Sequence
  Description of Artificial Sequence: Synthetic oligonucleotide
  Target: LAMA2; (+) strand; PAM type: NRG; PAM sequence: GAG
ataaaaaaaaaagtttagct

SEQ ID NO: 125467 - DNA, 20 bp, Artificial Sequence
  Description of Artificial Sequence: Synthetic oligonucleotide
  Target: LAMA2; (+) strand; PAM type: NRG; PAM sequence: AAG
aaaaaaaagtttagctgaga

SEQ ID NO: 125468 - DNA, 20 bp, Artificial Sequence
  Description of Artificial Sequence: Synthetic oligonucleotide
  Target: LAMA2; (+) strand; PAM type: NRG; PAM sequence: AGG
aaaaaaagtttagctgagaa

SEQ ID NO: 125469 - DNA, 20 bp, Artificial Sequence
  Description of Artificial Sequence: Synthetic oligonucleotide
  Target: LAMA2; (+) strand; PAM type: NRG; PAM sequence: TAG
aaaagtttagctgagaaagg

SEQ ID NO: 125470 - DNA, 20 bp, Artificial Sequence
  Description of Artificial Sequence: Synthetic oligonucleotide
  Target: LAMA2; (+) strand; PAM type: NRG; PAM sequence: AGG
aaagtttagctgagaaaggt

SEQ ID NO: 125471 - DNA, 20 bp, Artificial Sequence
  Description of Artificial Sequence: Synthetic oligonucleotide
  Target: LAMA2; (+) strand; PAM type: NRG; PAM sequence: TGG
ctgagaaaggtaggtcttaa

SEQ ID NO: 125472 - DNA, 20 bp, Artificial Sequence
  Description of Artificial Sequence: Synthetic oligonucleotide
  Target: LAMA2; (+) strand; PAM type: NRG; PAM sequence: TAG
ttaatggaattgttaatatg

SEQ ID NO: 125473 - DNA, 20 bp, Artificial Sequence
  Description of Artificial Sequence: Synthetic oligonucleotide
  Target: LAMA2; (+) strand; PAM type: NRG; PAM sequence: TGG
gttaatatgtagtcttattt

SEQ ID NO: 125474 - DNA, 20 bp, Artificial Sequence
  Description of Artificial Sequence: Synthetic oligonucleotide
  Target: LAMA2; (+) strand; PAM type: NRG; PAM sequence: TGG
tcacttacgtatttaatctg

SEQ ID NO: 125475 - DNA, 20 bp, Artificial Sequence
  Description of Artificial Sequence: Synthetic oligonucleotide
  Target: LAMA2; (+) strand; PAM type: NRG; PAM sequence: TAG
cgtatttaatctgtggattg

SEQ ID NO: 125476 - DNA, 20 bp, Artificial Sequence
  Description of Artificial Sequence: Synthetic oligonucleotide
  Target: LAMA2; (+) strand; PAM type: NRG; PAM sequence: GAG
tatttaatctgtggattgta

SEQ ID NO: 125477 - DNA, 20 bp, Artificial Sequence
  Description of Artificial Sequence: Synthetic oligonucleotide
  Target: LAMA2; (+) strand; PAM type: NRG; PAM sequence: TGG
ctgtggattgtagagcatgc

SEQ ID NO: 125478 - DNA, 20 bp, Artificial Sequence
  Description of Artificial Sequence: Synthetic oligonucleotide
  Target: LAMA2; (+) strand; PAM type: NRG; PAM sequence: GGG
tgtggattgtagagcatgct

SEQ ID NO: 125479 - DNA, 20 bp, Artificial Sequence
  Description of Artificial Sequence: Synthetic oligonucleotide
  Target: LAMA2; (+) strand; PAM type: NRG; PAM sequence: AAG
ggattgtagagcatgctggg

SEQ ID NO: 125480 - DNA, 20 bp, Artificial Sequence
  Description of Artificial Sequence: Synthetic oligonucleotide
  Target: LAMA2; (+) strand; PAM type: NRG; PAM sequence: TGG
tgggaagttatcaattccat

SEQ ID NO: 125481 - DNA, 20 bp, Artificial Sequence
  Description of Artificial Sequence: Synthetic oligonucleotide
  Target: LAMA2; (+) strand; PAM type: NRG; PAM sequence: CAG
aattccattggtacctgcct

SEQ ID NO: 125482 - DNA, 20 bp, Artificial Sequence
  Description of Artificial Sequence: Synthetic oligonucleotide
  Target: LAMA2; (+) strand; PAM type: NRG; PAM sequence: CAG
attggtacctgcctcagttg

SEQ ID NO: 125483 - DNA, 20 bp, Artificial Sequence
  Description of Artificial Sequence: Synthetic oligonucleotide
  Target: LAMA2; (+) strand; PAM type: NRG; PAM sequence: CAG
tacctgcctcagttgcagtt

SEQ ID NO: 125484 - DNA, 20 bp, Artificial Sequence
  Description of Artificial Sequence: Synthetic oligonucleotide
  Target: LAMA2; (+) strand; PAM type: NRG; PAM sequence: AAG
ctcagttgcagttcagcctt

SEQ ID NO: 125485 - DNA, 20 bp, Artificial Sequence
  Description of Artificial Sequence: Synthetic oligonucleotide
  Target: LAMA2; (+) strand; PAM type: NRG; PAM sequence: AAG
tcagccttaagtacttacca

SEQ ID NO: 125486 - DNA, 20 bp, Artificial Sequence
  Description of Artificial Sequence: Synthetic oligonucleotide
  Target: LAMA2; (+) strand; PAM type: NRG; PAM sequence: AGG
cagccttaagtacttaccaa

SEQ ID NO: 125487 - DNA, 20 bp, Artificial Sequence
  Description of Artificial Sequence: Synthetic oligonucleotide
  Target: LAMA2; (+) strand; PAM type: NRG; PAM sequence: GGG
agccttaagtacttaccaaa

SEQ ID NO: 125488 - DNA, 20 bp, Artificial Sequence
  Description of Artificial Sequence: Synthetic oligonucleotide
  Target: LAMA2; (+) strand; PAM type: NRG; PAM sequence: GAG
ccttaagtacttaccaaagg

SEQ ID NO: 125489 - DNA, 20 bp, Artificial Sequence
  Description of Artificial Sequence: Synthetic oligonucleotide
  Target: LAMA2; (+) strand; PAM type: NRG; PAM sequence: TGG
cttaccaaagggagctcatt

SEQ ID NO: 125490 - DNA, 20 bp, Artificial Sequence
  Description of Artificial Sequence: Synthetic oligonucleotide
  Target: LAMA2; (+) strand; PAM type: NRG; PAM sequence: GGG
ttaccaaagggagctcattt

SEQ ID NO: 125491 - DNA, 20 bp, Artificial Sequence
  Description of Artificial Sequence: Synthetic oligonucleotide
  Target: LAMA2; (+) strand; PAM type: NRG; PAM sequence: GGG
taccaaagggagctcatttg

SEQ ID NO: 125492 - DNA, 20 bp, Artificial Sequence
  Description of Artificial Sequence: Synthetic oligonucleotide
  Target: LAMA2; (+) strand; PAM type: NRG; PAM sequence: TGG
caaagggagctcatttgggg

SEQ ID NO: 125493 - DNA, 20 bp, Artificial Sequence
  Description of Artificial Sequence: Synthetic oligonucleotide
  Target: LAMA2; (+) strand; PAM type: NRG; PAM sequence: CAG
agggagctcatttggggtgg

SEQ ID NO: 125494 - DNA, 20 bp, Artificial Sequence
  Description of Artificial Sequence: Synthetic oligonucleotide
  Target: LAMA2; (+) strand; PAM type: NRG; PAM sequence: AGG
gggagctcatttggggtggc

SEQ ID NO: 125495 - DNA, 20 bp, Artificial Sequence
  Description of Artificial Sequence: Synthetic oligonucleotide
  Target: LAMA2; (+) strand; PAM type: NRG; PAM sequence: GGG
ggagctcatttggggtggca

SEQ ID NO: 125496 - DNA, 20 bp, Artificial Sequence
  Description of Artificial Sequence: Synthetic oligonucleotide
  Target: LAMA2; (+) strand; PAM type: NRG; PAM sequence: GGG
gagctcatttggggtggcag

SEQ ID NO: 125497 - DNA, 20 bp, Artificial Sequence
  Description of Artificial Sequence: Synthetic oligonucleotide
  Target: LAMA2; (+) strand; PAM type: NRG; PAM sequence: AAG
gggtggcaggggtaaccgaa

SEQ ID NO: 125498 - DNA, 20 bp, Artificial Sequence
  Description of Artificial Sequence: Synthetic oligonucleotide
  Target: LAMA2; (+) strand; PAM type: NRG; PAM sequence: TGG
gcaggggtaaccgaaaagtg

SEQ ID NO: 125499 - DNA, 20 bp, Artificial Sequence
  Description of Artificial Sequence: Synthetic oligonucleotide
  Target: LAMA2; (+) strand; PAM type: NRG; PAM sequence: GGG
caggggtaaccgaaaagtgt

SEQ ID NO: 125500 - DNA, 20 bp, Artificial Sequence
  Description of Artificial Sequence: Synthetic oligonucleotide
  Target: LAMA2; (+) strand; PAM type: NRG; PAM sequence: GAG
ggggtaaccgaaaagtgtgg

SEQ ID NO: 125501 - DNA, 20 bp, Artificial Sequence
  Description of Artificial Sequence: Synthetic oligonucleotide
  Target: LAMA2; (+) strand; PAM type: NRG; PAM sequence: GAG
aaccgaaaagtgtgggagct

SEQ ID NO: 125502 - DNA, 20 bp, Artificial Sequence
  Description of Artificial Sequence: Synthetic oligonucleotide
  Target: LAMA2; (+) strand; PAM type: NRG; PAM sequence: AGG
accgaaaagtgtgggagctg

SEQ ID NO: 125503 - DNA, 20 bp, Artificial Sequence
  Description of Artificial Sequence: Synthetic oligonucleotide
  Target: LAMA2; (+) strand; PAM type: NRG; PAM sequence: GAG
tgggagctgaggtattgttt

SEQ ID NO: 125504 - DNA, 20 bp, Artificial Sequence
  Description of Artificial Sequence: Synthetic oligonucleotide
  Target: LAMA2; (+) strand; PAM type: NRG; PAM sequence: GAG
ggagctgaggtattgtttga

SEQ ID NO: 125505 - DNA, 20 bp, Artificial Sequence
  Description of Artificial Sequence: Synthetic oligonucleotide
  Target: LAMA2; (+) strand; PAM type: NRG; PAM sequence: TGG
aggtattgtttgagagcctg

SEQ ID NO: 125506 - DNA, 20 bp, Artificial Sequence
  Description of Artificial Sequence: Synthetic oligonucleotide
  Target: LAMA2; (+) strand; PAM type: NRG; PAM sequence: GGG
ggtattgtttgagagcctgt

SEQ ID NO: 125507 - DNA, 20 bp, Artificial Sequence
  Description of Artificial Sequence: Synthetic oligonucleotide
  Target: LAMA2; (+) strand; PAM type: NRG; PAM sequence: CAG
attgtttgagagcctgtggg

SEQ ID NO: 125508 - DNA, 20 bp, Artificial Sequence
  Description of Artificial Sequence: Synthetic oligonucleotide
  Target: LAMA2; (+) strand; PAM type: NRG; PAM sequence: TAG
cagtgtgactgctccaatcg

SEQ ID NO: 125509 - DNA, 20 bp, Artificial Sequence
  Description of Artificial Sequence: Synthetic oligonucleotide
  Target: LAMA2; (+) strand; PAM type: NRG; PAM sequence: CAG
gactgctccaatcgtagttt

SEQ ID NO: 125510 - DNA, 20 bp, Artificial Sequence
  Description of Artificial Sequence: Synthetic oligonucleotide
  Target: LAMA2; (+) strand; PAM type: NRG; PAM sequence: GAG
gctccaatcgtagtttcagt

SEQ ID NO: 125511 - DNA, 20 bp, Artificial Sequence
  Description of Artificial Sequence: Synthetic oligonucleotide
  Target: LAMA2; (+) strand; PAM type: NRG; PAM sequence: AGG
ctccaatcgtagtttcagtg

SEQ ID NO: 125512 - DNA, 20 bp, Artificial Sequence
  Description of Artificial Sequence: Synthetic oligonucleotide
  Target: LAMA2; (+) strand; PAM type: NRG; PAM sequence: AAG
caatcgtagtttcagtgagg

SEQ ID NO: 125513 - DNA, 20 bp, Artificial Sequence
  Description of Artificial Sequence: Synthetic oligonucleotide
  Target: LAMA2; (+) strand; PAM type: NRG; PAM sequence: GAG
atcgtagtttcagtgaggaa

SEQ ID NO: 125514 - DNA, 20 bp, Artificial Sequence
  Description of Artificial Sequence: Synthetic oligonucleotide
  Target: LAMA2; (+) strand; PAM type: NRG; PAM sequence: AAG
aggaagagcaccatctgtgc

SEQ ID NO: 125515 - DNA, 20 bp, Artificial Sequence
  Description of Artificial Sequence: Synthetic oligonucleotide
  Target: LAMA2; (+) strand; PAM type: NRG; PAM sequence: CAG
ccatctgtgcaagattttct

SEQ ID NO: 125516 - DNA, 20 bp, Artificial Sequence
  Description of Artificial Sequence: Synthetic oligonucleotide
  Target: LAMA2; (+) strand; PAM type: NRG; PAM sequence: AAG
ttttctcagatgtcctctat

SEQ ID NO: 125517 - DNA, 20 bp, Artificial Sequence
  Description of Artificial Sequence: Synthetic oligonucleotide
  Target: LAMA2; (+) strand; PAM type: NRG; PAM sequence: CAG
tataagactttcattgtcat

SEQ ID NO: 125518 - DNA, 20 bp, Artificial Sequence
  Description of Artificial Sequence: Synthetic oligonucleotide
  Target: LAMA2; (+) strand; PAM type: NRG; PAM sequence: AAG
ttcttctttattttgcacat

SEQ ID NO: 125519 - DNA, 20 bp, Artificial Sequence
  Description of Artificial Sequence: Synthetic oligonucleotide
  Target: LAMA2; (+) strand; PAM type: NRG; PAM sequence: AAG
ttattttgcacataagctat

SEQ ID NO: 125520 - DNA, 20 bp, Artificial Sequence
  Description of Artificial Sequence: Synthetic oligonucleotide
  Target: LAMA2; (+) strand; PAM type: NRG; PAM sequence: AAG
taagctataagctatttttt

SEQ ID NO: 125521 - DNA, 20 bp, Artificial Sequence
  Description of Artificial Sequence: Synthetic oligonucleotide
  Target: LAMA2; (+) strand; PAM type: NRG; PAM sequence: TAG
aagctattttttaagacata

SEQ ID NO: 125522 - DNA, 20 bp, Artificial Sequence
  Description of Artificial Sequence: Synthetic oligonucleotide
  Target: LAMA2; (+) strand; PAM type: NRG; PAM sequence: AGG
agctattttttaagacatat

SEQ ID NO: 125523 - DNA, 20 bp, Artificial Sequence
  Description of Artificial Sequence: Synthetic oligonucleotide
  Target: LAMA2; (+) strand; PAM type: NRG; PAM sequence: CGG
tgtgatcaaaaactatgtct

SEQ ID NO: 125524 - DNA, 20 bp, Artificial Sequence
  Description of Artificial Sequence: Synthetic oligonucleotide
  Target: LAMA2; (+) strand; PAM type: NRG; PAM sequence: GGG
gtgatcaaaaactatgtctc

SEQ ID NO: 125525 - DNA, 20 bp, Artificial Sequence
  Description of Artificial Sequence: Synthetic oligonucleotide
  Target: LAMA2; (+) strand; PAM type: NRG; PAM sequence: TGG
ctcgggcaacttctactttt

SEQ ID NO: 125526 - DNA, 20 bp, Artificial Sequence
  Description of Artificial Sequence: Synthetic oligonucleotide
  Target: LAMA2; (+) strand; PAM type: NRG; PAM sequence: TGG
attaacaattattttctttg

SEQ ID NO: 125527 - DNA, 20 bp, Artificial Sequence
  Description of Artificial Sequence: Synthetic oligonucleotide
  Target: LAMA2; (+) strand; PAM type: NRG; PAM sequence: AAG
atatataaacacatacgcac

SEQ ID NO: 125528 - DNA, 20 bp, Artificial Sequence
  Description of Artificial Sequence: Synthetic oligonucleotide
  Target: LAMA2; (+) strand; PAM type: NRG; PAM sequence: AAG
tataaacacatacgcacaag

SEQ ID NO: 125529 - DNA, 20 bp, Artificial Sequence
  Description of Artificial Sequence: Synthetic oligonucleotide
  Target: LAMA2; (+) strand; PAM type: NRG; PAM sequence: CAG
tacacgcacatataaataca

SEQ ID NO: 125530 - DNA, 20 bp, Artificial Sequence
  Description of Artificial Sequence: Synthetic oligonucleotide
  Target: LAMA2; (+) strand; PAM type: NRG; PAM sequence: GAG
cacgcacatataaatacaca

SEQ ID NO: 125531 - DNA, 20 bp, Artificial Sequence
  Description of Artificial Sequence: Synthetic oligonucleotide
  Target: LAMA2; (+) strand; PAM type: NRG; PAM sequence: GAG
cgcacatataaatacacaga

SEQ ID NO: 125532 - DNA, 20 bp, Artificial Sequence
  Description of Artificial Sequence: Synthetic oligonucleotide
  Target: LAMA2; (+) strand; PAM type: NRG; PAM sequence: GAG
cacatataaatacacagaga

SEQ ID NO: 125533 - DNA, 20 bp, Artificial Sequence
  Description of Artificial Sequence: Synthetic oligonucleotide
  Target: LAMA2; (+) strand; PAM type: NRG; PAM sequence: CAG
agtgtgtgtgtatatataca

SEQ ID NO: 125534 - DNA, 20 bp, Artificial Sequence
  Description of Artificial Sequence: Synthetic oligonucleotide
  Target: LAMA2; (+) strand; PAM type: NRG; PAM sequence: GAG
tgtgtgtgtatatatacaca

SEQ ID NO: 125535 - DNA, 20 bp, Artificial Sequence
  Description of Artificial Sequence: Synthetic oligonucleotide
  Target: LAMA2; (+) strand; PAM type: NRG; PAM sequence: GAG
tgtgtgtatatatacacaga

SEQ ID NO: 125536 - DNA, 20 bp, Artificial Sequence
  Description of Artificial Sequence: Synthetic oligonucleotide
  Target: LAMA2; (+) strand; PAM type: NRG; PAM sequence: GAG
tgtgtatatatacacagaga

SEQ ID NO: 125537 - DNA, 20 bp, Artificial Sequence
  Description of Artificial Sequence: Synthetic oligonucleotide
  Target: LAMA2; (+) strand; PAM type: NRG; PAM sequence: GAG
tgtatatatacacagagaga

SEQ ID NO: 125538 - DNA, 20 bp, Artificial Sequence
  Description of Artificial Sequence: Synthetic oligonucleotide
  Target: LAMA2; (+) strand; PAM type: NRG; PAM sequence: GAG
tatatatacacagagagaga

SEQ ID NO: 125539 - DNA, 20 bp, Artificial Sequence
  Description of Artificial Sequence: Synthetic oligonucleotide
  Target: LAMA2; (+) strand; PAM type: NRG; PAM sequence: GAG
tatatacacagagagagaga

SEQ ID NO: 125540 - DNA, 20 bp, Artificial Sequence
  Description of Artificial Sequence: Synthetic oligonucleotide
  Target: LAMA2; (+) strand; PAM type: NRG; PAM sequence: GAG
tatacacagagagagagaga

SEQ ID NO: 125541 - DNA, 20 bp, Artificial Sequence
  Description of Artificial Sequence: Synthetic oligonucleotide
  Target: LAMA2; (+) strand; PAM type: NRG; PAM sequence: GAG
tacacagagagagagagaga

SEQ ID NO: 125542 - DNA, 20 bp, Artificial Sequence
  Description of Artificial Sequence: Synthetic oligonucleotide
  Target: LAMA2; (+) strand; PAM type: NRG; PAM sequence: GAG
cacagagagagagagagaga

SEQ ID NO: 125543 - DNA, 20 bp, Artificial Sequence
  Description of Artificial Sequence: Synthetic oligonucleotide
  Target: LAMA2; (+) strand; PAM type: NRG; PAM sequence: GAG
cagagagagagagagagaga

SEQ ID NO: 125544 - DNA, 20 bp, Artificial Sequence
  Description of Artificial Sequence: Synthetic oligonucleotide
  Target: LAMA2; (+) strand; PAM type: NRG; PAM sequence: GAG
gagagagagagagagagaga

SEQ ID NO: 125545 - DNA, 20 bp, Artificial Sequence
  Description of Artificial Sequence: Synthetic oligonucleotide
  Target: LAMA2; (+) strand; PAM type: NRG; PAM sequence: GAG
gagagagagagagagagaga

SEQ ID NO: 125546 - DNA, 20 bp, Artificial Sequence
  Description of Artificial Sequence: Synthetic oligonucleotide
  Target: LAMA2; (+) strand; PAM type: NRG; PAM sequence: GAG
gagagagagagagagagaga

SEQ ID NO: 125547 - DNA, 20 bp, Artificial Sequence
  Description of Artificial Sequence: Synthetic oligonucleotide
  Target: LAMA2; (+) strand; PAM type: NRG; PAM sequence: GAG
gagagagagagagagagaga

SEQ ID NO: 125548 - DNA, 20 bp, Artificial Sequence
  Description of Artificial Sequence: Synthetic oligonucleotide
  Target: LAMA2; (+) strand; PAM type: NRG; PAM sequence: GAG
gagagagagagagagagaga

SEQ ID NO: 125549 - DNA, 20 bp, Artificial Sequence
  Description of Artificial Sequence: Synthetic oligonucleotide
  Target: LAMA2; (+) strand; PAM type: NRG; PAM sequence: GAG
gagagagagagagagagaga

SEQ ID NO: 125550 - DNA, 20 bp, Artificial Sequence
  Description of Artificial Sequence: Synthetic oligonucleotide
  Target: LAMA2; (+) strand; PAM type: NRG; PAM sequence: GAG
gagagagagagagagagaga

SEQ ID NO: 125551 - DNA, 20 bp, Artificial Sequence
  Description of Artificial Sequence: Synthetic oligonucleotide
  Target: LAMA2; (+) strand; PAM type: NRG; PAM sequence: GAG
gagagagagagagagagaga

SEQ ID NO: 125552 - DNA, 20 bp, Artificial Sequence
  Description of Artificial Sequence: Synthetic oligonucleotide
  Target: LAMA2; (+) strand; PAM type: NRG; PAM sequence: CAG
gagagagagagagagagagt

SEQ ID NO: 125553 - DNA, 20 bp, Artificial Sequence
  Description of Artificial Sequence: Synthetic oligonucleotide
  Target: LAMA2; (+) strand; PAM type: NRG; PAM sequence: CAG
gtcagtcttgctctgttaac

SEQ ID NO: 125554 - DNA, 20 bp, Artificial Sequence
  Description of Artificial Sequence: Synthetic oligonucleotide
  Target: LAMA2; (+) strand; PAM type: NRG; PAM sequence: TGG
gtcttgctctgttaaccagc

SEQ ID NO: 125555 - DNA, 20 bp, Artificial Sequence
  Description of Artificial Sequence: Synthetic oligonucleotide
  Target: LAMA2; (+) strand; PAM type: NRG; PAM sequence: GGG
tcttgctctgttaaccagct

SEQ ID NO: 125556 - DNA, 20 bp, Artificial Sequence
  Description of Artificial Sequence: Synthetic oligonucleotide
  Target: LAMA2; (+) strand; PAM type: NRG; PAM sequence: GGG
cttgctctgttaaccagctg

SEQ ID NO: 125557 - DNA, 20 bp, Artificial Sequence
  Description of Artificial Sequence: Synthetic oligonucleotide
  Target: LAMA2; (+) strand; PAM type: NRG; PAM sequence: TGG
gttaaccagctggggtgctg

SEQ ID NO: 125558 - DNA, 20 bp, Artificial Sequence
  Description of Artificial Sequence: Synthetic oligonucleotide
  Target: LAMA2; (+) strand; PAM type: NRG; PAM sequence: TGG
ggggtgctgtggtgcaatta

SEQ ID NO: 125559 - DNA, 20 bp, Artificial Sequence
  Description of Artificial Sequence: Synthetic oligonucleotide
  Target: LAMA2; (+) strand; PAM type: NRG; PAM sequence: TGG
gtggtgcaattatggctcac

SEQ ID NO: 125560 - DNA, 20 bp, Artificial Sequence
  Description of Artificial Sequence: Synthetic oligonucleotide
  Target: LAMA2; (+) strand; PAM type: NRG; PAM sequence: GAG
ggtgcaattatggctcactg

SEQ ID NO: 125561 - DNA, 20 bp, Artificial Sequence
  Description of Artificial Sequence: Synthetic oligonucleotide
  Target: LAMA2; (+) strand; PAM type: NRG; PAM sequence: CAG
tcactggagcctccacctcc

SEQ ID NO: 125562 - DNA, 20 bp, Artificial Sequence
  Description of Artificial Sequence: Synthetic oligonucleotide
  Target: LAMA2; (+) strand; PAM type: NRG; PAM sequence: AAG
agcctccacctcccagactc

SEQ ID NO: 125563 - DNA, 20 bp, Artificial Sequence
  Description of Artificial Sequence: Synthetic oligonucleotide
  Target: LAMA2; (+) strand; PAM type: NRG; PAM sequence: CAG
ctcaagcaattctcatgcct

SEQ ID NO: 125564 - DNA, 20 bp, Artificial Sequence
  Description of Artificial Sequence: Synthetic oligonucleotide
  Target: LAMA2; (+) strand; PAM type: NRG; PAM sequence: GAG
ttctcatgcctcagccttct

SEQ ID NO: 125565 - DNA, 20 bp, Artificial Sequence
  Description of Artificial Sequence: Synthetic oligonucleotide
  Target: LAMA2; (+) strand; PAM type: NRG; PAM sequence: TGG
tcatgcctcagccttctgag

SEQ ID NO: 125566 - DNA, 20 bp, Artificial Sequence
  Description of Artificial Sequence: Synthetic oligonucleotide
  Target: LAMA2; (+) strand; PAM type: NRG; PAM sequence: TGG
gcctcagccttctgagtggc

SEQ ID NO: 125567 - DNA, 20 bp, Artificial Sequence
  Description of Artificial Sequence: Synthetic oligonucleotide
  Target: LAMA2; (+) strand; PAM type: NRG; PAM sequence: GGG
cctcagccttctgagtggct

SEQ ID NO: 125568 - DNA, 20 bp, Artificial Sequence
  Description of Artificial Sequence: Synthetic oligonucleotide
  Target: LAMA2; (+) strand; PAM type: NRG; PAM sequence: CAG
ttctgagtggctgggactcc

SEQ ID NO: 125569 - DNA, 20 bp, Artificial Sequence
  Description of Artificial Sequence: Synthetic oligonucleotide
  Target: LAMA2; (+) strand; PAM type: NRG; PAM sequence: CAG
ccagcattcaccaccacacc

SEQ ID NO: 125570 - DNA, 20 bp, Artificial Sequence
  Description of Artificial Sequence: Synthetic oligonucleotide
  Target: LAMA2; (+) strand; PAM type: NRG; PAM sequence: TAG
cattcaccaccacacccagt

SEQ ID NO: 125571 - DNA, 20 bp, Artificial Sequence
  Description of Artificial Sequence: Synthetic oligonucleotide
  Target: LAMA2; (+) strand; PAM type: NRG; PAM sequence: AAG
ttgtactttttttttttttg

SEQ ID NO: 125572 - DNA, 20 bp, Artificial Sequence
  Description of Artificial Sequence: Synthetic oligonucleotide
  Target: LAMA2; (+) strand; PAM type: NRG; PAM sequence: GAG
gtactttttttttttttgaa

SEQ ID NO: 125573 - DNA, 20 bp, Artificial Sequence
  Description of Artificial Sequence: Synthetic oligonucleotide
  Target: LAMA2; (+) strand; PAM type: NRG; PAM sequence: CAG
tttttttttttttgaagaga

SEQ ID NO: 125574 - DNA, 20 bp, Artificial Sequence
  Description of Artificial Sequence: Synthetic oligonucleotide
  Target: LAMA2; (+) strand; PAM type: NRG; PAM sequence: AGG
ttttttttttttgaagagac

SEQ ID NO: 125575 - DNA, 20 bp, Artificial Sequence
  Description of Artificial Sequence: Synthetic oligonucleotide
  Target: LAMA2; (+) strand; PAM type: NRG; PAM sequence: GGG
tttttttttttgaagagaca

SEQ ID NO: 125576 - DNA, 20 bp, Artificial Sequence
  Description of Artificial Sequence: Synthetic oligonucleotide
  Target: LAMA2; (+) strand; PAM type: NRG; PAM sequence: AAG
agggttttgctgtgttgccc

SEQ ID NO: 125577 - DNA, 20 bp, Artificial Sequence
  Description of Artificial Sequence: Synthetic oligonucleotide
  Target: LAMA2; (+) strand; PAM type: NRG; PAM sequence: TGG
ccaagctgatcttgaactcc

SEQ ID NO: 125578 - DNA, 20 bp, Artificial Sequence
  Description of Artificial Sequence: Synthetic oligonucleotide
  Target: LAMA2; (+) strand; PAM type: NRG; PAM sequence: CAG
atcttgaactcctggacctc

SEQ ID NO: 125579 - DNA, 20 bp, Artificial Sequence
  Description of Artificial Sequence: Synthetic oligonucleotide
  Target: LAMA2; (+) strand; PAM type: NRG; PAM sequence: TGG
tggacctccagcaattctcc

SEQ ID NO: 125580 - DNA, 20 bp, Artificial Sequence
  Description of Artificial Sequence: Synthetic oligonucleotide
  Target: LAMA2; (+) strand; PAM type: NRG; PAM sequence: TGG
ctccagcaattctcctggct

SEQ ID NO: 125581 - DNA, 20 bp, Artificial Sequence
  Description of Artificial Sequence: Synthetic oligonucleotide
  Target: LAMA2; (+) strand; PAM type: NRG; PAM sequence: TAG
ttctcaatatgctgaaatta

SEQ ID NO: 125582 - DNA, 20 bp, Artificial Sequence
  Description of Artificial Sequence: Synthetic oligonucleotide
  Target: LAMA2; (+) strand; PAM type: NRG; PAM sequence: AGG
tctcaatatgctgaaattat

SEQ ID NO: 125583 - DNA, 20 bp, Artificial Sequence
  Description of Artificial Sequence: Synthetic oligonucleotide
  Target: LAMA2; (+) strand; PAM type: NRG; PAM sequence: AAG
tatgctgaaattataggcgt

SEQ ID NO: 125584 - DNA, 20 bp, Artificial Sequence
  Description of Artificial Sequence: Synthetic oligonucleotide
  Target: LAMA2; (+) strand; PAM type: NRG; PAM sequence: TAG
atatatttttgaaaatgacc

SEQ ID NO: 125585 - DNA, 20 bp, Artificial Sequence
  Description of Artificial Sequence: Synthetic oligonucleotide
  Target: LAMA2; (+) strand; PAM type: NRG; PAM sequence: AGG
tatatttttgaaaatgacct

SEQ ID NO: 125586 - DNA, 20 bp, Artificial Sequence
  Description of Artificial Sequence: Synthetic oligonucleotide
  Target: LAMA2; (+) strand; PAM type: NRG; PAM sequence: GAG
gaaaatgacctaggaacaat

SEQ ID NO: 125587 - DNA, 20 bp, Artificial Sequence
  Description of Artificial Sequence: Synthetic oligonucleotide
  Target: LAMA2; (+) strand; PAM type: NRG; PAM sequence: AAG
aggaacaatgagactttttg

SEQ ID NO: 125588 - DNA, 20 bp, Artificial Sequence
  Description of Artificial Sequence: Synthetic oligonucleotide
  Target: LAMA2; (+) strand; PAM type: NRG; PAM sequence: CAG
ttttccgtttgctaacttat

SEQ ID NO: 125589 - DNA, 20 bp, Artificial Sequence
  Description of Artificial Sequence: Synthetic oligonucleotide
  Target: LAMA2; (+) strand; PAM type: NRG; PAM sequence: GAG
ttccgtttgctaacttatca

SEQ ID NO: 125590 - DNA, 20 bp, Artificial Sequence
  Description of Artificial Sequence: Synthetic oligonucleotide
  Target: LAMA2; (+) strand; PAM type: NRG; PAM sequence: TAG
gctaacttatcagagaaaac

SEQ ID NO: 125591 - DNA, 20 bp, Artificial Sequence
  Description of Artificial Sequence: Synthetic oligonucleotide
  Target: LAMA2; (+) strand; PAM type: NRG; PAM sequence: TGG
aacttatcagagaaaactag

SEQ ID NO: 125592 - DNA, 20 bp, Artificial Sequence
  Description of Artificial Sequence: Synthetic oligonucleotide
  Target: LAMA2; (+) strand; PAM type: NRG; PAM sequence: AAG
ctagtggaaataatatcaaa

SEQ ID NO: 125593 - DNA, 20 bp, Artificial Sequence
  Description of Artificial Sequence: Synthetic oligonucleotide
  Target: LAMA2; (+) strand; PAM type: NRG; PAM sequence: TGG
aaatcatcaaatgctaccca

SEQ ID NO: 125594 - DNA, 20 bp, Artificial Sequence
  Description of Artificial Sequence: Synthetic oligonucleotide
  Target: LAMA2; (+) strand; PAM type: NRG; PAM sequence: AAG
gctacccatggataatgtac

SEQ ID NO: 125595 - DNA, 20 bp, Artificial Sequence
  Description of Artificial Sequence: Synthetic oligonucleotide
  Target: LAMA2; (+) strand; PAM type: NRG; PAM sequence: CAG
ggataatgtacaagaaaact

SEQ ID NO: 125596 - DNA, 20 bp, Artificial Sequence
  Description of Artificial Sequence: Synthetic oligonucleotide
  Target: LAMA2; (+) strand; PAM type: NRG; PAM sequence: TGG
gaaaactcagcaaaattatt

SEQ ID NO: 125597 - DNA, 20 bp, Artificial Sequence
  Description of Artificial Sequence: Synthetic oligonucleotide
  Target: LAMA2; (+) strand; PAM type: NRG; PAM sequence: CAG
ctcagcaaaattatttggca

SEQ ID NO: 125598 - DNA, 20 bp, Artificial Sequence
  Description of Artificial Sequence: Synthetic oligonucleotide
  Target: LAMA2; (+) strand; PAM type: NRG; PAM sequence: AAG
aaaattatttggcacagatg

SEQ ID NO: 125599 - DNA, 20 bp, Artificial Sequence
  Description of Artificial Sequence: Synthetic oligonucleotide
  Target: LAMA2; (+) strand; PAM type: NRG; PAM sequence: AAG
attatttggcacagatgaag

SEQ ID NO: 125600 - DNA, 20 bp, Artificial Sequence
  Description of Artificial Sequence: Synthetic oligonucleotide
  Target: LAMA2; (+) strand; PAM type: NRG; PAM sequence: AAG
ttggcacagatgaagaagac

SEQ ID NO: 125601 - DNA, 20 bp, Artificial Sequence
  Description of Artificial Sequence: Synthetic oligonucleotide
  Target: LAMA2; (+) strand; PAM type: NRG; PAM sequence: GAG
aagaaaaatgtctgctttgt

SEQ ID NO: 125602 - DNA, 20 bp, Artificial Sequence
  Description of Artificial Sequence: Synthetic oligonucleotide
  Target: LAMA2; (+) strand; PAM type: NRG; PAM sequence: TAG
tctgctttgtgagaatacca

SEQ ID NO: 125603 - DNA, 20 bp, Artificial Sequence
  Description of Artificial Sequence: Synthetic oligonucleotide
  Target: LAMA2; (+) strand; PAM type: NRG; PAM sequence: TAG
gctttgtgagaataccatag

SEQ ID NO: 125604 - DNA, 20 bp, Artificial Sequence
  Description of Artificial Sequence: Synthetic oligonucleotide
  Target: LAMA2; (+) strand; PAM type: NRG; PAM sequence: AGG
ctttgtgagaataccatagt

SEQ ID NO: 125605 - DNA, 20 bp, Artificial Sequence
  Description of Artificial Sequence: Synthetic oligonucleotide
  Target: LAMA2; (+) strand; PAM type: NRG; PAM sequence: CAG
gaataccatagtaggtcctt

SEQ ID NO: 125606 - DNA, 20 bp, Artificial Sequence
  Description of Artificial Sequence: Synthetic oligonucleotide
  Target: LAMA2; (+) strand; PAM type: NRG; PAM sequence: CAG
accatagtaggtccttcaga

SEQ ID NO: 125607 - DNA, 20 bp, Artificial Sequence
  Description of Artificial Sequence: Synthetic oligonucleotide
  Target: LAMA2; (+) strand; PAM type: NRG; PAM sequence: AGG
ccatagtaggtccttcagac

SEQ ID NO: 125608 - DNA, 20 bp, Artificial Sequence
  Description of Artificial Sequence: Synthetic oligonucleotide
  Target: LAMA2; (+) strand; PAM type: NRG; PAM sequence: GAG
atagtaggtccttcagacag

SEQ ID NO: 125609 - DNA, 20 bp, Artificial Sequence
  Description of Artificial Sequence: Synthetic oligonucleotide
  Target: LAMA2; (+) strand; PAM type: NRG; PAM sequence: AGG
tagtaggtccttcagacagg

SEQ ID NO: 125610 - DNA, 20 bp, Artificial Sequence
  Description of Artificial Sequence: Synthetic oligonucleotide
  Target: LAMA2; (+) strand; PAM type: NRG; PAM sequence: AAG
cagacaggaggtactttatt

SEQ ID NO: 125611 - DNA, 20 bp, Artificial Sequence
  Description of Artificial Sequence: Synthetic oligonucleotide
  Target: LAMA2; (+) strand; PAM type: NRG; PAM sequence: AAG
acaggaggtactttattaag

SEQ ID NO: 125612 - DNA, 20 bp, Artificial Sequence
  Description of Artificial Sequence: Synthetic oligonucleotide
  Target: LAMA2; (+) strand; PAM type: NRG; PAM sequence: AGG
caggaggtactttattaaga

SEQ ID NO: 125613 - DNA, 20 bp, Artificial Sequence
  Description of Artificial Sequence: Synthetic oligonucleotide
  Target: LAMA2; (+) strand; PAM type: NRG; PAM sequence: GAG
ggaggtactttattaagaag

SEQ ID NO: 125614 - DNA, 20 bp, Artificial Sequence
  Description of Artificial Sequence: Synthetic oligonucleotide
  Target: LAMA2; (+) strand; PAM type: NRG; PAM sequence: AAG
aggagcaattctcattaata

SEQ ID NO: 125615 - DNA, 20 bp, Artificial Sequence
  Description of Artificial Sequence: Synthetic oligonucleotide
  Target: LAMA2; (+) strand; PAM type: NRG; PAM sequence: TAG
aattctcattaataaagatt

SEQ ID NO: 125616 - DNA, 20 bp, Artificial Sequence
  Description of Artificial Sequence: Synthetic oligonucleotide
  Target: LAMA2; (+) strand; PAM type: NRG; PAM sequence: GAG
ttctcattaataaagattta

SEQ ID NO: 125617 - DNA, 20 bp, Artificial Sequence
  Description of Artificial Sequence: Synthetic oligonucleotide
  Target: LAMA2; (+) strand; PAM type: NRG; PAM sequence: GAG
ctcattaataaagatttaga

SEQ ID NO: 125618 - DNA, 20 bp, Artificial Sequence
  Description of Artificial Sequence: Synthetic oligonucleotide
  Target: LAMA2; (+) strand; PAM type: NRG; PAM sequence: AAG
gatttagagagatcacttat

SEQ ID NO: 125619 - DNA, 20 bp, Artificial Sequence
  Description of Artificial Sequence: Synthetic oligonucleotide
  Target: LAMA2; (+) strand; PAM type: NRG; PAM sequence: TGG
tcacttataagatgtattta

SEQ ID NO: 125620 - DNA, 20 bp, Artificial Sequence
  Description of Artificial Sequence: Synthetic oligonucleotide
  Target: LAMA2; (+) strand; PAM type: NRG; PAM sequence: CAG
cttataagatgtatttatgg

SEQ ID NO: 125621 - DNA, 20 bp, Artificial Sequence
  Description of Artificial Sequence: Synthetic oligonucleotide
  Target: LAMA2; (+) strand; PAM type: NRG; PAM sequence: AAG
taagatgtatttatggcagc

SEQ ID NO: 125622 - DNA, 20 bp, Artificial Sequence
  Description of Artificial Sequence: Synthetic oligonucleotide
  Target: LAMA2; (+) strand; PAM type: NRG; PAM sequence: TGG
tttatggcagcaagctcatt

SEQ ID NO: 125623 - DNA, 20 bp, Artificial Sequence
  Description of Artificial Sequence: Synthetic oligonucleotide
  Target: LAMA2; (+) strand; PAM type: NRG; PAM sequence: GAG
catttggtacatgtatgtat

SEQ ID NO: 125624 - DNA, 20 bp, Artificial Sequence
  Description of Artificial Sequence: Synthetic oligonucleotide
  Target: LAMA2; (+) strand; PAM type: NRG; PAM sequence: AGG
atttggtacatgtatgtatg

SEQ ID NO: 125625 - DNA, 20 bp, Artificial Sequence
  Description of Artificial Sequence: Synthetic oligonucleotide
  Target: LAMA2; (+) strand; PAM type: NRG; PAM sequence: GGG
tttggtacatgtatgtatga

SEQ ID NO: 125626 - DNA, 20 bp, Artificial Sequence
  Description of Artificial Sequence: Synthetic oligonucleotide
  Target: LAMA2; (+) strand; PAM type: NRG; PAM sequence: AAG
catgtatgtatgagggaatc

SEQ ID NO: 125627 - DNA, 20 bp, Artificial Sequence
  Description of Artificial Sequence: Synthetic oligonucleotide
  Target: LAMA2; (+) strand; PAM type: NRG; PAM sequence: AAG
tgagggaatcaagatctgaa

SEQ ID NO: 125628 - DNA, 20 bp, Artificial Sequence
  Description of Artificial Sequence: Synthetic oligonucleotide
  Target: LAMA2; (+) strand; PAM type: NRG; PAM sequence: CGG
agatctgaaaagattttcat

SEQ ID NO: 125629 - DNA, 20 bp, Artificial Sequence
  Description of Artificial Sequence: Synthetic oligonucleotide
  Target: LAMA2; (+) strand; PAM type: NRG; PAM sequence: TAG
ctgaaaagattttcatcggt

SEQ ID NO: 125630 - DNA, 20 bp, Artificial Sequence
  Description of Artificial Sequence: Synthetic oligonucleotide
  Target: LAMA2; (+) strand; PAM type: NRG; PAM sequence: GAG
gaaaagattttcatcggtta

SEQ ID NO: 125631 - DNA, 20 bp, Artificial Sequence
  Description of Artificial Sequence: Synthetic oligonucleotide
  Target: LAMA2; (+) strand; PAM type: NRG; PAM sequence: TGG
aattgtgatatactgtctac

SEQ ID NO: 125632 - DNA, 20 bp, Artificial Sequence
  Description of Artificial Sequence: Synthetic oligonucleotide
  Target: LAMA2; (+) strand; PAM type: NRG; PAM sequence: GAG
ttgtgatatactgtctactg

SEQ ID NO: 125633 - DNA, 20 bp, Artificial Sequence
  Description of Artificial Sequence: Synthetic oligonucleotide
  Target: LAMA2; (+) strand; PAM type: NRG; PAM sequence: TAG
ttctccaaaacctgacaatc

SEQ ID NO: 125634 - DNA, 20 bp, Artificial Sequence
  Description of Artificial Sequence: Synthetic oligonucleotide
  Target: LAMA2; (+) strand; PAM type: NRG; PAM sequence: TAG
cctgacaatctagtactttg

SEQ ID NO: 125635 - DNA, 20 bp, Artificial Sequence
  Description of Artificial Sequence: Synthetic oligonucleotide
  Target: LAMA2; (+) strand; PAM type: NRG; PAM sequence: AGG
ctgacaatctagtactttgt

SEQ ID NO: 125636 - DNA, 20 bp, Artificial Sequence
  Description of Artificial Sequence: Synthetic oligonucleotide
  Target: LAMA2; (+) strand; PAM type: NRG; PAM sequence: TAG
ggaactaatgtgtataatct

SEQ ID NO: 125637 - DNA, 20 bp, Artificial Sequence
  Description of Artificial Sequence: Synthetic oligonucleotide
  Target: LAMA2; (+) strand; PAM type: NRG; PAM sequence: AGG
gaactaatgtgtataatctt

SEQ ID NO: 125638 - DNA, 20 bp, Artificial Sequence
  Description of Artificial Sequence: Synthetic oligonucleotide
  Target: LAMA2; (+) strand; PAM type: NRG; PAM sequence: GGG
aactaatgtgtataatctta

SEQ ID NO: 125639 - DNA, 20 bp, Artificial Sequence
  Description of Artificial Sequence: Synthetic oligonucleotide
  Target: LAMA2; (+) strand; PAM type: NRG; PAM sequence: GGG
actaatgtgtataatcttag

SEQ ID NO: 125640 - DNA, 20 bp, Artificial Sequence
  Description of Artificial Sequence: Synthetic oligonucleotide
  Target: LAMA2; (+) strand; PAM type: NRG; PAM sequence: GGG
ctaatgtgtataatcttagg

SEQ ID NO: 125641 - DNA, 20 bp, Artificial Sequence
  Description of Artificial Sequence: Synthetic oligonucleotide
  Target: LAMA2; (+) strand; PAM type: NRG; PAM sequence: TAG
gtgtataatcttagggggct

SEQ ID NO: 125642 - DNA, 20 bp, Artificial Sequence
  Description of Artificial Sequence: Synthetic oligonucleotide
  Target: LAMA2; (+) strand; PAM type: NRG; PAM sequence: TGG
tataatcttagggggcttag

SEQ ID NO: 125643 - DNA, 20 bp, Artificial Sequence
  Description of Artificial Sequence: Synthetic oligonucleotide
  Target: LAMA2; (+) strand; PAM type: NRG; PAM sequence: CAG
atcttagggggcttagtgga

SEQ ID NO: 125644 - DNA, 20 bp, Artificial Sequence
  Description of Artificial Sequence: Synthetic oligonucleotide
  Target: LAMA2; (+) strand; PAM type: NRG; PAM sequence: AAG
tagggggcttagtggacaga

SEQ ID NO: 125645 - DNA, 20 bp, Artificial Sequence
  Description of Artificial Sequence: Synthetic oligonucleotide
  Target: LAMA2; (+) strand; PAM type: NRG; PAM sequence: TAG
ttagtggacagaaagttcat

SEQ ID NO: 125646 - DNA, 20 bp, Artificial Sequence
  Description of Artificial Sequence: Synthetic oligonucleotide
  Target: LAMA2; (+) strand; PAM type: NRG; PAM sequence: TGG
acagaaagttcattagccgt

SEQ ID NO: 125647 - DNA, 20 bp, Artificial Sequence
  Description of Artificial Sequence: Synthetic oligonucleotide
  Target: LAMA2; (+) strand; PAM type: NRG; PAM sequence: TAG
attagccgttggtactgtga

SEQ ID NO: 125648 - DNA, 20 bp, Artificial Sequence
  Description of Artificial Sequence: Synthetic oligonucleotide
  Target: LAMA2; (+) strand; PAM type: NRG; PAM sequence: AGG
ttagccgttggtactgtgat

SEQ ID NO: 125649 - DNA, 20 bp, Artificial Sequence
  Description of Artificial Sequence: Synthetic oligonucleotide
  Target: LAMA2; (+) strand; PAM type: NRG; PAM sequence: GGG
tagccgttggtactgtgata

SEQ ID NO: 125650 - DNA, 20 bp, Artificial Sequence
  Description of Artificial Sequence: Synthetic oligonucleotide
  Target: LAMA2; (+) strand; PAM type: NRG; PAM sequence: GGG
agccgttggtactgtgatag

SEQ ID NO: 125651 - DNA, 20 bp, Artificial Sequence
  Description of Artificial Sequence: Synthetic oligonucleotide
  Target: LAMA2; (+) strand; PAM type: NRG; PAM sequence: AAG
tggtactgtgataggggaaa

SEQ ID NO: 125652 - DNA, 20 bp, Artificial Sequence
  Description of Artificial Sequence: Synthetic oligonucleotide
  Target: LAMA2; (+) strand; PAM type: NRG; PAM sequence: TGG
gtgataggggaaaaagcaaa

SEQ ID NO: 125653 - DNA, 20 bp, Artificial Sequence
  Description of Artificial Sequence: Synthetic oligonucleotide
  Target: LAMA2; (+) strand; PAM type: NRG; PAM sequence: GGG
tgataggggaaaaagcaaat

SEQ ID NO: 125654 - DNA, 20 bp, Artificial Sequence
  Description of Artificial Sequence: Synthetic oligonucleotide
  Target: LAMA2; (+) strand; PAM type: NRG; PAM sequence: TAG
gggaccttaaacaatatgaa

SEQ ID NO: 125655 - DNA, 20 bp, Artificial Sequence
  Description of Artificial Sequence: Synthetic oligonucleotide
  Target: LAMA2; (+) strand; PAM type: NRG; PAM sequence: TGG
ttaaacaatatgaatagaca

SEQ ID NO: 125656 - DNA, 20 bp, Artificial Sequence
  Description of Artificial Sequence: Synthetic oligonucleotide
  Target: LAMA2; (+) strand; PAM type: NRG; PAM sequence: AAG
tgaatagacatggtttctca

SEQ ID NO: 125657 - DNA, 20 bp, Artificial Sequence
  Description of Artificial Sequence: Synthetic oligonucleotide
  Target: LAMA2; (+) strand; PAM type: NRG; PAM sequence: TAG
agacatggtttctcaaagaa

SEQ ID NO: 125658 - DNA, 20 bp, Artificial Sequence
  Description of Artificial Sequence: Synthetic oligonucleotide
  Target: LAMA2; (+) strand; PAM type: NRG; PAM sequence: TGG
gtttctcaaagaatagtcta

SEQ ID NO: 125659 - DNA, 20 bp, Artificial Sequence
  Description of Artificial Sequence: Synthetic oligonucleotide
  Target: LAMA2; (+) strand; PAM type: NRG; PAM sequence: GAG
gaatagtctatggttcacct

SEQ ID NO: 125660 - DNA, 20 bp, Artificial Sequence
  Description of Artificial Sequence: Synthetic oligonucleotide
  Target: LAMA2; (+) strand; PAM type: NRG; PAM sequence: AAG
tcacctgagcacacatcaca

SEQ ID NO: 125661 - DNA, 20 bp, Artificial Sequence
  Description of Artificial Sequence: Synthetic oligonucleotide
  Target: LAMA2; (+) strand; PAM type: NRG; PAM sequence: AGG
cacctgagcacacatcacaa

SEQ ID NO: 125662 - DNA, 20 bp, Artificial Sequence
  Description of Artificial Sequence: Synthetic oligonucleotide
  Target: LAMA2; (+) strand; PAM type: NRG; PAM sequence: CAG
caaaggatgctgacaatgca

SEQ ID NO: 125663 - DNA, 20 bp, Artificial Sequence
  Description of Artificial Sequence: Synthetic oligonucleotide
  Target: LAMA2; (+) strand; PAM type: NRG; PAM sequence: AAG
gatgctgacaatgcacagtt

SEQ ID NO: 125664 - DNA, 20 bp, Artificial Sequence
  Description of Artificial Sequence: Synthetic oligonucleotide
  Target: LAMA2; (+) strand; PAM type: NRG; PAM sequence: AGG
atgctgacaatgcacagtta

SEQ ID NO: 125665 - DNA, 20 bp, Artificial Sequence
  Description of Artificial Sequence: Synthetic oligonucleotide
  Target: LAMA2; (+) strand; PAM type: NRG; PAM sequence: TAG
cacagttaaggtaccccacc

SEQ ID NO: 125666 - DNA, 20 bp, Artificial Sequence
  Description of Artificial Sequence: Synthetic oligonucleotide
  Target: LAMA2; (+) strand; PAM type: NRG; PAM sequence: TGG
tagattaaatgaattaattt

SEQ ID NO: 125667 - DNA, 20 bp, Artificial Sequence
  Description of Artificial Sequence: Synthetic oligonucleotide
  Target: LAMA2; (+) strand; PAM type: NRG; PAM sequence: TGG
aaatgaattaattttggact

SEQ ID NO: 125668 - DNA, 20 bp, Artificial Sequence
  Description of Artificial Sequence: Synthetic oligonucleotide
  Target: LAMA2; (+) strand; PAM type: NRG; PAM sequence: GGG
aatgaattaattttggactt

SEQ ID NO: 125669 - DNA, 20 bp, Artificial Sequence
  Description of Artificial Sequence: Synthetic oligonucleotide
  Target: LAMA2; (+) strand; PAM type: NRG; PAM sequence: TAG
attaattttggacttgggtt

SEQ ID NO: 125670 - DNA, 20 bp, Artificial Sequence
  Description of Artificial Sequence: Synthetic oligonucleotide
  Target: LAMA2; (+) strand; PAM type: NRG; PAM sequence: CAG
ttagatatttacatttttat

SEQ ID NO: 125671 - DNA, 20 bp, Artificial Sequence
  Description of Artificial Sequence: Synthetic oligonucleotide
  Target: LAMA2; (+) strand; PAM type: NRG; PAM sequence: AGG
tagatatttacatttttatc

SEQ ID NO: 125672 - DNA, 20 bp, Artificial Sequence
  Description of Artificial Sequence: Synthetic oligonucleotide
  Target: LAMA2; (+) strand; PAM type: NRG; PAM sequence: AAG
gacttcttatgttcacccca

SEQ ID NO: 125673 - DNA, 20 bp, Artificial Sequence
  Description of Artificial Sequence: Synthetic oligonucleotide
  Target: LAMA2; (+) strand; PAM type: NRG; PAM sequence: AAG
gcaaaatgctcatctaaaat

SEQ ID NO: 125674 - DNA, 20 bp, Artificial Sequence
  Description of Artificial Sequence: Synthetic oligonucleotide
  Target: LAMA2; (+) strand; PAM type: NRG; PAM sequence: AAG
aatgctcatctaaaataaga

SEQ ID NO: 125675 - DNA, 20 bp, Artificial Sequence
  Description of Artificial Sequence: Synthetic oligonucleotide
  Target: LAMA2; (+) strand; PAM type: NRG; PAM sequence: TAG
atctaaaataagaaagatga

SEQ ID NO: 125676 - DNA, 20 bp, Artificial Sequence
  Description of Artificial Sequence: Synthetic oligonucleotide
  Target: LAMA2; (+) strand; PAM type: NRG; PAM sequence: AGG
tctaaaataagaaagatgat

SEQ ID NO: 125677 - DNA, 20 bp, Artificial Sequence
  Description of Artificial Sequence: Synthetic oligonucleotide
  Target: LAMA2; (+) strand; PAM type: NRG; PAM sequence: TAG
ctgatccatcttctgtttac

SEQ ID NO: 125678 - DNA, 20 bp, Artificial Sequence
  Description of Artificial Sequence: Synthetic oligonucleotide
  Target: LAMA2; (+) strand; PAM type: NRG; PAM sequence: AGG
tgatccatcttctgtttact

SEQ ID NO: 125679 - DNA, 20 bp, Artificial Sequence
  Description of Artificial Sequence: Synthetic oligonucleotide
  Target: LAMA2; (+) strand; PAM type: NRG; PAM sequence: TGG
tctgtttactaggttaaatc

SEQ ID NO: 125680 - DNA, 20 bp, Artificial Sequence
  Description of Artificial Sequence: Synthetic oligonucleotide
  Target: LAMA2; (+) strand; PAM type: NRG; PAM sequence: CAG
aatctggaaaatataaacct

SEQ ID NO: 125681 - DNA, 20 bp, Artificial Sequence
  Description of Artificial Sequence: Synthetic oligonucleotide
  Target: LAMA2; (+) strand; PAM type: NRG; PAM sequence: AGG
atctggaaaatataaacctc

SEQ ID NO: 125682 - DNA, 20 bp, Artificial Sequence
  Description of Artificial Sequence: Synthetic oligonucleotide
  Target: LAMA2; (+) strand; PAM type: NRG; PAM sequence: CAG
aaaatataaacctcaggtgc

SEQ ID NO: 125683 - DNA, 20 bp, Artificial Sequence
  Description of Artificial Sequence: Synthetic oligonucleotide
  Target: LAMA2; (+) strand; PAM type: NRG; PAM sequence: CAG
aaacctcaggtgccagactt

SEQ ID NO: 125684 - DNA, 20 bp, Artificial Sequence
  Description of Artificial Sequence: Synthetic oligonucleotide
  Target: LAMA2; (+) strand; PAM type: NRG; PAM sequence: GAG
acctcaggtgccagacttca

SEQ ID NO: 125685 - DNA, 20 bp, Artificial Sequence
  Description of Artificial Sequence: Synthetic oligonucleotide
  Target: LAMA2; (+) strand; PAM type: NRG; PAM sequence: AGG
cctcaggtgccagacttcag

SEQ ID NO: 125686 - DNA, 20 bp, Artificial Sequence
  Description of Artificial Sequence: Synthetic oligonucleotide
  Target: LAMA2; (+) strand; PAM type: NRG; PAM sequence: GGG
ctcaggtgccagacttcaga

SEQ ID NO: 125687 - DNA, 20 bp, Artificial Sequence
  Description of Artificial Sequence: Synthetic oligonucleotide
  Target: LAMA2; (+) strand; PAM type: NRG; PAM sequence: TAG
tgccagacttcagagggata

SEQ ID NO: 125688 - DNA, 20 bp, Artificial Sequence
  Description of Artificial Sequence: Synthetic oligonucleotide
  Target: LAMA2; (+) strand; PAM type: NRG; PAM sequence: TAG
aaaacaattactttttgcat

SEQ ID NO: 125689 - DNA, 20 bp, Artificial Sequence
  Description of Artificial Sequence: Synthetic oligonucleotide
  Target: LAMA2; (+) strand; PAM type: NRG; PAM sequence: AAG
cttgcattgctaaaatccta

SEQ ID NO: 125690 - DNA, 20 bp, Artificial Sequence
  Description of Artificial Sequence: Synthetic oligonucleotide
  Target: LAMA2; (+) strand; PAM type: NRG; PAM sequence: TGG
attgctaaaatcctaaagac

SEQ ID NO: 125691 - DNA, 20 bp, Artificial Sequence
  Description of Artificial Sequence: Synthetic oligonucleotide
  Target: LAMA2; (+) strand; PAM type: NRG; PAM sequence: AAG
taaagactggataatttcta

SEQ ID NO: 125692 - DNA, 20 bp, Artificial Sequence
  Description of Artificial Sequence: Synthetic oligonucleotide
  Target: LAMA2; (+) strand; PAM type: NRG; PAM sequence: AAG
actggataatttctaaagaa

SEQ ID NO: 125693 - DNA, 20 bp, Artificial Sequence
  Description of Artificial Sequence: Synthetic oligonucleotide
  Target: LAMA2; (+) strand; PAM type: NRG; PAM sequence: AAG
tttctaaagaaaagatgatt

SEQ ID NO: 125694 - DNA, 20 bp, Artificial Sequence
  Description of Artificial Sequence: Synthetic oligonucleotide
  Target: LAMA2; (+) strand; PAM type: NRG; PAM sequence: AGG
ttctaaagaaaagatgatta

SEQ ID NO: 125695 - DNA, 20 bp, Artificial Sequence
  Description of Artificial Sequence: Synthetic oligonucleotide
  Target: LAMA2; (+) strand; PAM type: NRG; PAM sequence: CGG
taaagaaaagatgattaagg

SEQ ID NO: 125696 - DNA, 20 bp, Artificial Sequence
  Description of Artificial Sequence: Synthetic oligonucleotide
  Target: LAMA2; (+) strand; PAM type: NRG; PAM sequence: GGG
aaagaaaagatgattaaggc

SEQ ID NO: 125697 - DNA, 20 bp, Artificial Sequence
  Description of Artificial Sequence: Synthetic oligonucleotide
  Target: LAMA2; (+) strand; PAM type: NRG; PAM sequence: CAG
aagatgattaaggcgggatg

SEQ ID NO: 125698 - DNA, 20 bp, Artificial Sequence
  Description of Artificial Sequence: Synthetic oligonucleotide
  Target: LAMA2; (+) strand; PAM type: NRG; PAM sequence: TGG
atgattaaggcgggatgcag

SEQ ID NO: 125699 - DNA, 20 bp, Artificial Sequence
  Description of Artificial Sequence: Synthetic oligonucleotide
  Target: LAMA2; (+) strand; PAM type: NRG; PAM sequence: CAG
gtggctcacgcctgtaatcc

SEQ ID NO: 125700 - DNA, 20 bp, Artificial Sequence
  Description of Artificial Sequence: Synthetic oligonucleotide
  Target: LAMA2; (+) strand; PAM type: NRG; PAM sequence: AGG
tggctcacgcctgtaatccc

SEQ ID NO: 125701 - DNA, 20 bp, Artificial Sequence
  Description of Artificial Sequence: Synthetic oligonucleotide
  Target: LAMA2; (+) strand; PAM type: NRG; PAM sequence: TGG
cgcctgtaatcccaggattt

SEQ ID NO: 125702 - DNA, 20 bp, Artificial Sequence
  Description of Artificial Sequence: Synthetic oligonucleotide
  Target: LAMA2; (+) strand; PAM type: NRG; PAM sequence: GGG
gcctgtaatcccaggatttt

SEQ ID NO: 125703 - DNA, 20 bp, Artificial Sequence
  Description of Artificial Sequence: Synthetic oligonucleotide
  Target: LAMA2; (+) strand; PAM type: NRG; PAM sequence: GAG
ctgtaatcccaggattttgg

SEQ ID NO: 125704 - DNA, 20 bp, Artificial Sequence
  Description of Artificial Sequence: Synthetic oligonucleotide
  Target: LAMA2; (+) strand; PAM type: NRG; PAM sequence: AGG
tgtaatcccaggattttggg

SEQ ID NO: 125705 - DNA, 20 bp, Artificial Sequence
  Description of Artificial Sequence: Synthetic oligonucleotide
  Target: LAMA2; (+) strand; PAM type: NRG; PAM sequence: GAG
tcccaggattttgggaggcc

SEQ ID NO: 125706 - DNA, 20 bp, Artificial Sequence
  Description of Artificial Sequence: Synthetic oligonucleotide
  Target: LAMA2; (+) strand; PAM type: NRG; PAM sequence: AGG
cccaggattttgggaggccg

SEQ ID NO: 125707 - DNA, 20 bp, Artificial Sequence
  Description of Artificial Sequence: Synthetic oligonucleotide
  Target: LAMA2; (+) strand; PAM type: NRG; PAM sequence: GAG
ggattttgggaggccgaggt

SEQ ID NO: 125708 - DNA, 20 bp, Artificial Sequence
  Description of Artificial Sequence: Synthetic oligonucleotide
  Target: LAMA2; (+) strand; PAM type: NRG; PAM sequence: CAG
ttttgggaggccgaggtgag

SEQ ID NO: 125709 - DNA, 20 bp, Artificial Sequence
  Description of Artificial Sequence: Synthetic oligonucleotide
  Target: LAMA2; (+) strand; PAM type: NRG; PAM sequence: CAG
aggtgagcagaccacgatgt

SEQ ID NO: 125710 - DNA, 20 bp, Artificial Sequence
  Description of Artificial Sequence: Synthetic oligonucleotide
  Target: LAMA2; (+) strand; PAM type: NRG; PAM sequence: AGG
ggtgagcagaccacgatgtc

SEQ ID NO: 125711 - DNA, 20 bp, Artificial Sequence
  Description of Artificial Sequence: Synthetic oligonucleotide
  Target: LAMA2; (+) strand; PAM type: NRG; PAM sequence: GAG
tgagcagaccacgatgtcag

SEQ ID NO: 125712 - DNA, 20 bp, Artificial Sequence
  Description of Artificial Sequence: Synthetic oligonucleotide
  Target: LAMA2; (+) strand; PAM type: NRG; PAM sequence: AAG
gaccacgatgtcaggagttc

SEQ ID NO: 125713 - DNA, 20 bp, Artificial Sequence
  Description of Artificial Sequence: Synthetic oligonucleotide
  Target: LAMA2; (+) strand; PAM type: NRG; PAM sequence: CAG
cgatgtcaggagttcaagac

SEQ ID NO: 125714 - DNA, 20 bp, Artificial Sequence
  Description of Artificial Sequence: Synthetic oligonucleotide
  Target: LAMA2; (+) strand; PAM type: NRG; PAM sequence: TGG
tcaggagttcaagaccagcc

SEQ ID NO: 125715 - DNA, 20 bp, Artificial Sequence
  Description of Artificial Sequence: Synthetic oligonucleotide
  Target: LAMA2; (+) strand; PAM type: NRG; PAM sequence: TGG
caagaccagcctggccaaca

SEQ ID NO: 125716 - DNA, 20 bp, Artificial Sequence
  Description of Artificial Sequence: Synthetic oligonucleotide
  Target: LAMA2; (+) strand; PAM type: NRG; PAM sequence: AAG
tgaaacctcgtctctgctaa

SEQ ID NO: 125717 - DNA, 20 bp, Artificial Sequence
  Description of Artificial Sequence: Synthetic oligonucleotide
  Target: LAMA2; (+) strand; PAM type: NRG; PAM sequence: TAG
aacctcgtctctgctaaaag

SEQ ID NO: 125718 - DNA, 20 bp, Artificial Sequence
  Description of Artificial Sequence: Synthetic oligonucleotide
  Target: LAMA2; (+) strand; PAM type: NRG; PAM sequence: AAG
aaaagtagaaaaaaaaaaaa

SEQ ID NO: 125719 - DNA, 20 bp, Artificial Sequence
  Description of Artificial Sequence: Synthetic oligonucleotide
  Target: LAMA2; (+) strand; PAM type: NRG; PAM sequence: AAG
agtagaaaaaaaaaaaaaag

SEQ ID NO: 125720 - DNA, 20 bp, Artificial Sequence
  Description of Artificial Sequence: Synthetic oligonucleotide
  Target: LAMA2; (+) strand; PAM type: NRG; PAM sequence: AAG
gaaaaaaaaaaaaaagaaga

SEQ ID NO: 125721 - DNA, 20 bp, Artificial Sequence
  Description of Artificial Sequence: Synthetic oligonucleotide
  Target: LAMA2; (+) strand; PAM type: NRG; PAM sequence: AAG
aaaaaaaaaaagaagaaaga

SEQ ID NO: 125722 - DNA, 20 bp, Artificial Sequence
  Description of Artificial Sequence: Synthetic oligonucleotide
  Target: LAMA2; (+) strand; PAM type: NRG; PAM sequence: AAG
aaaaaagaagaaagaaagaa

SEQ ID NO: 125723 - DNA, 20 bp, Artificial Sequence
  Description of Artificial Sequence: Synthetic oligonucleotide
  Target: LAMA2; (+) strand; PAM type: NRG; PAM sequence: AAG
gaaagaaagaaaagacgatt

SEQ ID NO: 125724 - DNA, 20 bp, Artificial Sequence
  Description of Artificial Sequence: Synthetic oligonucleotide
  Target: LAMA2; (+) strand; PAM type: NRG; PAM sequence: TGG
agaaagaaaagacgattaag

SEQ ID NO: 125725 - DNA, 20 bp, Artificial Sequence
  Description of Artificial Sequence: Synthetic oligonucleotide
  Target: LAMA2; (+) strand; PAM type: NRG; PAM sequence: TAG
aaaagacgattaagtggttc

SEQ ID NO: 125726 - DNA, 20 bp, Artificial Sequence
  Description of Artificial Sequence: Synthetic oligonucleotide
  Target: LAMA2; (+) strand; PAM type: NRG; PAM sequence: CAG
ttaagtggttctagattcta

SEQ ID NO: 125727 - DNA, 20 bp, Artificial Sequence
  Description of Artificial Sequence: Synthetic oligonucleotide
  Target: LAMA2; (+) strand; PAM type: NRG; PAM sequence: AGG
taagtggttctagattctac

SEQ ID NO: 125728 - DNA, 20 bp, Artificial Sequence
  Description of Artificial Sequence: Synthetic oligonucleotide
  Target: LAMA2; (+) strand; PAM type: NRG; PAM sequence: CAG
tctagattctacaggctgta

SEQ ID NO: 125729 - DNA, 20 bp, Artificial Sequence
  Description of Artificial Sequence: Synthetic oligonucleotide
  Target: LAMA2; (+) strand; PAM type: NRG; PAM sequence: AGG
ctagattctacaggctgtac

SEQ ID NO: 125730 - DNA, 20 bp, Artificial Sequence
  Description of Artificial Sequence: Synthetic oligonucleotide
  Target: LAMA2; (+) strand; PAM type: NRG; PAM sequence: AAG
gattctacaggctgtacagg

SEQ ID NO: 125731 - DNA, 20 bp, Artificial Sequence
  Description of Artificial Sequence: Synthetic oligonucleotide
  Target: LAMA2; (+) strand; PAM type: NRG; PAM sequence: CAG
aggctgtacaggaagcacaa

SEQ ID NO: 125732 - DNA, 20 bp, Artificial Sequence
  Description of Artificial Sequence: Synthetic oligonucleotide
  Target: LAMA2; (+) strand; PAM type: NRG; PAM sequence: TGG
agcacaacagcatctgcctc

SEQ ID NO: 125733 - DNA, 20 bp, Artificial Sequence
  Description of Artificial Sequence: Synthetic oligonucleotide
  Target: LAMA2; (+) strand; PAM type: NRG; PAM sequence: GGG
gcacaacagcatctgcctct

SEQ ID NO: 125734 - DNA, 20 bp, Artificial Sequence
  Description of Artificial Sequence: Synthetic oligonucleotide
  Target: LAMA2; (+) strand; PAM type: NRG; PAM sequence: GGG
cacaacagcatctgcctctg

SEQ ID NO: 125735 - DNA, 20 bp, Artificial Sequence
  Description of Artificial Sequence: Synthetic oligonucleotide
  Target: LAMA2; (+) strand; PAM type: NRG; PAM sequence: GAG
caacagcatctgcctctggg

SEQ ID NO: 125736 - DNA, 20 bp, Artificial Sequence
  Description of Artificial Sequence: Synthetic oligonucleotide
  Target: LAMA2; (+) strand; PAM type: NRG; PAM sequence: AGG
aacagcatctgcctctgggg

SEQ ID NO: 125737 - DNA, 20 bp, Artificial Sequence
  Description of Artificial Sequence: Synthetic oligonucleotide
  Target: LAMA2; (+) strand; PAM type: NRG; PAM sequence: CAG
atctgcctctggggaggcct

SEQ ID NO: 125738 - DNA, 20 bp, Artificial Sequence
  Description of Artificial Sequence: Synthetic oligonucleotide
  Target: LAMA2; (+) strand; PAM type: NRG; PAM sequence: AGG
tctgcctctggggaggcctc

SEQ ID NO: 125739 - DNA, 20 bp, Artificial Sequence
  Description of Artificial Sequence: Synthetic oligonucleotide
  Target: LAMA2; (+) strand; PAM type: NRG; PAM sequence: AAG
gcctctggggaggcctcagg

SEQ ID NO: 125740 - DNA, 20 bp, Artificial Sequence
  Description of Artificial Sequence: Synthetic oligonucleotide
  Target: LAMA2; (+) strand; PAM type: NRG; PAM sequence: TGG
cctcaggaagcttccaatca

SEQ ID NO: 125741 - DNA, 20 bp, Artificial Sequence
  Description of Artificial Sequence: Synthetic oligonucleotide
  Target: LAMA2; (+) strand; PAM type: NRG; PAM sequence: CAG
caggaagcttccaatcatgg

SEQ ID NO: 125742 - DNA, 20 bp, Artificial Sequence
  Description of Artificial Sequence: Synthetic oligonucleotide
  Target: LAMA2; (+) strand; PAM type: NRG; PAM sequence: AAG
gaagcttccaatcatggcag

SEQ ID NO: 125743 - DNA, 20 bp, Artificial Sequence
  Description of Artificial Sequence: Synthetic oligonucleotide
  Target: LAMA2; (+) strand; PAM type: NRG; PAM sequence: AGG
aagcttccaatcatggcaga

SEQ ID NO: 125744 - DNA, 20 bp, Artificial Sequence
  Description of Artificial Sequence: Synthetic oligonucleotide
  Target: LAMA2; (+) strand; PAM type: NRG; PAM sequence: AAG
tccaatcatggcagaaggtt

SEQ ID NO: 125745 - DNA, 20 bp, Artificial Sequence
  Description of Artificial Sequence: Synthetic oligonucleotide
  Target: LAMA2; (+) strand; PAM type: NRG; PAM sequence: AGG
ccaatcatggcagaaggtta

SEQ ID NO: 125746 - DNA, 20 bp, Artificial Sequence
  Description of Artificial Sequence: Synthetic oligonucleotide
  Target: LAMA2; (+) strand; PAM type: NRG; PAM sequence: GAG
aatcatggcagaaggttaag

SEQ ID NO: 125747 - DNA, 20 bp, Artificial Sequence
  Description of Artificial Sequence: Synthetic oligonucleotide
  Target: LAMA2; (+) strand; PAM type: NRG; PAM sequence: AGG
atcatggcagaaggttaagg

SEQ ID NO: 125748 - DNA, 20 bp, Artificial Sequence
  Description of Artificial Sequence: Synthetic oligonucleotide
  Target: LAMA2; (+) strand; PAM type: NRG; PAM sequence: GAG
catggcagaaggttaaggag

SEQ ID NO: 125749 - DNA, 20 bp, Artificial Sequence
  Description of Artificial Sequence: Synthetic oligonucleotide
  Target: LAMA2; (+) strand; PAM type: NRG; PAM sequence: CAG
ggcagaaggttaaggaggag

SEQ ID NO: 125750 - DNA, 20 bp, Artificial Sequence
  Description of Artificial Sequence: Synthetic oligonucleotide
  Target: LAMA2; (+) strand; PAM type: NRG; PAM sequence: AGG
gcagaaggttaaggaggagc

SEQ ID NO: 125751 - DNA, 20 bp, Artificial Sequence
  Description of Artificial Sequence: Synthetic oligonucleotide
  Target: LAMA2; (+) strand; PAM type: NRG; PAM sequence: CAG
ggcatgccacactgcataaa

SEQ ID NO: 125752 - DNA, 20 bp, Artificial Sequence
  Description of Artificial Sequence: Synthetic oligonucleotide
  Target: LAMA2; (+) strand; PAM type: NRG; PAM sequence: AGG
gcatgccacactgcataaac

SEQ ID NO: 125753 - DNA, 20 bp, Artificial Sequence
  Description of Artificial Sequence: Synthetic oligonucleotide
  Target: LAMA2; (+) strand; PAM type: NRG; PAM sequence: GAG
atgccacactgcataaacag

SEQ ID NO: 125754 - DNA, 20 bp, Artificial Sequence
  Description of Artificial Sequence: Synthetic oligonucleotide
  Target: LAMA2; (+) strand; PAM type: NRG; PAM sequence: AAG
cacactgcataaacaggagc

SEQ ID NO: 125755 - DNA, 20 bp, Artificial Sequence
  Description of Artificial Sequence: Synthetic oligonucleotide
  Target: LAMA2; (+) strand; PAM type: NRG; PAM sequence: GAG
cactgcataaacaggagcaa

SEQ ID NO: 125756 - DNA, 20 bp, Artificial Sequence
  Description of Artificial Sequence: Synthetic oligonucleotide
  Target: LAMA2; (+) strand; PAM type: NRG; PAM sequence: GAG
ctgcataaacaggagcaaga

SEQ ID NO: 125757 - DNA, 20 bp, Artificial Sequence
  Description of Artificial Sequence: Synthetic oligonucleotide
  Target: LAMA2; (+) strand; PAM type: NRG; PAM sequence: GAG
gcataaacaggagcaagaga

SEQ ID NO: 125758 - DNA, 20 bp, Artificial Sequence
  Description of Artificial Sequence: Synthetic oligonucleotide
  Target: LAMA2; (+) strand; PAM type: NRG; PAM sequence: TGG
taaacaggagcaagagagag

SEQ ID NO: 125759 - DNA, 20 bp, Artificial Sequence
  Description of Artificial Sequence: Synthetic oligonucleotide
  Target: LAMA2; (+) strand; PAM type: NRG; PAM sequence: GGG
aaacaggagcaagagagagt

SEQ ID NO: 125760 - DNA, 20 bp, Artificial Sequence
  Description of Artificial Sequence: Synthetic oligonucleotide
  Target: LAMA2; (+) strand; PAM type: NRG; PAM sequence: AAG
caggagcaagagagagtggg

SEQ ID NO: 125761 - DNA, 20 bp, Artificial Sequence
  Description of Artificial Sequence: Synthetic oligonucleotide
  Target: LAMA2; (+) strand; PAM type: NRG; PAM sequence: AGG
aggagcaagagagagtggga

SEQ ID NO: 125762 - DNA, 20 bp, Artificial Sequence
  Description of Artificial Sequence: Synthetic oligonucleotide
  Target: LAMA2; (+) strand; PAM type: NRG; PAM sequence: GAG
atactttaaaatgacctcat

SEQ ID NO: 125763 - DNA, 20 bp, Artificial Sequence
  Description of Artificial Sequence: Synthetic oligonucleotide
  Target: LAMA2; (+) strand; PAM type: NRG; PAM sequence: GAG
tcatgagaactcactgtcat

SEQ ID NO: 125764 - DNA, 20 bp, Artificial Sequence
  Description of Artificial Sequence: Synthetic oligonucleotide
  Target: LAMA2; (+) strand; PAM type: NRG; PAM sequence: AGG
catgagaactcactgtcatg

SEQ ID NO: 125765 - DNA, 20 bp, Artificial Sequence
  Description of Artificial Sequence: Synthetic oligonucleotide
  Target: LAMA2; (+) strand; PAM type: NRG; PAM sequence: CAG
agaactcactgtcatgagga

SEQ ID NO: 125766 - DNA, 20 bp, Artificial Sequence
  Description of Artificial Sequence: Synthetic oligonucleotide
  Target: LAMA2; (+) strand; PAM type: NRG; PAM sequence: AAG
actgtcatgaggacagttcc

SEQ ID NO: 125767 - DNA, 20 bp, Artificial Sequence
  Description of Artificial Sequence: Synthetic oligonucleotide
  Target: LAMA2; (+) strand; PAM type: NRG; PAM sequence: AGG
ctgtcatgaggacagttcca

SEQ ID NO: 125768 - DNA, 20 bp, Artificial Sequence
  Description of Artificial Sequence: Synthetic oligonucleotide
  Target: LAMA2; (+) strand; PAM type: NRG; PAM sequence: GGG
tgtcatgaggacagttccaa

SEQ ID NO: 125769 - DNA, 20 bp, Artificial Sequence
  Description of Artificial Sequence: Synthetic oligonucleotide
  Target: LAMA2; (+) strand; PAM type: NRG; PAM sequence: GGG
gtcatgaggacagttccaag

SEQ ID NO: 125770 - DNA, 20 bp, Artificial Sequence
  Description of Artificial Sequence: Synthetic oligonucleotide
  Target: LAMA2; (+) strand; PAM type: NRG; PAM sequence: GGG
tcatgaggacagttccaagg

SEQ ID NO: 125771 - DNA, 20 bp, Artificial Sequence
  Description of Artificial Sequence: Synthetic oligonucleotide
  Target: LAMA2; (+) strand; PAM type: NRG; PAM sequence: TGG
gaggacagttccaaggggga

SEQ ID NO: 125772 - DNA, 20 bp, Artificial Sequence
  Description of Artificial Sequence: Synthetic oligonucleotide
  Target: LAMA2; (+) strand; PAM type: NRG; PAM sequence: GAG
gatggtgctaaaccacttat

SEQ ID NO: 125773 - DNA, 20 bp, Artificial Sequence
  Description of Artificial Sequence: Synthetic oligonucleotide
  Target: LAMA2; (+) strand; PAM type: NRG; PAM sequence: CAG
ctaaaccacttatgagaaat

SEQ ID NO: 125774 - DNA, 20 bp, Artificial Sequence
  Description of Artificial Sequence: Synthetic oligonucleotide
  Target: LAMA2; (+) strand; PAM type: NRG; PAM sequence: CAG
attctccaatcatctcccac

SEQ ID NO: 125775 - DNA, 20 bp, Artificial Sequence
  Description of Artificial Sequence: Synthetic oligonucleotide
  Target: LAMA2; (+) strand; PAM type: NRG; PAM sequence: AGG
ttctccaatcatctcccacc

SEQ ID NO: 125776 - DNA, 20 bp, Artificial Sequence
  Description of Artificial Sequence: Synthetic oligonucleotide
  Target: LAMA2; (+) strand; PAM type: NRG; PAM sequence: TGG
ccaggcccctcccctaacat

SEQ ID NO: 125777 - DNA, 20 bp, Artificial Sequence
  Description of Artificial Sequence: Synthetic oligonucleotide
  Target: LAMA2; (+) strand; PAM type: NRG; PAM sequence: GAG
aggcccctcccctaacattg

SEQ ID NO: 125778 - DNA, 20 bp, Artificial Sequence
  Description of Artificial Sequence: Synthetic oligonucleotide
  Target: LAMA2; (+) strand; PAM type: NRG; PAM sequence: GAG
tggagattacatttcaatac

SEQ ID NO: 125779 - DNA, 20 bp, Artificial Sequence
  Description of Artificial Sequence: Synthetic oligonucleotide
  Target: LAMA2; (+) strand; PAM type: NRG; PAM sequence: TGG
ttacatttcaatacgagatt

SEQ ID NO: 125780 - DNA, 20 bp, Artificial Sequence
  Description of Artificial Sequence: Synthetic oligonucleotide
  Target: LAMA2; (+) strand; PAM type: NRG; PAM sequence: GGG
tacatttcaatacgagattt

SEQ ID NO: 125781 - DNA, 20 bp, Artificial Sequence
  Description of Artificial Sequence: Synthetic oligonucleotide
  Target: LAMA2; (+) strand; PAM type: NRG; PAM sequence: TAG
atttcaatacgagatttggg

SEQ ID NO: 125782 - DNA, 20 bp, Artificial Sequence
  Description of Artificial Sequence: Synthetic oligonucleotide
  Target: LAMA2; (+) strand; PAM type: NRG; PAM sequence: AGG
tttcaatacgagatttgggt

SEQ ID NO: 125783 - DNA, 20 bp, Artificial Sequence
  Description of Artificial Sequence: Synthetic oligonucleotide
  Target: LAMA2; (+) strand; PAM type: NRG; PAM sequence: TGG
cacacatcctatatcacttt

SEQ ID NO: 125784 - DNA, 20 bp, Artificial Sequence
  Description of Artificial Sequence: Synthetic oligonucleotide
  Target: LAMA2; (+) strand; PAM type: NRG; PAM sequence: GAG
cacatcctatatcacttttg

SEQ ID NO: 125785 - DNA, 20 bp, Artificial Sequence
  Description of Artificial Sequence: Synthetic oligonucleotide
  Target: LAMA2; (+) strand; PAM type: NRG; PAM sequence: AAG
tcctatatcacttttggaga

SEQ ID NO: 125786 - DNA, 20 bp, Artificial Sequence
  Description of Artificial Sequence: Synthetic oligonucleotide
  Target: LAMA2; (+) strand; PAM type: NRG; PAM sequence: GAG
ctatatcacttttggagaaa

SEQ ID NO: 125787 - DNA, 20 bp, Artificial Sequence
  Description of Artificial Sequence: Synthetic oligonucleotide
  Target: LAMA2; (+) strand; PAM type: NRG; PAM sequence: TGG
tatcacttttggagaaagag

SEQ ID NO: 125788 - DNA, 20 bp, Artificial Sequence
  Description of Artificial Sequence: Synthetic oligonucleotide
  Target: LAMA2; (+) strand; PAM type: NRG; PAM sequence: GAG
tcacttttggagaaagagtg

SEQ ID NO: 125789 - DNA, 20 bp, Artificial Sequence
  Description of Artificial Sequence: Synthetic oligonucleotide
  Target: LAMA2; (+) strand; PAM type: NRG; PAM sequence: AGG
cacttttggagaaagagtgg

SEQ ID NO: 125790 - DNA, 20 bp, Artificial Sequence
  Description of Artificial Sequence: Synthetic oligonucleotide
  Target: LAMA2; (+) strand; PAM type: NRG; PAM sequence: TAG
ttttggagaaagagtggagg

SEQ ID NO: 125791 - DNA, 20 bp, Artificial Sequence
  Description of Artificial Sequence: Synthetic oligonucleotide
  Target: LAMA2; (+) strand; PAM type: NRG; PAM sequence: AAG
aaagagtggaggtagctctg

SEQ ID NO: 125792 - DNA, 20 bp, Artificial Sequence
  Description of Artificial Sequence: Synthetic oligonucleotide
  Target: LAMA2; (+) strand; PAM type: NRG; PAM sequence: AGG
aagagtggaggtagctctga

SEQ ID NO: 125793 - DNA, 20 bp, Artificial Sequence
  Description of Artificial Sequence: Synthetic oligonucleotide
  Target: LAMA2; (+) strand; PAM type: NRG; PAM sequence: CAG
tctgaaggtttgttacatca

SEQ ID NO: 125794 - DNA, 20 bp, Artificial Sequence
  Description of Artificial Sequence: Synthetic oligonucleotide
  Target: LAMA2; (+) strand; PAM type: NRG; PAM sequence: GAG
tttgttacatcacagcattt

SEQ ID NO: 125795 - DNA, 20 bp, Artificial Sequence
  Description of Artificial Sequence: Synthetic oligonucleotide
  Target: LAMA2; (+) strand; PAM type: NRG; PAM sequence: AGG
ttgttacatcacagcatttg

SEQ ID NO: 125796 - DNA, 20 bp, Artificial Sequence
  Description of Artificial Sequence: Synthetic oligonucleotide
  Target: LAMA2; (+) strand; PAM type: NRG; PAM sequence: TGG
acatcacagcatttgaggaa

SEQ ID NO: 125797 - DNA, 20 bp, Artificial Sequence
  Description of Artificial Sequence: Synthetic oligonucleotide
  Target: LAMA2; (+) strand; PAM type: NRG; PAM sequence: TGG
cacagcatttgaggaatggc

SEQ ID NO: 125798 - DNA, 20 bp, Artificial Sequence
  Description of Artificial Sequence: Synthetic oligonucleotide
  Target: LAMA2; (+) strand; PAM type: NRG; PAM sequence: GGG
acagcatttgaggaatggct

SEQ ID NO: 125799 - DNA, 20 bp, Artificial Sequence
  Description of Artificial Sequence: Synthetic oligonucleotide
  Target: LAMA2; (+) strand; PAM type: NRG; PAM sequence: GGG
cagcatttgaggaatggctg

SEQ ID NO: 125800 - DNA, 20 bp, Artificial Sequence
  Description of Artificial Sequence: Synthetic oligonucleotide
  Target: LAMA2; (+) strand; PAM type: NRG; PAM sequence: TGG
ttgaggaatggctggggtga

SEQ ID NO: 125801 - DNA, 20 bp, Artificial Sequence
  Description of Artificial Sequence: Synthetic oligonucleotide
  Target: LAMA2; (+) strand; PAM type: NRG; PAM sequence: CAG
gggtgatggcaaatatcata

SEQ ID NO: 125802 - DNA, 20 bp, Artificial Sequence
  Description of Artificial Sequence: Synthetic oligonucleotide
  Target: LAMA2; (+) strand; PAM type: NRG; PAM sequence: AAG
tgatggcaaatatcatacag

SEQ ID NO: 125803 - DNA, 20 bp, Artificial Sequence
  Description of Artificial Sequence: Synthetic oligonucleotide
  Target: LAMA2; (+) strand; PAM type: NRG; PAM sequence: GAG
atggcaaatatcatacagaa

SEQ ID NO: 125804 - DNA, 20 bp, Artificial Sequence
  Description of Artificial Sequence: Synthetic oligonucleotide
  Target: LAMA2; (+) strand; PAM type: NRG; PAM sequence: CAG
gcaaatatcatacagaagag

SEQ ID NO: 125805 - DNA, 20 bp, Artificial Sequence
  Description of Artificial Sequence: Synthetic oligonucleotide
  Target: LAMA2; (+) strand; PAM type: NRG; PAM sequence: AGG
caaatatcatacagaagagc

SEQ ID NO: 125806 - DNA, 20 bp, Artificial Sequence
  Description of Artificial Sequence: Synthetic oligonucleotide
  Target: LAMA2; (+) strand; PAM type: NRG; PAM sequence: TAG
atcatacagaagagcaggcg

SEQ ID NO: 125807 - DNA, 20 bp, Artificial Sequence
  Description of Artificial Sequence: Synthetic oligonucleotide
  Target: LAMA2; (+) strand; PAM type: NRG; PAM sequence: AAG
acagaagagcaggcgtagac

SEQ ID NO: 125808 - DNA, 20 bp, Artificial Sequence
  Description of Artificial Sequence: Synthetic oligonucleotide
  Target: LAMA2; (+) strand; PAM type: NRG; PAM sequence: CAG
caggcgtagacaagatatac

SEQ ID NO: 125809 - DNA, 20 bp, Artificial Sequence
  Description of Artificial Sequence: Synthetic oligonucleotide
  Target: LAMA2; (+) strand; PAM type: NRG; PAM sequence: GAG
ccagttgttttcaaatatct

SEQ ID NO: 125810 - DNA, 20 bp, Artificial Sequence
  Description of Artificial Sequence: Synthetic oligonucleotide
  Target: LAMA2; (+) strand; PAM type: NRG; PAM sequence: CAG
tcaaatatctgagaaaatat

SEQ ID NO: 125811 - DNA, 20 bp, Artificial Sequence
  Description of Artificial Sequence: Synthetic oligonucleotide
  Target: LAMA2; (+) strand; PAM type: NRG; PAM sequence: AAG
atatctgagaaaatatcagt

SEQ ID NO: 125812 - DNA, 20 bp, Artificial Sequence
  Description of Artificial Sequence: Synthetic oligonucleotide
  Target: LAMA2; (+) strand; PAM type: NRG; PAM sequence: AAG
tctgagaaaatatcagtaag

SEQ ID NO: 125813 - DNA, 20 bp, Artificial Sequence
  Description of Artificial Sequence: Synthetic oligonucleotide
  Target: LAMA2; (+) strand; PAM type: NRG; PAM sequence: AAG
gagaaaatatcagtaagaag

SEQ ID NO: 125814 - DNA, 20 bp, Artificial Sequence
  Description of Artificial Sequence: Synthetic oligonucleotide
  Target: LAMA2; (+) strand; PAM type: NRG; PAM sequence: TAG
aatatcagtaagaagaagta

SEQ ID NO: 125815 - DNA, 20 bp, Artificial Sequence
  Description of Artificial Sequence: Synthetic oligonucleotide
  Target: LAMA2; (+) strand; PAM type: NRG; PAM sequence: GAG
gtaagaagaagtatagtcat

SEQ ID NO: 125816 - DNA, 20 bp, Artificial Sequence
  Description of Artificial Sequence: Synthetic oligonucleotide
  Target: LAMA2; (+) strand; PAM type: NRG; PAM sequence: TAG
ttttgattaaaaatgcattt

SEQ ID NO: 125817 - DNA, 20 bp, Artificial Sequence
  Description of Artificial Sequence: Synthetic oligonucleotide
  Target: LAMA2; (+) strand; PAM type: NRG; PAM sequence: TAG
tgattaaaaatgcattttag

SEQ ID NO: 125818 - DNA, 20 bp, Artificial Sequence
  Description of Artificial Sequence: Synthetic oligonucleotide
  Target: LAMA2; (+) strand; PAM type: NRG; PAM sequence: TGG
ttaattatgcctttttcctc

SEQ ID NO: 125819 - DNA, 20 bp, Artificial Sequence
  Description of Artificial Sequence: Synthetic oligonucleotide
  Target: LAMA2; (+) strand; PAM type: NRG; PAM sequence: CAG
tgacctatgaaaaaatttgt

SEQ ID NO: 125820 - DNA, 20 bp, Artificial Sequence
  Description of Artificial Sequence: Synthetic oligonucleotide
  Target: LAMA2; (+) strand; PAM type: NRG; PAM sequence: AAG
ctatgaaaaaatttgtcagt

SEQ ID NO: 125821 - DNA, 20 bp, Artificial Sequence
  Description of Artificial Sequence: Synthetic oligonucleotide
  Target: LAMA2; (+) strand; PAM type: NRG; PAM sequence: CAG
atttgttgtaccaaacttct

SEQ ID NO: 125822 - DNA, 20 bp, Artificial Sequence
  Description of Artificial Sequence: Synthetic oligonucleotide
  Target: LAMA2; (+) strand; PAM type: NRG; PAM sequence: TGG
tgtaccaaacttctcagttc

SEQ ID NO: 125823 - DNA, 20 bp, Artificial Sequence
  Description of Artificial Sequence: Synthetic oligonucleotide
  Target: LAMA2; (+) strand; PAM type: NRG; PAM sequence: CAG
tcagttctggactttttaat

SEQ ID NO: 125824 - DNA, 20 bp, Artificial Sequence
  Description of Artificial Sequence: Synthetic oligonucleotide
  Target: LAMA2; (+) strand; PAM type: NRG; PAM sequence: TAG
tctggactttttaatcagtg

SEQ ID NO: 125825 - DNA, 20 bp, Artificial Sequence
  Description of Artificial Sequence: Synthetic oligonucleotide
  Target: LAMA2; (+) strand; PAM type: NRG; PAM sequence: CGG
ttaatcagtgtagttgccat

SEQ ID NO: 125826 - DNA, 20 bp, Artificial Sequence
  Description of Artificial Sequence: Synthetic oligonucleotide
  Target: LAMA2; (+) strand; PAM type: NRG; PAM sequence: CAG
ttgccatcggactcacccac

SEQ ID NO: 125827 - DNA, 20 bp, Artificial Sequence
  Description of Artificial Sequence: Synthetic oligonucleotide
  Target: LAMA2; (+) strand; PAM type: NRG; PAM sequence: CAG
tgatctgtgtcactcaaata

SEQ ID NO: 125828 - DNA, 20 bp, Artificial Sequence
  Description of Artificial Sequence: Synthetic oligonucleotide
  Target: LAMA2; (+) strand; PAM type: NRG; PAM sequence: CAG
tctgtgtcactcaaatacag

SEQ ID NO: 125829 - DNA, 20 bp, Artificial Sequence
  Description of Artificial Sequence: Synthetic oligonucleotide
  Target: LAMA2; (+) strand; PAM type: NRG; PAM sequence: AGG
ctgtgtcactcaaatacagc

SEQ ID NO: 125830 - DNA, 20 bp, Artificial Sequence
  Description of Artificial Sequence: Synthetic oligonucleotide
  Target: LAMA2; (+) strand; PAM type: NRG; PAM sequence: CAG
tgtcactcaaatacagcagg

SEQ ID NO: 125831 - DNA, 20 bp, Artificial Sequence
  Description of Artificial Sequence: Synthetic oligonucleotide
  Target: LAMA2; (+) strand; PAM type: NRG; PAM sequence: AAG
ctcaaatacagcaggcagtg

SEQ ID NO: 125832 - DNA, 20 bp, Artificial Sequence
  Description of Artificial Sequence: Synthetic oligonucleotide
  Target: LAMA2; (+) strand; PAM type: NRG; PAM sequence: CAG
atacagcaggcagtgaagaa

SEQ ID NO: 125833 - DNA, 20 bp, Artificial Sequence
  Description of Artificial Sequence: Synthetic oligonucleotide
  Target: LAMA2; (+) strand; PAM type: NRG; PAM sequence: CAG
cttctatctgtcataaaatc

SEQ ID NO: 125834 - DNA, 20 bp, Artificial Sequence
  Description of Artificial Sequence: Synthetic oligonucleotide
  Target: LAMA2; (+) strand; PAM type: NRG; PAM sequence: AGG
ttctatctgtcataaaatcc

SEQ ID NO: 125835 - DNA, 20 bp, Artificial Sequence
  Description of Artificial Sequence: Synthetic oligonucleotide
  Target: LAMA2; (+) strand; PAM type: NRG; PAM sequence: TAG
aaaatccaggtaccaataac

SEQ ID NO: 125836 - DNA, 20 bp, Artificial Sequence
  Description of Artificial Sequence: Synthetic oligonucleotide
  Target: LAMA2; (+) strand; PAM type: NRG; PAM sequence: AGG
aaatccaggtaccaataact

SEQ ID NO: 125837 - DNA, 20 bp, Artificial Sequence
  Description of Artificial Sequence: Synthetic oligonucleotide
  Target: LAMA2; (+) strand; PAM type: NRG; PAM sequence: GGG
aatccaggtaccaataacta

SEQ ID NO: 125838 - DNA, 20 bp, Artificial Sequence
  Description of Artificial Sequence: Synthetic oligonucleotide
  Target: LAMA2; (+) strand; PAM type: NRG; PAM sequence: AAG
aggtaccaataactagggat

SEQ ID NO: 125839 - DNA, 20 bp, Artificial Sequence
  Description of Artificial Sequence: Synthetic oligonucleotide
  Target: LAMA2; (+) strand; PAM type: NRG; PAM sequence: AAG
ctagggataagtgttttacc

SEQ ID NO: 125840 - DNA, 20 bp, Artificial Sequence
  Description of Artificial Sequence: Synthetic oligonucleotide
  Target: LAMA2; (+) strand; PAM type: NRG; PAM sequence: GAG
agggataagtgttttaccaa

SEQ ID NO: 125841 - DNA, 20 bp, Artificial Sequence
  Description of Artificial Sequence: Synthetic oligonucleotide
  Target: LAMA2; (+) strand; PAM type: NRG; PAM sequence: CAG
gataagtgttttaccaagag

SEQ ID NO: 125842 - DNA, 20 bp, Artificial Sequence
  Description of Artificial Sequence: Synthetic oligonucleotide
  Target: LAMA2; (+) strand; PAM type: NRG; PAM sequence: TAG
accaagagcagttatttcaa

SEQ ID NO: 125843 - DNA, 20 bp, Artificial Sequence
  Description of Artificial Sequence: Synthetic oligonucleotide
  Target: LAMA2; (+) strand; PAM type: NRG; PAM sequence: CAG
aatagcttgaacttaaatac

SEQ ID NO: 125844 - DNA, 20 bp, Artificial Sequence
  Description of Artificial Sequence: Synthetic oligonucleotide
  Target: LAMA2; (+) strand; PAM type: NRG; PAM sequence: CAG
aaataccagattaattttca

SEQ ID NO: 125845 - DNA, 20 bp, Artificial Sequence
  Description of Artificial Sequence: Synthetic oligonucleotide
  Target: LAMA2; (+) strand; PAM type: NRG; PAM sequence: TAG
cacagaataaaaataatgtt

SEQ ID NO: 125846 - DNA, 20 bp, Artificial Sequence
  Description of Artificial Sequence: Synthetic oligonucleotide
  Target: LAMA2; (+) strand; PAM type: NRG; PAM sequence: AAG
ataaaaataatgtttagtat

SEQ ID NO: 125847 - DNA, 20 bp, Artificial Sequence
  Description of Artificial Sequence: Synthetic oligonucleotide
  Target: LAMA2; (+) strand; PAM type: NRG; PAM sequence: TGG
tttagtataagttttaataa

SEQ ID NO: 125848 - DNA, 20 bp, Artificial Sequence
  Description of Artificial Sequence: Synthetic oligonucleotide
  Target: LAMA2; (+) strand; PAM type: NRG; PAM sequence: TAG
taagttttaataatggcatg

SEQ ID NO: 125849 - DNA, 20 bp, Artificial Sequence
  Description of Artificial Sequence: Synthetic oligonucleotide
  Target: LAMA2; (+) strand; PAM type: NRG; PAM sequence: TGG
tggcatgtagatgaaatatt

SEQ ID NO: 125850 - DNA, 20 bp, Artificial Sequence
  Description of Artificial Sequence: Synthetic oligonucleotide
  Target: LAMA2; (+) strand; PAM type: NRG; PAM sequence: TGG
gtagatgaaatatttggact

SEQ ID NO: 125851 - DNA, 20 bp, Artificial Sequence
  Description of Artificial Sequence: Synthetic oligonucleotide
  Target: LAMA2; (+) strand; PAM type: NRG; PAM sequence: AAG
atttggacttggtgactttt

SEQ ID NO: 125852 - DNA, 20 bp, Artificial Sequence
  Description of Artificial Sequence: Synthetic oligonucleotide
  Target: LAMA2; (+) strand; PAM type: NRG; PAM sequence: TGG
acttggtgacttttaagttg

SEQ ID NO: 125853 - DNA, 20 bp, Artificial Sequence
  Description of Artificial Sequence: Synthetic oligonucleotide
  Target: LAMA2; (+) strand; PAM type: NRG; PAM sequence: GAG
tttaaatgacttctctgttt

SEQ ID NO: 125854 - DNA, 20 bp, Artificial Sequence
  Description of Artificial Sequence: Synthetic oligonucleotide
  Target: LAMA2; (+) strand; PAM type: NRG; PAM sequence: AGG
ttaaatgacttctctgtttg

SEQ ID NO: 125855 - DNA, 20 bp, Artificial Sequence
  Description of Artificial Sequence: Synthetic oligonucleotide
  Target: LAMA2; (+) strand; PAM type: NRG; PAM sequence: TGG
cacatttcctatcacatttg

SEQ ID NO: 125856 - DNA, 20 bp, Artificial Sequence
  Description of Artificial Sequence: Synthetic oligonucleotide
  Target: LAMA2; (+) strand; PAM type: NRG; PAM sequence: TAG
atttcctatcacatttgtgg

SEQ ID NO: 125857 - DNA, 20 bp, Artificial Sequence
  Description of Artificial Sequence: Synthetic oligonucleotide
  Target: LAMA2; (+) strand; PAM type: NRG; PAM sequence: AGG
tttcctatcacatttgtggt

SEQ ID NO: 125858 - DNA, 20 bp, Artificial Sequence
  Description of Artificial Sequence: Synthetic oligonucleotide
  Target: LAMA2; (+) strand; PAM type: NRG; PAM sequence: AAG
cctatcacatttgtggtagg

SEQ ID NO: 125859 - DNA, 20 bp, Artificial Sequence
  Description of Artificial Sequence: Synthetic oligonucleotide
  Target: LAMA2; (+) strand; PAM type: NRG; PAM sequence: AAG
atttgtggtaggaagattct

SEQ ID NO: 125860 - DNA, 20 bp, Artificial Sequence
  Description of Artificial Sequence: Synthetic oligonucleotide
  Target: LAMA2; (+) strand; PAM type: NRG; PAM sequence: AAG
aagattctaagatgaccctc

SEQ ID NO: 125861 - DNA, 20 bp, Artificial Sequence
  Description of Artificial Sequence: Synthetic oligonucleotide
  Target: LAMA2; (+) strand; PAM type: NRG; PAM sequence: TGG
ccctcaagattcacaacctc

SEQ ID NO: 125862 - DNA, 20 bp, Artificial Sequence
  Description of Artificial Sequence: Synthetic oligonucleotide
  Target: LAMA2; (+) strand; PAM type: NRG; PAM sequence: GGG
cctcaagattcacaacctct

SEQ ID NO: 125863 - DNA, 20 bp, Artificial Sequence
  Description of Artificial Sequence: Synthetic oligonucleotide
  Target: LAMA2; (+) strand; PAM type: NRG; PAM sequence: GGG
ctcaagattcacaacctctg

SEQ ID NO: 125864 - DNA, 20 bp, Artificial Sequence
  Description of Artificial Sequence: Synthetic oligonucleotide
  Target: LAMA2; (+) strand; PAM type: NRG; PAM sequence: GAG
ctatatgatcccctcctgtt

SEQ ID NO: 125865 - DNA, 20 bp, Artificial Sequence
  Description of Artificial Sequence: Synthetic oligonucleotide
  Target: LAMA2; (+) strand; PAM type: NRG; PAM sequence: TGG
cccctcctgttgagtgtgat

SEQ ID NO: 125866 - DNA, 20 bp, Artificial Sequence
  Description of Artificial Sequence: Synthetic oligonucleotide
  Target: LAMA2; (+) strand; PAM type: NRG; PAM sequence: GAG
cctcctgttgagtgtgattg

SEQ ID NO: 125867 - DNA, 20 bp, Artificial Sequence
  Description of Artificial Sequence: Synthetic oligonucleotide
  Target: LAMA2; (+) strand; PAM type: NRG; PAM sequence: TGG
attggagcctgtgaatatga

SEQ ID NO: 125868 - DNA, 20 bp, Artificial Sequence
  Description of Artificial Sequence: Synthetic oligonucleotide
  Target: LAMA2; (+) strand; PAM type: NRG; PAM sequence: GGG
ttggagcctgtgaatatgat

SEQ ID NO: 125869 - DNA, 20 bp, Artificial Sequence
  Description of Artificial Sequence: Synthetic oligonucleotide
  Target: LAMA2; (+) strand; PAM type: NRG; PAM sequence: TAG
tgggacatcattcccatgat

SEQ ID NO: 125870 - DNA, 20 bp, Artificial Sequence
  Description of Artificial Sequence: Synthetic oligonucleotide
  Target: LAMA2; (+) strand; PAM type: NRG; PAM sequence: AGG
gggacatcattcccatgatt

SEQ ID NO: 125871 - DNA, 20 bp, Artificial Sequence
  Description of Artificial Sequence: Synthetic oligonucleotide
  Target: LAMA2; (+) strand; PAM type: NRG; PAM sequence: AAG
ttaggtaacattttacaaca

SEQ ID NO: 125872 - DNA, 20 bp, Artificial Sequence
  Description of Artificial Sequence: Synthetic oligonucleotide
  Target: LAMA2; (+) strand; PAM type: NRG; PAM sequence: TAG
ggtaacattttacaacaaag

SEQ ID NO: 125873 - DNA, 20 bp, Artificial Sequence
  Description of Artificial Sequence: Synthetic oligonucleotide
  Target: LAMA2; (+) strand; PAM type: NRG; PAM sequence: AAG
aacattttacaacaaagtag

SEQ ID NO: 125874 - DNA, 20 bp, Artificial Sequence
  Description of Artificial Sequence: Synthetic oligonucleotide
  Target: LAMA2; (+) strand; PAM type: NRG; PAM sequence: CGG
acaaagtagaagatataatt

SEQ ID NO: 125875 - DNA, 20 bp, Artificial Sequence
  Description of Artificial Sequence: Synthetic oligonucleotide
  Target: LAMA2; (+) strand; PAM type: NRG; PAM sequence: CAG
gatataattcggatataact

SEQ ID NO: 125876 - DNA, 20 bp, Artificial Sequence
  Description of Artificial Sequence: Synthetic oligonucleotide
  Target: LAMA2; (+) strand; PAM type: NRG; PAM sequence: AGG
atataattcggatataactc

SEQ ID NO: 125877 - DNA, 20 bp, Artificial Sequence
  Description of Artificial Sequence: Synthetic oligonucleotide
  Target: LAMA2; (+) strand; PAM type: NRG; PAM sequence: TGG
taattcggatataactcagg

SEQ ID NO: 125878 - DNA, 20 bp, Artificial Sequence
  Description of Artificial Sequence: Synthetic oligonucleotide
  Target: LAMA2; (+) strand; PAM type: NRG; PAM sequence: TAG
tataactcaggtggctaaat

SEQ ID NO: 125879 - DNA, 20 bp, Artificial Sequence
  Description of Artificial Sequence: Synthetic oligonucleotide
  Target: LAMA2; (+) strand; PAM type: NRG; PAM sequence: AAG
tggctaaattagttttcttc

SEQ ID NO: 125880 - DNA, 20 bp, Artificial Sequence
  Description of Artificial Sequence: Synthetic oligonucleotide
  Target: LAMA2; (+) strand; PAM type: NRG; PAM sequence: AAG
gttttcttcaagctactcaa

SEQ ID NO: 125881 - DNA, 20 bp, Artificial Sequence
  Description of Artificial Sequence: Synthetic oligonucleotide
  Target: LAMA2; (+) strand; PAM type: NRG; PAM sequence: AGG
ttttcttcaagctactcaaa

SEQ ID NO: 125882 - DNA, 20 bp, Artificial Sequence
  Description of Artificial Sequence: Synthetic oligonucleotide
  Target: LAMA2; (+) strand; PAM type: NRG; PAM sequence: AAG
tcttcaagctactcaaaagg

SEQ ID NO: 125883 - DNA, 20 bp, Artificial Sequence
  Description of Artificial Sequence: Synthetic oligonucleotide
  Target: LAMA2; (+) strand; PAM type: NRG; PAM sequence: GAG
ctcaaaaggaagattattct

SEQ ID NO: 125884 - DNA, 20 bp, Artificial Sequence
  Description of Artificial Sequence: Synthetic oligonucleotide
  Target: LAMA2; (+) strand; PAM type: NRG; PAM sequence: AGG
tcaaaaggaagattattctg

SEQ ID NO: 125885 - DNA, 20 bp, Artificial Sequence
  Description of Artificial Sequence: Synthetic oligonucleotide
  Target: LAMA2; (+) strand; PAM type: NRG; PAM sequence: GGG
caaaaggaagattattctga

SEQ ID NO: 125886 - DNA, 20 bp, Artificial Sequence
  Description of Artificial Sequence: Synthetic oligonucleotide
  Target: LAMA2; (+) strand; PAM type: NRG; PAM sequence: AAG
tgagggcacccaacttaatc

SEQ ID NO: 125887 - DNA, 20 bp, Artificial Sequence
  Description of Artificial Sequence: Synthetic oligonucleotide
  Target: LAMA2; (+) strand; PAM type: NRG; PAM sequence: AAG
ttaatcaagtgaactcctaa

SEQ ID NO: 125888 - DNA, 20 bp, Artificial Sequence
  Description of Artificial Sequence: Synthetic oligonucleotide
  Target: LAMA2; (+) strand; PAM type: NRG; PAM sequence: GAG
aatcaagtgaactcctaaaa

SEQ ID NO: 125889 - DNA, 20 bp, Artificial Sequence
  Description of Artificial Sequence: Synthetic oligonucleotide
  Target: LAMA2; (+) strand; PAM type: NRG; PAM sequence: TAG
tgaactcctaaaagagtgtc

SEQ ID NO: 125890 - DNA, 20 bp, Artificial Sequence
  Description of Artificial Sequence: Synthetic oligonucleotide
  Target: LAMA2; (+) strand; PAM type: NRG; PAM sequence: CAG
ctaaaagagtgtctagttct

SEQ ID NO: 125891 - DNA, 20 bp, Artificial Sequence
  Description of Artificial Sequence: Synthetic oligonucleotide
  Target: LAMA2; (+) strand; PAM type: NRG; PAM sequence: GAG
aaaagagtgtctagttctca

SEQ ID NO: 125892 - DNA, 20 bp, Artificial Sequence
  Description of Artificial Sequence: Synthetic oligonucleotide
  Target: LAMA2; (+) strand; PAM type: NRG; PAM sequence: GAG
aagagtgtctagttctcaga

SEQ ID NO: 125893 - DNA, 20 bp, Artificial Sequence
  Description of Artificial Sequence: Synthetic oligonucleotide
  Target: LAMA2; (+) strand; PAM type: NRG; PAM sequence: AAG
gagagcttttcctgctcttg

SEQ ID NO: 125894 - DNA, 20 bp, Artificial Sequence
  Description of Artificial Sequence: Synthetic oligonucleotide
  Target: LAMA2; (+) strand; PAM type: NRG; PAM sequence: AAG
agcttttcctgctcttgaag

SEQ ID NO: 125895 - DNA, 20 bp, Artificial Sequence
  Description of Artificial Sequence: Synthetic oligonucleotide
  Target: LAMA2; (+) strand; PAM type: NRG; PAM sequence: GAG
gaagaagcaaataatcatgt

SEQ ID NO: 125896 - DNA, 20 bp, Artificial Sequence
  Description of Artificial Sequence: Synthetic oligonucleotide
  Target: LAMA2; (+) strand; PAM type: NRG; PAM sequence: AAG
gaagcaaataatcatgtgag

SEQ ID NO: 125897 - DNA, 20 bp, Artificial Sequence
  Description of Artificial Sequence: Synthetic oligonucleotide
  Target: LAMA2; (+) strand; PAM type: NRG; PAM sequence: AGG
aagcaaataatcatgtgaga

SEQ ID NO: 125898 - DNA, 20 bp, Artificial Sequence
  Description of Artificial Sequence: Synthetic oligonucleotide
  Target: LAMA2; (+) strand; PAM type: NRG; PAM sequence: CAG
aatcatgtgagaaggccaca

SEQ ID NO: 125899 - DNA, 20 bp, Artificial Sequence
  Description of Artificial Sequence: Synthetic oligonucleotide
  Target: LAMA2; (+) strand; PAM type: NRG; PAM sequence: AAG
atgtgagaaggccacacagc

SEQ ID NO: 125900 - DNA, 20 bp, Artificial Sequence
  Description of Artificial Sequence: Synthetic oligonucleotide
  Target: LAMA2; (+) strand; PAM type: NRG; PAM sequence: GAG
gtgagaaggccacacagcaa

SEQ ID NO: 125901 - DNA, 20 bp, Artificial Sequence
  Description of Artificial Sequence: Synthetic oligonucleotide
  Target: LAMA2; (+) strand; PAM type: NRG; PAM sequence: AGG
tgagaaggccacacagcaag

SEQ ID NO: 125902 - DNA, 20 bp, Artificial Sequence
  Description of Artificial Sequence: Synthetic oligonucleotide
  Target: LAMA2; (+) strand; PAM type: NRG; PAM sequence: TAG
aggccacacagcaagaggct

SEQ ID NO: 125903 - DNA, 20 bp, Artificial Sequence
  Description of Artificial Sequence: Synthetic oligonucleotide
  Target: LAMA2; (+) strand; PAM type: NRG; PAM sequence: AGG
ggccacacagcaagaggctt

SEQ ID NO: 125904 - DNA, 20 bp, Artificial Sequence
  Description of Artificial Sequence: Synthetic oligonucleotide
  Target: LAMA2; (+) strand; PAM type: NRG; PAM sequence: GAG
ccacacagcaagaggcttag

SEQ ID NO: 125905 - DNA, 20 bp, Artificial Sequence
  Description of Artificial Sequence: Synthetic oligonucleotide
  Target: LAMA2; (+) strand; PAM type: NRG; PAM sequence: AGG
cacacagcaagaggcttagg

SEQ ID NO: 125906 - DNA, 20 bp, Artificial Sequence
  Description of Artificial Sequence: Synthetic oligonucleotide
  Target: LAMA2; (+) strand; PAM type: NRG; PAM sequence: TAG
caagaggcttaggaggcctc

SEQ ID NO: 125907 - DNA, 20 bp, Artificial Sequence
  Description of Artificial Sequence: Synthetic oligonucleotide
  Target: LAMA2; (+) strand; PAM type: NRG; PAM sequence: AAG
gaggcttaggaggcctctag

SEQ ID NO: 125908 - DNA, 20 bp, Artificial Sequence
  Description of Artificial Sequence: Synthetic oligonucleotide
  Target: LAMA2; (+) strand; PAM type: NRG; PAM sequence: GAG
ttaggaggcctctagaagct

SEQ ID NO: 125909 - DNA, 20 bp, Artificial Sequence
  Description of Artificial Sequence: Synthetic oligonucleotide
  Target: LAMA2; (+) strand; PAM type: NRG; PAM sequence: GAG
aggaggcctctagaagctga

SEQ ID NO: 125910 - DNA, 20 bp, Artificial Sequence
  Description of Artificial Sequence: Synthetic oligonucleotide
  Target: LAMA2; (+) strand; PAM type: NRG; PAM sequence: CAG
aggcctctagaagctgagag

SEQ ID NO: 125911 - DNA, 20 bp, Artificial Sequence
  Description of Artificial Sequence: Synthetic oligonucleotide
  Target: LAMA2; (+) strand; PAM type: NRG; PAM sequence: TGG
ctagaagctgagagcagcac

SEQ ID NO: 125912 - DNA, 20 bp, Artificial Sequence
  Description of Artificial Sequence: Synthetic oligonucleotide
  Target: LAMA2; (+) strand; PAM type: NRG; PAM sequence: CAG
agcagcactggattgataat

SEQ ID NO: 125913 - DNA, 20 bp, Artificial Sequence
  Description of Artificial Sequence: Synthetic oligonucleotide
  Target: LAMA2; (+) strand; PAM type: NRG; PAM sequence: AAG
gcactggattgataatcagc

SEQ ID NO: 125914 - DNA, 20 bp, Artificial Sequence
  Description of Artificial Sequence: Synthetic oligonucleotide
  Target: LAMA2; (+) strand; PAM type: NRG; PAM sequence: AAG
tggattgataatcagcaaga

SEQ ID NO: 125915 - DNA, 20 bp, Artificial Sequence
  Description of Artificial Sequence: Synthetic oligonucleotide
  Target: LAMA2; (+) strand; PAM type: NRG; PAM sequence: CAG
tgataatcagcaagaaagca

SEQ ID NO: 125916 - DNA, 20 bp, Artificial Sequence
  Description of Artificial Sequence: Synthetic oligonucleotide
  Target: LAMA2; (+) strand; PAM type: NRG; PAM sequence: GAG
atcagcaagaaagcacagct

SEQ ID NO: 125917 - DNA, 20 bp, Artificial Sequence
  Description of Artificial Sequence: Synthetic oligonucleotide
  Target: LAMA2; (+) strand; PAM type: NRG; PAM sequence: TGG
aaagcacagctgagctaaca

SEQ ID NO: 125918 - DNA, 20 bp, Artificial Sequence
  Description of Artificial Sequence: Synthetic oligonucleotide
  Target: LAMA2; (+) strand; PAM type: NRG; PAM sequence: GAG
agcacagctgagctaacatg

SEQ ID NO: 125919 - DNA, 20 bp, Artificial Sequence
  Description of Artificial Sequence: Synthetic oligonucleotide
  Target: LAMA2; (+) strand; PAM type: NRG; PAM sequence: CAG
ctgagctaacatggagactg

SEQ ID NO: 125920 - DNA, 20 bp, Artificial Sequence
  Description of Artificial Sequence: Synthetic oligonucleotide
  Target: LAMA2; (+) strand; PAM type: NRG; PAM sequence: TAG
catggagactgcagcctctc

SEQ ID NO: 125921 - DNA, 20 bp, Artificial Sequence
  Description of Artificial Sequence: Synthetic oligonucleotide
  Target: LAMA2; (+) strand; PAM type: NRG; PAM sequence: AGG
atggagactgcagcctctct

SEQ ID NO: 125922 - DNA, 20 bp, Artificial Sequence
  Description of Artificial Sequence: Synthetic oligonucleotide
  Target: LAMA2; (+) strand; PAM type: NRG; PAM sequence: CAG
ctgcagcctctctaggtcga

SEQ ID NO: 125923 - DNA, 20 bp, Artificial Sequence
  Description of Artificial Sequence: Synthetic oligonucleotide
  Target: LAMA2; (+) strand; PAM type: NRG; PAM sequence: AGG
tgcagcctctctaggtcgac

SEQ ID NO: 125924 - DNA, 20 bp, Artificial Sequence
  Description of Artificial Sequence: Synthetic oligonucleotide
  Target: LAMA2; (+) strand; PAM type: NRG; PAM sequence: AAG
ttatcaatgaatgttgtttt

SEQ ID NO: 125925 - DNA, 20 bp, Artificial Sequence
  Description of Artificial Sequence: Synthetic oligonucleotide
  Target: LAMA2; (+) strand; PAM type: NRG; PAM sequence: CAG
gtttgtgataatttattata

SEQ ID NO: 125926 - DNA, 20 bp, Artificial Sequence
  Description of Artificial Sequence: Synthetic oligonucleotide
  Target: LAMA2; (+) strand; PAM type: NRG; PAM sequence: AAG
gtaataaaaaccaaatacaa

SEQ ID NO: 125927 - DNA, 20 bp, Artificial Sequence
  Description of Artificial Sequence: Synthetic oligonucleotide
  Target: LAMA2; (+) strand; PAM type: NRG; PAM sequence: AAG
accaaatacaaaagattaaa

SEQ ID NO: 125928 - DNA, 20 bp, Artificial Sequence
  Description of Artificial Sequence: Synthetic oligonucleotide
  Target: LAMA2; (+) strand; PAM type: NRG; PAM sequence: AAG
aaaagattaaaaagaaatct

SEQ ID NO: 125929 - DNA, 20 bp, Artificial Sequence
  Description of Artificial Sequence: Synthetic oligonucleotide
  Target: LAMA2; (+) strand; PAM type: NRG; PAM sequence: AAG
ttaaaaagaaatctaagttg

SEQ ID NO: 125930 - DNA, 20 bp, Artificial Sequence
  Description of Artificial Sequence: Synthetic oligonucleotide
  Target: LAMA2; (+) strand; PAM type: NRG; PAM sequence: TAG
acctaacctactgaacatca

SEQ ID NO: 125931 - DNA, 20 bp, Artificial Sequence
  Description of Artificial Sequence: Synthetic oligonucleotide
  Target: LAMA2; (+) strand; PAM type: NRG; PAM sequence: TAG
acctactgaacatcatagtt

SEQ ID NO: 125932 - DNA, 20 bp, Artificial Sequence
  Description of Artificial Sequence: Synthetic oligonucleotide
  Target: LAMA2; (+) strand; PAM type: NRG; PAM sequence: TAG
ctgaacatcatagtttagcc

SEQ ID NO: 125933 - DNA, 20 bp, Artificial Sequence
  Description of Artificial Sequence: Synthetic oligonucleotide
  Target: LAMA2; (+) strand; PAM type: NRG; PAM sequence: CAG
tagcctacctttaacatact

SEQ ID NO: 125934 - DNA, 20 bp, Artificial Sequence
  Description of Artificial Sequence: Synthetic oligonucleotide
  Target: LAMA2; (+) strand; PAM type: NRG; PAM sequence: TAG
catactcagaacactcacat

SEQ ID NO: 125935 - DNA, 20 bp, Artificial Sequence
  Description of Artificial Sequence: Synthetic oligonucleotide
  Target: LAMA2; (+) strand; PAM type: NRG; PAM sequence: CAG
agaacactcacattagccca

SEQ ID NO: 125936 - DNA, 20 bp, Artificial Sequence
  Description of Artificial Sequence: Synthetic oligonucleotide
  Target: LAMA2; (+) strand; PAM type: NRG; PAM sequence: TGG
cactcacattagcccacagt

SEQ ID NO: 125937 - DNA, 20 bp, Artificial Sequence
  Description of Artificial Sequence: Synthetic oligonucleotide
  Target: LAMA2; (+) strand; PAM type: NRG; PAM sequence: TGG
cacagttggacaaaattacc

SEQ ID NO: 125938 - DNA, 20 bp, Artificial Sequence
  Description of Artificial Sequence: Synthetic oligonucleotide
  Target: LAMA2; (+) strand; PAM type: NRG; PAM sequence: CAG
gacaaaattacctggcaaca

SEQ ID NO: 125939 - DNA, 20 bp, Artificial Sequence
  Description of Artificial Sequence: Synthetic oligonucleotide
  Target: LAMA2; (+) strand; PAM type: NRG; PAM sequence: TGG
cctggcaacacagtacactg

SEQ ID NO: 125940 - DNA, 20 bp, Artificial Sequence
  Description of Artificial Sequence: Synthetic oligonucleotide
  Target: LAMA2; (+) strand; PAM type: NRG; PAM sequence: TGG
agtacactgtggaatattgt

SEQ ID NO: 125941 - DNA, 20 bp, Artificial Sequence
  Description of Artificial Sequence: Synthetic oligonucleotide
  Target: LAMA2; (+) strand; PAM type: NRG; PAM sequence: TGG
ggttcaccctcatgaacatg

SEQ ID NO: 125942 - DNA, 20 bp, Artificial Sequence
  Description of Artificial Sequence: Synthetic oligonucleotide
  Target: LAMA2; (+) strand; PAM type: NRG; PAM sequence: TGG
tcaccctcatgaacatgtgg

SEQ ID NO: 125943 - DNA, 20 bp, Artificial Sequence
  Description of Artificial Sequence: Synthetic oligonucleotide
  Target: LAMA2; (+) strand; PAM type: NRG; PAM sequence: TGG
ctcatgaacatgtggtggac

SEQ ID NO: 125944 - DNA, 20 bp, Artificial Sequence
  Description of Artificial Sequence: Synthetic oligonucleotide
  Target: LAMA2; (+) strand; PAM type: NRG; PAM sequence: GGG
tcatgaacatgtggtggact

SEQ ID NO: 125945 - DNA, 20 bp, Artificial Sequence
  Description of Artificial Sequence: Synthetic oligonucleotide
  Target: LAMA2; (+) strand; PAM type: NRG; PAM sequence: CAG
atgtggtggactgggatcct

SEQ ID NO: 125946 - DNA, 20 bp, Artificial Sequence
  Description of Artificial Sequence: Synthetic oligonucleotide
  Target: LAMA2; (+) strand; PAM type: NRG; PAM sequence: CAG
ctcagcttgctgcccctgcc

SEQ ID NO: 125947 - DNA, 20 bp, Artificial Sequence
  Description of Artificial Sequence: Synthetic oligonucleotide
  Target: LAMA2; (+) strand; PAM type: NRG; PAM sequence: CAG
gctgcccctgcccagcatca

SEQ ID NO: 125948 - DNA, 20 bp, Artificial Sequence
  Description of Artificial Sequence: Synthetic oligonucleotide
  Target: LAMA2; (+) strand; PAM type: NRG; PAM sequence: GAG
tgcccctgcccagcatcaca

SEQ ID NO: 125949 - DNA, 20 bp, Artificial Sequence
  Description of Artificial Sequence: Synthetic oligonucleotide
  Target: LAMA2; (+) strand; PAM type: NRG; PAM sequence: GAG
cccctgcccagcatcacaga

SEQ ID NO: 125950 - DNA, 20 bp, Artificial Sequence
  Description of Artificial Sequence: Synthetic oligonucleotide
  Target: LAMA2; (+) strand; PAM type: NRG; PAM sequence: TAG
agaaatgtgcttcatatcac

SEQ ID NO: 125951 - DNA, 20 bp, Artificial Sequence
  Description of Artificial Sequence: Synthetic oligonucleotide
  Target: LAMA2; (+) strand; PAM type: NRG; PAM sequence: TGG
tgtgcttcatatcactagcc

SEQ ID NO: 125952 - DNA, 20 bp, Artificial Sequence
  Description of Artificial Sequence: Synthetic oligonucleotide
  Target: LAMA2; (+) strand; PAM type: NRG; PAM sequence: AAG
atatcaaaattcaaaatttg

SEQ ID NO: 125953 - DNA, 20 bp, Artificial Sequence
  Description of Artificial Sequence: Synthetic oligonucleotide
  Target: LAMA2; (+) strand; PAM type: NRG; PAM sequence: TGG
atattgactatgtattgctt

SEQ ID NO: 125954 - DNA, 20 bp, Artificial Sequence
  Description of Artificial Sequence: Synthetic oligonucleotide
  Target: LAMA2; (+) strand; PAM type: NRG; PAM sequence: AAG
tcacaaaatcgaaaaatacg

SEQ ID NO: 125955 - DNA, 20 bp, Artificial Sequence
  Description of Artificial Sequence: Synthetic oligonucleotide
  Target: LAMA2; (+) strand; PAM type: NRG; PAM sequence: TAG
tgactatctgtaccaccaaa

SEQ ID NO: 125956 - DNA, 20 bp, Artificial Sequence
  Description of Artificial Sequence: Synthetic oligonucleotide
  Target: LAMA2; (+) strand; PAM type: NRG; PAM sequence: TAG
gtatgtgacctctatttata

SEQ ID NO: 125957 - DNA, 20 bp, Artificial Sequence
  Description of Artificial Sequence: Synthetic oligonucleotide
  Target: LAMA2; (+) strand; PAM type: NRG; PAM sequence: AAG
caatacttcttgatttgaaa

SEQ ID NO: 125958 - DNA, 20 bp, Artificial Sequence
  Description of Artificial Sequence: Synthetic oligonucleotide
  Target: LAMA2; (+) strand; PAM type: NRG; PAM sequence: AGG
aatacttcttgatttgaaaa

SEQ ID NO: 125959 - DNA, 20 bp, Artificial Sequence
  Description of Artificial Sequence: Synthetic oligonucleotide
  Target: LAMA2; (+) strand; PAM type: NRG; PAM sequence: TGG
ttcttgatttgaaaaaggat

SEQ ID NO: 125960 - DNA, 20 bp, Artificial Sequence
  Description of Artificial Sequence: Synthetic oligonucleotide
  Target: LAMA2; (+) strand; PAM type: NRG; PAM sequence: TAG
gaaaaaggattggatgataa

SEQ ID NO: 125961 - DNA, 20 bp, Artificial Sequence
  Description of Artificial Sequence: Synthetic oligonucleotide
  Target: LAMA2; (+) strand; PAM type: NRG; PAM sequence: AAG
aaaggattggatgataatag

SEQ ID NO: 125962 - DNA, 20 bp, Artificial Sequence
  Description of Artificial Sequence: Synthetic oligonucleotide
  Target: LAMA2; (+) strand; PAM type: NRG; PAM sequence: AAG
tggatgataatagaagtgaa

SEQ ID NO: 125963 - DNA, 20 bp, Artificial Sequence
  Description of Artificial Sequence: Synthetic oligonucleotide
  Target: LAMA2; (+) strand; PAM type: NRG; PAM sequence: CAG
ctttttctttatctataaac

SEQ ID NO: 125964 - DNA, 20 bp, Artificial Sequence
  Description of Artificial Sequence: Synthetic oligonucleotide
  Target: LAMA2; (+) strand; PAM type: NRG; PAM sequence: CAG
tttatctataaaccagcgcc

SEQ ID NO: 125965 - DNA, 20 bp, Artificial Sequence
  Description of Artificial Sequence: Synthetic oligonucleotide
  Target: LAMA2; (+) strand; PAM type: NRG; PAM sequence: TGG
tctataaaccagcgcccagt

SEQ ID NO: 125966 - DNA, 20 bp, Artificial Sequence
  Description of Artificial Sequence: Synthetic oligonucleotide
  Target: LAMA2; (+) strand; PAM type: NRG; PAM sequence: TAG
gttggaacatttccatattt

SEQ ID NO: 125967 - DNA, 20 bp, Artificial Sequence
  Description of Artificial Sequence: Synthetic oligonucleotide
  Target: LAMA2; (+) strand; PAM type: NRG; PAM sequence: AAG
catttccatattttagttct

SEQ ID NO: 125968 - DNA, 20 bp, Artificial Sequence
  Description of Artificial Sequence: Synthetic oligonucleotide
  Target: LAMA2; (+) strand; PAM type: NRG; PAM sequence: AGG
atttccatattttagttcta

SEQ ID NO: 125969 - DNA, 20 bp, Artificial Sequence
  Description of Artificial Sequence: Synthetic oligonucleotide
  Target: LAMA2; (+) strand; PAM type: NRG; PAM sequence: AAG
ctaaggttgtaaattgctga

SEQ ID NO: 125970 - DNA, 20 bp, Artificial Sequence
  Description of Artificial Sequence: Synthetic oligonucleotide
  Target: LAMA2; (+) strand; PAM type: NRG; PAM sequence: TAG
gttgtaaattgctgaaagtt

SEQ ID NO: 125971 - DNA, 20 bp, Artificial Sequence
  Description of Artificial Sequence: Synthetic oligonucleotide
  Target: LAMA2; (+) strand; PAM type: NRG; PAM sequence: AGG
ttgtaaattgctgaaagttt

SEQ ID NO: 125972 - DNA, 20 bp, Artificial Sequence
  Description of Artificial Sequence: Synthetic oligonucleotide
  Target: LAMA2; (+) strand; PAM type: NRG; PAM sequence: AAG
attctctgctaacatttgat

SEQ ID NO: 125973 - DNA, 20 bp, Artificial Sequence
  Description of Artificial Sequence: Synthetic oligonucleotide
  Target: LAMA2; (+) strand; PAM type: NRG; PAM sequence: TAG
ctctgctaacatttgataag

SEQ ID NO: 125974 - DNA, 20 bp, Artificial Sequence
  Description of Artificial Sequence: Synthetic oligonucleotide
  Target: LAMA2; (+) strand; PAM type: NRG; PAM sequence: AGG
tctgctaacatttgataagt

SEQ ID NO: 125975 - DNA, 20 bp, Artificial Sequence
  Description of Artificial Sequence: Synthetic oligonucleotide
  Target: LAMA2; (+) strand; PAM type: NRG; PAM sequence: AAG
atatcacaattaatctattt

SEQ ID NO: 125976 - DNA, 20 bp, Artificial Sequence
  Description of Artificial Sequence: Synthetic oligonucleotide
  Target: LAMA2; (+) strand; PAM type: NRG; PAM sequence: AAG
tcacaattaatctatttaag

SEQ ID NO: 125977 - DNA, 20 bp, Artificial Sequence
  Description of Artificial Sequence: Synthetic oligonucleotide
  Target: LAMA2; (+) strand; PAM type: NRG; PAM sequence: AGG
cacaattaatctatttaaga

SEQ ID NO: 125978 - DNA, 20 bp, Artificial Sequence
  Description of Artificial Sequence: Synthetic oligonucleotide
  Target: LAMA2; (+) strand; PAM type: NRG; PAM sequence: GAG
ttaatctatttaagaaggtt

SEQ ID NO: 125979 - DNA, 20 bp, Artificial Sequence
  Description of Artificial Sequence: Synthetic oligonucleotide
  Target: LAMA2; (+) strand; PAM type: NRG; PAM sequence: GAG
aatctatttaagaaggttga

SEQ ID NO: 125980 - DNA, 20 bp, Artificial Sequence
  Description of Artificial Sequence: Synthetic oligonucleotide
  Target: LAMA2; (+) strand; PAM type: NRG; PAM sequence: AAG
agagatatactgttaaacca

SEQ ID NO: 125981 - DNA, 20 bp, Artificial Sequence
  Description of Artificial Sequence: Synthetic oligonucleotide
  Target: LAMA2; (+) strand; PAM type: NRG; PAM sequence: AGG
gagatatactgttaaaccaa

SEQ ID NO: 125982 - DNA, 20 bp, Artificial Sequence
  Description of Artificial Sequence: Synthetic oligonucleotide
  Target: LAMA2; (+) strand; PAM type: NRG; PAM sequence: GGG
agatatactgttaaaccaaa

SEQ ID NO: 125983 - DNA, 20 bp, Artificial Sequence
  Description of Artificial Sequence: Synthetic oligonucleotide
  Target: LAMA2; (+) strand; PAM type: NRG; PAM sequence: TGG
ctgttaaaccaaagggaaaa

SEQ ID NO: 125984 - DNA, 20 bp, Artificial Sequence
  Description of Artificial Sequence: Synthetic oligonucleotide
  Target: LAMA2; (+) strand; PAM type: NRG; PAM sequence: TGG
tatatttttcccctaattca

SEQ ID NO: 125985 - DNA, 20 bp, Artificial Sequence
  Description of Artificial Sequence: Synthetic oligonucleotide
  Target: LAMA2; (+) strand; PAM type: NRG; PAM sequence: GGG
atatttttcccctaattcat

SEQ ID NO: 125986 - DNA, 20 bp, Artificial Sequence
  Description of Artificial Sequence: Synthetic oligonucleotide
  Target: LAMA2; (+) strand; PAM type: NRG; PAM sequence: TAG
atgggcattgaatattaact

SEQ ID NO: 125987 - DNA, 20 bp, Artificial Sequence
  Description of Artificial Sequence: Synthetic oligonucleotide
  Target: LAMA2; (+) strand; PAM type: NRG; PAM sequence: TGG
ggcattgaatattaacttag

SEQ ID NO: 125988 - DNA, 20 bp, Artificial Sequence
  Description of Artificial Sequence: Synthetic oligonucleotide
  Target: LAMA2; (+) strand; PAM type: NRG; PAM sequence: TAG
aacttagtggtctgcacttg

SEQ ID NO: 125989 - DNA, 20 bp, Artificial Sequence
  Description of Artificial Sequence: Synthetic oligonucleotide
  Target: LAMA2; (+) strand; PAM type: NRG; PAM sequence: TAG
cttgttaattgtttgacatc

SEQ ID NO: 125990 - DNA, 20 bp, Artificial Sequence
  Description of Artificial Sequence: Synthetic oligonucleotide
  Target: LAMA2; (+) strand; PAM type: NRG; PAM sequence: AAG
ttgtttgacatctagctgaa

SEQ ID NO: 125991 - DNA, 20 bp, Artificial Sequence
  Description of Artificial Sequence: Synthetic oligonucleotide
  Target: LAMA2; (+) strand; PAM type: NRG; PAM sequence: AAG
tgacatctagctgaaaagta

SEQ ID NO: 125992 - DNA, 20 bp, Artificial Sequence
  Description of Artificial Sequence: Synthetic oligonucleotide
  Target: LAMA2; (+) strand; PAM type: NRG; PAM sequence: CAG
aaaagtaaagtgttatatca

SEQ ID NO: 125993 - DNA, 20 bp, Artificial Sequence
  Description of Artificial Sequence: Synthetic oligonucleotide
  Target: LAMA2; (+) strand; PAM type: NRG; PAM sequence: TAG
gtaaagtgttatatcacaga

SEQ ID NO: 125994 - DNA, 20 bp, Artificial Sequence
  Description of Artificial Sequence: Synthetic oligonucleotide
  Target: LAMA2; (+) strand; PAM type: NRG; PAM sequence: TGG
acatcaccctgtttattcat

SEQ ID NO: 125995 - DNA, 20 bp, Artificial Sequence
  Description of Artificial Sequence: Synthetic oligonucleotide
  Target: LAMA2; (+) strand; PAM type: NRG; PAM sequence: AAG
tgtttattcattggttcact

SEQ ID NO: 125996 - DNA, 20 bp, Artificial Sequence
  Description of Artificial Sequence: Synthetic oligonucleotide
  Target: LAMA2; (+) strand; PAM type: NRG; PAM sequence: TAG
ttggttcactaagccttaat

SEQ ID NO: 125997 - DNA, 20 bp, Artificial Sequence
  Description of Artificial Sequence: Synthetic oligonucleotide
  Target: LAMA2; (+) strand; PAM type: NRG; PAM sequence: AGG
tggttcactaagccttaatt

SEQ ID NO: 125998 - DNA, 20 bp, Artificial Sequence
  Description of Artificial Sequence: Synthetic oligonucleotide
  Target: LAMA2; (+) strand; PAM type: NRG; PAM sequence: TGG
ggtatctatcctgtaccaaa

SEQ ID NO: 125999 - DNA, 20 bp, Artificial Sequence
  Description of Artificial Sequence: Synthetic oligonucleotide
  Target: LAMA2; (+) strand; PAM type: NRG; PAM sequence: CAG
tcctgtaccaaatggtatgc

SEQ ID NO: 126000 - DNA, 20 bp, Artificial Sequence
  Description of Artificial Sequence: Synthetic oligonucleotide
  Target: LAMA2; (+) strand; PAM type: NRG; PAM sequence: AGG
cctgtaccaaatggtatgcc

SEQ ID NO: 126001 - DNA, 20 bp, Artificial Sequence
  Description of Artificial Sequence: Synthetic oligonucleotide
  Target: LAMA2; (+) strand; PAM type: NRG; PAM sequence: GGG
ctgtaccaaatggtatgcca

SEQ ID NO: 126002 - DNA, 20 bp, Artificial Sequence
  Description of Artificial Sequence: Synthetic oligonucleotide
  Target: LAMA2; (+) strand; PAM type: NRG; PAM sequence: GGG
tgtaccaaatggtatgccag

SEQ ID NO: 126003 - DNA, 20 bp, Artificial Sequence
  Description of Artificial Sequence: Synthetic oligonucleotide
  Target: LAMA2; (+) strand; PAM type: NRG; PAM sequence: GAG
ccaaatggtatgccaggggt

SEQ ID NO: 126004 - DNA, 20 bp, Artificial Sequence
  Description of Artificial Sequence: Synthetic oligonucleotide
  Target: LAMA2; (+) strand; PAM type: NRG; PAM sequence: AGG
caaatggtatgccaggggtg

SEQ ID NO: 126005 - DNA, 20 bp, Artificial Sequence
  Description of Artificial Sequence: Synthetic oligonucleotide
  Target: LAMA2; (+) strand; PAM type: NRG; PAM sequence: AAG
atgccaggggtgaggataca

SEQ ID NO: 126006 - DNA, 20 bp, Artificial Sequence
  Description of Artificial Sequence: Synthetic oligonucleotide
  Target: LAMA2; (+) strand; PAM type: NRG; PAM sequence: TAG
caggggtgaggatacaaaga

SEQ ID NO: 126007 - DNA, 20 bp, Artificial Sequence
  Description of Artificial Sequence: Synthetic oligonucleotide
  Target: LAMA2; (+) strand; PAM type: NRG; PAM sequence: TAG
gtgaggatacaaagatagaa

SEQ ID NO: 126008 - DNA, 20 bp, Artificial Sequence
  Description of Artificial Sequence: Synthetic oligonucleotide
  Target: LAMA2; (+) strand; PAM type: NRG; PAM sequence: TAG
aaagatagaatagaactttt

SEQ ID NO: 126009 - DNA, 20 bp, Artificial Sequence
  Description of Artificial Sequence: Synthetic oligonucleotide
  Target: LAMA2; (+) strand; PAM type: NRG; PAM sequence: AAG
gaactttttagtacaatgtg

SEQ ID NO: 126010 - DNA, 20 bp, Artificial Sequence
  Description of Artificial Sequence: Synthetic oligonucleotide
  Target: LAMA2; (+) strand; PAM type: NRG; PAM sequence: AAG
tttttagtacaatgtgaaga

SEQ ID NO: 126011 - DNA, 20 bp, Artificial Sequence
  Description of Artificial Sequence: Synthetic oligonucleotide
  Target: LAMA2; (+) strand; PAM type: NRG; PAM sequence: AAG
aatgtgaagaaagaaacata

SEQ ID NO: 126012 - DNA, 20 bp, Artificial Sequence
  Description of Artificial Sequence: Synthetic oligonucleotide
  Target: LAMA2; (+) strand; PAM type: NRG; PAM sequence: AAG
agaaagaaacataaagaaat

SEQ ID NO: 126013 - DNA, 20 bp, Artificial Sequence
  Description of Artificial Sequence: Synthetic oligonucleotide
  Target: LAMA2; (+) strand; PAM type: NRG; PAM sequence: AAG
ataaagaaataagactgctg

SEQ ID NO: 126014 - DNA, 20 bp, Artificial Sequence
  Description of Artificial Sequence: Synthetic oligonucleotide
  Target: LAMA2; (+) strand; PAM type: NRG; PAM sequence: CAG
tgctgaagtattttaactac

SEQ ID NO: 126015 - DNA, 20 bp, Artificial Sequence
  Description of Artificial Sequence: Synthetic oligonucleotide
  Target: LAMA2; (+) strand; PAM type: NRG; PAM sequence: AGG
gctgaagtattttaactacc

SEQ ID NO: 126016 - DNA, 20 bp, Artificial Sequence
  Description of Artificial Sequence: Synthetic oligonucleotide
  Target: LAMA2; (+) strand; PAM type: NRG; PAM sequence: TGG
tgacttctttatgcttcatt

SEQ ID NO: 126017 - DNA, 20 bp, Artificial Sequence
  Description of Artificial Sequence: Synthetic oligonucleotide
  Target: LAMA2; (+) strand; PAM type: NRG; PAM sequence: GAG
atgcttcatttggattttct

SEQ ID NO: 126018 - DNA, 20 bp, Artificial Sequence
  Description of Artificial Sequence: Synthetic oligonucleotide
  Target: LAMA2; (+) strand; PAM type: NRG; PAM sequence: AGG
tgcttcatttggattttctg

SEQ ID NO: 126019 - DNA, 20 bp, Artificial Sequence
  Description of Artificial Sequence: Synthetic oligonucleotide
  Target: LAMA2; (+) strand; PAM type: NRG; PAM sequence: AAG
ctttaacgttttccgttttt

SEQ ID NO: 126020 - DNA, 20 bp, Artificial Sequence
  Description of Artificial Sequence: Synthetic oligonucleotide
  Target: LAMA2; (+) strand; PAM type: NRG; PAM sequence: AAG
cgttttccgtttttaagact

SEQ ID NO: 126021 - DNA, 20 bp, Artificial Sequence
  Description of Artificial Sequence: Synthetic oligonucleotide
  Target: LAMA2; (+) strand; PAM type: NRG; PAM sequence: AAG
ccgtttttaagactaagctc

SEQ ID NO: 126022 - DNA, 20 bp, Artificial Sequence
  Description of Artificial Sequence: Synthetic oligonucleotide
  Target: LAMA2; (+) strand; PAM type: NRG; PAM sequence: AGG
cgtttttaagactaagctca

SEQ ID NO: 126023 - DNA, 20 bp, Artificial Sequence
  Description of Artificial Sequence: Synthetic oligonucleotide
  Target: LAMA2; (+) strand; PAM type: NRG; PAM sequence: GGG
gtttttaagactaagctcaa

SEQ ID NO: 126024 - DNA, 20 bp, Artificial Sequence
  Description of Artificial Sequence: Synthetic oligonucleotide
  Target: LAMA2; (+) strand; PAM type: NRG; PAM sequence: AAG
ctatttatgtttccatctat

SEQ ID NO: 126025 - DNA, 20 bp, Artificial Sequence
  Description of Artificial Sequence: Synthetic oligonucleotide
  Target: LAMA2; (+) strand; PAM type: NRG; PAM sequence: AAG
tttatgtttccatctataag

SEQ ID NO: 126026 - DNA, 20 bp, Artificial Sequence
  Description of Artificial Sequence: Synthetic oligonucleotide
  Target: LAMA2; (+) strand; PAM type: NRG; PAM sequence: GAG
tatgtttccatctataagaa

SEQ ID NO: 126027 - DNA, 20 bp, Artificial Sequence
  Description of Artificial Sequence: Synthetic oligonucleotide
  Target: LAMA2; (+) strand; PAM type: NRG; PAM sequence: AAG
tgaaatctaatgacactgaa

SEQ ID NO: 126028 - DNA, 20 bp, Artificial Sequence
  Description of Artificial Sequence: Synthetic oligonucleotide
  Target: LAMA2; (+) strand; PAM type: NRG; PAM sequence: GAG
agtgctttcaatgtactgtt

SEQ ID NO: 126029 - DNA, 20 bp, Artificial Sequence
  Description of Artificial Sequence: Synthetic oligonucleotide
  Target: LAMA2; (+) strand; PAM type: NRG; PAM sequence: TGG
gctttcaatgtactgttgag

SEQ ID NO: 126030 - DNA, 20 bp, Artificial Sequence
  Description of Artificial Sequence: Synthetic oligonucleotide
  Target: LAMA2; (+) strand; PAM type: NRG; PAM sequence: GGG
ctttcaatgtactgttgagt

SEQ ID NO: 126031 - DNA, 20 bp, Artificial Sequence
  Description of Artificial Sequence: Synthetic oligonucleotide
  Target: LAMA2; (+) strand; PAM type: NRG; PAM sequence: AAG
aatgtactgttgagtgggaa

SEQ ID NO: 126032 - DNA, 20 bp, Artificial Sequence
  Description of Artificial Sequence: Synthetic oligonucleotide
  Target: LAMA2; (+) strand; PAM type: NRG; PAM sequence: CAG
acatttttaacttgtatatt

SEQ ID NO: 126033 - DNA, 20 bp, Artificial Sequence
  Description of Artificial Sequence: Synthetic oligonucleotide
  Target: LAMA2; (+) strand; PAM type: NRG; PAM sequence: TAG
atatatgtgaatataataca

SEQ ID NO: 126034 - DNA, 20 bp, Artificial Sequence
  Description of Artificial Sequence: Synthetic oligonucleotide
  Target: LAMA2; (+) strand; PAM type: NRG; PAM sequence: AGG
tatatgtgaatataatacat

SEQ ID NO: 126035 - DNA, 20 bp, Artificial Sequence
  Description of Artificial Sequence: Synthetic oligonucleotide
  Target: LAMA2; (+) strand; PAM type: NRG; PAM sequence: AAG
tgtgaatataatacatagga

SEQ ID NO: 126036 - DNA, 20 bp, Artificial Sequence
  Description of Artificial Sequence: Synthetic oligonucleotide
  Target: LAMA2; (+) strand; PAM type: NRG; PAM sequence: GAG
tgaatataatacataggaaa

SEQ ID NO: 126037 - DNA, 20 bp, Artificial Sequence
  Description of Artificial Sequence: Synthetic oligonucleotide
  Target: LAMA2; (+) strand; PAM type: NRG; PAM sequence: AGG
gaatataatacataggaaag

SEQ ID NO: 126038 - DNA, 20 bp, Artificial Sequence
  Description of Artificial Sequence: Synthetic oligonucleotide
  Target: LAMA2; (+) strand; PAM type: NRG; PAM sequence: TGG
ataatacataggaaagaggt

SEQ ID NO: 126039 - DNA, 20 bp, Artificial Sequence
  Description of Artificial Sequence: Synthetic oligonucleotide
  Target: LAMA2; (+) strand; PAM type: NRG; PAM sequence: AAG
atacataggaaagaggttgg

SEQ ID NO: 126040 - DNA, 20 bp, Artificial Sequence
  Description of Artificial Sequence: Synthetic oligonucleotide
  Target: LAMA2; (+) strand; PAM type: NRG; PAM sequence: GAG
gttggaagtaattcaatcat

SEQ ID NO: 126041 - DNA, 20 bp, Artificial Sequence
  Description of Artificial Sequence: Synthetic oligonucleotide
  Target: LAMA2; (+) strand; PAM type: NRG; PAM sequence: AGG
ttggaagtaattcaatcatg

SEQ ID NO: 126042 - DNA, 20 bp, Artificial Sequence
  Description of Artificial Sequence: Synthetic oligonucleotide
  Target: LAMA2; (+) strand; PAM type: NRG; PAM sequence: AAG
aattcaatcatgaggttaac

SEQ ID NO: 126043 - DNA, 20 bp, Artificial Sequence
  Description of Artificial Sequence: Synthetic oligonucleotide
  Target: LAMA2; (+) strand; PAM type: NRG; PAM sequence: CAG
gaggttaacaagttttatct

SEQ ID NO: 126044 - DNA, 20 bp, Artificial Sequence
  Description of Artificial Sequence: Synthetic oligonucleotide
  Target: LAMA2; (+) strand; PAM type: NRG; PAM sequence: GAG
taacaagttttatctcagat

SEQ ID NO: 126045 - DNA, 20 bp, Artificial Sequence
  Description of Artificial Sequence: Synthetic oligonucleotide
  Target: LAMA2; (+) strand; PAM type: NRG; PAM sequence: AAG
ttatatttattctacctaat

SEQ ID NO: 126046 - DNA, 20 bp, Artificial Sequence
  Description of Artificial Sequence: Synthetic oligonucleotide
  Target: LAMA2; (+) strand; PAM type: NRG; PAM sequence: GAG
atttattacttttataacct

SEQ ID NO: 126047 - DNA, 20 bp, Artificial Sequence
  Description of Artificial Sequence: Synthetic oligonucleotide
  Target: LAMA2; (+) strand; PAM type: NRG; PAM sequence: GAG
ttattacttttataacctga

SEQ ID NO: 126048 - DNA, 20 bp, Artificial Sequence
  Description of Artificial Sequence: Synthetic oligonucleotide
  Target: LAMA2; (+) strand; PAM type: NRG; PAM sequence: AAG
agagataaacattattgaaa

SEQ ID NO: 126049 - DNA, 20 bp, Artificial Sequence
  Description of Artificial Sequence: Synthetic oligonucleotide
  Target: LAMA2; (+) strand; PAM type: NRG; PAM sequence: AAG
gataaacattattgaaaaag

SEQ ID NO: 126050 - DNA, 20 bp, Artificial Sequence
  Description of Artificial Sequence: Synthetic oligonucleotide
  Target: LAMA2; (+) strand; PAM type: NRG; PAM sequence: GAG
taaacattattgaaaaagaa

SEQ ID NO: 126051 - DNA, 20 bp, Artificial Sequence
  Description of Artificial Sequence: Synthetic oligonucleotide
  Target: LAMA2; (+) strand; PAM type: NRG; PAM sequence: TGG
attattgaaaaagaagagca

SEQ ID NO: 126052 - DNA, 20 bp, Artificial Sequence
  Description of Artificial Sequence: Synthetic oligonucleotide
  Target: LAMA2; (+) strand; PAM type: NRG; PAM sequence: AAG
aaaagaagagcatggattta

SEQ ID NO: 126053 - DNA, 20 bp, Artificial Sequence
  Description of Artificial Sequence: Synthetic oligonucleotide
  Target: LAMA2; (+) strand; PAM type: NRG; PAM sequence: GAG
gaagagcatggatttaaagc

SEQ ID NO: 126054 - DNA, 20 bp, Artificial Sequence
  Description of Artificial Sequence: Synthetic oligonucleotide
  Target: LAMA2; (+) strand; PAM type: NRG; PAM sequence: AGG
aagagcatggatttaaagcg

SEQ ID NO: 126055 - DNA, 20 bp, Artificial Sequence
  Description of Artificial Sequence: Synthetic oligonucleotide
  Target: LAMA2; (+) strand; PAM type: NRG; PAM sequence: GAG
tggatttaaagcgaggatgt

SEQ ID NO: 126056 - DNA, 20 bp, Artificial Sequence
  Description of Artificial Sequence: Synthetic oligonucleotide
  Target: LAMA2; (+) strand; PAM type: NRG; PAM sequence: TGG
aaagcgaggatgtgagactg

SEQ ID NO: 126057 - DNA, 20 bp, Artificial Sequence
  Description of Artificial Sequence: Synthetic oligonucleotide
  Target: LAMA2; (+) strand; PAM type: NRG; PAM sequence: TGG
gtggctgttacatatttttt

SEQ ID NO: 126058 - DNA, 20 bp, Artificial Sequence
  Description of Artificial Sequence: Synthetic oligonucleotide
  Target: LAMA2; (+) strand; PAM type: NRG; PAM sequence: TGG
tgttacatatttttttggtt

SEQ ID NO: 126059 - DNA, 20 bp, Artificial Sequence
  Description of Artificial Sequence: Synthetic oligonucleotide
  Target: LAMA2; (+) strand; PAM type: NRG; PAM sequence: TGG
tatttttttggtttggacct

SEQ ID NO: 126060 - DNA, 20 bp, Artificial Sequence
  Description of Artificial Sequence: Synthetic oligonucleotide
  Target: LAMA2; (+) strand; PAM type: NRG; PAM sequence: AAG
ttttggtttggaccttggtt

SEQ ID NO: 126061 - DNA, 20 bp, Artificial Sequence
  Description of Artificial Sequence: Synthetic oligonucleotide
  Target: LAMA2; (+) strand; PAM type: NRG; PAM sequence: AAG
tggtttggaccttggttaag

SEQ ID NO: 126062 - DNA, 20 bp, Artificial Sequence
  Description of Artificial Sequence: Synthetic oligonucleotide
  Target: LAMA2; (+) strand; PAM type: NRG; PAM sequence: AGG
ggtttggaccttggttaaga

SEQ ID NO: 126063 - DNA, 20 bp, Artificial Sequence
  Description of Artificial Sequence: Synthetic oligonucleotide
  Target: LAMA2; (+) strand; PAM type: NRG; PAM sequence: AAG
ggaccttggttaagaaggca

SEQ ID NO: 126064 - DNA, 20 bp, Artificial Sequence
  Description of Artificial Sequence: Synthetic oligonucleotide
  Target: LAMA2; (+) strand; PAM type: NRG; PAM sequence: GAG
accttggttaagaaggcaaa

SEQ ID NO: 126065 - DNA, 20 bp, Artificial Sequence
  Description of Artificial Sequence: Synthetic oligonucleotide
  Target: LAMA2; (+) strand; PAM type: NRG; PAM sequence: AGG
ccttggttaagaaggcaaag

SEQ ID NO: 126066 - DNA, 20 bp, Artificial Sequence
  Description of Artificial Sequence: Synthetic oligonucleotide
  Target: LAMA2; (+) strand; PAM type: NRG; PAM sequence: GGG
cttggttaagaaggcaaaga

SEQ ID NO: 126067 - DNA, 20 bp, Artificial Sequence
  Description of Artificial Sequence: Synthetic oligonucleotide
  Target: LAMA2; (+) strand; PAM type: NRG; PAM sequence: TAG
gttaagaaggcaaagaggga

SEQ ID NO: 126068 - DNA, 20 bp, Artificial Sequence
  Description of Artificial Sequence: Synthetic oligonucleotide
  Target: LAMA2; (+) strand; PAM type: NRG; PAM sequence: GAG
taagaaggcaaagagggata

SEQ ID NO: 126069 - DNA, 20 bp, Artificial Sequence
  Description of Artificial Sequence: Synthetic oligonucleotide
  Target: LAMA2; (+) strand; PAM type: NRG; PAM sequence: TGG
gcaaagagggatagagattg

SEQ ID NO: 126070 - DNA, 20 bp, Artificial Sequence
  Description of Artificial Sequence: Synthetic oligonucleotide
  Target: LAMA2; (+) strand; PAM type: NRG; PAM sequence: GGG
caaagagggatagagattgt

SEQ ID NO: 126071 - DNA, 20 bp, Artificial Sequence
  Description of Artificial Sequence: Synthetic oligonucleotide
  Target: LAMA2; (+) strand; PAM type: NRG; PAM sequence: TAG
gggatagagattgtgggaca

SEQ ID NO: 126072 - DNA, 20 bp, Artificial Sequence
  Description of Artificial Sequence: Synthetic oligonucleotide
  Target: LAMA2; (+) strand; PAM type: NRG; PAM sequence: GAG
gatagagattgtgggacata

SEQ ID NO: 126073 - DNA, 20 bp, Artificial Sequence
  Description of Artificial Sequence: Synthetic oligonucleotide
  Target: LAMA2; (+) strand; PAM type: NRG; PAM sequence: AGG
atagagattgtgggacatag

SEQ ID NO: 126074 - DNA, 20 bp, Artificial Sequence
  Description of Artificial Sequence: Synthetic oligonucleotide
  Target: LAMA2; (+) strand; PAM type: NRG; PAM sequence: GGG
tagagattgtgggacataga

SEQ ID NO: 126075 - DNA, 20 bp, Artificial Sequence
  Description of Artificial Sequence: Synthetic oligonucleotide
  Target: LAMA2; (+) strand; PAM type: NRG; PAM sequence: GAG
gagattgtgggacatagagg

SEQ ID NO: 126076 - DNA, 20 bp, Artificial Sequence
  Description of Artificial Sequence: Synthetic oligonucleotide
  Target: LAMA2; (+) strand; PAM type: NRG; PAM sequence: CAG
gtgggacatagagggagacg

SEQ ID NO: 126077 - DNA, 20 bp, Artificial Sequence
  Description of Artificial Sequence: Synthetic oligonucleotide
  Target: LAMA2; (+) strand; PAM type: NRG; PAM sequence: AGG
tgggacatagagggagacgc

SEQ ID NO: 126078 - DNA, 20 bp, Artificial Sequence
  Description of Artificial Sequence: Synthetic oligonucleotide
  Target: LAMA2; (+) strand; PAM type: NRG; PAM sequence: GAG
atagagggagacgcaggcct

SEQ ID NO: 126079 - DNA, 20 bp, Artificial Sequence
  Description of Artificial Sequence: Synthetic oligonucleotide
  Target: LAMA2; (+) strand; PAM type: NRG; PAM sequence: AGG
tagagggagacgcaggcctg

SEQ ID NO: 126080 - DNA, 20 bp, Artificial Sequence
  Description of Artificial Sequence: Synthetic oligonucleotide
  Target: LAMA2; (+) strand; PAM type: NRG; PAM sequence: CAG
gggagacgcaggcctgagga

SEQ ID NO: 126081 - DNA, 20 bp, Artificial Sequence
  Description of Artificial Sequence: Synthetic oligonucleotide
  Target: LAMA2; (+) strand; PAM type: NRG; PAM sequence: CAG
cgcaggcctgaggacagtta

SEQ ID NO: 126082 - DNA, 20 bp, Artificial Sequence
  Description of Artificial Sequence: Synthetic oligonucleotide
  Target: LAMA2; (+) strand; PAM type: NRG; PAM sequence: AAG
aggacagttacagtgttata

SEQ ID NO: 126083 - DNA, 20 bp, Artificial Sequence
  Description of Artificial Sequence: Synthetic oligonucleotide
  Target: LAMA2; (+) strand; PAM type: NRG; PAM sequence: AGG
ggacagttacagtgttataa

SEQ ID NO: 126084 - DNA, 20 bp, Artificial Sequence
  Description of Artificial Sequence: Synthetic oligonucleotide
  Target: LAMA2; (+) strand; PAM type: NRG; PAM sequence: GGG
gacagttacagtgttataaa

SEQ ID NO: 126085 - DNA, 20 bp, Artificial Sequence
  Description of Artificial Sequence: Synthetic oligonucleotide
  Target: LAMA2; (+) strand; PAM type: NRG; PAM sequence: GAG
cagttacagtgttataaagg

SEQ ID NO: 126086 - DNA, 20 bp, Artificial Sequence
  Description of Artificial Sequence: Synthetic oligonucleotide
  Target: LAMA2; (+) strand; PAM type: NRG; PAM sequence: GAG
gttacagtgttataaaggga

SEQ ID NO: 126087 - DNA, 20 bp, Artificial Sequence
  Description of Artificial Sequence: Synthetic oligonucleotide
  Target: LAMA2; (+) strand; PAM type: NRG; PAM sequence: AGG
ttacagtgttataaagggag

SEQ ID NO: 126088 - DNA, 20 bp, Artificial Sequence
  Description of Artificial Sequence: Synthetic oligonucleotide
  Target: LAMA2; (+) strand; PAM type: NRG; PAM sequence: AAG
tgttataaagggagaggctt

SEQ ID NO: 126089 - DNA, 20 bp, Artificial Sequence
  Description of Artificial Sequence: Synthetic oligonucleotide
  Target: LAMA2; (+) strand; PAM type: NRG; PAM sequence: GAG
cttaagtatcattataatat

SEQ ID NO: 126090 - DNA, 20 bp, Artificial Sequence
  Description of Artificial Sequence: Synthetic oligonucleotide
  Target: LAMA2; (+) strand; PAM type: NRG; PAM sequence: CAG
aagtatcattataatatgag

SEQ ID NO: 126091 - DNA, 20 bp, Artificial Sequence
  Description of Artificial Sequence: Synthetic oligonucleotide
  Target: LAMA2; (+) strand; PAM type: NRG; PAM sequence: AAG
taatatgagcagaaattgca

SEQ ID NO: 126092 - DNA, 20 bp, Artificial Sequence
  Description of Artificial Sequence: Synthetic oligonucleotide
  Target: LAMA2; (+) strand; PAM type: NRG; PAM sequence: GAG
atatgagcagaaattgcaaa

SEQ ID NO: 126093 - DNA, 20 bp, Artificial Sequence
  Description of Artificial Sequence: Synthetic oligonucleotide
  Target: LAMA2; (+) strand; PAM type: NRG; PAM sequence: GAG
gagcagaaattgcaaagagt

SEQ ID NO: 126094 - DNA, 20 bp, Artificial Sequence
  Description of Artificial Sequence: Synthetic oligonucleotide
  Target: LAMA2; (+) strand; PAM type: NRG; PAM sequence: AAG
cagaaattgcaaagagtgag

SEQ ID NO: 126095 - DNA, 20 bp, Artificial Sequence
  Description of Artificial Sequence: Synthetic oligonucleotide
  Target: LAMA2; (+) strand; PAM type: NRG; PAM sequence: TGG
caaagagtgagaagctaaaa

SEQ ID NO: 126096 - DNA, 20 bp, Artificial Sequence
  Description of Artificial Sequence: Synthetic oligonucleotide
  Target: LAMA2; (+) strand; PAM type: NRG; PAM sequence: AAG
agagtgagaagctaaaatgg

SEQ ID NO: 126097 - DNA, 20 bp, Artificial Sequence
  Description of Artificial Sequence: Synthetic oligonucleotide
  Target: LAMA2; (+) strand; PAM type: NRG; PAM sequence: AGG
gagtgagaagctaaaatgga

SEQ ID NO: 126098 - DNA, 20 bp, Artificial Sequence
  Description of Artificial Sequence: Synthetic oligonucleotide
  Target: LAMA2; (+) strand; PAM type: NRG; PAM sequence: GGG
agtgagaagctaaaatggaa

SEQ ID NO: 126099 - DNA, 20 bp, Artificial Sequence
  Description of Artificial Sequence: Synthetic oligonucleotide
  Target: LAMA2; (+) strand; PAM type: NRG; PAM sequence: GAG
tgagaagctaaaatggaagg

SEQ ID NO: 126100 - DNA, 20 bp, Artificial Sequence
  Description of Artificial Sequence: Synthetic oligonucleotide
  Target: LAMA2; (+) strand; PAM type: NRG; PAM sequence: TAG
aatggaagggagacgataaa

SEQ ID NO: 126101 - DNA, 20 bp, Artificial Sequence
  Description of Artificial Sequence: Synthetic oligonucleotide
  Target: LAMA2; (+) strand; PAM type: NRG; PAM sequence: CAG
aagggagacgataaatagct

SEQ ID NO: 126102 - DNA, 20 bp, Artificial Sequence
  Description of Artificial Sequence: Synthetic oligonucleotide
  Target: LAMA2; (+) strand; PAM type: NRG; PAM sequence: AAG
gagacgataaatagctcagc

SEQ ID NO: 126103 - DNA, 20 bp, Artificial Sequence
  Description of Artificial Sequence: Synthetic oligonucleotide
  Target: LAMA2; (+) strand; PAM type: NRG; PAM sequence: AGG
agacgataaatagctcagca

SEQ ID NO: 126104 - DNA, 20 bp, Artificial Sequence
  Description of Artificial Sequence: Synthetic oligonucleotide
  Target: LAMA2; (+) strand; PAM type: NRG; PAM sequence: TAG
aaatagctcagcaaggtttt

SEQ ID NO: 126105 - DNA, 20 bp, Artificial Sequence
  Description of Artificial Sequence: Synthetic oligonucleotide
  Target: LAMA2; (+) strand; PAM type: NRG; PAM sequence: AGG
aatagctcagcaaggttttt

SEQ ID NO: 126106 - DNA, 20 bp, Artificial Sequence
  Description of Artificial Sequence: Synthetic oligonucleotide
  Target: LAMA2; (+) strand; PAM type: NRG; PAM sequence: GGG
atagctcagcaaggttttta

SEQ ID NO: 126107 - DNA, 20 bp, Artificial Sequence
  Description of Artificial Sequence: Synthetic oligonucleotide
  Target: LAMA2; (+) strand; PAM type: NRG; PAM sequence: AAG
gctcagcaaggtttttaggg

SEQ ID NO: 126108 - DNA, 20 bp, Artificial Sequence
  Description of Artificial Sequence: Synthetic oligonucleotide
  Target: LAMA2; (+) strand; PAM type: NRG; PAM sequence: CAG
cagcaaggtttttagggaag

SEQ ID NO: 126109 - DNA, 20 bp, Artificial Sequence
  Description of Artificial Sequence: Synthetic oligonucleotide
  Target: LAMA2; (+) strand; PAM type: NRG; PAM sequence: CAG
ttagggaagcagaaatgact

SEQ ID NO: 126110 - DNA, 20 bp, Artificial Sequence
  Description of Artificial Sequence: Synthetic oligonucleotide
  Target: LAMA2; (+) strand; PAM type: NRG; PAM sequence: TAG
aatgactcagatttgaaata

SEQ ID NO: 126111 - DNA, 20 bp, Artificial Sequence
  Description of Artificial Sequence: Synthetic oligonucleotide
  Target: LAMA2; (+) strand; PAM type: NRG; PAM sequence: AGG
atgactcagatttgaaatat

SEQ ID NO: 126112 - DNA, 20 bp, Artificial Sequence
  Description of Artificial Sequence: Synthetic oligonucleotide
  Target: LAMA2; (+) strand; PAM type: NRG; PAM sequence: CAG
cagatttgaaatataggtga

SEQ ID NO: 126113 - DNA, 20 bp, Artificial Sequence
  Description of Artificial Sequence: Synthetic oligonucleotide
  Target: LAMA2; (+) strand; PAM type: NRG; PAM sequence: TAG
tgaaatataggtgacagaat

SEQ ID NO: 126114 - DNA, 20 bp, Artificial Sequence
  Description of Artificial Sequence: Synthetic oligonucleotide
  Target: LAMA2; (+) strand; PAM type: NRG; PAM sequence: AAG
taggtgacagaattagcctt

SEQ ID NO: 126115 - DNA, 20 bp, Artificial Sequence
  Description of Artificial Sequence: Synthetic oligonucleotide
  Target: LAMA2; (+) strand; PAM type: NRG; PAM sequence: AGG
aggtgacagaattagcctta

SEQ ID NO: 126116 - DNA, 20 bp, Artificial Sequence
  Description of Artificial Sequence: Synthetic oligonucleotide
  Target: LAMA2; (+) strand; PAM type: NRG; PAM sequence: GAG
gtgacagaattagccttaag

SEQ ID NO: 126117 - DNA, 20 bp, Artificial Sequence
  Description of Artificial Sequence: Synthetic oligonucleotide
  Target: LAMA2; (+) strand; PAM type: NRG; PAM sequence: AGG
tgacagaattagccttaagg

SEQ ID NO: 126118 - DNA, 20 bp, Artificial Sequence
  Description of Artificial Sequence: Synthetic oligonucleotide
  Target: LAMA2; (+) strand; PAM type: NRG; PAM sequence: GAG
acagaattagccttaaggag

SEQ ID NO: 126119 - DNA, 20 bp, Artificial Sequence
  Description of Artificial Sequence: Synthetic oligonucleotide
  Target: LAMA2; (+) strand; PAM type: NRG; PAM sequence: AAG
aattagccttaaggaggaga

SEQ ID NO: 126120 - DNA, 20 bp, Artificial Sequence
  Description of Artificial Sequence: Synthetic oligonucleotide
  Target: LAMA2; (+) strand; PAM type: NRG; PAM sequence: AAG
gccttaaggaggagaaagaa

SEQ ID NO: 126121 - DNA, 20 bp, Artificial Sequence
  Description of Artificial Sequence: Synthetic oligonucleotide
  Target: LAMA2; (+) strand; PAM type: NRG; PAM sequence: GAG
ggagaaagaaaagatctttt

SEQ ID NO: 126122 - DNA, 20 bp, Artificial Sequence
  Description of Artificial Sequence: Synthetic oligonucleotide
  Target: LAMA2; (+) strand; PAM type: NRG; PAM sequence: AAG
aaaagatcttttgagactat

SEQ ID NO: 126123 - DNA, 20 bp, Artificial Sequence
  Description of Artificial Sequence: Synthetic oligonucleotide
  Target: LAMA2; (+) strand; PAM type: NRG; PAM sequence: AAG
gatcttttgagactataaga

SEQ ID NO: 126124 - DNA, 20 bp, Artificial Sequence
  Description of Artificial Sequence: Synthetic oligonucleotide
  Target: LAMA2; (+) strand; PAM type: NRG; PAM sequence: AGG
atcttttgagactataagaa

SEQ ID NO: 126125 - DNA, 20 bp, Artificial Sequence
  Description of Artificial Sequence: Synthetic oligonucleotide
  Target: LAMA2; (+) strand; PAM type: NRG; PAM sequence: GAG
cttttgagactataagaaag

SEQ ID NO: 126126 - DNA, 20 bp, Artificial Sequence
  Description of Artificial Sequence: Synthetic oligonucleotide
  Target: LAMA2; (+) strand; PAM type: NRG; PAM sequence: AGG
ttttgagactataagaaagg

SEQ ID NO: 126127 - DNA, 20 bp, Artificial Sequence
  Description of Artificial Sequence: Synthetic oligonucleotide
  Target: LAMA2; (+) strand; PAM type: NRG; PAM sequence: GAG
gagactataagaaaggaggt

SEQ ID NO: 126128 - DNA, 20 bp, Artificial Sequence
  Description of Artificial Sequence: Synthetic oligonucleotide
  Target: LAMA2; (+) strand; PAM type: NRG; PAM sequence: GAG
gactataagaaaggaggtga

SEQ ID NO: 126129 - DNA, 20 bp, Artificial Sequence
  Description of Artificial Sequence: Synthetic oligonucleotide
  Target: LAMA2; (+) strand; PAM type: NRG; PAM sequence: TAG
aaaggaggtgagagttgatg

SEQ ID NO: 126130 - DNA, 20 bp, Artificial Sequence
  Description of Artificial Sequence: Synthetic oligonucleotide
  Target: LAMA2; (+) strand; PAM type: NRG; PAM sequence: CAG
tgatgtagccataaaaaata

SEQ ID NO: 126131 - DNA, 20 bp, Artificial Sequence
  Description of Artificial Sequence: Synthetic oligonucleotide
  Target: LAMA2; (+) strand; PAM type: NRG; PAM sequence: GAG
atgtagccataaaaaataca

SEQ ID NO: 126132 - DNA, 20 bp, Artificial Sequence
  Description of Artificial Sequence: Synthetic oligonucleotide
  Target: LAMA2; (+) strand; PAM type: NRG; PAM sequence: AAG
cataaaaaatacagagatga

SEQ ID NO: 126133 - DNA, 20 bp, Artificial Sequence
  Description of Artificial Sequence: Synthetic oligonucleotide
  Target: LAMA2; (+) strand; PAM type: NRG; PAM sequence: AGG
ataaaaaatacagagatgaa

SEQ ID NO: 126134 - DNA, 20 bp, Artificial Sequence
  Description of Artificial Sequence: Synthetic oligonucleotide
  Target: LAMA2; (+) strand; PAM type: NRG; PAM sequence: GGG
taaaaaatacagagatgaaa

SEQ ID NO: 126135 - DNA, 20 bp, Artificial Sequence
  Description of Artificial Sequence: Synthetic oligonucleotide
  Target: LAMA2; (+) strand; PAM type: NRG; PAM sequence: TGG
aaaatacagagatgaaaggg

SEQ ID NO: 126136 - DNA, 20 bp, Artificial Sequence
  Description of Artificial Sequence: Synthetic oligonucleotide
  Target: LAMA2; (+) strand; PAM type: NRG; PAM sequence: GGG
aaatacagagatgaaagggt

SEQ ID NO: 126137 - DNA, 20 bp, Artificial Sequence
  Description of Artificial Sequence: Synthetic oligonucleotide
  Target: LAMA2; (+) strand; PAM type: NRG; PAM sequence: GGG
aatacagagatgaaagggtg

SEQ ID NO: 126138 - DNA, 20 bp, Artificial Sequence
  Description of Artificial Sequence: Synthetic oligonucleotide
  Target: LAMA2; (+) strand; PAM type: NRG; PAM sequence: GAG
tacagagatgaaagggtggg

SEQ ID NO: 126139 - DNA, 20 bp, Artificial Sequence
  Description of Artificial Sequence: Synthetic oligonucleotide
  Target: LAMA2; (+) strand; PAM type: NRG; PAM sequence: AAG
atgaaagggtggggagttaa

SEQ ID NO: 126140 - DNA, 20 bp, Artificial Sequence
  Description of Artificial Sequence: Synthetic oligonucleotide
  Target: LAMA2; (+) strand; PAM type: NRG; PAM sequence: GAG
gaaagggtggggagttaaaa

SEQ ID NO: 126141 - DNA, 20 bp, Artificial Sequence
  Description of Artificial Sequence: Synthetic oligonucleotide
  Target: LAMA2; (+) strand; PAM type: NRG; PAM sequence: TAG
gttaaaagagcctgtgtatg

SEQ ID NO: 126142 - DNA, 20 bp, Artificial Sequence
  Description of Artificial Sequence: Synthetic oligonucleotide
  Target: LAMA2; (+) strand; PAM type: NRG; PAM sequence: TAG
cctaaattcttgctatgaac

SEQ ID NO: 126143 - DNA, 20 bp, Artificial Sequence
  Description of Artificial Sequence: Synthetic oligonucleotide
  Target: LAMA2; (+) strand; PAM type: NRG; PAM sequence: AAG
aattcttgctatgaactaga

SEQ ID NO: 126144 - DNA, 20 bp, Artificial Sequence
  Description of Artificial Sequence: Synthetic oligonucleotide
  Target: LAMA2; (+) strand; PAM type: NRG; PAM sequence: CAG
cttgctatgaactagaaagc

SEQ ID NO: 126145 - DNA, 20 bp, Artificial Sequence
  Description of Artificial Sequence: Synthetic oligonucleotide
  Target: LAMA2; (+) strand; PAM type: NRG; PAM sequence: AGG
ttgctatgaactagaaagcc

SEQ ID NO: 126146 - DNA, 20 bp, Artificial Sequence
  Description of Artificial Sequence: Synthetic oligonucleotide
  Target: LAMA2; (+) strand; PAM type: NRG; PAM sequence: TAG
gaactagaaagccaggtcat

SEQ ID NO: 126147 - DNA, 20 bp, Artificial Sequence
  Description of Artificial Sequence: Synthetic oligonucleotide
  Target: LAMA2; (+) strand; PAM type: NRG; PAM sequence: TGG
tcattagccgaaattgacaa

SEQ ID NO: 126148 - DNA, 20 bp, Artificial Sequence
  Description of Artificial Sequence: Synthetic oligonucleotide
  Target: LAMA2; (+) strand; PAM type: NRG; PAM sequence: GGG
cattagccgaaattgacaat

SEQ ID NO: 126149 - DNA, 20 bp, Artificial Sequence
  Description of Artificial Sequence: Synthetic oligonucleotide
  Target: LAMA2; (+) strand; PAM type: NRG; PAM sequence: TAG
agccgaaattgacaatggga

SEQ ID NO: 126150 - DNA, 20 bp, Artificial Sequence
  Description of Artificial Sequence: Synthetic oligonucleotide
  Target: LAMA2; (+) strand; PAM type: NRG; PAM sequence: AGG
gccgaaattgacaatgggat

SEQ ID NO: 126151 - DNA, 20 bp, Artificial Sequence
  Description of Artificial Sequence: Synthetic oligonucleotide
  Target: LAMA2; (+) strand; PAM type: NRG; PAM sequence: GGG
ccgaaattgacaatgggata

SEQ ID NO: 126152 - DNA, 20 bp, Artificial Sequence
  Description of Artificial Sequence: Synthetic oligonucleotide
  Target: LAMA2; (+) strand; PAM type: NRG; PAM sequence: GGG
cgaaattgacaatgggatag

SEQ ID NO: 126153 - DNA, 20 bp, Artificial Sequence
  Description of Artificial Sequence: Synthetic oligonucleotide
  Target: LAMA2; (+) strand; PAM type: NRG; PAM sequence: TGG
aattgacaatgggatagggg

SEQ ID NO: 126154 - DNA, 20 bp, Artificial Sequence
  Description of Artificial Sequence: Synthetic oligonucleotide
  Target: LAMA2; (+) strand; PAM type: NRG; PAM sequence: TGG
caatgggataggggtggtct

SEQ ID NO: 126155 - DNA, 20 bp, Artificial Sequence
  Description of Artificial Sequence: Synthetic oligonucleotide
  Target: LAMA2; (+) strand; PAM type: NRG; PAM sequence: GGG
aatgggataggggtggtctt

SEQ ID NO: 126156 - DNA, 20 bp, Artificial Sequence
  Description of Artificial Sequence: Synthetic oligonucleotide
  Target: LAMA2; (+) strand; PAM type: NRG; PAM sequence: GGG
atgggataggggtggtcttg

SEQ ID NO: 126157 - DNA, 20 bp, Artificial Sequence
  Description of Artificial Sequence: Synthetic oligonucleotide
  Target: LAMA2; (+) strand; PAM type: NRG; PAM sequence: GAG
gggataggggtggtcttggg

SEQ ID NO: 126158 - DNA, 20 bp, Artificial Sequence
  Description of Artificial Sequence: Synthetic oligonucleotide
  Target: LAMA2; (+) strand; PAM type: NRG; PAM sequence: AGG
ggataggggtggtcttgggg

SEQ ID NO: 126159 - DNA, 20 bp, Artificial Sequence
  Description of Artificial Sequence: Synthetic oligonucleotide
  Target: LAMA2; (+) strand; PAM type: NRG; PAM sequence: AAG
ggggtggtcttggggaggtt

SEQ ID NO: 126160 - DNA, 20 bp, Artificial Sequence
  Description of Artificial Sequence: Synthetic oligonucleotide
  Target: LAMA2; (+) strand; PAM type: NRG; PAM sequence: AGG
gggtggtcttggggaggtta

SEQ ID NO: 126161 - DNA, 20 bp, Artificial Sequence
  Description of Artificial Sequence: Synthetic oligonucleotide
  Target: LAMA2; (+) strand; PAM type: NRG; PAM sequence: TAG
ggtcttggggaggttaaggc

SEQ ID NO: 126162 - DNA, 20 bp, Artificial Sequence
  Description of Artificial Sequence: Synthetic oligonucleotide
  Target: LAMA2; (+) strand; PAM type: NRG; PAM sequence: AAG
ggttaaggctagaaaaatcc

SEQ ID NO: 126163 - DNA, 20 bp, Artificial Sequence
  Description of Artificial Sequence: Synthetic oligonucleotide
  Target: LAMA2; (+) strand; PAM type: NRG; PAM sequence: AAG
aggctagaaaaatccaagca

SEQ ID NO: 126164 - DNA, 20 bp, Artificial Sequence
  Description of Artificial Sequence: Synthetic oligonucleotide
  Target: LAMA2; (+) strand; PAM type: NRG; PAM sequence: CAG
ctagaaaaatccaagcaaag

SEQ ID NO: 126165 - DNA, 20 bp, Artificial Sequence
  Description of Artificial Sequence: Synthetic oligonucleotide
  Target: LAMA2; (+) strand; PAM type: NRG; PAM sequence: AGG
tagaaaaatccaagcaaagc

SEQ ID NO: 126166 - DNA, 20 bp, Artificial Sequence
  Description of Artificial Sequence: Synthetic oligonucleotide
  Target: LAMA2; (+) strand; PAM type: NRG; PAM sequence: AAG
atccaagcaaagcaggtaac

SEQ ID NO: 126167 - DNA, 20 bp, Artificial Sequence
  Description of Artificial Sequence: Synthetic oligonucleotide
  Target: LAMA2; (+) strand; PAM type: NRG; PAM sequence: GAG
ccaagcaaagcaggtaacaa

SEQ ID NO: 126168 - DNA, 20 bp, Artificial Sequence
  Description of Artificial Sequence: Synthetic oligonucleotide
  Target: LAMA2; (+) strand; PAM type: NRG; PAM sequence: AGG
caagcaaagcaggtaacaag

SEQ ID NO: 126169 - DNA, 20 bp, Artificial Sequence
  Description of Artificial Sequence: Synthetic oligonucleotide
  Target: LAMA2; (+) strand; PAM type: NRG; PAM sequence: CAG
gtaacaagaggacttgattc

SEQ ID NO: 126170 - DNA, 20 bp, Artificial Sequence
  Description of Artificial Sequence: Synthetic oligonucleotide
  Target: LAMA2; (+) strand; PAM type: NRG; PAM sequence: CAG
acttgattccagactgtgaa

SEQ ID NO: 126171 - DNA, 20 bp, Artificial Sequence
  Description of Artificial Sequence: Synthetic oligonucleotide
  Target: LAMA2; (+) strand; PAM type: NRG; PAM sequence: GAG
tccagactgtgaacagattt

SEQ ID NO: 126172 - DNA, 20 bp, Artificial Sequence
  Description of Artificial Sequence: Synthetic oligonucleotide
  Target: LAMA2; (+) strand; PAM type: NRG; PAM sequence: AGG
ccagactgtgaacagatttg

SEQ ID NO: 126173 - DNA, 20 bp, Artificial Sequence
  Description of Artificial Sequence: Synthetic oligonucleotide
  Target: LAMA2; (+) strand; PAM type: NRG; PAM sequence: CAG
gactgtgaacagatttgagg

SEQ ID NO: 126174 - DNA, 20 bp, Artificial Sequence
  Description of Artificial Sequence: Synthetic oligonucleotide
  Target: LAMA2; (+) strand; PAM type: NRG; PAM sequence: AGG
actgtgaacagatttgaggc

SEQ ID NO: 126175 - DNA, 20 bp, Artificial Sequence
  Description of Artificial Sequence: Synthetic oligonucleotide
  Target: LAMA2; (+) strand; PAM type: NRG; PAM sequence: GGG
ctgtgaacagatttgaggca

SEQ ID NO: 126176 - DNA, 20 bp, Artificial Sequence
  Description of Artificial Sequence: Synthetic oligonucleotide
  Target: LAMA2; (+) strand; PAM type: NRG; PAM sequence: CAG
gaacagatttgaggcagggt

SEQ ID NO: 126177 - DNA, 20 bp, Artificial Sequence
  Description of Artificial Sequence: Synthetic oligonucleotide
  Target: LAMA2; (+) strand; PAM type: NRG; PAM sequence: AAG
agatttgaggcagggtcaga

SEQ ID NO: 126178 - DNA, 20 bp, Artificial Sequence
  Description of Artificial Sequence: Synthetic oligonucleotide
  Target: LAMA2; (+) strand; PAM type: NRG; PAM sequence: CAG
agaaagccaccctgaaattt

SEQ ID NO: 126179 - DNA, 20 bp, Artificial Sequence
  Description of Artificial Sequence: Synthetic oligonucleotide
  Target: LAMA2; (+) strand; PAM type: NRG; PAM sequence: TAG
atttcagtgctataaacctg

SEQ ID NO: 126180 - DNA, 20 bp, Artificial Sequence
  Description of Artificial Sequence: Synthetic oligonucleotide
  Target: LAMA2; (+) strand; PAM type: NRG; PAM sequence: TGG
tcagtgctataaacctgtag

SEQ ID NO: 126181 - DNA, 20 bp, Artificial Sequence
  Description of Artificial Sequence: Synthetic oligonucleotide
  Target: LAMA2; (+) strand; PAM type: NRG; PAM sequence: GGG
cagtgctataaacctgtagt

SEQ ID NO: 126182 - DNA, 20 bp, Artificial Sequence
  Description of Artificial Sequence: Synthetic oligonucleotide
  Target: LAMA2; (+) strand; PAM type: NRG; PAM sequence: TAG
aacctgtagtgggaactcta

SEQ ID NO: 126183 - DNA, 20 bp, Artificial Sequence
  Description of Artificial Sequence: Synthetic oligonucleotide
  Target: LAMA2; (+) strand; PAM type: NRG; PAM sequence: AGG
acctgtagtgggaactctat

SEQ ID NO: 126184 - DNA, 20 bp, Artificial Sequence
  Description of Artificial Sequence: Synthetic oligonucleotide
  Target: LAMA2; (+) strand; PAM type: NRG; PAM sequence: AAG
aatttctcccttcatcaaca

SEQ ID NO: 126185 - DNA, 20 bp, Artificial Sequence
  Description of Artificial Sequence: Synthetic oligonucleotide
  Target: LAMA2; (+) strand; PAM type: NRG; PAM sequence: TGG
catcaacaaagatattatac

SEQ ID NO: 126186 - DNA, 20 bp, Artificial Sequence
  Description of Artificial Sequence: Synthetic oligonucleotide
  Target: LAMA2; (+) strand; PAM type: NRG; PAM sequence: AAG
gatattatactggtcctgtg

SEQ ID NO: 126187 - DNA, 20 bp, Artificial Sequence
  Description of Artificial Sequence: Synthetic oligonucleotide
  Target: LAMA2; (+) strand; PAM type: NRG; PAM sequence: GAG
tattatactggtcctgtgaa

SEQ ID NO: 126188 - DNA, 20 bp, Artificial Sequence
  Description of Artificial Sequence: Synthetic oligonucleotide
  Target: LAMA2; (+) strand; PAM type: NRG; PAM sequence: AGG
attatactggtcctgtgaag

SEQ ID NO: 126189 - DNA, 20 bp, Artificial Sequence
  Description of Artificial Sequence: Synthetic oligonucleotide
  Target: LAMA2; (+) strand; PAM type: NRG; PAM sequence: TAG
actggtcctgtgaagaggct

SEQ ID NO: 126190 - DNA, 20 bp, Artificial Sequence
  Description of Artificial Sequence: Synthetic oligonucleotide
  Target: LAMA2; (+) strand; PAM type: NRG; PAM sequence: CAG
gaagaggcttagtcacttcc

SEQ ID NO: 126191 - DNA, 20 bp, Artificial Sequence
  Description of Artificial Sequence: Synthetic oligonucleotide
  Target: LAMA2; (+) strand; PAM type: NRG; PAM sequence: AAG
cttcccagtttatgtatttc

SEQ ID NO: 126192 - DNA, 20 bp, Artificial Sequence
  Description of Artificial Sequence: Synthetic oligonucleotide
  Target: LAMA2; (+) strand; PAM type: NRG; PAM sequence: CAG
aagattatattcctaaaaca

SEQ ID NO: 126193 - DNA, 20 bp, Artificial Sequence
  Description of Artificial Sequence: Synthetic oligonucleotide
  Target: LAMA2; (+) strand; PAM type: NRG; PAM sequence: AAG
attatattcctaaaacacag

SEQ ID NO: 126194 - DNA, 20 bp, Artificial Sequence
  Description of Artificial Sequence: Synthetic oligonucleotide
  Target: LAMA2; (+) strand; PAM type: NRG; PAM sequence: CAG
cctaaaacacagaagttttt

SEQ ID NO: 126195 - DNA, 20 bp, Artificial Sequence
  Description of Artificial Sequence: Synthetic oligonucleotide
  Target: LAMA2; (+) strand; PAM type: NRG; PAM sequence: CAG
tttgttccctaacctgaccc

SEQ ID NO: 126196 - DNA, 20 bp, Artificial Sequence
  Description of Artificial Sequence: Synthetic oligonucleotide
  Target: LAMA2; (+) strand; PAM type: NRG; PAM sequence: AAG
cagtctacctgtttccatcc

SEQ ID NO: 126197 - DNA, 20 bp, Artificial Sequence
  Description of Artificial Sequence: Synthetic oligonucleotide
  Target: LAMA2; (+) strand; PAM type: NRG; PAM sequence: CAG
taccacttctaaaccacctc

SEQ ID NO: 126198 - DNA, 20 bp, Artificial Sequence
  Description of Artificial Sequence: Synthetic oligonucleotide
  Target: LAMA2; (+) strand; PAM type: NRG; PAM sequence: GAG
aaaaaacacacactatgctt

SEQ ID NO: 126199 - DNA, 20 bp, Artificial Sequence
  Description of Artificial Sequence: Synthetic oligonucleotide
  Target: LAMA2; (+) strand; PAM type: NRG; PAM sequence: TAG
acacaccttcctctaaacat

SEQ ID NO: 126200 - DNA, 20 bp, Artificial Sequence
  Description of Artificial Sequence: Synthetic oligonucleotide
  Target: LAMA2; (+) strand; PAM type: NRG; PAM sequence: TAG
tctaaacattagtgtgaaat

SEQ ID NO: 126201 - DNA, 20 bp, Artificial Sequence
  Description of Artificial Sequence: Synthetic oligonucleotide
  Target: LAMA2; (+) strand; PAM type: NRG; PAM sequence: AGG
ctaaacattagtgtgaaatt

SEQ ID NO: 126202 - DNA, 20 bp, Artificial Sequence
  Description of Artificial Sequence: Synthetic oligonucleotide
  Target: LAMA2; (+) strand; PAM type: NRG; PAM sequence: TGG
tagtgtgaaattaggacatt

SEQ ID NO: 126203 - DNA, 20 bp, Artificial Sequence
  Description of Artificial Sequence: Synthetic oligonucleotide
  Target: LAMA2; (+) strand; PAM type: NRG; PAM sequence: GGG
agtgtgaaattaggacattt

SEQ ID NO: 126204 - DNA, 20 bp, Artificial Sequence
  Description of Artificial Sequence: Synthetic oligonucleotide
  Target: LAMA2; (+) strand; PAM type: NRG; PAM sequence: TGG
cttcaaatcgcatgttgaaa

SEQ ID NO: 126205 - DNA, 20 bp, Artificial Sequence
  Description of Artificial Sequence: Synthetic oligonucleotide
  Target: LAMA2; (+) strand; PAM type: NRG; PAM sequence: CAG
gcatgttgaaatggtattcc

SEQ ID NO: 126206 - DNA, 20 bp, Artificial Sequence
  Description of Artificial Sequence: Synthetic oligonucleotide
  Target: LAMA2; (+) strand; PAM type: NRG; PAM sequence: TGG
tgaaatggtattcccagtat

SEQ ID NO: 126207 - DNA, 20 bp, Artificial Sequence
  Description of Artificial Sequence: Synthetic oligonucleotide
  Target: LAMA2; (+) strand; PAM type: NRG; PAM sequence: TGG
ggtattcccagtattggacg

SEQ ID NO: 126208 - DNA, 20 bp, Artificial Sequence
  Description of Artificial Sequence: Synthetic oligonucleotide
  Target: LAMA2; (+) strand; PAM type: NRG; PAM sequence: GGG
gtattcccagtattggacgt

SEQ ID NO: 126209 - DNA, 20 bp, Artificial Sequence
  Description of Artificial Sequence: Synthetic oligonucleotide
  Target: LAMA2; (+) strand; PAM type: NRG; PAM sequence: GGG
tattcccagtattggacgtg

SEQ ID NO: 126210 - DNA, 20 bp, Artificial Sequence
  Description of Artificial Sequence: Synthetic oligonucleotide
  Target: LAMA2; (+) strand; PAM type: NRG; PAM sequence: TGG
ccagtattggacgtggggac

SEQ ID NO: 126211 - DNA, 20 bp, Artificial Sequence
  Description of Artificial Sequence: Synthetic oligonucleotide
  Target: LAMA2; (+) strand; PAM type: NRG; PAM sequence: TGG
gtattggacgtggggactgg

SEQ ID NO: 126212 - DNA, 20 bp, Artificial Sequence
  Description of Artificial Sequence: Synthetic oligonucleotide
  Target: LAMA2; (+) strand; PAM type: NRG; PAM sequence: GGG
tattggacgtggggactggt

SEQ ID NO: 126213 - DNA, 20 bp, Artificial Sequence
  Description of Artificial Sequence: Synthetic oligonucleotide
  Target: LAMA2; (+) strand; PAM type: NRG; PAM sequence: GAG
ttggacgtggggactggtgg

SEQ ID NO: 126214 - DNA, 20 bp, Artificial Sequence
  Description of Artificial Sequence: Synthetic oligonucleotide
  Target: LAMA2; (+) strand; PAM type: NRG; PAM sequence: AGG
tggacgtggggactggtggg

SEQ ID NO: 126215 - DNA, 20 bp, Artificial Sequence
  Description of Artificial Sequence: Synthetic oligonucleotide
  Target: LAMA2; (+) strand; PAM type: NRG; PAM sequence: TGG
ggggactggtgggaggtgat

SEQ ID NO: 126216 - DNA, 20 bp, Artificial Sequence
  Description of Artificial Sequence: Synthetic oligonucleotide
  Target: LAMA2; (+) strand; PAM type: NRG; PAM sequence: TGG
ggtgggaggtgattggatca

SEQ ID NO: 126217 - DNA, 20 bp, Artificial Sequence
  Description of Artificial Sequence: Synthetic oligonucleotide
  Target: LAMA2; (+) strand; PAM type: NRG; PAM sequence: GGG
gtgggaggtgattggatcat

SEQ ID NO: 126218 - DNA, 20 bp, Artificial Sequence
  Description of Artificial Sequence: Synthetic oligonucleotide
  Target: LAMA2; (+) strand; PAM type: NRG; PAM sequence: GGG
tgggaggtgattggatcatg

SEQ ID NO: 126219 - DNA, 20 bp, Artificial Sequence
  Description of Artificial Sequence: Synthetic oligonucleotide
  Target: LAMA2; (+) strand; PAM type: NRG; PAM sequence: CAG
aggtgattggatcatgggga

SEQ ID NO: 126220 - DNA, 20 bp, Artificial Sequence
  Description of Artificial Sequence: Synthetic oligonucleotide
  Target: LAMA2; (+) strand; PAM type: NRG; PAM sequence: TGG
ggggacagatccctcatgaa

SEQ ID NO: 126221 - DNA, 20 bp, Artificial Sequence
  Description of Artificial Sequence: Synthetic oligonucleotide
  Target: LAMA2; (+) strand; PAM type: NRG; PAM sequence: TAG
cagatccctcatgaatggtg

SEQ ID NO: 126222 - DNA, 20 bp, Artificial Sequence
  Description of Artificial Sequence: Synthetic oligonucleotide
  Target: LAMA2; (+) strand; PAM type: NRG; PAM sequence: TGG
atggtgtagcaccatcccct

SEQ ID NO: 126223 - DNA, 20 bp, Artificial Sequence
  Description of Artificial Sequence: Synthetic oligonucleotide
  Target: LAMA2; (+) strand; PAM type: NRG; PAM sequence: AAG
agcaccatccccttggtgat

SEQ ID NO: 126224 - DNA, 20 bp, Artificial Sequence
  Description of Artificial Sequence: Synthetic oligonucleotide
  Target: LAMA2; (+) strand; PAM type: NRG; PAM sequence: GAG
ccatccccttggtgataagt

SEQ ID NO: 126225 - DNA, 20 bp, Artificial Sequence
  Description of Artificial Sequence: Synthetic oligonucleotide
  Target: LAMA2; (+) strand; PAM type: NRG; PAM sequence: TAG
gtgataagtgagttctccct

SEQ ID NO: 126226 - DNA, 20 bp, Artificial Sequence
  Description of Artificial Sequence: Synthetic oligonucleotide
  Target: LAMA2; (+) strand; PAM type: NRG; PAM sequence: GAG
agttctcccttagttcccat

SEQ ID NO: 126227 - DNA, 20 bp, Artificial Sequence
  Description of Artificial Sequence: Synthetic oligonucleotide
  Target: LAMA2; (+) strand; PAM type: NRG; PAM sequence: TGG
cccttagttcccatgagatc

SEQ ID NO: 126228 - DNA, 20 bp, Artificial Sequence
  Description of Artificial Sequence: Synthetic oligonucleotide
  Target: LAMA2; (+) strand; PAM type: NRG; PAM sequence: AAG
catgagatctggttgtttaa

SEQ ID NO: 126229 - DNA, 20 bp, Artificial Sequence
  Description of Artificial Sequence: Synthetic oligonucleotide
  Target: LAMA2; (+) strand; PAM type: NRG; PAM sequence: TGG
tctggttgtttaaaagaaat

SEQ ID NO: 126230 - DNA, 20 bp, Artificial Sequence
  Description of Artificial Sequence: Synthetic oligonucleotide
  Target: LAMA2; (+) strand; PAM type: NRG; PAM sequence: GGG
ctggttgtttaaaagaaatt

SEQ ID NO: 126231 - DNA, 20 bp, Artificial Sequence
  Description of Artificial Sequence: Synthetic oligonucleotide
  Target: LAMA2; (+) strand; PAM type: NRG; PAM sequence: CAG
tccatgtgacatgtgtgctc

SEQ ID NO: 126232 - DNA, 20 bp, Artificial Sequence
  Description of Artificial Sequence: Synthetic oligonucleotide
  Target: LAMA2; (+) strand; PAM type: NRG; PAM sequence: TGG
gctttatcttctgccatgac

SEQ ID NO: 126233 - DNA, 20 bp, Artificial Sequence
  Description of Artificial Sequence: Synthetic oligonucleotide
  Target: LAMA2; (+) strand; PAM type: NRG; PAM sequence: AAG
ttatcttctgccatgactgg

SEQ ID NO: 126234 - DNA, 20 bp, Artificial Sequence
  Description of Artificial Sequence: Synthetic oligonucleotide
  Target: LAMA2; (+) strand; PAM type: NRG; PAM sequence: GAG
gccatgactggaagcttcct

SEQ ID NO: 126235 - DNA, 20 bp, Artificial Sequence
  Description of Artificial Sequence: Synthetic oligonucleotide
  Target: LAMA2; (+) strand; PAM type: NRG; PAM sequence: AGG
ccatgactggaagcttcctg

SEQ ID NO: 126236 - DNA, 20 bp, Artificial Sequence
  Description of Artificial Sequence: Synthetic oligonucleotide
  Target: LAMA2; (+) strand; PAM type: NRG; PAM sequence: CAG
aagcttcctgaggccctcac

SEQ ID NO: 126237 - DNA, 20 bp, Artificial Sequence
  Description of Artificial Sequence: Synthetic oligonucleotide
  Target: LAMA2; (+) strand; PAM type: NRG; PAM sequence: CAG
cctgaggccctcaccagaat

SEQ ID NO: 126238 - DNA, 20 bp, Artificial Sequence
  Description of Artificial Sequence: Synthetic oligonucleotide
  Target: LAMA2; (+) strand; PAM type: NRG; PAM sequence: TGG
agaatcagatgtctgcacca

SEQ ID NO: 126239 - DNA, 20 bp, Artificial Sequence
  Description of Artificial Sequence: Synthetic oligonucleotide
  Target: LAMA2; (+) strand; PAM type: NRG; PAM sequence: CAG
tctgcaccatggttcctgta

SEQ ID NO: 126240 - DNA, 20 bp, Artificial Sequence
  Description of Artificial Sequence: Synthetic oligonucleotide
  Target: LAMA2; (+) strand; PAM type: NRG; PAM sequence: CAG
catggttcctgtacagcctg

SEQ ID NO: 126241 - DNA, 20 bp, Artificial Sequence
  Description of Artificial Sequence: Synthetic oligonucleotide
  Target: LAMA2; (+) strand; PAM type: NRG; PAM sequence: CAG
ttcctgtacagcctgcagaa

SEQ ID NO: 126242 - DNA, 20 bp, Artificial Sequence
  Description of Artificial Sequence: Synthetic oligonucleotide
  Target: LAMA2; (+) strand; PAM type: NRG; PAM sequence: GAG
cctgtacagcctgcagaaca

SEQ ID NO: 126243 - DNA, 20 bp, Artificial Sequence
  Description of Artificial Sequence: Synthetic oligonucleotide
  Target: LAMA2; (+) strand; PAM type: NRG; PAM sequence: CAG
tcttttctttataaattacc

SEQ ID NO: 126244 - DNA, 20 bp, Artificial Sequence
  Description of Artificial Sequence: Synthetic oligonucleotide
  Target: LAMA2; (+) strand; PAM type: NRG; PAM sequence: CAG
ctttataaattacccagcct

SEQ ID NO: 126245 - DNA, 20 bp, Artificial Sequence
  Description of Artificial Sequence: Synthetic oligonucleotide
  Target: LAMA2; (+) strand; PAM type: NRG; PAM sequence: AAG
cagcctcagatgtttcttaa

SEQ ID NO: 126246 - DNA, 20 bp, Artificial Sequence
  Description of Artificial Sequence: Synthetic oligonucleotide
  Target: LAMA2; (+) strand; PAM type: NRG; PAM sequence: CAG
cctcagatgtttcttaaaag

SEQ ID NO: 126247 - DNA, 20 bp, Artificial Sequence
  Description of Artificial Sequence: Synthetic oligonucleotide
  Target: LAMA2; (+) strand; PAM type: NRG; PAM sequence: TGG
cttaaaagcagtgcaaaaaa

SEQ ID NO: 126248 - DNA, 20 bp, Artificial Sequence
  Description of Artificial Sequence: Synthetic oligonucleotide
  Target: LAMA2; (+) strand; PAM type: NRG; PAM sequence: TGG
tggcttaacactgtgatatt

SEQ ID NO: 126249 - DNA, 20 bp, Artificial Sequence
  Description of Artificial Sequence: Synthetic oligonucleotide
  Target: LAMA2; (+) strand; PAM type: NRG; PAM sequence: TAG
ctgtgatatttggtattttc

SEQ ID NO: 126250 - DNA, 20 bp, Artificial Sequence
  Description of Artificial Sequence: Synthetic oligonucleotide
  Target: LAMA2; (+) strand; PAM type: NRG; PAM sequence: TAG
tttggtattttctagtccat

SEQ ID NO: 126251 - DNA, 20 bp, Artificial Sequence
  Description of Artificial Sequence: Synthetic oligonucleotide
  Target: LAMA2; (+) strand; PAM type: NRG; PAM sequence: TAG
tagtgcacatccccccgatg

SEQ ID NO: 126252 - DNA, 20 bp, Artificial Sequence
  Description of Artificial Sequence: Synthetic oligonucleotide
  Target: LAMA2; (+) strand; PAM type: NRG; PAM sequence: AGG
agtgcacatccccccgatgt

SEQ ID NO: 126253 - DNA, 20 bp, Artificial Sequence
  Description of Artificial Sequence: Synthetic oligonucleotide
  Target: LAMA2; (+) strand; PAM type: NRG; PAM sequence: TGG
cccccgatgtaggataaata

SEQ ID NO: 126254 - DNA, 20 bp, Artificial Sequence
  Description of Artificial Sequence: Synthetic oligonucleotide
  Target: LAMA2; (+) strand; PAM type: NRG; PAM sequence: GAG
gaatatttgaatatttttat

SEQ ID NO: 126255 - DNA, 20 bp, Artificial Sequence
  Description of Artificial Sequence: Synthetic oligonucleotide
  Target: LAMA2; (+) strand; PAM type: NRG; PAM sequence: AAG
tatttttatgagtaataatt

SEQ ID NO: 126256 - DNA, 20 bp, Artificial Sequence
  Description of Artificial Sequence: Synthetic oligonucleotide
  Target: LAMA2; (+) strand; PAM type: NRG; PAM sequence: CAG
ttattgaattatcacaactc

SEQ ID NO: 126257 - DNA, 20 bp, Artificial Sequence
  Description of Artificial Sequence: Synthetic oligonucleotide
  Target: LAMA2; (+) strand; PAM type: NRG; PAM sequence: GAG
tgaattatcacaactccagt

SEQ ID NO: 126258 - DNA, 20 bp, Artificial Sequence
  Description of Artificial Sequence: Synthetic oligonucleotide
  Target: LAMA2; (+) strand; PAM type: NRG; PAM sequence: AAG
tatcacaactccagtgagat

SEQ ID NO: 126259 - DNA, 20 bp, Artificial Sequence
  Description of Artificial Sequence: Synthetic oligonucleotide
  Target: LAMA2; (+) strand; PAM type: NRG; PAM sequence: TAG
aagtctaattttaatatcat

SEQ ID NO: 126260 - DNA, 20 bp, Artificial Sequence
  Description of Artificial Sequence: Synthetic oligonucleotide
  Target: LAMA2; (+) strand; PAM type: NRG; PAM sequence: AAG
ctaattttaatatcattaga

SEQ ID NO: 126261 - DNA, 20 bp, Artificial Sequence
  Description of Artificial Sequence: Synthetic oligonucleotide
  Target: LAMA2; (+) strand; PAM type: NRG; PAM sequence: AGG
taattttaatatcattagaa

SEQ ID NO: 126262 - DNA, 20 bp, Artificial Sequence
  Description of Artificial Sequence: Synthetic oligonucleotide
  Target: LAMA2; (+) strand; PAM type: NRG; PAM sequence: AAG
ttaatatcattagaaaggtg

SEQ ID NO: 126263 - DNA, 20 bp, Artificial Sequence
  Description of Artificial Sequence: Synthetic oligonucleotide
  Target: LAMA2; (+) strand; PAM type: NRG; PAM sequence: AAG
atatcattagaaaggtgaag

SEQ ID NO: 126264 - DNA, 20 bp, Artificial Sequence
  Description of Artificial Sequence: Synthetic oligonucleotide
  Target: LAMA2; (+) strand; PAM type: NRG; PAM sequence: AAG
attagaaaggtgaagaagac

SEQ ID NO: 126265 - DNA, 20 bp, Artificial Sequence
  Description of Artificial Sequence: Synthetic oligonucleotide
  Target: LAMA2; (+) strand; PAM type: NRG; PAM sequence: CAG
aaaggtgaagaagacaagac

SEQ ID NO: 126266 - DNA, 20 bp, Artificial Sequence
  Description of Artificial Sequence: Synthetic oligonucleotide
  Target: LAMA2; (+) strand; PAM type: NRG; PAM sequence: GAG
gtgaagaagacaagaccagc

SEQ ID NO: 126267 - DNA, 20 bp, Artificial Sequence
  Description of Artificial Sequence: Synthetic oligonucleotide
  Target: LAMA2; (+) strand; PAM type: NRG; PAM sequence: AGG
tgaagaagacaagaccagcg

SEQ ID NO: 126268 - DNA, 20 bp, Artificial Sequence
  Description of Artificial Sequence: Synthetic oligonucleotide
  Target: LAMA2; (+) strand; PAM type: NRG; PAM sequence: GGG
gaagaagacaagaccagcga

SEQ ID NO: 126269 - DNA, 20 bp, Artificial Sequence
  Description of Artificial Sequence: Synthetic oligonucleotide
  Target: LAMA2; (+) strand; PAM type: NRG; PAM sequence: AAG
gcgagggctactaatttctc

SEQ ID NO: 126270 - DNA, 20 bp, Artificial Sequence
  Description of Artificial Sequence: Synthetic oligonucleotide
  Target: LAMA2; (+) strand; PAM type: NRG; PAM sequence: AGG
cgagggctactaatttctca

SEQ ID NO: 126271 - DNA, 20 bp, Artificial Sequence
  Description of Artificial Sequence: Synthetic oligonucleotide
  Target: LAMA2; (+) strand; PAM type: NRG; PAM sequence: GAG
ggacacgctcatcctcatgt

SEQ ID NO: 126272 - DNA, 20 bp, Artificial Sequence
  Description of Artificial Sequence: Synthetic oligonucleotide
  Target: LAMA2; (+) strand; PAM type: NRG; PAM sequence: GAG
acacgctcatcctcatgtga

SEQ ID NO: 126273 - DNA, 20 bp, Artificial Sequence
  Description of Artificial Sequence: Synthetic oligonucleotide
  Target: LAMA2; (+) strand; PAM type: NRG; PAM sequence: TGG
gctcatcctcatgtgagagc

SEQ ID NO: 126274 - DNA, 20 bp, Artificial Sequence
  Description of Artificial Sequence: Synthetic oligonucleotide
  Target: LAMA2; (+) strand; PAM type: NRG; PAM sequence: CAG
tgagagctggaactcaaaac

SEQ ID NO: 126275 - DNA, 20 bp, Artificial Sequence
  Description of Artificial Sequence: Synthetic oligonucleotide
  Target: LAMA2; (+) strand; PAM type: NRG; PAM sequence: TGG
actttgtcaaaatgcacttt

SEQ ID NO: 126276 - DNA, 20 bp, Artificial Sequence
  Description of Artificial Sequence: Synthetic oligonucleotide
  Target: LAMA2; (+) strand; PAM type: NRG; PAM sequence: TAG
tttggttcccaatctgatat

SEQ ID NO: 126277 - DNA, 20 bp, Artificial Sequence
  Description of Artificial Sequence: Synthetic oligonucleotide
  Target: LAMA2; (+) strand; PAM type: NRG; PAM sequence: AGG
ttggttcccaatctgatatt

SEQ ID NO: 126278 - DNA, 20 bp, Artificial Sequence
  Description of Artificial Sequence: Synthetic oligonucleotide
  Target: LAMA2; (+) strand; PAM type: NRG; PAM sequence: CAG
tcccaatctgatattaggtg

SEQ ID NO: 126279 - DNA, 20 bp, Artificial Sequence
  Description of Artificial Sequence: Synthetic oligonucleotide
  Target: LAMA2; (+) strand; PAM type: NRG; PAM sequence: AAG
gattcttctcttctttaacc

SEQ ID NO: 126280 - DNA, 20 bp, Artificial Sequence
  Description of Artificial Sequence: Synthetic oligonucleotide
  Target: LAMA2; (+) strand; PAM type: NRG; PAM sequence: AGG
attcttctcttctttaacca

SEQ ID NO: 126281 - DNA, 20 bp, Artificial Sequence
  Description of Artificial Sequence: Synthetic oligonucleotide
  Target: LAMA2; (+) strand; PAM type: NRG; PAM sequence: GGG
ttcttctcttctttaaccaa

SEQ ID NO: 126282 - DNA, 20 bp, Artificial Sequence
  Description of Artificial Sequence: Synthetic oligonucleotide
  Target: LAMA2; (+) strand; PAM type: NRG; PAM sequence: CAG
taaccaagggccaaataata

SEQ ID NO: 126283 - DNA, 20 bp, Artificial Sequence
  Description of Artificial Sequence: Synthetic oligonucleotide
  Target: LAMA2; (+) strand; PAM type: NRG; PAM sequence: CAG
ccacccaccccaccctgccc

SEQ ID NO: 126284 - DNA, 20 bp, Artificial Sequence
  Description of Artificial Sequence: Synthetic oligonucleotide
  Target: LAMA2; (+) strand; PAM type: NRG; PAM sequence: TAG
ccctgccccagctctccttt

SEQ ID NO: 126285 - DNA, 20 bp, Artificial Sequence
  Description of Artificial Sequence: Synthetic oligonucleotide
  Target: LAMA2; (+) strand; PAM type: NRG; PAM sequence: TAG
aaactgttgctctctcactt

SEQ ID NO: 126286 - DNA, 20 bp, Artificial Sequence
  Description of Artificial Sequence: Synthetic oligonucleotide
  Target: LAMA2; (+) strand; PAM type: NRG; PAM sequence: GAG
tgttgctctctcactttagt

SEQ ID NO: 126287 - DNA, 20 bp, Artificial Sequence
  Description of Artificial Sequence: Synthetic oligonucleotide
  Target: LAMA2; (+) strand; PAM type: NRG; PAM sequence: AGG
gttgctctctcactttagtg

SEQ ID NO: 126288 - DNA, 20 bp, Artificial Sequence
  Description of Artificial Sequence: Synthetic oligonucleotide
  Target: LAMA2; (+) strand; PAM type: NRG; PAM sequence: TGG
gctctctcactttagtgagg

SEQ ID NO: 126289 - DNA, 20 bp, Artificial Sequence
  Description of Artificial Sequence: Synthetic oligonucleotide
  Target: LAMA2; (+) strand; PAM type: NRG; PAM sequence: AAG
ctctcactttagtgaggtgg

SEQ ID NO: 126290 - DNA, 20 bp, Artificial Sequence
  Description of Artificial Sequence: Synthetic oligonucleotide
  Target: LAMA2; (+) strand; PAM type: NRG; PAM sequence: AGG
tctcactttagtgaggtgga

SEQ ID NO: 126291 - DNA, 20 bp, Artificial Sequence
  Description of Artificial Sequence: Synthetic oligonucleotide
  Target: LAMA2; (+) strand; PAM type: NRG; PAM sequence: AAG
cactttagtgaggtggaagg

SEQ ID NO: 126292 - DNA, 20 bp, Artificial Sequence
  Description of Artificial Sequence: Synthetic oligonucleotide
  Target: LAMA2; (+) strand; PAM type: NRG; PAM sequence: AAG
ctgatgaattaaccctatcg

SEQ ID NO: 126293 - DNA, 20 bp, Artificial Sequence
  Description of Artificial Sequence: Synthetic oligonucleotide
  Target: LAMA2; (+) strand; PAM type: NRG; PAM sequence: AGG
tgatgaattaaccctatcga

SEQ ID NO: 126294 - DNA, 20 bp, Artificial Sequence
  Description of Artificial Sequence: Synthetic oligonucleotide
  Target: LAMA2; (+) strand; PAM type: NRG; PAM sequence: CAG
gaattaaccctatcgaaggt

SEQ ID NO: 126295 - DNA, 20 bp, Artificial Sequence
  Description of Artificial Sequence: Synthetic oligonucleotide
  Target: LAMA2; (+) strand; PAM type: NRG; PAM sequence: TAG
atcgaaggtcagaaaaatgt

SEQ ID NO: 126296 - DNA, 20 bp, Artificial Sequence
  Description of Artificial Sequence: Synthetic oligonucleotide
  Target: LAMA2; (+) strand; PAM type: NRG; PAM sequence: AAG
agaaaaatgttagataactt

SEQ ID NO: 126297 - DNA, 20 bp, Artificial Sequence
  Description of Artificial Sequence: Synthetic oligonucleotide
  Target: LAMA2; (+) strand; PAM type: NRG; PAM sequence: AGG
gaaaaatgttagataactta

SEQ ID NO: 126298 - DNA, 20 bp, Artificial Sequence
  Description of Artificial Sequence: Synthetic oligonucleotide
  Target: LAMA2; (+) strand; PAM type: NRG; PAM sequence: GGG
aaaaatgttagataacttaa

SEQ ID NO: 126299 - DNA, 20 bp, Artificial Sequence
  Description of Artificial Sequence: Synthetic oligonucleotide
  Target: LAMA2; (+) strand; PAM type: NRG; PAM sequence: GGG
aaaatgttagataacttaag

SEQ ID NO: 126300 - DNA, 20 bp, Artificial Sequence
  Description of Artificial Sequence: Synthetic oligonucleotide
  Target: LAMA2; (+) strand; PAM type: NRG; PAM sequence: GGG
aaatgttagataacttaagg

SEQ ID NO: 126301 - DNA, 20 bp, Artificial Sequence
  Description of Artificial Sequence: Synthetic oligonucleotide
  Target: LAMA2; (+) strand; PAM type: NRG; PAM sequence: AAG
gataacttaagggggaaaaa

SEQ ID NO: 126302 - DNA, 20 bp, Artificial Sequence
  Description of Artificial Sequence: Synthetic oligonucleotide
  Target: LAMA2; (+) strand; PAM type: NRG; PAM sequence: TGG
agaaaataaatatcaaaatg

SEQ ID NO: 126303 - DNA, 20 bp, Artificial Sequence
  Description of Artificial Sequence: Synthetic oligonucleotide
  Target: LAMA2; (+) strand; PAM type: NRG; PAM sequence: AAG
aaatgtggaaatgtttgaaa

SEQ ID NO: 126304 - DNA, 20 bp, Artificial Sequence
  Description of Artificial Sequence: Synthetic oligonucleotide
  Target: LAMA2; (+) strand; PAM type: NRG; PAM sequence: AAG
gtggaaatgtttgaaaaaga

SEQ ID NO: 126305 - DNA, 20 bp, Artificial Sequence
  Description of Artificial Sequence: Synthetic oligonucleotide
  Target: LAMA2; (+) strand; PAM type: NRG; PAM sequence: AAG
aatgtttgaaaaagaaagac

SEQ ID NO: 126306 - DNA, 20 bp, Artificial Sequence
  Description of Artificial Sequence: Synthetic oligonucleotide
  Target: LAMA2; (+) strand; PAM type: NRG; PAM sequence: AAG
gtttgaaaaagaaagacaag

SEQ ID NO: 126307 - DNA, 20 bp, Artificial Sequence
  Description of Artificial Sequence: Synthetic oligonucleotide
  Target: LAMA2; (+) strand; PAM type: NRG; PAM sequence: AGG
tttgaaaaagaaagacaaga

SEQ ID NO: 126308 - DNA, 20 bp, Artificial Sequence
  Description of Artificial Sequence: Synthetic oligonucleotide
  Target: LAMA2; (+) strand; PAM type: NRG; PAM sequence: TAG
aaaaagaaagacaagaagga

SEQ ID NO: 126309 - DNA, 20 bp, Artificial Sequence
  Description of Artificial Sequence: Synthetic oligonucleotide
  Target: LAMA2; (+) strand; PAM type: NRG; PAM sequence: AGG
aaaagaaagacaagaaggat

SEQ ID NO: 126310 - DNA, 20 bp, Artificial Sequence
  Description of Artificial Sequence: Synthetic oligonucleotide
  Target: LAMA2; (+) strand; PAM type: NRG; PAM sequence: GGG
aaagaaagacaagaaggata

SEQ ID NO: 126311 - DNA, 20 bp, Artificial Sequence
  Description of Artificial Sequence: Synthetic oligonucleotide
  Target: LAMA2; (+) strand; PAM type: NRG; PAM sequence: GGG
aagaaagacaagaaggatag

SEQ ID NO: 126312 - DNA, 20 bp, Artificial Sequence
  Description of Artificial Sequence: Synthetic oligonucleotide
  Target: LAMA2; (+) strand; PAM type: NRG; PAM sequence: TAG
acaagaaggataggggaaaa

SEQ ID NO: 126313 - DNA, 20 bp, Artificial Sequence
  Description of Artificial Sequence: Synthetic oligonucleotide
  Target: LAMA2; (+) strand; PAM type: NRG; PAM sequence: GAG
aagaaggataggggaaaata

SEQ ID NO: 126314 - DNA, 20 bp, Artificial Sequence
  Description of Artificial Sequence: Synthetic oligonucleotide
  Target: LAMA2; (+) strand; PAM type: NRG; PAM sequence: AAG
aaggataggggaaaatagag

SEQ ID NO: 126315 - DNA, 20 bp, Artificial Sequence
  Description of Artificial Sequence: Synthetic oligonucleotide
  Target: LAMA2; (+) strand; PAM type: NRG; PAM sequence: TAG
taggggaaaatagagaagaa

SEQ ID NO: 126316 - DNA, 20 bp, Artificial Sequence
  Description of Artificial Sequence: Synthetic oligonucleotide
  Target: LAMA2; (+) strand; PAM type: NRG; PAM sequence: GAG
ggggaaaatagagaagaata

SEQ ID NO: 126317 - DNA, 20 bp, Artificial Sequence
  Description of Artificial Sequence: Synthetic oligonucleotide
  Target: LAMA2; (+) strand; PAM type: NRG; PAM sequence: GAG
ggaaaatagagaagaataga

SEQ ID NO: 126318 - DNA, 20 bp, Artificial Sequence
  Description of Artificial Sequence: Synthetic oligonucleotide
  Target: LAMA2; (+) strand; PAM type: NRG; PAM sequence: GAG
aaaatagagaagaatagaga

SEQ ID NO: 126319 - DNA, 20 bp, Artificial Sequence
  Description of Artificial Sequence: Synthetic oligonucleotide
  Target: LAMA2; (+) strand; PAM type: NRG; PAM sequence: AAG
tagagaagaatagagagaga

SEQ ID NO: 126320 - DNA, 20 bp, Artificial Sequence
  Description of Artificial Sequence: Synthetic oligonucleotide
  Target: LAMA2; (+) strand; PAM type: NRG; PAM sequence: AGG
agagaagaatagagagagaa

SEQ ID NO: 126321 - DNA, 20 bp, Artificial Sequence
  Description of Artificial Sequence: Synthetic oligonucleotide
  Target: LAMA2; (+) strand; PAM type: NRG; PAM sequence: AAG
gaagaatagagagagaaagg

SEQ ID NO: 126322 - DNA, 20 bp, Artificial Sequence
  Description of Artificial Sequence: Synthetic oligonucleotide
  Target: LAMA2; (+) strand; PAM type: NRG; PAM sequence: AAG
aatagagagagaaaggaaga

SEQ ID NO: 126323 - DNA, 20 bp, Artificial Sequence
  Description of Artificial Sequence: Synthetic oligonucleotide
  Target: LAMA2; (+) strand; PAM type: NRG; PAM sequence: AAG
gagagagaaaggaagaaaga

SEQ ID NO: 126324 - DNA, 20 bp, Artificial Sequence
  Description of Artificial Sequence: Synthetic oligonucleotide
  Target: LAMA2; (+) strand; PAM type: NRG; PAM sequence: AGG
agagagaaaggaagaaagaa

SEQ ID NO: 126325 - DNA, 20 bp, Artificial Sequence
  Description of Artificial Sequence: Synthetic oligonucleotide
  Target: LAMA2; (+) strand; PAM type: NRG; PAM sequence: GAG
agagaaaggaagaaagaaag

SEQ ID NO: 126326 - DNA, 20 bp, Artificial Sequence
  Description of Artificial Sequence: Synthetic oligonucleotide
  Target: LAMA2; (+) strand; PAM type: NRG; PAM sequence: AGG
gagaaaggaagaaagaaagg

SEQ ID NO: 126327 - DNA, 20 bp, Artificial Sequence
  Description of Artificial Sequence: Synthetic oligonucleotide
  Target: LAMA2; (+) strand; PAM type: NRG; PAM sequence: GAG
gaaaggaagaaagaaaggag

SEQ ID NO: 126328 - DNA, 20 bp, Artificial Sequence
  Description of Artificial Sequence: Synthetic oligonucleotide
  Target: LAMA2; (+) strand; PAM type: NRG; PAM sequence: GAG
aaggaagaaagaaaggagga

SEQ ID NO: 126329 - DNA, 20 bp, Artificial Sequence
  Description of Artificial Sequence: Synthetic oligonucleotide
  Target: LAMA2; (+) strand; PAM type: NRG; PAM sequence: AAG
gaagaaagaaaggaggagag

SEQ ID NO: 126330 - DNA, 20 bp, Artificial Sequence
  Description of Artificial Sequence: Synthetic oligonucleotide
  Target: LAMA2; (+) strand; PAM type: NRG; PAM sequence: AGG
aagaaagaaaggaggagaga

SEQ ID NO: 126331 - DNA, 20 bp, Artificial Sequence
  Description of Artificial Sequence: Synthetic oligonucleotide
  Target: LAMA2; (+) strand; PAM type: NRG; PAM sequence: GGG
agaaagaaaggaggagagaa

SEQ ID NO: 126332 - DNA, 20 bp, Artificial Sequence
  Description of Artificial Sequence: Synthetic oligonucleotide
  Target: LAMA2; (+) strand; PAM type: NRG; PAM sequence: AAG
aagaaaggaggagagaaggg

SEQ ID NO: 126333 - DNA, 20 bp, Artificial Sequence
  Description of Artificial Sequence: Synthetic oligonucleotide
  Target: LAMA2; (+) strand; PAM type: NRG; PAM sequence: AGG
agaaaggaggagagaaggga

SEQ ID NO: 126334 - DNA, 20 bp, Artificial Sequence
  Description of Artificial Sequence: Synthetic oligonucleotide
  Target: LAMA2; (+) strand; PAM type: NRG; PAM sequence: AAG
aaggaggagagaagggaagg

SEQ ID NO: 126335 - DNA, 20 bp, Artificial Sequence
  Description of Artificial Sequence: Synthetic oligonucleotide
  Target: LAMA2; (+) strand; PAM type: NRG; PAM sequence: AGG
aggaggagagaagggaagga

SEQ ID NO: 126336 - DNA, 20 bp, Artificial Sequence
  Description of Artificial Sequence: Synthetic oligonucleotide
  Target: LAMA2; (+) strand; PAM type: NRG; PAM sequence: GAG
gaggagagaagggaaggaag

SEQ ID NO: 126337 - DNA, 20 bp, Artificial Sequence
  Description of Artificial Sequence: Synthetic oligonucleotide
  Target: LAMA2; (+) strand; PAM type: NRG; PAM sequence: GAG
aaggaaggagaatgtttgat

SEQ ID NO: 126338 - DNA, 20 bp, Artificial Sequence
  Description of Artificial Sequence: Synthetic oligonucleotide
  Target: LAMA2; (+) strand; PAM type: NRG; PAM sequence: AAG
gaatgtttgatgagcttatg

SEQ ID NO: 126339 - DNA, 20 bp, Artificial Sequence
  Description of Artificial Sequence: Synthetic oligonucleotide
  Target: LAMA2; (+) strand; PAM type: NRG; PAM sequence: AGG
aatgtttgatgagcttatga

SEQ ID NO: 126340 - DNA, 20 bp, Artificial Sequence
  Description of Artificial Sequence: Synthetic oligonucleotide
  Target: LAMA2; (+) strand; PAM type: NRG; PAM sequence: GAG
aaggatgtctctttgcaact

SEQ ID NO: 126341 - DNA, 20 bp, Artificial Sequence
  Description of Artificial Sequence: Synthetic oligonucleotide
  Target: LAMA2; (+) strand; PAM type: NRG; PAM sequence: TAG
tttgcaactgagtgtgaatt

SEQ ID NO: 126342 - DNA, 20 bp, Artificial Sequence
  Description of Artificial Sequence: Synthetic oligonucleotide
  Target: LAMA2; (+) strand; PAM type: NRG; PAM sequence: TGG
caactgagtgtgaatttaga

SEQ ID NO: 126343 - DNA, 20 bp, Artificial Sequence
  Description of Artificial Sequence: Synthetic oligonucleotide
  Target: LAMA2; (+) strand; PAM type: NRG; PAM sequence: GGG
aactgagtgtgaatttagat

SEQ ID NO: 126344 - DNA, 20 bp, Artificial Sequence
  Description of Artificial Sequence: Synthetic oligonucleotide
  Target: LAMA2; (+) strand; PAM type: NRG; PAM sequence: AAG
ataacatgaaacaaaatgaa

SEQ ID NO: 126345 - DNA, 20 bp, Artificial Sequence
  Description of Artificial Sequence: Synthetic oligonucleotide
  Target: LAMA2; (+) strand; PAM type: NRG; PAM sequence: AAG
acatgaaacaaaatgaaaag

SEQ ID NO: 126346 - DNA, 20 bp, Artificial Sequence
  Description of Artificial Sequence: Synthetic oligonucleotide
  Target: LAMA2; (+) strand; PAM type: NRG; PAM sequence: CAG
aaaatgaaaagaagaaaaaa

SEQ ID NO: 126347 - DNA, 20 bp, Artificial Sequence
  Description of Artificial Sequence: Synthetic oligonucleotide
  Target: LAMA2; (+) strand; PAM type: NRG; PAM sequence: CAG
gaagaaaaaacagatacatt

SEQ ID NO: 126348 - DNA, 20 bp, Artificial Sequence
  Description of Artificial Sequence: Synthetic oligonucleotide
  Target: LAMA2; (+) strand; PAM type: NRG; PAM sequence: TGG
tacattcagtgatttaaaaa

SEQ ID NO: 126349 - DNA, 20 bp, Artificial Sequence
  Description of Artificial Sequence: Synthetic oligonucleotide
  Target: LAMA2; (+) strand; PAM type: NRG; PAM sequence: GGG
acattcagtgatttaaaaat

SEQ ID NO: 126350 - DNA, 20 bp, Artificial Sequence
  Description of Artificial Sequence: Synthetic oligonucleotide
  Target: LAMA2; (+) strand; PAM type: NRG; PAM sequence: GGG
cattcagtgatttaaaaatg

SEQ ID NO: 126351 - DNA, 20 bp, Artificial Sequence
  Description of Artificial Sequence: Synthetic oligonucleotide
  Target: LAMA2; (+) strand; PAM type: NRG; PAM sequence: AAG
tctttctgtttttatttcac

SEQ ID NO: 126352 - DNA, 20 bp, Artificial Sequence
  Description of Artificial Sequence: Synthetic oligonucleotide
  Target: LAMA2; (+) strand; PAM type: NRG; PAM sequence: TAG
aagtcttttgtaacttattt

SEQ ID NO: 126353 - DNA, 20 bp, Artificial Sequence
  Description of Artificial Sequence: Synthetic oligonucleotide
  Target: LAMA2; (+) strand; PAM type: NRG; PAM sequence: GAG
gtcttttgtaacttatttta

SEQ ID NO: 126354 - DNA, 20 bp, Artificial Sequence
  Description of Artificial Sequence: Synthetic oligonucleotide
  Target: LAMA2; (+) strand; PAM type: NRG; PAM sequence: TAG
tttagagttttaaaactttg

SEQ ID NO: 126355 - DNA, 20 bp, Artificial Sequence
  Description of Artificial Sequence: Synthetic oligonucleotide
  Target: LAMA2; (+) strand; PAM type: NRG; PAM sequence: AAG
acaatcacatttttaaacat

SEQ ID NO: 126356 - DNA, 20 bp, Artificial Sequence
  Description of Artificial Sequence: Synthetic oligonucleotide
  Target: LAMA2; (+) strand; PAM type: NRG; PAM sequence: AGG
caatcacatttttaaacata

SEQ ID NO: 126357 - DNA, 20 bp, Artificial Sequence
  Description of Artificial Sequence: Synthetic oligonucleotide
  Target: LAMA2; (+) strand; PAM type: NRG; PAM sequence: GGG
aatcacatttttaaacataa

SEQ ID NO: 126358 - DNA, 20 bp, Artificial Sequence
  Description of Artificial Sequence: Synthetic oligonucleotide
  Target: LAMA2; (+) strand; PAM type: NRG; PAM sequence: TGG
taaacataagggcatatatt

SEQ ID NO: 126359 - DNA, 20 bp, Artificial Sequence
  Description of Artificial Sequence: Synthetic oligonucleotide
  Target: LAMA2; (+) strand; PAM type: NRG; PAM sequence: AAG
acaacctaacatttgccacc

SEQ ID NO: 126360 - DNA, 20 bp, Artificial Sequence
  Description of Artificial Sequence: Synthetic oligonucleotide
  Target: LAMA2; (+) strand; PAM type: NRG; PAM sequence: AAG
acatttgccaccaagtgtta

SEQ ID NO: 126361 - DNA, 20 bp, Artificial Sequence
  Description of Artificial Sequence: Synthetic oligonucleotide
  Target: LAMA2; (+) strand; PAM type: NRG; PAM sequence: CAG
accaagtgttaaagatgaac

SEQ ID NO: 126362 - DNA, 20 bp, Artificial Sequence
  Description of Artificial Sequence: Synthetic oligonucleotide
  Target: LAMA2; (+) strand; PAM type: NRG; PAM sequence: TAG
gaaccagttttaattttaac

SEQ ID NO: 126363 - DNA, 20 bp, Artificial Sequence
  Description of Artificial Sequence: Synthetic oligonucleotide
  Target: LAMA2; (+) strand; PAM type: NRG; PAM sequence: GAG
gaaacttttttgatatactt

SEQ ID NO: 126364 - DNA, 20 bp, Artificial Sequence
  Description of Artificial Sequence: Synthetic oligonucleotide
  Target: LAMA2; (+) strand; PAM type: NRG; PAM sequence: TGG
ttttgatatacttgagaatt

SEQ ID NO: 126365 - DNA, 20 bp, Artificial Sequence
  Description of Artificial Sequence: Synthetic oligonucleotide
  Target: LAMA2; (+) strand; PAM type: NRG; PAM sequence: GGG
tttgatatacttgagaattt

SEQ ID NO: 126366 - DNA, 20 bp, Artificial Sequence
  Description of Artificial Sequence: Synthetic oligonucleotide
  Target: LAMA2; (+) strand; PAM type: NRG; PAM sequence: TGG
aaatatatgtaaatactatg

SEQ ID NO: 126367 - DNA, 20 bp, Artificial Sequence
  Description of Artificial Sequence: Synthetic oligonucleotide
  Target: LAMA2; (+) strand; PAM type: NRG; PAM sequence: GAG
atatatgtaaatactatgtg

SEQ ID NO: 126368 - DNA, 20 bp, Artificial Sequence
  Description of Artificial Sequence: Synthetic oligonucleotide
  Target: LAMA2; (+) strand; PAM type: NRG; PAM sequence: TAG
taaatactatgtggagaatt

SEQ ID NO: 126369 - DNA, 20 bp, Artificial Sequence
  Description of Artificial Sequence: Synthetic oligonucleotide
  Target: LAMA2; (+) strand; PAM type: NRG; PAM sequence: AAG
aatttagatactaaaaattt

SEQ ID NO: 126370 - DNA, 20 bp, Artificial Sequence
  Description of Artificial Sequence: Synthetic oligonucleotide
  Target: LAMA2; (+) strand; PAM type: NRG; PAM sequence: AAG
atttaagtcaaatattgttt

SEQ ID NO: 126371 - DNA, 20 bp, Artificial Sequence
  Description of Artificial Sequence: Synthetic oligonucleotide
  Target: LAMA2; (+) strand; PAM type: NRG; PAM sequence: CGG
ttaagtacttacaatatgcc

SEQ ID NO: 126372 - DNA, 20 bp, Artificial Sequence
  Description of Artificial Sequence: Synthetic oligonucleotide
  Target: LAMA2; (+) strand; PAM type: NRG; PAM sequence: GGG
taagtacttacaatatgccc

SEQ ID NO: 126373 - DNA, 20 bp, Artificial Sequence
  Description of Artificial Sequence: Synthetic oligonucleotide
  Target: LAMA2; (+) strand; PAM type: NRG; PAM sequence: AAG
gggactgtacatgatgctaa

SEQ ID NO: 126374 - DNA, 20 bp, Artificial Sequence
  Description of Artificial Sequence: Synthetic oligonucleotide
  Target: LAMA2; (+) strand; PAM type: NRG; PAM sequence: TAG
actgtacatgatgctaaaag

SEQ ID NO: 126375 - DNA, 20 bp, Artificial Sequence
  Description of Artificial Sequence: Synthetic oligonucleotide
  Target: LAMA2; (+) strand; PAM type: NRG; PAM sequence: CAG
tacatgatgctaaaagtagc

SEQ ID NO: 126376 - DNA, 20 bp, Artificial Sequence
  Description of Artificial Sequence: Synthetic oligonucleotide
  Target: LAMA2; (+) strand; PAM type: NRG; PAM sequence: TGG
ctaaaagtagccagatgcaa

SEQ ID NO: 126377 - DNA, 20 bp, Artificial Sequence
  Description of Artificial Sequence: Synthetic oligonucleotide
  Target: LAMA2; (+) strand; PAM type: NRG; PAM sequence: GAG
atgcaatggttactgacttc

SEQ ID NO: 126378 - DNA, 20 bp, Artificial Sequence
  Description of Artificial Sequence: Synthetic oligonucleotide
  Target: LAMA2; (+) strand; PAM type: NRG; PAM sequence: TGG
caatggttactgacttcgag

SEQ ID NO: 126379 - DNA, 20 bp, Artificial Sequence
  Description of Artificial Sequence: Synthetic oligonucleotide
  Target: LAMA2; (+) strand; PAM type: NRG; PAM sequence: CAG
cgagtggcatctttttgaaa

SEQ ID NO: 126380 - DNA, 20 bp, Artificial Sequence
  Description of Artificial Sequence: Synthetic oligonucleotide
  Target: LAMA2; (+) strand; PAM type: NRG; PAM sequence: GAG
agtggcatctttttgaaaca

SEQ ID NO: 126381 - DNA, 20 bp, Artificial Sequence
  Description of Artificial Sequence: Synthetic oligonucleotide
  Target: LAMA2; (+) strand; PAM type: NRG; PAM sequence: AGG
gtggcatctttttgaaacag

SEQ ID NO: 126382 - DNA, 20 bp, Artificial Sequence
  Description of Artificial Sequence: Synthetic oligonucleotide
  Target: LAMA2; (+) strand; PAM type: NRG; PAM sequence: GGG
tggcatctttttgaaacaga

SEQ ID NO: 126383 - DNA, 20 bp, Artificial Sequence
  Description of Artificial Sequence: Synthetic oligonucleotide
  Target: LAMA2; (+) strand; PAM type: NRG; PAM sequence: CAG
catctttttgaaacagaggg

SEQ ID NO: 126384 - DNA, 20 bp, Artificial Sequence
  Description of Artificial Sequence: Synthetic oligonucleotide
  Target: LAMA2; (+) strand; PAM type: NRG; PAM sequence: GAG
gggcagaaatgaataaatct

SEQ ID NO: 126385 - DNA, 20 bp, Artificial Sequence
  Description of Artificial Sequence: Synthetic oligonucleotide
  Target: LAMA2; (+) strand; PAM type: NRG; PAM sequence: GAG
aatctgagataacatgatgt

SEQ ID NO: 126386 - DNA, 20 bp, Artificial Sequence
  Description of Artificial Sequence: Synthetic oligonucleotide
  Target: LAMA2; (+) strand; PAM type: NRG; PAM sequence: TGG
gatgtgagcttgttccatac

SEQ ID NO: 126387 - DNA, 20 bp, Artificial Sequence
  Description of Artificial Sequence: Synthetic oligonucleotide
  Target: LAMA2; (+) strand; PAM type: NRG; PAM sequence: GAG
tgtgagcttgttccatactg

SEQ ID NO: 126388 - DNA, 20 bp, Artificial Sequence
  Description of Artificial Sequence: Synthetic oligonucleotide
  Target: LAMA2; (+) strand; PAM type: NRG; PAM sequence: TGG
gcttgttccatactggagaa

SEQ ID NO: 126389 - DNA, 20 bp, Artificial Sequence
  Description of Artificial Sequence: Synthetic oligonucleotide
  Target: LAMA2; (+) strand; PAM type: NRG; PAM sequence: GGG
cttgttccatactggagaat

SEQ ID NO: 126390 - DNA, 20 bp, Artificial Sequence
  Description of Artificial Sequence: Synthetic oligonucleotide
  Target: LAMA2; (+) strand; PAM type: NRG; PAM sequence: GGG
ttgttccatactggagaatg

SEQ ID NO: 126391 - DNA, 20 bp, Artificial Sequence
  Description of Artificial Sequence: Synthetic oligonucleotide
  Target: LAMA2; (+) strand; PAM type: NRG; PAM sequence: CAG
atactggagaatggggcact

SEQ ID NO: 126392 - DNA, 20 bp, Artificial Sequence
  Description of Artificial Sequence: Synthetic oligonucleotide
  Target: LAMA2; (+) strand; PAM type: NRG; PAM sequence: GAG
actggagaatggggcactca

SEQ ID NO: 126393 - DNA, 20 bp, Artificial Sequence
  Description of Artificial Sequence: Synthetic oligonucleotide
  Target: LAMA2; (+) strand; PAM type: NRG; PAM sequence: AAG
agaatggggcactcagagaa

SEQ ID NO: 126394 - DNA, 20 bp, Artificial Sequence
  Description of Artificial Sequence: Synthetic oligonucleotide
  Target: LAMA2; (+) strand; PAM type: NRG; PAM sequence: GAG
aatggggcactcagagaaaa

SEQ ID NO: 126395 - DNA, 20 bp, Artificial Sequence
  Description of Artificial Sequence: Synthetic oligonucleotide
  Target: LAMA2; (+) strand; PAM type: NRG; PAM sequence: CAG
gaaaagagtgtgtgcaactg

SEQ ID NO: 126396 - DNA, 20 bp, Artificial Sequence
  Description of Artificial Sequence: Synthetic oligonucleotide
  Target: LAMA2; (+) strand; PAM type: NRG; PAM sequence: AGG
aaaagagtgtgtgcaactgc

SEQ ID NO: 126397 - DNA, 20 bp, Artificial Sequence
  Description of Artificial Sequence: Synthetic oligonucleotide
  Target: LAMA2; (+) strand; PAM type: NRG; PAM sequence: TGG
agagtgtgtgcaactgcagg

SEQ ID NO: 126398 - DNA, 20 bp, Artificial Sequence
  Description of Artificial Sequence: Synthetic oligonucleotide
  Target: LAMA2; (+) strand; PAM type: NRG; PAM sequence: GGG
gagtgtgtgcaactgcaggt

SEQ ID NO: 126399 - DNA, 20 bp, Artificial Sequence
  Description of Artificial Sequence: Synthetic oligonucleotide
  Target: LAMA2; (+) strand; PAM type: NRG; PAM sequence: GGG
agtgtgtgcaactgcaggtg

SEQ ID NO: 126400 - DNA, 20 bp, Artificial Sequence
  Description of Artificial Sequence: Synthetic oligonucleotide
  Target: LAMA2; (+) strand; PAM type: NRG; PAM sequence: GAG
tgtgtgcaactgcaggtggg

SEQ ID NO: 126401 - DNA, 20 bp, Artificial Sequence
  Description of Artificial Sequence: Synthetic oligonucleotide
  Target: LAMA2; (+) strand; PAM type: NRG; PAM sequence: AAG
gtgcaactgcaggtggggag

SEQ ID NO: 126402 - DNA, 20 bp, Artificial Sequence
  Description of Artificial Sequence: Synthetic oligonucleotide
  Target: LAMA2; (+) strand; PAM type: NRG; PAM sequence: TGG
ctgcaggtggggagaagctt

SEQ ID NO: 126403 - DNA, 20 bp, Artificial Sequence
  Description of Artificial Sequence: Synthetic oligonucleotide
  Target: LAMA2; (+) strand; PAM type: NRG; PAM sequence: GGG
tgcaggtggggagaagcttt

SEQ ID NO: 126404 - DNA, 20 bp, Artificial Sequence
  Description of Artificial Sequence: Synthetic oligonucleotide
  Target: LAMA2; (+) strand; PAM type: NRG; PAM sequence: TGG
gtggggagaagctttgggtt

SEQ ID NO: 126405 - DNA, 20 bp, Artificial Sequence
  Description of Artificial Sequence: Synthetic oligonucleotide
  Target: LAMA2; (+) strand; PAM type: NRG; PAM sequence: CAG
aagctttgggtttggcactc

SEQ ID NO: 126406 - DNA, 20 bp, Artificial Sequence
  Description of Artificial Sequence: Synthetic oligonucleotide
  Target: LAMA2; (+) strand; PAM type: NRG; PAM sequence: AGG
agctttgggtttggcactcc

SEQ ID NO: 126407 - DNA, 20 bp, Artificial Sequence
  Description of Artificial Sequence: Synthetic oligonucleotide
  Target: LAMA2; (+) strand; PAM type: NRG; PAM sequence: AAG
tttgggtttggcactccagg

SEQ ID NO: 126408 - DNA, 20 bp, Artificial Sequence
  Description of Artificial Sequence: Synthetic oligonucleotide
  Target: LAMA2; (+) strand; PAM type: NRG; PAM sequence: AAG
actccaggaagatatgttca

SEQ ID NO: 126409 - DNA, 20 bp, Artificial Sequence
  Description of Artificial Sequence: Synthetic oligonucleotide
  Target: LAMA2; (+) strand; PAM type: NRG; PAM sequence: CAG
ccaggaagatatgttcaaag

SEQ ID NO: 126410 - DNA, 20 bp, Artificial Sequence
  Description of Artificial Sequence: Synthetic oligonucleotide
  Target: LAMA2; (+) strand; PAM type: NRG; PAM sequence: AAG
ggaagatatgttcaaagcag

SEQ ID NO: 126411 - DNA, 20 bp, Artificial Sequence
  Description of Artificial Sequence: Synthetic oligonucleotide
  Target: LAMA2; (+) strand; PAM type: NRG; PAM sequence: AGG
gaagatatgttcaaagcaga

SEQ ID NO: 126412 - DNA, 20 bp, Artificial Sequence
  Description of Artificial Sequence: Synthetic oligonucleotide
  Target: LAMA2; (+) strand; PAM type: NRG; PAM sequence: GGG
aagatatgttcaaagcagaa

SEQ ID NO: 126413 - DNA, 20 bp, Artificial Sequence
  Description of Artificial Sequence: Synthetic oligonucleotide
  Target: LAMA2; (+) strand; PAM type: NRG; PAM sequence: AAG
atgttcaaagcagaagggta

SEQ ID NO: 126414 - DNA, 20 bp, Artificial Sequence
  Description of Artificial Sequence: Synthetic oligonucleotide
  Target: LAMA2; (+) strand; PAM type: NRG; PAM sequence: AGG
tgttcaaagcagaagggtaa

SEQ ID NO: 126415 - DNA, 20 bp, Artificial Sequence
  Description of Artificial Sequence: Synthetic oligonucleotide
  Target: LAMA2; (+) strand; PAM type: NRG; PAM sequence: GGG
gttcaaagcagaagggtaaa

SEQ ID NO: 126416 - DNA, 20 bp, Artificial Sequence
  Description of Artificial Sequence: Synthetic oligonucleotide
  Target: LAMA2; (+) strand; PAM type: NRG; PAM sequence: AAG
gtaaagggcactgattgttc

SEQ ID NO: 126417 - DNA, 20 bp, Artificial Sequence
  Description of Artificial Sequence: Synthetic oligonucleotide
  Target: LAMA2; (+) strand; PAM type: NRG; PAM sequence: AAG
gggcactgattgttcaagaa

SEQ ID NO: 126418 - DNA, 20 bp, Artificial Sequence
  Description of Artificial Sequence: Synthetic oligonucleotide
  Target: LAMA2; (+) strand; PAM type: NRG; PAM sequence: GAG
actgattgttcaagaaaagt

SEQ ID NO: 126419 - DNA, 20 bp, Artificial Sequence
  Description of Artificial Sequence: Synthetic oligonucleotide
  Target: LAMA2; (+) strand; PAM type: NRG; PAM sequence: TAG
gattgttcaagaaaagtgag

SEQ ID NO: 126420 - DNA, 20 bp, Artificial Sequence
  Description of Artificial Sequence: Synthetic oligonucleotide
  Target: LAMA2; (+) strand; PAM type: NRG; PAM sequence: TGG
ttcaagaaaagtgagtagtc

SEQ ID NO: 126421 - DNA, 20 bp, Artificial Sequence
  Description of Artificial Sequence: Synthetic oligonucleotide
  Target: LAMA2; (+) strand; PAM type: NRG; PAM sequence: AAG
agaaaagtgagtagtctgga

SEQ ID NO: 126422 - DNA, 20 bp, Artificial Sequence
  Description of Artificial Sequence: Synthetic oligonucleotide
  Target: LAMA2; (+) strand; PAM type: NRG; PAM sequence: AGG
gaaaagtgagtagtctggaa

SEQ ID NO: 126423 - DNA, 20 bp, Artificial Sequence
  Description of Artificial Sequence: Synthetic oligonucleotide
  Target: LAMA2; (+) strand; PAM type: NRG; PAM sequence: GGG
aaaagtgagtagtctggaaa

SEQ ID NO: 126424 - DNA, 20 bp, Artificial Sequence
  Description of Artificial Sequence: Synthetic oligonucleotide
  Target: LAMA2; (+) strand; PAM type: NRG; PAM sequence: CAG
tctggaaagggtcattattt

SEQ ID NO: 126425 - DNA, 20 bp, Artificial Sequence
  Description of Artificial Sequence: Synthetic oligonucleotide
  Target: LAMA2; (+) strand; PAM type: NRG; PAM sequence: AAG
ggaaagggtcattatttcag

SEQ ID NO: 126426 - DNA, 20 bp, Artificial Sequence
  Description of Artificial Sequence: Synthetic oligonucleotide
  Target: LAMA2; (+) strand; PAM type: NRG; PAM sequence: AAG
tatttcagaagcaacatacc

SEQ ID NO: 126427 - DNA, 20 bp, Artificial Sequence
  Description of Artificial Sequence: Synthetic oligonucleotide
  Target: LAMA2; (+) strand; PAM type: NRG; PAM sequence: AAG
ttcagaagcaacataccaag

SEQ ID NO: 126428 - DNA, 20 bp, Artificial Sequence
  Description of Artificial Sequence: Synthetic oligonucleotide
  Target: LAMA2; (+) strand; PAM type: NRG; PAM sequence: AGG
tcagaagcaacataccaaga

SEQ ID NO: 126429 - DNA, 20 bp, Artificial Sequence
  Description of Artificial Sequence: Synthetic oligonucleotide
  Target: LAMA2; (+) strand; PAM type: NRG; PAM sequence: GAG
agaagcaacataccaagaag

SEQ ID NO: 126430 - DNA, 20 bp, Artificial Sequence
  Description of Artificial Sequence: Synthetic oligonucleotide
  Target: LAMA2; (+) strand; PAM type: NRG; PAM sequence: AGG
gaagcaacataccaagaagg

SEQ ID NO: 126431 - DNA, 20 bp, Artificial Sequence
  Description of Artificial Sequence: Synthetic oligonucleotide
  Target: LAMA2; (+) strand; PAM type: NRG; PAM sequence: CAG
gcaacataccaagaaggagg

SEQ ID NO: 126432 - DNA, 20 bp, Artificial Sequence
  Description of Artificial Sequence: Synthetic oligonucleotide
  Target: LAMA2; (+) strand; PAM type: NRG; PAM sequence: AGG
caacataccaagaaggaggc

SEQ ID NO: 126433 - DNA, 20 bp, Artificial Sequence
  Description of Artificial Sequence: Synthetic oligonucleotide
  Target: LAMA2; (+) strand; PAM type: NRG; PAM sequence: AAG
taccaagaaggaggcaggaa

SEQ ID NO: 126434 - DNA, 20 bp, Artificial Sequence
  Description of Artificial Sequence: Synthetic oligonucleotide
  Target: LAMA2; (+) strand; PAM type: NRG; PAM sequence: GAG
ccaagaaggaggcaggaaaa

SEQ ID NO: 126435 - DNA, 20 bp, Artificial Sequence
  Description of Artificial Sequence: Synthetic oligonucleotide
  Target: LAMA2; (+) strand; PAM type: NRG; PAM sequence: AAG
agaaggaggcaggaaaagag

SEQ ID NO: 126436 - DNA, 20 bp, Artificial Sequence
  Description of Artificial Sequence: Synthetic oligonucleotide
  Target: LAMA2; (+) strand; PAM type: NRG; PAM sequence: CAG
caggaaaagagaagacaaaa

SEQ ID NO: 126437 - DNA, 20 bp, Artificial Sequence
  Description of Artificial Sequence: Synthetic oligonucleotide
  Target: LAMA2; (+) strand; PAM type: NRG; PAM sequence: CAG
gaaaagagaagacaaaacag

SEQ ID NO: 126438 - DNA, 20 bp, Artificial Sequence
  Description of Artificial Sequence: Synthetic oligonucleotide
  Target: LAMA2; (+) strand; PAM type: NRG; PAM sequence: TGG
gagaagacaaaacagcagca

SEQ ID NO: 126439 - DNA, 20 bp, Artificial Sequence
  Description of Artificial Sequence: Synthetic oligonucleotide
  Target: LAMA2; (+) strand; PAM type: NRG; PAM sequence: AAG
aagacaaaacagcagcatgg

SEQ ID NO: 126440 - DNA, 20 bp, Artificial Sequence
  Description of Artificial Sequence: Synthetic oligonucleotide
  Target: LAMA2; (+) strand; PAM type: NRG; PAM sequence: TGG
caaaacagcagcatggaaga

SEQ ID NO: 126441 - DNA, 20 bp, Artificial Sequence
  Description of Artificial Sequence: Synthetic oligonucleotide
  Target: LAMA2; (+) strand; PAM type: NRG; PAM sequence: GGG
aaaacagcagcatggaagat

SEQ ID NO: 126442 - DNA, 20 bp, Artificial Sequence
  Description of Artificial Sequence: Synthetic oligonucleotide
  Target: LAMA2; (+) strand; PAM type: NRG; PAM sequence: GAG
cagcagcatggaagatgggt

SEQ ID NO: 126443 - DNA, 20 bp, Artificial Sequence
  Description of Artificial Sequence: Synthetic oligonucleotide
  Target: LAMA2; (+) strand; PAM type: NRG; PAM sequence: AGG
agcagcatggaagatgggtg

SEQ ID NO: 126444 - DNA, 20 bp, Artificial Sequence
  Description of Artificial Sequence: Synthetic oligonucleotide
  Target: LAMA2; (+) strand; PAM type: NRG; PAM sequence: GAG
cagcatggaagatgggtgag

SEQ ID NO: 126445 - DNA, 20 bp, Artificial Sequence
  Description of Artificial Sequence: Synthetic oligonucleotide
  Target: LAMA2; (+) strand; PAM type: NRG; PAM sequence: CAG
atggaagatgggtgaggagc

SEQ ID NO: 126446 - DNA, 20 bp, Artificial Sequence
  Description of Artificial Sequence: Synthetic oligonucleotide
  Target: LAMA2; (+) strand; PAM type: NRG; PAM sequence: AGG
tggaagatgggtgaggagcc

SEQ ID NO: 126447 - DNA, 20 bp, Artificial Sequence
  Description of Artificial Sequence: Synthetic oligonucleotide
  Target: LAMA2; (+) strand; PAM type: NRG; PAM sequence: TGG
gggtgaggagccaggccacg

SEQ ID NO: 126448 - DNA, 20 bp, Artificial Sequence
  Description of Artificial Sequence: Synthetic oligonucleotide
  Target: LAMA2; (+) strand; PAM type: NRG; PAM sequence: GGG
ggtgaggagccaggccacgt

SEQ ID NO: 126449 - DNA, 20 bp, Artificial Sequence
  Description of Artificial Sequence: Synthetic oligonucleotide
  Target: LAMA2; (+) strand; PAM type: NRG; PAM sequence: TAG
gaggagccaggccacgtggg

SEQ ID NO: 126450 - DNA, 20 bp, Artificial Sequence
  Description of Artificial Sequence: Synthetic oligonucleotide
  Target: LAMA2; (+) strand; PAM type: NRG; PAM sequence: GAG
aggccacgtgggtagaactt

SEQ ID NO: 126451 - DNA, 20 bp, Artificial Sequence
  Description of Artificial Sequence: Synthetic oligonucleotide
  Target: LAMA2; (+) strand; PAM type: NRG; PAM sequence: TAG
tttctccatctaaattctac

SEQ ID NO: 126452 - DNA, 20 bp, Artificial Sequence
  Description of Artificial Sequence: Synthetic oligonucleotide
  Target: LAMA2; (+) strand; PAM type: NRG; PAM sequence: AGG
ttctccatctaaattctact

SEQ ID NO: 126453 - DNA, 20 bp, Artificial Sequence
  Description of Artificial Sequence: Synthetic oligonucleotide
  Target: LAMA2; (+) strand; PAM type: NRG; PAM sequence: TAG
catctaaattctactaggac

SEQ ID NO: 126454 - DNA, 20 bp, Artificial Sequence
  Description of Artificial Sequence: Synthetic oligonucleotide
  Target: LAMA2; (+) strand; PAM type: NRG; PAM sequence: AAG
ctaaattctactaggactag

SEQ ID NO: 126455 - DNA, 20 bp, Artificial Sequence
  Description of Artificial Sequence: Synthetic oligonucleotide
  Target: LAMA2; (+) strand; PAM type: NRG; PAM sequence: TGG
tactaggactagaagtctta

SEQ ID NO: 126456 - DNA, 20 bp, Artificial Sequence
  Description of Artificial Sequence: Synthetic oligonucleotide
  Target: LAMA2; (+) strand; PAM type: NRG; PAM sequence: AAG
gacattttatttactctaca

SEQ ID NO: 126457 - DNA, 20 bp, Artificial Sequence
  Description of Artificial Sequence: Synthetic oligonucleotide
  Target: LAMA2; (+) strand; PAM type: NRG; PAM sequence: CAG
actctacaaagtgcccacgt

SEQ ID NO: 126458 - DNA, 20 bp, Artificial Sequence
  Description of Artificial Sequence: Synthetic oligonucleotide
  Target: LAMA2; (+) strand; PAM type: NRG; PAM sequence: CAG
caaagtgcccacgtcagtga

SEQ ID NO: 126459 - DNA, 20 bp, Artificial Sequence
  Description of Artificial Sequence: Synthetic oligonucleotide
  Target: LAMA2; (+) strand; PAM type: NRG; PAM sequence: AAG
gcccacgtcagtgacagata

SEQ ID NO: 126460 - DNA, 20 bp, Artificial Sequence
  Description of Artificial Sequence: Synthetic oligonucleotide
  Target: LAMA2; (+) strand; PAM type: NRG; PAM sequence: GAG
ccacgtcagtgacagataaa

SEQ ID NO: 126461 - DNA, 20 bp, Artificial Sequence
  Description of Artificial Sequence: Synthetic oligonucleotide
  Target: LAMA2; (+) strand; PAM type: NRG; PAM sequence: TGG
acagataaagagtcaacatc

SEQ ID NO: 126462 - DNA, 20 bp, Artificial Sequence
  Description of Artificial Sequence: Synthetic oligonucleotide
  Target: LAMA2; (+) strand; PAM type: NRG; PAM sequence: GGG
cagataaagagtcaacatct

SEQ ID NO: 126463 - DNA, 20 bp, Artificial Sequence
  Description of Artificial Sequence: Synthetic oligonucleotide
  Target: LAMA2; (+) strand; PAM type: NRG; PAM sequence: GAG
gataaagagtcaacatctgg

SEQ ID NO: 126464 - DNA, 20 bp, Artificial Sequence
  Description of Artificial Sequence: Synthetic oligonucleotide
  Target: LAMA2; (+) strand; PAM type: NRG; PAM sequence: TAG
aaagagtcaacatctgggag

SEQ ID NO: 126465 - DNA, 20 bp, Artificial Sequence
  Description of Artificial Sequence: Synthetic oligonucleotide
  Target: LAMA2; (+) strand; PAM type: NRG; PAM sequence: TAG
gtcaacatctgggagtagct

SEQ ID NO: 126466 - DNA, 20 bp, Artificial Sequence
  Description of Artificial Sequence: Synthetic oligonucleotide
  Target: LAMA2; (+) strand; PAM type: NRG; PAM sequence: AGG
tcaacatctgggagtagctt

SEQ ID NO: 126467 - DNA, 20 bp, Artificial Sequence
  Description of Artificial Sequence: Synthetic oligonucleotide
  Target: LAMA2; (+) strand; PAM type: NRG; PAM sequence: TGG
acatctgggagtagcttagg

SEQ ID NO: 126468 - DNA, 20 bp, Artificial Sequence
  Description of Artificial Sequence: Synthetic oligonucleotide
  Target: LAMA2; (+) strand; PAM type: NRG; PAM sequence: GGG
catctgggagtagcttaggt

SEQ ID NO: 126469 - DNA, 20 bp, Artificial Sequence
  Description of Artificial Sequence: Synthetic oligonucleotide
  Target: LAMA2; (+) strand; PAM type: NRG; PAM sequence: TGG
tagcttaggtgggttccaca

SEQ ID NO: 126470 - DNA, 20 bp, Artificial Sequence
  Description of Artificial Sequence: Synthetic oligonucleotide
  Target: LAMA2; (+) strand; PAM type: NRG; PAM sequence: CAG
taggtgggttccacatggcc

SEQ ID NO: 126471 - DNA, 20 bp, Artificial Sequence
  Description of Artificial Sequence: Synthetic oligonucleotide
  Target: LAMA2; (+) strand; PAM type: NRG; PAM sequence: AGG
aggtgggttccacatggccc

SEQ ID NO: 126472 - DNA, 20 bp, Artificial Sequence
  Description of Artificial Sequence: Synthetic oligonucleotide
  Target: LAMA2; (+) strand; PAM type: NRG; PAM sequence: TAG
aacctctttctctcccttct

SEQ ID NO: 126473 - DNA, 20 bp, Artificial Sequence
  Description of Artificial Sequence: Synthetic oligonucleotide
  Target: LAMA2; (+) strand; PAM type: NRG; PAM sequence: CAG
ccttcttagctgtttgacct

SEQ ID NO: 126474 - DNA, 20 bp, Artificial Sequence
  Description of Artificial Sequence: Synthetic oligonucleotide
  Target: LAMA2; (+) strand; PAM type: NRG; PAM sequence: AAG
ttagctgtttgacctcagtc

SEQ ID NO: 126475 - DNA, 20 bp, Artificial Sequence
  Description of Artificial Sequence: Synthetic oligonucleotide
  Target: LAMA2; (+) strand; PAM type: NRG; PAM sequence: TGG
ctgttttcttgtctgtaaat

SEQ ID NO: 126476 - DNA, 20 bp, Artificial Sequence
  Description of Artificial Sequence: Synthetic oligonucleotide
  Target: LAMA2; (+) strand; PAM type: NRG; PAM sequence: GGG
tgttttcttgtctgtaaatt

SEQ ID NO: 126477 - DNA, 20 bp, Artificial Sequence
  Description of Artificial Sequence: Synthetic oligonucleotide
  Target: LAMA2; (+) strand; PAM type: NRG; PAM sequence: AAG
gtctgtaaattgggaataat

SEQ ID NO: 126478 - DNA, 20 bp, Artificial Sequence
  Description of Artificial Sequence: Synthetic oligonucleotide
  Target: LAMA2; (+) strand; PAM type: NRG; PAM sequence: AGG
tctgtaaattgggaataata

SEQ ID NO: 126479 - DNA, 20 bp, Artificial Sequence
  Description of Artificial Sequence: Synthetic oligonucleotide
  Target: LAMA2; (+) strand; PAM type: NRG; PAM sequence: AAG
gggaataataaggtaataat

SEQ ID NO: 126480 - DNA, 20 bp, Artificial Sequence
  Description of Artificial Sequence: Synthetic oligonucleotide
  Target: LAMA2; (+) strand; PAM type: NRG; PAM sequence: GAG
aaggtaataataagtattgt

SEQ ID NO: 126481 - DNA, 20 bp, Artificial Sequence
  Description of Artificial Sequence: Synthetic oligonucleotide
  Target: LAMA2; (+) strand; PAM type: NRG; PAM sequence: AGG
aggtaataataagtattgtg

SEQ ID NO: 126482 - DNA, 20 bp, Artificial Sequence
  Description of Artificial Sequence: Synthetic oligonucleotide
  Target: LAMA2; (+) strand; PAM type: NRG; PAM sequence: AAG
tcatgtatacatatacatgt

SEQ ID NO: 126483 - DNA, 20 bp, Artificial Sequence
  Description of Artificial Sequence: Synthetic oligonucleotide
  Target: LAMA2; (+) strand; PAM type: NRG; PAM sequence: AGG
catgtatacatatacatgta

SEQ ID NO: 126484 - DNA, 20 bp, Artificial Sequence
  Description of Artificial Sequence: Synthetic oligonucleotide
  Target: LAMA2; (+) strand; PAM type: NRG; PAM sequence: CAG
tatacatgtaaggtgcttaa

SEQ ID NO: 126485 - DNA, 20 bp, Artificial Sequence
  Description of Artificial Sequence: Synthetic oligonucleotide
  Target: LAMA2; (+) strand; PAM type: NRG; PAM sequence: GAG
tacatgtaaggtgcttaaca

SEQ ID NO: 126486 - DNA, 20 bp, Artificial Sequence
  Description of Artificial Sequence: Synthetic oligonucleotide
  Target: LAMA2; (+) strand; PAM type: NRG; PAM sequence: TGG
aaggtgcttaacagagtccc

SEQ ID NO: 126487 - DNA, 20 bp, Artificial Sequence
  Description of Artificial Sequence: Synthetic oligonucleotide
  Target: LAMA2; (+) strand; PAM type: NRG; PAM sequence: AAG
cagagtccctggtaccaaat

SEQ ID NO: 126488 - DNA, 20 bp, Artificial Sequence
  Description of Artificial Sequence: Synthetic oligonucleotide
  Target: LAMA2; (+) strand; PAM type: NRG; PAM sequence: TGG
caacattaactattattatt

SEQ ID NO: 126489 - DNA, 20 bp, Artificial Sequence
  Description of Artificial Sequence: Synthetic oligonucleotide
  Target: LAMA2; (+) strand; PAM type: NRG; PAM sequence: TGG
gtttatctgaaacattcaaa

SEQ ID NO: 126490 - DNA, 20 bp, Artificial Sequence
  Description of Artificial Sequence: Synthetic oligonucleotide
  Target: LAMA2; (+) strand; PAM type: NRG; PAM sequence: TAG
tctgaaacattcaaatggta

SEQ ID NO: 126491 - DNA, 20 bp, Artificial Sequence
  Description of Artificial Sequence: Synthetic oligonucleotide
  Target: LAMA2; (+) strand; PAM type: NRG; PAM sequence: AAG
cattcaaatggtatagcact

SEQ ID NO: 126492 - DNA, 20 bp, Artificial Sequence
  Description of Artificial Sequence: Synthetic oligonucleotide
  Target: LAMA2; (+) strand; PAM type: NRG; PAM sequence: AGG
attcaaatggtatagcacta

SEQ ID NO: 126493 - DNA, 20 bp, Artificial Sequence
  Description of Artificial Sequence: Synthetic oligonucleotide
  Target: LAMA2; (+) strand; PAM type: NRG; PAM sequence: TGG
ttgaaactttttcacatttt

SEQ ID NO: 126494 - DNA, 20 bp, Artificial Sequence
  Description of Artificial Sequence: Synthetic oligonucleotide
  Target: LAMA2; (+) strand; PAM type: NRG; PAM sequence: GGG
tgaaactttttcacattttt

SEQ ID NO: 126495 - DNA, 20 bp, Artificial Sequence
  Description of Artificial Sequence: Synthetic oligonucleotide
  Target: LAMA2; (+) strand; PAM type: NRG; PAM sequence: CAG
ttttcacatttttgggtatc

SEQ ID NO: 126496 - DNA, 20 bp, Artificial Sequence
  Description of Artificial Sequence: Synthetic oligonucleotide
  Target: LAMA2; (+) strand; PAM type: NRG; PAM sequence: AGG
tttcacatttttgggtatcc

SEQ ID NO: 126497 - DNA, 20 bp, Artificial Sequence
  Description of Artificial Sequence: Synthetic oligonucleotide
  Target: LAMA2; (+) strand; PAM type: NRG; PAM sequence: TAG
acatttttgggtatccagga

SEQ ID NO: 126498 - DNA, 20 bp, Artificial Sequence
  Description of Artificial Sequence: Synthetic oligonucleotide
  Target: LAMA2; (+) strand; PAM type: NRG; PAM sequence: GAG
atttttgggtatccaggata

SEQ ID NO: 126499 - DNA, 20 bp, Artificial Sequence
  Description of Artificial Sequence: Synthetic oligonucleotide
  Target: LAMA2; (+) strand; PAM type: NRG; PAM sequence: AAG
tttgggtatccaggatagag

SEQ ID NO: 126500 - DNA, 20 bp, Artificial Sequence
  Description of Artificial Sequence: Synthetic oligonucleotide
  Target: LAMA2; (+) strand; PAM type: NRG; PAM sequence: AGG
ttgggtatccaggatagaga

SEQ ID NO: 126501 - DNA, 20 bp, Artificial Sequence
  Description of Artificial Sequence: Synthetic oligonucleotide
  Target: LAMA2; (+) strand; PAM type: NRG; PAM sequence: GGG
tgggtatccaggatagagaa

SEQ ID NO: 126502 - DNA, 20 bp, Artificial Sequence
  Description of Artificial Sequence: Synthetic oligonucleotide
  Target: LAMA2; (+) strand; PAM type: NRG; PAM sequence: GGG
gggtatccaggatagagaag

SEQ ID NO: 126503 - DNA, 20 bp, Artificial Sequence
  Description of Artificial Sequence: Synthetic oligonucleotide
  Target: LAMA2; (+) strand; PAM type: NRG; PAM sequence: GAG
gtatccaggatagagaaggg

SEQ ID NO: 126504 - DNA, 20 bp, Artificial Sequence
  Description of Artificial Sequence: Synthetic oligonucleotide
  Target: LAMA2; (+) strand; PAM type: NRG; PAM sequence: AGG
tatccaggatagagaagggg

SEQ ID NO: 126505 - DNA, 20 bp, Artificial Sequence
  Description of Artificial Sequence: Synthetic oligonucleotide
  Target: LAMA2; (+) strand; PAM type: NRG; PAM sequence: AAG
ccaggatagagaaggggagg

SEQ ID NO: 126506 - DNA, 20 bp, Artificial Sequence
  Description of Artificial Sequence: Synthetic oligonucleotide
  Target: LAMA2; (+) strand; PAM type: NRG; PAM sequence: AGG
caggatagagaaggggagga

SEQ ID NO: 126507 - DNA, 20 bp, Artificial Sequence
  Description of Artificial Sequence: Synthetic oligonucleotide
  Target: LAMA2; (+) strand; PAM type: NRG; PAM sequence: TAG
agagaaggggaggaaggatc

SEQ ID NO: 126508 - DNA, 20 bp, Artificial Sequence
  Description of Artificial Sequence: Synthetic oligonucleotide
  Target: LAMA2; (+) strand; PAM type: NRG; PAM sequence: GAG
gatctagtcacataatattt

SEQ ID NO: 126509 - DNA, 20 bp, Artificial Sequence
  Description of Artificial Sequence: Synthetic oligonucleotide
  Target: LAMA2; (+) strand; PAM type: NRG; PAM sequence: GAG
tctagtcacataatatttga

SEQ ID NO: 126510 - DNA, 20 bp, Artificial Sequence
  Description of Artificial Sequence: Synthetic oligonucleotide
  Target: LAMA2; (+) strand; PAM type: NRG; PAM sequence: CAG
gtcacataatatttgagagt

SEQ ID NO: 126511 - DNA, 20 bp, Artificial Sequence
  Description of Artificial Sequence: Synthetic oligonucleotide
  Target: LAMA2; (+) strand; PAM type: NRG; PAM sequence: GAG
gtgattgtatttgtctgtgt

SEQ ID NO: 126512 - DNA, 20 bp, Artificial Sequence
  Description of Artificial Sequence: Synthetic oligonucleotide
  Target: LAMA2; (+) strand; PAM type: NRG; PAM sequence: TGG
tctgtgtgagatttctatga

SEQ ID NO: 126513 - DNA, 20 bp, Artificial Sequence
  Description of Artificial Sequence: Synthetic oligonucleotide
  Target: LAMA2; (+) strand; PAM type: NRG; PAM sequence: TGG
ttctatgatggtcattttca

SEQ ID NO: 126514 - DNA, 20 bp, Artificial Sequence
  Description of Artificial Sequence: Synthetic oligonucleotide
  Target: LAMA2; (+) strand; PAM type: NRG; PAM sequence: GAG
ctatgatggtcattttcatg

SEQ ID NO: 126515 - DNA, 20 bp, Artificial Sequence
  Description of Artificial Sequence: Synthetic oligonucleotide
  Target: LAMA2; (+) strand; PAM type: NRG; PAM sequence: CAG
gatggtcattttcatggagc

SEQ ID NO: 126516 - DNA, 20 bp, Artificial Sequence
  Description of Artificial Sequence: Synthetic oligonucleotide
  Target: LAMA2; (+) strand; PAM type: NRG; PAM sequence: AAG
tcattttcatggagccagtc

SEQ ID NO: 126517 - DNA, 20 bp, Artificial Sequence
  Description of Artificial Sequence: Synthetic oligonucleotide
  Target: LAMA2; (+) strand; PAM type: NRG; PAM sequence: TAG
tcaagcattgactttgaaat

SEQ ID NO: 126518 - DNA, 20 bp, Artificial Sequence
  Description of Artificial Sequence: Synthetic oligonucleotide
  Target: LAMA2; (+) strand; PAM type: NRG; PAM sequence: AGG
caagcattgactttgaaatt

SEQ ID NO: 126519 - DNA, 20 bp, Artificial Sequence
  Description of Artificial Sequence: Synthetic oligonucleotide
  Target: LAMA2; (+) strand; PAM type: NRG; PAM sequence: CAG
gcattgactttgaaattagg

SEQ ID NO: 126520 - DNA, 20 bp, Artificial Sequence
  Description of Artificial Sequence: Synthetic oligonucleotide
  Target: LAMA2; (+) strand; PAM type: NRG; PAM sequence: AAG
taggcagatatgaatttgaa

SEQ ID NO: 126521 - DNA, 20 bp, Artificial Sequence
  Description of Artificial Sequence: Synthetic oligonucleotide
  Target: LAMA2; (+) strand; PAM type: NRG; PAM sequence: TAG
gcagatatgaatttgaaaag

SEQ ID NO: 126522 - DNA, 20 bp, Artificial Sequence
  Description of Artificial Sequence: Synthetic oligonucleotide
  Target: LAMA2; (+) strand; PAM type: NRG; PAM sequence: TAG
aaaagtagttttccctccac

SEQ ID NO: 126523 - DNA, 20 bp, Artificial Sequence
  Description of Artificial Sequence: Synthetic oligonucleotide
  Target: LAMA2; (+) strand; PAM type: NRG; PAM sequence: AAG
ctagccgtttgaccttgtac

SEQ ID NO: 126524 - DNA, 20 bp, Artificial Sequence
  Description of Artificial Sequence: Synthetic oligonucleotide
  Target: LAMA2; (+) strand; PAM type: NRG; PAM sequence: TAG
attttttattattaaaaaaa

SEQ ID NO: 126525 - DNA, 20 bp, Artificial Sequence
  Description of Artificial Sequence: Synthetic oligonucleotide
  Target: LAMA2; (+) strand; PAM type: NRG; PAM sequence: AGG
ttttttattattaaaaaaat

SEQ ID NO: 126526 - DNA, 20 bp, Artificial Sequence
  Description of Artificial Sequence: Synthetic oligonucleotide
  Target: LAMA2; (+) strand; PAM type: NRG; PAM sequence: GGG
tttttattattaaaaaaata

SEQ ID NO: 126527 - DNA, 20 bp, Artificial Sequence
  Description of Artificial Sequence: Synthetic oligonucleotide
  Target: LAMA2; (+) strand; PAM type: NRG; PAM sequence: AAG
aatagggattttttctttgt

SEQ ID NO: 126528 - DNA, 20 bp, Artificial Sequence
  Description of Artificial Sequence: Synthetic oligonucleotide
  Target: LAMA2; (+) strand; PAM type: NRG; PAM sequence: AAG
ttttctttgtaagatttttc

SEQ ID NO: 126529 - DNA, 20 bp, Artificial Sequence
  Description of Artificial Sequence: Synthetic oligonucleotide
  Target: LAMA2; (+) strand; PAM type: NRG; PAM sequence: GAG
ttctttgtaagatttttcaa

SEQ ID NO: 126530 - DNA, 20 bp, Artificial Sequence
  Description of Artificial Sequence: Synthetic oligonucleotide
  Target: LAMA2; (+) strand; PAM type: NRG; PAM sequence: AGG
tctttgtaagatttttcaag

SEQ ID NO: 126531 - DNA, 20 bp, Artificial Sequence
  Description of Artificial Sequence: Synthetic oligonucleotide
  Target: LAMA2; (+) strand; PAM type: NRG; PAM sequence: TGG
tttttcaagaggattcaatg

SEQ ID NO: 126532 - DNA, 20 bp, Artificial Sequence
  Description of Artificial Sequence: Synthetic oligonucleotide
  Target: LAMA2; (+) strand; PAM type: NRG; PAM sequence: CAG
aagaggattcaatgtggtaa

SEQ ID NO: 126533 - DNA, 20 bp, Artificial Sequence
  Description of Artificial Sequence: Synthetic oligonucleotide
  Target: LAMA2; (+) strand; PAM type: NRG; PAM sequence: AGG
agaggattcaatgtggtaac

SEQ ID NO: 126534 - DNA, 20 bp, Artificial Sequence
  Description of Artificial Sequence: Synthetic oligonucleotide
  Target: LAMA2; (+) strand; PAM type: NRG; PAM sequence: AAG
ttcaatgtggtaacaggtat

SEQ ID NO: 126535 - DNA, 20 bp, Artificial Sequence
  Description of Artificial Sequence: Synthetic oligonucleotide
  Target: LAMA2; (+) strand; PAM type: NRG; PAM sequence: TAG
taacaggtataagtgcctgt

SEQ ID NO: 126536 - DNA, 20 bp, Artificial Sequence
  Description of Artificial Sequence: Synthetic oligonucleotide
  Target: LAMA2; (+) strand; PAM type: NRG; PAM sequence: GAG
acaggtataagtgcctgtta

SEQ ID NO: 126537 - DNA, 20 bp, Artificial Sequence
  Description of Artificial Sequence: Synthetic oligonucleotide
  Target: LAMA2; (+) strand; PAM type: NRG; PAM sequence: AGG
caggtataagtgcctgttag

SEQ ID NO: 126538 - DNA, 20 bp, Artificial Sequence
  Description of Artificial Sequence: Synthetic oligonucleotide
  Target: LAMA2; (+) strand; PAM type: NRG; PAM sequence: GGG
aggtataagtgcctgttaga

SEQ ID NO: 126539 - DNA, 20 bp, Artificial Sequence
  Description of Artificial Sequence: Synthetic oligonucleotide
  Target: LAMA2; (+) strand; PAM type: NRG; PAM sequence: TAG
gcctgttagagggcctgtca

SEQ ID NO: 126540 - DNA, 20 bp, Artificial Sequence
  Description of Artificial Sequence: Synthetic oligonucleotide
  Target: LAMA2; (+) strand; PAM type: NRG; PAM sequence: AAG
tcatagataaatcctcaatg

SEQ ID NO: 126541 - DNA, 20 bp, Artificial Sequence
  Description of Artificial Sequence: Synthetic oligonucleotide
  Target: LAMA2; (+) strand; PAM type: NRG; PAM sequence: AGG
catagataaatcctcaatga

SEQ ID NO: 126542 - DNA, 20 bp, Artificial Sequence
  Description of Artificial Sequence: Synthetic oligonucleotide
  Target: LAMA2; (+) strand; PAM type: NRG; PAM sequence: GGG
atagataaatcctcaatgaa

SEQ ID NO: 126543 - DNA, 20 bp, Artificial Sequence
  Description of Artificial Sequence: Synthetic oligonucleotide
  Target: LAMA2; (+) strand; PAM type: NRG; PAM sequence: AAG
tgaagggtaactgttactaa

SEQ ID NO: 126544 - DNA, 20 bp, Artificial Sequence
  Description of Artificial Sequence: Synthetic oligonucleotide
  Target: LAMA2; (+) strand; PAM type: NRG; PAM sequence: AGG
gaagggtaactgttactaaa

SEQ ID NO: 126545 - DNA, 20 bp, Artificial Sequence
  Description of Artificial Sequence: Synthetic oligonucleotide
  Target: LAMA2; (+) strand; PAM type: NRG; PAM sequence: AAG
gggtaactgttactaaaagg

SEQ ID NO: 126546 - DNA, 20 bp, Artificial Sequence
  Description of Artificial Sequence: Synthetic oligonucleotide
  Target: LAMA2; (+) strand; PAM type: NRG; PAM sequence: AAG
tgttactaaaaggaagatat

SEQ ID NO: 126547 - DNA, 20 bp, Artificial Sequence
  Description of Artificial Sequence: Synthetic oligonucleotide
  Target: LAMA2; (+) strand; PAM type: NRG; PAM sequence: AGG
gttactaaaaggaagatata

SEQ ID NO: 126548 - DNA, 20 bp, Artificial Sequence
  Description of Artificial Sequence: Synthetic oligonucleotide
  Target: LAMA2; (+) strand; PAM type: NRG; PAM sequence: GAG
tactaaaaggaagatataag

SEQ ID NO: 126549 - DNA, 20 bp, Artificial Sequence
  Description of Artificial Sequence: Synthetic oligonucleotide
  Target: LAMA2; (+) strand; PAM type: NRG; PAM sequence: GAG
ctaaaaggaagatataagga

SEQ ID NO: 126550 - DNA, 20 bp, Artificial Sequence
  Description of Artificial Sequence: Synthetic oligonucleotide
  Target: LAMA2; (+) strand; PAM type: NRG; PAM sequence: TGG
ctacttccaaataaaaaccc

SEQ ID NO: 126551 - DNA, 20 bp, Artificial Sequence
  Description of Artificial Sequence: Synthetic oligonucleotide
  Target: LAMA2; (+) strand; PAM type: NRG; PAM sequence: TGG
taaaaaccctggttcaatat

SEQ ID NO: 126552 - DNA, 20 bp, Artificial Sequence
  Description of Artificial Sequence: Synthetic oligonucleotide
  Target: LAMA2; (+) strand; PAM type: NRG; PAM sequence: GAG
aaaaccctggttcaatattg

SEQ ID NO: 126553 - DNA, 20 bp, Artificial Sequence
  Description of Artificial Sequence: Synthetic oligonucleotide
  Target: LAMA2; (+) strand; PAM type: NRG; PAM sequence: TGG
cctggttcaatattggagca

SEQ ID NO: 126554 - DNA, 20 bp, Artificial Sequence
  Description of Artificial Sequence: Synthetic oligonucleotide
  Target: LAMA2; (+) strand; PAM type: NRG; PAM sequence: GGG
ctggttcaatattggagcat

SEQ ID NO: 126555 - DNA, 20 bp, Artificial Sequence
  Description of Artificial Sequence: Synthetic oligonucleotide
  Target: LAMA2; (+) strand; PAM type: NRG; PAM sequence: GGG
tggttcaatattggagcatg

SEQ ID NO: 126556 - DNA, 20 bp, Artificial Sequence
  Description of Artificial Sequence: Synthetic oligonucleotide
  Target: LAMA2; (+) strand; PAM type: NRG; PAM sequence: AAG
ggagcatggggacccccttt

SEQ ID NO: 126557 - DNA, 20 bp, Artificial Sequence
  Description of Artificial Sequence: Synthetic oligonucleotide
  Target: LAMA2; (+) strand; PAM type: NRG; PAM sequence: GAG
agcatggggaccccctttaa

SEQ ID NO: 126558 - DNA, 20 bp, Artificial Sequence
  Description of Artificial Sequence: Synthetic oligonucleotide
  Target: LAMA2; (+) strand; PAM type: NRG; PAM sequence: AAG
atggggaccccctttaagag

SEQ ID NO: 126559 - DNA, 20 bp, Artificial Sequence
  Description of Artificial Sequence: Synthetic oligonucleotide
  Target: LAMA2; (+) strand; PAM type: NRG; PAM sequence: CAG
ctttaagagaagcatcctcc

SEQ ID NO: 126560 - DNA, 20 bp, Artificial Sequence
  Description of Artificial Sequence: Synthetic oligonucleotide
  Target: LAMA2; (+) strand; PAM type: NRG; PAM sequence: AAG
aatgaaaatatttcatttgt

SEQ ID NO: 126561 - DNA, 20 bp, Artificial Sequence
  Description of Artificial Sequence: Synthetic oligonucleotide
  Target: LAMA2; (+) strand; PAM type: NRG; PAM sequence: AAG
aatatttcatttgtaagcat

SEQ ID NO: 126562 - DNA, 20 bp, Artificial Sequence
  Description of Artificial Sequence: Synthetic oligonucleotide
  Target: LAMA2; (+) strand; PAM type: NRG; PAM sequence: AAG
tttcatttgtaagcataaga

SEQ ID NO: 126563 - DNA, 20 bp, Artificial Sequence
  Description of Artificial Sequence: Synthetic oligonucleotide
  Target: LAMA2; (+) strand; PAM type: NRG; PAM sequence: AGG
ttcatttgtaagcataagaa

SEQ ID NO: 126564 - DNA, 20 bp, Artificial Sequence
  Description of Artificial Sequence: Synthetic oligonucleotide
  Target: LAMA2; (+) strand; PAM type: NRG; PAM sequence: GGG
tcatttgtaagcataagaaa

SEQ ID NO: 126565 - DNA, 20 bp, Artificial Sequence
  Description of Artificial Sequence: Synthetic oligonucleotide
  Target: LAMA2; (+) strand; PAM type: NRG; PAM sequence: GGG
catttgtaagcataagaaag

SEQ ID NO: 126566 - DNA, 20 bp, Artificial Sequence
  Description of Artificial Sequence: Synthetic oligonucleotide
  Target: LAMA2; (+) strand; PAM type: NRG; PAM sequence: AAG
cataagaaaggggtcatttt

SEQ ID NO: 126567 - DNA, 20 bp, Artificial Sequence
  Description of Artificial Sequence: Synthetic oligonucleotide
  Target: LAMA2; (+) strand; PAM type: NRG; PAM sequence: AAG
agtgaaatgaccgacttatc

SEQ ID NO: 126568 - DNA, 20 bp, Artificial Sequence
  Description of Artificial Sequence: Synthetic oligonucleotide
  Target: LAMA2; (+) strand; PAM type: NRG; PAM sequence: CAG
aaatgaccgacttatcaagc

SEQ ID NO: 126569 - DNA, 20 bp, Artificial Sequence
  Description of Artificial Sequence: Synthetic oligonucleotide
  Target: LAMA2; (+) strand; PAM type: NRG; PAM sequence: TAG
caagccagtccactgaactg

SEQ ID NO: 126570 - DNA, 20 bp, Artificial Sequence
  Description of Artificial Sequence: Synthetic oligonucleotide
  Target: LAMA2; (+) strand; PAM type: NRG; PAM sequence: TGG
cagtccactgaactgtagct

SEQ ID NO: 126571 - DNA, 20 bp, Artificial Sequence
  Description of Artificial Sequence: Synthetic oligonucleotide
  Target: LAMA2; (+) strand; PAM type: NRG; PAM sequence: GAG
gtccactgaactgtagcttg

SEQ ID NO: 126572 - DNA, 20 bp, Artificial Sequence
  Description of Artificial Sequence: Synthetic oligonucleotide
  Target: LAMA2; (+) strand; PAM type: NRG; PAM sequence: GAG
tgaactgtagcttggagtct

SEQ ID NO: 126573 - DNA, 20 bp, Artificial Sequence
  Description of Artificial Sequence: Synthetic oligonucleotide
  Target: LAMA2; (+) strand; PAM type: NRG; PAM sequence: AAG
agcttggagtctgagttaca

SEQ ID NO: 126574 - DNA, 20 bp, Artificial Sequence
  Description of Artificial Sequence: Synthetic oligonucleotide
  Target: LAMA2; (+) strand; PAM type: NRG; PAM sequence: TAG
ctgagttacaaagtaatcta

SEQ ID NO: 126575 - DNA, 20 bp, Artificial Sequence
  Description of Artificial Sequence: Synthetic oligonucleotide
  Target: LAMA2; (+) strand; PAM type: NRG; PAM sequence: GAG
aaagtaatctatagtgatct

SEQ ID NO: 126576 - DNA, 20 bp, Artificial Sequence
  Description of Artificial Sequence: Synthetic oligonucleotide
  Target: LAMA2; (+) strand; PAM type: NRG; PAM sequence: AGG
aagtaatctatagtgatctg

SEQ ID NO: 126577 - DNA, 20 bp, Artificial Sequence
  Description of Artificial Sequence: Synthetic oligonucleotide
  Target: LAMA2; (+) strand; PAM type: NRG; PAM sequence: GGG
agtaatctatagtgatctga

SEQ ID NO: 126578 - DNA, 20 bp, Artificial Sequence
  Description of Artificial Sequence: Synthetic oligonucleotide
  Target: LAMA2; (+) strand; PAM type: NRG; PAM sequence: GAG
taatctatagtgatctgagg

SEQ ID NO: 126579 - DNA, 20 bp, Artificial Sequence
  Description of Artificial Sequence: Synthetic oligonucleotide
  Target: LAMA2; (+) strand; PAM type: NRG; PAM sequence: AAG
gagggagtaatacaaactcc

SEQ ID NO: 126580 - DNA, 20 bp, Artificial Sequence
  Description of Artificial Sequence: Synthetic oligonucleotide
  Target: LAMA2; (+) strand; PAM type: NRG; PAM sequence: TAG
aaactccaagttaatgactg

SEQ ID NO: 126581 - DNA, 20 bp, Artificial Sequence
  Description of Artificial Sequence: Synthetic oligonucleotide
  Target: LAMA2; (+) strand; PAM type: NRG; PAM sequence: CAG
ataaattctactgatatttg

SEQ ID NO: 126582 - DNA, 20 bp, Artificial Sequence
  Description of Artificial Sequence: Synthetic oligonucleotide
  Target: LAMA2; (+) strand; PAM type: NRG; PAM sequence: TAG
ttctactgatatttgcagtc

SEQ ID NO: 126583 - DNA, 20 bp, Artificial Sequence
  Description of Artificial Sequence: Synthetic oligonucleotide
  Target: LAMA2; (+) strand; PAM type: NRG; PAM sequence: AAG
atttgcagtctagtgtcatc

SEQ ID NO: 126584 - DNA, 20 bp, Artificial Sequence
  Description of Artificial Sequence: Synthetic oligonucleotide
  Target: LAMA2; (+) strand; PAM type: NRG; PAM sequence: AGG
tttgcagtctagtgtcatca

SEQ ID NO: 126585 - DNA, 20 bp, Artificial Sequence
  Description of Artificial Sequence: Synthetic oligonucleotide
  Target: LAMA2; (+) strand; PAM type: NRG; PAM sequence: AAG
tcaaggctaattctccttta

SEQ ID NO: 126586 - DNA, 20 bp, Artificial Sequence
  Description of Artificial Sequence: Synthetic oligonucleotide
  Target: LAMA2; (+) strand; PAM type: NRG; PAM sequence: GAG
aaggctaattctcctttaaa

SEQ ID NO: 126587 - DNA, 20 bp, Artificial Sequence
  Description of Artificial Sequence: Synthetic oligonucleotide
  Target: LAMA2; (+) strand; PAM type: NRG; PAM sequence: AGG
aggctaattctcctttaaag

SEQ ID NO: 126588 - DNA, 20 bp, Artificial Sequence
  Description of Artificial Sequence: Synthetic oligonucleotide
  Target: LAMA2; (+) strand; PAM type: NRG; PAM sequence: AAG
attctcctttaaagaggcaa

SEQ ID NO: 126589 - DNA, 20 bp, Artificial Sequence
  Description of Artificial Sequence: Synthetic oligonucleotide
  Target: LAMA2; (+) strand; PAM type: NRG; PAM sequence: TAG
tgtccccaaaactgttgata

SEQ ID NO: 126590 - DNA, 20 bp, Artificial Sequence
  Description of Artificial Sequence: Synthetic oligonucleotide
  Target: LAMA2; (+) strand; PAM type: NRG; PAM sequence: CAG
tgttgatatagtatgtaact

SEQ ID NO: 126591 - DNA, 20 bp, Artificial Sequence
  Description of Artificial Sequence: Synthetic oligonucleotide
  Target: LAMA2; (+) strand; PAM type: NRG; PAM sequence: CAG
gtatgtaactcagcatgtca

SEQ ID NO: 126592 - DNA, 20 bp, Artificial Sequence
  Description of Artificial Sequence: Synthetic oligonucleotide
  Target: LAMA2; (+) strand; PAM type: NRG; PAM sequence: TGG
gaaatgttgtttatccactt

SEQ ID NO: 126593 - DNA, 20 bp, Artificial Sequence
  Description of Artificial Sequence: Synthetic oligonucleotide
  Target: LAMA2; (+) strand; PAM type: NRG; PAM sequence: AAG
tttaaatttctatatttcat

SEQ ID NO: 126594 - DNA, 20 bp, Artificial Sequence
  Description of Artificial Sequence: Synthetic oligonucleotide
  Target: LAMA2; (+) strand; PAM type: NRG; PAM sequence: AAG
ctatatttcataagtaaacc

SEQ ID NO: 126595 - DNA, 20 bp, Artificial Sequence
  Description of Artificial Sequence: Synthetic oligonucleotide
  Target: LAMA2; (+) strand; PAM type: NRG; PAM sequence: CGG
gtaaaccaagcctcaacact

SEQ ID NO: 126596 - DNA, 20 bp, Artificial Sequence
  Description of Artificial Sequence: Synthetic oligonucleotide
  Target: LAMA2; (+) strand; PAM type: NRG; PAM sequence: CAG
agcctcaacactcggcattt

SEQ ID NO: 126597 - DNA, 20 bp, Artificial Sequence
  Description of Artificial Sequence: Synthetic oligonucleotide
  Target: LAMA2; (+) strand; PAM type: NRG; PAM sequence: AGG
gcctcaacactcggcatttc

SEQ ID NO: 126598 - DNA, 20 bp, Artificial Sequence
  Description of Artificial Sequence: Synthetic oligonucleotide
  Target: LAMA2; (+) strand; PAM type: NRG; PAM sequence: CAG
caacactcggcatttcaggc

SEQ ID NO: 126599 - DNA, 20 bp, Artificial Sequence
  Description of Artificial Sequence: Synthetic oligonucleotide
  Target: LAMA2; (+) strand; PAM type: NRG; PAM sequence: AGG
aacactcggcatttcaggcc

SEQ ID NO: 126600 - DNA, 20 bp, Artificial Sequence
  Description of Artificial Sequence: Synthetic oligonucleotide
  Target: LAMA2; (+) strand; PAM type: NRG; PAM sequence: TGG
tcggcatttcaggccaggta

SEQ ID NO: 126601 - DNA, 20 bp, Artificial Sequence
  Description of Artificial Sequence: Synthetic oligonucleotide
  Target: LAMA2; (+) strand; PAM type: NRG; PAM sequence: TGG
gcatttcaggccaggtatgg

SEQ ID NO: 126602 - DNA, 20 bp, Artificial Sequence
  Description of Artificial Sequence: Synthetic oligonucleotide
  Target: LAMA2; (+) strand; PAM type: NRG; PAM sequence: CAG
gccaggtatggtggctcaca

SEQ ID NO: 126603 - DNA, 20 bp, Artificial Sequence
  Description of Artificial Sequence: Synthetic oligonucleotide
  Target: LAMA2; (+) strand; PAM type: NRG; PAM sequence: AGG
ccaggtatggtggctcacac

SEQ ID NO: 126604 - DNA, 20 bp, Artificial Sequence
  Description of Artificial Sequence: Synthetic oligonucleotide
  Target: LAMA2; (+) strand; PAM type: NRG; PAM sequence: TGG
tggtggctcacacaggtgtg

SEQ ID NO: 126605 - DNA, 20 bp, Artificial Sequence
  Description of Artificial Sequence: Synthetic oligonucleotide
  Target: LAMA2; (+) strand; PAM type: NRG; PAM sequence: CAG
acacaggtgtgtggtaatca

SEQ ID NO: 126606 - DNA, 20 bp, Artificial Sequence
  Description of Artificial Sequence: Synthetic oligonucleotide
  Target: LAMA2; (+) strand; PAM type: NRG; PAM sequence: TGG
gtgtggtaatcacagcactt

SEQ ID NO: 126607 - DNA, 20 bp, Artificial Sequence
  Description of Artificial Sequence: Synthetic oligonucleotide
  Target: LAMA2; (+) strand; PAM type: NRG; PAM sequence: GGG
tgtggtaatcacagcacttt

SEQ ID NO: 126608 - DNA, 20 bp, Artificial Sequence
  Description of Artificial Sequence: Synthetic oligonucleotide
  Target: LAMA2; (+) strand; PAM type: NRG; PAM sequence: GAG
tggtaatcacagcactttgg

SEQ ID NO: 126609 - DNA, 20 bp, Artificial Sequence
  Description of Artificial Sequence: Synthetic oligonucleotide
  Target: LAMA2; (+) strand; PAM type: NRG; PAM sequence: AGG
ggtaatcacagcactttggg

SEQ ID NO: 126610 - DNA, 20 bp, Artificial Sequence
  Description of Artificial Sequence: Synthetic oligonucleotide
  Target: LAMA2; (+) strand; PAM type: NRG; PAM sequence: CAG
agcactttgggaggcttgtg

SEQ ID NO: 126611 - DNA, 20 bp, Artificial Sequence
  Description of Artificial Sequence: Synthetic oligonucleotide
  Target: LAMA2; (+) strand; PAM type: NRG; PAM sequence: AGG
gcactttgggaggcttgtgc

SEQ ID NO: 126612 - DNA, 20 bp, Artificial Sequence
  Description of Artificial Sequence: Synthetic oligonucleotide
  Target: LAMA2; (+) strand; PAM type: NRG; PAM sequence: GAG
actttgggaggcttgtgcag

SEQ ID NO: 126613 - DNA, 20 bp, Artificial Sequence
  Description of Artificial Sequence: Synthetic oligonucleotide
  Target: LAMA2; (+) strand; PAM type: NRG; PAM sequence: AGG
ctttgggaggcttgtgcagg

SEQ ID NO: 126614 - DNA, 20 bp, Artificial Sequence
  Description of Artificial Sequence: Synthetic oligonucleotide
  Target: LAMA2; (+) strand; PAM type: NRG; PAM sequence: GAG
cttgtgcaggaggatcgctt

SEQ ID NO: 126615 - DNA, 20 bp, Artificial Sequence
  Description of Artificial Sequence: Synthetic oligonucleotide
  Target: LAMA2; (+) strand; PAM type: NRG; PAM sequence: AGG
ttgtgcaggaggatcgcttg

SEQ ID NO: 126616 - DNA, 20 bp, Artificial Sequence
  Description of Artificial Sequence: Synthetic oligonucleotide
  Target: LAMA2; (+) strand; PAM type: NRG; PAM sequence: CAG
gcaggaggatcgcttgaggc

SEQ ID NO: 126617 - DNA, 20 bp, Artificial Sequence
  Description of Artificial Sequence: Synthetic oligonucleotide
  Target: LAMA2; (+) strand; PAM type: NRG; PAM sequence: AGG
caggaggatcgcttgaggcc

SEQ ID NO: 126618 - DNA, 20 bp, Artificial Sequence
  Description of Artificial Sequence: Synthetic oligonucleotide
  Target: LAMA2; (+) strand; PAM type: NRG; PAM sequence: GAG
ggaggatcgcttgaggccag

SEQ ID NO: 126619 - DNA, 20 bp, Artificial Sequence
  Description of Artificial Sequence: Synthetic oligonucleotide
  Target: LAMA2; (+) strand; PAM type: NRG; PAM sequence: GAG
tcgcttgaggccaggagttc

SEQ ID NO: 126620 - DNA, 20 bp, Artificial Sequence
  Description of Artificial Sequence: Synthetic oligonucleotide
  Target: LAMA2; (+) strand; PAM type: NRG; PAM sequence: AGG
cgcttgaggccaggagttcg

SEQ ID NO: 126621 - DNA, 20 bp, Artificial Sequence
  Description of Artificial Sequence: Synthetic oligonucleotide
  Target: LAMA2; (+) strand; PAM type: NRG; PAM sequence: TGG
cgaggctaacctgtgcaaca

SEQ ID NO: 126622 - DNA, 20 bp, Artificial Sequence
  Description of Artificial Sequence: Synthetic oligonucleotide
  Target: LAMA2; (+) strand; PAM type: NRG; PAM sequence: GGG
gaggctaacctgtgcaacat

SEQ ID NO: 126623 - DNA, 20 bp, Artificial Sequence
  Description of Artificial Sequence: Synthetic oligonucleotide
  Target: LAMA2; (+) strand; PAM type: NRG; PAM sequence: GGG
aggctaacctgtgcaacatg

SEQ ID NO: 126624 - DNA, 20 bp, Artificial Sequence
  Description of Artificial Sequence: Synthetic oligonucleotide
  Target: LAMA2; (+) strand; PAM type: NRG; PAM sequence: GAG
gctaacctgtgcaacatggg

SEQ ID NO: 126625 - DNA, 20 bp, Artificial Sequence
  Description of Artificial Sequence: Synthetic oligonucleotide
  Target: LAMA2; (+) strand; PAM type: NRG; PAM sequence: TAG
acatggggagaccctgcctc

SEQ ID NO: 126626 - DNA, 20 bp, Artificial Sequence
  Description of Artificial Sequence: Synthetic oligonucleotide
  Target: LAMA2; (+) strand; PAM type: NRG; PAM sequence: GAG
atggggagaccctgcctcta

SEQ ID NO: 126627 - DNA, 20 bp, Artificial Sequence
  Description of Artificial Sequence: Synthetic oligonucleotide
  Target: LAMA2; (+) strand; PAM type: NRG; PAM sequence: TAG
tagagaaaatgaaaaataat

SEQ ID NO: 126628 - DNA, 20 bp, Artificial Sequence
  Description of Artificial Sequence: Synthetic oligonucleotide
  Target: LAMA2; (+) strand; PAM type: NRG; PAM sequence: AGG
agagaaaatgaaaaataatt

SEQ ID NO: 126629 - DNA, 20 bp, Artificial Sequence
  Description of Artificial Sequence: Synthetic oligonucleotide
  Target: LAMA2; (+) strand; PAM type: NRG; PAM sequence: CAG
gaaaatgaaaaataattagg

SEQ ID NO: 126630 - DNA, 20 bp, Artificial Sequence
  Description of Artificial Sequence: Synthetic oligonucleotide
  Target: LAMA2; (+) strand; PAM type: NRG; PAM sequence: AGG
aaaatgaaaaataattaggc

SEQ ID NO: 126631 - DNA, 20 bp, Artificial Sequence
  Description of Artificial Sequence: Synthetic oligonucleotide
  Target: LAMA2; (+) strand; PAM type: NRG; PAM sequence: TAG
gaaaaataattaggcaggca

SEQ ID NO: 126632 - DNA, 20 bp, Artificial Sequence
  Description of Artificial Sequence: Synthetic oligonucleotide
  Target: LAMA2; (+) strand; PAM type: NRG; PAM sequence: TGG
aaataattaggcaggcatag

SEQ ID NO: 126633 - DNA, 20 bp, Artificial Sequence
  Description of Artificial Sequence: Synthetic oligonucleotide
  Target: LAMA2; (+) strand; PAM type: NRG; PAM sequence: TAG
ggcatagtggcacatgtctg

SEQ ID NO: 126634 - DNA, 20 bp, Artificial Sequence
  Description of Artificial Sequence: Synthetic oligonucleotide
  Target: LAMA2; (+) strand; PAM type: NRG; PAM sequence: GAG
gtctgtagtccctgatactc

SEQ ID NO: 126635 - DNA, 20 bp, Artificial Sequence
  Description of Artificial Sequence: Synthetic oligonucleotide
  Target: LAMA2; (+) strand; PAM type: NRG; PAM sequence: GAG
ctgtagtccctgatactcga

SEQ ID NO: 126636 - DNA, 20 bp, Artificial Sequence
  Description of Artificial Sequence: Synthetic oligonucleotide
  Target: LAMA2; (+) strand; PAM type: NRG; PAM sequence: AGG
tgtagtccctgatactcgag

SEQ ID NO: 126637 - DNA, 20 bp, Artificial Sequence
  Description of Artificial Sequence: Synthetic oligonucleotide
  Target: LAMA2; (+) strand; PAM type: NRG; PAM sequence: GAG
tccctgatactcgagaggct

SEQ ID NO: 126638 - DNA, 20 bp, Artificial Sequence
  Description of Artificial Sequence: Synthetic oligonucleotide
  Target: LAMA2; (+) strand; PAM type: NRG; PAM sequence: AGG
ccctgatactcgagaggctg

SEQ ID NO: 126639 - DNA, 20 bp, Artificial Sequence
  Description of Artificial Sequence: Synthetic oligonucleotide
  Target: LAMA2; (+) strand; PAM type: NRG; PAM sequence: TGG
tgatactcgagaggctgagg

SEQ ID NO: 126640 - DNA, 20 bp, Artificial Sequence
  Description of Artificial Sequence: Synthetic oligonucleotide
  Target: LAMA2; (+) strand; PAM type: NRG; PAM sequence: GGG
gatactcgagaggctgaggt

SEQ ID NO: 126641 - DNA, 20 bp, Artificial Sequence
  Description of Artificial Sequence: Synthetic oligonucleotide
  Target: LAMA2; (+) strand; PAM type: NRG; PAM sequence: GAG
tactcgagaggctgaggtgg

SEQ ID NO: 126642 - DNA, 20 bp, Artificial Sequence
  Description of Artificial Sequence: Synthetic oligonucleotide
  Target: LAMA2; (+) strand; PAM type: NRG; PAM sequence: GAG
ctgaggtgggagaattgctt

SEQ ID NO: 126643 - DNA, 20 bp, Artificial Sequence
  Description of Artificial Sequence: Synthetic oligonucleotide
  Target: LAMA2; (+) strand; PAM type: NRG; PAM sequence: CAG
gtgggagaattgcttgagtc

SEQ ID NO: 126644 - DNA, 20 bp, Artificial Sequence
  Description of Artificial Sequence: Synthetic oligonucleotide
  Target: LAMA2; (+) strand; PAM type: NRG; PAM sequence: AGG
tgggagaattgcttgagtcc

SEQ ID NO: 126645 - DNA, 20 bp, Artificial Sequence
  Description of Artificial Sequence: Synthetic oligonucleotide
  Target: LAMA2; (+) strand; PAM type: NRG; PAM sequence: GAG
ggagaattgcttgagtccag

SEQ ID NO: 126646 - DNA, 20 bp, Artificial Sequence
  Description of Artificial Sequence: Synthetic oligonucleotide
  Target: LAMA2; (+) strand; PAM type: NRG; PAM sequence: GAG
ttgcttgagtccaggagttt

SEQ ID NO: 126647 - DNA, 20 bp, Artificial Sequence
  Description of Artificial Sequence: Synthetic oligonucleotide
  Target: LAMA2; (+) strand; PAM type: NRG; PAM sequence: AGG
tgcttgagtccaggagtttg

SEQ ID NO: 126648 - DNA, 20 bp, Artificial Sequence
  Description of Artificial Sequence: Synthetic oligonucleotide
  Target: LAMA2; (+) strand; PAM type: NRG; PAM sequence: CAG
agtccaggagtttgaggctg

SEQ ID NO: 126649 - DNA, 20 bp, Artificial Sequence
  Description of Artificial Sequence: Synthetic oligonucleotide
  Target: LAMA2; (+) strand; PAM type: NRG; PAM sequence: GAG
caggagtttgaggctgcagt

SEQ ID NO: 126650 - DNA, 20 bp, Artificial Sequence
  Description of Artificial Sequence: Synthetic oligonucleotide
  Target: LAMA2; (+) strand; PAM type: NRG; PAM sequence: CAG
atgatcttgccactgtgctc

SEQ ID NO: 126651 - DNA, 20 bp, Artificial Sequence
  Description of Artificial Sequence: Synthetic oligonucleotide
  Target: LAMA2; (+) strand; PAM type: NRG; PAM sequence: TGG
cttgccactgtgctccagcc

SEQ ID NO: 126652 - DNA, 20 bp, Artificial Sequence
  Description of Artificial Sequence: Synthetic oligonucleotide
  Target: LAMA2; (+) strand; PAM type: NRG; PAM sequence: GGG
ttgccactgtgctccagcct

SEQ ID NO: 126653 - DNA, 20 bp, Artificial Sequence
  Description of Artificial Sequence: Synthetic oligonucleotide
  Target: LAMA2; (+) strand; PAM type: NRG; PAM sequence: TGG
ctgtgctccagcctgggcaa

SEQ ID NO: 126654 - DNA, 20 bp, Artificial Sequence
  Description of Artificial Sequence: Synthetic oligonucleotide
  Target: LAMA2; (+) strand; PAM type: NRG; PAM sequence: GAG
gtgctccagcctgggcaatg

SEQ ID NO: 126655 - DNA, 20 bp, Artificial Sequence
  Description of Artificial Sequence: Synthetic oligonucleotide
  Target: LAMA2; (+) strand; PAM type: NRG; PAM sequence: AAG
tccagcctgggcaatggagc

SEQ ID NO: 126656 - DNA, 20 bp, Artificial Sequence
  Description of Artificial Sequence: Synthetic oligonucleotide
  Target: LAMA2; (+) strand; PAM type: NRG; PAM sequence: AAG
gcaagaccctgtcttgaaaa

SEQ ID NO: 126657 - DNA, 20 bp, Artificial Sequence
  Description of Artificial Sequence: Synthetic oligonucleotide
  Target: LAMA2; (+) strand; PAM type: NRG; PAM sequence: AAG
catatttttctgaattaaaa

SEQ ID NO: 126658 - DNA, 20 bp, Artificial Sequence
  Description of Artificial Sequence: Synthetic oligonucleotide
  Target: LAMA2; (+) strand; PAM type: NRG; PAM sequence: AAG
aaagaaaaaatactctcttt

SEQ ID NO: 126659 - DNA, 20 bp, Artificial Sequence
  Description of Artificial Sequence: Synthetic oligonucleotide
  Target: LAMA2; (+) strand; PAM type: NRG; PAM sequence: AAG
ctctctttaagtatatgaaa

SEQ ID NO: 126660 - DNA, 20 bp, Artificial Sequence
  Description of Artificial Sequence: Synthetic oligonucleotide
  Target: LAMA2; (+) strand; PAM type: NRG; PAM sequence: TAG
gaaaaagcaaatatctttcc

SEQ ID NO: 126661 - DNA, 20 bp, Artificial Sequence
  Description of Artificial Sequence: Synthetic oligonucleotide
  Target: LAMA2; (+) strand; PAM type: NRG; PAM sequence: GAG
aaaagcaaatatctttccta

SEQ ID NO: 126662 - DNA, 20 bp, Artificial Sequence
  Description of Artificial Sequence: Synthetic oligonucleotide
  Target: LAMA2; (+) strand; PAM type: NRG; PAM sequence: CAG
tagagtatattacattttaa

SEQ ID NO: 126663 - DNA, 20 bp, Artificial Sequence
  Description of Artificial Sequence: Synthetic oligonucleotide
  Target: LAMA2; (+) strand; PAM type: NRG; PAM sequence: CAG
tttaacagctcttgaaaatt

SEQ ID NO: 126664 - DNA, 20 bp, Artificial Sequence
  Description of Artificial Sequence: Synthetic oligonucleotide
  Target: LAMA2; (+) strand; PAM type: NRG; PAM sequence: AAG
cagctcttgaaaattcagtt

SEQ ID NO: 126665 - DNA, 20 bp, Artificial Sequence
  Description of Artificial Sequence: Synthetic oligonucleotide
  Target: LAMA2; (+) strand; PAM type: NRG; PAM sequence: TGG
ctcttgaaaattcagttaag

SEQ ID NO: 126666 - DNA, 20 bp, Artificial Sequence
  Description of Artificial Sequence: Synthetic oligonucleotide
  Target: LAMA2; (+) strand; PAM type: NRG; PAM sequence: TAG
gaaaattcagttaagtggtc

SEQ ID NO: 126667 - DNA, 20 bp, Artificial Sequence
  Description of Artificial Sequence: Synthetic oligonucleotide
  Target: LAMA2; (+) strand; PAM type: NRG; PAM sequence: TGG
gttaagtggtctagtgcttg

SEQ ID NO: 126668 - DNA, 20 bp, Artificial Sequence
  Description of Artificial Sequence: Synthetic oligonucleotide
  Target: LAMA2; (+) strand; PAM type: NRG; PAM sequence: TGG
gtctagtgcttgtggtaatc

SEQ ID NO: 126669 - DNA, 20 bp, Artificial Sequence
  Description of Artificial Sequence: Synthetic oligonucleotide
  Target: LAMA2; (+) strand; PAM type: NRG; PAM sequence: TAG
gcttgtggtaatctggatgt

SEQ ID NO: 126670 - DNA, 20 bp, Artificial Sequence
  Description of Artificial Sequence: Synthetic oligonucleotide
  Target: LAMA2; (+) strand; PAM type: NRG; PAM sequence: AAG
taatctggatgttagctaac

SEQ ID NO: 126671 - DNA, 20 bp, Artificial Sequence
  Description of Artificial Sequence: Synthetic oligonucleotide
  Target: LAMA2; (+) strand; PAM type: NRG; PAM sequence: CAG
ttaattccatacgttatcaa

SEQ ID NO: 126672 - DNA, 20 bp, Artificial Sequence
  Description of Artificial Sequence: Synthetic oligonucleotide
  Target: LAMA2; (+) strand; PAM type: NRG; PAM sequence: AAG
tccatacgttatcaacagca

SEQ ID NO: 126673 - DNA, 20 bp, Artificial Sequence
  Description of Artificial Sequence: Synthetic oligonucleotide
  Target: LAMA2; (+) strand; PAM type: NRG; PAM sequence: TGG
ttatcaacagcaaagaattt

SEQ ID NO: 126674 - DNA, 20 bp, Artificial Sequence
  Description of Artificial Sequence: Synthetic oligonucleotide
  Target: LAMA2; (+) strand; PAM type: NRG; PAM sequence: GAG
atcaacagcaaagaattttg

SEQ ID NO: 126675 - DNA, 20 bp, Artificial Sequence
  Description of Artificial Sequence: Synthetic oligonucleotide
  Target: LAMA2; (+) strand; PAM type: NRG; PAM sequence: CAG
aacagcaaagaattttggag

SEQ ID NO: 126676 - DNA, 20 bp, Artificial Sequence
  Description of Artificial Sequence: Synthetic oligonucleotide
  Target: LAMA2; (+) strand; PAM type: NRG; PAM sequence: AAG
ttggagcagctaccataaat

SEQ ID NO: 126677 - DNA, 20 bp, Artificial Sequence
  Description of Artificial Sequence: Synthetic oligonucleotide
  Target: LAMA2; (+) strand; PAM type: NRG; PAM sequence: TAG
ccataaataagaaactgctt

SEQ ID NO: 126678 - DNA, 20 bp, Artificial Sequence
  Description of Artificial Sequence: Synthetic oligonucleotide
  Target: LAMA2; (+) strand; PAM type: NRG; PAM sequence: TGG
taagaaactgctttagatgc

SEQ ID NO: 126679 - DNA, 20 bp, Artificial Sequence
  Description of Artificial Sequence: Synthetic oligonucleotide
  Target: LAMA2; (+) strand; PAM type: NRG; PAM sequence: GAG
agaaactgctttagatgctg

SEQ ID NO: 126680 - DNA, 20 bp, Artificial Sequence
  Description of Artificial Sequence: Synthetic oligonucleotide
  Target: LAMA2; (+) strand; PAM type: NRG; PAM sequence: TGG
agatgctggagatctaaatt

SEQ ID NO: 126681 - DNA, 20 bp, Artificial Sequence
  Description of Artificial Sequence: Synthetic oligonucleotide
  Target: LAMA2; (+) strand; PAM type: NRG; PAM sequence: AAG
gctggagatctaaatttggt

SEQ ID NO: 126682 - DNA, 20 bp, Artificial Sequence
  Description of Artificial Sequence: Synthetic oligonucleotide
  Target: LAMA2; (+) strand; PAM type: NRG; PAM sequence: CAG
aatttggtaagatataattt

SEQ ID NO: 126683 - DNA, 20 bp, Artificial Sequence
  Description of Artificial Sequence: Synthetic oligonucleotide
  Target: LAMA2; (+) strand; PAM type: NRG; PAM sequence: AAG
aagatataatttcagccctc

SEQ ID NO: 126684 - DNA, 20 bp, Artificial Sequence
  Description of Artificial Sequence: Synthetic oligonucleotide
  Target: LAMA2; (+) strand; PAM type: NRG; PAM sequence: AGG
agatataatttcagccctca

SEQ ID NO: 126685 - DNA, 20 bp, Artificial Sequence
  Description of Artificial Sequence: Synthetic oligonucleotide
  Target: LAMA2; (+) strand; PAM type: NRG; PAM sequence: TAG
aatttcagccctcaaggatc

SEQ ID NO: 126686 - DNA, 20 bp, Artificial Sequence
  Description of Artificial Sequence: Synthetic oligonucleotide
  Target: LAMA2; (+) strand; PAM type: NRG; PAM sequence: AAG
cctcaaggatctagtttgtt

SEQ ID NO: 126687 - DNA, 20 bp, Artificial Sequence
  Description of Artificial Sequence: Synthetic oligonucleotide
  Target: LAMA2; (+) strand; PAM type: NRG; PAM sequence: TAG
atctagtttgttaagaaaca

SEQ ID NO: 126688 - DNA, 20 bp, Artificial Sequence
  Description of Artificial Sequence: Synthetic oligonucleotide
  Target: LAMA2; (+) strand; PAM type: NRG; PAM sequence: AGG
tctagtttgttaagaaacat

SEQ ID NO: 126689 - DNA, 20 bp, Artificial Sequence
  Description of Artificial Sequence: Synthetic oligonucleotide
  Target: LAMA2; (+) strand; PAM type: NRG; PAM sequence: AAG
cttgaattcaaaaaaaatta

SEQ ID NO: 126690 - DNA, 20 bp, Artificial Sequence
  Description of Artificial Sequence: Synthetic oligonucleotide
  Target: LAMA2; (+) strand; PAM type: NRG; PAM sequence: CAG
aaaattaaagcttgattgtt

SEQ ID NO: 126691 - DNA, 20 bp, Artificial Sequence
  Description of Artificial Sequence: Synthetic oligonucleotide
  Target: LAMA2; (+) strand; PAM type: NRG; PAM sequence: AAG
ttaaagcttgattgttcaga

SEQ ID NO: 126692 - DNA, 20 bp, Artificial Sequence
  Description of Artificial Sequence: Synthetic oligonucleotide
  Target: LAMA2; (+) strand; PAM type: NRG; PAM sequence: TAG
aaagcaatttcatctatatt

SEQ ID NO: 126693 - DNA, 20 bp, Artificial Sequence
  Description of Artificial Sequence: Synthetic oligonucleotide
  Target: LAMA2; (+) strand; PAM type: NRG; PAM sequence: AGG
aagcaatttcatctatattt

SEQ ID NO: 126694 - DNA, 20 bp, Artificial Sequence
  Description of Artificial Sequence: Synthetic oligonucleotide
  Target: LAMA2; (+) strand; PAM type: NRG; PAM sequence: GAG
gcaatttcatctatatttag

SEQ ID NO: 126695 - DNA, 20 bp, Artificial Sequence
  Description of Artificial Sequence: Synthetic oligonucleotide
  Target: LAMA2; (+) strand; PAM type: NRG; PAM sequence: CAG
ctatatttaggagatgttta

SEQ ID NO: 126696 - DNA, 20 bp, Artificial Sequence
  Description of Artificial Sequence: Synthetic oligonucleotide
  Target: LAMA2; (+) strand; PAM type: NRG; PAM sequence: AGG
tatatttaggagatgtttac

SEQ ID NO: 126697 - DNA, 20 bp, Artificial Sequence
  Description of Artificial Sequence: Synthetic oligonucleotide
  Target: LAMA2; (+) strand; PAM type: NRG; PAM sequence: CAG
aggtgttatattttataatg

SEQ ID NO: 126698 - DNA, 20 bp, Artificial Sequence
  Description of Artificial Sequence: Synthetic oligonucleotide
  Target: LAMA2; (+) strand; PAM type: NRG; PAM sequence: GAG
atattttataatgcagatct

SEQ ID NO: 126699 - DNA, 20 bp, Artificial Sequence
  Description of Artificial Sequence: Synthetic oligonucleotide
  Target: LAMA2; (+) strand; PAM type: NRG; PAM sequence: AAG
tctgagttcactttttgtac

SEQ ID NO: 126700 - DNA, 20 bp, Artificial Sequence
  Description of Artificial Sequence: Synthetic oligonucleotide
  Target: LAMA2; (+) strand; PAM type: NRG; PAM sequence: TAG
gagttcactttttgtacaag

SEQ ID NO: 126701 - DNA, 20 bp, Artificial Sequence
  Description of Artificial Sequence: Synthetic oligonucleotide
  Target: LAMA2; (+) strand; PAM type: NRG; PAM sequence: AAG
ttcactttttgtacaagtag

SEQ ID NO: 126702 - DNA, 20 bp, Artificial Sequence
  Description of Artificial Sequence: Synthetic oligonucleotide
  Target: LAMA2; (+) strand; PAM type: NRG; PAM sequence: GAG
cactttttgtacaagtagaa

SEQ ID NO: 126703 - DNA, 20 bp, Artificial Sequence
  Description of Artificial Sequence: Synthetic oligonucleotide
  Target: LAMA2; (+) strand; PAM type: NRG; PAM sequence: TAG
gagtcacacttttatattaa

SEQ ID NO: 126704 - DNA, 20 bp, Artificial Sequence
  Description of Artificial Sequence: Synthetic oligonucleotide
  Target: LAMA2; (+) strand; PAM type: NRG; PAM sequence: TGG
gataatattattaacactgt

SEQ ID NO: 126705 - DNA, 20 bp, Artificial Sequence
  Description of Artificial Sequence: Synthetic oligonucleotide
  Target: LAMA2; (+) strand; PAM type: NRG; PAM sequence: TAG
atttcttccatgtactgtcc

SEQ ID NO: 126706 - DNA, 20 bp, Artificial Sequence
  Description of Artificial Sequence: Synthetic oligonucleotide
  Target: LAMA2; (+) strand; PAM type: NRG; PAM sequence: TAG
ctagatattttacttattcc

SEQ ID NO: 126707 - DNA, 20 bp, Artificial Sequence
  Description of Artificial Sequence: Synthetic oligonucleotide
  Target: LAMA2; (+) strand; PAM type: NRG; PAM sequence: TAG
tacttattcctagaatttta

SEQ ID NO: 126708 - DNA, 20 bp, Artificial Sequence
  Description of Artificial Sequence: Synthetic oligonucleotide
  Target: LAMA2; (+) strand; PAM type: NRG; PAM sequence: TAG
attcctagaattttatagaa

SEQ ID NO: 126709 - DNA, 20 bp, Artificial Sequence
  Description of Artificial Sequence: Synthetic oligonucleotide
  Target: LAMA2; (+) strand; PAM type: NRG; PAM sequence: AGG
ttcctagaattttatagaat

SEQ ID NO: 126710 - DNA, 20 bp, Artificial Sequence
  Description of Artificial Sequence: Synthetic oligonucleotide
  Target: LAMA2; (+) strand; PAM type: NRG; PAM sequence: TAG
ataggtcattttgcttatgt

SEQ ID NO: 126711 - DNA, 20 bp, Artificial Sequence
  Description of Artificial Sequence: Synthetic oligonucleotide
  Target: LAMA2; (+) strand; PAM type: NRG; PAM sequence: CAG
attttgcttatgttagcctt

SEQ ID NO: 126712 - DNA, 20 bp, Artificial Sequence
  Description of Artificial Sequence: Synthetic oligonucleotide
  Target: LAMA2; (+) strand; PAM type: NRG; PAM sequence: CAG
cttatgttagccttcagttg

SEQ ID NO: 126713 - DNA, 20 bp, Artificial Sequence
  Description of Artificial Sequence: Synthetic oligonucleotide
  Target: LAMA2; (+) strand; PAM type: NRG; PAM sequence: AGG
ttatgttagccttcagttgc

SEQ ID NO: 126714 - DNA, 20 bp, Artificial Sequence
  Description of Artificial Sequence: Synthetic oligonucleotide
  Target: LAMA2; (+) strand; PAM type: NRG; PAM sequence: TAG
tagccttcagttgcaggtga

SEQ ID NO: 126715 - DNA, 20 bp, Artificial Sequence
  Description of Artificial Sequence: Synthetic oligonucleotide
  Target: LAMA2; (+) strand; PAM type: NRG; PAM sequence: GAG
aggtgatagaaatccaaatt

SEQ ID NO: 126716 - DNA, 20 bp, Artificial Sequence
  Description of Artificial Sequence: Synthetic oligonucleotide
  Target: LAMA2; (+) strand; PAM type: NRG; PAM sequence: CAG
gacacctctattgatctgtc

SEQ ID NO: 126717 - DNA, 20 bp, Artificial Sequence
  Description of Artificial Sequence: Synthetic oligonucleotide
  Target: LAMA2; (+) strand; PAM type: NRG; PAM sequence: AGG
acacctctattgatctgtcc

SEQ ID NO: 126718 - DNA, 20 bp, Artificial Sequence
  Description of Artificial Sequence: Synthetic oligonucleotide
  Target: LAMA2; (+) strand; PAM type: NRG; PAM sequence: GGG
cacctctattgatctgtcca

SEQ ID NO: 126719 - DNA, 20 bp, Artificial Sequence
  Description of Artificial Sequence: Synthetic oligonucleotide
  Target: LAMA2; (+) strand; PAM type: NRG; PAM sequence: AAG
ctctattgatctgtccaggg

SEQ ID NO: 126720 - DNA, 20 bp, Artificial Sequence
  Description of Artificial Sequence: Synthetic oligonucleotide
  Target: LAMA2; (+) strand; PAM type: NRG; PAM sequence: CAG
ttgatctgtccagggaagta

SEQ ID NO: 126721 - DNA, 20 bp, Artificial Sequence
  Description of Artificial Sequence: Synthetic oligonucleotide
  Target: LAMA2; (+) strand; PAM type: NRG; PAM sequence: GAG
gatctgtccagggaagtaca

SEQ ID NO: 126722 - DNA, 20 bp, Artificial Sequence
  Description of Artificial Sequence: Synthetic oligonucleotide
  Target: LAMA2; (+) strand; PAM type: NRG; PAM sequence: AGG
atctgtccagggaagtacag

SEQ ID NO: 126723 - DNA, 20 bp, Artificial Sequence
  Description of Artificial Sequence: Synthetic oligonucleotide
  Target: LAMA2; (+) strand; PAM type: NRG; PAM sequence: GAG
ctgtccagggaagtacagag

SEQ ID NO: 126724 - DNA, 20 bp, Artificial Sequence
  Description of Artificial Sequence: Synthetic oligonucleotide
  Target: LAMA2; (+) strand; PAM type: NRG; PAM sequence: TAG
agtacagaggagacctgcct

SEQ ID NO: 126725 - DNA, 20 bp, Artificial Sequence
  Description of Artificial Sequence: Synthetic oligonucleotide
  Target: LAMA2; (+) strand; PAM type: NRG; PAM sequence: CAG
tgccttagccatctgttgac

SEQ ID NO: 126726 - DNA, 20 bp, Artificial Sequence
  Description of Artificial Sequence: Synthetic oligonucleotide
  Target: LAMA2; (+) strand; PAM type: NRG; PAM sequence: GAG
ccttagccatctgttgacca

SEQ ID NO: 126727 - DNA, 20 bp, Artificial Sequence
  Description of Artificial Sequence: Synthetic oligonucleotide
  Target: LAMA2; (+) strand; PAM type: NRG; PAM sequence: AGG
cttagccatctgttgaccag

SEQ ID NO: 126728 - DNA, 20 bp, Artificial Sequence
  Description of Artificial Sequence: Synthetic oligonucleotide
  Target: LAMA2; (+) strand; PAM type: NRG; PAM sequence: CAG
cagaggaccaatcacatcaa

SEQ ID NO: 126729 - DNA, 20 bp, Artificial Sequence
  Description of Artificial Sequence: Synthetic oligonucleotide
  Target: LAMA2; (+) strand; PAM type: NRG; PAM sequence: AGG
agaggaccaatcacatcaac

SEQ ID NO: 126730 - DNA, 20 bp, Artificial Sequence
  Description of Artificial Sequence: Synthetic oligonucleotide
  Target: LAMA2; (+) strand; PAM type: NRG; PAM sequence: AAG
gactctcccctctctcttct

SEQ ID NO: 126731 - DNA, 20 bp, Artificial Sequence
  Description of Artificial Sequence: Synthetic oligonucleotide
  Target: LAMA2; (+) strand; PAM type: NRG; PAM sequence: TAG
tttgttgtctttattttcac

SEQ ID NO: 126732 - DNA, 20 bp, Artificial Sequence
  Description of Artificial Sequence: Synthetic oligonucleotide
  Target: LAMA2; (+) strand; PAM type: NRG; PAM sequence: AGG
ttgttgtctttattttcact

SEQ ID NO: 126733 - DNA, 20 bp, Artificial Sequence
  Description of Artificial Sequence: Synthetic oligonucleotide
  Target: LAMA2; (+) strand; PAM type: NRG; PAM sequence: GGG
tgttgtctttattttcacta

SEQ ID NO: 126734 - DNA, 20 bp, Artificial Sequence
  Description of Artificial Sequence: Synthetic oligonucleotide
  Target: LAMA2; (+) strand; PAM type: NRG; PAM sequence: AAG
ttcactagggttttctctgt

SEQ ID NO: 126735 - DNA, 20 bp, Artificial Sequence
  Description of Artificial Sequence: Synthetic oligonucleotide
  Target: LAMA2; (+) strand; PAM type: NRG; PAM sequence: AGG
tcactagggttttctctgta

SEQ ID NO: 126736 - DNA, 20 bp, Artificial Sequence
  Description of Artificial Sequence: Synthetic oligonucleotide
  Target: LAMA2; (+) strand; PAM type: NRG; PAM sequence: TGG
tctctgtaaggtgcctaaaa

SEQ ID NO: 126737 - DNA, 20 bp, Artificial Sequence
  Description of Artificial Sequence: Synthetic oligonucleotide
  Target: LAMA2; (+) strand; PAM type: NRG; PAM sequence: TAG
aaggtgcctaaaatggctac

SEQ ID NO: 126738 - DNA, 20 bp, Artificial Sequence
  Description of Artificial Sequence: Synthetic oligonucleotide
  Target: LAMA2; (+) strand; PAM type: NRG; PAM sequence: TAG
gtgcctaaaatggctactag

SEQ ID NO: 126739 - DNA, 20 bp, Artificial Sequence
  Description of Artificial Sequence: Synthetic oligonucleotide
  Target: LAMA2; (+) strand; PAM type: NRG; PAM sequence: CAG
aaaatggctactagtagcta

SEQ ID NO: 126740 - DNA, 20 bp, Artificial Sequence
  Description of Artificial Sequence: Synthetic oligonucleotide
  Target: LAMA2; (+) strand; PAM type: NRG; PAM sequence: AGG
aaatggctactagtagctac

SEQ ID NO: 126741 - DNA, 20 bp, Artificial Sequence
  Description of Artificial Sequence: Synthetic oligonucleotide
  Target: LAMA2; (+) strand; PAM type: NRG; PAM sequence: TAG
gctactagtagctacaggtt

SEQ ID NO: 126742 - DNA, 20 bp, Artificial Sequence
  Description of Artificial Sequence: Synthetic oligonucleotide
  Target: LAMA2; (+) strand; PAM type: NRG; PAM sequence: AGG
ctactagtagctacaggttt

SEQ ID NO: 126743 - DNA, 20 bp, Artificial Sequence
  Description of Artificial Sequence: Synthetic oligonucleotide
  Target: LAMA2; (+) strand; PAM type: NRG; PAM sequence: TGG
gtagctacaggtttaggacc

SEQ ID NO: 126744 - DNA, 20 bp, Artificial Sequence
  Description of Artificial Sequence: Synthetic oligonucleotide
  Target: LAMA2; (+) strand; PAM type: NRG; PAM sequence: TAG
caggtttaggacctggtcct

SEQ ID NO: 126745 - DNA, 20 bp, Artificial Sequence
  Description of Artificial Sequence: Synthetic oligonucleotide
  Target: LAMA2; (+) strand; PAM type: NRG; PAM sequence: CAG
gtttaggacctggtccttag

SEQ ID NO: 126746 - DNA, 20 bp, Artificial Sequence
  Description of Artificial Sequence: Synthetic oligonucleotide
  Target: LAMA2; (+) strand; PAM type: NRG; PAM sequence: CGG
tggtccttagcagtttaaat

SEQ ID NO: 126747 - DNA, 20 bp, Artificial Sequence
  Description of Artificial Sequence: Synthetic oligonucleotide
  Target: LAMA2; (+) strand; PAM type: NRG; PAM sequence: GAG
gtccttagcagtttaaatcg

SEQ ID NO: 126748 - DNA, 20 bp, Artificial Sequence
  Description of Artificial Sequence: Synthetic oligonucleotide
  Target: LAMA2; (+) strand; PAM type: NRG; PAM sequence: AGG
tccttagcagtttaaatcgg

SEQ ID NO: 126749 - DNA, 20 bp, Artificial Sequence
  Description of Artificial Sequence: Synthetic oligonucleotide
  Target: LAMA2; (+) strand; PAM type: NRG; PAM sequence: GAG
cttagcagtttaaatcggag

SEQ ID NO: 126750 - DNA, 20 bp, Artificial Sequence
  Description of Artificial Sequence: Synthetic oligonucleotide
  Target: LAMA2; (+) strand; PAM type: NRG; PAM sequence: AGG
ttagcagtttaaatcggagg

SEQ ID NO: 126751 - DNA, 20 bp, Artificial Sequence
  Description of Artificial Sequence: Synthetic oligonucleotide
  Target: LAMA2; (+) strand; PAM type: NRG; PAM sequence: AAG
aaaaatacctcctgttctta

SEQ ID NO: 126752 - DNA, 20 bp, Artificial Sequence
  Description of Artificial Sequence: Synthetic oligonucleotide
  Target: LAMA2; (+) strand; PAM type: NRG; PAM sequence: TGG
aagtccctattaatctctgt

SEQ ID NO: 126753 - DNA, 20 bp, Artificial Sequence
  Description of Artificial Sequence: Synthetic oligonucleotide
  Target: LAMA2; (+) strand; PAM type: NRG; PAM sequence: TGG
taatctctgttggccttgca

SEQ ID NO: 126754 - DNA, 20 bp, Artificial Sequence
  Description of Artificial Sequence: Synthetic oligonucleotide
  Target: LAMA2; (+) strand; PAM type: NRG; PAM sequence: GGG
aatctctgttggccttgcat

SEQ ID NO: 126755 - DNA, 20 bp, Artificial Sequence
  Description of Artificial Sequence: Synthetic oligonucleotide
  Target: LAMA2; (+) strand; PAM type: NRG; PAM sequence: TGG
tgttggccttgcatgggtga

SEQ ID NO: 126756 - DNA, 20 bp, Artificial Sequence
  Description of Artificial Sequence: Synthetic oligonucleotide
  Target: LAMA2; (+) strand; PAM type: NRG; PAM sequence: GGG
gttggccttgcatgggtgat

SEQ ID NO: 126757 - DNA, 20 bp, Artificial Sequence
  Description of Artificial Sequence: Synthetic oligonucleotide
  Target: LAMA2; (+) strand; PAM type: NRG; PAM sequence: TAG
gggtgatgggcccaaccatg

SEQ ID NO: 126758 - DNA, 20 bp, Artificial Sequence
  Description of Artificial Sequence: Synthetic oligonucleotide
  Target: LAMA2; (+) strand; PAM type: NRG; PAM sequence: AGG
ggtgatgggcccaaccatgt

SEQ ID NO: 126759 - DNA, 20 bp, Artificial Sequence
  Description of Artificial Sequence: Synthetic oligonucleotide
  Target: LAMA2; (+) strand; PAM type: NRG; PAM sequence: CAG
ggcccaaccatgtaggaaca

SEQ ID NO: 126760 - DNA, 20 bp, Artificial Sequence
  Description of Artificial Sequence: Synthetic oligonucleotide
  Target: LAMA2; (+) strand; PAM type: NRG; PAM sequence: AGG
gcccaaccatgtaggaacac

SEQ ID NO: 126761 - DNA, 20 bp, Artificial Sequence
  Description of Artificial Sequence: Synthetic oligonucleotide
  Target: LAMA2; (+) strand; PAM type: NRG; PAM sequence: GGG
cccaaccatgtaggaacaca

SEQ ID NO: 126762 - DNA, 20 bp, Artificial Sequence
  Description of Artificial Sequence: Synthetic oligonucleotide
  Target: LAMA2; (+) strand; PAM type: NRG; PAM sequence: CAG
aaccatgtaggaacacaggg

SEQ ID NO: 126763 - DNA, 20 bp, Artificial Sequence
  Description of Artificial Sequence: Synthetic oligonucleotide
  Target: LAMA2; (+) strand; PAM type: NRG; PAM sequence: TAG
tgtaggaacacagggcagct

SEQ ID NO: 126764 - DNA, 20 bp, Artificial Sequence
  Description of Artificial Sequence: Synthetic oligonucleotide
  Target: LAMA2; (+) strand; PAM type: NRG; PAM sequence: AGG
gtaggaacacagggcagctt

SEQ ID NO: 126765 - DNA, 20 bp, Artificial Sequence
  Description of Artificial Sequence: Synthetic oligonucleotide
  Target: LAMA2; (+) strand; PAM type: NRG; PAM sequence: CAG
ggtcacatttccataaatat

SEQ ID NO: 126766 - DNA, 20 bp, Artificial Sequence
  Description of Artificial Sequence: Synthetic oligonucleotide
  Target: LAMA2; (+) strand; PAM type: NRG; PAM sequence: GAG
tcacatttccataaatatca

SEQ ID NO: 126767 - DNA, 20 bp, Artificial Sequence
  Description of Artificial Sequence: Synthetic oligonucleotide
  Target: LAMA2; (+) strand; PAM type: NRG; PAM sequence: AAG
catttccataaatatcagag

SEQ ID NO: 126768 - DNA, 20 bp, Artificial Sequence
  Description of Artificial Sequence: Synthetic oligonucleotide
  Target: LAMA2; (+) strand; PAM type: NRG; PAM sequence: TGG
ttccataaatatcagagaag

SEQ ID NO: 126769 - DNA, 20 bp, Artificial Sequence
  Description of Artificial Sequence: Synthetic oligonucleotide
  Target: LAMA2; (+) strand; PAM type: NRG; PAM sequence: TAG
attgcctgatatgtatttca

SEQ ID NO: 126770 - DNA, 20 bp, Artificial Sequence
  Description of Artificial Sequence: Synthetic oligonucleotide
  Target: LAMA2; (+) strand; PAM type: NRG; PAM sequence: TAG
cctgatatgtatttcatagc

SEQ ID NO: 126771 - DNA, 20 bp, Artificial Sequence
  Description of Artificial Sequence: Synthetic oligonucleotide
  Target: LAMA2; (+) strand; PAM type: NRG; PAM sequence: TGG
catagctagcaaatgacaac

SEQ ID NO: 126772 - DNA, 20 bp, Artificial Sequence
  Description of Artificial Sequence: Synthetic oligonucleotide
  Target: LAMA2; (+) strand; PAM type: NRG; PAM sequence: AAG
gcaaatgacaactggaattg

SEQ ID NO: 126773 - DNA, 20 bp, Artificial Sequence
  Description of Artificial Sequence: Synthetic oligonucleotide
  Target: LAMA2; (+) strand; PAM type: NRG; PAM sequence: GAG
ttgaagtccatgcttcttcc

SEQ ID NO: 126774 - DNA, 20 bp, Artificial Sequence
  Description of Artificial Sequence: Synthetic oligonucleotide
  Target: LAMA2; (+) strand; PAM type: NRG; PAM sequence: GAG
tgatcactgtccctctaatt

SEQ ID NO: 126775 - DNA, 20 bp, Artificial Sequence
  Description of Artificial Sequence: Synthetic oligonucleotide
  Target: LAMA2; (+) strand; PAM type: NRG; PAM sequence: TGG
tttcaattgaacctgtttcc

SEQ ID NO: 126776 - DNA, 20 bp, Artificial Sequence
  Description of Artificial Sequence: Synthetic oligonucleotide
  Target: LAMA2; (+) strand; PAM type: NRG; PAM sequence: AAG
aaaactatcttcttgatttt

SEQ ID NO: 126777 - DNA, 20 bp, Artificial Sequence
  Description of Artificial Sequence: Synthetic oligonucleotide
  Target: LAMA2; (+) strand; PAM type: NRG; PAM sequence: AAG
atcttcttgattttaagtaa

SEQ ID NO: 126778 - DNA, 20 bp, Artificial Sequence
  Description of Artificial Sequence: Synthetic oligonucleotide
  Target: LAMA2; (+) strand; PAM type: NRG; PAM sequence: AAG
ttaagtaaaagcaatgaaaa

SEQ ID NO: 126779 - DNA, 20 bp, Artificial Sequence
  Description of Artificial Sequence: Synthetic oligonucleotide
  Target: LAMA2; (+) strand; PAM type: NRG; PAM sequence: AGG
taagtaaaagcaatgaaaaa

SEQ ID NO: 126780 - DNA, 20 bp, Artificial Sequence
  Description of Artificial Sequence: Synthetic oligonucleotide
  Target: LAMA2; (+) strand; PAM type: NRG; PAM sequence: TAG
ttttctgctcacaaaaaaat

SEQ ID NO: 126781 - DNA, 20 bp, Artificial Sequence
  Description of Artificial Sequence: Synthetic oligonucleotide
  Target: LAMA2; (+) strand; PAM type: NRG; PAM sequence: CAG
tcacaaaaaaattagcttta

SEQ ID NO: 126782 - DNA, 20 bp, Artificial Sequence
  Description of Artificial Sequence: Synthetic oligonucleotide
  Target: LAMA2; (+) strand; PAM type: NRG; PAM sequence: TAG
aaaaaaattagctttacaga

SEQ ID NO: 126783 - DNA, 20 bp, Artificial Sequence
  Description of Artificial Sequence: Synthetic oligonucleotide
  Target: LAMA2; (+) strand; PAM type: NRG; PAM sequence: TAG
aaaattagctttacagatag

SEQ ID NO: 126784 - DNA, 20 bp, Artificial Sequence
  Description of Artificial Sequence: Synthetic oligonucleotide
  Target: LAMA2; (+) strand; PAM type: NRG; PAM sequence: CAG
ttacagatagtagacttcat

SEQ ID NO: 126785 - DNA, 20 bp, Artificial Sequence
  Description of Artificial Sequence: Synthetic oligonucleotide
  Target: LAMA2; (+) strand; PAM type: NRG; PAM sequence: TAG
cagatagtagacttcatcag

SEQ ID NO: 126786 - DNA, 20 bp, Artificial Sequence
  Description of Artificial Sequence: Synthetic oligonucleotide
  Target: LAMA2; (+) strand; PAM type: NRG; PAM sequence: CAG
gtagacttcatcagtagata

SEQ ID NO: 126787 - DNA, 20 bp, Artificial Sequence
  Description of Artificial Sequence: Synthetic oligonucleotide
  Target: LAMA2; (+) strand; PAM type: NRG; PAM sequence: AAG
catcagtagatacagtcttt

SEQ ID NO: 126788 - DNA, 20 bp, Artificial Sequence
  Description of Artificial Sequence: Synthetic oligonucleotide
  Target: LAMA2; (+) strand; PAM type: NRG; PAM sequence: AGG
atcagtagatacagtcttta

SEQ ID NO: 126789 - DNA, 20 bp, Artificial Sequence
  Description of Artificial Sequence: Synthetic oligonucleotide
  Target: LAMA2; (+) strand; PAM type: NRG; PAM sequence: AAG
agtagatacagtctttaagg

SEQ ID NO: 126790 - DNA, 20 bp, Artificial Sequence
  Description of Artificial Sequence: Synthetic oligonucleotide
  Target: LAMA2; (+) strand; PAM type: NRG; PAM sequence: TAG
gtctttaaggaagaaaaaca

SEQ ID NO: 126791 - DNA, 20 bp, Artificial Sequence
  Description of Artificial Sequence: Synthetic oligonucleotide
  Target: LAMA2; (+) strand; PAM type: NRG; PAM sequence: TGG
ctttactatgtaatgtctcc

SEQ ID NO: 126792 - DNA, 20 bp, Artificial Sequence
  Description of Artificial Sequence: Synthetic oligonucleotide
  Target: LAMA2; (+) strand; PAM type: NRG; PAM sequence: TGG
ctcctggattctataataat

SEQ ID NO: 126793 - DNA, 20 bp, Artificial Sequence
  Description of Artificial Sequence: Synthetic oligonucleotide
  Target: LAMA2; (+) strand; PAM type: NRG; PAM sequence: TGG
ctggattctataataattgg

SEQ ID NO: 126794 - DNA, 20 bp, Artificial Sequence
  Description of Artificial Sequence: Synthetic oligonucleotide
  Target: LAMA2; (+) strand; PAM type: NRG; PAM sequence: GGG
tggattctataataattggt

SEQ ID NO: 126795 - DNA, 20 bp, Artificial Sequence
  Description of Artificial Sequence: Synthetic oligonucleotide
  Target: LAMA2; (+) strand; PAM type: NRG; PAM sequence: TGG
ataataattggtgggctgtg

SEQ ID NO: 126796 - DNA, 20 bp, Artificial Sequence
  Description of Artificial Sequence: Synthetic oligonucleotide
  Target: LAMA2; (+) strand; PAM type: NRG; PAM sequence: AAG
tggtctgcttgccatcttcc

SEQ ID NO: 126797 - DNA, 20 bp, Artificial Sequence
  Description of Artificial Sequence: Synthetic oligonucleotide
  Target: LAMA2; (+) strand; PAM type: NRG; PAM sequence: TAG
aaaaacaaaacctatgtctg

SEQ ID NO: 126798 - DNA, 20 bp, Artificial Sequence
  Description of Artificial Sequence: Synthetic oligonucleotide
  Target: LAMA2; (+) strand; PAM type: NRG; PAM sequence: TGG
catttaaatgtttgtgccca

SEQ ID NO: 126799 - DNA, 20 bp, Artificial Sequence
  Description of Artificial Sequence: Synthetic oligonucleotide
  Target: LAMA2; (+) strand; PAM type: NRG; PAM sequence: TGG
tatgtctatatatatatgta

SEQ ID NO: 126800 - DNA, 20 bp, Artificial Sequence
  Description of Artificial Sequence: Synthetic oligonucleotide
  Target: LAMA2; (+) strand; PAM type: NRG; PAM sequence: GAG
tatatgtatggtgtttgtgt

SEQ ID NO: 126801 - DNA, 20 bp, Artificial Sequence
  Description of Artificial Sequence: Synthetic oligonucleotide
  Target: LAMA2; (+) strand; PAM type: NRG; PAM sequence: GAG
tatgtatggtgtttgtgtga

SEQ ID NO: 126802 - DNA, 20 bp, Artificial Sequence
  Description of Artificial Sequence: Synthetic oligonucleotide
  Target: LAMA2; (+) strand; PAM type: NRG; PAM sequence: AGG
atgtatggtgtttgtgtgag

SEQ ID NO: 126803 - DNA, 20 bp, Artificial Sequence
  Description of Artificial Sequence: Synthetic oligonucleotide
  Target: LAMA2; (+) strand; PAM type: NRG; PAM sequence: AAG
tggtgtttgtgtgagaggca

SEQ ID NO: 126804 - DNA, 20 bp, Artificial Sequence
  Description of Artificial Sequence: Synthetic oligonucleotide
  Target: LAMA2; (+) strand; PAM type: NRG; PAM sequence: GAG
gtgtttgtgtgagaggcaaa

SEQ ID NO: 126805 - DNA, 20 bp, Artificial Sequence
  Description of Artificial Sequence: Synthetic oligonucleotide
  Target: LAMA2; (+) strand; PAM type: NRG; PAM sequence: AAG
tttgtgtgagaggcaaagag

SEQ ID NO: 126806 - DNA, 20 bp, Artificial Sequence
  Description of Artificial Sequence: Synthetic oligonucleotide
  Target: LAMA2; (+) strand; PAM type: NRG; PAM sequence: GAG
tgtgtgagaggcaaagagaa

SEQ ID NO: 126807 - DNA, 20 bp, Artificial Sequence
  Description of Artificial Sequence: Synthetic oligonucleotide
  Target: LAMA2; (+) strand; PAM type: NRG; PAM sequence: AAG
gaggcaaagagaagagaaaa

SEQ ID NO: 126808 - DNA, 20 bp, Artificial Sequence
  Description of Artificial Sequence: Synthetic oligonucleotide
  Target: LAMA2; (+) strand; PAM type: NRG; PAM sequence: TAG
aagagaaaaaagaatgacgt

SEQ ID NO: 126809 - DNA, 20 bp, Artificial Sequence
  Description of Artificial Sequence: Synthetic oligonucleotide
  Target: LAMA2; (+) strand; PAM type: NRG; PAM sequence: TAG
tataataaaattgtgttgac

SEQ ID NO: 126810 - DNA, 20 bp, Artificial Sequence
  Description of Artificial Sequence: Synthetic oligonucleotide
  Target: LAMA2; (+) strand; PAM type: NRG; PAM sequence: AAG
gttctcttccaaactgataa

SEQ ID NO: 126811 - DNA, 20 bp, Artificial Sequence
  Description of Artificial Sequence: Synthetic oligonucleotide
  Target: LAMA2; (+) strand; PAM type: NRG; PAM sequence: AGG
ttctcttccaaactgataaa

SEQ ID NO: 126812 - DNA, 20 bp, Artificial Sequence
  Description of Artificial Sequence: Synthetic oligonucleotide
  Target: LAMA2; (+) strand; PAM type: NRG; PAM sequence: TGG
actgataaaaggacaatttt

SEQ ID NO: 126813 - DNA, 20 bp, Artificial Sequence
  Description of Artificial Sequence: Synthetic oligonucleotide
  Target: LAMA2; (+) strand; PAM type: NRG; PAM sequence: CGG
aaaggacaatttttggtgtg

SEQ ID NO: 126814 - DNA, 20 bp, Artificial Sequence
  Description of Artificial Sequence: Synthetic oligonucleotide
  Target: LAMA2; (+) strand; PAM type: NRG; PAM sequence: AAG
atttttggtgtgcggtttaa

SEQ ID NO: 126815 - DNA, 20 bp, Artificial Sequence
  Description of Artificial Sequence: Synthetic oligonucleotide
  Target: LAMA2; (+) strand; PAM type: NRG; PAM sequence: GAG
tgaacttttccccctatact

SEQ ID NO: 126816 - DNA, 20 bp, Artificial Sequence
  Description of Artificial Sequence: Synthetic oligonucleotide
  Target: LAMA2; (+) strand; PAM type: NRG; PAM sequence: AGG
gaacttttccccctatactg

SEQ ID NO: 126817 - DNA, 20 bp, Artificial Sequence
  Description of Artificial Sequence: Synthetic oligonucleotide
  Target: LAMA2; (+) strand; PAM type: NRG; PAM sequence: GGG
aacttttccccctatactga

SEQ ID NO: 126818 - DNA, 20 bp, Artificial Sequence
  Description of Artificial Sequence: Synthetic oligonucleotide
  Target: LAMA2; (+) strand; PAM type: NRG; PAM sequence: AAG
tatactgagggcaattttaa

SEQ ID NO: 126819 - DNA, 20 bp, Artificial Sequence
  Description of Artificial Sequence: Synthetic oligonucleotide
  Target: LAMA2; (+) strand; PAM type: NRG; PAM sequence: AAG
actgagggcaattttaaaag

SEQ ID NO: 126820 - DNA, 20 bp, Artificial Sequence
  Description of Artificial Sequence: Synthetic oligonucleotide
  Target: LAMA2; (+) strand; PAM type: NRG; PAM sequence: AGG
ctgagggcaattttaaaaga

SEQ ID NO: 126821 - DNA, 20 bp, Artificial Sequence
  Description of Artificial Sequence: Synthetic oligonucleotide
  Target: LAMA2; (+) strand; PAM type: NRG; PAM sequence: TAG
agggcaattttaaaagaagg

SEQ ID NO: 126822 - DNA, 20 bp, Artificial Sequence
  Description of Artificial Sequence: Synthetic oligonucleotide
  Target: LAMA2; (+) strand; PAM type: NRG; PAM sequence: CAG
tttaaaagaaggtagtttct

SEQ ID NO: 126823 - DNA, 20 bp, Artificial Sequence
  Description of Artificial Sequence: Synthetic oligonucleotide
  Target: LAMA2; (+) strand; PAM type: NRG; PAM sequence: AGG
ttaaaagaaggtagtttctc

SEQ ID NO: 126824 - DNA, 20 bp, Artificial Sequence
  Description of Artificial Sequence: Synthetic oligonucleotide
  Target: LAMA2; (+) strand; PAM type: NRG; PAM sequence: TAG
ggtagtttctcaggtgtttc

SEQ ID NO: 126825 - DNA, 20 bp, Artificial Sequence
  Description of Artificial Sequence: Synthetic oligonucleotide
  Target: LAMA2; (+) strand; PAM type: NRG; PAM sequence: AAG
gtcaaaatgacaaacctaca

SEQ ID NO: 126826 - DNA, 20 bp, Artificial Sequence
  Description of Artificial Sequence: Synthetic oligonucleotide
  Target: LAMA2; (+) strand; PAM type: NRG; PAM sequence: TAG
ttttatgtatactttactga

SEQ ID NO: 126827 - DNA, 20 bp, Artificial Sequence
  Description of Artificial Sequence: Synthetic oligonucleotide
  Target: LAMA2; (+) strand; PAM type: NRG; PAM sequence: GAG
ttatgtatactttactgata

SEQ ID NO: 126828 - DNA, 20 bp, Artificial Sequence
  Description of Artificial Sequence: Synthetic oligonucleotide
  Target: LAMA2; (+) strand; PAM type: NRG; PAM sequence: GAG
gatagagtcctttaaatgtt

SEQ ID NO: 126829 - DNA, 20 bp, Artificial Sequence
  Description of Artificial Sequence: Synthetic oligonucleotide
  Target: LAMA2; (+) strand; PAM type: NRG; PAM sequence: AAG
gtcctttaaatgttgagttc

SEQ ID NO: 126830 - DNA, 20 bp, Artificial Sequence
  Description of Artificial Sequence: Synthetic oligonucleotide
  Target: LAMA2; (+) strand; PAM type: NRG; PAM sequence: AAG
aatttttcttaatcttcaaa

SEQ ID NO: 126831 - DNA, 20 bp, Artificial Sequence
  Description of Artificial Sequence: Synthetic oligonucleotide
  Target: LAMA2; (+) strand; PAM type: NRG; PAM sequence: TAG
ttcttaatcttcaaaaagtt

SEQ ID NO: 126832 - DNA, 20 bp, Artificial Sequence
  Description of Artificial Sequence: Synthetic oligonucleotide
  Target: LAMA2; (+) strand; PAM type: NRG; PAM sequence: AGG
tcttaatcttcaaaaagttt

SEQ ID NO: 126833 - DNA, 20 bp, Artificial Sequence
  Description of Artificial Sequence: Synthetic oligonucleotide
  Target: LAMA2; (+) strand; PAM type: NRG; PAM sequence: GGG
cttaatcttcaaaaagttta

SEQ ID NO: 126834 - DNA, 20 bp, Artificial Sequence
  Description of Artificial Sequence: Synthetic oligonucleotide
  Target: LAMA2; (+) strand; PAM type: NRG; PAM sequence: CAG
agggatcaaattgtatcctg

SEQ ID NO: 126835 - DNA, 20 bp, Artificial Sequence
  Description of Artificial Sequence: Synthetic oligonucleotide
  Target: LAMA2; (+) strand; PAM type: NRG; PAM sequence: TAG
tcatttcatctcttcttctt

SEQ ID NO: 126836 - DNA, 20 bp, Artificial Sequence
  Description of Artificial Sequence: Synthetic oligonucleotide
  Target: LAMA2; (+) strand; PAM type: NRG; PAM sequence: CAG
tctcttcttctttagttcta

SEQ ID NO: 126837 - DNA, 20 bp, Artificial Sequence
  Description of Artificial Sequence: Synthetic oligonucleotide
  Target: LAMA2; (+) strand; PAM type: NRG; PAM sequence: GAG
tcttcttctttagttctaca

SEQ ID NO: 126838 - DNA, 20 bp, Artificial Sequence
  Description of Artificial Sequence: Synthetic oligonucleotide
  Target: LAMA2; (+) strand; PAM type: NRG; PAM sequence: AAG
tcttctttagttctacagag

SEQ ID NO: 126839 - DNA, 20 bp, Artificial Sequence
  Description of Artificial Sequence: Synthetic oligonucleotide
  Target: LAMA2; (+) strand; PAM type: NRG; PAM sequence: TAG
ctttagttctacagagaagt

SEQ ID NO: 126840 - DNA, 20 bp, Artificial Sequence
  Description of Artificial Sequence: Synthetic oligonucleotide
  Target: LAMA2; (+) strand; PAM type: NRG; PAM sequence: AGG
tttagttctacagagaagtt

SEQ ID NO: 126841 - DNA, 20 bp, Artificial Sequence
  Description of Artificial Sequence: Synthetic oligonucleotide
  Target: LAMA2; (+) strand; PAM type: NRG; PAM sequence: AAG
ttctacagagaagttaggtc

SEQ ID NO: 126842 - DNA, 20 bp, Artificial Sequence
  Description of Artificial Sequence: Synthetic oligonucleotide
  Target: LAMA2; (+) strand; PAM type: NRG; PAM sequence: AAG
gttaggtcaagattgtttga

SEQ ID NO: 126843 - DNA, 20 bp, Artificial Sequence
  Description of Artificial Sequence: Synthetic oligonucleotide
  Target: LAMA2; (+) strand; PAM type: NRG; PAM sequence: TAG
aggtcaagattgtttgaaag

SEQ ID NO: 126844 - DNA, 20 bp, Artificial Sequence
  Description of Artificial Sequence: Synthetic oligonucleotide
  Target: LAMA2; (+) strand; PAM type: NRG; PAM sequence: GAG
gattgtttgaaagtagactt

SEQ ID NO: 126845 - DNA, 20 bp, Artificial Sequence
  Description of Artificial Sequence: Synthetic oligonucleotide
  Target: LAMA2; (+) strand; PAM type: NRG; PAM sequence: CAG
tttgaaagtagacttgagtc

SEQ ID NO: 126846 - DNA, 20 bp, Artificial Sequence
  Description of Artificial Sequence: Synthetic oligonucleotide
  Target: LAMA2; (+) strand; PAM type: NRG; PAM sequence: CAG
cagaaacttgtctcttcgac

SEQ ID NO: 126847 - DNA, 20 bp, Artificial Sequence
  Description of Artificial Sequence: Synthetic oligonucleotide
  Target: LAMA2; (+) strand; PAM type: NRG; PAM sequence: TGG
aaacttgtctcttcgaccag

SEQ ID NO: 126848 - DNA, 20 bp, Artificial Sequence
  Description of Artificial Sequence: Synthetic oligonucleotide
  Target: LAMA2; (+) strand; PAM type: NRG; PAM sequence: TAG
tctaccaatttgaaaaaata

SEQ ID NO: 126849 - DNA, 20 bp, Artificial Sequence
  Description of Artificial Sequence: Synthetic oligonucleotide
  Target: LAMA2; (+) strand; PAM type: NRG; PAM sequence: TGG
gaaaaaatatagcatgcatg

SEQ ID NO: 126850 - DNA, 20 bp, Artificial Sequence
  Description of Artificial Sequence: Synthetic oligonucleotide
  Target: LAMA2; (+) strand; PAM type: NRG; PAM sequence: AAG
aaaatatagcatgcatgtgg

SEQ ID NO: 126851 - DNA, 20 bp, Artificial Sequence
  Description of Artificial Sequence: Synthetic oligonucleotide
  Target: LAMA2; (+) strand; PAM type: NRG; PAM sequence: CAG
aaaatgttacttttgcatgt

SEQ ID NO: 126852 - DNA, 20 bp, Artificial Sequence
  Description of Artificial Sequence: Synthetic oligonucleotide
  Target: LAMA2; (+) strand; PAM type: NRG; PAM sequence: TAG
cagcatgttgtcattattat

SEQ ID NO: 126853 - DNA, 20 bp, Artificial Sequence
  Description of Artificial Sequence: Synthetic oligonucleotide
  Target: LAMA2; (+) strand; PAM type: NRG; PAM sequence: AAG
catgttgtcattattattag

SEQ ID NO: 126854 - DNA, 20 bp, Artificial Sequence
  Description of Artificial Sequence: Synthetic oligonucleotide
  Target: LAMA2; (+) strand; PAM type: NRG; PAM sequence: AAG
ttagaagaacacatctttca

SEQ ID NO: 126855 - DNA, 20 bp, Artificial Sequence
  Description of Artificial Sequence: Synthetic oligonucleotide
  Target: LAMA2; (+) strand; PAM type: NRG; PAM sequence: AAG
aagaacacatctttcaaaga

SEQ ID NO: 126856 - DNA, 20 bp, Artificial Sequence
  Description of Artificial Sequence: Synthetic oligonucleotide
  Target: LAMA2; (+) strand; PAM type: NRG; PAM sequence: AGG
agaacacatctttcaaagaa

SEQ ID NO: 126857 - DNA, 20 bp, Artificial Sequence
  Description of Artificial Sequence: Synthetic oligonucleotide
  Target: LAMA2; (+) strand; PAM type: NRG; PAM sequence: AAG
gctgtctgatattattcttg

SEQ ID NO: 126858 - DNA, 20 bp, Artificial Sequence
  Description of Artificial Sequence: Synthetic oligonucleotide
  Target: LAMA2; (+) strand; PAM type: NRG; PAM sequence: CGG
tctgatattattcttgaaga

SEQ ID NO: 126859 - DNA, 20 bp, Artificial Sequence
  Description of Artificial Sequence: Synthetic oligonucleotide
  Target: LAMA2; (+) strand; PAM type: NRG; PAM sequence: TAG
cttgaagacggctatcattt

SEQ ID NO: 126860 - DNA, 20 bp, Artificial Sequence
  Description of Artificial Sequence: Synthetic oligonucleotide
  Target: LAMA2; (+) strand; PAM type: NRG; PAM sequence: CAG
tcattttagctgttataaaa

SEQ ID NO: 126861 - DNA, 20 bp, Artificial Sequence
  Description of Artificial Sequence: Synthetic oligonucleotide
  Target: LAMA2; (+) strand; PAM type: NRG; PAM sequence: AGG
cattttagctgttataaaac

SEQ ID NO: 126862 - DNA, 20 bp, Artificial Sequence
  Description of Artificial Sequence: Synthetic oligonucleotide
  Target: LAMA2; (+) strand; PAM type: NRG; PAM sequence: AAG
tttagctgttataaaacagg

SEQ ID NO: 126863 - DNA, 20 bp, Artificial Sequence
  Description of Artificial Sequence: Synthetic oligonucleotide
  Target: LAMA2; (+) strand; PAM type: NRG; PAM sequence: AGG
ttagctgttataaaacagga

SEQ ID NO: 126864 - DNA, 20 bp, Artificial Sequence
  Description of Artificial Sequence: Synthetic oligonucleotide
  Target: LAMA2; (+) strand; PAM type: NRG; PAM sequence: TGG
taaaacaggaaggaacatca

SEQ ID NO: 126865 - DNA, 20 bp, Artificial Sequence
  Description of Artificial Sequence: Synthetic oligonucleotide
  Target: LAMA2; (+) strand; PAM type: NRG; PAM sequence: GAG
aaacaggaaggaacatcatg

SEQ ID NO: 126866 - DNA, 20 bp, Artificial Sequence
  Description of Artificial Sequence: Synthetic oligonucleotide
  Target: LAMA2; (+) strand; PAM type: NRG; PAM sequence: TAG
gaaggaacatcatggagcat

SEQ ID NO: 126867 - DNA, 20 bp, Artificial Sequence
  Description of Artificial Sequence: Synthetic oligonucleotide
  Target: LAMA2; (+) strand; PAM type: NRG; PAM sequence: TAG
gcattagattataatatcta

SEQ ID NO: 126868 - DNA, 20 bp, Artificial Sequence
  Description of Artificial Sequence: Synthetic oligonucleotide
  Target: LAMA2; (+) strand; PAM type: NRG; PAM sequence: TAG
tataatatctatagtcccac

SEQ ID NO: 126869 - DNA, 20 bp, Artificial Sequence
  Description of Artificial Sequence: Synthetic oligonucleotide
  Target: LAMA2; (+) strand; PAM type: NRG; PAM sequence: AAG
cactagcacaccattaaata

SEQ ID NO: 126870 - DNA, 20 bp, Artificial Sequence
  Description of Artificial Sequence: Synthetic oligonucleotide
  Target: LAMA2; (+) strand; PAM type: NRG; PAM sequence: AAG
gcacaccattaaataaagtg

SEQ ID NO: 126871 - DNA, 20 bp, Artificial Sequence
  Description of Artificial Sequence: Synthetic oligonucleotide
  Target: LAMA2; (+) strand; PAM type: NRG; PAM sequence: AGG
cacaccattaaataaagtga

SEQ ID NO: 126872 - DNA, 20 bp, Artificial Sequence
  Description of Artificial Sequence: Synthetic oligonucleotide
  Target: LAMA2; (+) strand; PAM type: NRG; PAM sequence: TAG
gaaggtatgaatatttaaat

SEQ ID NO: 126873 - DNA, 20 bp, Artificial Sequence
  Description of Artificial Sequence: Synthetic oligonucleotide
  Target: LAMA2; (+) strand; PAM type: NRG; PAM sequence: CAG
ttttttatactatattatgt

SEQ ID NO: 126874 - DNA, 20 bp, Artificial Sequence
  Description of Artificial Sequence: Synthetic oligonucleotide
  Target: LAMA2; (+) strand; PAM type: NRG; PAM sequence: AGG
tttttatactatattatgtc

SEQ ID NO: 126875 - DNA, 20 bp, Artificial Sequence
  Description of Artificial Sequence: Synthetic oligonucleotide
  Target: LAMA2; (+) strand; PAM type: NRG; PAM sequence: AAG
ttatactatattatgtcagg

SEQ ID NO: 126876 - DNA, 20 bp, Artificial Sequence
  Description of Artificial Sequence: Synthetic oligonucleotide
  Target: LAMA2; (+) strand; PAM type: NRG; PAM sequence: AAG
ttatgtcaggaagaaattgc

SEQ ID NO: 126877 - DNA, 20 bp, Artificial Sequence
  Description of Artificial Sequence: Synthetic oligonucleotide
  Target: LAMA2; (+) strand; PAM type: NRG; PAM sequence: TGG
caggaagaaattgcaagctc

SEQ ID NO: 126878 - DNA, 20 bp, Artificial Sequence
  Description of Artificial Sequence: Synthetic oligonucleotide
  Target: LAMA2; (+) strand; PAM type: NRG; PAM sequence: TAG
tctggaaattctttgtgtct

SEQ ID NO: 126879 - DNA, 20 bp, Artificial Sequence
  Description of Artificial Sequence: Synthetic oligonucleotide
  Target: LAMA2; (+) strand; PAM type: NRG; PAM sequence: AGG
ctggaaattctttgtgtctt

SEQ ID NO: 126880 - DNA, 20 bp, Artificial Sequence
  Description of Artificial Sequence: Synthetic oligonucleotide
  Target: LAMA2; (+) strand; PAM type: NRG; PAM sequence: GAG
tctttgtgtcttaggaaaat

SEQ ID NO: 126881 - DNA, 20 bp, Artificial Sequence
  Description of Artificial Sequence: Synthetic oligonucleotide
  Target: LAMA2; (+) strand; PAM type: NRG; PAM sequence: TAG
aaatgagattctatttttta

SEQ ID NO: 126882 - DNA, 20 bp, Artificial Sequence
  Description of Artificial Sequence: Synthetic oligonucleotide
  Target: LAMA2; (+) strand; PAM type: NRG; PAM sequence: CAG
tttaaaaaaaatacctgcat

SEQ ID NO: 126883 - DNA, 20 bp, Artificial Sequence
  Description of Artificial Sequence: Synthetic oligonucleotide
  Target: LAMA2; (+) strand; PAM type: NRG; PAM sequence: CAG
aaaaaaaatacctgcatcag

SEQ ID NO: 126884 - DNA, 20 bp, Artificial Sequence
  Description of Artificial Sequence: Synthetic oligonucleotide
  Target: LAMA2; (+) strand; PAM type: NRG; PAM sequence: TGG
tacctgcatcagcagacaat

SEQ ID NO: 126885 - DNA, 20 bp, Artificial Sequence
  Description of Artificial Sequence: Synthetic oligonucleotide
  Target: LAMA2; (+) strand; PAM type: NRG; PAM sequence: CAG
catcagcagacaattggtaa

SEQ ID NO: 126886 - DNA, 20 bp, Artificial Sequence
  Description of Artificial Sequence: Synthetic oligonucleotide
  Target: LAMA2; (+) strand; PAM type: NRG; PAM sequence: TGG
ttggtaacagtcatcatatt

SEQ ID NO: 126887 - DNA, 20 bp, Artificial Sequence
  Description of Artificial Sequence: Synthetic oligonucleotide
  Target: LAMA2; (+) strand; PAM type: NRG; PAM sequence: TAG
tcatcatatttggtgttatt

SEQ ID NO: 126888 - DNA, 20 bp, Artificial Sequence
  Description of Artificial Sequence: Synthetic oligonucleotide
  Target: LAMA2; (+) strand; PAM type: NRG; PAM sequence: TGG
tttagcatttctcaaaaaca

SEQ ID NO: 126889 - DNA, 20 bp, Artificial Sequence
  Description of Artificial Sequence: Synthetic oligonucleotide
  Target: LAMA2; (+) strand; PAM type: NRG; PAM sequence: CAG
agcatttctcaaaaacatgg

SEQ ID NO: 126890 - DNA, 20 bp, Artificial Sequence
  Description of Artificial Sequence: Synthetic oligonucleotide
  Target: LAMA2; (+) strand; PAM type: NRG; PAM sequence: TGG
acatggcagttgtttttatg

SEQ ID NO: 126891 - DNA, 20 bp, Artificial Sequence
  Description of Artificial Sequence: Synthetic oligonucleotide
  Target: LAMA2; (+) strand; PAM type: NRG; PAM sequence: GGG
catggcagttgtttttatgt

SEQ ID NO: 126892 - DNA, 20 bp, Artificial Sequence
  Description of Artificial Sequence: Synthetic oligonucleotide
  Target: LAMA2; (+) strand; PAM type: NRG; PAM sequence: TGG
cagttgtttttatgtgggtg

SEQ ID NO: 126893 - DNA, 20 bp, Artificial Sequence
  Description of Artificial Sequence: Synthetic oligonucleotide
  Target: LAMA2; (+) strand; PAM type: NRG; PAM sequence: TGG
tttatgtgggtgtggcatgt

SEQ ID NO: 126894 - DNA, 20 bp, Artificial Sequence
  Description of Artificial Sequence: Synthetic oligonucleotide
  Target: LAMA2; (+) strand; PAM type: NRG; PAM sequence: TGG
ctctgtgctgacctgtcata

SEQ ID NO: 126895 - DNA, 20 bp, Artificial Sequence
  Description of Artificial Sequence: Synthetic oligonucleotide
  Target: LAMA2; (+) strand; PAM type: NRG; PAM sequence: GGG
tctgtgctgacctgtcatat

SEQ ID NO: 126896 - DNA, 20 bp, Artificial Sequence
  Description of Artificial Sequence: Synthetic oligonucleotide
  Target: LAMA2; (+) strand; PAM type: NRG; PAM sequence: CAG
atatgggataaatctaacta

SEQ ID NO: 126897 - DNA, 20 bp, Artificial Sequence
  Description of Artificial Sequence: Synthetic oligonucleotide
  Target: LAMA2; (+) strand; PAM type: NRG; PAM sequence: AAG
ggataaatctaactacagca

SEQ ID NO: 126898 - DNA, 20 bp, Artificial Sequence
  Description of Artificial Sequence: Synthetic oligonucleotide
  Target: LAMA2; (+) strand; PAM type: NRG; PAM sequence: CAG
agcaaagctctgttattctt

SEQ ID NO: 126899 - DNA, 20 bp, Artificial Sequence
  Description of Artificial Sequence: Synthetic oligonucleotide
  Target: LAMA2; (+) strand; PAM type: NRG; PAM sequence: CAG
agctctgttattcttcagta

SEQ ID NO: 126900 - DNA, 20 bp, Artificial Sequence
  Description of Artificial Sequence: Synthetic oligonucleotide
  Target: LAMA2; (+) strand; PAM type: NRG; PAM sequence: CAG
tattcttcagtacagtacaa

SEQ ID NO: 126901 - DNA, 20 bp, Artificial Sequence
  Description of Artificial Sequence: Synthetic oligonucleotide
  Target: LAMA2; (+) strand; PAM type: NRG; PAM sequence: AAG
ttcagtacagtacaacagat

SEQ ID NO: 126902 - DNA, 20 bp, Artificial Sequence
  Description of Artificial Sequence: Synthetic oligonucleotide
  Target: LAMA2; (+) strand; PAM type: NRG; PAM sequence: AAG
gtacagtacaacagataagt

SEQ ID NO: 126903 - DNA, 20 bp, Artificial Sequence
  Description of Artificial Sequence: Synthetic oligonucleotide
  Target: LAMA2; (+) strand; PAM type: NRG; PAM sequence: CAG
agtacaacagataagtaagc

SEQ ID NO: 126904 - DNA, 20 bp, Artificial Sequence
  Description of Artificial Sequence: Synthetic oligonucleotide
  Target: LAMA2; (+) strand; PAM type: NRG; PAM sequence: TGG
taagccagatataatacatt

SEQ ID NO: 126905 - DNA, 20 bp, Artificial Sequence
  Description of Artificial Sequence: Synthetic oligonucleotide
  Target: LAMA2; (+) strand; PAM type: NRG; PAM sequence: GGG
aagccagatataatacattt

SEQ ID NO: 126906 - DNA, 20 bp, Artificial Sequence
  Description of Artificial Sequence: Synthetic oligonucleotide
  Target: LAMA2; (+) strand; PAM type: NRG; PAM sequence: TAG
gtgaaaaaactacaaaatca

SEQ ID NO: 126907 - DNA, 20 bp, Artificial Sequence
  Description of Artificial Sequence: Synthetic oligonucleotide
  Target: LAMA2; (+) strand; PAM type: NRG; PAM sequence: GAG
gaaaaaactacaaaatcata

SEQ ID NO: 126908 - DNA, 20 bp, Artificial Sequence
  Description of Artificial Sequence: Synthetic oligonucleotide
  Target: LAMA2; (+) strand; PAM type: NRG; PAM sequence: AGG
aaaaaactacaaaatcatag

SEQ ID NO: 126909 - DNA, 20 bp, Artificial Sequence
  Description of Artificial Sequence: Synthetic oligonucleotide
  Target: LAMA2; (+) strand; PAM type: NRG; PAM sequence: GGG
aaaaactacaaaatcataga

SEQ ID NO: 126910 - DNA, 20 bp, Artificial Sequence
  Description of Artificial Sequence: Synthetic oligonucleotide
  Target: LAMA2; (+) strand; PAM type: NRG; PAM sequence: GGG
aaaactacaaaatcatagag

SEQ ID NO: 126911 - DNA, 20 bp, Artificial Sequence
  Description of Artificial Sequence: Synthetic oligonucleotide
  Target: LAMA2; (+) strand; PAM type: NRG; PAM sequence: GGG
aaactacaaaatcatagagg

SEQ ID NO: 126912 - DNA, 20 bp, Artificial Sequence
  Description of Artificial Sequence: Synthetic oligonucleotide
  Target: LAMA2; (+) strand; PAM type: NRG; PAM sequence: AAG
tcatagagggggatcttttt

SEQ ID NO: 126913 - DNA, 20 bp, Artificial Sequence
  Description of Artificial Sequence: Synthetic oligonucleotide
  Target: LAMA2; (+) strand; PAM type: NRG; PAM sequence: GAG
atagagggggatctttttaa

SEQ ID NO: 126914 - DNA, 20 bp, Artificial Sequence
  Description of Artificial Sequence: Synthetic oligonucleotide
  Target: LAMA2; (+) strand; PAM type: NRG; PAM sequence: TGG
gagcttttaaaacaatcttt

SEQ ID NO: 126915 - DNA, 20 bp, Artificial Sequence
  Description of Artificial Sequence: Synthetic oligonucleotide
  Target: LAMA2; (+) strand; PAM type: NRG; PAM sequence: AAG
ttaaaacaatcttttggttt

SEQ ID NO: 126916 - DNA, 20 bp, Artificial Sequence
  Description of Artificial Sequence: Synthetic oligonucleotide
  Target: LAMA2; (+) strand; PAM type: NRG; PAM sequence: AGG
taaaacaatcttttggttta

SEQ ID NO: 126917 - DNA, 20 bp, Artificial Sequence
  Description of Artificial Sequence: Synthetic oligonucleotide
  Target: LAMA2; (+) strand; PAM type: NRG; PAM sequence: CAG
aacaatcttttggtttaagg

SEQ ID NO: 126918 - DNA, 20 bp, Artificial Sequence
  Description of Artificial Sequence: Synthetic oligonucleotide
  Target: LAMA2; (+) strand; PAM type: NRG; PAM sequence: GAG
caatcttttggtttaaggca

SEQ ID NO: 126919 - DNA, 20 bp, Artificial Sequence
  Description of Artificial Sequence: Synthetic oligonucleotide
  Target: LAMA2; (+) strand; PAM type: NRG; PAM sequence: AAG
tcttttggtttaaggcagag

SEQ ID NO: 126920 - DNA, 20 bp, Artificial Sequence
  Description of Artificial Sequence: Synthetic oligonucleotide
  Target: LAMA2; (+) strand; PAM type: NRG; PAM sequence: TAG
agtattctacaatgaaacac

SEQ ID NO: 126921 - DNA, 20 bp, Artificial Sequence
  Description of Artificial Sequence: Synthetic oligonucleotide
  Target: LAMA2; (+) strand; PAM type: NRG; PAM sequence: AAG
aatgaaacactagattgcat

SEQ ID NO: 126922 - DNA, 20 bp, Artificial Sequence
  Description of Artificial Sequence: Synthetic oligonucleotide
  Target: LAMA2; (+) strand; PAM type: NRG; PAM sequence: AAG
aacactagattgcataagat

SEQ ID NO: 126923 - DNA, 20 bp, Artificial Sequence
  Description of Artificial Sequence: Synthetic oligonucleotide
  Target: LAMA2; (+) strand; PAM type: NRG; PAM sequence: AAG
ttaattttctttgttactct

SEQ ID NO: 126924 - DNA, 20 bp, Artificial Sequence
  Description of Artificial Sequence: Synthetic oligonucleotide
  Target: LAMA2; (+) strand; PAM type: NRG; PAM sequence: CAG
ccccatatatatgtaaattt

SEQ ID NO: 126925 - DNA, 20 bp, Artificial Sequence
  Description of Artificial Sequence: Synthetic oligonucleotide
  Target: LAMA2; (+) strand; PAM type: NRG; PAM sequence: CAG
catatatatgtaaatttcag

SEQ ID NO: 126926 - DNA, 20 bp, Artificial Sequence
  Description of Artificial Sequence: Synthetic oligonucleotide
  Target: LAMA2; (+) strand; PAM type: NRG; PAM sequence: TGG
gtaaatttcagcagtgttaa

SEQ ID NO: 126927 - DNA, 20 bp, Artificial Sequence
  Description of Artificial Sequence: Synthetic oligonucleotide
  Target: LAMA2; (+) strand; PAM type: NRG; PAM sequence: GGG
taaatttcagcagtgttaat

SEQ ID NO: 126928 - DNA, 20 bp, Artificial Sequence
  Description of Artificial Sequence: Synthetic oligonucleotide
  Target: LAMA2; (+) strand; PAM type: NRG; PAM sequence: TGG
cagtgttaatgggctttctt

SEQ ID NO: 126929 - DNA, 20 bp, Artificial Sequence
  Description of Artificial Sequence: Synthetic oligonucleotide
  Target: LAMA2; (+) strand; PAM type: NRG; PAM sequence: CAG
atgggctttctttggtatgt

SEQ ID NO: 126930 - DNA, 20 bp, Artificial Sequence
  Description of Artificial Sequence: Synthetic oligonucleotide
  Target: LAMA2; (+) strand; PAM type: NRG; PAM sequence: AAG
ggctttctttggtatgtcag

SEQ ID NO: 126931 - DNA, 20 bp, Artificial Sequence
  Description of Artificial Sequence: Synthetic oligonucleotide
  Target: LAMA2; (+) strand; PAM type: NRG; PAM sequence: AAG
tttctttggtatgtcagaag

SEQ ID NO: 126932 - DNA, 20 bp, Artificial Sequence
  Description of Artificial Sequence: Synthetic oligonucleotide
  Target: LAMA2; (+) strand; PAM type: NRG; PAM sequence: TAG
gaagaatgtaatttgtgaac

SEQ ID NO: 126933 - DNA, 20 bp, Artificial Sequence
  Description of Artificial Sequence: Synthetic oligonucleotide
  Target: LAMA2; (+) strand; PAM type: NRG; PAM sequence: AAG
tgtgaactagataaatctat

SEQ ID NO: 126934 - DNA, 20 bp, Artificial Sequence
  Description of Artificial Sequence: Synthetic oligonucleotide
  Target: LAMA2; (+) strand; PAM type: NRG; PAM sequence: AGG
gtgaactagataaatctata

SEQ ID NO: 126935 - DNA, 20 bp, Artificial Sequence
  Description of Artificial Sequence: Synthetic oligonucleotide
  Target: LAMA2; (+) strand; PAM type: NRG; PAM sequence: CAG
ctagataaatctataaggca

SEQ ID NO: 126936 - DNA, 20 bp, Artificial Sequence
  Description of Artificial Sequence: Synthetic oligonucleotide
  Target: LAMA2; (+) strand; PAM type: NRG; PAM sequence: AGG
tagataaatctataaggcac

SEQ ID NO: 126937 - DNA, 20 bp, Artificial Sequence
  Description of Artificial Sequence: Synthetic oligonucleotide
  Target: LAMA2; (+) strand; PAM type: NRG; PAM sequence: GAG
aatctataaggcacaggtgt

SEQ ID NO: 126938 - DNA, 20 bp, Artificial Sequence
  Description of Artificial Sequence: Synthetic oligonucleotide
  Target: LAMA2; (+) strand; PAM type: NRG; PAM sequence: AAG
tgagcaaaaaaaaaaataat

SEQ ID NO: 126939 - DNA, 20 bp, Artificial Sequence
  Description of Artificial Sequence: Synthetic oligonucleotide
  Target: LAMA2; (+) strand; PAM type: NRG; PAM sequence: AAG
taataagaatcactcctcac

SEQ ID NO: 126940 - DNA, 20 bp, Artificial Sequence
  Description of Artificial Sequence: Synthetic oligonucleotide
  Target: LAMA2; (+) strand; PAM type: NRG; PAM sequence: AGG
aataagaatcactcctcaca

SEQ ID NO: 126941 - DNA, 20 bp, Artificial Sequence
  Description of Artificial Sequence: Synthetic oligonucleotide
  Target: LAMA2; (+) strand; PAM type: NRG; PAM sequence: GAG
actaaataacaattattatt

SEQ ID NO: 126942 - DNA, 20 bp, Artificial Sequence
  Description of Artificial Sequence: Synthetic oligonucleotide
  Target: LAMA2; (+) strand; PAM type: NRG; PAM sequence: TAG
tcatgcattttttttatcca

SEQ ID NO: 126943 - DNA, 20 bp, Artificial Sequence
  Description of Artificial Sequence: Synthetic oligonucleotide
  Target: LAMA2; (+) strand; PAM type: NRG; PAM sequence: TAG
tgcattttttttatccatag

SEQ ID NO: 126944 - DNA, 20 bp, Artificial Sequence
  Description of Artificial Sequence: Synthetic oligonucleotide
  Target: LAMA2; (+) strand; PAM type: NRG; PAM sequence: AAG
ttttttttatccatagtagt

SEQ ID NO: 126945 - DNA, 20 bp, Artificial Sequence
  Description of Artificial Sequence: Synthetic oligonucleotide
  Target: LAMA2; (+) strand; PAM type: NRG; PAM sequence: AAG
taagtactactatctctata

SEQ ID NO: 126946 - DNA, 20 bp, Artificial Sequence
  Description of Artificial Sequence: Synthetic oligonucleotide
  Target: LAMA2; (+) strand; PAM type: NRG; PAM sequence: GAG
agtactactatctctataaa

SEQ ID NO: 126947 - DNA, 20 bp, Artificial Sequence
  Description of Artificial Sequence: Synthetic oligonucleotide
  Target: LAMA2; (+) strand; PAM type: NRG; PAM sequence: AGG
gtactactatctctataaag

SEQ ID NO: 126948 - DNA, 20 bp, Artificial Sequence
  Description of Artificial Sequence: Synthetic oligonucleotide
  Target: LAMA2; (+) strand; PAM type: NRG; PAM sequence: CAG
agaggaaaaattcaatccaa

SEQ ID NO: 126949 - DNA, 20 bp, Artificial Sequence
  Description of Artificial Sequence: Synthetic oligonucleotide
  Target: LAMA2; (+) strand; PAM type: NRG; PAM sequence: AAG
attcaatccaacagtcatta

SEQ ID NO: 126950 - DNA, 20 bp, Artificial Sequence
  Description of Artificial Sequence: Synthetic oligonucleotide
  Target: LAMA2; (+) strand; PAM type: NRG; PAM sequence: TAG
taaagttgttctattaaatg

SEQ ID NO: 126951 - DNA, 20 bp, Artificial Sequence
  Description of Artificial Sequence: Synthetic oligonucleotide
  Target: LAMA2; (+) strand; PAM type: NRG; PAM sequence: CAG
taaatgtagtgataaatctt

SEQ ID NO: 126952 - DNA, 20 bp, Artificial Sequence
  Description of Artificial Sequence: Synthetic oligonucleotide
  Target: LAMA2; (+) strand; PAM type: NRG; PAM sequence: AAG
tcagtttgtatttttaatat

SEQ ID NO: 126953 - DNA, 20 bp, Artificial Sequence
  Description of Artificial Sequence: Synthetic oligonucleotide
  Target: LAMA2; (+) strand; PAM type: NRG; PAM sequence: GAG
gtatttttaatataagatct

SEQ ID NO: 126954 - DNA, 20 bp, Artificial Sequence
  Description of Artificial Sequence: Synthetic oligonucleotide
  Target: LAMA2; (+) strand; PAM type: NRG; PAM sequence: AGG
tatttttaatataagatctg

SEQ ID NO: 126955 - DNA, 20 bp, Artificial Sequence
  Description of Artificial Sequence: Synthetic oligonucleotide
  Target: LAMA2; (+) strand; PAM type: NRG; PAM sequence: GGG
atttttaatataagatctga

SEQ ID NO: 126956 - DNA, 20 bp, Artificial Sequence
  Description of Artificial Sequence: Synthetic oligonucleotide
  Target: LAMA2; (+) strand; PAM type: NRG; PAM sequence: AAG
taagatctgagggataatca

SEQ ID NO: 126957 - DNA, 20 bp, Artificial Sequence
  Description of Artificial Sequence: Synthetic oligonucleotide
  Target: LAMA2; (+) strand; PAM type: NRG; PAM sequence: AAG
tctgagggataatcaaagca

SEQ ID NO: 126958 - DNA, 20 bp, Artificial Sequence
  Description of Artificial Sequence: Synthetic oligonucleotide
  Target: LAMA2; (+) strand; PAM type: NRG; PAM sequence: AGG
ctgagggataatcaaagcaa

SEQ ID NO: 126959 - DNA, 20 bp, Artificial Sequence
  Description of Artificial Sequence: Synthetic oligonucleotide
  Target: LAMA2; (+) strand; PAM type: NRG; PAM sequence: TGG
aatcaaagcaaaggcttatg

SEQ ID NO: 126960 - DNA, 20 bp, Artificial Sequence
  Description of Artificial Sequence: Synthetic oligonucleotide
  Target: LAMA2; (+) strand; PAM type: NRG; PAM sequence: TAG
aaagcaaaggcttatgtgga

SEQ ID NO: 126961 - DNA, 20 bp, Artificial Sequence
  Description of Artificial Sequence: Synthetic oligonucleotide
  Target: LAMA2; (+) strand; PAM type: NRG; PAM sequence: AGG
aagcaaaggcttatgtggat

SEQ ID NO: 126962 - DNA, 20 bp, Artificial Sequence
  Description of Artificial Sequence: Synthetic oligonucleotide
  Target: LAMA2; (+) strand; PAM type: NRG; PAM sequence: GGG
agcaaaggcttatgtggata

SEQ ID NO: 126963 - DNA, 20 bp, Artificial Sequence
  Description of Artificial Sequence: Synthetic oligonucleotide
  Target: LAMA2; (+) strand; PAM type: NRG; PAM sequence: CAG
atagggcatttattacatac

SEQ ID NO: 126964 - DNA, 20 bp, Artificial Sequence
  Description of Artificial Sequence: Synthetic oligonucleotide
  Target: LAMA2; (+) strand; PAM type: NRG; PAM sequence: AGG
tagggcatttattacatacc

SEQ ID NO: 126965 - DNA, 20 bp, Artificial Sequence
  Description of Artificial Sequence: Synthetic oligonucleotide
  Target: LAMA2; (+) strand; PAM type: NRG; PAM sequence: TAG
aattttctgaattacacttg

SEQ ID NO: 126966 - DNA, 20 bp, Artificial Sequence
  Description of Artificial Sequence: Synthetic oligonucleotide
  Target: LAMA2; (+) strand; PAM type: NRG; PAM sequence: TAG
ttctgaattacacttgtaga

SEQ ID NO: 126967 - DNA, 20 bp, Artificial Sequence
  Description of Artificial Sequence: Synthetic oligonucleotide
  Target: LAMA2; (+) strand; PAM type: NRG; PAM sequence: AGG
tctgaattacacttgtagat

SEQ ID NO: 126968 - DNA, 20 bp, Artificial Sequence
  Description of Artificial Sequence: Synthetic oligonucleotide
  Target: LAMA2; (+) strand; PAM type: NRG; PAM sequence: TAG
ctattgttatcctcatttta

SEQ ID NO: 126969 - DNA, 20 bp, Artificial Sequence
  Description of Artificial Sequence: Synthetic oligonucleotide
  Target: LAMA2; (+) strand; PAM type: NRG; PAM sequence: AAG
ttatcctcattttatagaca

SEQ ID NO: 126970 - DNA, 20 bp, Artificial Sequence
  Description of Artificial Sequence: Synthetic oligonucleotide
  Target: LAMA2; (+) strand; PAM type: NRG; PAM sequence: CAG
tcattttatagacaaagaca

SEQ ID NO: 126971 - DNA, 20 bp, Artificial Sequence
  Description of Artificial Sequence: Synthetic oligonucleotide
  Target: LAMA2; (+) strand; PAM type: NRG; PAM sequence: GAG
attttatagacaaagacaca

SEQ ID NO: 126972 - DNA, 20 bp, Artificial Sequence
  Description of Artificial Sequence: Synthetic oligonucleotide
  Target: LAMA2; (+) strand; PAM type: NRG; PAM sequence: TAG
tatagacaaagacacagaga

SEQ ID NO: 126973 - DNA, 20 bp, Artificial Sequence
  Description of Artificial Sequence: Synthetic oligonucleotide
  Target: LAMA2; (+) strand; PAM type: NRG; PAM sequence: GAG
tagacaaagacacagagata

SEQ ID NO: 126974 - DNA, 20 bp, Artificial Sequence
  Description of Artificial Sequence: Synthetic oligonucleotide
  Target: LAMA2; (+) strand; PAM type: NRG; PAM sequence: AGG
agacaaagacacagagatag

SEQ ID NO: 126975 - DNA, 20 bp, Artificial Sequence
  Description of Artificial Sequence: Synthetic oligonucleotide
  Target: LAMA2; (+) strand; PAM type: NRG; PAM sequence: AAG
aagacacagagatagaggtt

SEQ ID NO: 126976 - DNA, 20 bp, Artificial Sequence
  Description of Artificial Sequence: Synthetic oligonucleotide
  Target: LAMA2; (+) strand; PAM type: NRG; PAM sequence: TGG
tagaggttaagtatctttac

SEQ ID NO: 126977 - DNA, 20 bp, Artificial Sequence
  Description of Artificial Sequence: Synthetic oligonucleotide
  Target: LAMA2; (+) strand; PAM type: NRG; PAM sequence: GGG
agaggttaagtatctttact

SEQ ID NO: 126978 - DNA, 20 bp, Artificial Sequence
  Description of Artificial Sequence: Synthetic oligonucleotide
  Target: LAMA2; (+) strand; PAM type: NRG; PAM sequence: GGG
gaggttaagtatctttactg

SEQ ID NO: 126979 - DNA, 20 bp, Artificial Sequence
  Description of Artificial Sequence: Synthetic oligonucleotide
  Target: LAMA2; (+) strand; PAM type: NRG; PAM sequence: CAG
gtatctttactggggccaca

SEQ ID NO: 126980 - DNA, 20 bp, Artificial Sequence
  Description of Artificial Sequence: Synthetic oligonucleotide
  Target: LAMA2; (+) strand; PAM type: NRG; PAM sequence: TAG
ctttactggggccacacagc

SEQ ID NO: 126981 - DNA, 20 bp, Artificial Sequence
  Description of Artificial Sequence: Synthetic oligonucleotide
  Target: LAMA2; (+) strand; PAM type: NRG; PAM sequence: AGG
tttactggggccacacagct

SEQ ID NO: 126982 - DNA, 20 bp, Artificial Sequence
  Description of Artificial Sequence: Synthetic oligonucleotide
  Target: LAMA2; (+) strand; PAM type: NRG; PAM sequence: TGG
ggggccacacagctaggaat

SEQ ID NO: 126983 - DNA, 20 bp, Artificial Sequence
  Description of Artificial Sequence: Synthetic oligonucleotide
  Target: LAMA2; (+) strand; PAM type: NRG; PAM sequence: CAG
gccacacagctaggaattgg

SEQ ID NO: 126984 - DNA, 20 bp, Artificial Sequence
  Description of Artificial Sequence: Synthetic oligonucleotide
  Target: LAMA2; (+) strand; PAM type: NRG; PAM sequence: CAG
cagctaggaattggcagaac

SEQ ID NO: 126985 - DNA, 20 bp, Artificial Sequence
  Description of Artificial Sequence: Synthetic oligonucleotide
  Target: LAMA2; (+) strand; PAM type: NRG; PAM sequence: AGG
agctaggaattggcagaacc

SEQ ID NO: 126986 - DNA, 20 bp, Artificial Sequence
  Description of Artificial Sequence: Synthetic oligonucleotide
  Target: LAMA2; (+) strand; PAM type: NRG; PAM sequence: TAG
gaattggcagaaccaggatt

SEQ ID NO: 126987 - DNA, 20 bp, Artificial Sequence
  Description of Artificial Sequence: Synthetic oligonucleotide
  Target: LAMA2; (+) strand; PAM type: NRG; PAM sequence: AGG
aattggcagaaccaggattt

SEQ ID NO: 126988 - DNA, 20 bp, Artificial Sequence
  Description of Artificial Sequence: Synthetic oligonucleotide
  Target: LAMA2; (+) strand; PAM type: NRG; PAM sequence: TAG
aaatctgtttatttaaccac

SEQ ID NO: 126989 - DNA, 20 bp, Artificial Sequence
  Description of Artificial Sequence: Synthetic oligonucleotide
  Target: LAMA2; (+) strand; PAM type: NRG; PAM sequence: TGG
tatttaaccactagcctaca

SEQ ID NO: 126990 - DNA, 20 bp, Artificial Sequence
  Description of Artificial Sequence: Synthetic oligonucleotide
  Target: LAMA2; (+) strand; PAM type: NRG; PAM sequence: TGG
ccactagcctacatggccat

SEQ ID NO: 126991 - DNA, 20 bp, Artificial Sequence
  Description of Artificial Sequence: Synthetic oligonucleotide
  Target: LAMA2; (+) strand; PAM type: NRG; PAM sequence: CAG
gccattggaaatgaattata

SEQ ID NO: 126992 - DNA, 20 bp, Artificial Sequence
  Description of Artificial Sequence: Synthetic oligonucleotide
  Target: LAMA2; (+) strand; PAM type: NRG; PAM sequence: GAG
cattggaaatgaattataca

SEQ ID NO: 126993 - DNA, 20 bp, Artificial Sequence
  Description of Artificial Sequence: Synthetic oligonucleotide
  Target: LAMA2; (+) strand; PAM type: NRG; PAM sequence: AAG
atgaattatacagagatgaa

SEQ ID NO: 126994 - DNA, 20 bp, Artificial Sequence
  Description of Artificial Sequence: Synthetic oligonucleotide
  Target: LAMA2; (+) strand; PAM type: NRG; PAM sequence: TAG
gagatgaaaagttttcgtta

SEQ ID NO: 126995 - DNA, 20 bp, Artificial Sequence
  Description of Artificial Sequence: Synthetic oligonucleotide
  Target: LAMA2; (+) strand; PAM type: NRG; PAM sequence: CAG
ccctcgttgaaactcaaaaa

SEQ ID NO: 126996 - DNA, 20 bp, Artificial Sequence
  Description of Artificial Sequence: Synthetic oligonucleotide
  Target: LAMA2; (+) strand; PAM type: NRG; PAM sequence: AAG
tcgttgaaactcaaaaacag

SEQ ID NO: 126997 - DNA, 20 bp, Artificial Sequence
  Description of Artificial Sequence: Synthetic oligonucleotide
  Target: LAMA2; (+) strand; PAM type: NRG; PAM sequence: AGG
cgttgaaactcaaaaacaga

SEQ ID NO: 126998 - DNA, 20 bp, Artificial Sequence
  Description of Artificial Sequence: Synthetic oligonucleotide
  Target: LAMA2; (+) strand; PAM type: NRG; PAM sequence: AAG
acagaaggcaaaatatgtaa

SEQ ID NO: 126999 - DNA, 20 bp, Artificial Sequence
  Description of Artificial Sequence: Synthetic oligonucleotide
  Target: LAMA2; (+) strand; PAM type: NRG; PAM sequence: GAG
atgtaaaagaactcaaaact

SEQ ID NO: 127000 - DNA, 20 bp, Artificial Sequence
  Description of Artificial Sequence: Synthetic oligonucleotide
  Target: LAMA2; (+) strand; PAM type: NRG; PAM sequence: TAG
actgagaatatttttaaaaa

SEQ ID NO: 127001 - DNA, 20 bp, Artificial Sequence
  Description of Artificial Sequence: Synthetic oligonucleotide
  Target: LAMA2; (+) strand; PAM type: NRG; PAM sequence: TAG
aaaaatagaataaaatgtca

SEQ ID NO: 127002 - DNA, 20 bp, Artificial Sequence
  Description of Artificial Sequence: Synthetic oligonucleotide
  Target: LAMA2; (+) strand; PAM type: NRG; PAM sequence: AAG
catagaaaaaaatcacattt

SEQ ID NO: 127003 - DNA, 20 bp, Artificial Sequence
  Description of Artificial Sequence: Synthetic oligonucleotide
  Target: LAMA2; (+) strand; PAM type: NRG; PAM sequence: GAG
tagaaaaaaatcacatttaa

SEQ ID NO: 127004 - DNA, 20 bp, Artificial Sequence
  Description of Artificial Sequence: Synthetic oligonucleotide
  Target: LAMA2; (+) strand; PAM type: NRG; PAM sequence: CAG
ttctattacttttaccattg

SEQ ID NO: 127005 - DNA, 20 bp, Artificial Sequence
  Description of Artificial Sequence: Synthetic oligonucleotide
  Target: LAMA2; (+) strand; PAM type: NRG; PAM sequence: TGG
tacttttaccattgcagtta

SEQ ID NO: 127006 - DNA, 20 bp, Artificial Sequence
  Description of Artificial Sequence: Synthetic oligonucleotide
  Target: LAMA2; (+) strand; PAM type: NRG; PAM sequence: GGG
acttttaccattgcagttat

SEQ ID NO: 127007 - DNA, 20 bp, Artificial Sequence
  Description of Artificial Sequence: Synthetic oligonucleotide
  Target: LAMA2; (+) strand; PAM type: NRG; PAM sequence: TGG
ccattgcagttatgggcgtt

SEQ ID NO: 127008 - DNA, 20 bp, Artificial Sequence
  Description of Artificial Sequence: Synthetic oligonucleotide
  Target: LAMA2; (+) strand; PAM type: NRG; PAM sequence: CAG
cagttatgggcgtttggata

SEQ ID NO: 127009 - DNA, 20 bp, Artificial Sequence
  Description of Artificial Sequence: Synthetic oligonucleotide
  Target: LAMA2; (+) strand; PAM type: NRG; PAM sequence: TGG
atgggcgtttggatacagtt

SEQ ID NO: 127010 - DNA, 20 bp, Artificial Sequence
  Description of Artificial Sequence: Synthetic oligonucleotide
  Target: LAMA2; (+) strand; PAM type: NRG; PAM sequence: GGG
tgggcgtttggatacagttt

SEQ ID NO: 127011 - DNA, 20 bp, Artificial Sequence
  Description of Artificial Sequence: Synthetic oligonucleotide
  Target: LAMA2; (+) strand; PAM type: NRG; PAM sequence: AAG
ttgggtttaataaaaccccc

SEQ ID NO: 127012 - DNA, 20 bp, Artificial Sequence
  Description of Artificial Sequence: Synthetic oligonucleotide
  Target: LAMA2; (+) strand; PAM type: NRG; PAM sequence: TGG
tttaataaaacccccaagtt

SEQ ID NO: 127013 - DNA, 20 bp, Artificial Sequence
  Description of Artificial Sequence: Synthetic oligonucleotide
  Target: LAMA2; (+) strand; PAM type: NRG; PAM sequence: AAG
agtttggtttttattaaaat

SEQ ID NO: 127014 - DNA, 20 bp, Artificial Sequence
  Description of Artificial Sequence: Synthetic oligonucleotide
  Target: LAMA2; (+) strand; PAM type: NRG; PAM sequence: TGG
aaaataagtcaatctatcat

SEQ ID NO: 127015 - DNA, 20 bp, Artificial Sequence
  Description of Artificial Sequence: Synthetic oligonucleotide
  Target: LAMA2; (+) strand; PAM type: NRG; PAM sequence: TAG
tcacatttatctctcttttc

SEQ ID NO: 127016 - DNA, 20 bp, Artificial Sequence
  Description of Artificial Sequence: Synthetic oligonucleotide
  Target: LAMA2; (+) strand; PAM type: NRG; PAM sequence: TAG
catttatctctcttttctag

SEQ ID NO: 127017 - DNA, 20 bp, Artificial Sequence
  Description of Artificial Sequence: Synthetic oligonucleotide
  Target: LAMA2; (+) strand; PAM type: NRG; PAM sequence: GAG
tttctagtagtgtcaaatct

SEQ ID NO: 127018 - DNA, 20 bp, Artificial Sequence
  Description of Artificial Sequence: Synthetic oligonucleotide
  Target: LAMA2; (+) strand; PAM type: NRG; PAM sequence: AGG
ttctagtagtgtcaaatctg

SEQ ID NO: 127019 - DNA, 20 bp, Artificial Sequence
  Description of Artificial Sequence: Synthetic oligonucleotide
  Target: LAMA2; (+) strand; PAM type: NRG; PAM sequence: GAG
ctagtagtgtcaaatctgag

SEQ ID NO: 127020 - DNA, 20 bp, Artificial Sequence
  Description of Artificial Sequence: Synthetic oligonucleotide
  Target: LAMA2; (+) strand; PAM type: NRG; PAM sequence: TAG
aaatctgaggagcaaatata

SEQ ID NO: 127021 - DNA, 20 bp, Artificial Sequence
  Description of Artificial Sequence: Synthetic oligonucleotide
  Target: LAMA2; (+) strand; PAM type: NRG; PAM sequence: AAG
tagctactatacaaaaatca

SEQ ID NO: 127022 - DNA, 20 bp, Artificial Sequence
  Description of Artificial Sequence: Synthetic oligonucleotide
  Target: LAMA2; (+) strand; PAM type: NRG; PAM sequence: AAG
tacaaaaatcaaagatttaa

SEQ ID NO: 127023 - DNA, 20 bp, Artificial Sequence
  Description of Artificial Sequence: Synthetic oligonucleotide
  Target: LAMA2; (+) strand; PAM type: NRG; PAM sequence: TAG
aatcaaagatttaaaagttt

SEQ ID NO: 127024 - DNA, 20 bp, Artificial Sequence
  Description of Artificial Sequence: Synthetic oligonucleotide
  Target: LAMA2; (+) strand; PAM type: NRG; PAM sequence: GAG
aaaagttttagcattgcatt

SEQ ID NO: 127025 - DNA, 20 bp, Artificial Sequence
  Description of Artificial Sequence: Synthetic oligonucleotide
  Target: LAMA2; (+) strand; PAM type: NRG; PAM sequence: TAG
ttttaaatgcctccattttt

SEQ ID NO: 127026 - DNA, 20 bp, Artificial Sequence
  Description of Artificial Sequence: Synthetic oligonucleotide
  Target: LAMA2; (+) strand; PAM type: NRG; PAM sequence: TAG
tgcctccattttttagatga

SEQ ID NO: 127027 - DNA, 20 bp, Artificial Sequence
  Description of Artificial Sequence: Synthetic oligonucleotide
  Target: LAMA2; (+) strand; PAM type: NRG; PAM sequence: AAG
tagatgatagctacacatta

SEQ ID NO: 127028 - DNA, 20 bp, Artificial Sequence
  Description of Artificial Sequence: Synthetic oligonucleotide
  Target: LAMA2; (+) strand; PAM type: NRG; PAM sequence: TGG
tgatagctacacattaaaga

SEQ ID NO: 127029 - DNA, 20 bp, Artificial Sequence
  Description of Artificial Sequence: Synthetic oligonucleotide
  Target: LAMA2; (+) strand; PAM type: NRG; PAM sequence: GGG
gatagctacacattaaagat

SEQ ID NO: 127030 - DNA, 20 bp, Artificial Sequence
  Description of Artificial Sequence: Synthetic oligonucleotide
  Target: LAMA2; (+) strand; PAM type: NRG; PAM sequence: GGG
atagctacacattaaagatg

SEQ ID NO: 127031 - DNA, 20 bp, Artificial Sequence
  Description of Artificial Sequence: Synthetic oligonucleotide
  Target: LAMA2; (+) strand; PAM type: NRG; PAM sequence: TAG
tacacattaaagatggggtg

SEQ ID NO: 127032 - DNA, 20 bp, Artificial Sequence
  Description of Artificial Sequence: Synthetic oligonucleotide
  Target: LAMA2; (+) strand; PAM type: NRG; PAM sequence: AGG
acacattaaagatggggtgt

SEQ ID NO: 127033 - DNA, 20 bp, Artificial Sequence
  Description of Artificial Sequence: Synthetic oligonucleotide
  Target: LAMA2; (+) strand; PAM type: NRG; PAM sequence: TAG
cattaaagatggggtgtagg

SEQ ID NO: 127034 - DNA, 20 bp, Artificial Sequence
  Description of Artificial Sequence: Synthetic oligonucleotide
  Target: LAMA2; (+) strand; PAM type: NRG; PAM sequence: AGG
attaaagatggggtgtaggt

SEQ ID NO: 127035 - DNA, 20 bp, Artificial Sequence
  Description of Artificial Sequence: Synthetic oligonucleotide
  Target: LAMA2; (+) strand; PAM type: NRG; PAM sequence: GGG
ttaaagatggggtgtaggta

SEQ ID NO: 127036 - DNA, 20 bp, Artificial Sequence
  Description of Artificial Sequence: Synthetic oligonucleotide
  Target: LAMA2; (+) strand; PAM type: NRG; PAM sequence: TGG
aagatggggtgtaggtaggg

SEQ ID NO: 127037 - DNA, 20 bp, Artificial Sequence
  Description of Artificial Sequence: Synthetic oligonucleotide
  Target: LAMA2; (+) strand; PAM type: NRG; PAM sequence: CAG
gtgtaggtagggtggttgat

SEQ ID NO: 127038 - DNA, 20 bp, Artificial Sequence
  Description of Artificial Sequence: Synthetic oligonucleotide
  Target: LAMA2; (+) strand; PAM type: NRG; PAM sequence: TAG
ggttgatcagtgtatctaaa

SEQ ID NO: 127039 - DNA, 20 bp, Artificial Sequence
  Description of Artificial Sequence: Synthetic oligonucleotide
  Target: LAMA2; (+) strand; PAM type: NRG; PAM sequence: TAG
cagtgtatctaaatagacta

SEQ ID NO: 127040 - DNA, 20 bp, Artificial Sequence
  Description of Artificial Sequence: Synthetic oligonucleotide
  Target: LAMA2; (+) strand; PAM type: NRG; PAM sequence: CAG
ctatagtatgcaaaaacatt

SEQ ID NO: 127041 - DNA, 20 bp, Artificial Sequence
  Description of Artificial Sequence: Synthetic oligonucleotide
  Target: LAMA2; (+) strand; PAM type: NRG; PAM sequence: GAG
ttcagtaaaaaatgttcctt

SEQ ID NO: 127042 - DNA, 20 bp, Artificial Sequence
  Description of Artificial Sequence: Synthetic oligonucleotide
  Target: LAMA2; (+) strand; PAM type: NRG; PAM sequence: AAG
gtaaaaaatgttccttgagc

SEQ ID NO: 127043 - DNA, 20 bp, Artificial Sequence
  Description of Artificial Sequence: Synthetic oligonucleotide
  Target: LAMA2; (+) strand; PAM type: NRG; PAM sequence: AAG
aaaaatgttccttgagcaag

SEQ ID NO: 127044 - DNA, 20 bp, Artificial Sequence
  Description of Artificial Sequence: Synthetic oligonucleotide
  Target: LAMA2; (+) strand; PAM type: NRG; PAM sequence: AAG
ttgagcaagaagaaaaaata

SEQ ID NO: 127045 - DNA, 20 bp, Artificial Sequence
  Description of Artificial Sequence: Synthetic oligonucleotide
  Target: LAMA2; (+) strand; PAM type: NRG; PAM sequence: CAG
gcaagaagaaaaaataaaga

SEQ ID NO: 127046 - DNA, 20 bp, Artificial Sequence
  Description of Artificial Sequence: Synthetic oligonucleotide
  Target: LAMA2; (+) strand; PAM type: NRG; PAM sequence: CAG
acacatgaatttatatgact

SEQ ID NO: 127047 - DNA, 20 bp, Artificial Sequence
  Description of Artificial Sequence: Synthetic oligonucleotide
  Target: LAMA2; (+) strand; PAM type: NRG; PAM sequence: AAG
tttcgctaccacttttatga

SEQ ID NO: 127048 - DNA, 20 bp, Artificial Sequence
  Description of Artificial Sequence: Synthetic oligonucleotide
  Target: LAMA2; (+) strand; PAM type: NRG; PAM sequence: GAG
attcacacaattcacaatgt

SEQ ID NO: 127049 - DNA, 20 bp, Artificial Sequence
  Description of Artificial Sequence: Synthetic oligonucleotide
  Target: LAMA2; (+) strand; PAM type: NRG; PAM sequence: AGG
ttcacacaattcacaatgtg

SEQ ID NO: 127050 - DNA, 20 bp, Artificial Sequence
  Description of Artificial Sequence: Synthetic oligonucleotide
  Target: LAMA2; (+) strand; PAM type: NRG; PAM sequence: GAG
cacacaattcacaatgtgag

SEQ ID NO: 127051 - DNA, 20 bp, Artificial Sequence
  Description of Artificial Sequence: Synthetic oligonucleotide
  Target: LAMA2; (+) strand; PAM type: NRG; PAM sequence: AAG
gtgaggagcaattaccatca

SEQ ID NO: 127052 - DNA, 20 bp, Artificial Sequence
  Description of Artificial Sequence: Synthetic oligonucleotide
  Target: LAMA2; (+) strand; PAM type: NRG; PAM sequence: TGG
atacataataatatgccatg

SEQ ID NO: 127053 - DNA, 20 bp, Artificial Sequence
  Description of Artificial Sequence: Synthetic oligonucleotide
  Target: LAMA2; (+) strand; PAM type: NRG; PAM sequence: TGG
ataatatgccatgtggtata

SEQ ID NO: 127054 - DNA, 20 bp, Artificial Sequence
  Description of Artificial Sequence: Synthetic oligonucleotide
  Target: LAMA2; (+) strand; PAM type: NRG; PAM sequence: GAG
aatatgccatgtggtatatg

SEQ ID NO: 127055 - DNA, 20 bp, Artificial Sequence
  Description of Artificial Sequence: Synthetic oligonucleotide
  Target: LAMA2; (+) strand; PAM type: NRG; PAM sequence: CAG
ccatgtggtatatggagcca

SEQ ID NO: 127056 - DNA, 20 bp, Artificial Sequence
  Description of Artificial Sequence: Synthetic oligonucleotide
  Target: LAMA2; (+) strand; PAM type: NRG; PAM sequence: AGG
catgtggtatatggagccac

SEQ ID NO: 127057 - DNA, 20 bp, Artificial Sequence
  Description of Artificial Sequence: Synthetic oligonucleotide
  Target: LAMA2; (+) strand; PAM type: NRG; PAM sequence: AAG
gtatatggagccacaggatg

SEQ ID NO: 127058 - DNA, 20 bp, Artificial Sequence
  Description of Artificial Sequence: Synthetic oligonucleotide
  Target: LAMA2; (+) strand; PAM type: NRG; PAM sequence: TGG
atggagccacaggatgaaga

SEQ ID NO: 127059 - DNA, 20 bp, Artificial Sequence
  Description of Artificial Sequence: Synthetic oligonucleotide
  Target: LAMA2; (+) strand; PAM type: NRG; PAM sequence: CAG
gagccacaggatgaagatgg

SEQ ID NO: 127060 - DNA, 20 bp, Artificial Sequence
  Description of Artificial Sequence: Synthetic oligonucleotide
  Target: LAMA2; (+) strand; PAM type: NRG; PAM sequence: AGG
agccacaggatgaagatggc

SEQ ID NO: 127061 - DNA, 20 bp, Artificial Sequence
  Description of Artificial Sequence: Synthetic oligonucleotide
  Target: LAMA2; (+) strand; PAM type: NRG; PAM sequence: TGG
atgaagatggcaggttttct

SEQ ID NO: 127062 - DNA, 20 bp, Artificial Sequence
  Description of Artificial Sequence: Synthetic oligonucleotide
  Target: LAMA2; (+) strand; PAM type: NRG; PAM sequence: GGG
tgaagatggcaggttttctt

SEQ ID NO: 127063 - DNA, 20 bp, Artificial Sequence
  Description of Artificial Sequence: Synthetic oligonucleotide
  Target: LAMA2; (+) strand; PAM type: NRG; PAM sequence: AAG
ttgggccatcaattttactc

SEQ ID NO: 127064 - DNA, 20 bp, Artificial Sequence
  Description of Artificial Sequence: Synthetic oligonucleotide
  Target: LAMA2; (+) strand; PAM type: NRG; PAM sequence: AGG
tgggccatcaattttactca

SEQ ID NO: 127065 - DNA, 20 bp, Artificial Sequence
  Description of Artificial Sequence: Synthetic oligonucleotide
  Target: LAMA2; (+) strand; PAM type: NRG; PAM sequence: GGG
gggccatcaattttactcaa

SEQ ID NO: 127066 - DNA, 20 bp, Artificial Sequence
  Description of Artificial Sequence: Synthetic oligonucleotide
  Target: LAMA2; (+) strand; PAM type: NRG; PAM sequence: AAG
aaaataatattttaatatta

SEQ ID NO: 127067 - DNA, 20 bp, Artificial Sequence
  Description of Artificial Sequence: Synthetic oligonucleotide
  Target: LAMA2; (+) strand; PAM type: NRG; PAM sequence: AGG
aaataatattttaatattaa

SEQ ID NO: 127068 - DNA, 20 bp, Artificial Sequence
  Description of Artificial Sequence: Synthetic oligonucleotide
  Target: LAMA2; (+) strand; PAM type: NRG; PAM sequence: AAG
taatattttaatattaaagg

SEQ ID NO: 127069 - DNA, 20 bp, Artificial Sequence
  Description of Artificial Sequence: Synthetic oligonucleotide
  Target: LAMA2; (+) strand; PAM type: NRG; PAM sequence: TAG
aaaggaagcatatgatactg

SEQ ID NO: 127070 - DNA, 20 bp, Artificial Sequence
  Description of Artificial Sequence: Synthetic oligonucleotide
  Target: LAMA2; (+) strand; PAM type: NRG; PAM sequence: CAG
ctgactcttctgtgaaattt

SEQ ID NO: 127071 - DNA, 20 bp, Artificial Sequence
  Description of Artificial Sequence: Synthetic oligonucleotide
  Target: LAMA2; (+) strand; PAM type: NRG; PAM sequence: GAG
gactcttctgtgaaatttca

SEQ ID NO: 127072 - DNA, 20 bp, Artificial Sequence
  Description of Artificial Sequence: Synthetic oligonucleotide
  Target: LAMA2; (+) strand; PAM type: NRG; PAM sequence: TGG
tctgtgaaatttcagagctg

SEQ ID NO: 127073 - DNA, 20 bp, Artificial Sequence
  Description of Artificial Sequence: Synthetic oligonucleotide
  Target: LAMA2; (+) strand; PAM type: NRG; PAM sequence: TGG
cagagctgtggctgttaaat

SEQ ID NO: 127074 - DNA, 20 bp, Artificial Sequence
  Description of Artificial Sequence: Synthetic oligonucleotide
  Target: LAMA2; (+) strand; PAM type: NRG; PAM sequence: CAG
ttaaattggaactatgccac

SEQ ID NO: 127075 - DNA, 20 bp, Artificial Sequence
  Description of Artificial Sequence: Synthetic oligonucleotide
  Target: LAMA2; (+) strand; PAM type: NRG; PAM sequence: TGG
ggaactatgccaccagaccc

SEQ ID NO: 127076 - DNA, 20 bp, Artificial Sequence
  Description of Artificial Sequence: Synthetic oligonucleotide
  Target: LAMA2; (+) strand; PAM type: NRG; PAM sequence: GGG
gaactatgccaccagaccct

SEQ ID NO: 127077 - DNA, 20 bp, Artificial Sequence
  Description of Artificial Sequence: Synthetic oligonucleotide
  Target: LAMA2; (+) strand; PAM type: NRG; PAM sequence: GGG
aactatgccaccagaccctg

SEQ ID NO: 127078 - DNA, 20 bp, Artificial Sequence
  Description of Artificial Sequence: Synthetic oligonucleotide
  Target: LAMA2; (+) strand; PAM type: NRG; PAM sequence: TAG
tatttattcttctctgcctt

SEQ ID NO: 127079 - DNA, 20 bp, Artificial Sequence
  Description of Artificial Sequence: Synthetic oligonucleotide
  Target: LAMA2; (+) strand; PAM type: NRG; PAM sequence: AGG
atttattcttctctgccttt

SEQ ID NO: 127080 - DNA, 20 bp, Artificial Sequence
  Description of Artificial Sequence: Synthetic oligonucleotide
  Target: LAMA2; (+) strand; PAM type: NRG; PAM sequence: GGG
tttattcttctctgccttta

SEQ ID NO: 127081 - DNA, 20 bp, Artificial Sequence
  Description of Artificial Sequence: Synthetic oligonucleotide
  Target: LAMA2; (+) strand; PAM type: NRG; PAM sequence: AAG
ctttagggaatttttttaaa

SEQ ID NO: 127082 - DNA, 20 bp, Artificial Sequence
  Description of Artificial Sequence: Synthetic oligonucleotide
  Target: LAMA2; (+) strand; PAM type: NRG; PAM sequence: AAG
ggaatttttttaaaaagttc

SEQ ID NO: 127083 - DNA, 20 bp, Artificial Sequence
  Description of Artificial Sequence: Synthetic oligonucleotide
  Target: LAMA2; (+) strand; PAM type: NRG; PAM sequence: AAG
atttttttaaaaagttcaag

SEQ ID NO: 127084 - DNA, 20 bp, Artificial Sequence
  Description of Artificial Sequence: Synthetic oligonucleotide
  Target: LAMA2; (+) strand; PAM type: NRG; PAM sequence: GAG
taaaaagttcaagaagccgt

SEQ ID NO: 127085 - DNA, 20 bp, Artificial Sequence
  Description of Artificial Sequence: Synthetic oligonucleotide
  Target: LAMA2; (+) strand; PAM type: NRG; PAM sequence: CAG
caagaagccgtgagataatg

SEQ ID NO: 127086 - DNA, 20 bp, Artificial Sequence
  Description of Artificial Sequence: Synthetic oligonucleotide
  Target: LAMA2; (+) strand; PAM type: NRG; PAM sequence: TAG
gtgagataatgcagccttca

SEQ ID NO: 127087 - DNA, 20 bp, Artificial Sequence
  Description of Artificial Sequence: Synthetic oligonucleotide
  Target: LAMA2; (+) strand; PAM type: NRG; PAM sequence: TAG
cttcatagttattctgtttg

SEQ ID NO: 127088 - DNA, 20 bp, Artificial Sequence
  Description of Artificial Sequence: Synthetic oligonucleotide
  Target: LAMA2; (+) strand; PAM type: NRG; PAM sequence: TGG
tagttattctgtttgtagat

SEQ ID NO: 127089 - DNA, 20 bp, Artificial Sequence
  Description of Artificial Sequence: Synthetic oligonucleotide
  Target: LAMA2; (+) strand; PAM type: NRG; PAM sequence: TAG
ttattctgtttgtagattgg

SEQ ID NO: 127090 - DNA, 20 bp, Artificial Sequence
  Description of Artificial Sequence: Synthetic oligonucleotide
  Target: LAMA2; (+) strand; PAM type: NRG; PAM sequence: AAG
ttgatacttattatgaatcc

SEQ ID NO: 127091 - DNA, 20 bp, Artificial Sequence
  Description of Artificial Sequence: Synthetic oligonucleotide
  Target: LAMA2; (+) strand; PAM type: NRG; PAM sequence: GAG
gatacttattatgaatccaa

SEQ ID NO: 127092 - DNA, 20 bp, Artificial Sequence
  Description of Artificial Sequence: Synthetic oligonucleotide
  Target: LAMA2; (+) strand; PAM type: NRG; PAM sequence: TGG
acttattatgaatccaagag

SEQ ID NO: 127093 - DNA, 20 bp, Artificial Sequence
  Description of Artificial Sequence: Synthetic oligonucleotide
  Target: LAMA2; (+) strand; PAM type: NRG; PAM sequence: GAG
ttattatgaatccaagagtg

SEQ ID NO: 127094 - DNA, 20 bp, Artificial Sequence
  Description of Artificial Sequence: Synthetic oligonucleotide
  Target: LAMA2; (+) strand; PAM type: NRG; PAM sequence: AGG
tattatgaatccaagagtgg

SEQ ID NO: 127095 - DNA, 20 bp, Artificial Sequence
  Description of Artificial Sequence: Synthetic oligonucleotide
  Target: LAMA2; (+) strand; PAM type: NRG; PAM sequence: TAG
ccaagagtggaggtgaaaca

SEQ ID NO: 127096 - DNA, 20 bp, Artificial Sequence
  Description of Artificial Sequence: Synthetic oligonucleotide
  Target: LAMA2; (+) strand; PAM type: NRG; PAM sequence: TGG
gtggaggtgaaacatagcac

SEQ ID NO: 127097 - DNA, 20 bp, Artificial Sequence
  Description of Artificial Sequence: Synthetic oligonucleotide
  Target: LAMA2; (+) strand; PAM type: NRG; PAM sequence: TGG
ctggatatttttatatgtgt

SEQ ID NO: 127098 - DNA, 20 bp, Artificial Sequence
  Description of Artificial Sequence: Synthetic oligonucleotide
  Target: LAMA2; (+) strand; PAM type: NRG; PAM sequence: TAG
gttggtctatgtcaatcaaa

SEQ ID NO: 127099 - DNA, 20 bp, Artificial Sequence
  Description of Artificial Sequence: Synthetic oligonucleotide
  Target: LAMA2; (+) strand; PAM type: NRG; PAM sequence: AGG
ttggtctatgtcaatcaaat

SEQ ID NO: 127100 - DNA, 20 bp, Artificial Sequence
  Description of Artificial Sequence: Synthetic oligonucleotide
  Target: LAMA2; (+) strand; PAM type: NRG; PAM sequence: GAG
ggtctatgtcaatcaaatag

SEQ ID NO: 127101 - DNA, 20 bp, Artificial Sequence
  Description of Artificial Sequence: Synthetic oligonucleotide
  Target: LAMA2; (+) strand; PAM type: NRG; PAM sequence: GAG
tctatgtcaatcaaatagga

SEQ ID NO: 127102 - DNA, 20 bp, Artificial Sequence
  Description of Artificial Sequence: Synthetic oligonucleotide
  Target: LAMA2; (+) strand; PAM type: NRG; PAM sequence: TAG
aaataggagagataaaatga

SEQ ID NO: 127103 - DNA, 20 bp, Artificial Sequence
  Description of Artificial Sequence: Synthetic oligonucleotide
  Target: LAMA2; (+) strand; PAM type: NRG; PAM sequence: TAG
agataaaatgatagtcttgt

SEQ ID NO: 127104 - DNA, 20 bp, Artificial Sequence
  Description of Artificial Sequence: Synthetic oligonucleotide
  Target: LAMA2; (+) strand; PAM type: NRG; PAM sequence: AAG
aatgatagtcttgttagtga

SEQ ID NO: 127105 - DNA, 20 bp, Artificial Sequence
  Description of Artificial Sequence: Synthetic oligonucleotide
  Target: LAMA2; (+) strand; PAM type: NRG; PAM sequence: TAG
gtcttgttagtgaaagaaaa

SEQ ID NO: 127106 - DNA, 20 bp, Artificial Sequence
  Description of Artificial Sequence: Synthetic oligonucleotide
  Target: LAMA2; (+) strand; PAM type: NRG; PAM sequence: AGG
tcttgttagtgaaagaaaat

SEQ ID NO: 127107 - DNA, 20 bp, Artificial Sequence
  Description of Artificial Sequence: Synthetic oligonucleotide
  Target: LAMA2; (+) strand; PAM type: NRG; PAM sequence: GGG
cttgttagtgaaagaaaata

SEQ ID NO: 127108 - DNA, 20 bp, Artificial Sequence
  Description of Artificial Sequence: Synthetic oligonucleotide
  Target: LAMA2; (+) strand; PAM type: NRG; PAM sequence: AAG
attaatgtataataaactta

SEQ ID NO: 127109 - DNA, 20 bp, Artificial Sequence
  Description of Artificial Sequence: Synthetic oligonucleotide
  Target: LAMA2; (+) strand; PAM type: NRG; PAM sequence: CAG
cttaaagttacatgatatga

SEQ ID NO: 127110 - DNA, 20 bp, Artificial Sequence
  Description of Artificial Sequence: Synthetic oligonucleotide
  Target: LAMA2; (+) strand; PAM type: NRG; PAM sequence: TAG
agttacatgatatgacagca

SEQ ID NO: 127111 - DNA, 20 bp, Artificial Sequence
  Description of Artificial Sequence: Synthetic oligonucleotide
  Target: LAMA2; (+) strand; PAM type: NRG; PAM sequence: TAG
gaattaaaaatatgtctgtc

SEQ ID NO: 127112 - DNA, 20 bp, Artificial Sequence
  Description of Artificial Sequence: Synthetic oligonucleotide
  Target: LAMA2; (+) strand; PAM type: NRG; PAM sequence: TAG
cgcaattattgctttcttca

SEQ ID NO: 127113 - DNA, 20 bp, Artificial Sequence
  Description of Artificial Sequence: Synthetic oligonucleotide
  Target: LAMA2; (+) strand; PAM type: NRG; PAM sequence: AGG
gcaattattgctttcttcat

SEQ ID NO: 127114 - DNA, 20 bp, Artificial Sequence
  Description of Artificial Sequence: Synthetic oligonucleotide
  Target: LAMA2; (+) strand; PAM type: NRG; PAM sequence: AAG
ttttcctattgttctctgtc

SEQ ID NO: 127115 - DNA, 20 bp, Artificial Sequence
  Description of Artificial Sequence: Synthetic oligonucleotide
  Target: LAMA2; (+) strand; PAM type: NRG; PAM sequence: CAG
tgttctctgtcaagacactg

SEQ ID NO: 127116 - DNA, 20 bp, Artificial Sequence
  Description of Artificial Sequence: Synthetic oligonucleotide
  Target: LAMA2; (+) strand; PAM type: NRG; PAM sequence: TGG
atgtcatacaaattcatgtt

SEQ ID NO: 127117 - DNA, 20 bp, Artificial Sequence
  Description of Artificial Sequence: Synthetic oligonucleotide
  Target: LAMA2; (+) strand; PAM type: NRG; PAM sequence: AAG
ttctccactaatactgtttc

SEQ ID NO: 127118 - DNA, 20 bp, Artificial Sequence
  Description of Artificial Sequence: Synthetic oligonucleotide
  Target: LAMA2; (+) strand; PAM type: NRG; PAM sequence: GAG
ctccactaatactgtttcaa

SEQ ID NO: 127119 - DNA, 20 bp, Artificial Sequence
  Description of Artificial Sequence: Synthetic oligonucleotide
  Target: LAMA2; (+) strand; PAM type: NRG; PAM sequence: AGG
tccactaatactgtttcaag

SEQ ID NO: 127120 - DNA, 20 bp, Artificial Sequence
  Description of Artificial Sequence: Synthetic oligonucleotide
  Target: LAMA2; (+) strand; PAM type: NRG; PAM sequence: AAG
tactgtttcaagaggtcacg

SEQ ID NO: 127121 - DNA, 20 bp, Artificial Sequence
  Description of Artificial Sequence: Synthetic oligonucleotide
  Target: LAMA2; (+) strand; PAM type: NRG; PAM sequence: AAG
tgtttcaagaggtcacgaag

SEQ ID NO: 127122 - DNA, 20 bp, Artificial Sequence
  Description of Artificial Sequence: Synthetic oligonucleotide
  Target: LAMA2; (+) strand; PAM type: NRG; PAM sequence: AGG
gtttcaagaggtcacgaaga

SEQ ID NO: 127123 - DNA, 20 bp, Artificial Sequence
  Description of Artificial Sequence: Synthetic oligonucleotide
  Target: LAMA2; (+) strand; PAM type: NRG; PAM sequence: AAG
agaaggtattttttttttta

SEQ ID NO: 127124 - DNA, 20 bp, Artificial Sequence
  Description of Artificial Sequence: Synthetic oligonucleotide
  Target: LAMA2; (+) strand; PAM type: NRG; PAM sequence: AGG
gaaggtatttttttttttaa

SEQ ID NO: 127125 - DNA, 20 bp, Artificial Sequence
  Description of Artificial Sequence: Synthetic oligonucleotide
  Target: LAMA2; (+) strand; PAM type: NRG; PAM sequence: TGG
ggaacaccaaaatcgaatga

SEQ ID NO: 127126 - DNA, 20 bp, Artificial Sequence
  Description of Artificial Sequence: Synthetic oligonucleotide
  Target: LAMA2; (+) strand; PAM type: NRG; PAM sequence: TGG
aaaatcgaatgatggtatga

SEQ ID NO: 127127 - DNA, 20 bp, Artificial Sequence
  Description of Artificial Sequence: Synthetic oligonucleotide
  Target: LAMA2; (+) strand; PAM type: NRG; PAM sequence: GAG
gatggattttatgtgtgact

SEQ ID NO: 127128 - DNA, 20 bp, Artificial Sequence
  Description of Artificial Sequence: Synthetic oligonucleotide
  Target: LAMA2; (+) strand; PAM type: NRG; PAM sequence: TGG
tatgtgtgactgagcttgtg

SEQ ID NO: 127129 - DNA, 20 bp, Artificial Sequence
  Description of Artificial Sequence: Synthetic oligonucleotide
  Target: LAMA2; (+) strand; PAM type: NRG; PAM sequence: GAG
tgtgtgactgagcttgtgtg

SEQ ID NO: 127130 - DNA, 20 bp, Artificial Sequence
  Description of Artificial Sequence: Synthetic oligonucleotide
  Target: LAMA2; (+) strand; PAM type: NRG; PAM sequence: AAG
gactgagcttgtgtggagtg

SEQ ID NO: 127131 - DNA, 20 bp, Artificial Sequence
  Description of Artificial Sequence: Synthetic oligonucleotide
  Target: LAMA2; (+) strand; PAM type: NRG; PAM sequence: GAG
ttcaaaataaattcctctct

SEQ ID NO: 127132 - DNA, 20 bp, Artificial Sequence
  Description of Artificial Sequence: Synthetic oligonucleotide
  Target: LAMA2; (+) strand; PAM type: NRG; PAM sequence: TGG
cctctctgagacacactgca

SEQ ID NO: 127133 - DNA, 20 bp, Artificial Sequence
  Description of Artificial Sequence: Synthetic oligonucleotide
  Target: LAMA2; (+) strand; PAM type: NRG; PAM sequence: AAG
cacactgcatggaaatatca

SEQ ID NO: 127134 - DNA, 20 bp, Artificial Sequence
  Description of Artificial Sequence: Synthetic oligonucleotide
  Target: LAMA2; (+) strand; PAM type: NRG; PAM sequence: CAG
actgcatggaaatatcaaag

SEQ ID NO: 127135 - DNA, 20 bp, Artificial Sequence
  Description of Artificial Sequence: Synthetic oligonucleotide
  Target: LAMA2; (+) strand; PAM type: NRG; PAM sequence: AAG
tgcaattctttcataaatta

SEQ ID NO: 127136 - DNA, 20 bp, Artificial Sequence
  Description of Artificial Sequence: Synthetic oligonucleotide
  Target: LAMA2; (+) strand; PAM type: NRG; PAM sequence: AGG
gcaattctttcataaattaa

SEQ ID NO: 127137 - DNA, 20 bp, Artificial Sequence
  Description of Artificial Sequence: Synthetic oligonucleotide
  Target: LAMA2; (+) strand; PAM type: NRG; PAM sequence: TGG
gttatactctcattctgttt

SEQ ID NO: 127138 - DNA, 20 bp, Artificial Sequence
  Description of Artificial Sequence: Synthetic oligonucleotide
  Target: LAMA2; (+) strand; PAM type: NRG; PAM sequence: GGG
ttatactctcattctgtttt

SEQ ID NO: 127139 - DNA, 20 bp, Artificial Sequence
  Description of Artificial Sequence: Synthetic oligonucleotide
  Target: LAMA2; (+) strand; PAM type: NRG; PAM sequence: CAG
cattctgttttgggtccatc

SEQ ID NO: 127140 - DNA, 20 bp, Artificial Sequence
  Description of Artificial Sequence: Synthetic oligonucleotide
  Target: LAMA2; (+) strand; PAM type: NRG; PAM sequence: AAG
tctgttttgggtccatccag

SEQ ID NO: 127141 - DNA, 20 bp, Artificial Sequence
  Description of Artificial Sequence: Synthetic oligonucleotide
  Target: LAMA2; (+) strand; PAM type: NRG; PAM sequence: GAG
ccagaagatgataatgtttc

SEQ ID NO: 127142 - DNA, 20 bp, Artificial Sequence
  Description of Artificial Sequence: Synthetic oligonucleotide
  Target: LAMA2; (+) strand; PAM type: NRG; PAM sequence: GAG
agaagatgataatgtttcga

SEQ ID NO: 127143 - DNA, 20 bp, Artificial Sequence
  Description of Artificial Sequence: Synthetic oligonucleotide
  Target: LAMA2; (+) strand; PAM type: NRG; PAM sequence: CAG
agatgataatgtttcgagag

SEQ ID NO: 127144 - DNA, 20 bp, Artificial Sequence
  Description of Artificial Sequence: Synthetic oligonucleotide
  Target: LAMA2; (+) strand; PAM type: NRG; PAM sequence: CAG
tgataatgtttcgagagcag

SEQ ID NO: 127145 - DNA, 20 bp, Artificial Sequence
  Description of Artificial Sequence: Synthetic oligonucleotide
  Target: LAMA2; (+) strand; PAM type: NRG; PAM sequence: CAG
tttcgagagcagcagtttct

SEQ ID NO: 127146 - DNA, 20 bp, Artificial Sequence
  Description of Artificial Sequence: Synthetic oligonucleotide
  Target: LAMA2; (+) strand; PAM type: NRG; PAM sequence: AGG
ttcgagagcagcagtttctc

SEQ ID NO: 127147 - DNA, 20 bp, Artificial Sequence
  Description of Artificial Sequence: Synthetic oligonucleotide
  Target: LAMA2; (+) strand; PAM type: NRG; PAM sequence: TGG
cactcttctgtgtttcacta

SEQ ID NO: 127148 - DNA, 20 bp, Artificial Sequence
  Description of Artificial Sequence: Synthetic oligonucleotide
  Target: LAMA2; (+) strand; PAM type: NRG; PAM sequence: AAG
ctgtgtttcactatggtacc

SEQ ID NO: 127149 - DNA, 20 bp, Artificial Sequence
  Description of Artificial Sequence: Synthetic oligonucleotide
  Target: LAMA2; (+) strand; PAM type: NRG; PAM sequence: CAG
tatggtaccaagaaatttgc

SEQ ID NO: 127150 - DNA, 20 bp, Artificial Sequence
  Description of Artificial Sequence: Synthetic oligonucleotide
  Target: LAMA2; (+) strand; PAM type: NRG; PAM sequence: AGG
atggtaccaagaaatttgcc

SEQ ID NO: 127151 - DNA, 20 bp, Artificial Sequence
  Description of Artificial Sequence: Synthetic oligonucleotide
  Target: LAMA2; (+) strand; PAM type: NRG; PAM sequence: GGG
tggtaccaagaaatttgcca

SEQ ID NO: 127152 - DNA, 20 bp, Artificial Sequence
  Description of Artificial Sequence: Synthetic oligonucleotide
  Target: LAMA2; (+) strand; PAM type: NRG; PAM sequence: AAG
accaagaaatttgccaggga

SEQ ID NO: 127153 - DNA, 20 bp, Artificial Sequence
  Description of Artificial Sequence: Synthetic oligonucleotide
  Target: LAMA2; (+) strand; PAM type: NRG; PAM sequence: AAG
tctgtcaatattatcaaatt

SEQ ID NO: 127154 - DNA, 20 bp, Artificial Sequence
  Description of Artificial Sequence: Synthetic oligonucleotide
  Target: LAMA2; (+) strand; PAM type: NRG; PAM sequence: GAG
aaaaattcttttaaattatt

SEQ ID NO: 127155 - DNA, 20 bp, Artificial Sequence
  Description of Artificial Sequence: Synthetic oligonucleotide
  Target: LAMA2; (+) strand; PAM type: NRG; PAM sequence: GAG
aattattgagtgtttattat

SEQ ID NO: 127156 - DNA, 20 bp, Artificial Sequence
  Description of Artificial Sequence: Synthetic oligonucleotide
  Target: LAMA2; (+) strand; PAM type: NRG; PAM sequence: AAG
tatgagtatttatgatgtgc

SEQ ID NO: 127157 - DNA, 20 bp, Artificial Sequence
  Description of Artificial Sequence: Synthetic oligonucleotide
  Target: LAMA2; (+) strand; PAM type: NRG; PAM sequence: AGG
atgagtatttatgatgtgca

SEQ ID NO: 127158 - DNA, 20 bp, Artificial Sequence
  Description of Artificial Sequence: Synthetic oligonucleotide
  Target: LAMA2; (+) strand; PAM type: NRG; PAM sequence: TAG
atttatgatgtgcaaggtgc

SEQ ID NO: 127159 - DNA, 20 bp, Artificial Sequence
  Description of Artificial Sequence: Synthetic oligonucleotide
  Target: LAMA2; (+) strand; PAM type: NRG; PAM sequence: AGG
tttatgatgtgcaaggtgct

SEQ ID NO: 127160 - DNA, 20 bp, Artificial Sequence
  Description of Artificial Sequence: Synthetic oligonucleotide
  Target: LAMA2; (+) strand; PAM type: NRG; PAM sequence: TGG
caaggtgctaggctaattgc

SEQ ID NO: 127161 - DNA, 20 bp, Artificial Sequence
  Description of Artificial Sequence: Synthetic oligonucleotide
  Target: LAMA2; (+) strand; PAM type: NRG; PAM sequence: AAG
ctaattgctggttgtatata

SEQ ID NO: 127162 - DNA, 20 bp, Artificial Sequence
  Description of Artificial Sequence: Synthetic oligonucleotide
  Target: LAMA2; (+) strand; PAM type: NRG; PAM sequence: AGG
taattgctggttgtatataa

SEQ ID NO: 127163 - DNA, 20 bp, Artificial Sequence
  Description of Artificial Sequence: Synthetic oligonucleotide
  Target: LAMA2; (+) strand; PAM type: NRG; PAM sequence: TGG
tggttgtatataaaggtatt

SEQ ID NO: 127164 - DNA, 20 bp, Artificial Sequence
  Description of Artificial Sequence: Synthetic oligonucleotide
  Target: LAMA2; (+) strand; PAM type: NRG; PAM sequence: CAG
atataaaggtatttggactc

SEQ ID NO: 127165 - DNA, 20 bp, Artificial Sequence
  Description of Artificial Sequence: Synthetic oligonucleotide
  Target: LAMA2; (+) strand; PAM type: NRG; PAM sequence: TAG
actattctatttttattttg

SEQ ID NO: 127166 - DNA, 20 bp, Artificial Sequence
  Description of Artificial Sequence: Synthetic oligonucleotide
  Target: LAMA2; (+) strand; PAM type: NRG; PAM sequence: CAG
ttataaaccactaaatctta

SEQ ID NO: 127167 - DNA, 20 bp, Artificial Sequence
  Description of Artificial Sequence: Synthetic oligonucleotide
  Target: LAMA2; (+) strand; PAM type: NRG; PAM sequence: AGG
tataaaccactaaatcttac

SEQ ID NO: 127168 - DNA, 20 bp, Artificial Sequence
  Description of Artificial Sequence: Synthetic oligonucleotide
  Target: LAMA2; (+) strand; PAM type: NRG; PAM sequence: TAG
tgtcttcaatatacctacca

SEQ ID NO: 127169 - DNA, 20 bp, Artificial Sequence
  Description of Artificial Sequence: Synthetic oligonucleotide
  Target: LAMA2; (+) strand; PAM type: NRG; PAM sequence: AAG
atatacctaccatagactgt

SEQ ID NO: 127170 - DNA, 20 bp, Artificial Sequence
  Description of Artificial Sequence: Synthetic oligonucleotide
  Target: LAMA2; (+) strand; PAM type: NRG; PAM sequence: AGG
tatacctaccatagactgta

SEQ ID NO: 127171 - DNA, 20 bp, Artificial Sequence
  Description of Artificial Sequence: Synthetic oligonucleotide
  Target: LAMA2; (+) strand; PAM type: NRG; PAM sequence: GGG
atacctaccatagactgtaa

SEQ ID NO: 127172 - DNA, 20 bp, Artificial Sequence
  Description of Artificial Sequence: Synthetic oligonucleotide
  Target: LAMA2; (+) strand; PAM type: NRG; PAM sequence: GAG
agactgtaagggattatttc

SEQ ID NO: 127173 - DNA, 20 bp, Artificial Sequence
  Description of Artificial Sequence: Synthetic oligonucleotide
  Target: LAMA2; (+) strand; PAM type: NRG; PAM sequence: TAG
ctgtaagggattatttcgag

SEQ ID NO: 127174 - DNA, 20 bp, Artificial Sequence
  Description of Artificial Sequence: Synthetic oligonucleotide
  Target: LAMA2; (+) strand; PAM type: NRG; PAM sequence: CAG
aagggattatttcgagtagt

SEQ ID NO: 127175 - DNA, 20 bp, Artificial Sequence
  Description of Artificial Sequence: Synthetic oligonucleotide
  Target: LAMA2; (+) strand; PAM type: NRG; PAM sequence: TGG
gattatttcgagtagtcagt

SEQ ID NO: 127176 - DNA, 20 bp, Artificial Sequence
  Description of Artificial Sequence: Synthetic oligonucleotide
  Target: LAMA2; (+) strand; PAM type: NRG; PAM sequence: GGG
attatttcgagtagtcagtt

SEQ ID NO: 127177 - DNA, 20 bp, Artificial Sequence
  Description of Artificial Sequence: Synthetic oligonucleotide
  Target: LAMA2; (+) strand; PAM type: NRG; PAM sequence: GGG
ttatttcgagtagtcagttg

SEQ ID NO: 127178 - DNA, 20 bp, Artificial Sequence
  Description of Artificial Sequence: Synthetic oligonucleotide
  Target: LAMA2; (+) strand; PAM type: NRG; PAM sequence: TGG
tagtcagttggggtttgata

SEQ ID NO: 127179 - DNA, 20 bp, Artificial Sequence
  Description of Artificial Sequence: Synthetic oligonucleotide
  Target: LAMA2; (+) strand; PAM type: NRG; PAM sequence: AAG
tacatcattctatcaatttc

SEQ ID NO: 127180 - DNA, 20 bp, Artificial Sequence
  Description of Artificial Sequence: Synthetic oligonucleotide
  Target: LAMA2; (+) strand; PAM type: NRG; PAM sequence: CAG
tcttttttctttaatttttc

SEQ ID NO: 127181 - DNA, 20 bp, Artificial Sequence
  Description of Artificial Sequence: Synthetic oligonucleotide
  Target: LAMA2; (+) strand; PAM type: NRG; PAM sequence: AGG
cttttttctttaatttttcc

SEQ ID NO: 127182 - DNA, 20 bp, Artificial Sequence
  Description of Artificial Sequence: Synthetic oligonucleotide
  Target: LAMA2; (+) strand; PAM type: NRG; PAM sequence: TAG
ttaatttttccaggctgaaa

SEQ ID NO: 127183 - DNA, 20 bp, Artificial Sequence
  Description of Artificial Sequence: Synthetic oligonucleotide
  Target: LAMA2; (+) strand; PAM type: NRG; PAM sequence: AAG
gctgaaatagttatctttta

SEQ ID NO: 127184 - DNA, 20 bp, Artificial Sequence
  Description of Artificial Sequence: Synthetic oligonucleotide
  Target: LAMA2; (+) strand; PAM type: NRG; PAM sequence: CAG
atcttttaaagtctgttcta

SEQ ID NO: 127185 - DNA, 20 bp, Artificial Sequence
  Description of Artificial Sequence: Synthetic oligonucleotide
  Target: LAMA2; (+) strand; PAM type: NRG; PAM sequence: CAG
ttttaaagtctgttctacag

SEQ ID NO: 127186 - DNA, 20 bp, Artificial Sequence
  Description of Artificial Sequence: Synthetic oligonucleotide
  Target: LAMA2; (+) strand; PAM type: NRG; PAM sequence: CAG
ctacagcagctgctccaccc

SEQ ID NO: 127187 - DNA, 20 bp, Artificial Sequence
  Description of Artificial Sequence: Synthetic oligonucleotide
  Target: LAMA2; (+) strand; PAM type: NRG; PAM sequence: TAG
tccaccccagtcattgcctt

SEQ ID NO: 127188 - DNA, 20 bp, Artificial Sequence
  Description of Artificial Sequence: Synthetic oligonucleotide
  Target: LAMA2; (+) strand; PAM type: NRG; PAM sequence: TAG
tcattgcctttagctttctc

SEQ ID NO: 127189 - DNA, 20 bp, Artificial Sequence
  Description of Artificial Sequence: Synthetic oligonucleotide
  Target: LAMA2; (+) strand; PAM type: NRG; PAM sequence: TAG
agctttctctagattgccat

SEQ ID NO: 127190 - DNA, 20 bp, Artificial Sequence
  Description of Artificial Sequence: Synthetic oligonucleotide
  Target: LAMA2; (+) strand; PAM type: NRG; PAM sequence: AGG
gctttctctagattgccatt

SEQ ID NO: 127191 - DNA, 20 bp, Artificial Sequence
  Description of Artificial Sequence: Synthetic oligonucleotide
  Target: LAMA2; (+) strand; PAM type: NRG; PAM sequence: AAG
attgccattaggccttcttg

SEQ ID NO: 127192 - DNA, 20 bp, Artificial Sequence
  Description of Artificial Sequence: Synthetic oligonucleotide
  Target: LAMA2; (+) strand; PAM type: NRG; PAM sequence: CAG
tcttgaagtcgtgcttatta

SEQ ID NO: 127193 - DNA, 20 bp, Artificial Sequence
  Description of Artificial Sequence: Synthetic oligonucleotide
  Target: LAMA2; (+) strand; PAM type: NRG; PAM sequence: GAG
cgtgcttattacagatatgt

SEQ ID NO: 127194 - DNA, 20 bp, Artificial Sequence
  Description of Artificial Sequence: Synthetic oligonucleotide
  Target: LAMA2; (+) strand; PAM type: NRG; PAM sequence: AGG
gtgcttattacagatatgtg

SEQ ID NO: 127195 - DNA, 20 bp, Artificial Sequence
  Description of Artificial Sequence: Synthetic oligonucleotide
  Target: LAMA2; (+) strand; PAM type: NRG; PAM sequence: GAG
gcttattacagatatgtgag

SEQ ID NO: 127196 - DNA, 20 bp, Artificial Sequence
  Description of Artificial Sequence: Synthetic oligonucleotide
  Target: LAMA2; (+) strand; PAM type: NRG; PAM sequence: TAG
tatgtgaggagtgctttttt

SEQ ID NO: 127197 - DNA, 20 bp, Artificial Sequence
  Description of Artificial Sequence: Synthetic oligonucleotide
  Target: LAMA2; (+) strand; PAM type: NRG; PAM sequence: AGG
atgtgaggagtgcttttttt

SEQ ID NO: 127198 - DNA, 20 bp, Artificial Sequence
  Description of Artificial Sequence: Synthetic oligonucleotide
  Target: LAMA2; (+) strand; PAM type: NRG; PAM sequence: GGG
tgtgaggagtgcttttttta

SEQ ID NO: 127199 - DNA, 20 bp, Artificial Sequence
  Description of Artificial Sequence: Synthetic oligonucleotide
  Target: LAMA2; (+) strand; PAM type: NRG; PAM sequence: GGG
gtgaggagtgctttttttag

SEQ ID NO: 127200 - DNA, 20 bp, Artificial Sequence
  Description of Artificial Sequence: Synthetic oligonucleotide
  Target: LAMA2; (+) strand; PAM type: NRG; PAM sequence: GGG
tgaggagtgctttttttagg

SEQ ID NO: 127201 - DNA, 20 bp, Artificial Sequence
  Description of Artificial Sequence: Synthetic oligonucleotide
  Target: LAMA2; (+) strand; PAM type: NRG; PAM sequence: GGG
gaggagtgctttttttaggg

SEQ ID NO: 127202 - DNA, 20 bp, Artificial Sequence
  Description of Artificial Sequence: Synthetic oligonucleotide
  Target: LAMA2; (+) strand; PAM type: NRG; PAM sequence: GGG
aggagtgctttttttagggg

SEQ ID NO: 127203 - DNA, 20 bp, Artificial Sequence
  Description of Artificial Sequence: Synthetic oligonucleotide
  Target: LAMA2; (+) strand; PAM type: NRG; PAM sequence: AAG
agtgctttttttaggggggg

SEQ ID NO: 127204 - DNA, 20 bp, Artificial Sequence
  Description of Artificial Sequence: Synthetic oligonucleotide
  Target: LAMA2; (+) strand; PAM type: NRG; PAM sequence: AGG
gtgctttttttaggggggga

SEQ ID NO: 127205 - DNA, 20 bp, Artificial Sequence
  Description of Artificial Sequence: Synthetic oligonucleotide
  Target: LAMA2; (+) strand; PAM type: NRG; PAM sequence: GGG
tgctttttttagggggggaa

SEQ ID NO: 127206 - DNA, 20 bp, Artificial Sequence
  Description of Artificial Sequence: Synthetic oligonucleotide
  Target: LAMA2; (+) strand; PAM type: NRG; PAM sequence: GGG
gctttttttagggggggaag

SEQ ID NO: 127207 - DNA, 20 bp, Artificial Sequence
  Description of Artificial Sequence: Synthetic oligonucleotide
  Target: LAMA2; (+) strand; PAM type: NRG; PAM sequence: GAG
tttttttagggggggaaggg

SEQ ID NO: 127208 - DNA, 20 bp, Artificial Sequence
  Description of Artificial Sequence: Synthetic oligonucleotide
  Target: LAMA2; (+) strand; PAM type: NRG; PAM sequence: CAG
tagggggggaaggggagaaa

SEQ ID NO: 127209 - DNA, 20 bp, Artificial Sequence
  Description of Artificial Sequence: Synthetic oligonucleotide
  Target: LAMA2; (+) strand; PAM type: NRG; PAM sequence: TAG
gggaaggggagaaacagatg

SEQ ID NO: 127210 - DNA, 20 bp, Artificial Sequence
  Description of Artificial Sequence: Synthetic oligonucleotide
  Target: LAMA2; (+) strand; PAM type: NRG; PAM sequence: TGG
tttaacacccttttctatga

SEQ ID NO: 127211 - DNA, 20 bp, Artificial Sequence
  Description of Artificial Sequence: Synthetic oligonucleotide
  Target: LAMA2; (+) strand; PAM type: NRG; PAM sequence: CAG
acacccttttctatgatggc

SEQ ID NO: 127212 - DNA, 20 bp, Artificial Sequence
  Description of Artificial Sequence: Synthetic oligonucleotide
  Target: LAMA2; (+) strand; PAM type: NRG; PAM sequence: TGG
tgtttcactgatgatcttgt

SEQ ID NO: 127213 - DNA, 20 bp, Artificial Sequence
  Description of Artificial Sequence: Synthetic oligonucleotide
  Target: LAMA2; (+) strand; PAM type: NRG; PAM sequence: TGG
gatcttgttggctgtctccg

SEQ ID NO: 127214 - DNA, 20 bp, Artificial Sequence
  Description of Artificial Sequence: Synthetic oligonucleotide
  Target: LAMA2; (+) strand; PAM type: NRG; PAM sequence: TGG
ttgttggctgtctccgtggc

SEQ ID NO: 127215 - DNA, 20 bp, Artificial Sequence
  Description of Artificial Sequence: Synthetic oligonucleotide
  Target: LAMA2; (+) strand; PAM type: NRG; PAM sequence: GAG
ggctgtctccgtggctggat

SEQ ID NO: 127216 - DNA, 20 bp, Artificial Sequence
  Description of Artificial Sequence: Synthetic oligonucleotide
  Target: LAMA2; (+) strand; PAM type: NRG; PAM sequence: AAG
tggctggatgagttgtctcg

SEQ ID NO: 127217 - DNA, 20 bp, Artificial Sequence
  Description of Artificial Sequence: Synthetic oligonucleotide
  Target: LAMA2; (+) strand; PAM type: NRG; PAM sequence: GAG
gctggatgagttgtctcgaa

SEQ ID NO: 127218 - DNA, 20 bp, Artificial Sequence
  Description of Artificial Sequence: Synthetic oligonucleotide
  Target: LAMA2; (+) strand; PAM type: NRG; PAM sequence: CAG
ggatgagttgtctcgaagag

SEQ ID NO: 127219 - DNA, 20 bp, Artificial Sequence
  Description of Artificial Sequence: Synthetic oligonucleotide
  Target: LAMA2; (+) strand; PAM type: NRG; PAM sequence: CAG
ctcgaagagcagtttacact

SEQ ID NO: 127220 - DNA, 20 bp, Artificial Sequence
  Description of Artificial Sequence: Synthetic oligonucleotide
  Target: LAMA2; (+) strand; PAM type: NRG; PAM sequence: TAG
gaagagcagtttacactcag

SEQ ID NO: 127221 - DNA, 20 bp, Artificial Sequence
  Description of Artificial Sequence: Synthetic oligonucleotide
  Target: LAMA2; (+) strand; PAM type: NRG; PAM sequence: CAG
agtttacactcagtagtgac

SEQ ID NO: 127222 - DNA, 20 bp, Artificial Sequence
  Description of Artificial Sequence: Synthetic oligonucleotide
  Target: LAMA2; (+) strand; PAM type: NRG; PAM sequence: AGG
gtttacactcagtagtgacc

SEQ ID NO: 127223 - DNA, 20 bp, Artificial Sequence
  Description of Artificial Sequence: Synthetic oligonucleotide
  Target: LAMA2; (+) strand; PAM type: NRG; PAM sequence: GAG
tcagtagtgaccaggtcctt

SEQ ID NO: 127224 - DNA, 20 bp, Artificial Sequence
  Description of Artificial Sequence: Synthetic oligonucleotide
  Target: LAMA2; (+) strand; PAM type: NRG; PAM sequence: GAG
agtagtgaccaggtccttga

SEQ ID NO: 127225 - DNA, 20 bp, Artificial Sequence
  Description of Artificial Sequence: Synthetic oligonucleotide
  Target: LAMA2; (+) strand; PAM type: NRG; PAM sequence: TAG
accaggtccttgagagctct

SEQ ID NO: 127226 - DNA, 20 bp, Artificial Sequence
  Description of Artificial Sequence: Synthetic oligonucleotide
  Target: LAMA2; (+) strand; PAM type: NRG; PAM sequence: AAG
ctcttagctcatcatccttt

SEQ ID NO: 127227 - DNA, 20 bp, Artificial Sequence
  Description of Artificial Sequence: Synthetic oligonucleotide
  Target: LAMA2; (+) strand; PAM type: NRG; PAM sequence: TAG
agctcatcatcctttaagta

SEQ ID NO: 127228 - DNA, 20 bp, Artificial Sequence
  Description of Artificial Sequence: Synthetic oligonucleotide
  Target: LAMA2; (+) strand; PAM type: NRG; PAM sequence: TGG
atcatcctttaagtatagtt

SEQ ID NO: 127229 - DNA, 20 bp, Artificial Sequence
  Description of Artificial Sequence: Synthetic oligonucleotide
  Target: LAMA2; (+) strand; PAM type: NRG; PAM sequence: GAG
catcctttaagtatagtttg

SEQ ID NO: 127230 - DNA, 20 bp, Artificial Sequence
  Description of Artificial Sequence: Synthetic oligonucleotide
  Target: LAMA2; (+) strand; PAM type: NRG; PAM sequence: CAG
atagtttggagtattcttcc

SEQ ID NO: 127231 - DNA, 20 bp, Artificial Sequence
  Description of Artificial Sequence: Synthetic oligonucleotide
  Target: LAMA2; (+) strand; PAM type: NRG; PAM sequence: AGG
tagtttggagtattcttccc

SEQ ID NO: 127232 - DNA, 20 bp, Artificial Sequence
  Description of Artificial Sequence: Synthetic oligonucleotide
  Target: LAMA2; (+) strand; PAM type: NRG; PAM sequence: TAG
ttttttttgcctattgtatt

SEQ ID NO: 127233 - DNA, 20 bp, Artificial Sequence
  Description of Artificial Sequence: Synthetic oligonucleotide
  Target: LAMA2; (+) strand; PAM type: NRG; PAM sequence: GAG
ttttttgcctattgtattta

SEQ ID NO: 127234 - DNA, 20 bp, Artificial Sequence
  Description of Artificial Sequence: Synthetic oligonucleotide
  Target: LAMA2; (+) strand; PAM type: NRG; PAM sequence: AAG
tcactatgtatttgactatc

SEQ ID NO: 127235 - DNA, 20 bp, Artificial Sequence
  Description of Artificial Sequence: Synthetic oligonucleotide
  Target: LAMA2; (+) strand; PAM type: NRG; PAM sequence: AAG
ctatgtatttgactatcaag

SEQ ID NO: 127236 - DNA, 20 bp, Artificial Sequence
  Description of Artificial Sequence: Synthetic oligonucleotide
  Target: LAMA2; (+) strand; PAM type: NRG; PAM sequence: GAG
atgtatttgactatcaagaa

SEQ ID NO: 127237 - DNA, 20 bp, Artificial Sequence
  Description of Artificial Sequence: Synthetic oligonucleotide
  Target: LAMA2; (+) strand; PAM type: NRG; PAM sequence: AAG
agaagagttgtatcatctgc

SEQ ID NO: 127238 - DNA, 20 bp, Artificial Sequence
  Description of Artificial Sequence: Synthetic oligonucleotide
  Target: LAMA2; (+) strand; PAM type: NRG; PAM sequence: GAG
gttgtatcatctgcaagttt

SEQ ID NO: 127239 - DNA, 20 bp, Artificial Sequence
  Description of Artificial Sequence: Synthetic oligonucleotide
  Target: LAMA2; (+) strand; PAM type: NRG; PAM sequence: AGG
ttgtatcatctgcaagtttg

SEQ ID NO: 127240 - DNA, 20 bp, Artificial Sequence
  Description of Artificial Sequence: Synthetic oligonucleotide
  Target: LAMA2; (+) strand; PAM type: NRG; PAM sequence: TAG
gtttcacttgaaaatcctat

SEQ ID NO: 127241 - DNA, 20 bp, Artificial Sequence
  Description of Artificial Sequence: Synthetic oligonucleotide
  Target: LAMA2; (+) strand; PAM type: NRG; PAM sequence: CAG
gaaaatcctattagcccata

SEQ ID NO: 127242 - DNA, 20 bp, Artificial Sequence
  Description of Artificial Sequence: Synthetic oligonucleotide
  Target: LAMA2; (+) strand; PAM type: NRG; PAM sequence: AGG
aaaatcctattagcccatac

SEQ ID NO: 127243 - DNA, 20 bp, Artificial Sequence
  Description of Artificial Sequence: Synthetic oligonucleotide
  Target: LAMA2; (+) strand; PAM type: NRG; PAM sequence: GGG
aaatcctattagcccataca

SEQ ID NO: 127244 - DNA, 20 bp, Artificial Sequence
  Description of Artificial Sequence: Synthetic oligonucleotide
  Target: LAMA2; (+) strand; PAM type: NRG; PAM sequence: CAG
atacagggaataattcattc

SEQ ID NO: 127245 - DNA, 20 bp, Artificial Sequence
  Description of Artificial Sequence: Synthetic oligonucleotide
  Target: LAMA2; (+) strand; PAM type: NRG; PAM sequence: TAG
cagggaataattcattccag

SEQ ID NO: 127246 - DNA, 20 bp, Artificial Sequence
  Description of Artificial Sequence: Synthetic oligonucleotide
  Target: LAMA2; (+) strand; PAM type: NRG; PAM sequence: AGG
agggaataattcattccagt

SEQ ID NO: 127247 - DNA, 20 bp, Artificial Sequence
  Description of Artificial Sequence: Synthetic oligonucleotide
  Target: LAMA2; (+) strand; PAM type: NRG; PAM sequence: TAG
tcattccagtaggttcttaa

SEQ ID NO: 127248 - DNA, 20 bp, Artificial Sequence
  Description of Artificial Sequence: Synthetic oligonucleotide
  Target: LAMA2; (+) strand; PAM type: NRG; PAM sequence: AAG
aatccatttattgctcttta

SEQ ID NO: 127249 - DNA, 20 bp, Artificial Sequence
  Description of Artificial Sequence: Synthetic oligonucleotide
  Target: LAMA2; (+) strand; PAM type: NRG; PAM sequence: TGG
tgcatattcatattaaaatc

SEQ ID NO: 127250 - DNA, 20 bp, Artificial Sequence
  Description of Artificial Sequence: Synthetic oligonucleotide
  Target: LAMA2; (+) strand; PAM type: NRG; PAM sequence: TAG
attaaaatctggaaaattca

SEQ ID NO: 127251 - DNA, 20 bp, Artificial Sequence
  Description of Artificial Sequence: Synthetic oligonucleotide
  Target: LAMA2; (+) strand; PAM type: NRG; PAM sequence: AAG
aaaatctggaaaattcatag

SEQ ID NO: 127252 - DNA, 20 bp, Artificial Sequence
  Description of Artificial Sequence: Synthetic oligonucleotide
  Target: LAMA2; (+) strand; PAM type: NRG; PAM sequence: CAG
atctggaaaattcatagaag

SEQ ID NO: 127253 - DNA, 20 bp, Artificial Sequence
  Description of Artificial Sequence: Synthetic oligonucleotide
  Target: LAMA2; (+) strand; PAM type: NRG; PAM sequence: AAG
aaattcatagaagcagaaat

SEQ ID NO: 127254 - DNA, 20 bp, Artificial Sequence
  Description of Artificial Sequence: Synthetic oligonucleotide
  Target: LAMA2; (+) strand; PAM type: NRG; PAM sequence: AAG
aatgaatcaaaaacaatgtc

SEQ ID NO: 127255 - DNA, 20 bp, Artificial Sequence
  Description of Artificial Sequence: Synthetic oligonucleotide
  Target: LAMA2; (+) strand; PAM type: NRG; PAM sequence: TAG
gaatcaaaaacaatgtcaag

SEQ ID NO: 127256 - DNA, 20 bp, Artificial Sequence
  Description of Artificial Sequence: Synthetic oligonucleotide
  Target: LAMA2; (+) strand; PAM type: NRG; PAM sequence: TGG
ttacaattatttatgaattt

SEQ ID NO: 127257 - DNA, 20 bp, Artificial Sequence
  Description of Artificial Sequence: Synthetic oligonucleotide
  Target: LAMA2; (+) strand; PAM type: NRG; PAM sequence: TGG
ggttttaatttttcaacatt

SEQ ID NO: 127258 - DNA, 20 bp, Artificial Sequence
  Description of Artificial Sequence: Synthetic oligonucleotide
  Target: LAMA2; (+) strand; PAM type: NRG; PAM sequence: TGG
catttggtctacttgatgtg

SEQ ID NO: 127259 - DNA, 20 bp, Artificial Sequence
  Description of Artificial Sequence: Synthetic oligonucleotide
  Target: LAMA2; (+) strand; PAM type: NRG; PAM sequence: CAG
attgttctatgaaatccaaa

SEQ ID NO: 127260 - DNA, 20 bp, Artificial Sequence
  Description of Artificial Sequence: Synthetic oligonucleotide
  Target: LAMA2; (+) strand; PAM type: NRG; PAM sequence: AAG
atccaaacagtgttattgta

SEQ ID NO: 127261 - DNA, 20 bp, Artificial Sequence
  Description of Artificial Sequence: Synthetic oligonucleotide
  Target: LAMA2; (+) strand; PAM type: NRG; PAM sequence: TGG
cagtgttattgtaaagtctc

SEQ ID NO: 127262 - DNA, 20 bp, Artificial Sequence
  Description of Artificial Sequence: Synthetic oligonucleotide
  Target: LAMA2; (+) strand; PAM type: NRG; PAM sequence: GGG
agtgttattgtaaagtctct

SEQ ID NO: 127263 - DNA, 20 bp, Artificial Sequence
  Description of Artificial Sequence: Synthetic oligonucleotide
  Target: LAMA2; (+) strand; PAM type: NRG; PAM sequence: TAG
tgtaaagtctctgggcttct

SEQ ID NO: 127264 - DNA, 20 bp, Artificial Sequence
  Description of Artificial Sequence: Synthetic oligonucleotide
  Target: LAMA2; (+) strand; PAM type: NRG; PAM sequence: GAG
taaagtctctgggcttctta

SEQ ID NO: 127265 - DNA, 20 bp, Artificial Sequence
  Description of Artificial Sequence: Synthetic oligonucleotide
  Target: LAMA2; (+) strand; PAM type: NRG; PAM sequence: AAG
ctctgggcttcttagagcaa

SEQ ID NO: 127266 - DNA, 20 bp, Artificial Sequence
  Description of Artificial Sequence: Synthetic oligonucleotide
  Target: LAMA2; (+) strand; PAM type: NRG; PAM sequence: TAG
aatatatttttatctatttc

SEQ ID NO: 127267 - DNA, 20 bp, Artificial Sequence
  Description of Artificial Sequence: Synthetic oligonucleotide
  Target: LAMA2; (+) strand; PAM type: NRG; PAM sequence: AAG
ctatttctagatttatttta

SEQ ID NO: 127268 - DNA, 20 bp, Artificial Sequence
  Description of Artificial Sequence: Synthetic oligonucleotide
  Target: LAMA2; (+) strand; PAM type: NRG; PAM sequence: AGG
tatttctagatttattttaa

SEQ ID NO: 127269 - DNA, 20 bp, Artificial Sequence
  Description of Artificial Sequence: Synthetic oligonucleotide
  Target: LAMA2; (+) strand; PAM type: NRG; PAM sequence: CAG
ttctagatttattttaaagg

SEQ ID NO: 127270 - DNA, 20 bp, Artificial Sequence
  Description of Artificial Sequence: Synthetic oligonucleotide
  Target: LAMA2; (+) strand; PAM type: NRG; PAM sequence: CAG
aaggcagtaaaataatctaa

SEQ ID NO: 127271 - DNA, 20 bp, Artificial Sequence
  Description of Artificial Sequence: Synthetic oligonucleotide
  Target: LAMA2; (+) strand; PAM type: NRG; PAM sequence: AGG
aggcagtaaaataatctaac

SEQ ID NO: 127272 - DNA, 20 bp, Artificial Sequence
  Description of Artificial Sequence: Synthetic oligonucleotide
  Target: LAMA2; (+) strand; PAM type: NRG; PAM sequence: TGG
aaaataatctaacaggctcc

SEQ ID NO: 127273 - DNA, 20 bp, Artificial Sequence
  Description of Artificial Sequence: Synthetic oligonucleotide
  Target: LAMA2; (+) strand; PAM type: NRG; PAM sequence: GGG
aaataatctaacaggctcct

SEQ ID NO: 127274 - DNA, 20 bp, Artificial Sequence
  Description of Artificial Sequence: Synthetic oligonucleotide
  Target: LAMA2; (+) strand; PAM type: NRG; PAM sequence: TGG
aacaggctcctgggtaccca

SEQ ID NO: 127275 - DNA, 20 bp, Artificial Sequence
  Description of Artificial Sequence: Synthetic oligonucleotide
  Target: LAMA2; (+) strand; PAM type: NRG; PAM sequence: AAG
atggtgtttattatattatg

SEQ ID NO: 127276 - DNA, 20 bp, Artificial Sequence
  Description of Artificial Sequence: Synthetic oligonucleotide
  Target: LAMA2; (+) strand; PAM type: NRG; PAM sequence: CAG
gaaataaaatattactcata

SEQ ID NO: 127277 - DNA, 20 bp, Artificial Sequence
  Description of Artificial Sequence: Synthetic oligonucleotide
  Target: LAMA2; (+) strand; PAM type: NRG; PAM sequence: CAG
taaattcctttccctccctt

SEQ ID NO: 127278 - DNA, 20 bp, Artificial Sequence
  Description of Artificial Sequence: Synthetic oligonucleotide
  Target: LAMA2; (+) strand; PAM type: NRG; PAM sequence: GAG
aattcctttccctcccttca

SEQ ID NO: 127279 - DNA, 20 bp, Artificial Sequence
  Description of Artificial Sequence: Synthetic oligonucleotide
  Target: LAMA2; (+) strand; PAM type: NRG; PAM sequence: AGG
attcctttccctcccttcag

SEQ ID NO: 127280 - DNA, 20 bp, Artificial Sequence
  Description of Artificial Sequence: Synthetic oligonucleotide
  Target: LAMA2; (+) strand; PAM type: NRG; PAM sequence: GGG
ttcctttccctcccttcaga

SEQ ID NO: 127281 - DNA, 20 bp, Artificial Sequence
  Description of Artificial Sequence: Synthetic oligonucleotide
  Target: LAMA2; (+) strand; PAM type: NRG; PAM sequence: TAG
tgatcatgaatgatttcaac

SEQ ID NO: 127282 - DNA, 20 bp, Artificial Sequence
  Description of Artificial Sequence: Synthetic oligonucleotide
  Target: LAMA2; (+) strand; PAM type: NRG; PAM sequence: TAG
cctcatcatcatccttacaa

SEQ ID NO: 127283 - DNA, 20 bp, Artificial Sequence
  Description of Artificial Sequence: Synthetic oligonucleotide
  Target: LAMA2; (+) strand; PAM type: NRG; PAM sequence: AGG
ctcatcatcatccttacaat

SEQ ID NO: 127284 - DNA, 20 bp, Artificial Sequence
  Description of Artificial Sequence: Synthetic oligonucleotide
  Target: LAMA2; (+) strand; PAM type: NRG; PAM sequence: TGG
ttacaataggctttatcttt

SEQ ID NO: 127285 - DNA, 20 bp, Artificial Sequence
  Description of Artificial Sequence: Synthetic oligonucleotide
  Target: LAMA2; (+) strand; PAM type: NRG; PAM sequence: TGG
catataatattgatgtgctc

SEQ ID NO: 127286 - DNA, 20 bp, Artificial Sequence
  Description of Artificial Sequence: Synthetic oligonucleotide
  Target: LAMA2; (+) strand; PAM type: NRG; PAM sequence: CAG
tcatcacctgcctcttgcct

SEQ ID NO: 127287 - DNA, 20 bp, Artificial Sequence
  Description of Artificial Sequence: Synthetic oligonucleotide
  Target: LAMA2; (+) strand; PAM type: NRG; PAM sequence: AAG
cacctgcctcttgcctcagc

SEQ ID NO: 127288 - DNA, 20 bp, Artificial Sequence
  Description of Artificial Sequence: Synthetic oligonucleotide
  Target: LAMA2; (+) strand; PAM type: NRG; PAM sequence: TAG
cctcttgcctcagcaagctc

SEQ ID NO: 127289 - DNA, 20 bp, Artificial Sequence
  Description of Artificial Sequence: Synthetic oligonucleotide
  Target: LAMA2; (+) strand; PAM type: NRG; PAM sequence: AGG
ctcttgcctcagcaagctct

SEQ ID NO: 127290 - DNA, 20 bp, Artificial Sequence
  Description of Artificial Sequence: Synthetic oligonucleotide
  Target: LAMA2; (+) strand; PAM type: NRG; PAM sequence: AAG
aagctctaggttgtatttta

SEQ ID NO: 127291 - DNA, 20 bp, Artificial Sequence
  Description of Artificial Sequence: Synthetic oligonucleotide
  Target: LAMA2; (+) strand; PAM type: NRG; PAM sequence: AGG
agctctaggttgtattttaa

SEQ ID NO: 127292 - DNA, 20 bp, Artificial Sequence
  Description of Artificial Sequence: Synthetic oligonucleotide
  Target: LAMA2; (+) strand; PAM type: NRG; PAM sequence: GAG
ctctaggttgtattttaaag

SEQ ID NO: 127293 - DNA, 20 bp, Artificial Sequence
  Description of Artificial Sequence: Synthetic oligonucleotide
  Target: LAMA2; (+) strand; PAM type: NRG; PAM sequence: AAG
cactgaatttaattgtatct

SEQ ID NO: 127294 - DNA, 20 bp, Artificial Sequence
  Description of Artificial Sequence: Synthetic oligonucleotide
  Target: LAMA2; (+) strand; PAM type: NRG; PAM sequence: AAG
tatctaagtaatacctttcg

SEQ ID NO: 127295 - DNA, 20 bp, Artificial Sequence
  Description of Artificial Sequence: Synthetic oligonucleotide
  Target: LAMA2; (+) strand; PAM type: NRG; PAM sequence: GAG
tctaagtaatacctttcgaa

SEQ ID NO: 127296 - DNA, 20 bp, Artificial Sequence
  Description of Artificial Sequence: Synthetic oligonucleotide
  Target: LAMA2; (+) strand; PAM type: NRG; PAM sequence: CAG
tttcgaagagtcaaataata

SEQ ID NO: 127297 - DNA, 20 bp, Artificial Sequence
  Description of Artificial Sequence: Synthetic oligonucleotide
  Target: LAMA2; (+) strand; PAM type: NRG; PAM sequence: AAG
aagagtcaaataatacagaa

SEQ ID NO: 127298 - DNA, 20 bp, Artificial Sequence
  Description of Artificial Sequence: Synthetic oligonucleotide
  Target: LAMA2; (+) strand; PAM type: NRG; PAM sequence: AAG
acagaaaagctcataacaaa

SEQ ID NO: 127299 - DNA, 20 bp, Artificial Sequence
  Description of Artificial Sequence: Synthetic oligonucleotide
  Target: LAMA2; (+) strand; PAM type: NRG; PAM sequence: CAG
ttccatccctccttcactct

SEQ ID NO: 127300 - DNA, 20 bp, Artificial Sequence
  Description of Artificial Sequence: Synthetic oligonucleotide
  Target: LAMA2; (+) strand; PAM type: NRG; PAM sequence: GAG
ccatccctccttcactctca

SEQ ID NO: 127301 - DNA, 20 bp, Artificial Sequence
  Description of Artificial Sequence: Synthetic oligonucleotide
  Target: LAMA2; (+) strand; PAM type: NRG; PAM sequence: CAG
gagacatgactgatctatct

SEQ ID NO: 127302 - DNA, 20 bp, Artificial Sequence
  Description of Artificial Sequence: Synthetic oligonucleotide
  Target: LAMA2; (+) strand; PAM type: NRG; PAM sequence: TAG
tctatctcagctgtttcttc

SEQ ID NO: 127303 - DNA, 20 bp, Artificial Sequence
  Description of Artificial Sequence: Synthetic oligonucleotide
  Target: LAMA2; (+) strand; PAM type: NRG; PAM sequence: CGG
tttcttctagcatttacccc

SEQ ID NO: 127304 - DNA, 20 bp, Artificial Sequence
  Description of Artificial Sequence: Synthetic oligonucleotide
  Target: LAMA2; (+) strand; PAM type: NRG; PAM sequence: TAG
ataacttaatttaaacattt

SEQ ID NO: 127305 - DNA, 20 bp, Artificial Sequence
  Description of Artificial Sequence: Synthetic oligonucleotide
  Target: LAMA2; (+) strand; PAM type: NRG; PAM sequence: TAG
gacattatctcttcctttcc

SEQ ID NO: 127306 - DNA, 20 bp, Artificial Sequence
  Description of Artificial Sequence: Synthetic oligonucleotide
  Target: LAMA2; (+) strand; PAM type: NRG; PAM sequence: TGG
tatctcttcctttcctagta

SEQ ID NO: 127307 - DNA, 20 bp, Artificial Sequence
  Description of Artificial Sequence: Synthetic oligonucleotide
  Target: LAMA2; (+) strand; PAM type: NRG; PAM sequence: AAG
ctcttcctttcctagtatgg

SEQ ID NO: 127308 - DNA, 20 bp, Artificial Sequence
  Description of Artificial Sequence: Synthetic oligonucleotide
  Target: LAMA2; (+) strand; PAM type: NRG; PAM sequence: AAG
ctttcctagtatggaagaca

SEQ ID NO: 127309 - DNA, 20 bp, Artificial Sequence
  Description of Artificial Sequence: Synthetic oligonucleotide
  Target: LAMA2; (+) strand; PAM type: NRG; PAM sequence: GAG
tagtatggaagacaaagatt

SEQ ID NO: 127310 - DNA, 20 bp, Artificial Sequence
  Description of Artificial Sequence: Synthetic oligonucleotide
  Target: LAMA2; (+) strand; PAM type: NRG; PAM sequence: CAG
aaccatataaatattactca

SEQ ID NO: 127311 - DNA, 20 bp, Artificial Sequence
  Description of Artificial Sequence: Synthetic oligonucleotide
  Target: LAMA2; (+) strand; PAM type: NRG; PAM sequence: GAG
tataaatattactcacagct

SEQ ID NO: 127312 - DNA, 20 bp, Artificial Sequence
  Description of Artificial Sequence: Synthetic oligonucleotide
  Target: LAMA2; (+) strand; PAM type: NRG; PAM sequence: TGG
ttactcacagctgagctctg

SEQ ID NO: 127313 - DNA, 20 bp, Artificial Sequence
  Description of Artificial Sequence: Synthetic oligonucleotide
  Target: LAMA2; (+) strand; PAM type: NRG; PAM sequence: TGG
cttttttgtacatcgttgcc

SEQ ID NO: 127314 - DNA, 20 bp, Artificial Sequence
  Description of Artificial Sequence: Synthetic oligonucleotide
  Target: LAMA2; (+) strand; PAM type: NRG; PAM sequence: TAG
attgctttgttttgaaaaat

SEQ ID NO: 127315 - DNA, 20 bp, Artificial Sequence
  Description of Artificial Sequence: Synthetic oligonucleotide
  Target: LAMA2; (+) strand; PAM type: NRG; PAM sequence: TAG
ttgttttgaaaaattagtct

SEQ ID NO: 127316 - DNA, 20 bp, Artificial Sequence
  Description of Artificial Sequence: Synthetic oligonucleotide
  Target: LAMA2; (+) strand; PAM type: NRG; PAM sequence: CAG
ttttaaactacactttctga

SEQ ID NO: 127317 - DNA, 20 bp, Artificial Sequence
  Description of Artificial Sequence: Synthetic oligonucleotide
  Target: LAMA2; (+) strand; PAM type: NRG; PAM sequence: CAG
cagaattattaaactccctt

SEQ ID NO: 127318 - DNA, 20 bp, Artificial Sequence
  Description of Artificial Sequence: Synthetic oligonucleotide
  Target: LAMA2; (+) strand; PAM type: NRG; PAM sequence: TGG
tcagtatgtttcatcacatt

SEQ ID NO: 127319 - DNA, 20 bp, Artificial Sequence
  Description of Artificial Sequence: Synthetic oligonucleotide
  Target: LAMA2; (+) strand; PAM type: NRG; PAM sequence: AAG
attatttgtgtttcattgtt

SEQ ID NO: 127320 - DNA, 20 bp, Artificial Sequence
  Description of Artificial Sequence: Synthetic oligonucleotide
  Target: LAMA2; (+) strand; PAM type: NRG; PAM sequence: TAG
ttttctctcccacatttttg

SEQ ID NO: 127321 - DNA, 20 bp, Artificial Sequence
  Description of Artificial Sequence: Synthetic oligonucleotide
  Target: LAMA2; (+) strand; PAM type: NRG; PAM sequence: TAG
ccacatttttgtagcttcct

SEQ ID NO: 127322 - DNA, 20 bp, Artificial Sequence
  Description of Artificial Sequence: Synthetic oligonucleotide
  Target: LAMA2; (+) strand; PAM type: NRG; PAM sequence: AAG
atttttgtagcttccttaga

SEQ ID NO: 127323 - DNA, 20 bp, Artificial Sequence
  Description of Artificial Sequence: Synthetic oligonucleotide
  Target: LAMA2; (+) strand; PAM type: NRG; PAM sequence: GAG
ttttgtagcttccttagaaa

SEQ ID NO: 127324 - DNA, 20 bp, Artificial Sequence
  Description of Artificial Sequence: Synthetic oligonucleotide
  Target: LAMA2; (+) strand; PAM type: NRG; PAM sequence: AAG
tagcttccttagaaagagtg

SEQ ID NO: 127325 - DNA, 20 bp, Artificial Sequence
  Description of Artificial Sequence: Synthetic oligonucleotide
  Target: LAMA2; (+) strand; PAM type: NRG; PAM sequence: AAG
tccttagaaagagtgaagaa

SEQ ID NO: 127326 - DNA, 20 bp, Artificial Sequence
  Description of Artificial Sequence: Synthetic oligonucleotide
  Target: LAMA2; (+) strand; PAM type: NRG; PAM sequence: AGG
ccttagaaagagtgaagaaa

SEQ ID NO: 127327 - DNA, 20 bp, Artificial Sequence
  Description of Artificial Sequence: Synthetic oligonucleotide
  Target: LAMA2; (+) strand; PAM type: NRG; PAM sequence: AAG
tttaataaattatgtgtctg

SEQ ID NO: 127328 - DNA, 20 bp, Artificial Sequence
  Description of Artificial Sequence: Synthetic oligonucleotide
  Target: LAMA2; (+) strand; PAM type: NRG; PAM sequence: TAG
gccttaattcccccctcttt

SEQ ID NO: 127329 - DNA, 20 bp, Artificial Sequence
  Description of Artificial Sequence: Synthetic oligonucleotide
  Target: LAMA2; (+) strand; PAM type: NRG; PAM sequence: CAG
ttcccccctcttttagatat

SEQ ID NO: 127330 - DNA, 20 bp, Artificial Sequence
  Description of Artificial Sequence: Synthetic oligonucleotide
  Target: LAMA2; (+) strand; PAM type: NRG; PAM sequence: TGG
cccctcttttagatatcagc

SEQ ID NO: 127331 - DNA, 20 bp, Artificial Sequence
  Description of Artificial Sequence: Synthetic oligonucleotide
  Target: LAMA2; (+) strand; PAM type: NRG; PAM sequence: TAG
ttttagatatcagctggctc

SEQ ID NO: 127332 - DNA, 20 bp, Artificial Sequence
  Description of Artificial Sequence: Synthetic oligonucleotide
  Target: LAMA2; (+) strand; PAM type: NRG; PAM sequence: TAG
atcagctggctctagaattc

SEQ ID NO: 127333 - DNA, 20 bp, Artificial Sequence
  Description of Artificial Sequence: Synthetic oligonucleotide
  Target: LAMA2; (+) strand; PAM type: NRG; PAM sequence: AGG
tcagctggctctagaattct

SEQ ID NO: 127334 - DNA, 20 bp, Artificial Sequence
  Description of Artificial Sequence: Synthetic oligonucleotide
  Target: LAMA2; (+) strand; PAM type: NRG; PAM sequence: TAG
gctggctctagaattctagg

SEQ ID NO: 127335 - DNA, 20 bp, Artificial Sequence
  Description of Artificial Sequence: Synthetic oligonucleotide
  Target: LAMA2; (+) strand; PAM type: NRG; PAM sequence: AAG
gctctagaattctaggtaga

SEQ ID NO: 127336 - DNA, 20 bp, Artificial Sequence
  Description of Artificial Sequence: Synthetic oligonucleotide
  Target: LAMA2; (+) strand; PAM type: NRG; PAM sequence: CAG
aggtagaaagcatctcttct

SEQ ID NO: 127337 - DNA, 20 bp, Artificial Sequence
  Description of Artificial Sequence: Synthetic oligonucleotide
  Target: LAMA2; (+) strand; PAM type: NRG; PAM sequence: AAG
catctcttctcagaattttg

SEQ ID NO: 127338 - DNA, 20 bp, Artificial Sequence
  Description of Artificial Sequence: Synthetic oligonucleotide
  Target: LAMA2; (+) strand; PAM type: NRG; PAM sequence: TGG
attttgaagatattgcttca

SEQ ID NO: 127339 - DNA, 20 bp, Artificial Sequence
  Description of Artificial Sequence: Synthetic oligonucleotide
  Target: LAMA2; (+) strand; PAM type: NRG; PAM sequence: CAG
tcaccttactctatgaaccc

SEQ ID NO: 127340 - DNA, 20 bp, Artificial Sequence
  Description of Artificial Sequence: Synthetic oligonucleotide
  Target: LAMA2; (+) strand; PAM type: NRG; PAM sequence: AGG
caccttactctatgaacccc

SEQ ID NO: 127341 - DNA, 20 bp, Artificial Sequence
  Description of Artificial Sequence: Synthetic oligonucleotide
  Target: LAMA2; (+) strand; PAM type: NRG; PAM sequence: GGG
accttactctatgaacccca

SEQ ID NO: 127342 - DNA, 20 bp, Artificial Sequence
  Description of Artificial Sequence: Synthetic oligonucleotide
  Target: LAMA2; (+) strand; PAM type: NRG; PAM sequence: GAG
ccagggtctttacatccctt

SEQ ID NO: 127343 - DNA, 20 bp, Artificial Sequence
  Description of Artificial Sequence: Synthetic oligonucleotide
  Target: LAMA2; (+) strand; PAM type: NRG; PAM sequence: AGG
cagggtctttacatcccttg

SEQ ID NO: 127344 - DNA, 20 bp, Artificial Sequence
  Description of Artificial Sequence: Synthetic oligonucleotide
  Target: LAMA2; (+) strand; PAM type: NRG; PAM sequence: AAG
tttacatcccttgaggactg

SEQ ID NO: 127345 - DNA, 20 bp, Artificial Sequence
  Description of Artificial Sequence: Synthetic oligonucleotide
  Target: LAMA2; (+) strand; PAM type: NRG; PAM sequence: CAG
actgaagtgtgtttccactt

SEQ ID NO: 127346 - DNA, 20 bp, Artificial Sequence
  Description of Artificial Sequence: Synthetic oligonucleotide
  Target: LAMA2; (+) strand; PAM type: NRG; PAM sequence: AGG
ctgaagtgtgtttccacttc

SEQ ID NO: 127347 - DNA, 20 bp, Artificial Sequence
  Description of Artificial Sequence: Synthetic oligonucleotide
  Target: LAMA2; (+) strand; PAM type: NRG; PAM sequence: TGG
ccacttcaggtgctttgcac

SEQ ID NO: 127348 - DNA, 20 bp, Artificial Sequence
  Description of Artificial Sequence: Synthetic oligonucleotide
  Target: LAMA2; (+) strand; PAM type: NRG; PAM sequence: TGG
ttcaggtgctttgcactggc

SEQ ID NO: 127349 - DNA, 20 bp, Artificial Sequence
  Description of Artificial Sequence: Synthetic oligonucleotide
  Target: LAMA2; (+) strand; PAM type: NRG; PAM sequence: TGG
gcactggctggtcttctatc

SEQ ID NO: 127350 - DNA, 20 bp, Artificial Sequence
  Description of Artificial Sequence: Synthetic oligonucleotide
  Target: LAMA2; (+) strand; PAM type: NRG; PAM sequence: AAG
tatctggaatgcttctcccc

SEQ ID NO: 127351 - DNA, 20 bp, Artificial Sequence
  Description of Artificial Sequence: Synthetic oligonucleotide
  Target: LAMA2; (+) strand; PAM type: NRG; PAM sequence: TGG
cttctccccaagatatcttc

SEQ ID NO: 127352 - DNA, 20 bp, Artificial Sequence
  Description of Artificial Sequence: Synthetic oligonucleotide
  Target: LAMA2; (+) strand; PAM type: NRG; PAM sequence: TAG
ggctaactctcttttcttct

SEQ ID NO: 127353 - DNA, 20 bp, Artificial Sequence
  Description of Artificial Sequence: Synthetic oligonucleotide
  Target: LAMA2; (+) strand; PAM type: NRG; PAM sequence: AAG
tttcttcttagaaaactgct

SEQ ID NO: 127354 - DNA, 20 bp, Artificial Sequence
  Description of Artificial Sequence: Synthetic oligonucleotide
  Target: LAMA2; (+) strand; PAM type: NRG; PAM sequence: GAG
taagatttaccattcccaat

SEQ ID NO: 127355 - DNA, 20 bp, Artificial Sequence
  Description of Artificial Sequence: Synthetic oligonucleotide
  Target: LAMA2; (+) strand; PAM type: NRG; PAM sequence: TGG
cccctgcccactgccattcc

SEQ ID NO: 127356 - DNA, 20 bp, Artificial Sequence
  Description of Artificial Sequence: Synthetic oligonucleotide
  Target: LAMA2; (+) strand; PAM type: NRG; PAM sequence: AAG
cattcctggtctccctaaac

SEQ ID NO: 127357 - DNA, 20 bp, Artificial Sequence
  Description of Artificial Sequence: Synthetic oligonucleotide
  Target: LAMA2; (+) strand; PAM type: NRG; PAM sequence: TAG
tggtctccctaaacaagtct

SEQ ID NO: 127358 - DNA, 20 bp, Artificial Sequence
  Description of Artificial Sequence: Synthetic oligonucleotide
  Target: LAMA2; (+) strand; PAM type: NRG; PAM sequence: TAG
tcatgttgaaatacactata

SEQ ID NO: 127359 - DNA, 20 bp, Artificial Sequence
  Description of Artificial Sequence: Synthetic oligonucleotide
  Target: LAMA2; (+) strand; PAM type: NRG; PAM sequence: TAG
tatatagtttacttatgtat

SEQ ID NO: 127360 - DNA, 20 bp, Artificial Sequence
  Description of Artificial Sequence: Synthetic oligonucleotide
  Target: LAMA2; (+) strand; PAM type: NRG; PAM sequence: AGG
atatagtttacttatgtatt

SEQ ID NO: 127361 - DNA, 20 bp, Artificial Sequence
  Description of Artificial Sequence: Synthetic oligonucleotide
  Target: LAMA2; (+) strand; PAM type: NRG; PAM sequence: AAG
tgcctctctctgtactcccc

SEQ ID NO: 127362 - DNA, 20 bp, Artificial Sequence
  Description of Artificial Sequence: Synthetic oligonucleotide
  Target: LAMA2; (+) strand; PAM type: NRG; PAM sequence: TAG
tcttgacccttgaaaaaatg

SEQ ID NO: 127363 - DNA, 20 bp, Artificial Sequence
  Description of Artificial Sequence: Synthetic oligonucleotide
  Target: LAMA2; (+) strand; PAM type: NRG; PAM sequence: AAG
ataaaaaattaatatattca

SEQ ID NO: 127364 - DNA, 20 bp, Artificial Sequence
  Description of Artificial Sequence: Synthetic oligonucleotide
  Target: LAMA2; (+) strand; PAM type: NRG; PAM sequence: TAG
attaatatattcaaagcaac

SEQ ID NO: 127365 - DNA, 20 bp, Artificial Sequence
  Description of Artificial Sequence: Synthetic oligonucleotide
  Target: LAMA2; (+) strand; PAM type: NRG; PAM sequence: TAG
tagatgtatgcctaaacacc

SEQ ID NO: 127366 - DNA, 20 bp, Artificial Sequence
  Description of Artificial Sequence: Synthetic oligonucleotide
  Target: LAMA2; (+) strand; PAM type: NRG; PAM sequence: AAG
gtatgcctaaacacctagaa

SEQ ID NO: 127367 - DNA, 20 bp, Artificial Sequence
  Description of Artificial Sequence: Synthetic oligonucleotide
  Target: LAMA2; (+) strand; PAM type: NRG; PAM sequence: TGG
taaacacctagaaaagtgcc

SEQ ID NO: 127368 - DNA, 20 bp, Artificial Sequence
  Description of Artificial Sequence: Synthetic oligonucleotide
  Target: LAMA2; (+) strand; PAM type: NRG; PAM sequence: TAG
gaaaagtgcctggcgcatgt

SEQ ID NO: 127369 - DNA, 20 bp, Artificial Sequence
  Description of Artificial Sequence: Synthetic oligonucleotide
  Target: LAMA2; (+) strand; PAM type: NRG; PAM sequence: TAG
gcctggcgcatgttagaaat

SEQ ID NO: 127370 - DNA, 20 bp, Artificial Sequence
  Description of Artificial Sequence: Synthetic oligonucleotide
  Target: LAMA2; (+) strand; PAM type: NRG; PAM sequence: AAG
ggcgcatgttagaaattaga

SEQ ID NO: 127371 - DNA, 20 bp, Artificial Sequence
  Description of Artificial Sequence: Synthetic oligonucleotide
  Target: LAMA2; (+) strand; PAM type: NRG; PAM sequence: CAG
tagaaagtatttcttatgaa

SEQ ID NO: 127372 - DNA, 20 bp, Artificial Sequence
  Description of Artificial Sequence: Synthetic oligonucleotide
  Target: LAMA2; (+) strand; PAM type: NRG; PAM sequence: AAG
ttttatgatttttcacattg

SEQ ID NO: 127373 - DNA, 20 bp, Artificial Sequence
  Description of Artificial Sequence: Synthetic oligonucleotide
  Target: LAMA2; (+) strand; PAM type: NRG; PAM sequence: AAG
gatttttcacattgaagttg

SEQ ID NO: 127374 - DNA, 20 bp, Artificial Sequence
  Description of Artificial Sequence: Synthetic oligonucleotide
  Target: LAMA2; (+) strand; PAM type: NRG; PAM sequence: GAG
tttttcacattgaagttgaa

SEQ ID NO: 127375 - DNA, 20 bp, Artificial Sequence
  Description of Artificial Sequence: Synthetic oligonucleotide
  Target: LAMA2; (+) strand; PAM type: NRG; PAM sequence: CAG
ccctatcttatatatgtgat

SEQ ID NO: 127376 - DNA, 20 bp, Artificial Sequence
  Description of Artificial Sequence: Synthetic oligonucleotide
  Target: LAMA2; (+) strand; PAM type: NRG; PAM sequence: TAG
tttttgcctctgtaaacttt

SEQ ID NO: 127377 - DNA, 20 bp, Artificial Sequence
  Description of Artificial Sequence: Synthetic oligonucleotide
  Target: LAMA2; (+) strand; PAM type: NRG; PAM sequence: AGG
ttttgcctctgtaaactttt

SEQ ID NO: 127378 - DNA, 20 bp, Artificial Sequence
  Description of Artificial Sequence: Synthetic oligonucleotide
  Target: LAMA2; (+) strand; PAM type: NRG; PAM sequence: TAG
tcttgaccccaaatgttctg

SEQ ID NO: 127379 - DNA, 20 bp, Artificial Sequence
  Description of Artificial Sequence: Synthetic oligonucleotide
  Target: LAMA2; (+) strand; PAM type: NRG; PAM sequence: CGG
gtgctatgaattttttgacc

SEQ ID NO: 127380 - DNA, 20 bp, Artificial Sequence
  Description of Artificial Sequence: Synthetic oligonucleotide
  Target: LAMA2; (+) strand; PAM type: NRG; PAM sequence: GGG
tgctatgaattttttgaccc

SEQ ID NO: 127381 - DNA, 20 bp, Artificial Sequence
  Description of Artificial Sequence: Synthetic oligonucleotide
  Target: LAMA2; (+) strand; PAM type: NRG; PAM sequence: AAG
gaaattcatacacctaactt

SEQ ID NO: 127382 - DNA, 20 bp, Artificial Sequence
  Description of Artificial Sequence: Synthetic oligonucleotide
  Target: LAMA2; (+) strand; PAM type: NRG; PAM sequence: AGG
aaattcatacacctaactta

SEQ ID NO: 127383 - DNA, 20 bp, Artificial Sequence
  Description of Artificial Sequence: Synthetic oligonucleotide
  Target: LAMA2; (+) strand; PAM type: NRG; PAM sequence: TGG
aacaatgtgttatttatcta

SEQ ID NO: 127384 - DNA, 20 bp, Artificial Sequence
  Description of Artificial Sequence: Synthetic oligonucleotide
  Target: LAMA2; (+) strand; PAM type: NRG; PAM sequence: TAG
tctatggaactcttctttgt

SEQ ID NO: 127385 - DNA, 20 bp, Artificial Sequence
  Description of Artificial Sequence: Synthetic oligonucleotide
  Target: LAMA2; (+) strand; PAM type: NRG; PAM sequence: TGG
ttgttagatattgaatttca

SEQ ID NO: 127386 - DNA, 20 bp, Artificial Sequence
  Description of Artificial Sequence: Synthetic oligonucleotide
  Target: LAMA2; (+) strand; PAM type: NRG; PAM sequence: TAG
aatttcatggattaatcccc

SEQ ID NO: 127387 - DNA, 20 bp, Artificial Sequence
  Description of Artificial Sequence: Synthetic oligonucleotide
  Target: LAMA2; (+) strand; PAM type: NRG; PAM sequence: TGG
atcccctagctttttgtctt

SEQ ID NO: 127388 - DNA, 20 bp, Artificial Sequence
  Description of Artificial Sequence: Synthetic oligonucleotide
  Target: LAMA2; (+) strand; PAM type: NRG; PAM sequence: GAG
ttttttcctttttttttttt

SEQ ID NO: 127389 - DNA, 20 bp, Artificial Sequence
  Description of Artificial Sequence: Synthetic oligonucleotide
  Target: LAMA2; (+) strand; PAM type: NRG; PAM sequence: AAG
ccttttttttttttgagaca

SEQ ID NO: 127390 - DNA, 20 bp, Artificial Sequence
  Description of Artificial Sequence: Synthetic oligonucleotide
  Target: LAMA2; (+) strand; PAM type: NRG; PAM sequence: CAG
aaagtctcgctcttgtcccc

SEQ ID NO: 127391 - DNA, 20 bp, Artificial Sequence
  Description of Artificial Sequence: Synthetic oligonucleotide
  Target: LAMA2; (+) strand; PAM type: NRG; PAM sequence: AGG
aagtctcgctcttgtccccc

SEQ ID NO: 127392 - DNA, 20 bp, Artificial Sequence
  Description of Artificial Sequence: Synthetic oligonucleotide
  Target: LAMA2; (+) strand; PAM type: NRG; PAM sequence: TGG
ctcgctcttgtcccccaggc

SEQ ID NO: 127393 - DNA, 20 bp, Artificial Sequence
  Description of Artificial Sequence: Synthetic oligonucleotide
  Target: LAMA2; (+) strand; PAM type: NRG; PAM sequence: GAG
cgctcttgtcccccaggctg

SEQ ID NO: 127394 - DNA, 20 bp, Artificial Sequence
  Description of Artificial Sequence: Synthetic oligonucleotide
  Target: LAMA2; (+) strand; PAM type: NRG; PAM sequence: TGG
tcccccaggctggagtgcaa

SEQ ID NO: 127395 - DNA, 20 bp, Artificial Sequence
  Description of Artificial Sequence: Synthetic oligonucleotide
  Target: LAMA2; (+) strand; PAM type: NRG; PAM sequence: TGG
ggagtgcaatggcatgatct

SEQ ID NO: 127396 - DNA, 20 bp, Artificial Sequence
  Description of Artificial Sequence: Synthetic oligonucleotide
  Target: LAMA2; (+) strand; PAM type: NRG; PAM sequence: CAG
ggcatgatcttggctcactg

SEQ ID NO: 127397 - DNA, 20 bp, Artificial Sequence
  Description of Artificial Sequence: Synthetic oligonucleotide
  Target: LAMA2; (+) strand; PAM type: NRG; PAM sequence: CAG
tcactgcagcctctgcctcc

SEQ ID NO: 127398 - DNA, 20 bp, Artificial Sequence
  Description of Artificial Sequence: Synthetic oligonucleotide
  Target: LAMA2; (+) strand; PAM type: NRG; PAM sequence: AGG
cactgcagcctctgcctccc

SEQ ID NO: 127399 - DNA, 20 bp, Artificial Sequence
  Description of Artificial Sequence: Synthetic oligonucleotide
  Target: LAMA2; (+) strand; PAM type: NRG; PAM sequence: CAG
agcctctgcctcccaggttc

SEQ ID NO: 127400 - DNA, 20 bp, Artificial Sequence
  Description of Artificial Sequence: Synthetic oligonucleotide
  Target: LAMA2; (+) strand; PAM type: NRG; PAM sequence: CGG
cccaggttccagcgattctc

SEQ ID NO: 127401 - DNA, 20 bp, Artificial Sequence
  Description of Artificial Sequence: Synthetic oligonucleotide
  Target: LAMA2; (+) strand; PAM type: NRG; PAM sequence: TGG
ttccagcgattctccggcct

SEQ ID NO: 127402 - DNA, 20 bp, Artificial Sequence
  Description of Artificial Sequence: Synthetic oligonucleotide
  Target: LAMA2; (+) strand; PAM type: NRG; PAM sequence: GAG
ccgcccccgccgacccccat

SEQ ID NO: 127403 - DNA, 20 bp, Artificial Sequence
  Description of Artificial Sequence: Synthetic oligonucleotide
  Target: LAMA2; (+) strand; PAM type: NRG; PAM sequence: TAG
cccccgccgacccccatgag

SEQ ID NO: 127404 - DNA, 20 bp, Artificial Sequence
  Description of Artificial Sequence: Synthetic oligonucleotide
  Target: LAMA2; (+) strand; PAM type: NRG; PAM sequence: TGG
cgccgacccccatgagtagc

SEQ ID NO: 127405 - DNA, 20 bp, Artificial Sequence
  Description of Artificial Sequence: Synthetic oligonucleotide
  Target: LAMA2; (+) strand; PAM type: NRG; PAM sequence: GGG
gccgacccccatgagtagct

SEQ ID NO: 127406 - DNA, 20 bp, Artificial Sequence
  Description of Artificial Sequence: Synthetic oligonucleotide
  Target: LAMA2; (+) strand; PAM type: NRG; PAM sequence: CAG
cccatgagtagctgggattt

SEQ ID NO: 127407 - DNA, 20 bp, Artificial Sequence
  Description of Artificial Sequence: Synthetic oligonucleotide
  Target: LAMA2; (+) strand; PAM type: NRG; PAM sequence: AGG
ccatgagtagctgggatttc

SEQ ID NO: 127408 - DNA, 20 bp, Artificial Sequence
  Description of Artificial Sequence: Synthetic oligonucleotide
  Target: LAMA2; (+) strand; PAM type: NRG; PAM sequence: CGG
caggtgcctgccaccaaacc

SEQ ID NO: 127409 - DNA, 20 bp, Artificial Sequence
  Description of Artificial Sequence: Synthetic oligonucleotide
  Target: LAMA2; (+) strand; PAM type: NRG; PAM sequence: TAG
ccggctaatttttgtatttt

SEQ ID NO: 127410 - DNA, 20 bp, Artificial Sequence
  Description of Artificial Sequence: Synthetic oligonucleotide
  Target: LAMA2; (+) strand; PAM type: NRG; PAM sequence: TAG
gctaatttttgtatttttag

SEQ ID NO: 127411 - DNA, 20 bp, Artificial Sequence
  Description of Artificial Sequence: Synthetic oligonucleotide
  Target: LAMA2; (+) strand; PAM type: NRG; PAM sequence: GAG
taatttttgtatttttagta

SEQ ID NO: 127412 - DNA, 20 bp, Artificial Sequence
  Description of Artificial Sequence: Synthetic oligonucleotide
  Target: LAMA2; (+) strand; PAM type: NRG; PAM sequence: TGG
ttttgtatttttagtagaga

SEQ ID NO: 127413 - DNA, 20 bp, Artificial Sequence
  Description of Artificial Sequence: Synthetic oligonucleotide
  Target: LAMA2; (+) strand; PAM type: NRG; PAM sequence: GGG
tttgtatttttagtagagat

SEQ ID NO: 127414 - DNA, 20 bp, Artificial Sequence
  Description of Artificial Sequence: Synthetic oligonucleotide
  Target: LAMA2; (+) strand; PAM type: NRG; PAM sequence: GGG
ttgtatttttagtagagatg

SEQ ID NO: 127415 - DNA, 20 bp, Artificial Sequence
  Description of Artificial Sequence: Synthetic oligonucleotide
  Target: LAMA2; (+) strand; PAM type: NRG; PAM sequence: TGG
agagatggggtttcaccatg

SEQ ID NO: 127416 - DNA, 20 bp, Artificial Sequence
  Description of Artificial Sequence: Synthetic oligonucleotide
  Target: LAMA2; (+) strand; PAM type: NRG; PAM sequence: GGG
gagatggggtttcaccatgt

SEQ ID NO: 127417 - DNA, 20 bp, Artificial Sequence
  Description of Artificial Sequence: Synthetic oligonucleotide
  Target: LAMA2; (+) strand; PAM type: NRG; PAM sequence: CAG
tggggtttcaccatgtgggc

SEQ ID NO: 127418 - DNA, 20 bp, Artificial Sequence
  Description of Artificial Sequence: Synthetic oligonucleotide
  Target: LAMA2; (+) strand; PAM type: NRG; PAM sequence: AGG
ggggtttcaccatgtgggcc

SEQ ID NO: 127419 - DNA, 20 bp, Artificial Sequence
  Description of Artificial Sequence: Synthetic oligonucleotide
  Target: LAMA2; (+) strand; PAM type: NRG; PAM sequence: TGG
tttcaccatgtgggccaggc

SEQ ID NO: 127420 - DNA, 20 bp, Artificial Sequence
  Description of Artificial Sequence: Synthetic oligonucleotide
  Target: LAMA2; (+) strand; PAM type: NRG; PAM sequence: TGG
ccatgtgggccaggctggtc

SEQ ID NO: 127421 - DNA, 20 bp, Artificial Sequence
  Description of Artificial Sequence: Synthetic oligonucleotide
  Target: LAMA2; (+) strand; PAM type: NRG; PAM sequence: CGG
tggtctggaacgcctgacct

SEQ ID NO: 127422 - DNA, 20 bp, Artificial Sequence
  Description of Artificial Sequence: Synthetic oligonucleotide
  Target: LAMA2; (+) strand; PAM type: NRG; PAM sequence: GGG
ggtctggaacgcctgacctc

SEQ ID NO: 127423 - DNA, 20 bp, Artificial Sequence
  Description of Artificial Sequence: Synthetic oligonucleotide
  Target: LAMA2; (+) strand; PAM type: NRG; PAM sequence: TGG
cctcgggtgatccacccgcc

SEQ ID NO: 127424 - DNA, 20 bp, Artificial Sequence
  Description of Artificial Sequence: Synthetic oligonucleotide
  Target: LAMA2; (+) strand; PAM type: NRG; PAM sequence: AAG
ccacccgcctggtcctccca

SEQ ID NO: 127425 - DNA, 20 bp, Artificial Sequence
  Description of Artificial Sequence: Synthetic oligonucleotide
  Target: LAMA2; (+) strand; PAM type: NRG; PAM sequence: TGG
gcctggtcctcccaaagtgc

SEQ ID NO: 127426 - DNA, 20 bp, Artificial Sequence
  Description of Artificial Sequence: Synthetic oligonucleotide
  Target: LAMA2; (+) strand; PAM type: NRG; PAM sequence: GGG
cctggtcctcccaaagtgct

SEQ ID NO: 127427 - DNA, 20 bp, Artificial Sequence
  Description of Artificial Sequence: Synthetic oligonucleotide
  Target: LAMA2; (+) strand; PAM type: NRG; PAM sequence: CAG
ctcccaaagtgctgggatta

SEQ ID NO: 127428 - DNA, 20 bp, Artificial Sequence
  Description of Artificial Sequence: Synthetic oligonucleotide
  Target: LAMA2; (+) strand; PAM type: NRG; PAM sequence: AGG
tcccaaagtgctgggattac

SEQ ID NO: 127429 - DNA, 20 bp, Artificial Sequence
  Description of Artificial Sequence: Synthetic oligonucleotide
  Target: LAMA2; (+) strand; PAM type: NRG; PAM sequence: GAG
agtgctgggattacaggcgt

SEQ ID NO: 127430 - DNA, 20 bp, Artificial Sequence
  Description of Artificial Sequence: Synthetic oligonucleotide
  Target: LAMA2; (+) strand; PAM type: NRG; PAM sequence: CAG
caggcgtgagccaccacgcc

SEQ ID NO: 127431 - DNA, 20 bp, Artificial Sequence
  Description of Artificial Sequence: Synthetic oligonucleotide
  Target: LAMA2; (+) strand; PAM type: NRG; PAM sequence: TGG
ttatattctattgtttcccc

SEQ ID NO: 127432 - DNA, 20 bp, Artificial Sequence
  Description of Artificial Sequence: Synthetic oligonucleotide
  Target: LAMA2; (+) strand; PAM type: NRG; PAM sequence: GGG
tatattctattgtttcccct

SEQ ID NO: 127433 - DNA, 20 bp, Artificial Sequence
  Description of Artificial Sequence: Synthetic oligonucleotide
  Target: LAMA2; (+) strand; PAM type: NRG; PAM sequence: GGG
atattctattgtttcccctg

SEQ ID NO: 127434 - DNA, 20 bp, Artificial Sequence
  Description of Artificial Sequence: Synthetic oligonucleotide
  Target: LAMA2; (+) strand; PAM type: NRG; PAM sequence: GAG
attctattgtttcccctggg

SEQ ID NO: 127435 - DNA, 20 bp, Artificial Sequence
  Description of Artificial Sequence: Synthetic oligonucleotide
  Target: LAMA2; (+) strand; PAM type: NRG; PAM sequence: GAG
taataattcttttgtgcttt

SEQ ID NO: 127436 - DNA, 20 bp, Artificial Sequence
  Description of Artificial Sequence: Synthetic oligonucleotide
  Target: LAMA2; (+) strand; PAM type: NRG; PAM sequence: TAG
taattcttttgtgctttgag

SEQ ID NO: 127437 - DNA, 20 bp, Artificial Sequence
  Description of Artificial Sequence: Synthetic oligonucleotide
  Target: LAMA2; (+) strand; PAM type: NRG; PAM sequence: TAG
gtgcatgccatatgttttgc

SEQ ID NO: 127438 - DNA, 20 bp, Artificial Sequence
  Description of Artificial Sequence: Synthetic oligonucleotide
  Target: LAMA2; (+) strand; PAM type: NRG; PAM sequence: GAG
atatgttttgctagttctcc

SEQ ID NO: 127439 - DNA, 20 bp, Artificial Sequence
  Description of Artificial Sequence: Synthetic oligonucleotide
  Target: LAMA2; (+) strand; PAM type: NRG; PAM sequence: AAG
agaatattgactcatttttg

SEQ ID NO: 127440 - DNA, 20 bp, Artificial Sequence
  Description of Artificial Sequence: Synthetic oligonucleotide
  Target: LAMA2; (+) strand; PAM type: NRG; PAM sequence: TGG
ctctgttttgttttctttca

SEQ ID NO: 127441 - DNA, 20 bp, Artificial Sequence
  Description of Artificial Sequence: Synthetic oligonucleotide
  Target: LAMA2; (+) strand; PAM type: NRG; PAM sequence: GGG
tctgttttgttttctttcat

SEQ ID NO: 127442 - DNA, 20 bp, Artificial Sequence
  Description of Artificial Sequence: Synthetic oligonucleotide
  Target: LAMA2; (+) strand; PAM type: NRG; PAM sequence: GAG
tgttttgttttctttcatgg

SEQ ID NO: 127443 - DNA, 20 bp, Artificial Sequence
  Description of Artificial Sequence: Synthetic oligonucleotide
  Target: LAMA2; (+) strand; PAM type: NRG; PAM sequence: TGG
catgggagatacaaaatttc

SEQ ID NO: 127444 - DNA, 20 bp, Artificial Sequence
  Description of Artificial Sequence: Synthetic oligonucleotide
  Target: LAMA2; (+) strand; PAM type: NRG; PAM sequence: GGG
atgggagatacaaaatttct

SEQ ID NO: 127445 - DNA, 20 bp, Artificial Sequence
  Description of Artificial Sequence: Synthetic oligonucleotide
  Target: LAMA2; (+) strand; PAM type: NRG; PAM sequence: TAG
ttttgctgtccaataatgtt

SEQ ID NO: 127446 - DNA, 20 bp, Artificial Sequence
  Description of Artificial Sequence: Synthetic oligonucleotide
  Target: LAMA2; (+) strand; PAM type: NRG; PAM sequence: GAG
ctgtccaataatgtttagct

SEQ ID NO: 127447 - DNA, 20 bp, Artificial Sequence
  Description of Artificial Sequence: Synthetic oligonucleotide
  Target: LAMA2; (+) strand; PAM type: NRG; PAM sequence: AAG
taaatctctgtatgtcacga

SEQ ID NO: 127448 - DNA, 20 bp, Artificial Sequence
  Description of Artificial Sequence: Synthetic oligonucleotide
  Target: LAMA2; (+) strand; PAM type: NRG; PAM sequence: AAG
atgttaactcaaatatgaac

SEQ ID NO: 127449 - DNA, 20 bp, Artificial Sequence
  Description of Artificial Sequence: Synthetic oligonucleotide
  Target: LAMA2; (+) strand; PAM type: NRG; PAM sequence: AGG
tgttaactcaaatatgaaca

SEQ ID NO: 127450 - DNA, 20 bp, Artificial Sequence
  Description of Artificial Sequence: Synthetic oligonucleotide
  Target: LAMA2; (+) strand; PAM type: NRG; PAM sequence: TGG
tgaacaaggtatcatttcat

SEQ ID NO: 127451 - DNA, 20 bp, Artificial Sequence
  Description of Artificial Sequence: Synthetic oligonucleotide
  Target: LAMA2; (+) strand; PAM type: NRG; PAM sequence: AAG
acaaggtatcatttcattgg

SEQ ID NO: 127452 - DNA, 20 bp, Artificial Sequence
  Description of Artificial Sequence: Synthetic oligonucleotide
  Target: LAMA2; (+) strand; PAM type: NRG; PAM sequence: CGG
aagactcccaaatatcctct

SEQ ID NO: 127453 - DNA, 20 bp, Artificial Sequence
  Description of Artificial Sequence: Synthetic oligonucleotide
  Target: LAMA2; (+) strand; PAM type: NRG; PAM sequence: TAG
actcccaaatatcctctcgg

SEQ ID NO: 127454 - DNA, 20 bp, Artificial Sequence
  Description of Artificial Sequence: Synthetic oligonucleotide
  Target: LAMA2; (+) strand; PAM type: NRG; PAM sequence: AGG
ctcccaaatatcctctcggt

SEQ ID NO: 127455 - DNA, 20 bp, Artificial Sequence
  Description of Artificial Sequence: Synthetic oligonucleotide
  Target: LAMA2; (+) strand; PAM type: NRG; PAM sequence: TGG
ctctcggtaggctattttta

SEQ ID NO: 127456 - DNA, 20 bp, Artificial Sequence
  Description of Artificial Sequence: Synthetic oligonucleotide
  Target: LAMA2; (+) strand; PAM type: NRG; PAM sequence: CAG
cggtaggctatttttatgga

SEQ ID NO: 127457 - DNA, 20 bp, Artificial Sequence
  Description of Artificial Sequence: Synthetic oligonucleotide
  Target: LAMA2; (+) strand; PAM type: NRG; PAM sequence: AGG
ggtaggctatttttatggac

SEQ ID NO: 127458 - DNA, 20 bp, Artificial Sequence
  Description of Artificial Sequence: Synthetic oligonucleotide
  Target: LAMA2; (+) strand; PAM type: NRG; PAM sequence: TAG
attttccaatctttgtctgc

SEQ ID NO: 127459 - DNA, 20 bp, Artificial Sequence
  Description of Artificial Sequence: Synthetic oligonucleotide
  Target: LAMA2; (+) strand; PAM type: NRG; PAM sequence: GAG
tgtctgctagcatttttgtt

SEQ ID NO: 127460 - DNA, 20 bp, Artificial Sequence
  Description of Artificial Sequence: Synthetic oligonucleotide
  Target: LAMA2; (+) strand; PAM type: NRG; PAM sequence: CGG
gctagcatttttgttgagaa

SEQ ID NO: 127461 - DNA, 20 bp, Artificial Sequence
  Description of Artificial Sequence: Synthetic oligonucleotide
  Target: LAMA2; (+) strand; PAM type: NRG; PAM sequence: GAG
tagcatttttgttgagaacg

SEQ ID NO: 127462 - DNA, 20 bp, Artificial Sequence
  Description of Artificial Sequence: Synthetic oligonucleotide
  Target: LAMA2; (+) strand; PAM type: NRG; PAM sequence: GAG
ttttgttgagaacggagtat

SEQ ID NO: 127463 - DNA, 20 bp, Artificial Sequence
  Description of Artificial Sequence: Synthetic oligonucleotide
  Target: LAMA2; (+) strand; PAM type: NRG; PAM sequence: AAG
ttgagaacggagtatgagct

SEQ ID NO: 127464 - DNA, 20 bp, Artificial Sequence
  Description of Artificial Sequence: Synthetic oligonucleotide
  Target: LAMA2; (+) strand; PAM type: NRG; PAM sequence: AGG
tgagaacggagtatgagcta

SEQ ID NO: 127465 - DNA, 20 bp, Artificial Sequence
  Description of Artificial Sequence: Synthetic oligonucleotide
  Target: LAMA2; (+) strand; PAM type: NRG; PAM sequence: GAG
acggagtatgagctaaggat

SEQ ID NO: 127466 - DNA, 20 bp, Artificial Sequence
  Description of Artificial Sequence: Synthetic oligonucleotide
  Target: LAMA2; (+) strand; PAM type: NRG; PAM sequence: TAG
taatcacactctacaatatg

SEQ ID NO: 127467 - DNA, 20 bp, Artificial Sequence
  Description of Artificial Sequence: Synthetic oligonucleotide
  Target: LAMA2; (+) strand; PAM type: NRG; PAM sequence: TAG
gattttcactttttcatttt

SEQ ID NO: 127468 - DNA, 20 bp, Artificial Sequence
  Description of Artificial Sequence: Synthetic oligonucleotide
  Target: LAMA2; (+) strand; PAM type: NRG; PAM sequence: TGG
acccctcatccttcactgca

SEQ ID NO: 127469 - DNA, 20 bp, Artificial Sequence
  Description of Artificial Sequence: Synthetic oligonucleotide
  Target: LAMA2; (+) strand; PAM type: NRG; PAM sequence: TGG
atccttcactgcatggtaat

SEQ ID NO: 127470 - DNA, 20 bp, Artificial Sequence
  Description of Artificial Sequence: Synthetic oligonucleotide
  Target: LAMA2; (+) strand; PAM type: NRG; PAM sequence: TAG
actttcttattaaatttccc

SEQ ID NO: 127471 - DNA, 20 bp, Artificial Sequence
  Description of Artificial Sequence: Synthetic oligonucleotide
  Target: LAMA2; (+) strand; PAM type: NRG; PAM sequence: GAG
tttcttattaaatttcccta

SEQ ID NO: 127472 - DNA, 20 bp, Artificial Sequence
  Description of Artificial Sequence: Synthetic oligonucleotide
  Target: LAMA2; (+) strand; PAM type: NRG; PAM sequence: TAG
atttccctagagaattgtat

SEQ ID NO: 127473 - DNA, 20 bp, Artificial Sequence
  Description of Artificial Sequence: Synthetic oligonucleotide
  Target: LAMA2; (+) strand; PAM type: NRG; PAM sequence: AGG
tttccctagagaattgtatt

SEQ ID NO: 127474 - DNA, 20 bp, Artificial Sequence
  Description of Artificial Sequence: Synthetic oligonucleotide
  Target: LAMA2; (+) strand; PAM type: NRG; PAM sequence: GGG
ttccctagagaattgtatta

SEQ ID NO: 127475 - DNA, 20 bp, Artificial Sequence
  Description of Artificial Sequence: Synthetic oligonucleotide
  Target: LAMA2; (+) strand; PAM type: NRG; PAM sequence: TAG
agaattgtattagggttctg

SEQ ID NO: 127476 - DNA, 20 bp, Artificial Sequence
  Description of Artificial Sequence: Synthetic oligonucleotide
  Target: LAMA2; (+) strand; PAM type: NRG; PAM sequence: GAG
aattgtattagggttctgta

SEQ ID NO: 127477 - DNA, 20 bp, Artificial Sequence
  Description of Artificial Sequence: Synthetic oligonucleotide
  Target: LAMA2; (+) strand; PAM type: NRG; PAM sequence: AGG
attgtattagggttctgtag

SEQ ID NO: 127478 - DNA, 20 bp, Artificial Sequence
  Description of Artificial Sequence: Synthetic oligonucleotide
  Target: LAMA2; (+) strand; PAM type: NRG; PAM sequence: GGG
ttgtattagggttctgtaga

SEQ ID NO: 127479 - DNA, 20 bp, Artificial Sequence
  Description of Artificial Sequence: Synthetic oligonucleotide
  Target: LAMA2; (+) strand; PAM type: NRG; PAM sequence: CAG
attagggttctgtagaggga

SEQ ID NO: 127480 - DNA, 20 bp, Artificial Sequence
  Description of Artificial Sequence: Synthetic oligonucleotide
  Target: LAMA2; (+) strand; PAM type: NRG; PAM sequence: TAG
atatatatatatatatatat

SEQ ID NO: 127481 - DNA, 20 bp, Artificial Sequence
  Description of Artificial Sequence: Synthetic oligonucleotide
  Target: LAMA2; (+) strand; PAM type: NRG; PAM sequence: AAG
tatatatatattagtttatt

SEQ ID NO: 127482 - DNA, 20 bp, Artificial Sequence
  Description of Artificial Sequence: Synthetic oligonucleotide
  Target: LAMA2; (+) strand; PAM type: NRG; PAM sequence: TGG
atatatatatgtatatatca

SEQ ID NO: 127483 - DNA, 20 bp, Artificial Sequence
  Description of Artificial Sequence: Synthetic oligonucleotide
  Target: LAMA2; (+) strand; PAM type: NRG; PAM sequence: GGG
tatatatatgtatatatcat

SEQ ID NO: 127484 - DNA, 20 bp, Artificial Sequence
  Description of Artificial Sequence: Synthetic oligonucleotide
  Target: LAMA2; (+) strand; PAM type: NRG; PAM sequence: GAG
tatatatgtatatatcatgg

SEQ ID NO: 127485 - DNA, 20 bp, Artificial Sequence
  Description of Artificial Sequence: Synthetic oligonucleotide
  Target: LAMA2; (+) strand; PAM type: NRG; PAM sequence: AAG
atatatcatgggagtttatt

SEQ ID NO: 127486 - DNA, 20 bp, Artificial Sequence
  Description of Artificial Sequence: Synthetic oligonucleotide
  Target: LAMA2; (+) strand; PAM type: NRG; PAM sequence: AAG
gtgttaacttactcgatcac

SEQ ID NO: 127487 - DNA, 20 bp, Artificial Sequence
  Description of Artificial Sequence: Synthetic oligonucleotide
  Target: LAMA2; (+) strand; PAM type: NRG; PAM sequence: AGG
tgttaacttactcgatcaca

SEQ ID NO: 127488 - DNA, 20 bp, Artificial Sequence
  Description of Artificial Sequence: Synthetic oligonucleotide
  Target: LAMA2; (+) strand; PAM type: NRG; PAM sequence: TAG
tcgatcacaaggtcccacaa

SEQ ID NO: 127489 - DNA, 20 bp, Artificial Sequence
  Description of Artificial Sequence: Synthetic oligonucleotide
  Target: LAMA2; (+) strand; PAM type: NRG; PAM sequence: AGG
cgatcacaaggtcccacaat

SEQ ID NO: 127490 - DNA, 20 bp, Artificial Sequence
  Description of Artificial Sequence: Synthetic oligonucleotide
  Target: LAMA2; (+) strand; PAM type: NRG; PAM sequence: AAG
tcccacaataggctgtctgc

SEQ ID NO: 127491 - DNA, 20 bp, Artificial Sequence
  Description of Artificial Sequence: Synthetic oligonucleotide
  Target: LAMA2; (+) strand; PAM type: NRG; PAM sequence: GAG
caataggctgtctgcaagct

SEQ ID NO: 127492 - DNA, 20 bp, Artificial Sequence
  Description of Artificial Sequence: Synthetic oligonucleotide
  Target: LAMA2; (+) strand; PAM type: NRG; PAM sequence: AGG
aataggctgtctgcaagctg

SEQ ID NO: 127493 - DNA, 20 bp, Artificial Sequence
  Description of Artificial Sequence: Synthetic oligonucleotide
  Target: LAMA2; (+) strand; PAM type: NRG; PAM sequence: GAG
taggctgtctgcaagctgag

SEQ ID NO: 127494 - DNA, 20 bp, Artificial Sequence
  Description of Artificial Sequence: Synthetic oligonucleotide
  Target: LAMA2; (+) strand; PAM type: NRG; PAM sequence: AAG
ctgtctgcaagctgaggagc

SEQ ID NO: 127495 - DNA, 20 bp, Artificial Sequence
  Description of Artificial Sequence: Synthetic oligonucleotide
  Target: LAMA2; (+) strand; PAM type: NRG; PAM sequence: AGG
tgtctgcaagctgaggagca

SEQ ID NO: 127496 - DNA, 20 bp, Artificial Sequence
  Description of Artificial Sequence: Synthetic oligonucleotide
  Target: LAMA2; (+) strand; PAM type: NRG; PAM sequence: GAG
tctgcaagctgaggagcaag

SEQ ID NO: 127497 - DNA, 20 bp, Artificial Sequence
  Description of Artificial Sequence: Synthetic oligonucleotide
  Target: LAMA2; (+) strand; PAM type: NRG; PAM sequence: GAG
tgcaagctgaggagcaagga

SEQ ID NO: 127498 - DNA, 20 bp, Artificial Sequence
  Description of Artificial Sequence: Synthetic oligonucleotide
  Target: LAMA2; (+) strand; PAM type: NRG; PAM sequence: CAG
agctgaggagcaaggagagc

SEQ ID NO: 127499 - DNA, 20 bp, Artificial Sequence
  Description of Artificial Sequence: Synthetic oligonucleotide
  Target: LAMA2; (+) strand; PAM type: NRG; PAM sequence: TGG
aggagcaaggagagccagtc

SEQ ID NO: 127500 - DNA, 20 bp, Artificial Sequence
  Description of Artificial Sequence: Synthetic oligonucleotide
  Target: LAMA2; (+) strand; PAM type: NRG; PAM sequence: GGG
ggagcaaggagagccagtct

SEQ ID NO: 127501 - DNA, 20 bp, Artificial Sequence
  Description of Artificial Sequence: Synthetic oligonucleotide
  Target: LAMA2; (+) strand; PAM type: NRG; PAM sequence: AAG
cagtctgggtcccaaaactg

SEQ ID NO: 127502 - DNA, 20 bp, Artificial Sequence
  Description of Artificial Sequence: Synthetic oligonucleotide
  Target: LAMA2; (+) strand; PAM type: NRG; PAM sequence: TGG
ggtcccaaaactgaagaact

SEQ ID NO: 127503 - DNA, 20 bp, Artificial Sequence
  Description of Artificial Sequence: Synthetic oligonucleotide
  Target: LAMA2; (+) strand; PAM type: NRG; PAM sequence: GAG
tcccaaaactgaagaacttg

SEQ ID NO: 127504 - DNA, 20 bp, Artificial Sequence
  Description of Artificial Sequence: Synthetic oligonucleotide
  Target: LAMA2; (+) strand; PAM type: NRG; PAM sequence: GAG
gaacttggagtctgatgttt

SEQ ID NO: 127505 - DNA, 20 bp, Artificial Sequence
  Description of Artificial Sequence: Synthetic oligonucleotide
  Target: LAMA2; (+) strand; PAM type: NRG; PAM sequence: AGG
aacttggagtctgatgtttg

SEQ ID NO: 127506 - DNA, 20 bp, Artificial Sequence
  Description of Artificial Sequence: Synthetic oligonucleotide
  Target: LAMA2; (+) strand; PAM type: NRG; PAM sequence: CAG
tggagtctgatgtttgagga

SEQ ID NO: 127507 - DNA, 20 bp, Artificial Sequence
  Description of Artificial Sequence: Synthetic oligonucleotide
  Target: LAMA2; (+) strand; PAM type: NRG; PAM sequence: AGG
ggagtctgatgtttgaggac

SEQ ID NO: 127508 - DNA, 20 bp, Artificial Sequence
  Description of Artificial Sequence: Synthetic oligonucleotide
  Target: LAMA2; (+) strand; PAM type: NRG; PAM sequence: AAG
gtctgatgtttgaggacagg

SEQ ID NO: 127509 - DNA, 20 bp, Artificial Sequence
  Description of Artificial Sequence: Synthetic oligonucleotide
  Target: LAMA2; (+) strand; PAM type: NRG; PAM sequence: CAG
gtttgaggacaggaagcatc

SEQ ID NO: 127510 - DNA, 20 bp, Artificial Sequence
  Description of Artificial Sequence: Synthetic oligonucleotide
  Target: LAMA2; (+) strand; PAM type: NRG; PAM sequence: AAG
gaggacaggaagcatccagc

SEQ ID NO: 127511 - DNA, 20 bp, Artificial Sequence
  Description of Artificial Sequence: Synthetic oligonucleotide
  Target: LAMA2; (+) strand; PAM type: NRG; PAM sequence: AGG
aggacaggaagcatccagca

SEQ ID NO: 127512 - DNA, 20 bp, Artificial Sequence
  Description of Artificial Sequence: Synthetic oligonucleotide
  Target: LAMA2; (+) strand; PAM type: NRG; PAM sequence: GGG
ggacaggaagcatccagcaa

SEQ ID NO: 127513 - DNA, 20 bp, Artificial Sequence
  Description of Artificial Sequence: Synthetic oligonucleotide
  Target: LAMA2; (+) strand; PAM type: NRG; PAM sequence: GAG
acaggaagcatccagcaagg

SEQ ID NO: 127514 - DNA, 20 bp, Artificial Sequence
  Description of Artificial Sequence: Synthetic oligonucleotide
  Target: LAMA2; (+) strand; PAM type: NRG; PAM sequence: AAG
gaagcatccagcaagggaga

SEQ ID NO: 127515 - DNA, 20 bp, Artificial Sequence
  Description of Artificial Sequence: Synthetic oligonucleotide
  Target: LAMA2; (+) strand; PAM type: NRG; PAM sequence: TAG
tccagcaagggagaaagatg

SEQ ID NO: 127516 - DNA, 20 bp, Artificial Sequence
  Description of Artificial Sequence: Synthetic oligonucleotide
  Target: LAMA2; (+) strand; PAM type: NRG; PAM sequence: TGG
caagggagaaagatgtagac

SEQ ID NO: 127517 - DNA, 20 bp, Artificial Sequence
  Description of Artificial Sequence: Synthetic oligonucleotide
  Target: LAMA2; (+) strand; PAM type: NRG; PAM sequence: GGG
aagggagaaagatgtagact

SEQ ID NO: 127518 - DNA, 20 bp, Artificial Sequence
  Description of Artificial Sequence: Synthetic oligonucleotide
  Target: LAMA2; (+) strand; PAM type: NRG; PAM sequence: GAG
gggagaaagatgtagactgg

SEQ ID NO: 127519 - DNA, 20 bp, Artificial Sequence
  Description of Artificial Sequence: Synthetic oligonucleotide
  Target: LAMA2; (+) strand; PAM type: NRG; PAM sequence: AGG
ggagaaagatgtagactggg

SEQ ID NO: 127520 - DNA, 20 bp, Artificial Sequence
  Description of Artificial Sequence: Synthetic oligonucleotide
  Target: LAMA2; (+) strand; PAM type: NRG; PAM sequence: CAG
tgtagactgggaggctatgc

SEQ ID NO: 127521 - DNA, 20 bp, Artificial Sequence
  Description of Artificial Sequence: Synthetic oligonucleotide
  Target: LAMA2; (+) strand; PAM type: NRG; PAM sequence: TGG
tctgcctgctttatatttgc

SEQ ID NO: 127522 - DNA, 20 bp, Artificial Sequence
  Description of Artificial Sequence: Synthetic oligonucleotide
  Target: LAMA2; (+) strand; PAM type: NRG; PAM sequence: CGG
gcctgctttatatttgctgg

SEQ ID NO: 127523 - DNA, 20 bp, Artificial Sequence
  Description of Artificial Sequence: Synthetic oligonucleotide
  Target: LAMA2; (+) strand; PAM type: NRG; PAM sequence: TAG
tatatttgctggcggctgat

SEQ ID NO: 127524 - DNA, 20 bp, Artificial Sequence
  Description of Artificial Sequence: Synthetic oligonucleotide
  Target: LAMA2; (+) strand; PAM type: NRG; PAM sequence: CAG
gctgattagattgtgcccac

SEQ ID NO: 127525 - DNA, 20 bp, Artificial Sequence
  Description of Artificial Sequence: Synthetic oligonucleotide
  Target: LAMA2; (+) strand; PAM type: NRG; PAM sequence: AAG
tagattgtgcccaccagatt

SEQ ID NO: 127526 - DNA, 20 bp, Artificial Sequence
  Description of Artificial Sequence: Synthetic oligonucleotide
  Target: LAMA2; (+) strand; PAM type: NRG; PAM sequence: AGG
agattgtgcccaccagatta

SEQ ID NO: 127527 - DNA, 20 bp, Artificial Sequence
  Description of Artificial Sequence: Synthetic oligonucleotide
  Target: LAMA2; (+) strand; PAM type: NRG; PAM sequence: GGG
gattgtgcccaccagattaa

SEQ ID NO: 127528 - DNA, 20 bp, Artificial Sequence
  Description of Artificial Sequence: Synthetic oligonucleotide
  Target: LAMA2; (+) strand; PAM type: NRG; PAM sequence: TGG
tgtgcccaccagattaaggg

SEQ ID NO: 127529 - DNA, 20 bp, Artificial Sequence
  Description of Artificial Sequence: Synthetic oligonucleotide
  Target: LAMA2; (+) strand; PAM type: NRG; PAM sequence: GGG
gtgcccaccagattaagggt

SEQ ID NO: 127530 - DNA, 20 bp, Artificial Sequence
  Description of Artificial Sequence: Synthetic oligonucleotide
  Target: LAMA2; (+) strand; PAM type: NRG; PAM sequence: CAG
aagggtgggtctgcctttcc

SEQ ID NO: 127531 - DNA, 20 bp, Artificial Sequence
  Description of Artificial Sequence: Synthetic oligonucleotide
  Target: LAMA2; (+) strand; PAM type: NRG; PAM sequence: TGG
actcaaatgttaatttcctt

SEQ ID NO: 127532 - DNA, 20 bp, Artificial Sequence
  Description of Artificial Sequence: Synthetic oligonucleotide
  Target: LAMA2; (+) strand; PAM type: NRG; PAM sequence: CAG
ttcctttggcaacaccctca

SEQ ID NO: 127533 - DNA, 20 bp, Artificial Sequence
  Description of Artificial Sequence: Synthetic oligonucleotide
  Target: LAMA2; (+) strand; PAM type: NRG; PAM sequence: AAG
ttgtattcttcaatccaatc

SEQ ID NO: 127534 - DNA, 20 bp, Artificial Sequence
  Description of Artificial Sequence: Synthetic oligonucleotide
  Target: LAMA2; (+) strand; PAM type: NRG; PAM sequence: AAG
acacttgtattaaccatcac

SEQ ID NO: 127535 - DNA, 20 bp, Artificial Sequence
  Description of Artificial Sequence: Synthetic oligonucleotide
  Target: LAMA2; (+) strand; PAM type: NRG; PAM sequence: CAG
ccatcacaagaataaattcc

SEQ ID NO: 127536 - DNA, 20 bp, Artificial Sequence
  Description of Artificial Sequence: Synthetic oligonucleotide
  Target: LAMA2; (+) strand; PAM type: NRG; PAM sequence: TGG
tcacaagaataaattcccag

SEQ ID NO: 127537 - DNA, 20 bp, Artificial Sequence
  Description of Artificial Sequence: Synthetic oligonucleotide
  Target: LAMA2; (+) strand; PAM type: NRG; PAM sequence: CAG
aattcccagtggtctcttgc

SEQ ID NO: 127538 - DNA, 20 bp, Artificial Sequence
  Description of Artificial Sequence: Synthetic oligonucleotide
  Target: LAMA2; (+) strand; PAM type: NRG; PAM sequence: AGG
attcccagtggtctcttgcc

SEQ ID NO: 127539 - DNA, 20 bp, Artificial Sequence
  Description of Artificial Sequence: Synthetic oligonucleotide
  Target: LAMA2; (+) strand; PAM type: NRG; PAM sequence: CAG
ccagtggtctcttgccaggt

SEQ ID NO: 127540 - DNA, 20 bp, Artificial Sequence
  Description of Artificial Sequence: Synthetic oligonucleotide
  Target: LAMA2; (+) strand; PAM type: NRG; PAM sequence: TGG
gtctcttgccaggtcagcaa

SEQ ID NO: 127541 - DNA, 20 bp, Artificial Sequence
  Description of Artificial Sequence: Synthetic oligonucleotide
  Target: LAMA2; (+) strand; PAM type: NRG; PAM sequence: GGG
tctcttgccaggtcagcaat

SEQ ID NO: 127542 - DNA, 20 bp, Artificial Sequence
  Description of Artificial Sequence: Synthetic oligonucleotide
  Target: LAMA2; (+) strand; PAM type: NRG; PAM sequence: TAG
ttgccaggtcagcaatggga

SEQ ID NO: 127543 - DNA, 20 bp, Artificial Sequence
  Description of Artificial Sequence: Synthetic oligonucleotide
  Target: LAMA2; (+) strand; PAM type: NRG; PAM sequence: GAG
gtcagcaatgggatagtaac

SEQ ID NO: 127544 - DNA, 20 bp, Artificial Sequence
  Description of Artificial Sequence: Synthetic oligonucleotide
  Target: LAMA2; (+) strand; PAM type: NRG; PAM sequence: AGG
tcagcaatgggatagtaacg

SEQ ID NO: 127545 - DNA, 20 bp, Artificial Sequence
  Description of Artificial Sequence: Synthetic oligonucleotide
  Target: LAMA2; (+) strand; PAM type: NRG; PAM sequence: TAG
tgggatagtaacgaggttta

SEQ ID NO: 127546 - DNA, 20 bp, Artificial Sequence
  Description of Artificial Sequence: Synthetic oligonucleotide
  Target: LAMA2; (+) strand; PAM type: NRG; PAM sequence: AGG
gggatagtaacgaggtttat

SEQ ID NO: 127547 - DNA, 20 bp, Artificial Sequence
  Description of Artificial Sequence: Synthetic oligonucleotide
  Target: LAMA2; (+) strand; PAM type: NRG; PAM sequence: GGG
ggatagtaacgaggtttata

SEQ ID NO: 127548 - DNA, 20 bp, Artificial Sequence
  Description of Artificial Sequence: Synthetic oligonucleotide
  Target: LAMA2; (+) strand; PAM type: NRG; PAM sequence: TGG
agtaacgaggtttatagggt

SEQ ID NO: 127549 - DNA, 20 bp, Artificial Sequence
  Description of Artificial Sequence: Synthetic oligonucleotide
  Target: LAMA2; (+) strand; PAM type: NRG; PAM sequence: CAG
aacgaggtttatagggttgg

SEQ ID NO: 127550 - DNA, 20 bp, Artificial Sequence
  Description of Artificial Sequence: Synthetic oligonucleotide
  Target: LAMA2; (+) strand; PAM type: NRG; PAM sequence: AGG
acgaggtttatagggttggc

SEQ ID NO: 127551 - DNA, 20 bp, Artificial Sequence
  Description of Artificial Sequence: Synthetic oligonucleotide
  Target: LAMA2; (+) strand; PAM type: NRG; PAM sequence: GGG
cgaggtttatagggttggca

SEQ ID NO: 127552 - DNA, 20 bp, Artificial Sequence
  Description of Artificial Sequence: Synthetic oligonucleotide
  Target: LAMA2; (+) strand; PAM type: NRG; PAM sequence: GGG
gaggtttatagggttggcag

SEQ ID NO: 127553 - DNA, 20 bp, Artificial Sequence
  Description of Artificial Sequence: Synthetic oligonucleotide
  Target: LAMA2; (+) strand; PAM type: NRG; PAM sequence: GGG
aggtttatagggttggcagg

SEQ ID NO: 127554 - DNA, 20 bp, Artificial Sequence
  Description of Artificial Sequence: Synthetic oligonucleotide
  Target: LAMA2; (+) strand; PAM type: NRG; PAM sequence: TGG
atagggttggcagggggatc

SEQ ID NO: 127555 - DNA, 20 bp, Artificial Sequence
  Description of Artificial Sequence: Synthetic oligonucleotide
  Target: LAMA2; (+) strand; PAM type: NRG; PAM sequence: AAG
ggggatctggatacctaact

SEQ ID NO: 127556 - DNA, 20 bp, Artificial Sequence
  Description of Artificial Sequence: Synthetic oligonucleotide
  Target: LAMA2; (+) strand; PAM type: NRG; PAM sequence: CAG
gatacctaactaagattttg

SEQ ID NO: 127557 - DNA, 20 bp, Artificial Sequence
  Description of Artificial Sequence: Synthetic oligonucleotide
  Target: LAMA2; (+) strand; PAM type: NRG; PAM sequence: TAG
tgcagcctcaacacttactc

SEQ ID NO: 127558 - DNA, 20 bp, Artificial Sequence
  Description of Artificial Sequence: Synthetic oligonucleotide
  Target: LAMA2; (+) strand; PAM type: NRG; PAM sequence: TGG
ctctagccttgtaaattatt

SEQ ID NO: 127559 - DNA, 20 bp, Artificial Sequence
  Description of Artificial Sequence: Synthetic oligonucleotide
  Target: LAMA2; (+) strand; PAM type: NRG; PAM sequence: CAG
ttatttggtacttaaaattt

SEQ ID NO: 127560 - DNA, 20 bp, Artificial Sequence
  Description of Artificial Sequence: Synthetic oligonucleotide
  Target: LAMA2; (+) strand; PAM type: NRG; PAM sequence: GAG
atttggtacttaaaatttca

SEQ ID NO: 127561 - DNA, 20 bp, Artificial Sequence
  Description of Artificial Sequence: Synthetic oligonucleotide
  Target: LAMA2; (+) strand; PAM type: NRG; PAM sequence: TGG
ttaaaatttcagagacattc

SEQ ID NO: 127562 - DNA, 20 bp, Artificial Sequence
  Description of Artificial Sequence: Synthetic oligonucleotide
  Target: LAMA2; (+) strand; PAM type: NRG; PAM sequence: GGG
taaaatttcagagacattct

SEQ ID NO: 127563 - DNA, 20 bp, Artificial Sequence
  Description of Artificial Sequence: Synthetic oligonucleotide
  Target: LAMA2; (+) strand; PAM type: NRG; PAM sequence: GGG
aaaatttcagagacattctg

SEQ ID NO: 127564 - DNA, 20 bp, Artificial Sequence
  Description of Artificial Sequence: Synthetic oligonucleotide
  Target: LAMA2; (+) strand; PAM type: NRG; PAM sequence: CAG
ttcagagacattctggggat

SEQ ID NO: 127565 - DNA, 20 bp, Artificial Sequence
  Description of Artificial Sequence: Synthetic oligonucleotide
  Target: LAMA2; (+) strand; PAM type: NRG; PAM sequence: CAG
agagacattctggggatcag

SEQ ID NO: 127566 - DNA, 20 bp, Artificial Sequence
  Description of Artificial Sequence: Synthetic oligonucleotide
  Target: LAMA2; (+) strand; PAM type: NRG; PAM sequence: TGG
tcaaataacacttcttgctg

SEQ ID NO: 127567 - DNA, 20 bp, Artificial Sequence
  Description of Artificial Sequence: Synthetic oligonucleotide
  Target: LAMA2; (+) strand; PAM type: NRG; PAM sequence: TGG
ctgtggtttgctcctcccct

SEQ ID NO: 127568 - DNA, 20 bp, Artificial Sequence
  Description of Artificial Sequence: Synthetic oligonucleotide
  Target: LAMA2; (+) strand; PAM type: NRG; PAM sequence: CAG
tggtttgctcctccccttgg

SEQ ID NO: 127569 - DNA, 20 bp, Artificial Sequence
  Description of Artificial Sequence: Synthetic oligonucleotide
  Target: LAMA2; (+) strand; PAM type: NRG; PAM sequence: CAG
tggcagacacatcctatccc

SEQ ID NO: 127570 - DNA, 20 bp, Artificial Sequence
  Description of Artificial Sequence: Synthetic oligonucleotide
  Target: LAMA2; (+) strand; PAM type: NRG; PAM sequence: TGG
atccccagcttcctctgctc

SEQ ID NO: 127571 - DNA, 20 bp, Artificial Sequence
  Description of Artificial Sequence: Synthetic oligonucleotide
  Target: LAMA2; (+) strand; PAM type: NRG; PAM sequence: GGG
tccccagcttcctctgctct

SEQ ID NO: 127572 - DNA, 20 bp, Artificial Sequence
  Description of Artificial Sequence: Synthetic oligonucleotide
  Target: LAMA2; (+) strand; PAM type: NRG; PAM sequence: TAG
cagcttcctctgctctgggc

SEQ ID NO: 127573 - DNA, 20 bp, Artificial Sequence
  Description of Artificial Sequence: Synthetic oligonucleotide
  Target: LAMA2; (+) strand; PAM type: NRG; PAM sequence: TGG
tcttttctgatgtcatcctc

SEQ ID NO: 127574 - DNA, 20 bp, Artificial Sequence
  Description of Artificial Sequence: Synthetic oligonucleotide
  Target: LAMA2; (+) strand; PAM type: NRG; PAM sequence: TAG
ttatgacttaactcttattt

SEQ ID NO: 127575 - DNA, 20 bp, Artificial Sequence
  Description of Artificial Sequence: Synthetic oligonucleotide
  Target: LAMA2; (+) strand; PAM type: NRG; PAM sequence: AAG
tgacttaactcttattttag

SEQ ID NO: 127576 - DNA, 20 bp, Artificial Sequence
  Description of Artificial Sequence: Synthetic oligonucleotide
  Target: LAMA2; (+) strand; PAM type: NRG; PAM sequence: TAG
ctcttattttagaagatttg

SEQ ID NO: 127577 - DNA, 20 bp, Artificial Sequence
  Description of Artificial Sequence: Synthetic oligonucleotide
  Target: LAMA2; (+) strand; PAM type: NRG; PAM sequence: AGG
tcttattttagaagatttgt

SEQ ID NO: 127578 - DNA, 20 bp, Artificial Sequence
  Description of Artificial Sequence: Synthetic oligonucleotide
  Target: LAMA2; (+) strand; PAM type: NRG; PAM sequence: TAG
agaagatttgtaggttataa

SEQ ID NO: 127579 - DNA, 20 bp, Artificial Sequence
  Description of Artificial Sequence: Synthetic oligonucleotide
  Target: LAMA2; (+) strand; PAM type: NRG; PAM sequence: AAG
tgtaggttataatagcattt

SEQ ID NO: 127580 - DNA, 20 bp, Artificial Sequence
  Description of Artificial Sequence: Synthetic oligonucleotide
  Target: LAMA2; (+) strand; PAM type: NRG; PAM sequence: TGG
catttaagtgtgtgtgttca

SEQ ID NO: 127581 - DNA, 20 bp, Artificial Sequence
  Description of Artificial Sequence: Synthetic oligonucleotide
  Target: LAMA2; (+) strand; PAM type: NRG; PAM sequence: CAG
taagtgtgtgtgttcatggt

SEQ ID NO: 127582 - DNA, 20 bp, Artificial Sequence
  Description of Artificial Sequence: Synthetic oligonucleotide
  Target: LAMA2; (+) strand; PAM type: NRG; PAM sequence: AGG
aagtgtgtgtgttcatggtc

SEQ ID NO: 127583 - DNA, 20 bp, Artificial Sequence
  Description of Artificial Sequence: Synthetic oligonucleotide
  Target: LAMA2; (+) strand; PAM type: NRG; PAM sequence: AAG
ttcatggtcaggtttaacca

SEQ ID NO: 127584 - DNA, 20 bp, Artificial Sequence
  Description of Artificial Sequence: Synthetic oligonucleotide
  Target: LAMA2; (+) strand; PAM type: NRG; PAM sequence: TAG
gtcaggtttaaccaaagtcc

SEQ ID NO: 127585 - DNA, 20 bp, Artificial Sequence
  Description of Artificial Sequence: Synthetic oligonucleotide
  Target: LAMA2; (+) strand; PAM type: NRG; PAM sequence: AGG
tcaggtttaaccaaagtcct

SEQ ID NO: 127586 - DNA, 20 bp, Artificial Sequence
  Description of Artificial Sequence: Synthetic oligonucleotide
  Target: LAMA2; (+) strand; PAM type: NRG; PAM sequence: GAG
ttaaccaaagtcctaggcct

SEQ ID NO: 127587 - DNA, 20 bp, Artificial Sequence
  Description of Artificial Sequence: Synthetic oligonucleotide
  Target: LAMA2; (+) strand; PAM type: NRG; PAM sequence: AAG
ggcctgagtatttcaatgtg

SEQ ID NO: 127588 - DNA, 20 bp, Artificial Sequence
  Description of Artificial Sequence: Synthetic oligonucleotide
  Target: LAMA2; (+) strand; PAM type: NRG; PAM sequence: CAG
atttcaatgtgaagaacaaa

SEQ ID NO: 127589 - DNA, 20 bp, Artificial Sequence
  Description of Artificial Sequence: Synthetic oligonucleotide
  Target: LAMA2; (+) strand; PAM type: NRG; PAM sequence: TAG
tttcatacctctatttttga

SEQ ID NO: 127590 - DNA, 20 bp, Artificial Sequence
  Description of Artificial Sequence: Synthetic oligonucleotide
  Target: LAMA2; (+) strand; PAM type: NRG; PAM sequence: GAG
ttttgatagtctgtgattct

SEQ ID NO: 127591 - DNA, 20 bp, Artificial Sequence
  Description of Artificial Sequence: Synthetic oligonucleotide
  Target: LAMA2; (+) strand; PAM type: NRG; PAM sequence: CAG
ctgagccctatctatgcttt

SEQ ID NO: 127592 - DNA, 20 bp, Artificial Sequence
  Description of Artificial Sequence: Synthetic oligonucleotide
  Target: LAMA2; (+) strand; PAM type: NRG; PAM sequence: TGG
gctttcagtcaaattaccaa

SEQ ID NO: 127593 - DNA, 20 bp, Artificial Sequence
  Description of Artificial Sequence: Synthetic oligonucleotide
  Target: LAMA2; (+) strand; PAM type: NRG; PAM sequence: TAG
aattttgtgtgtctcacgtt

SEQ ID NO: 127594 - DNA, 20 bp, Artificial Sequence
  Description of Artificial Sequence: Synthetic oligonucleotide
  Target: LAMA2; (+) strand; PAM type: NRG; PAM sequence: GAG
ttttgtgtgtctcacgttta

SEQ ID NO: 127595 - DNA, 20 bp, Artificial Sequence
  Description of Artificial Sequence: Synthetic oligonucleotide
  Target: LAMA2; (+) strand; PAM type: NRG; PAM sequence: AGG
tttgtgtgtctcacgtttag

SEQ ID NO: 127596 - DNA, 20 bp, Artificial Sequence
  Description of Artificial Sequence: Synthetic oligonucleotide
  Target: LAMA2; (+) strand; PAM type: NRG; PAM sequence: GGG
ttgtgtgtctcacgtttaga

SEQ ID NO: 127597 - DNA, 20 bp, Artificial Sequence
  Description of Artificial Sequence: Synthetic oligonucleotide
  Target: LAMA2; (+) strand; PAM type: NRG; PAM sequence: TAG
tgtgtctcacgtttagaggg

SEQ ID NO: 127598 - DNA, 20 bp, Artificial Sequence
  Description of Artificial Sequence: Synthetic oligonucleotide
  Target: LAMA2; (+) strand; PAM type: NRG; PAM sequence: AAG
tcacgtttagagggtagctt

SEQ ID NO: 127599 - DNA, 20 bp, Artificial Sequence
  Description of Artificial Sequence: Synthetic oligonucleotide
  Target: LAMA2; (+) strand; PAM type: NRG; PAM sequence: GAG
acgtttagagggtagcttaa

SEQ ID NO: 127600 - DNA, 20 bp, Artificial Sequence
  Description of Artificial Sequence: Synthetic oligonucleotide
  Target: LAMA2; (+) strand; PAM type: NRG; PAM sequence: AGG
cgtttagagggtagcttaag

SEQ ID NO: 127601 - DNA, 20 bp, Artificial Sequence
  Description of Artificial Sequence: Synthetic oligonucleotide
  Target: LAMA2; (+) strand; PAM type: NRG; PAM sequence: GAG
tttaactgcatgactattgt

SEQ ID NO: 127602 - DNA, 20 bp, Artificial Sequence
  Description of Artificial Sequence: Synthetic oligonucleotide
  Target: LAMA2; (+) strand; PAM type: NRG; PAM sequence: AGG
ttaactgcatgactattgtg

SEQ ID NO: 127603 - DNA, 20 bp, Artificial Sequence
  Description of Artificial Sequence: Synthetic oligonucleotide
  Target: LAMA2; (+) strand; PAM type: NRG; PAM sequence: GAG
aactgcatgactattgtgag

SEQ ID NO: 127604 - DNA, 20 bp, Artificial Sequence
  Description of Artificial Sequence: Synthetic oligonucleotide
  Target: LAMA2; (+) strand; PAM type: NRG; PAM sequence: AGG
actgcatgactattgtgagg

SEQ ID NO: 127605 - DNA, 20 bp, Artificial Sequence
  Description of Artificial Sequence: Synthetic oligonucleotide
  Target: LAMA2; (+) strand; PAM type: NRG; PAM sequence: GAG
attgtgaggaggatacttat

SEQ ID NO: 127606 - DNA, 20 bp, Artificial Sequence
  Description of Artificial Sequence: Synthetic oligonucleotide
  Target: LAMA2; (+) strand; PAM type: NRG; PAM sequence: TGG
tgagttgttcttcatttcca

SEQ ID NO: 127607 - DNA, 20 bp, Artificial Sequence
  Description of Artificial Sequence: Synthetic oligonucleotide
  Target: LAMA2; (+) strand; PAM type: NRG; PAM sequence: GGG
gagttgttcttcatttccat

SEQ ID NO: 127608 - DNA, 20 bp, Artificial Sequence
  Description of Artificial Sequence: Synthetic oligonucleotide
  Target: LAMA2; (+) strand; PAM type: NRG; PAM sequence: GGG
agttgttcttcatttccatg

SEQ ID NO: 127609 - DNA, 20 bp, Artificial Sequence
  Description of Artificial Sequence: Synthetic oligonucleotide
  Target: LAMA2; (+) strand; PAM type: NRG; PAM sequence: AAG
ttcttcatttccatggggac

SEQ ID NO: 127610 - DNA, 20 bp, Artificial Sequence
  Description of Artificial Sequence: Synthetic oligonucleotide
  Target: LAMA2; (+) strand; PAM type: NRG; PAM sequence: AGG
tcttcatttccatggggaca

SEQ ID NO: 127611 - DNA, 20 bp, Artificial Sequence
  Description of Artificial Sequence: Synthetic oligonucleotide
  Target: LAMA2; (+) strand; PAM type: NRG; PAM sequence: CAG
ggacaaggacaatgaaaata

SEQ ID NO: 127612 - DNA, 20 bp, Artificial Sequence
  Description of Artificial Sequence: Synthetic oligonucleotide
  Target: LAMA2; (+) strand; PAM type: NRG; PAM sequence: CAG
aaaatacagtataatacatt

SEQ ID NO: 127613 - DNA, 20 bp, Artificial Sequence
  Description of Artificial Sequence: Synthetic oligonucleotide
  Target: LAMA2; (+) strand; PAM type: NRG; PAM sequence: GAG
aatacagtataatacattca

SEQ ID NO: 127614 - DNA, 20 bp, Artificial Sequence
  Description of Artificial Sequence: Synthetic oligonucleotide
  Target: LAMA2; (+) strand; PAM type: NRG; PAM sequence: TAG
taatacattcagagtgttat

SEQ ID NO: 127615 - DNA, 20 bp, Artificial Sequence
  Description of Artificial Sequence: Synthetic oligonucleotide
  Target: LAMA2; (+) strand; PAM type: NRG; PAM sequence: AAG
tacattcagagtgttattag

SEQ ID NO: 127616 - DNA, 20 bp, Artificial Sequence
  Description of Artificial Sequence: Synthetic oligonucleotide
  Target: LAMA2; (+) strand; PAM type: NRG; PAM sequence: TAG
ttcagagtgttattagaagt

SEQ ID NO: 127617 - DNA, 20 bp, Artificial Sequence
  Description of Artificial Sequence: Synthetic oligonucleotide
  Target: LAMA2; (+) strand; PAM type: NRG; PAM sequence: AGG
tcagagtgttattagaagtt

SEQ ID NO: 127618 - DNA, 20 bp, Artificial Sequence
  Description of Artificial Sequence: Synthetic oligonucleotide
  Target: LAMA2; (+) strand; PAM type: NRG; PAM sequence: TAG
gagtgttattagaagttagg

SEQ ID NO: 127619 - DNA, 20 bp, Artificial Sequence
  Description of Artificial Sequence: Synthetic oligonucleotide
  Target: LAMA2; (+) strand; PAM type: NRG; PAM sequence: AAG
cttttaattgttaaacaata

SEQ ID NO: 127620 - DNA, 20 bp, Artificial Sequence
  Description of Artificial Sequence: Synthetic oligonucleotide
  Target: LAMA2; (+) strand; PAM type: NRG; PAM sequence: TAG
aaagtaataacattgctcat

SEQ ID NO: 127621 - DNA, 20 bp, Artificial Sequence
  Description of Artificial Sequence: Synthetic oligonucleotide
  Target: LAMA2; (+) strand; PAM type: NRG; PAM sequence: AGG
aagtaataacattgctcatt

SEQ ID NO: 127622 - DNA, 20 bp, Artificial Sequence
  Description of Artificial Sequence: Synthetic oligonucleotide
  Target: LAMA2; (+) strand; PAM type: NRG; PAM sequence: AAG
tcattaggcatgtgcttatg

SEQ ID NO: 127623 - DNA, 20 bp, Artificial Sequence
  Description of Artificial Sequence: Synthetic oligonucleotide
  Target: LAMA2; (+) strand; PAM type: NRG; PAM sequence: AAG
catgtgcttatgaagacaaa

SEQ ID NO: 127624 - DNA, 20 bp, Artificial Sequence
  Description of Artificial Sequence: Synthetic oligonucleotide
  Target: LAMA2; (+) strand; PAM type: NRG; PAM sequence: AGG
atgtgcttatgaagacaaaa

SEQ ID NO: 127625 - DNA, 20 bp, Artificial Sequence
  Description of Artificial Sequence: Synthetic oligonucleotide
  Target: LAMA2; (+) strand; PAM type: NRG; PAM sequence: TAG
aaaggcctgatttactgatt

SEQ ID NO: 127626 - DNA, 20 bp, Artificial Sequence
  Description of Artificial Sequence: Synthetic oligonucleotide
  Target: LAMA2; (+) strand; PAM type: NRG; PAM sequence: TAG
gatttactgatttagtgatt

SEQ ID NO: 127627 - DNA, 20 bp, Artificial Sequence
  Description of Artificial Sequence: Synthetic oligonucleotide
  Target: LAMA2; (+) strand; PAM type: NRG; PAM sequence: AAG
ctgatttagtgatttagtcc

SEQ ID NO: 127628 - DNA, 20 bp, Artificial Sequence
  Description of Artificial Sequence: Synthetic oligonucleotide
  Target: LAMA2; (+) strand; PAM type: NRG; PAM sequence: AGG
tgatttagtgatttagtcca

SEQ ID NO: 127629 - DNA, 20 bp, Artificial Sequence
  Description of Artificial Sequence: Synthetic oligonucleotide
  Target: LAMA2; (+) strand; PAM type: NRG; PAM sequence: TGG
gctttgacatccatatgatg

SEQ ID NO: 127630 - DNA, 20 bp, Artificial Sequence
  Description of Artificial Sequence: Synthetic oligonucleotide
  Target: LAMA2; (+) strand; PAM type: NRG; PAM sequence: TGG
atccatatgatgtggacctc

SEQ ID NO: 127631 - DNA, 20 bp, Artificial Sequence
  Description of Artificial Sequence: Synthetic oligonucleotide
  Target: LAMA2; (+) strand; PAM type: NRG; PAM sequence: GGG
tccatatgatgtggacctct

SEQ ID NO: 127632 - DNA, 20 bp, Artificial Sequence
  Description of Artificial Sequence: Synthetic oligonucleotide
  Target: LAMA2; (+) strand; PAM type: NRG; PAM sequence: AAG
atgtggacctctgggtacta

SEQ ID NO: 127633 - DNA, 20 bp, Artificial Sequence
  Description of Artificial Sequence: Synthetic oligonucleotide
  Target: LAMA2; (+) strand; PAM type: NRG; PAM sequence: AAG
tggacctctgggtactaaag

SEQ ID NO: 127634 - DNA, 20 bp, Artificial Sequence
  Description of Artificial Sequence: Synthetic oligonucleotide
  Target: LAMA2; (+) strand; PAM type: NRG; PAM sequence: TAG
atcttatgcatgtatttctt

SEQ ID NO: 127635 - DNA, 20 bp, Artificial Sequence
  Description of Artificial Sequence: Synthetic oligonucleotide
  Target: LAMA2; (+) strand; PAM type: NRG; PAM sequence: AAG
tgcatgtatttctttagcta

SEQ ID NO: 127636 - DNA, 20 bp, Artificial Sequence
  Description of Artificial Sequence: Synthetic oligonucleotide
  Target: LAMA2; (+) strand; PAM type: NRG; PAM sequence: CAG
tgtatttctttagctaaaga

SEQ ID NO: 127637 - DNA, 20 bp, Artificial Sequence
  Description of Artificial Sequence: Synthetic oligonucleotide
  Target: LAMA2; (+) strand; PAM type: NRG; PAM sequence: GAG
tatttctttagctaaagaca

SEQ ID NO: 127638 - DNA, 20 bp, Artificial Sequence
  Description of Artificial Sequence: Synthetic oligonucleotide
  Target: LAMA2; (+) strand; PAM type: NRG; PAM sequence: AGG
atttctttagctaaagacag

SEQ ID NO: 127639 - DNA, 20 bp, Artificial Sequence
  Description of Artificial Sequence: Synthetic oligonucleotide
  Target: LAMA2; (+) strand; PAM type: NRG; PAM sequence: TAG
tctttagctaaagacagagg

SEQ ID NO: 127640 - DNA, 20 bp, Artificial Sequence
  Description of Artificial Sequence: Synthetic oligonucleotide
  Target: LAMA2; (+) strand; PAM type: NRG; PAM sequence: AAG
aatcaaataaaaattactcc

SEQ ID NO: 127641 - DNA, 20 bp, Artificial Sequence
  Description of Artificial Sequence: Synthetic oligonucleotide
  Target: LAMA2; (+) strand; PAM type: NRG; PAM sequence: TGG
aaaaattactccaagtttac

SEQ ID NO: 127642 - DNA, 20 bp, Artificial Sequence
  Description of Artificial Sequence: Synthetic oligonucleotide
  Target: LAMA2; (+) strand; PAM type: NRG; PAM sequence: CAG
tatttctcttcatttgaaaa

SEQ ID NO: 127643 - DNA, 20 bp, Artificial Sequence
  Description of Artificial Sequence: Synthetic oligonucleotide
  Target: LAMA2; (+) strand; PAM type: NRG; PAM sequence: AAG
tgaaaacagaattttctcaa

SEQ ID NO: 127644 - DNA, 20 bp, Artificial Sequence
  Description of Artificial Sequence: Synthetic oligonucleotide
  Target: LAMA2; (+) strand; PAM type: NRG; PAM sequence: AGG
gaaaacagaattttctcaaa

SEQ ID NO: 127645 - DNA, 20 bp, Artificial Sequence
  Description of Artificial Sequence: Synthetic oligonucleotide
  Target: LAMA2; (+) strand; PAM type: NRG; PAM sequence: AAG
cagaattttctcaaaaggca

SEQ ID NO: 127646 - DNA, 20 bp, Artificial Sequence
  Description of Artificial Sequence: Synthetic oligonucleotide
  Target: LAMA2; (+) strand; PAM type: NRG; PAM sequence: AGG
agaattttctcaaaaggcaa

SEQ ID NO: 127647 - DNA, 20 bp, Artificial Sequence
  Description of Artificial Sequence: Synthetic oligonucleotide
  Target: LAMA2; (+) strand; PAM type: NRG; PAM sequence: AAG
tttctcaaaaggcaaaggaa

SEQ ID NO: 127648 - DNA, 20 bp, Artificial Sequence
  Description of Artificial Sequence: Synthetic oligonucleotide
  Target: LAMA2; (+) strand; PAM type: NRG; PAM sequence: AAG
tccacatctcttattaatga

SEQ ID NO: 127649 - DNA, 20 bp, Artificial Sequence
  Description of Artificial Sequence: Synthetic oligonucleotide
  Target: LAMA2; (+) strand; PAM type: NRG; PAM sequence: GAG
gaataaaacaaactactgat

SEQ ID NO: 127650 - DNA, 20 bp, Artificial Sequence
  Description of Artificial Sequence: Synthetic oligonucleotide
  Target: LAMA2; (+) strand; PAM type: NRG; PAM sequence: GAG
ataaaacaaactactgatga

SEQ ID NO: 127651 - DNA, 20 bp, Artificial Sequence
  Description of Artificial Sequence: Synthetic oligonucleotide
  Target: LAMA2; (+) strand; PAM type: NRG; PAM sequence: AAG
caaactactgatgagagata

SEQ ID NO: 127652 - DNA, 20 bp, Artificial Sequence
  Description of Artificial Sequence: Synthetic oligonucleotide
  Target: LAMA2; (+) strand; PAM type: NRG; PAM sequence: TAG
gagataaagataattatttt

SEQ ID NO: 127653 - DNA, 20 bp, Artificial Sequence
  Description of Artificial Sequence: Synthetic oligonucleotide
  Target: LAMA2; (+) strand; PAM type: NRG; PAM sequence: TGG
tcttttaaatattccttttt

SEQ ID NO: 127654 - DNA, 20 bp, Artificial Sequence
  Description of Artificial Sequence: Synthetic oligonucleotide
  Target: LAMA2; (+) strand; PAM type: NRG; PAM sequence: AAG
taaatattccttttttggaa

SEQ ID NO: 127655 - DNA, 20 bp, Artificial Sequence
  Description of Artificial Sequence: Synthetic oligonucleotide
  Target: LAMA2; (+) strand; PAM type: NRG; PAM sequence: AAG
cttttttggaaaagcaaaac

SEQ ID NO: 127656 - DNA, 20 bp, Artificial Sequence
  Description of Artificial Sequence: Synthetic oligonucleotide
  Target: LAMA2; (+) strand; PAM type: NRG; PAM sequence: TGG
aaaacaagacatgattatat

SEQ ID NO: 127657 - DNA, 20 bp, Artificial Sequence
  Description of Artificial Sequence: Synthetic oligonucleotide
  Target: LAMA2; (+) strand; PAM type: NRG; PAM sequence: GGG
aaacaagacatgattatatt

SEQ ID NO: 127658 - DNA, 20 bp, Artificial Sequence
  Description of Artificial Sequence: Synthetic oligonucleotide
  Target: LAMA2; (+) strand; PAM type: NRG; PAM sequence: GAG
acaagacatgattatattgg

SEQ ID NO: 127659 - DNA, 20 bp, Artificial Sequence
  Description of Artificial Sequence: Synthetic oligonucleotide
  Target: LAMA2; (+) strand; PAM type: NRG; PAM sequence: AAG
agacatgattatattgggag

SEQ ID NO: 127660 - DNA, 20 bp, Artificial Sequence
  Description of Artificial Sequence: Synthetic oligonucleotide
  Target: LAMA2; (+) strand; PAM type: NRG; PAM sequence: TGG
tgattatattgggagaagaa

SEQ ID NO: 127661 - DNA, 20 bp, Artificial Sequence
  Description of Artificial Sequence: Synthetic oligonucleotide
  Target: LAMA2; (+) strand; PAM type: NRG; PAM sequence: AAG
tgggagaagaatggtgaccc

SEQ ID NO: 127662 - DNA, 20 bp, Artificial Sequence
  Description of Artificial Sequence: Synthetic oligonucleotide
  Target: LAMA2; (+) strand; PAM type: NRG; PAM sequence: TAG
aagaatggtgacccaagaac

SEQ ID NO: 127663 - DNA, 20 bp, Artificial Sequence
  Description of Artificial Sequence: Synthetic oligonucleotide
  Target: LAMA2; (+) strand; PAM type: NRG; PAM sequence: TGG
atggtgacccaagaactaga

SEQ ID NO: 127664 - DNA, 20 bp, Artificial Sequence
  Description of Artificial Sequence: Synthetic oligonucleotide
  Target: LAMA2; (+) strand; PAM type: NRG; PAM sequence: TGG
agaactagatggccttcttc

SEQ ID NO: 127665 - DNA, 20 bp, Artificial Sequence
  Description of Artificial Sequence: Synthetic oligonucleotide
  Target: LAMA2; (+) strand; PAM type: NRG; PAM sequence: CGG
tagatggccttcttctggta

SEQ ID NO: 127666 - DNA, 20 bp, Artificial Sequence
  Description of Artificial Sequence: Synthetic oligonucleotide
  Target: LAMA2; (+) strand; PAM type: NRG; PAM sequence: TGG
ggtacggttctttcactatc

SEQ ID NO: 127667 - DNA, 20 bp, Artificial Sequence
  Description of Artificial Sequence: Synthetic oligonucleotide
  Target: LAMA2; (+) strand; PAM type: NRG; PAM sequence: AAG
cactatctggtgtatctctg

SEQ ID NO: 127668 - DNA, 20 bp, Artificial Sequence
  Description of Artificial Sequence: Synthetic oligonucleotide
  Target: LAMA2; (+) strand; PAM type: NRG; PAM sequence: AAG
gtatctctgaagtgtgatca

SEQ ID NO: 127669 - DNA, 20 bp, Artificial Sequence
  Description of Artificial Sequence: Synthetic oligonucleotide
  Target: LAMA2; (+) strand; PAM type: NRG; PAM sequence: AGG
tatctctgaagtgtgatcaa

SEQ ID NO: 127670 - DNA, 20 bp, Artificial Sequence
  Description of Artificial Sequence: Synthetic oligonucleotide
  Target: LAMA2; (+) strand; PAM type: NRG; PAM sequence: TAG
caaaggtaactgatcataac

SEQ ID NO: 127671 - DNA, 20 bp, Artificial Sequence
  Description of Artificial Sequence: Synthetic oligonucleotide
  Target: LAMA2; (+) strand; PAM type: NRG; PAM sequence: AAG
tcataactagataatcgtta

SEQ ID NO: 127672 - DNA, 20 bp, Artificial Sequence
  Description of Artificial Sequence: Synthetic oligonucleotide
  Target: LAMA2; (+) strand; PAM type: NRG; PAM sequence: AAG
tttcttcccttattgatact

SEQ ID NO: 127673 - DNA, 20 bp, Artificial Sequence
  Description of Artificial Sequence: Synthetic oligonucleotide
  Target: LAMA2; (+) strand; PAM type: NRG; PAM sequence: AAG
gatactaagaccttgatact

SEQ ID NO: 127674 - DNA, 20 bp, Artificial Sequence
  Description of Artificial Sequence: Synthetic oligonucleotide
  Target: LAMA2; (+) strand; PAM type: NRG; PAM sequence: TGG
gatactaagttgttcacaac

SEQ ID NO: 127675 - DNA, 20 bp, Artificial Sequence
  Description of Artificial Sequence: Synthetic oligonucleotide
  Target: LAMA2; (+) strand; PAM type: NRG; PAM sequence: TAG
ttcacaactggcccacattc

SEQ ID NO: 127676 - DNA, 20 bp, Artificial Sequence
  Description of Artificial Sequence: Synthetic oligonucleotide
  Target: LAMA2; (+) strand; PAM type: NRG; PAM sequence: AGG
tcacaactggcccacattct

SEQ ID NO: 127677 - DNA, 20 bp, Artificial Sequence
  Description of Artificial Sequence: Synthetic oligonucleotide
  Target: LAMA2; (+) strand; PAM type: NRG; PAM sequence: TGG
cacattctaggttgaaatga

SEQ ID NO: 127678 - DNA, 20 bp, Artificial Sequence
  Description of Artificial Sequence: Synthetic oligonucleotide
  Target: LAMA2; (+) strand; PAM type: NRG; PAM sequence: TGG
gttgaaatgatggtgcatgt

SEQ ID NO: 127679 - DNA, 20 bp, Artificial Sequence
  Description of Artificial Sequence: Synthetic oligonucleotide
  Target: LAMA2; (+) strand; PAM type: NRG; PAM sequence: GAG
tgaaatgatggtgcatgttg

SEQ ID NO: 127680 - DNA, 20 bp, Artificial Sequence
  Description of Artificial Sequence: Synthetic oligonucleotide
  Target: LAMA2; (+) strand; PAM type: NRG; PAM sequence: TGG
atgtacaaataaataccata

SEQ ID NO: 127681 - DNA, 20 bp, Artificial Sequence
  Description of Artificial Sequence: Synthetic oligonucleotide
  Target: LAMA2; (+) strand; PAM type: NRG; PAM sequence: TAG
tactactgtgaaaatgtatg

SEQ ID NO: 127682 - DNA, 20 bp, Artificial Sequence
  Description of Artificial Sequence: Synthetic oligonucleotide
  Target: LAMA2; (+) strand; PAM type: NRG; PAM sequence: TGG
aaaatgtatgtagaaaatgc

SEQ ID NO: 127683 - DNA, 20 bp, Artificial Sequence
  Description of Artificial Sequence: Synthetic oligonucleotide
  Target: LAMA2; (+) strand; PAM type: NRG; PAM sequence: GGG
aaatgtatgtagaaaatgct

SEQ ID NO: 127684 - DNA, 20 bp, Artificial Sequence
  Description of Artificial Sequence: Synthetic oligonucleotide
  Target: LAMA2; (+) strand; PAM type: NRG; PAM sequence: GGG
aatgtatgtagaaaatgctg

SEQ ID NO: 127685 - DNA, 20 bp, Artificial Sequence
  Description of Artificial Sequence: Synthetic oligonucleotide
  Target: LAMA2; (+) strand; PAM type: NRG; PAM sequence: TGG
tagaaaatgctggggtaata

SEQ ID NO: 127686 - DNA, 20 bp, Artificial Sequence
  Description of Artificial Sequence: Synthetic oligonucleotide
  Target: LAMA2; (+) strand; PAM type: NRG; PAM sequence: TAG
taataatctaatttcttacc

SEQ ID NO: 127687 - DNA, 20 bp, Artificial Sequence
  Description of Artificial Sequence: Synthetic oligonucleotide
  Target: LAMA2; (+) strand; PAM type: NRG; PAM sequence: TAG
taatctaatttcttacctag

SEQ ID NO: 127688 - DNA, 20 bp, Artificial Sequence
  Description of Artificial Sequence: Synthetic oligonucleotide
  Target: LAMA2; (+) strand; PAM type: NRG; PAM sequence: CAG
ctaatttcttacctagtaga

SEQ ID NO: 127689 - DNA, 20 bp, Artificial Sequence
  Description of Artificial Sequence: Synthetic oligonucleotide
  Target: LAMA2; (+) strand; PAM type: NRG; PAM sequence: TGG
acagtcaacatttccaatca

SEQ ID NO: 127690 - DNA, 20 bp, Artificial Sequence
  Description of Artificial Sequence: Synthetic oligonucleotide
  Target: LAMA2; (+) strand; PAM type: NRG; PAM sequence: TAG
ttccaatcatggaaatgaac

SEQ ID NO: 127691 - DNA, 20 bp, Artificial Sequence
  Description of Artificial Sequence: Synthetic oligonucleotide
  Target: LAMA2; (+) strand; PAM type: NRG; PAM sequence: TGG
taactgaaatccttcacatc

SEQ ID NO: 127692 - DNA, 20 bp, Artificial Sequence
  Description of Artificial Sequence: Synthetic oligonucleotide
  Target: LAMA2; (+) strand; PAM type: NRG; PAM sequence: TAG
ccttcacatctggctatctt

SEQ ID NO: 127693 - DNA, 20 bp, Artificial Sequence
  Description of Artificial Sequence: Synthetic oligonucleotide
  Target: LAMA2; (+) strand; PAM type: NRG; PAM sequence: AGG
cttcacatctggctatcttt

SEQ ID NO: 127694 - DNA, 20 bp, Artificial Sequence
  Description of Artificial Sequence: Synthetic oligonucleotide
  Target: LAMA2; (+) strand; PAM type: NRG; PAM sequence: GAG
taaattatgtgaaattcact

SEQ ID NO: 127695 - DNA, 20 bp, Artificial Sequence
  Description of Artificial Sequence: Synthetic oligonucleotide
  Target: LAMA2; (+) strand; PAM type: NRG; PAM sequence: CAG
aattcactgagtattttcca

SEQ ID NO: 127696 - DNA, 20 bp, Artificial Sequence
  Description of Artificial Sequence: Synthetic oligonucleotide
  Target: LAMA2; (+) strand; PAM type: NRG; PAM sequence: GAG
ttcactgagtattttccaca

SEQ ID NO: 127697 - DNA, 20 bp, Artificial Sequence
  Description of Artificial Sequence: Synthetic oligonucleotide
  Target: LAMA2; (+) strand; PAM type: NRG; PAM sequence: AAG
taaatcaaaatgttacatca

SEQ ID NO: 127698 - DNA, 20 bp, Artificial Sequence
  Description of Artificial Sequence: Synthetic oligonucleotide
  Target: LAMA2; (+) strand; PAM type: NRG; PAM sequence: AGG
aaatcaaaatgttacatcaa

SEQ ID NO: 127699 - DNA, 20 bp, Artificial Sequence
  Description of Artificial Sequence: Synthetic oligonucleotide
  Target: LAMA2; (+) strand; PAM type: NRG; PAM sequence: AAG
tcaaaatgttacatcaaagg

SEQ ID NO: 127700 - DNA, 20 bp, Artificial Sequence
  Description of Artificial Sequence: Synthetic oligonucleotide
  Target: LAMA2; (+) strand; PAM type: NRG; PAM sequence: GAG
aaaatgttacatcaaaggaa

SEQ ID NO: 127701 - DNA, 20 bp, Artificial Sequence
  Description of Artificial Sequence: Synthetic oligonucleotide
  Target: LAMA2; (+) strand; PAM type: NRG; PAM sequence: AAG
caaaggaagagttgcatcaa

SEQ ID NO: 127702 - DNA, 20 bp, Artificial Sequence
  Description of Artificial Sequence: Synthetic oligonucleotide
  Target: LAMA2; (+) strand; PAM type: NRG; PAM sequence: CAG
gagttgcatcaaaagaacct

SEQ ID NO: 127703 - DNA, 20 bp, Artificial Sequence
  Description of Artificial Sequence: Synthetic oligonucleotide
  Target: LAMA2; (+) strand; PAM type: NRG; PAM sequence: TAG
cacttgtctgtttaaattat

SEQ ID NO: 127704 - DNA, 20 bp, Artificial Sequence
  Description of Artificial Sequence: Synthetic oligonucleotide
  Target: LAMA2; (+) strand; PAM type: NRG; PAM sequence: AAG
tctgtttaaattattagcaa

SEQ ID NO: 127705 - DNA, 20 bp, Artificial Sequence
  Description of Artificial Sequence: Synthetic oligonucleotide
  Target: LAMA2; (+) strand; PAM type: NRG; PAM sequence: CAG
gtttaaattattagcaaaag

SEQ ID NO: 127706 - DNA, 20 bp, Artificial Sequence
  Description of Artificial Sequence: Synthetic oligonucleotide
  Target: LAMA2; (+) strand; PAM type: NRG; PAM sequence: CAG
caaaagcagctctgttatcc

SEQ ID NO: 127707 - DNA, 20 bp, Artificial Sequence
  Description of Artificial Sequence: Synthetic oligonucleotide
  Target: LAMA2; (+) strand; PAM type: NRG; PAM sequence: AAG
gctctgttatcccagcttct

SEQ ID NO: 127708 - DNA, 20 bp, Artificial Sequence
  Description of Artificial Sequence: Synthetic oligonucleotide
  Target: LAMA2; (+) strand; PAM type: NRG; PAM sequence: CAG
atcccagcttctaagctaac

SEQ ID NO: 127709 - DNA, 20 bp, Artificial Sequence
  Description of Artificial Sequence: Synthetic oligonucleotide
  Target: LAMA2; (+) strand; PAM type: NRG; PAM sequence: TGG
gctaaccagactcatcattt

SEQ ID NO: 127710 - DNA, 20 bp, Artificial Sequence
  Description of Artificial Sequence: Synthetic oligonucleotide
  Target: LAMA2; (+) strand; PAM type: NRG; PAM sequence: TGG
tttcatgtatgcttttccta

SEQ ID NO: 127711 - DNA, 20 bp, Artificial Sequence
  Description of Artificial Sequence: Synthetic oligonucleotide
  Target: LAMA2; (+) strand; PAM type: NRG; PAM sequence: AAG
aattactaataaatgctgac

SEQ ID NO: 127712 - DNA, 20 bp, Artificial Sequence
  Description of Artificial Sequence: Synthetic oligonucleotide
  Target: LAMA2; (+) strand; PAM type: NRG; PAM sequence: AGG
attactaataaatgctgaca

SEQ ID NO: 127713 - DNA, 20 bp, Artificial Sequence
  Description of Artificial Sequence: Synthetic oligonucleotide
  Target: LAMA2; (+) strand; PAM type: NRG; PAM sequence: GAG
tactaataaatgctgacaag

SEQ ID NO: 127714 - DNA, 20 bp, Artificial Sequence
  Description of Artificial Sequence: Synthetic oligonucleotide
  Target: LAMA2; (+) strand; PAM type: NRG; PAM sequence: GAG
ctaataaatgctgacaagga

SEQ ID NO: 127715 - DNA, 20 bp, Artificial Sequence
  Description of Artificial Sequence: Synthetic oligonucleotide
  Target: LAMA2; (+) strand; PAM type: NRG; PAM sequence: GAG
aataaatgctgacaaggaga

SEQ ID NO: 127716 - DNA, 20 bp, Artificial Sequence
  Description of Artificial Sequence: Synthetic oligonucleotide
  Target: LAMA2; (+) strand; PAM type: NRG; PAM sequence: AGG
ataaatgctgacaaggagag

SEQ ID NO: 127717 - DNA, 20 bp, Artificial Sequence
  Description of Artificial Sequence: Synthetic oligonucleotide
  Target: LAMA2; (+) strand; PAM type: NRG; PAM sequence: CAG
acaaggagagaggttaaaac

SEQ ID NO: 127718 - DNA, 20 bp, Artificial Sequence
  Description of Artificial Sequence: Synthetic oligonucleotide
  Target: LAMA2; (+) strand; PAM type: NRG; PAM sequence: AGG
caaggagagaggttaaaacc

SEQ ID NO: 127719 - DNA, 20 bp, Artificial Sequence
  Description of Artificial Sequence: Synthetic oligonucleotide
  Target: LAMA2; (+) strand; PAM type: NRG; PAM sequence: AAG
ggagagaggttaaaaccagg

SEQ ID NO: 127720 - DNA, 20 bp, Artificial Sequence
  Description of Artificial Sequence: Synthetic oligonucleotide
  Target: LAMA2; (+) strand; PAM type: NRG; PAM sequence: TAG
aaccaggaagccatgccttt

SEQ ID NO: 127721 - DNA, 20 bp, Artificial Sequence
  Description of Artificial Sequence: Synthetic oligonucleotide
  Target: LAMA2; (+) strand; PAM type: NRG; PAM sequence: TGG
acattcattgaaatgctatc

SEQ ID NO: 127722 - DNA, 20 bp, Artificial Sequence
  Description of Artificial Sequence: Synthetic oligonucleotide
  Target: LAMA2; (+) strand; PAM type: NRG; PAM sequence: GGG
cattcattgaaatgctatct

SEQ ID NO: 127723 - DNA, 20 bp, Artificial Sequence
  Description of Artificial Sequence: Synthetic oligonucleotide
  Target: LAMA2; (+) strand; PAM type: NRG; PAM sequence: AAG
attgaaatgctatctgggtg

SEQ ID NO: 127724 - DNA, 20 bp, Artificial Sequence
  Description of Artificial Sequence: Synthetic oligonucleotide
  Target: LAMA2; (+) strand; PAM type: NRG; PAM sequence: GAG
tgctatctgggtgaagcact

SEQ ID NO: 127725 - DNA, 20 bp, Artificial Sequence
  Description of Artificial Sequence: Synthetic oligonucleotide
  Target: LAMA2; (+) strand; PAM type: NRG; PAM sequence: TAG
tgagaaattaatcatctgaa

SEQ ID NO: 127726 - DNA, 20 bp, Artificial Sequence
  Description of Artificial Sequence: Synthetic oligonucleotide
  Target: LAMA2; (+) strand; PAM type: NRG; PAM sequence: TAG
catctgaatagtctaaatta

SEQ ID NO: 127727 - DNA, 20 bp, Artificial Sequence
  Description of Artificial Sequence: Synthetic oligonucleotide
  Target: LAMA2; (+) strand; PAM type: NRG; PAM sequence: AAG
agtctaaattatagtacatg

SEQ ID NO: 127728 - DNA, 20 bp, Artificial Sequence
  Description of Artificial Sequence: Synthetic oligonucleotide
  Target: LAMA2; (+) strand; PAM type: NRG; PAM sequence: TAG
acatgaagaatgcaacttgc

SEQ ID NO: 127729 - DNA, 20 bp, Artificial Sequence
  Description of Artificial Sequence: Synthetic oligonucleotide
  Target: LAMA2; (+) strand; PAM type: NRG; PAM sequence: AGG
catgaagaatgcaacttgct

SEQ ID NO: 127730 - DNA, 20 bp, Artificial Sequence
  Description of Artificial Sequence: Synthetic oligonucleotide
  Target: LAMA2; (+) strand; PAM type: NRG; PAM sequence: GGG
atgaagaatgcaacttgcta

SEQ ID NO: 127731 - DNA, 20 bp, Artificial Sequence
  Description of Artificial Sequence: Synthetic oligonucleotide
  Target: LAMA2; (+) strand; PAM type: NRG; PAM sequence: GAG
gaagaatgcaacttgctagg

SEQ ID NO: 127732 - DNA, 20 bp, Artificial Sequence
  Description of Artificial Sequence: Synthetic oligonucleotide
  Target: LAMA2; (+) strand; PAM type: NRG; PAM sequence: CAG
ttgctagggagacatacctt

SEQ ID NO: 127733 - DNA, 20 bp, Artificial Sequence
  Description of Artificial Sequence: Synthetic oligonucleotide
  Target: LAMA2; (+) strand; PAM type: NRG; PAM sequence: GAG
acataccttcagcattattc

SEQ ID NO: 127734 - DNA, 20 bp, Artificial Sequence
  Description of Artificial Sequence: Synthetic oligonucleotide
  Target: LAMA2; (+) strand; PAM type: NRG; PAM sequence: AGG
cataccttcagcattattcg

SEQ ID NO: 127735 - DNA, 20 bp, Artificial Sequence
  Description of Artificial Sequence: Synthetic oligonucleotide
  Target: LAMA2; (+) strand; PAM type: NRG; PAM sequence: TGG
atgtttgtatgcttcatgtg

SEQ ID NO: 127736 - DNA, 20 bp, Artificial Sequence
  Description of Artificial Sequence: Synthetic oligonucleotide
  Target: LAMA2; (+) strand; PAM type: NRG; PAM sequence: AAG
cttcatgtgtggtatcccaa

SEQ ID NO: 127737 - DNA, 20 bp, Artificial Sequence
  Description of Artificial Sequence: Synthetic oligonucleotide
  Target: LAMA2; (+) strand; PAM type: NRG; PAM sequence: AGG
ttcatgtgtggtatcccaaa

SEQ ID NO: 127738 - DNA, 20 bp, Artificial Sequence
  Description of Artificial Sequence: Synthetic oligonucleotide
  Target: LAMA2; (+) strand; PAM type: NRG; PAM sequence: CAG
tgctgatcgcctttcatgaa

SEQ ID NO: 127739 - DNA, 20 bp, Artificial Sequence
  Description of Artificial Sequence: Synthetic oligonucleotide
  Target: LAMA2; (+) strand; PAM type: NRG; PAM sequence: TGG
tgatcgcctttcatgaacag

SEQ ID NO: 127740 - DNA, 20 bp, Artificial Sequence
  Description of Artificial Sequence: Synthetic oligonucleotide
  Target: LAMA2; (+) strand; PAM type: NRG; PAM sequence: CAG
aatgcactttgaaaaaaaca

SEQ ID NO: 127741 - DNA, 20 bp, Artificial Sequence
  Description of Artificial Sequence: Synthetic oligonucleotide
  Target: LAMA2; (+) strand; PAM type: NRG; PAM sequence: AAG
aaacacagtctttttctttg

SEQ ID NO: 127742 - DNA, 20 bp, Artificial Sequence
  Description of Artificial Sequence: Synthetic oligonucleotide
  Target: LAMA2; (+) strand; PAM type: NRG; PAM sequence: AGG
aacacagtctttttctttga

SEQ ID NO: 127743 - DNA, 20 bp, Artificial Sequence
  Description of Artificial Sequence: Synthetic oligonucleotide
  Target: LAMA2; (+) strand; PAM type: NRG; PAM sequence: AAG
cagtctttttctttgaaggt

SEQ ID NO: 127744 - DNA, 20 bp, Artificial Sequence
  Description of Artificial Sequence: Synthetic oligonucleotide
  Target: LAMA2; (+) strand; PAM type: NRG; PAM sequence: AAG
tttctttgaaggtaagttgt

SEQ ID NO: 127745 - DNA, 20 bp, Artificial Sequence
  Description of Artificial Sequence: Synthetic oligonucleotide
  Target: LAMA2; (+) strand; PAM type: NRG; PAM sequence: AAG
tttgaaggtaagttgtaaga

SEQ ID NO: 127746 - DNA, 20 bp, Artificial Sequence
  Description of Artificial Sequence: Synthetic oligonucleotide
  Target: LAMA2; (+) strand; PAM type: NRG; PAM sequence: GAG
tgaaggtaagttgtaagaaa

SEQ ID NO: 127747 - DNA, 20 bp, Artificial Sequence
  Description of Artificial Sequence: Synthetic oligonucleotide
  Target: LAMA2; (+) strand; PAM type: NRG; PAM sequence: AAG
gtaagaaagagaaatcatta

SEQ ID NO: 127748 - DNA, 20 bp, Artificial Sequence
  Description of Artificial Sequence: Synthetic oligonucleotide
  Target: LAMA2; (+) strand; PAM type: NRG; PAM sequence: TGG
aaagagaaatcattaaagcc

SEQ ID NO: 127749 - DNA, 20 bp, Artificial Sequence
  Description of Artificial Sequence: Synthetic oligonucleotide
  Target: LAMA2; (+) strand; PAM type: NRG; PAM sequence: GAG
agagaaatcattaaagcctg

SEQ ID NO: 127750 - DNA, 20 bp, Artificial Sequence
  Description of Artificial Sequence: Synthetic oligonucleotide
  Target: LAMA2; (+) strand; PAM type: NRG; PAM sequence: CAG
aatcattaaagcctggagtg

SEQ ID NO: 127751 - DNA, 20 bp, Artificial Sequence
  Description of Artificial Sequence: Synthetic oligonucleotide
  Target: LAMA2; (+) strand; PAM type: NRG; PAM sequence: TGG
agaattgttgtcgactgaaa

SEQ ID NO: 127752 - DNA, 20 bp, Artificial Sequence
  Description of Artificial Sequence: Synthetic oligonucleotide
  Target: LAMA2; (+) strand; PAM type: NRG; PAM sequence: AAG
ttgtcgactgaaatggtatc

SEQ ID NO: 127753 - DNA, 20 bp, Artificial Sequence
  Description of Artificial Sequence: Synthetic oligonucleotide
  Target: LAMA2; (+) strand; PAM type: NRG; PAM sequence: GAG
cgactgaaatggtatcaagt

SEQ ID NO: 127754 - DNA, 20 bp, Artificial Sequence
  Description of Artificial Sequence: Synthetic oligonucleotide
  Target: LAMA2; (+) strand; PAM type: NRG; PAM sequence: TGG
aatgcctcatattttaaaaa

SEQ ID NO: 127755 - DNA, 20 bp, Artificial Sequence
  Description of Artificial Sequence: Synthetic oligonucleotide
  Target: LAMA2; (+) strand; PAM type: NRG; PAM sequence: GGG
atgcctcatattttaaaaat

SEQ ID NO: 127756 - DNA, 20 bp, Artificial Sequence
  Description of Artificial Sequence: Synthetic oligonucleotide
  Target: LAMA2; (+) strand; PAM type: NRG; PAM sequence: TGG
attttatgtgatatctgaca

SEQ ID NO: 127757 - DNA, 20 bp, Artificial Sequence
  Description of Artificial Sequence: Synthetic oligonucleotide
  Target: LAMA2; (+) strand; PAM type: NRG; PAM sequence: GGG
ttttatgtgatatctgacat

SEQ ID NO: 127758 - DNA, 20 bp, Artificial Sequence
  Description of Artificial Sequence: Synthetic oligonucleotide
  Target: LAMA2; (+) strand; PAM type: NRG; PAM sequence: AAG
atgtgatatctgacatggga

SEQ ID NO: 127759 - DNA, 20 bp, Artificial Sequence
  Description of Artificial Sequence: Synthetic oligonucleotide
  Target: LAMA2; (+) strand; PAM type: NRG; PAM sequence: AGG
tgtgatatctgacatgggaa

SEQ ID NO: 127760 - DNA, 20 bp, Artificial Sequence
  Description of Artificial Sequence: Synthetic oligonucleotide
  Target: LAMA2; (+) strand; PAM type: NRG; PAM sequence: GGG
gtgatatctgacatgggaaa

SEQ ID NO: 127761 - DNA, 20 bp, Artificial Sequence
  Description of Artificial Sequence: Synthetic oligonucleotide
  Target: LAMA2; (+) strand; PAM type: NRG; PAM sequence: GAG
atgggaaagggatgcttgat

SEQ ID NO: 127762 - DNA, 20 bp, Artificial Sequence
  Description of Artificial Sequence: Synthetic oligonucleotide
  Target: LAMA2; (+) strand; PAM type: NRG; PAM sequence: TAG
ggaaagggatgcttgatgag

SEQ ID NO: 127763 - DNA, 20 bp, Artificial Sequence
  Description of Artificial Sequence: Synthetic oligonucleotide
  Target: LAMA2; (+) strand; PAM type: NRG; PAM sequence: TGG
agtagccaatgatgttgaac

SEQ ID NO: 127764 - DNA, 20 bp, Artificial Sequence
  Description of Artificial Sequence: Synthetic oligonucleotide
  Target: LAMA2; (+) strand; PAM type: NRG; PAM sequence: AAG
actgacttgtttttcttatg

SEQ ID NO: 127765 - DNA, 20 bp, Artificial Sequence
  Description of Artificial Sequence: Synthetic oligonucleotide
  Target: LAMA2; (+) strand; PAM type: NRG; PAM sequence: AGG
ctgacttgtttttcttatga

SEQ ID NO: 127766 - DNA, 20 bp, Artificial Sequence
  Description of Artificial Sequence: Synthetic oligonucleotide
  Target: LAMA2; (+) strand; PAM type: NRG; PAM sequence: CAG
acttgtttttcttatgaagg

SEQ ID NO: 127767 - DNA, 20 bp, Artificial Sequence
  Description of Artificial Sequence: Synthetic oligonucleotide
  Target: LAMA2; (+) strand; PAM type: NRG; PAM sequence: TAG
ttcttatgaaggcagcattt

SEQ ID NO: 127768 - DNA, 20 bp, Artificial Sequence
  Description of Artificial Sequence: Synthetic oligonucleotide
  Target: LAMA2; (+) strand; PAM type: NRG; PAM sequence: TAG
gtgtttgtctttctttctga

SEQ ID NO: 127769 - DNA, 20 bp, Artificial Sequence
  Description of Artificial Sequence: Synthetic oligonucleotide
  Target: LAMA2; (+) strand; PAM type: NRG; PAM sequence: AGG
tgtttgtctttctttctgat

SEQ ID NO: 127770 - DNA, 20 bp, Artificial Sequence
  Description of Artificial Sequence: Synthetic oligonucleotide
  Target: LAMA2; (+) strand; PAM type: NRG; PAM sequence: AAG
tttctgataggctctaattg

SEQ ID NO: 127771 - DNA, 20 bp, Artificial Sequence
  Description of Artificial Sequence: Synthetic oligonucleotide
  Target: LAMA2; (+) strand; PAM type: NRG; PAM sequence: AAG
taggctctaattgaagtttg

SEQ ID NO: 127772 - DNA, 20 bp, Artificial Sequence
  Description of Artificial Sequence: Synthetic oligonucleotide
  Target: LAMA2; (+) strand; PAM type: NRG; PAM sequence: AGG
aggctctaattgaagtttga

SEQ ID NO: 127773 - DNA, 20 bp, Artificial Sequence
  Description of Artificial Sequence: Synthetic oligonucleotide
  Target: LAMA2; (+) strand; PAM type: NRG; PAM sequence: TGG
aaggttcattacacaatgcc

SEQ ID NO: 127774 - DNA, 20 bp, Artificial Sequence
  Description of Artificial Sequence: Synthetic oligonucleotide
  Target: LAMA2; (+) strand; PAM type: NRG; PAM sequence: GGG
aggttcattacacaatgcct

SEQ ID NO: 127775 - DNA, 20 bp, Artificial Sequence
  Description of Artificial Sequence: Synthetic oligonucleotide
  Target: LAMA2; (+) strand; PAM type: NRG; PAM sequence: CAG
aatacaattcacctctccca

SEQ ID NO: 127776 - DNA, 20 bp, Artificial Sequence
  Description of Artificial Sequence: Synthetic oligonucleotide
  Target: LAMA2; (+) strand; PAM type: NRG; PAM sequence: TGG
acctctcccacagtgaatat

SEQ ID NO: 127777 - DNA, 20 bp, Artificial Sequence
  Description of Artificial Sequence: Synthetic oligonucleotide
  Target: LAMA2; (+) strand; PAM type: NRG; PAM sequence: TAG
tgaatattggcatgatttta

SEQ ID NO: 127778 - DNA, 20 bp, Artificial Sequence
  Description of Artificial Sequence: Synthetic oligonucleotide
  Target: LAMA2; (+) strand; PAM type: NRG; PAM sequence: AGG
gaatattggcatgattttat

SEQ ID NO: 127779 - DNA, 20 bp, Artificial Sequence
  Description of Artificial Sequence: Synthetic oligonucleotide
  Target: LAMA2; (+) strand; PAM type: NRG; PAM sequence: CAG
attggcatgattttatagga

SEQ ID NO: 127780 - DNA, 20 bp, Artificial Sequence
  Description of Artificial Sequence: Synthetic oligonucleotide
  Target: LAMA2; (+) strand; PAM type: NRG; PAM sequence: AGG
ttggcatgattttataggac

SEQ ID NO: 127781 - DNA, 20 bp, Artificial Sequence
  Description of Artificial Sequence: Synthetic oligonucleotide
  Target: LAMA2; (+) strand; PAM type: NRG; PAM sequence: GGG
tggcatgattttataggaca

SEQ ID NO: 127782 - DNA, 20 bp, Artificial Sequence
  Description of Artificial Sequence: Synthetic oligonucleotide
  Target: LAMA2; (+) strand; PAM type: NRG; PAM sequence: TAG
ttttataggacagggtactc

SEQ ID NO: 127783 - DNA, 20 bp, Artificial Sequence
  Description of Artificial Sequence: Synthetic oligonucleotide
  Target: LAMA2; (+) strand; PAM type: NRG; PAM sequence: GAG
ttataggacagggtactcta

SEQ ID NO: 127784 - DNA, 20 bp, Artificial Sequence
  Description of Artificial Sequence: Synthetic oligonucleotide
  Target: LAMA2; (+) strand; PAM type: NRG; PAM sequence: CAG
ggacagggtactctagagct

SEQ ID NO: 127785 - DNA, 20 bp, Artificial Sequence
  Description of Artificial Sequence: Synthetic oligonucleotide
  Target: LAMA2; (+) strand; PAM type: NRG; PAM sequence: TGG
agctcagctgtcataatatt

SEQ ID NO: 127786 - DNA, 20 bp, Artificial Sequence
  Description of Artificial Sequence: Synthetic oligonucleotide
  Target: LAMA2; (+) strand; PAM type: NRG; PAM sequence: TGG
ggctccaatttcattcataa

SEQ ID NO: 127787 - DNA, 20 bp, Artificial Sequence
  Description of Artificial Sequence: Synthetic oligonucleotide
  Target: LAMA2; (+) strand; PAM type: NRG; PAM sequence: CAG
ccaatttcattcataatgga

SEQ ID NO: 127788 - DNA, 20 bp, Artificial Sequence
  Description of Artificial Sequence: Synthetic oligonucleotide
  Target: LAMA2; (+) strand; PAM type: NRG; PAM sequence: CAG
gaatccctactttcaaatgt

SEQ ID NO: 127789 - DNA, 20 bp, Artificial Sequence
  Description of Artificial Sequence: Synthetic oligonucleotide
  Target: LAMA2; (+) strand; PAM type: NRG; PAM sequence: TGG
actttcaaatgtcagcacac

SEQ ID NO: 127790 - DNA, 20 bp, Artificial Sequence
  Description of Artificial Sequence: Synthetic oligonucleotide
  Target: LAMA2; (+) strand; PAM type: NRG; PAM sequence: AAG
gcacactggaacaaatatta

SEQ ID NO: 127791 - DNA, 20 bp, Artificial Sequence
  Description of Artificial Sequence: Synthetic oligonucleotide
  Target: LAMA2; (+) strand; PAM type: NRG; PAM sequence: TGG
ctggaacaaatattaaagaa

SEQ ID NO: 127792 - DNA, 20 bp, Artificial Sequence
  Description of Artificial Sequence: Synthetic oligonucleotide
  Target: LAMA2; (+) strand; PAM type: NRG; PAM sequence: GGG
tggaacaaatattaaagaat

SEQ ID NO: 127793 - DNA, 20 bp, Artificial Sequence
  Description of Artificial Sequence: Synthetic oligonucleotide
  Target: LAMA2; (+) strand; PAM type: NRG; PAM sequence: AAG
taaagaatgggtttgaatct

SEQ ID NO: 127794 - DNA, 20 bp, Artificial Sequence
  Description of Artificial Sequence: Synthetic oligonucleotide
  Target: LAMA2; (+) strand; PAM type: NRG; PAM sequence: TAG
agaatgggtttgaatctaag

SEQ ID NO: 127795 - DNA, 20 bp, Artificial Sequence
  Description of Artificial Sequence: Synthetic oligonucleotide
  Target: LAMA2; (+) strand; PAM type: NRG; PAM sequence: GAG
gggtttgaatctaagtagat

SEQ ID NO: 127796 - DNA, 20 bp, Artificial Sequence
  Description of Artificial Sequence: Synthetic oligonucleotide
  Target: LAMA2; (+) strand; PAM type: NRG; PAM sequence: AAG
agtagatgagtatttccttg

SEQ ID NO: 127797 - DNA, 20 bp, Artificial Sequence
  Description of Artificial Sequence: Synthetic oligonucleotide
  Target: LAMA2; (+) strand; PAM type: NRG; PAM sequence: TAG
ttccttgaagcaacatgtta

SEQ ID NO: 127798 - DNA, 20 bp, Artificial Sequence
  Description of Artificial Sequence: Synthetic oligonucleotide
  Target: LAMA2; (+) strand; PAM type: NRG; PAM sequence: CAG
atgtaaccttaaatgtttca

SEQ ID NO: 127799 - DNA, 20 bp, Artificial Sequence
  Description of Artificial Sequence: Synthetic oligonucleotide
  Target: LAMA2; (+) strand; PAM type: NRG; PAM sequence: AAG
aaaacacatactactcatca

SEQ ID NO: 127800 - DNA, 20 bp, Artificial Sequence
  Description of Artificial Sequence: Synthetic oligonucleotide
  Target: LAMA2; (+) strand; PAM type: NRG; PAM sequence: AAG
catcaaagtcatctttattt

SEQ ID NO: 127801 - DNA, 20 bp, Artificial Sequence
  Description of Artificial Sequence: Synthetic oligonucleotide
  Target: LAMA2; (+) strand; PAM type: NRG; PAM sequence: TAG
aagtcatctttatttaagct

SEQ ID NO: 127802 - DNA, 20 bp, Artificial Sequence
  Description of Artificial Sequence: Synthetic oligonucleotide
  Target: LAMA2; (+) strand; PAM type: NRG; PAM sequence: AGG
agtcatctttatttaagctt

SEQ ID NO: 127803 - DNA, 20 bp, Artificial Sequence
  Description of Artificial Sequence: Synthetic oligonucleotide
  Target: LAMA2; (+) strand; PAM type: NRG; PAM sequence: AAG
catctttatttaagcttagg

SEQ ID NO: 127804 - DNA, 20 bp, Artificial Sequence
  Description of Artificial Sequence: Synthetic oligonucleotide
  Target: LAMA2; (+) strand; PAM type: NRG; PAM sequence: TAG
tttaagcttaggaagaaaaa

SEQ ID NO: 127805 - DNA, 20 bp, Artificial Sequence
  Description of Artificial Sequence: Synthetic oligonucleotide
  Target: LAMA2; (+) strand; PAM type: NRG; PAM sequence: TAG
aaatctgaaatgtttgctct

SEQ ID NO: 127806 - DNA, 20 bp, Artificial Sequence
  Description of Artificial Sequence: Synthetic oligonucleotide
  Target: LAMA2; (+) strand; PAM type: NRG; PAM sequence: TGG
gtccacacacacttctcatc

SEQ ID NO: 127807 - DNA, 20 bp, Artificial Sequence
  Description of Artificial Sequence: Synthetic oligonucleotide
  Target: LAMA2; (+) strand; PAM type: NRG; PAM sequence: CAG
cacacacacttctcatctgg

SEQ ID NO: 127808 - DNA, 20 bp, Artificial Sequence
  Description of Artificial Sequence: Synthetic oligonucleotide
  Target: LAMA2; (+) strand; PAM type: NRG; PAM sequence: AGG
acacacacttctcatctggc

SEQ ID NO: 127809 - DNA, 20 bp, Artificial Sequence
  Description of Artificial Sequence: Synthetic oligonucleotide
  Target: LAMA2; (+) strand; PAM type: NRG; PAM sequence: TGG
aggacatttctgaatttatt

SEQ ID NO: 127810 - DNA, 20 bp, Artificial Sequence
  Description of Artificial Sequence: Synthetic oligonucleotide
  Target: LAMA2; (+) strand; PAM type: NRG; PAM sequence: GGG
ggacatttctgaatttattt

SEQ ID NO: 127811 - DNA, 20 bp, Artificial Sequence
  Description of Artificial Sequence: Synthetic oligonucleotide
  Target: LAMA2; (+) strand; PAM type: NRG; PAM sequence: CAG
ttgggaaattgaatatatgt

SEQ ID NO: 127812 - DNA, 20 bp, Artificial Sequence
  Description of Artificial Sequence: Synthetic oligonucleotide
  Target: LAMA2; (+) strand; PAM type: NRG; PAM sequence: AGG
tgggaaattgaatatatgtc

SEQ ID NO: 127813 - DNA, 20 bp, Artificial Sequence
  Description of Artificial Sequence: Synthetic oligonucleotide
  Target: LAMA2; (+) strand; PAM type: NRG; PAM sequence: TAG
gaaattgaatatatgtcagg

SEQ ID NO: 127814 - DNA, 20 bp, Artificial Sequence
  Description of Artificial Sequence: Synthetic oligonucleotide
  Target: LAMA2; (+) strand; PAM type: NRG; PAM sequence: AGG
aaattgaatatatgtcaggt

SEQ ID NO: 127815 - DNA, 20 bp, Artificial Sequence
  Description of Artificial Sequence: Synthetic oligonucleotide
  Target: LAMA2; (+) strand; PAM type: NRG; PAM sequence: TGG
gaatatatgtcaggtaggtt

SEQ ID NO: 127816 - DNA, 20 bp, Artificial Sequence
  Description of Artificial Sequence: Synthetic oligonucleotide
  Target: LAMA2; (+) strand; PAM type: NRG; PAM sequence: GGG
aatatatgtcaggtaggttt

SEQ ID NO: 127817 - DNA, 20 bp, Artificial Sequence
  Description of Artificial Sequence: Synthetic oligonucleotide
  Target: LAMA2; (+) strand; PAM type: NRG; PAM sequence: TGG
gtcaggtaggtttgggttgc

SEQ ID NO: 127818 - DNA, 20 bp, Artificial Sequence
  Description of Artificial Sequence: Synthetic oligonucleotide
  Target: LAMA2; (+) strand; PAM type: NRG; PAM sequence: GGG
tcaggtaggtttgggttgct

SEQ ID NO: 127819 - DNA, 20 bp, Artificial Sequence
  Description of Artificial Sequence: Synthetic oligonucleotide
  Target: LAMA2; (+) strand; PAM type: NRG; PAM sequence: GAG
gtttgggttgctgggtaaat

SEQ ID NO: 127820 - DNA, 20 bp, Artificial Sequence
  Description of Artificial Sequence: Synthetic oligonucleotide
  Target: LAMA2; (+) strand; PAM type: NRG; PAM sequence: CAG
ctgggtaaatgagtgtactt

SEQ ID NO: 127821 - DNA, 20 bp, Artificial Sequence
  Description of Artificial Sequence: Synthetic oligonucleotide
  Target: LAMA2; (+) strand; PAM type: NRG; PAM sequence: CAG
aaatgagtgtacttcagtgt

SEQ ID NO: 127822 - DNA, 20 bp, Artificial Sequence
  Description of Artificial Sequence: Synthetic oligonucleotide
  Target: LAMA2; (+) strand; PAM type: NRG; PAM sequence: AGG
aatgagtgtacttcagtgtc

SEQ ID NO: 127823 - DNA, 20 bp, Artificial Sequence
  Description of Artificial Sequence: Synthetic oligonucleotide
  Target: LAMA2; (+) strand; PAM type: NRG; PAM sequence: CAG
gtcaggactgtttttattaa

SEQ ID NO: 127824 - DNA, 20 bp, Artificial Sequence
  Description of Artificial Sequence: Synthetic oligonucleotide
  Target: LAMA2; (+) strand; PAM type: NRG; PAM sequence: TGG
tattaacagattttataaac

SEQ ID NO: 127825 - DNA, 20 bp, Artificial Sequence
  Description of Artificial Sequence: Synthetic oligonucleotide
  Target: LAMA2; (+) strand; PAM type: NRG; PAM sequence: TGG
acagattttataaactggct

SEQ ID NO: 127826 - DNA, 20 bp, Artificial Sequence
  Description of Artificial Sequence: Synthetic oligonucleotide
  Target: LAMA2; (+) strand; PAM type: NRG; PAM sequence: TAG
gattttataaactggcttgg

SEQ ID NO: 127827 - DNA, 20 bp, Artificial Sequence
  Description of Artificial Sequence: Synthetic oligonucleotide
  Target: LAMA2; (+) strand; PAM type: NRG; PAM sequence: CAG
taaactggcttggtagtttc

SEQ ID NO: 127828 - DNA, 20 bp, Artificial Sequence
  Description of Artificial Sequence: Synthetic oligonucleotide
  Target: LAMA2; (+) strand; PAM type: NRG; PAM sequence: TGG
cttggtagtttccagttctg

SEQ ID NO: 127829 - DNA, 20 bp, Artificial Sequence
  Description of Artificial Sequence: Synthetic oligonucleotide
  Target: LAMA2; (+) strand; PAM type: NRG; PAM sequence: AAG
gtagtttccagttctgtggc

SEQ ID NO: 127830 - DNA, 20 bp, Artificial Sequence
  Description of Artificial Sequence: Synthetic oligonucleotide
  Target: LAMA2; (+) strand; PAM type: NRG; PAM sequence: AAG
ataataaacctgtaacataa

SEQ ID NO: 127831 - DNA, 20 bp, Artificial Sequence
  Description of Artificial Sequence: Synthetic oligonucleotide
  Target: LAMA2; (+) strand; PAM type: NRG; PAM sequence: CAG
aaacctgtaacataaaagta

SEQ ID NO: 127832 - DNA, 20 bp, Artificial Sequence
  Description of Artificial Sequence: Synthetic oligonucleotide
  Target: LAMA2; (+) strand; PAM type: NRG; PAM sequence: AAG
acagaatacattcctgtttc

SEQ ID NO: 127833 - DNA, 20 bp, Artificial Sequence
  Description of Artificial Sequence: Synthetic oligonucleotide
  Target: LAMA2; (+) strand; PAM type: NRG; PAM sequence: GAG
agaatacattcctgtttcaa

SEQ ID NO: 127834 - DNA, 20 bp, Artificial Sequence
  Description of Artificial Sequence: Synthetic oligonucleotide
  Target: LAMA2; (+) strand; PAM type: NRG; PAM sequence: AAG
ttcctgtttcaagagtctgt

SEQ ID NO: 127835 - DNA, 20 bp, Artificial Sequence
  Description of Artificial Sequence: Synthetic oligonucleotide
  Target: LAMA2; (+) strand; PAM type: NRG; PAM sequence: GAG
cctgtttcaagagtctgtaa

SEQ ID NO: 127836 - DNA, 20 bp, Artificial Sequence
  Description of Artificial Sequence: Synthetic oligonucleotide
  Target: LAMA2; (+) strand; PAM type: NRG; PAM sequence: AGG
ctgtttcaagagtctgtaag

SEQ ID NO: 127837 - DNA, 20 bp, Artificial Sequence
  Description of Artificial Sequence: Synthetic oligonucleotide
  Target: LAMA2; (+) strand; PAM type: NRG; PAM sequence: GAG
gtttcaagagtctgtaagag

SEQ ID NO: 127838 - DNA, 20 bp, Artificial Sequence
  Description of Artificial Sequence: Synthetic oligonucleotide
  Target: LAMA2; (+) strand; PAM type: NRG; PAM sequence: CAG
aagaggagtcccctcatgaa

SEQ ID NO: 127839 - DNA, 20 bp, Artificial Sequence
  Description of Artificial Sequence: Synthetic oligonucleotide
  Target: LAMA2; (+) strand; PAM type: NRG; PAM sequence: GAG
ccctcatgaacagtttatat

SEQ ID NO: 127840 - DNA, 20 bp, Artificial Sequence
  Description of Artificial Sequence: Synthetic oligonucleotide
  Target: LAMA2; (+) strand; PAM type: NRG; PAM sequence: GAG
ctcatgaacagtttatatga

SEQ ID NO: 127841 - DNA, 20 bp, Artificial Sequence
  Description of Artificial Sequence: Synthetic oligonucleotide
  Target: LAMA2; (+) strand; PAM type: NRG; PAM sequence: AGG
tcatgaacagtttatatgag

SEQ ID NO: 127842 - DNA, 20 bp, Artificial Sequence
  Description of Artificial Sequence: Synthetic oligonucleotide
  Target: LAMA2; (+) strand; PAM type: NRG; PAM sequence: AAG
tatgagaggattataaaatg

SEQ ID NO: 127843 - DNA, 20 bp, Artificial Sequence
  Description of Artificial Sequence: Synthetic oligonucleotide
  Target: LAMA2; (+) strand; PAM type: NRG; PAM sequence: CAG
gaggattataaaatgaagtt

SEQ ID NO: 127844 - DNA, 20 bp, Artificial Sequence
  Description of Artificial Sequence: Synthetic oligonucleotide
  Target: LAMA2; (+) strand; PAM type: NRG; PAM sequence: CAG
gattataaaatgaagttcag

SEQ ID NO: 127845 - DNA, 20 bp, Artificial Sequence
  Description of Artificial Sequence: Synthetic oligonucleotide
  Target: LAMA2; (+) strand; PAM type: NRG; PAM sequence: TAG
tataaaatgaagttcagcag

SEQ ID NO: 127846 - DNA, 20 bp, Artificial Sequence
  Description of Artificial Sequence: Synthetic oligonucleotide
  Target: LAMA2; (+) strand; PAM type: NRG; PAM sequence: AAG
atgaagttcagcagtagcac

SEQ ID NO: 127847 - DNA, 20 bp, Artificial Sequence
  Description of Artificial Sequence: Synthetic oligonucleotide
  Target: LAMA2; (+) strand; PAM type: NRG; PAM sequence: CAG
agcagtagcacaagcaactg

SEQ ID NO: 127848 - DNA, 20 bp, Artificial Sequence
  Description of Artificial Sequence: Synthetic oligonucleotide
  Target: LAMA2; (+) strand; PAM type: NRG; PAM sequence: TGG
gcacaagcaactgcagtgaa

SEQ ID NO: 127849 - DNA, 20 bp, Artificial Sequence
  Description of Artificial Sequence: Synthetic oligonucleotide
  Target: LAMA2; (+) strand; PAM type: NRG; PAM sequence: AAG
gcagtgaatggtgtgttgtt

SEQ ID NO: 127850 - DNA, 20 bp, Artificial Sequence
  Description of Artificial Sequence: Synthetic oligonucleotide
  Target: LAMA2; (+) strand; PAM type: NRG; PAM sequence: AGG
cagtgaatggtgtgttgtta

SEQ ID NO: 127851 - DNA, 20 bp, Artificial Sequence
  Description of Artificial Sequence: Synthetic oligonucleotide
  Target: LAMA2; (+) strand; PAM type: NRG; PAM sequence: AAG
catgaaaaaaatatactttc

SEQ ID NO: 127852 - DNA, 20 bp, Artificial Sequence
  Description of Artificial Sequence: Synthetic oligonucleotide
  Target: LAMA2; (+) strand; PAM type: NRG; PAM sequence: AGG
atgaaaaaaatatactttca

SEQ ID NO: 127853 - DNA, 20 bp, Artificial Sequence
  Description of Artificial Sequence: Synthetic oligonucleotide
  Target: LAMA2; (+) strand; PAM type: NRG; PAM sequence: TGG
tactccaaatatatatattt

SEQ ID NO: 127854 - DNA, 20 bp, Artificial Sequence
  Description of Artificial Sequence: Synthetic oligonucleotide
  Target: LAMA2; (+) strand; PAM type: NRG; PAM sequence: TAG
aatatatatattttggtaaa

SEQ ID NO: 127855 - DNA, 20 bp, Artificial Sequence
  Description of Artificial Sequence: Synthetic oligonucleotide
  Target: LAMA2; (+) strand; PAM type: NRG; PAM sequence: TGG
atattttggtaaatagcaat

SEQ ID NO: 127856 - DNA, 20 bp, Artificial Sequence
  Description of Artificial Sequence: Synthetic oligonucleotide
  Target: LAMA2; (+) strand; PAM type: NRG; PAM sequence: AAG
tttggtaaatagcaattgga

SEQ ID NO: 127857 - DNA, 20 bp, Artificial Sequence
  Description of Artificial Sequence: Synthetic oligonucleotide
  Target: LAMA2; (+) strand; PAM type: NRG; PAM sequence: AAG
ggtaaatagcaattggaaag

SEQ ID NO: 127858 - DNA, 20 bp, Artificial Sequence
  Description of Artificial Sequence: Synthetic oligonucleotide
  Target: LAMA2; (+) strand; PAM type: NRG; PAM sequence: AGG
gtaaatagcaattggaaaga

SEQ ID NO: 127859 - DNA, 20 bp, Artificial Sequence
  Description of Artificial Sequence: Synthetic oligonucleotide
  Target: LAMA2; (+) strand; PAM type: NRG; PAM sequence: GGG
taaatagcaattggaaagaa

SEQ ID NO: 127860 - DNA, 20 bp, Artificial Sequence
  Description of Artificial Sequence: Synthetic oligonucleotide
  Target: LAMA2; (+) strand; PAM type: NRG; PAM sequence: TAG
aaagaagggtttgtatttct

SEQ ID NO: 127861 - DNA, 20 bp, Artificial Sequence
  Description of Artificial Sequence: Synthetic oligonucleotide
  Target: LAMA2; (+) strand; PAM type: NRG; PAM sequence: AAG
gaagggtttgtatttcttag

SEQ ID NO: 127862 - DNA, 20 bp, Artificial Sequence
  Description of Artificial Sequence: Synthetic oligonucleotide
  Target: LAMA2; (+) strand; PAM type: NRG; PAM sequence: GAG
ttgtatttcttagaagcact

SEQ ID NO: 127863 - DNA, 20 bp, Artificial Sequence
  Description of Artificial Sequence: Synthetic oligonucleotide
  Target: LAMA2; (+) strand; PAM type: NRG; PAM sequence: TGG
cactgagctgaccaatatat

SEQ ID NO: 127864 - DNA, 20 bp, Artificial Sequence
  Description of Artificial Sequence: Synthetic oligonucleotide
  Target: LAMA2; (+) strand; PAM type: NRG; PAM sequence: AAG
gaccaatatattggaaaact

SEQ ID NO: 127865 - DNA, 20 bp, Artificial Sequence
  Description of Artificial Sequence: Synthetic oligonucleotide
  Target: LAMA2; (+) strand; PAM type: NRG; PAM sequence: AAG
atatattggaaaactaagta

SEQ ID NO: 127866 - DNA, 20 bp, Artificial Sequence
  Description of Artificial Sequence: Synthetic oligonucleotide
  Target: LAMA2; (+) strand; PAM type: NRG; PAM sequence: CAG
tattggaaaactaagtaaag

SEQ ID NO: 127867 - DNA, 20 bp, Artificial Sequence
  Description of Artificial Sequence: Synthetic oligonucleotide
  Target: LAMA2; (+) strand; PAM type: NRG; PAM sequence: AGG
attggaaaactaagtaaagc

SEQ ID NO: 127868 - DNA, 20 bp, Artificial Sequence
  Description of Artificial Sequence: Synthetic oligonucleotide
  Target: LAMA2; (+) strand; PAM type: NRG; PAM sequence: CAG
gaaaactaagtaaagcaggc

SEQ ID NO: 127869 - DNA, 20 bp, Artificial Sequence
  Description of Artificial Sequence: Synthetic oligonucleotide
  Target: LAMA2; (+) strand; PAM type: NRG; PAM sequence: GAG
aggccagtgatctctattct

SEQ ID NO: 127870 - DNA, 20 bp, Artificial Sequence
  Description of Artificial Sequence: Synthetic oligonucleotide
  Target: LAMA2; (+) strand; PAM type: NRG; PAM sequence: TGG
attttgctctgtttgacatc

SEQ ID NO: 127871 - DNA, 20 bp, Artificial Sequence
  Description of Artificial Sequence: Synthetic oligonucleotide
  Target: LAMA2; (+) strand; PAM type: NRG; PAM sequence: GGG
ttttgctctgtttgacatct

SEQ ID NO: 127872 - DNA, 20 bp, Artificial Sequence
  Description of Artificial Sequence: Synthetic oligonucleotide
  Target: LAMA2; (+) strand; PAM type: NRG; PAM sequence: TGG
ttgacatctgggtgcaatga

SEQ ID NO: 127873 - DNA, 20 bp, Artificial Sequence
  Description of Artificial Sequence: Synthetic oligonucleotide
  Target: LAMA2; (+) strand; PAM type: NRG; PAM sequence: CAG
gggtgcaatgatggctatgt

SEQ ID NO: 127874 - DNA, 20 bp, Artificial Sequence
  Description of Artificial Sequence: Synthetic oligonucleotide
  Target: LAMA2; (+) strand; PAM type: NRG; PAM sequence: AAG
actttatttttctcttgtgc

SEQ ID NO: 127875 - DNA, 20 bp, Artificial Sequence
  Description of Artificial Sequence: Synthetic oligonucleotide
  Target: LAMA2; (+) strand; PAM type: NRG; PAM sequence: TAG
ttaaatactaatgtgtattt

SEQ ID NO: 127876 - DNA, 20 bp, Artificial Sequence
  Description of Artificial Sequence: Synthetic oligonucleotide
  Target: LAMA2; (+) strand; PAM type: NRG; PAM sequence: CAG
acacaaattctgttatattc

SEQ ID NO: 127877 - DNA, 20 bp, Artificial Sequence
  Description of Artificial Sequence: Synthetic oligonucleotide
  Target: LAMA2; (+) strand; PAM type: NRG; PAM sequence: AGG
cacaaattctgttatattcc

SEQ ID NO: 127878 - DNA, 20 bp, Artificial Sequence
  Description of Artificial Sequence: Synthetic oligonucleotide
  Target: LAMA2; (+) strand; PAM type: NRG; PAM sequence: GAG
caaattctgttatattccag

SEQ ID NO: 127879 - DNA, 20 bp, Artificial Sequence
  Description of Artificial Sequence: Synthetic oligonucleotide
  Target: LAMA2; (+) strand; PAM type: NRG; PAM sequence: AGG
aaattctgttatattccagg

SEQ ID NO: 127880 - DNA, 20 bp, Artificial Sequence
  Description of Artificial Sequence: Synthetic oligonucleotide
  Target: LAMA2; (+) strand; PAM type: NRG; PAM sequence: AAG
ttctgttatattccaggagg

SEQ ID NO: 127881 - DNA, 20 bp, Artificial Sequence
  Description of Artificial Sequence: Synthetic oligonucleotide
  Target: LAMA2; (+) strand; PAM type: NRG; PAM sequence: AGG
tctgttatattccaggagga

SEQ ID NO: 127882 - DNA, 20 bp, Artificial Sequence
  Description of Artificial Sequence: Synthetic oligonucleotide
  Target: LAMA2; (+) strand; PAM type: NRG; PAM sequence: TAG
caggaggaaggaaattgcct

SEQ ID NO: 127883 - DNA, 20 bp, Artificial Sequence
  Description of Artificial Sequence: Synthetic oligonucleotide
  Target: LAMA2; (+) strand; PAM type: NRG; PAM sequence: AGG
aggaggaaggaaattgcctt

SEQ ID NO: 127884 - DNA, 20 bp, Artificial Sequence
  Description of Artificial Sequence: Synthetic oligonucleotide
  Target: LAMA2; (+) strand; PAM type: NRG; PAM sequence: CAG
aattgccttaggatatgaat

SEQ ID NO: 127885 - DNA, 20 bp, Artificial Sequence
  Description of Artificial Sequence: Synthetic oligonucleotide
  Target: LAMA2; (+) strand; PAM type: NRG; PAM sequence: AAG
ctaaattgaaaacatcatga

SEQ ID NO: 127886 - DNA, 20 bp, Artificial Sequence
  Description of Artificial Sequence: Synthetic oligonucleotide
  Target: LAMA2; (+) strand; PAM type: NRG; PAM sequence: TGG
aaaacatcatgaaagataat

SEQ ID NO: 127887 - DNA, 20 bp, Artificial Sequence
  Description of Artificial Sequence: Synthetic oligonucleotide
  Target: LAMA2; (+) strand; PAM type: NRG; PAM sequence: GGG
aaacatcatgaaagataatt

SEQ ID NO: 127888 - DNA, 20 bp, Artificial Sequence
  Description of Artificial Sequence: Synthetic oligonucleotide
  Target: LAMA2; (+) strand; PAM type: NRG; PAM sequence: TAG
gttttattcttctttctact

SEQ ID NO: 127889 - DNA, 20 bp, Artificial Sequence
  Description of Artificial Sequence: Synthetic oligonucleotide
  Target: LAMA2; (+) strand; PAM type: NRG; PAM sequence: AGG
ttttattcttctttctactt

SEQ ID NO: 127890 - DNA, 20 bp, Artificial Sequence
  Description of Artificial Sequence: Synthetic oligonucleotide
  Target: LAMA2; (+) strand; PAM type: NRG; PAM sequence: AAG
ttcttctttctacttaggct

SEQ ID NO: 127891 - DNA, 20 bp, Artificial Sequence
  Description of Artificial Sequence: Synthetic oligonucleotide
  Target: LAMA2; (+) strand; PAM type: NRG; PAM sequence: AAG
tacttaggctaagctctcaa

SEQ ID NO: 127892 - DNA, 20 bp, Artificial Sequence
  Description of Artificial Sequence: Synthetic oligonucleotide
  Target: LAMA2; (+) strand; PAM type: NRG; PAM sequence: AGG
acttaggctaagctctcaaa

SEQ ID NO: 127893 - DNA, 20 bp, Artificial Sequence
  Description of Artificial Sequence: Synthetic oligonucleotide
  Target: LAMA2; (+) strand; PAM type: NRG; PAM sequence: AAG
aggctaagctctcaaaagga

SEQ ID NO: 127894 - DNA, 20 bp, Artificial Sequence
  Description of Artificial Sequence: Synthetic oligonucleotide
  Target: LAMA2; (+) strand; PAM type: NRG; PAM sequence: AGG
ggctaagctctcaaaaggaa

SEQ ID NO: 127895 - DNA, 20 bp, Artificial Sequence
  Description of Artificial Sequence: Synthetic oligonucleotide
  Target: LAMA2; (+) strand; PAM type: NRG; PAM sequence: GAG
ctaagctctcaaaaggaaag

SEQ ID NO: 127896 - DNA, 20 bp, Artificial Sequence
  Description of Artificial Sequence: Synthetic oligonucleotide
  Target: LAMA2; (+) strand; PAM type: NRG; PAM sequence: AAG
agatgtaattcaatgtatgt

SEQ ID NO: 127897 - DNA, 20 bp, Artificial Sequence
  Description of Artificial Sequence: Synthetic oligonucleotide
  Target: LAMA2; (+) strand; PAM type: NRG; PAM sequence: AAG
ttcaatgtatgtaagtttct

SEQ ID NO: 127898 - DNA, 20 bp, Artificial Sequence
  Description of Artificial Sequence: Synthetic oligonucleotide
  Target: LAMA2; (+) strand; PAM type: NRG; PAM sequence: TAG
tgtatgtaagtttctaagtg

SEQ ID NO: 127899 - DNA, 20 bp, Artificial Sequence
  Description of Artificial Sequence: Synthetic oligonucleotide
  Target: LAMA2; (+) strand; PAM type: NRG; PAM sequence: AGG
gtatgtaagtttctaagtgt

SEQ ID NO: 127900 - DNA, 20 bp, Artificial Sequence
  Description of Artificial Sequence: Synthetic oligonucleotide
  Target: LAMA2; (+) strand; PAM type: NRG; PAM sequence: CAG
acataaaaactgtgtttaaa

SEQ ID NO: 127901 - DNA, 20 bp, Artificial Sequence
  Description of Artificial Sequence: Synthetic oligonucleotide
  Target: LAMA2; (+) strand; PAM type: NRG; PAM sequence: TGG
aacagattaaaaatattttc

SEQ ID NO: 127902 - DNA, 20 bp, Artificial Sequence
  Description of Artificial Sequence: Synthetic oligonucleotide
  Target: LAMA2; (+) strand; PAM type: NRG; PAM sequence: GAG
cagattaaaaatattttctg

SEQ ID NO: 127903 - DNA, 20 bp, Artificial Sequence
  Description of Artificial Sequence: Synthetic oligonucleotide
  Target: LAMA2; (+) strand; PAM type: NRG; PAM sequence: GAG
gattaaaaatattttctgga

SEQ ID NO: 127904 - DNA, 20 bp, Artificial Sequence
  Description of Artificial Sequence: Synthetic oligonucleotide
  Target: LAMA2; (+) strand; PAM type: NRG; PAM sequence: AAG
atttattttacaatgtttac

SEQ ID NO: 127905 - DNA, 20 bp, Artificial Sequence
  Description of Artificial Sequence: Synthetic oligonucleotide
  Target: LAMA2; (+) strand; PAM type: NRG; PAM sequence: AAG
atgtttacaagtgaattgtc

SEQ ID NO: 127906 - DNA, 20 bp, Artificial Sequence
  Description of Artificial Sequence: Synthetic oligonucleotide
  Target: LAMA2; (+) strand; PAM type: NRG; PAM sequence: CAG
tcccaatattatttcctttc

SEQ ID NO: 127907 - DNA, 20 bp, Artificial Sequence
  Description of Artificial Sequence: Synthetic oligonucleotide
  Target: LAMA2; (+) strand; PAM type: NRG; PAM sequence: CAG
aatattatttcctttccaga

SEQ ID NO: 127908 - DNA, 20 bp, Artificial Sequence
  Description of Artificial Sequence: Synthetic oligonucleotide
  Target: LAMA2; (+) strand; PAM type: NRG; PAM sequence: GAG
gcaatctttaaatcctgctt

SEQ ID NO: 127909 - DNA, 20 bp, Artificial Sequence
  Description of Artificial Sequence: Synthetic oligonucleotide
  Target: LAMA2; (+) strand; PAM type: NRG; PAM sequence: CAG
gcttgagtcatcttttattc

SEQ ID NO: 127910 - DNA, 20 bp, Artificial Sequence
  Description of Artificial Sequence: Synthetic oligonucleotide
  Target: LAMA2; (+) strand; PAM type: NRG; PAM sequence: GAG
attccagttttccttttttt

SEQ ID NO: 127911 - DNA, 20 bp, Artificial Sequence
  Description of Artificial Sequence: Synthetic oligonucleotide
  Target: LAMA2; (+) strand; PAM type: NRG; PAM sequence: AAG
ttttcctttttttgagtgta

SEQ ID NO: 127912 - DNA, 20 bp, Artificial Sequence
  Description of Artificial Sequence: Synthetic oligonucleotide
  Target: LAMA2; (+) strand; PAM type: NRG; PAM sequence: AGG
tttcctttttttgagtgtaa

SEQ ID NO: 127913 - DNA, 20 bp, Artificial Sequence
  Description of Artificial Sequence: Synthetic oligonucleotide
  Target: LAMA2; (+) strand; PAM type: NRG; PAM sequence: AAG
gcaataaattataacaataa

SEQ ID NO: 127914 - DNA, 20 bp, Artificial Sequence
  Description of Artificial Sequence: Synthetic oligonucleotide
  Target: LAMA2; (+) strand; PAM type: NRG; PAM sequence: TAG
gacttatactctttgtccca

SEQ ID NO: 127915 - DNA, 20 bp, Artificial Sequence
  Description of Artificial Sequence: Synthetic oligonucleotide
  Target: LAMA2; (+) strand; PAM type: NRG; PAM sequence: TAG
ttctcttttctgttgaaata

SEQ ID NO: 127916 - DNA, 20 bp, Artificial Sequence
  Description of Artificial Sequence: Synthetic oligonucleotide
  Target: LAMA2; (+) strand; PAM type: NRG; PAM sequence: TGG
ttgaaatatagcttgctctt

SEQ ID NO: 127917 - DNA, 20 bp, Artificial Sequence
  Description of Artificial Sequence: Synthetic oligonucleotide
  Target: LAMA2; (+) strand; PAM type: NRG; PAM sequence: CAG
tggaatattaacatgtaaac

SEQ ID NO: 127918 - DNA, 20 bp, Artificial Sequence
  Description of Artificial Sequence: Synthetic oligonucleotide
  Target: LAMA2; (+) strand; PAM type: NRG; PAM sequence: GAG
gaatattaacatgtaaacca

SEQ ID NO: 127919 - DNA, 20 bp, Artificial Sequence
  Description of Artificial Sequence: Synthetic oligonucleotide
  Target: LAMA2; (+) strand; PAM type: NRG; PAM sequence: AGG
aatattaacatgtaaaccag

SEQ ID NO: 127920 - DNA, 20 bp, Artificial Sequence
  Description of Artificial Sequence: Synthetic oligonucleotide
  Target: LAMA2; (+) strand; PAM type: NRG; PAM sequence: TAG
gactattctaaaacactttt

SEQ ID NO: 127921 - DNA, 20 bp, Artificial Sequence
  Description of Artificial Sequence: Synthetic oligonucleotide
  Target: LAMA2; (+) strand; PAM type: NRG; PAM sequence: AGG
actattctaaaacacttttt

SEQ ID NO: 127922 - DNA, 20 bp, Artificial Sequence
  Description of Artificial Sequence: Synthetic oligonucleotide
  Target: LAMA2; (+) strand; PAM type: NRG; PAM sequence: AAG
ggatatcactaattgtcaat

SEQ ID NO: 127923 - DNA, 20 bp, Artificial Sequence
  Description of Artificial Sequence: Synthetic oligonucleotide
  Target: LAMA2; (+) strand; PAM type: NRG; PAM sequence: AGG
gatatcactaattgtcaata

SEQ ID NO: 127924 - DNA, 20 bp, Artificial Sequence
  Description of Artificial Sequence: Synthetic oligonucleotide
  Target: LAMA2; (+) strand; PAM type: NRG; PAM sequence: GAG
ctaattgtcaataaggaatt

SEQ ID NO: 127925 - DNA, 20 bp, Artificial Sequence
  Description of Artificial Sequence: Synthetic oligonucleotide
  Target: LAMA2; (+) strand; PAM type: NRG; PAM sequence: CAG
caataaggaattgagatcca

SEQ ID NO: 127926 - DNA, 20 bp, Artificial Sequence
  Description of Artificial Sequence: Synthetic oligonucleotide
  Target: LAMA2; (+) strand; PAM type: NRG; PAM sequence: CAG
agatccacagataaacttat

SEQ ID NO: 127927 - DNA, 20 bp, Artificial Sequence
  Description of Artificial Sequence: Synthetic oligonucleotide
  Target: LAMA2; (+) strand; PAM type: NRG; PAM sequence: AGG
gatccacagataaacttatc

SEQ ID NO: 127928 - DNA, 20 bp, Artificial Sequence
  Description of Artificial Sequence: Synthetic oligonucleotide
  Target: LAMA2; (+) strand; PAM type: NRG; PAM sequence: CAG
acagataaacttatcaggaa

SEQ ID NO: 127929 - DNA, 20 bp, Artificial Sequence
  Description of Artificial Sequence: Synthetic oligonucleotide
  Target: LAMA2; (+) strand; PAM type: NRG; PAM sequence: TAG
atacatttttaatatttaaa

SEQ ID NO: 127930 - DNA, 20 bp, Artificial Sequence
  Description of Artificial Sequence: Synthetic oligonucleotide
  Target: LAMA2; (+) strand; PAM type: NRG; PAM sequence: CAG
ttttaatatttaaatagtca

SEQ ID NO: 127931 - DNA, 20 bp, Artificial Sequence
  Description of Artificial Sequence: Synthetic oligonucleotide
  Target: LAMA2; (+) strand; PAM type: NRG; PAM sequence: AAG
caaaactaaattttttttta

SEQ ID NO: 127932 - DNA, 20 bp, Artificial Sequence
  Description of Artificial Sequence: Synthetic oligonucleotide
  Target: LAMA2; (+) strand; PAM type: NRG; PAM sequence: TAG
tttttaaagattctgttgaa

SEQ ID NO: 127933 - DNA, 20 bp, Artificial Sequence
  Description of Artificial Sequence: Synthetic oligonucleotide
  Target: LAMA2; (+) strand; PAM type: NRG; PAM sequence: AGG
ttttaaagattctgttgaat

SEQ ID NO: 127934 - DNA, 20 bp, Artificial Sequence
  Description of Artificial Sequence: Synthetic oligonucleotide
  Target: LAMA2; (+) strand; PAM type: NRG; PAM sequence: TAG
taaagattctgttgaatagg

SEQ ID NO: 127935 - DNA, 20 bp, Artificial Sequence
  Description of Artificial Sequence: Synthetic oligonucleotide
  Target: LAMA2; (+) strand; PAM type: NRG; PAM sequence: AGG
aaagattctgttgaataggt

SEQ ID NO: 127936 - DNA, 20 bp, Artificial Sequence
  Description of Artificial Sequence: Synthetic oligonucleotide
  Target: LAMA2; (+) strand; PAM type: NRG; PAM sequence: TGG
gaataggtaggacttcacat

SEQ ID NO: 127937 - DNA, 20 bp, Artificial Sequence
  Description of Artificial Sequence: Synthetic oligonucleotide
  Target: LAMA2; (+) strand; PAM type: NRG; PAM sequence: TGG
acttcacattggattcaacc

SEQ ID NO: 127938 - DNA, 20 bp, Artificial Sequence
  Description of Artificial Sequence: Synthetic oligonucleotide
  Target: LAMA2; (+) strand; PAM type: NRG; PAM sequence: AAG
ttttgatttctctttttgct

SEQ ID NO: 127939 - DNA, 20 bp, Artificial Sequence
  Description of Artificial Sequence: Synthetic oligonucleotide
  Target: LAMA2; (+) strand; PAM type: NRG; PAM sequence: AAG
tttttgctaagtaatattct

SEQ ID NO: 127940 - DNA, 20 bp, Artificial Sequence
  Description of Artificial Sequence: Synthetic oligonucleotide
  Target: LAMA2; (+) strand; PAM type: NRG; PAM sequence: GAG
tttgctaagtaatattctaa

SEQ ID NO: 127941 - DNA, 20 bp, Artificial Sequence
  Description of Artificial Sequence: Synthetic oligonucleotide
  Target: LAMA2; (+) strand; PAM type: NRG; PAM sequence: TAG
taagtaatattctaagagat

SEQ ID NO: 127942 - DNA, 20 bp, Artificial Sequence
  Description of Artificial Sequence: Synthetic oligonucleotide
  Target: LAMA2; (+) strand; PAM type: NRG; PAM sequence: TAG
gtttcatgtttgtataaatg

SEQ ID NO: 127943 - DNA, 20 bp, Artificial Sequence
  Description of Artificial Sequence: Synthetic oligonucleotide
  Target: LAMA2; (+) strand; PAM type: NRG; PAM sequence: GAG
ttcatgtttgtataaatgta

SEQ ID NO: 127944 - DNA, 20 bp, Artificial Sequence
  Description of Artificial Sequence: Synthetic oligonucleotide
  Target: LAMA2; (+) strand; PAM type: NRG; PAM sequence: TAG
gtttgtataaatgtagagat

SEQ ID NO: 127945 - DNA, 20 bp, Artificial Sequence
  Description of Artificial Sequence: Synthetic oligonucleotide
  Target: LAMA2; (+) strand; PAM type: NRG; PAM sequence: AAG
tagagattagacacttgttt

SEQ ID NO: 127946 - DNA, 20 bp, Artificial Sequence
  Description of Artificial Sequence: Synthetic oligonucleotide
  Target: LAMA2; (+) strand; PAM type: NRG; PAM sequence: AAG
acacttgtttaagatcctta

SEQ ID NO: 127947 - DNA, 20 bp, Artificial Sequence
  Description of Artificial Sequence: Synthetic oligonucleotide
  Target: LAMA2; (+) strand; PAM type: NRG; PAM sequence: GAG
tttaagatccttaaagatct

SEQ ID NO: 127948 - DNA, 20 bp, Artificial Sequence
  Description of Artificial Sequence: Synthetic oligonucleotide
  Target: LAMA2; (+) strand; PAM type: NRG; PAM sequence: AGG
ttaagatccttaaagatctg

SEQ ID NO: 127949 - DNA, 20 bp, Artificial Sequence
  Description of Artificial Sequence: Synthetic oligonucleotide
  Target: LAMA2; (+) strand; PAM type: NRG; PAM sequence: TGG
gatctgaggtaaattatttt

SEQ ID NO: 127950 - DNA, 20 bp, Artificial Sequence
  Description of Artificial Sequence: Synthetic oligonucleotide
  Target: LAMA2; (+) strand; PAM type: NRG; PAM sequence: GGG
atctgaggtaaattattttt

SEQ ID NO: 127951 - DNA, 20 bp, Artificial Sequence
  Description of Artificial Sequence: Synthetic oligonucleotide
  Target: LAMA2; (+) strand; PAM type: NRG; PAM sequence: AAG
cttctgtgaacaacttcttg

SEQ ID NO: 127952 - DNA, 20 bp, Artificial Sequence
  Description of Artificial Sequence: Synthetic oligonucleotide
  Target: LAMA2; (+) strand; PAM type: NRG; PAM sequence: TGG
gaagactgttctgttgctct

SEQ ID NO: 127953 - DNA, 20 bp, Artificial Sequence
  Description of Artificial Sequence: Synthetic oligonucleotide
  Target: LAMA2; (+) strand; PAM type: NRG; PAM sequence: CAG
tgttgctcttggtttatacg

SEQ ID NO: 127954 - DNA, 20 bp, Artificial Sequence
  Description of Artificial Sequence: Synthetic oligonucleotide
  Target: LAMA2; (+) strand; PAM type: NRG; PAM sequence: AGG
gttgctcttggtttatacgc

SEQ ID NO: 127955 - DNA, 20 bp, Artificial Sequence
  Description of Artificial Sequence: Synthetic oligonucleotide
  Target: LAMA2; (+) strand; PAM type: NRG; PAM sequence: AAG
aaaataacaaaataaaaaat

SEQ ID NO: 127956 - DNA, 20 bp, Artificial Sequence
  Description of Artificial Sequence: Synthetic oligonucleotide
  Target: LAMA2; (+) strand; PAM type: NRG; PAM sequence: AAG
aaaaataagaaacaatacat

SEQ ID NO: 127957 - DNA, 20 bp, Artificial Sequence
  Description of Artificial Sequence: Synthetic oligonucleotide
  Target: LAMA2; (+) strand; PAM type: NRG; PAM sequence: AGG
aaaataagaaacaatacata

SEQ ID NO: 127958 - DNA, 20 bp, Artificial Sequence
  Description of Artificial Sequence: Synthetic oligonucleotide
  Target: LAMA2; (+) strand; PAM type: NRG; PAM sequence: AAG
agaaacaatacataaggaca

SEQ ID NO: 127959 - DNA, 20 bp, Artificial Sequence
  Description of Artificial Sequence: Synthetic oligonucleotide
  Target: LAMA2; (+) strand; PAM type: NRG; PAM sequence: TGG
caatacataaggacaaagac

SEQ ID NO: 127960 - DNA, 20 bp, Artificial Sequence
  Description of Artificial Sequence: Synthetic oligonucleotide
  Target: LAMA2; (+) strand; PAM type: NRG; PAM sequence: AAG
aggacaaagactggaaataa

SEQ ID NO: 127961 - DNA, 20 bp, Artificial Sequence
  Description of Artificial Sequence: Synthetic oligonucleotide
  Target: LAMA2; (+) strand; PAM type: NRG; PAM sequence: AAG
aagaaaaataatttaaactc

SEQ ID NO: 127962 - DNA, 20 bp, Artificial Sequence
  Description of Artificial Sequence: Synthetic oligonucleotide
  Target: LAMA2; (+) strand; PAM type: NRG; PAM sequence: AGG
agaaaaataatttaaactca

SEQ ID NO: 127963 - DNA, 20 bp, Artificial Sequence
  Description of Artificial Sequence: Synthetic oligonucleotide
  Target: LAMA2; (+) strand; PAM type: NRG; PAM sequence: GGG
gaaaaataatttaaactcaa

SEQ ID NO: 127964 - DNA, 20 bp, Artificial Sequence
  Description of Artificial Sequence: Synthetic oligonucleotide
  Target: LAMA2; (+) strand; PAM type: NRG; PAM sequence: TGG
ttaaactcaagggattttct

SEQ ID NO: 127965 - DNA, 20 bp, Artificial Sequence
  Description of Artificial Sequence: Synthetic oligonucleotide
  Target: LAMA2; (+) strand; PAM type: NRG; PAM sequence: GGG
taaactcaagggattttctt

SEQ ID NO: 127966 - DNA, 20 bp, Artificial Sequence
  Description of Artificial Sequence: Synthetic oligonucleotide
  Target: LAMA2; (+) strand; PAM type: NRG; PAM sequence: AAG
ctcaagggattttcttgggt

SEQ ID NO: 127967 - DNA, 20 bp, Artificial Sequence
  Description of Artificial Sequence: Synthetic oligonucleotide
  Target: LAMA2; (+) strand; PAM type: NRG; PAM sequence: AGG
tcaagggattttcttgggta

SEQ ID NO: 127968 - DNA, 20 bp, Artificial Sequence
  Description of Artificial Sequence: Synthetic oligonucleotide
  Target: LAMA2; (+) strand; PAM type: NRG; PAM sequence: CAG
gattttcttgggtaaggcct

SEQ ID NO: 127969 - DNA, 20 bp, Artificial Sequence
  Description of Artificial Sequence: Synthetic oligonucleotide
  Target: LAMA2; (+) strand; PAM type: NRG; PAM sequence: GAG
ttttcttgggtaaggcctca

SEQ ID NO: 127970 - DNA, 20 bp, Artificial Sequence
  Description of Artificial Sequence: Synthetic oligonucleotide
  Target: LAMA2; (+) strand; PAM type: NRG; PAM sequence: CAG
taaggcctcagagaatgttc

SEQ ID NO: 127971 - DNA, 20 bp, Artificial Sequence
  Description of Artificial Sequence: Synthetic oligonucleotide
  Target: LAMA2; (+) strand; PAM type: NRG; PAM sequence: AAG
agaatgttccagctgttctt

SEQ ID NO: 127972 - DNA, 20 bp, Artificial Sequence
  Description of Artificial Sequence: Synthetic oligonucleotide
  Target: LAMA2; (+) strand; PAM type: NRG; PAM sequence: AAG
tgttccagctgttcttaaga

SEQ ID NO: 127973 - DNA, 20 bp, Artificial Sequence
  Description of Artificial Sequence: Synthetic oligonucleotide
  Target: LAMA2; (+) strand; PAM type: NRG; PAM sequence: AAG
taagaaagacattgtatata

SEQ ID NO: 127974 - DNA, 20 bp, Artificial Sequence
  Description of Artificial Sequence: Synthetic oligonucleotide
  Target: LAMA2; (+) strand; PAM type: NRG; PAM sequence: AGG
aagaaagacattgtatataa

SEQ ID NO: 127975 - DNA, 20 bp, Artificial Sequence
  Description of Artificial Sequence: Synthetic oligonucleotide
  Target: LAMA2; (+) strand; PAM type: NRG; PAM sequence: TAG
ttgtatataaaggccacatt

SEQ ID NO: 127976 - DNA, 20 bp, Artificial Sequence
  Description of Artificial Sequence: Synthetic oligonucleotide
  Target: LAMA2; (+) strand; PAM type: NRG; PAM sequence: TAG
aaaggccacatttagctgaa

SEQ ID NO: 127977 - DNA, 20 bp, Artificial Sequence
  Description of Artificial Sequence: Synthetic oligonucleotide
  Target: LAMA2; (+) strand; PAM type: NRG; PAM sequence: GAG
ctgaaaaattcttattattt

SEQ ID NO: 127978 - DNA, 20 bp, Artificial Sequence
  Description of Artificial Sequence: Synthetic oligonucleotide
  Target: LAMA2; (+) strand; PAM type: NRG; PAM sequence: AAG
cattaatcctttttaaactg

SEQ ID NO: 127979 - DNA, 20 bp, Artificial Sequence
  Description of Artificial Sequence: Synthetic oligonucleotide
  Target: LAMA2; (+) strand; PAM type: NRG; PAM sequence: TAG
cctttttaaactgaagtaat

SEQ ID NO: 127980 - DNA, 20 bp, Artificial Sequence
  Description of Artificial Sequence: Synthetic oligonucleotide
  Target: LAMA2; (+) strand; PAM type: NRG; PAM sequence: AAG
taaactgaagtaattagaaa

SEQ ID NO: 127981 - DNA, 20 bp, Artificial Sequence
  Description of Artificial Sequence: Synthetic oligonucleotide
  Target: LAMA2; (+) strand; PAM type: NRG; PAM sequence: CAG
actgaagtaattagaaaaag

SEQ ID NO: 127982 - DNA, 20 bp, Artificial Sequence
  Description of Artificial Sequence: Synthetic oligonucleotide
  Target: LAMA2; (+) strand; PAM type: NRG; PAM sequence: AGG
ctgaagtaattagaaaaagc

SEQ ID NO: 127983 - DNA, 20 bp, Artificial Sequence
  Description of Artificial Sequence: Synthetic oligonucleotide
  Target: LAMA2; (+) strand; PAM type: NRG; PAM sequence: AAG
aaaaagcaggtcaatgtgca

SEQ ID NO: 127984 - DNA, 20 bp, Artificial Sequence
  Description of Artificial Sequence: Synthetic oligonucleotide
  Target: LAMA2; (+) strand; PAM type: NRG; PAM sequence: TGG
caggtcaatgtgcaaagaaa

SEQ ID NO: 127985 - DNA, 20 bp, Artificial Sequence
  Description of Artificial Sequence: Synthetic oligonucleotide
  Target: LAMA2; (+) strand; PAM type: NRG; PAM sequence: GGG
aggtcaatgtgcaaagaaat

SEQ ID NO: 127986 - DNA, 20 bp, Artificial Sequence
  Description of Artificial Sequence: Synthetic oligonucleotide
  Target: LAMA2; (+) strand; PAM type: NRG; PAM sequence: TGG
atgggcttttcttcatcaaa

SEQ ID NO: 127987 - DNA, 20 bp, Artificial Sequence
  Description of Artificial Sequence: Synthetic oligonucleotide
  Target: LAMA2; (+) strand; PAM type: NRG; PAM sequence: TGG
atggttaattctttattaaa

SEQ ID NO: 127988 - DNA, 20 bp, Artificial Sequence
  Description of Artificial Sequence: Synthetic oligonucleotide
  Target: LAMA2; (+) strand; PAM type: NRG; PAM sequence: GAG
aaatggttattctttaaaat

SEQ ID NO: 127989 - DNA, 20 bp, Artificial Sequence
  Description of Artificial Sequence: Synthetic oligonucleotide
  Target: LAMA2; (+) strand; PAM type: NRG; PAM sequence: AAG
gttattctttaaaatgagca

SEQ ID NO: 127990 - DNA, 20 bp, Artificial Sequence
  Description of Artificial Sequence: Synthetic oligonucleotide
  Target: LAMA2; (+) strand; PAM type: NRG; PAM sequence: GAG
tctttaaaatgagcaaagat

SEQ ID NO: 127991 - DNA, 20 bp, Artificial Sequence
  Description of Artificial Sequence: Synthetic oligonucleotide
  Target: LAMA2; (+) strand; PAM type: NRG; PAM sequence: CAG
aaaatgagcaaagatgagct

SEQ ID NO: 127992 - DNA, 20 bp, Artificial Sequence
  Description of Artificial Sequence: Synthetic oligonucleotide
  Target: LAMA2; (+) strand; PAM type: NRG; PAM sequence: AAG
caaagatgagctcagcaaat

SEQ ID NO: 127993 - DNA, 20 bp, Artificial Sequence
  Description of Artificial Sequence: Synthetic oligonucleotide
  Target: LAMA2; (+) strand; PAM type: NRG; PAM sequence: AGG
aaagatgagctcagcaaata

SEQ ID NO: 127994 - DNA, 20 bp, Artificial Sequence
  Description of Artificial Sequence: Synthetic oligonucleotide
  Target: LAMA2; (+) strand; PAM type: NRG; PAM sequence: AAG
taaggtacttgtaataatga

SEQ ID NO: 127995 - DNA, 20 bp, Artificial Sequence
  Description of Artificial Sequence: Synthetic oligonucleotide
  Target: LAMA2; (+) strand; PAM type: NRG; PAM sequence: CAG
aataatgaaagtactatatg

SEQ ID NO: 127996 - DNA, 20 bp, Artificial Sequence
  Description of Artificial Sequence: Synthetic oligonucleotide
  Target: LAMA2; (+) strand; PAM type: NRG; PAM sequence: AGG
ataatgaaagtactatatgc

SEQ ID NO: 127997 - DNA, 20 bp, Artificial Sequence
  Description of Artificial Sequence: Synthetic oligonucleotide
  Target: LAMA2; (+) strand; PAM type: NRG; PAM sequence: TGG
agtactatatgcaggaatac

SEQ ID NO: 127998 - DNA, 20 bp, Artificial Sequence
  Description of Artificial Sequence: Synthetic oligonucleotide
  Target: LAMA2; (+) strand; PAM type: NRG; PAM sequence: TAG
ttttgtttttaatctgcaat

SEQ ID NO: 127999 - DNA, 20 bp, Artificial Sequence
  Description of Artificial Sequence: Synthetic oligonucleotide
  Target: LAMA2; (+) strand; PAM type: NRG; PAM sequence: TAG
tagttaattaaatttcattg

SEQ ID NO: 128000 - DNA, 20 bp, Artificial Sequence
  Description of Artificial Sequence: Synthetic oligonucleotide
  Target: LAMA2; (+) strand; PAM type: NRG; PAM sequence: AAG
attgcataaaatacatttga

SEQ ID NO: 128001 - DNA, 20 bp, Artificial Sequence
  Description of Artificial Sequence: Synthetic oligonucleotide
  Target: LAMA2; (+) strand; PAM type: NRG; PAM sequence: AGG
ttgcataaaatacatttgaa

SEQ ID NO: 128002 - DNA, 20 bp, Artificial Sequence
  Description of Artificial Sequence: Synthetic oligonucleotide
  Target: LAMA2; (+) strand; PAM type: NRG; PAM sequence: CAG
caccattcttcctcataata

SEQ ID NO: 128003 - DNA, 20 bp, Artificial Sequence
  Description of Artificial Sequence: Synthetic oligonucleotide
  Target: LAMA2; (+) strand; PAM type: NRG; PAM sequence: TAG
attcttcctcataatacagc

SEQ ID NO: 128004 - DNA, 20 bp, Artificial Sequence
  Description of Artificial Sequence: Synthetic oligonucleotide
  Target: LAMA2; (+) strand; PAM type: NRG; PAM sequence: AAG
tcctcataatacagctagtg

SEQ ID NO: 128005 - DNA, 20 bp, Artificial Sequence
  Description of Artificial Sequence: Synthetic oligonucleotide
  Target: LAMA2; (+) strand; PAM type: NRG; PAM sequence: AGG
cctcataatacagctagtga

SEQ ID NO: 128006 - DNA, 20 bp, Artificial Sequence
  Description of Artificial Sequence: Synthetic oligonucleotide
  Target: LAMA2; (+) strand; PAM type: NRG; PAM sequence: CAG
gctagtgaaggtccaaattt

SEQ ID NO: 128007 - DNA, 20 bp, Artificial Sequence
  Description of Artificial Sequence: Synthetic oligonucleotide
  Target: LAMA2; (+) strand; PAM type: NRG; PAM sequence: AAG
ggtccaaatttcagtgactc

SEQ ID NO: 128008 - DNA, 20 bp, Artificial Sequence
  Description of Artificial Sequence: Synthetic oligonucleotide
  Target: LAMA2; (+) strand; PAM type: NRG; PAM sequence: TAG
aaatttcagtgactcaagtg

SEQ ID NO: 128009 - DNA, 20 bp, Artificial Sequence
  Description of Artificial Sequence: Synthetic oligonucleotide
  Target: LAMA2; (+) strand; PAM type: NRG; PAM sequence: AGG
aatttcagtgactcaagtgt

SEQ ID NO: 128010 - DNA, 20 bp, Artificial Sequence
  Description of Artificial Sequence: Synthetic oligonucleotide
  Target: LAMA2; (+) strand; PAM type: NRG; PAM sequence: TGG
ttcagtgactcaagtgtagg

SEQ ID NO: 128011 - DNA, 20 bp, Artificial Sequence
  Description of Artificial Sequence: Synthetic oligonucleotide
  Target: LAMA2; (+) strand; PAM type: NRG; PAM sequence: GGG
tcagtgactcaagtgtaggt

SEQ ID NO: 128012 - DNA, 20 bp, Artificial Sequence
  Description of Artificial Sequence: Synthetic oligonucleotide
  Target: LAMA2; (+) strand; PAM type: NRG; PAM sequence: AAG
actcaagtgtaggtgggaaa

SEQ ID NO: 128013 - DNA, 20 bp, Artificial Sequence
  Description of Artificial Sequence: Synthetic oligonucleotide
  Target: LAMA2; (+) strand; PAM type: NRG; PAM sequence: TAG
acaaactttacgcaaattgt

SEQ ID NO: 128014 - DNA, 20 bp, Artificial Sequence
  Description of Artificial Sequence: Synthetic oligonucleotide
  Target: LAMA2; (+) strand; PAM type: NRG; PAM sequence: AAG
ctttacgcaaattgttagaa

SEQ ID NO: 128015 - DNA, 20 bp, Artificial Sequence
  Description of Artificial Sequence: Synthetic oligonucleotide
  Target: LAMA2; (+) strand; PAM type: NRG; PAM sequence: CAG
aaacatgactactatgaata

SEQ ID NO: 128016 - DNA, 20 bp, Artificial Sequence
  Description of Artificial Sequence: Synthetic oligonucleotide
  Target: LAMA2; (+) strand; PAM type: NRG; PAM sequence: CAG
tgactactatgaatacagac

SEQ ID NO: 128017 - DNA, 20 bp, Artificial Sequence
  Description of Artificial Sequence: Synthetic oligonucleotide
  Target: LAMA2; (+) strand; PAM type: NRG; PAM sequence: AGG
gactactatgaatacagacc

SEQ ID NO: 128018 - DNA, 20 bp, Artificial Sequence
  Description of Artificial Sequence: Synthetic oligonucleotide
  Target: LAMA2; (+) strand; PAM type: NRG; PAM sequence: GGG
actactatgaatacagacca

SEQ ID NO: 128019 - DNA, 20 bp, Artificial Sequence
  Description of Artificial Sequence: Synthetic oligonucleotide
  Target: LAMA2; (+) strand; PAM type: NRG; PAM sequence: CAG
tacagaccagggatgtgccc

SEQ ID NO: 128020 - DNA, 20 bp, Artificial Sequence
  Description of Artificial Sequence: Synthetic oligonucleotide
  Target: LAMA2; (+) strand; PAM type: NRG; PAM sequence: GAG
cagaccagggatgtgcccca

SEQ ID NO: 128021 - DNA, 20 bp, Artificial Sequence
  Description of Artificial Sequence: Synthetic oligonucleotide
  Target: LAMA2; (+) strand; PAM type: NRG; PAM sequence: GAG
ggatgtgccccagagtcaat

SEQ ID NO: 128022 - DNA, 20 bp, Artificial Sequence
  Description of Artificial Sequence: Synthetic oligonucleotide
  Target: LAMA2; (+) strand; PAM type: NRG; PAM sequence: CAG
acttgctgccacaatgcttt

SEQ ID NO: 128023 - DNA, 20 bp, Artificial Sequence
  Description of Artificial Sequence: Synthetic oligonucleotide
  Target: LAMA2; (+) strand; PAM type: NRG; PAM sequence: AGG
cttgctgccacaatgctttc

SEQ ID NO: 128024 - DNA, 20 bp, Artificial Sequence
  Description of Artificial Sequence: Synthetic oligonucleotide
  Target: LAMA2; (+) strand; PAM type: NRG; PAM sequence: TAG
tgccacaatgctttcaggcc

SEQ ID NO: 128025 - DNA, 20 bp, Artificial Sequence
  Description of Artificial Sequence: Synthetic oligonucleotide
  Target: LAMA2; (+) strand; PAM type: NRG; PAM sequence: AGG
gccacaatgctttcaggcct

SEQ ID NO: 128026 - DNA, 20 bp, Artificial Sequence
  Description of Artificial Sequence: Synthetic oligonucleotide
  Target: LAMA2; (+) strand; PAM type: NRG; PAM sequence: CAG
tttcaggcctaggctctttg

SEQ ID NO: 128027 - DNA, 20 bp, Artificial Sequence
  Description of Artificial Sequence: Synthetic oligonucleotide
  Target: LAMA2; (+) strand; PAM type: NRG; PAM sequence: CAG
aggcctaggctctttgcaga

SEQ ID NO: 128028 - DNA, 20 bp, Artificial Sequence
  Description of Artificial Sequence: Synthetic oligonucleotide
  Target: LAMA2; (+) strand; PAM type: NRG; PAM sequence: GAG
gcctaggctctttgcagaca

SEQ ID NO: 128029 - DNA, 20 bp, Artificial Sequence
  Description of Artificial Sequence: Synthetic oligonucleotide
  Target: LAMA2; (+) strand; PAM type: NRG; PAM sequence: GAG
ctaggctctttgcagacaga

SEQ ID NO: 128030 - DNA, 20 bp, Artificial Sequence
  Description of Artificial Sequence: Synthetic oligonucleotide
  Target: LAMA2; (+) strand; PAM type: NRG; PAM sequence: CAG
ggctctttgcagacagagag

SEQ ID NO: 128031 - DNA, 20 bp, Artificial Sequence
  Description of Artificial Sequence: Synthetic oligonucleotide
  Target: LAMA2; (+) strand; PAM type: NRG; PAM sequence: CAG
ttgcagacagagagcagcat

SEQ ID NO: 128032 - DNA, 20 bp, Artificial Sequence
  Description of Artificial Sequence: Synthetic oligonucleotide
  Target: LAMA2; (+) strand; PAM type: NRG; PAM sequence: AGG
tgcagacagagagcagcatc

SEQ ID NO: 128033 - DNA, 20 bp, Artificial Sequence
  Description of Artificial Sequence: Synthetic oligonucleotide
  Target: LAMA2; (+) strand; PAM type: NRG; PAM sequence: GGG
gcagacagagagcagcatca

SEQ ID NO: 128034 - DNA, 20 bp, Artificial Sequence
  Description of Artificial Sequence: Synthetic oligonucleotide
  Target: LAMA2; (+) strand; PAM type: NRG; PAM sequence: CAG
gaatgattattacctgtgcc

SEQ ID NO: 128035 - DNA, 20 bp, Artificial Sequence
  Description of Artificial Sequence: Synthetic oligonucleotide
  Target: LAMA2; (+) strand; PAM type: NRG; PAM sequence: CAG
tgattattacctgtgcccag

SEQ ID NO: 128036 - DNA, 20 bp, Artificial Sequence
  Description of Artificial Sequence: Synthetic oligonucleotide
  Target: LAMA2; (+) strand; PAM type: NRG; PAM sequence: AGG
gattattacctgtgcccagc

SEQ ID NO: 128037 - DNA, 20 bp, Artificial Sequence
  Description of Artificial Sequence: Synthetic oligonucleotide
  Target: LAMA2; (+) strand; PAM type: NRG; PAM sequence: GGG
attattacctgtgcccagca

SEQ ID NO: 128038 - DNA, 20 bp, Artificial Sequence
  Description of Artificial Sequence: Synthetic oligonucleotide
  Target: LAMA2; (+) strand; PAM type: NRG; PAM sequence: TGG
agggtttgttcaactgctaa

SEQ ID NO: 128039 - DNA, 20 bp, Artificial Sequence
  Description of Artificial Sequence: Synthetic oligonucleotide
  Target: LAMA2; (+) strand; PAM type: NRG; PAM sequence: AAG
ttgttcaactgctaatggtc

SEQ ID NO: 128040 - DNA, 20 bp, Artificial Sequence
  Description of Artificial Sequence: Synthetic oligonucleotide
  Target: LAMA2; (+) strand; PAM type: NRG; PAM sequence: AGG
tgttcaactgctaatggtca

SEQ ID NO: 128041 - DNA, 20 bp, Artificial Sequence
  Description of Artificial Sequence: Synthetic oligonucleotide
  Target: LAMA2; (+) strand; PAM type: NRG; PAM sequence: TAG
tcaactgctaatggtcaagg

SEQ ID NO: 128042 - DNA, 20 bp, Artificial Sequence
  Description of Artificial Sequence: Synthetic oligonucleotide
  Target: LAMA2; (+) strand; PAM type: NRG; PAM sequence: AAG
ctaatggtcaaggtagattc

SEQ ID NO: 128043 - DNA, 20 bp, Artificial Sequence
  Description of Artificial Sequence: Synthetic oligonucleotide
  Target: LAMA2; (+) strand; PAM type: NRG; PAM sequence: CAG
ttcaagccctctatcattcc

SEQ ID NO: 128044 - DNA, 20 bp, Artificial Sequence
  Description of Artificial Sequence: Synthetic oligonucleotide
  Target: LAMA2; (+) strand; PAM type: NRG; PAM sequence: GAG
caagccctctatcattccca

SEQ ID NO: 128045 - DNA, 20 bp, Artificial Sequence
  Description of Artificial Sequence: Synthetic oligonucleotide
  Target: LAMA2; (+) strand; PAM type: NRG; PAM sequence: AAG
caaaatcaaatactgactta

SEQ ID NO: 128046 - DNA, 20 bp, Artificial Sequence
  Description of Artificial Sequence: Synthetic oligonucleotide
  Target: LAMA2; (+) strand; PAM type: NRG; PAM sequence: GAG
aaatcaaatactgacttaaa

SEQ ID NO: 128047 - DNA, 20 bp, Artificial Sequence
  Description of Artificial Sequence: Synthetic oligonucleotide
  Target: LAMA2; (+) strand; PAM type: NRG; PAM sequence: AAG
aagagaaatataaatgaaat

SEQ ID NO: 128048 - DNA, 20 bp, Artificial Sequence
  Description of Artificial Sequence: Synthetic oligonucleotide
  Target: LAMA2; (+) strand; PAM type: NRG; PAM sequence: AAG
ataaatgaaataagttctaa

SEQ ID NO: 128049 - DNA, 20 bp, Artificial Sequence
  Description of Artificial Sequence: Synthetic oligonucleotide
  Target: LAMA2; (+) strand; PAM type: NRG; PAM sequence: AGG
taaatgaaataagttctaaa

SEQ ID NO: 128050 - DNA, 20 bp, Artificial Sequence
  Description of Artificial Sequence: Synthetic oligonucleotide
  Target: LAMA2; (+) strand; PAM type: NRG; PAM sequence: AAG
gaaataagttctaaaaggaa

SEQ ID NO: 128051 - DNA, 20 bp, Artificial Sequence
  Description of Artificial Sequence: Synthetic oligonucleotide
  Target: LAMA2; (+) strand; PAM type: NRG; PAM sequence: AAG
tctaaaaggaaaagaaaaca

SEQ ID NO: 128052 - DNA, 20 bp, Artificial Sequence
  Description of Artificial Sequence: Synthetic oligonucleotide
  Target: LAMA2; (+) strand; PAM type: NRG; PAM sequence: AAG
aacaaagaaatgtcttttac

SEQ ID NO: 128053 - DNA, 20 bp, Artificial Sequence
  Description of Artificial Sequence: Synthetic oligonucleotide
  Target: LAMA2; (+) strand; PAM type: NRG; PAM sequence: AGG
acaaagaaatgtcttttaca

SEQ ID NO: 128054 - DNA, 20 bp, Artificial Sequence
  Description of Artificial Sequence: Synthetic oligonucleotide
  Target: LAMA2; (+) strand; PAM type: NRG; PAM sequence: AAG
atgtcttttacaaggcacta

SEQ ID NO: 128055 - DNA, 20 bp, Artificial Sequence
  Description of Artificial Sequence: Synthetic oligonucleotide
  Target: LAMA2; (+) strand; PAM type: NRG; PAM sequence: AAG
cttttacaaggcactaaaga

SEQ ID NO: 128056 - DNA, 20 bp, Artificial Sequence
  Description of Artificial Sequence: Synthetic oligonucleotide
  Target: LAMA2; (+) strand; PAM type: NRG; PAM sequence: AAG
aaggcactaaagaaagacac

SEQ ID NO: 128057 - DNA, 20 bp, Artificial Sequence
  Description of Artificial Sequence: Synthetic oligonucleotide
  Target: LAMA2; (+) strand; PAM type: NRG; PAM sequence: AGG
aggcactaaagaaagacaca

SEQ ID NO: 128058 - DNA, 20 bp, Artificial Sequence
  Description of Artificial Sequence: Synthetic oligonucleotide
  Target: LAMA2; (+) strand; PAM type: NRG; PAM sequence: GGG
ggcactaaagaaagacacaa

SEQ ID NO: 128059 - DNA, 20 bp, Artificial Sequence
  Description of Artificial Sequence: Synthetic oligonucleotide
  Target: LAMA2; (+) strand; PAM type: NRG; PAM sequence: TAG
gacacaagggaacattcata

SEQ ID NO: 128060 - DNA, 20 bp, Artificial Sequence
  Description of Artificial Sequence: Synthetic oligonucleotide
  Target: LAMA2; (+) strand; PAM type: NRG; PAM sequence: GAG
tattttattaaatatttatt

SEQ ID NO: 128061 - DNA, 20 bp, Artificial Sequence
  Description of Artificial Sequence: Synthetic oligonucleotide
  Target: LAMA2; (+) strand; PAM type: NRG; PAM sequence: CAG
attgagcaaaatatttgtgc

SEQ ID NO: 128062 - DNA, 20 bp, Artificial Sequence
  Description of Artificial Sequence: Synthetic oligonucleotide
  Target: LAMA2; (+) strand; PAM type: NRG; PAM sequence: AGG
ttgagcaaaatatttgtgcc

SEQ ID NO: 128063 - DNA, 20 bp, Artificial Sequence
  Description of Artificial Sequence: Synthetic oligonucleotide
  Target: LAMA2; (+) strand; PAM type: NRG; PAM sequence: TAG
atatttgtgccaggcactgt

SEQ ID NO: 128064 - DNA, 20 bp, Artificial Sequence
  Description of Artificial Sequence: Synthetic oligonucleotide
  Target: LAMA2; (+) strand; PAM type: NRG; PAM sequence: TGG
tgtgccaggcactgttagat

SEQ ID NO: 128065 - DNA, 20 bp, Artificial Sequence
  Description of Artificial Sequence: Synthetic oligonucleotide
  Target: LAMA2; (+) strand; PAM type: NRG; PAM sequence: GAG
cactgttagattggcctcat

SEQ ID NO: 128066 - DNA, 20 bp, Artificial Sequence
  Description of Artificial Sequence: Synthetic oligonucleotide
  Target: LAMA2; (+) strand; PAM type: NRG; PAM sequence: TGG
ttggcctcatgagctttgca

SEQ ID NO: 128067 - DNA, 20 bp, Artificial Sequence
  Description of Artificial Sequence: Synthetic oligonucleotide
  Target: LAMA2; (+) strand; PAM type: NRG; PAM sequence: GGG
tggcctcatgagctttgcat

SEQ ID NO: 128068 - DNA, 20 bp, Artificial Sequence
  Description of Artificial Sequence: Synthetic oligonucleotide
  Target: LAMA2; (+) strand; PAM type: NRG; PAM sequence: CAG
ggcacccacttgctatacat

SEQ ID NO: 128069 - DNA, 20 bp, Artificial Sequence
  Description of Artificial Sequence: Synthetic oligonucleotide
  Target: LAMA2; (+) strand; PAM type: NRG; PAM sequence: AGG
gcacccacttgctatacatc

SEQ ID NO: 128070 - DNA, 20 bp, Artificial Sequence
  Description of Artificial Sequence: Synthetic oligonucleotide
  Target: LAMA2; (+) strand; PAM type: NRG; PAM sequence: TGG
cacttgctatacatcaggct

SEQ ID NO: 128071 - DNA, 20 bp, Artificial Sequence
  Description of Artificial Sequence: Synthetic oligonucleotide
  Target: LAMA2; (+) strand; PAM type: NRG; PAM sequence: CAG
cttggaaacatactcctgac

SEQ ID NO: 128072 - DNA, 20 bp, Artificial Sequence
  Description of Artificial Sequence: Synthetic oligonucleotide
  Target: LAMA2; (+) strand; PAM type: NRG; PAM sequence: TAG
ctcctgaccagcatttatgc

SEQ ID NO: 128073 - DNA, 20 bp, Artificial Sequence
  Description of Artificial Sequence: Synthetic oligonucleotide
  Target: LAMA2; (+) strand; PAM type: NRG; PAM sequence: AAG
tttatgtctcatactgtgct

SEQ ID NO: 128074 - DNA, 20 bp, Artificial Sequence
  Description of Artificial Sequence: Synthetic oligonucleotide
  Target: LAMA2; (+) strand; PAM type: NRG; PAM sequence: AGG
ttatgtctcatactgtgcta

SEQ ID NO: 128075 - DNA, 20 bp, Artificial Sequence
  Description of Artificial Sequence: Synthetic oligonucleotide
  Target: LAMA2; (+) strand; PAM type: NRG; PAM sequence: GGG
tatgtctcatactgtgctaa

SEQ ID NO: 128076 - DNA, 20 bp, Artificial Sequence
  Description of Artificial Sequence: Synthetic oligonucleotide
  Target: LAMA2; (+) strand; PAM type: NRG; PAM sequence: GGG
atgtctcatactgtgctaag

SEQ ID NO: 128077 - DNA, 20 bp, Artificial Sequence
  Description of Artificial Sequence: Synthetic oligonucleotide
  Target: LAMA2; (+) strand; PAM type: NRG; PAM sequence: GGG
tgtctcatactgtgctaagg

SEQ ID NO: 128078 - DNA, 20 bp, Artificial Sequence
  Description of Artificial Sequence: Synthetic oligonucleotide
  Target: LAMA2; (+) strand; PAM type: NRG; PAM sequence: GAG
tatattgaccaatacttgat

SEQ ID NO: 128079 - DNA, 20 bp, Artificial Sequence
  Description of Artificial Sequence: Synthetic oligonucleotide
  Target: LAMA2; (+) strand; PAM type: NRG; PAM sequence: CAG
tacttgatgagtatatttga

SEQ ID NO: 128080 - DNA, 20 bp, Artificial Sequence
  Description of Artificial Sequence: Synthetic oligonucleotide
  Target: LAMA2; (+) strand; PAM type: NRG; PAM sequence: AAG
tatatttgacagatgtttaa

SEQ ID NO: 128081 - DNA, 20 bp, Artificial Sequence
  Description of Artificial Sequence: Synthetic oligonucleotide
  Target: LAMA2; (+) strand; PAM type: NRG; PAM sequence: CGG
aaccctgctcaaaaatgtaa

SEQ ID NO: 128082 - DNA, 20 bp, Artificial Sequence
  Description of Artificial Sequence: Synthetic oligonucleotide
  Target: LAMA2; (+) strand; PAM type: NRG; PAM sequence: GGG
accctgctcaaaaatgtaac

SEQ ID NO: 128083 - DNA, 20 bp, Artificial Sequence
  Description of Artificial Sequence: Synthetic oligonucleotide
  Target: LAMA2; (+) strand; PAM type: NRG; PAM sequence: CAG
gtaacgggatctttactaat

SEQ ID NO: 128084 - DNA, 20 bp, Artificial Sequence
  Description of Artificial Sequence: Synthetic oligonucleotide
  Target: LAMA2; (+) strand; PAM type: NRG; PAM sequence: AGG
taacgggatctttactaatc

SEQ ID NO: 128085 - DNA, 20 bp, Artificial Sequence
  Description of Artificial Sequence: Synthetic oligonucleotide
  Target: LAMA2; (+) strand; PAM type: NRG; PAM sequence: TAG
atctttactaatcaggatca

SEQ ID NO: 128086 - DNA, 20 bp, Artificial Sequence
  Description of Artificial Sequence: Synthetic oligonucleotide
  Target: LAMA2; (+) strand; PAM type: NRG; PAM sequence: AGG
tctttactaatcaggatcat

SEQ ID NO: 128087 - DNA, 20 bp, Artificial Sequence
  Description of Artificial Sequence: Synthetic oligonucleotide
  Target: LAMA2; (+) strand; PAM type: NRG; PAM sequence: TGG
atcaggatcataggtttgca

SEQ ID NO: 128088 - DNA, 20 bp, Artificial Sequence
  Description of Artificial Sequence: Synthetic oligonucleotide
  Target: LAMA2; (+) strand; PAM type: NRG; PAM sequence: GGG
tcaggatcataggtttgcat

SEQ ID NO: 128089 - DNA, 20 bp, Artificial Sequence
  Description of Artificial Sequence: Synthetic oligonucleotide
  Target: LAMA2; (+) strand; PAM type: NRG; PAM sequence: TAG
cataggtttgcatgggttcc

SEQ ID NO: 128090 - DNA, 20 bp, Artificial Sequence
  Description of Artificial Sequence: Synthetic oligonucleotide
  Target: LAMA2; (+) strand; PAM type: NRG; PAM sequence: AGG
ataggtttgcatgggttcct

SEQ ID NO: 128091 - DNA, 20 bp, Artificial Sequence
  Description of Artificial Sequence: Synthetic oligonucleotide
  Target: LAMA2; (+) strand; PAM type: NRG; PAM sequence: GAG
aggtttgcatgggttcctag

SEQ ID NO: 128092 - DNA, 20 bp, Artificial Sequence
  Description of Artificial Sequence: Synthetic oligonucleotide
  Target: LAMA2; (+) strand; PAM type: NRG; PAM sequence: AGG
ggtttgcatgggttcctagg

SEQ ID NO: 128093 - DNA, 20 bp, Artificial Sequence
  Description of Artificial Sequence: Synthetic oligonucleotide
  Target: LAMA2; (+) strand; PAM type: NRG; PAM sequence: AAG
gcatgggttcctaggaggaa

SEQ ID NO: 128094 - DNA, 20 bp, Artificial Sequence
  Description of Artificial Sequence: Synthetic oligonucleotide
  Target: LAMA2; (+) strand; PAM type: NRG; PAM sequence: GAG
gttcctaggaggaaaagaat

SEQ ID NO: 128095 - DNA, 20 bp, Artificial Sequence
  Description of Artificial Sequence: Synthetic oligonucleotide
  Target: LAMA2; (+) strand; PAM type: NRG; PAM sequence: TGG
cctaggaggaaaagaatgag

SEQ ID NO: 128096 - DNA, 20 bp, Artificial Sequence
  Description of Artificial Sequence: Synthetic oligonucleotide
  Target: LAMA2; (+) strand; PAM type: NRG; PAM sequence: GGG
ctaggaggaaaagaatgagt

SEQ ID NO: 128097 - DNA, 20 bp, Artificial Sequence
  Description of Artificial Sequence: Synthetic oligonucleotide
  Target: LAMA2; (+) strand; PAM type: NRG; PAM sequence: CAG
aggaaaagaatgagtgggac

SEQ ID NO: 128098 - DNA, 20 bp, Artificial Sequence
  Description of Artificial Sequence: Synthetic oligonucleotide
  Target: LAMA2; (+) strand; PAM type: NRG; PAM sequence: AAG
gtgggaccagtttatacacc

SEQ ID NO: 128099 - DNA, 20 bp, Artificial Sequence
  Description of Artificial Sequence: Synthetic oligonucleotide
  Target: LAMA2; (+) strand; PAM type: NRG; PAM sequence: AAG
agtttatacaccaagcatca

SEQ ID NO: 128100 - DNA, 20 bp, Artificial Sequence
  Description of Artificial Sequence: Synthetic oligonucleotide
  Target: LAMA2; (+) strand; PAM type: NRG; PAM sequence: AGG
gtttatacaccaagcatcaa

SEQ ID NO: 128101 - DNA, 20 bp, Artificial Sequence
  Description of Artificial Sequence: Synthetic oligonucleotide
  Target: LAMA2; (+) strand; PAM type: NRG; PAM sequence: TAG
aaaggactccattctcaccc

SEQ ID NO: 128102 - DNA, 20 bp, Artificial Sequence
  Description of Artificial Sequence: Synthetic oligonucleotide
  Target: LAMA2; (+) strand; PAM type: NRG; PAM sequence: AGG
aaggactccattctcaccct

SEQ ID NO: 128103 - DNA, 20 bp, Artificial Sequence
  Description of Artificial Sequence: Synthetic oligonucleotide
  Target: LAMA2; (+) strand; PAM type: NRG; PAM sequence: GGG
aggactccattctcacccta

SEQ ID NO: 128104 - DNA, 20 bp, Artificial Sequence
  Description of Artificial Sequence: Synthetic oligonucleotide
  Target: LAMA2; (+) strand; PAM type: NRG; PAM sequence: CGG
attctcaccctagggaaaca

SEQ ID NO: 128105 - DNA, 20 bp, Artificial Sequence
  Description of Artificial Sequence: Synthetic oligonucleotide
  Target: LAMA2; (+) strand; PAM type: NRG; PAM sequence: CAG
gaaacacggattttactgct

SEQ ID NO: 128106 - DNA, 20 bp, Artificial Sequence
  Description of Artificial Sequence: Synthetic oligonucleotide
  Target: LAMA2; (+) strand; PAM type: NRG; PAM sequence: AGG
aaacacggattttactgctc

SEQ ID NO: 128107 - DNA, 20 bp, Artificial Sequence
  Description of Artificial Sequence: Synthetic oligonucleotide
  Target: LAMA2; (+) strand; PAM type: NRG; PAM sequence: GGG
aacacggattttactgctca

SEQ ID NO: 128108 - DNA, 20 bp, Artificial Sequence
  Description of Artificial Sequence: Synthetic oligonucleotide
  Target: LAMA2; (+) strand; PAM type: NRG; PAM sequence: GGG
acacggattttactgctcag

SEQ ID NO: 128109 - DNA, 20 bp, Artificial Sequence
  Description of Artificial Sequence: Synthetic oligonucleotide
  Target: LAMA2; (+) strand; PAM type: NRG; PAM sequence: TGG
gctcaggggatgatgaaaat

SEQ ID NO: 128110 - DNA, 20 bp, Artificial Sequence
  Description of Artificial Sequence: Synthetic oligonucleotide
  Target: LAMA2; (+) strand; PAM type: NRG; PAM sequence: CAG
ggattccgacttttacacct

SEQ ID NO: 128111 - DNA, 20 bp, Artificial Sequence
  Description of Artificial Sequence: Synthetic oligonucleotide
  Target: LAMA2; (+) strand; PAM type: NRG; PAM sequence: CAG
tatttctattaattacacct

SEQ ID NO: 128112 - DNA, 20 bp, Artificial Sequence
  Description of Artificial Sequence: Synthetic oligonucleotide
  Target: LAMA2; (+) strand; PAM type: NRG; PAM sequence: CAG
agattatttctattacacct

SEQ ID NO: 128113 - DNA, 20 bp, Artificial Sequence
  Description of Artificial Sequence: Synthetic oligonucleotide
  Target: LAMA2; (+) strand; PAM type: NRG; PAM sequence: CAG
tacacctcagattattatct

SEQ ID NO: 128114 - DNA, 20 bp, Artificial Sequence
  Description of Artificial Sequence: Synthetic oligonucleotide
  Target: LAMA2; (+) strand; PAM type: NRG; PAM sequence: CAG
gattattatctattacacct

SEQ ID NO: 128115 - DNA, 20 bp, Artificial Sequence
  Description of Artificial Sequence: Synthetic oligonucleotide
  Target: LAMA2; (+) strand; PAM type: NRG; PAM sequence: CAG
ctcagattatttctattatt

SEQ ID NO: 128116 - DNA, 20 bp, Artificial Sequence
  Description of Artificial Sequence: Synthetic oligonucleotide
  Target: LAMA2; (+) strand; PAM type: NRG; PAM sequence: TAG
ttatttctattattcagtct

SEQ ID NO: 128117 - DNA, 20 bp, Artificial Sequence
  Description of Artificial Sequence: Synthetic oligonucleotide
  Target: LAMA2; (+) strand; PAM type: NRG; PAM sequence: AAG
ctattattcagtcttagccg

SEQ ID NO: 128118 - DNA, 20 bp, Artificial Sequence
  Description of Artificial Sequence: Synthetic oligonucleotide
  Target: LAMA2; (+) strand; PAM type: NRG; PAM sequence: CAG
cagtcttagccgaagattcc

SEQ ID NO: 128119 - DNA, 20 bp, Artificial Sequence
  Description of Artificial Sequence: Synthetic oligonucleotide
  Target: LAMA2; (+) strand; PAM type: NRG; PAM sequence: CAG
tagccgaagattcccagccc

SEQ ID NO: 128120 - DNA, 20 bp, Artificial Sequence
  Description of Artificial Sequence: Synthetic oligonucleotide
  Target: LAMA2; (+) strand; PAM type: NRG; PAM sequence: AGG
agccgaagattcccagcccc

SEQ ID NO: 128121 - DNA, 20 bp, Artificial Sequence
  Description of Artificial Sequence: Synthetic oligonucleotide
  Target: LAMA2; (+) strand; PAM type: NRG; PAM sequence: AAG
ccccaggtccatcgttgctc

SEQ ID NO: 128122 - DNA, 20 bp, Artificial Sequence
  Description of Artificial Sequence: Synthetic oligonucleotide
  Target: LAMA2; (+) strand; PAM type: NRG; PAM sequence: AGG
cccaggtccatcgttgctca

SEQ ID NO: 128123 - DNA, 20 bp, Artificial Sequence
  Description of Artificial Sequence: Synthetic oligonucleotide
  Target: LAMA2; (+) strand; PAM type: NRG; PAM sequence: GGG
ccaggtccatcgttgctcaa

SEQ ID NO: 128124 - DNA, 20 bp, Artificial Sequence
  Description of Artificial Sequence: Synthetic oligonucleotide
  Target: LAMA2; (+) strand; PAM type: NRG; PAM sequence: AAG
gtccatcgttgctcaagggt

SEQ ID NO: 128125 - DNA, 20 bp, Artificial Sequence
  Description of Artificial Sequence: Synthetic oligonucleotide
  Target: LAMA2; (+) strand; PAM type: NRG; PAM sequence: CAG
gttgctcaagggtaagatca

SEQ ID NO: 128126 - DNA, 20 bp, Artificial Sequence
  Description of Artificial Sequence: Synthetic oligonucleotide
  Target: LAMA2; (+) strand; PAM type: NRG; PAM sequence: TAG
caagggtaagatcacagacc

SEQ ID NO: 128127 - DNA, 20 bp, Artificial Sequence
  Description of Artificial Sequence: Synthetic oligonucleotide
  Target: LAMA2; (+) strand; PAM type: NRG; PAM sequence: GAG
ttcccttctgtgcaaatcgt

SEQ ID NO: 128128 - DNA, 20 bp, Artificial Sequence
  Description of Artificial Sequence: Synthetic oligonucleotide
  Target: LAMA2; (+) strand; PAM type: NRG; PAM sequence: AGG
tcccttctgtgcaaatcgtg

SEQ ID NO: 128129 - DNA, 20 bp, Artificial Sequence
  Description of Artificial Sequence: Synthetic oligonucleotide
  Target: LAMA2; (+) strand; PAM type: NRG; PAM sequence: GGG
cccttctgtgcaaatcgtga

SEQ ID NO: 128130 - DNA, 20 bp, Artificial Sequence
  Description of Artificial Sequence: Synthetic oligonucleotide
  Target: LAMA2; (+) strand; PAM type: NRG; PAM sequence: CAG
ctctaaaaatttgcattaaa

SEQ ID NO: 128131 - DNA, 20 bp, Artificial Sequence
  Description of Artificial Sequence: Synthetic oligonucleotide
  Target: LAMA2; (+) strand; PAM type: NRG; PAM sequence: TAG
gcattaaacagaccaatcac

SEQ ID NO: 128132 - DNA, 20 bp, Artificial Sequence
  Description of Artificial Sequence: Synthetic oligonucleotide
  Target: LAMA2; (+) strand; PAM type: NRG; PAM sequence: CAG
caatcactagattccttcta

SEQ ID NO: 128133 - DNA, 20 bp, Artificial Sequence
  Description of Artificial Sequence: Synthetic oligonucleotide
  Target: LAMA2; (+) strand; PAM type: NRG; PAM sequence: AAG
gcatttattcaatcaaacaa

SEQ ID NO: 128134 - DNA, 20 bp, Artificial Sequence
  Description of Artificial Sequence: Synthetic oligonucleotide
  Target: LAMA2; (+) strand; PAM type: NRG; PAM sequence: AGG
catttattcaatcaaacaaa

SEQ ID NO: 128135 - DNA, 20 bp, Artificial Sequence
  Description of Artificial Sequence: Synthetic oligonucleotide
  Target: LAMA2; (+) strand; PAM type: NRG; PAM sequence: GGG
atttattcaatcaaacaaaa

SEQ ID NO: 128136 - DNA, 20 bp, Artificial Sequence
  Description of Artificial Sequence: Synthetic oligonucleotide
  Target: LAMA2; (+) strand; PAM type: NRG; PAM sequence: GAG
aaacaaaagggaatccatgt

SEQ ID NO: 128137 - DNA, 20 bp, Artificial Sequence
  Description of Artificial Sequence: Synthetic oligonucleotide
  Target: LAMA2; (+) strand; PAM type: NRG; PAM sequence: AGG
aacaaaagggaatccatgtg

SEQ ID NO: 128138 - DNA, 20 bp, Artificial Sequence
  Description of Artificial Sequence: Synthetic oligonucleotide
  Target: LAMA2; (+) strand; PAM type: NRG; PAM sequence: AAG
ggaatccatgtgaggcaact

SEQ ID NO: 128139 - DNA, 20 bp, Artificial Sequence
  Description of Artificial Sequence: Synthetic oligonucleotide
  Target: LAMA2; (+) strand; PAM type: NRG; PAM sequence: AGG
gaatccatgtgaggcaacta

SEQ ID NO: 128140 - DNA, 20 bp, Artificial Sequence
  Description of Artificial Sequence: Synthetic oligonucleotide
  Target: LAMA2; (+) strand; PAM type: NRG; PAM sequence: AAG
tccatgtgaggcaactaagg

SEQ ID NO: 128141 - DNA, 20 bp, Artificial Sequence
  Description of Artificial Sequence: Synthetic oligonucleotide
  Target: LAMA2; (+) strand; PAM type: NRG; PAM sequence: AGG
ccatgtgaggcaactaagga

SEQ ID NO: 128142 - DNA, 20 bp, Artificial Sequence
  Description of Artificial Sequence: Synthetic oligonucleotide
  Target: LAMA2; (+) strand; PAM type: NRG; PAM sequence: GGG
catgtgaggcaactaaggaa

SEQ ID NO: 128143 - DNA, 20 bp, Artificial Sequence
  Description of Artificial Sequence: Synthetic oligonucleotide
  Target: LAMA2; (+) strand; PAM type: NRG; PAM sequence: CAG
ctaaggaagggctttccctc

SEQ ID NO: 128144 - DNA, 20 bp, Artificial Sequence
  Description of Artificial Sequence: Synthetic oligonucleotide
  Target: LAMA2; (+) strand; PAM type: NRG; PAM sequence: TGG
gaagggctttccctccagtc

SEQ ID NO: 128145 - DNA, 20 bp, Artificial Sequence
  Description of Artificial Sequence: Synthetic oligonucleotide
  Target: LAMA2; (+) strand; PAM type: NRG; PAM sequence: GAG
ggctttccctccagtctggt

SEQ ID NO: 128146 - DNA, 20 bp, Artificial Sequence
  Description of Artificial Sequence: Synthetic oligonucleotide
  Target: LAMA2; (+) strand; PAM type: NRG; PAM sequence: CAG
tttccctccagtctggtgag

SEQ ID NO: 128147 - DNA, 20 bp, Artificial Sequence
  Description of Artificial Sequence: Synthetic oligonucleotide
  Target: LAMA2; (+) strand; PAM type: NRG; PAM sequence: TGG
ccctccagtctggtgagcag

SEQ ID NO: 128148 - DNA, 20 bp, Artificial Sequence
  Description of Artificial Sequence: Synthetic oligonucleotide
  Target: LAMA2; (+) strand; PAM type: NRG; PAM sequence: TGG
agtctggtgagcagtggctg

SEQ ID NO: 128149 - DNA, 20 bp, Artificial Sequence
  Description of Artificial Sequence: Synthetic oligonucleotide
  Target: LAMA2; (+) strand; PAM type: NRG; PAM sequence: TGG
agcagtggctgtggctctgc

SEQ ID NO: 128150 - DNA, 20 bp, Artificial Sequence
  Description of Artificial Sequence: Synthetic oligonucleotide
  Target: LAMA2; (+) strand; PAM type: NRG; PAM sequence: GAG
ctctgctggctctattttgt

SEQ ID NO: 128151 - DNA, 20 bp, Artificial Sequence
  Description of Artificial Sequence: Synthetic oligonucleotide
  Target: LAMA2; (+) strand; PAM type: NRG; PAM sequence: AGG
tctgctggctctattttgtg

SEQ ID NO: 128152 - DNA, 20 bp, Artificial Sequence
  Description of Artificial Sequence: Synthetic oligonucleotide
  Target: LAMA2; (+) strand; PAM type: NRG; PAM sequence: AAG
ctttataaatgaccacaatt

SEQ ID NO: 128153 - DNA, 20 bp, Artificial Sequence
  Description of Artificial Sequence: Synthetic oligonucleotide
  Target: LAMA2; (+) strand; PAM type: NRG; PAM sequence: TAG
aaatgaccacaattaagctg

SEQ ID NO: 128154 - DNA, 20 bp, Artificial Sequence
  Description of Artificial Sequence: Synthetic oligonucleotide
  Target: LAMA2; (+) strand; PAM type: NRG; PAM sequence: TAG
ctgtagatgtactcatgccc

SEQ ID NO: 128155 - DNA, 20 bp, Artificial Sequence
  Description of Artificial Sequence: Synthetic oligonucleotide
  Target: LAMA2; (+) strand; PAM type: NRG; PAM sequence: TGG
ctagatgtaaccatccgttc

SEQ ID NO: 128156 - DNA, 20 bp, Artificial Sequence
  Description of Artificial Sequence: Synthetic oligonucleotide
  Target: LAMA2; (+) strand; PAM type: NRG; PAM sequence: GGG
tagatgtaaccatccgttct

SEQ ID NO: 128157 - DNA, 20 bp, Artificial Sequence
  Description of Artificial Sequence: Synthetic oligonucleotide
  Target: LAMA2; (+) strand; PAM type: NRG; PAM sequence: GGG
agatgtaaccatccgttctg

SEQ ID NO: 128158 - DNA, 20 bp, Artificial Sequence
  Description of Artificial Sequence: Synthetic oligonucleotide
  Target: LAMA2; (+) strand; PAM type: NRG; PAM sequence: TGG
accatccgttctggggaata

SEQ ID NO: 128159 - DNA, 20 bp, Artificial Sequence
  Description of Artificial Sequence: Synthetic oligonucleotide
  Target: LAMA2; (+) strand; PAM type: NRG; PAM sequence: TGG
atatggcttgataaacccat

SEQ ID NO: 128160 - DNA, 20 bp, Artificial Sequence
  Description of Artificial Sequence: Synthetic oligonucleotide
  Target: LAMA2; (+) strand; PAM type: NRG; PAM sequence: GAG
ttattcaaacaaatattttt

SEQ ID NO: 128161 - DNA, 20 bp, Artificial Sequence
  Description of Artificial Sequence: Synthetic oligonucleotide
  Target: LAMA2; (+) strand; PAM type: NRG; PAM sequence: GAG
aaatatttttgagctcttat

SEQ ID NO: 128162 - DNA, 20 bp, Artificial Sequence
  Description of Artificial Sequence: Synthetic oligonucleotide
  Target: LAMA2; (+) strand; PAM type: NRG; PAM sequence: AGG
aatatttttgagctcttatg

SEQ ID NO: 128163 - DNA, 20 bp, Artificial Sequence
  Description of Artificial Sequence: Synthetic oligonucleotide
  Target: LAMA2; (+) strand; PAM type: NRG; PAM sequence: CAG
tttgagctcttatgaggtgc

SEQ ID NO: 128164 - DNA, 20 bp, Artificial Sequence
  Description of Artificial Sequence: Synthetic oligonucleotide
  Target: LAMA2; (+) strand; PAM type: NRG; PAM sequence: AGG
ttgagctcttatgaggtgcc

SEQ ID NO: 128165 - DNA, 20 bp, Artificial Sequence
  Description of Artificial Sequence: Synthetic oligonucleotide
  Target: LAMA2; (+) strand; PAM type: NRG; PAM sequence: AAG
gaggtgccaggcactgttct

SEQ ID NO: 128166 - DNA, 20 bp, Artificial Sequence
  Description of Artificial Sequence: Synthetic oligonucleotide
  Target: LAMA2; (+) strand; PAM type: NRG; PAM sequence: TGG
ccaggcactgttctaagcaa

SEQ ID NO: 128167 - DNA, 20 bp, Artificial Sequence
  Description of Artificial Sequence: Synthetic oligonucleotide
  Target: LAMA2; (+) strand; PAM type: NRG; PAM sequence: GGG
caggcactgttctaagcaat

SEQ ID NO: 128168 - DNA, 20 bp, Artificial Sequence
  Description of Artificial Sequence: Synthetic oligonucleotide
  Target: LAMA2; (+) strand; PAM type: NRG; PAM sequence: CAG
tgttctaagcaatgggaaaa

SEQ ID NO: 128169 - DNA, 20 bp, Artificial Sequence
  Description of Artificial Sequence: Synthetic oligonucleotide
  Target: LAMA2; (+) strand; PAM type: NRG; PAM sequence: AGG
gttctaagcaatgggaaaac

SEQ ID NO: 128170 - DNA, 20 bp, Artificial Sequence
  Description of Artificial Sequence: Synthetic oligonucleotide
  Target: LAMA2; (+) strand; PAM type: NRG; PAM sequence: GAG
tctaagcaatgggaaaacag

SEQ ID NO: 128171 - DNA, 20 bp, Artificial Sequence
  Description of Artificial Sequence: Synthetic oligonucleotide
  Target: LAMA2; (+) strand; PAM type: NRG; PAM sequence: AAG
atgggaaaacaggagtaaac

SEQ ID NO: 128172 - DNA, 20 bp, Artificial Sequence
  Description of Artificial Sequence: Synthetic oligonucleotide
  Target: LAMA2; (+) strand; PAM type: NRG; PAM sequence: TAG
ttcttatgatgtttttattt

SEQ ID NO: 128173 - DNA, 20 bp, Artificial Sequence
  Description of Artificial Sequence: Synthetic oligonucleotide
  Target: LAMA2; (+) strand; PAM type: NRG; PAM sequence: GAG
cttatgatgtttttatttta

SEQ ID NO: 128174 - DNA, 20 bp, Artificial Sequence
  Description of Artificial Sequence: Synthetic oligonucleotide
  Target: LAMA2; (+) strand; PAM type: NRG; PAM sequence: AGG
ttatgatgtttttattttag

SEQ ID NO: 128175 - DNA, 20 bp, Artificial Sequence
  Description of Artificial Sequence: Synthetic oligonucleotide
  Target: LAMA2; (+) strand; PAM type: NRG; PAM sequence: GGG
tatgatgtttttattttaga

SEQ ID NO: 128176 - DNA, 20 bp, Artificial Sequence
  Description of Artificial Sequence: Synthetic oligonucleotide
  Target: LAMA2; (+) strand; PAM type: NRG; PAM sequence: GGG
atgatgtttttattttagag

SEQ ID NO: 128177 - DNA, 20 bp, Artificial Sequence
  Description of Artificial Sequence: Synthetic oligonucleotide
  Target: LAMA2; (+) strand; PAM type: NRG; PAM sequence: TAG
tgtttttattttagagggga

SEQ ID NO: 128178 - DNA, 20 bp, Artificial Sequence
  Description of Artificial Sequence: Synthetic oligonucleotide
  Target: LAMA2; (+) strand; PAM type: NRG; PAM sequence: AGG
gtttttattttagaggggat

SEQ ID NO: 128179 - DNA, 20 bp, Artificial Sequence
  Description of Artificial Sequence: Synthetic oligonucleotide
  Target: LAMA2; (+) strand; PAM type: NRG; PAM sequence: AAG
tttattttagaggggatagg

SEQ ID NO: 128180 - DNA, 20 bp, Artificial Sequence
  Description of Artificial Sequence: Synthetic oligonucleotide
  Target: LAMA2; (+) strand; PAM type: NRG; PAM sequence: AAG
attttagaggggataggaag

SEQ ID NO: 128181 - DNA, 20 bp, Artificial Sequence
  Description of Artificial Sequence: Synthetic oligonucleotide
  Target: LAMA2; (+) strand; PAM type: NRG; PAM sequence: AGG
ttttagaggggataggaaga

SEQ ID NO: 128182 - DNA, 20 bp, Artificial Sequence
  Description of Artificial Sequence: Synthetic oligonucleotide
  Target: LAMA2; (+) strand; PAM type: NRG; PAM sequence: GAG
ttagaggggataggaagaag

SEQ ID NO: 128183 - DNA, 20 bp, Artificial Sequence
  Description of Artificial Sequence: Synthetic oligonucleotide
  Target: LAMA2; (+) strand; PAM type: NRG; PAM sequence: AAG
gggataggaagaaggagaaa

SEQ ID NO: 128184 - DNA, 20 bp, Artificial Sequence
  Description of Artificial Sequence: Synthetic oligonucleotide
  Target: LAMA2; (+) strand; PAM type: NRG; PAM sequence: AAG
aggagaaaaagccaatgaat

SEQ ID NO: 128185 - DNA, 20 bp, Artificial Sequence
  Description of Artificial Sequence: Synthetic oligonucleotide
  Target: LAMA2; (+) strand; PAM type: NRG; PAM sequence: AGG
ggagaaaaagccaatgaata

SEQ ID NO: 128186 - DNA, 20 bp, Artificial Sequence
  Description of Artificial Sequence: Synthetic oligonucleotide
  Target: LAMA2; (+) strand; PAM type: NRG; PAM sequence: AAG
aaaaagccaatgaataagga

SEQ ID NO: 128187 - DNA, 20 bp, Artificial Sequence
  Description of Artificial Sequence: Synthetic oligonucleotide
  Target: LAMA2; (+) strand; PAM type: NRG; PAM sequence: AAG
aaggaaagaaataaatcaac

SEQ ID NO: 128188 - DNA, 20 bp, Artificial Sequence
  Description of Artificial Sequence: Synthetic oligonucleotide
  Target: LAMA2; (+) strand; PAM type: NRG; PAM sequence: AAG
agataatttcatataatgct

SEQ ID NO: 128189 - DNA, 20 bp, Artificial Sequence
  Description of Artificial Sequence: Synthetic oligonucleotide
  Target: LAMA2; (+) strand; PAM type: NRG; PAM sequence: AGG
gataatttcatataatgcta

SEQ ID NO: 128190 - DNA, 20 bp, Artificial Sequence
  Description of Artificial Sequence: Synthetic oligonucleotide
  Target: LAMA2; (+) strand; PAM type: NRG; PAM sequence: TGG
atttcatataatgctaagga

SEQ ID NO: 128191 - DNA, 20 bp, Artificial Sequence
  Description of Artificial Sequence: Synthetic oligonucleotide
  Target: LAMA2; (+) strand; PAM type: NRG; PAM sequence: GGG
tttcatataatgctaaggat

SEQ ID NO: 128192 - DNA, 20 bp, Artificial Sequence
  Description of Artificial Sequence: Synthetic oligonucleotide
  Target: LAMA2; (+) strand; PAM type: NRG; PAM sequence: AAG
catataatgctaaggatggg

SEQ ID NO: 128193 - DNA, 20 bp, Artificial Sequence
  Description of Artificial Sequence: Synthetic oligonucleotide
  Target: LAMA2; (+) strand; PAM type: NRG; PAM sequence: CAG
aggatgggaagaaatgaaaa

SEQ ID NO: 128194 - DNA, 20 bp, Artificial Sequence
  Description of Artificial Sequence: Synthetic oligonucleotide
  Target: LAMA2; (+) strand; PAM type: NRG; PAM sequence: AGG
ggatgggaagaaatgaaaac

SEQ ID NO: 128195 - DNA, 20 bp, Artificial Sequence
  Description of Artificial Sequence: Synthetic oligonucleotide
  Target: LAMA2; (+) strand; PAM type: NRG; PAM sequence: TGG
gaagaaatgaaaacaggtgt

SEQ ID NO: 128196 - DNA, 20 bp, Artificial Sequence
  Description of Artificial Sequence: Synthetic oligonucleotide
  Target: LAMA2; (+) strand; PAM type: NRG; PAM sequence: TAG
aatgaaaacaggtgttggaa

SEQ ID NO: 128197 - DNA, 20 bp, Artificial Sequence
  Description of Artificial Sequence: Synthetic oligonucleotide
  Target: LAMA2; (+) strand; PAM type: NRG; PAM sequence: TGG
acaggtgttggaatagatca

SEQ ID NO: 128198 - DNA, 20 bp, Artificial Sequence
  Description of Artificial Sequence: Synthetic oligonucleotide
  Target: LAMA2; (+) strand; PAM type: NRG; PAM sequence: GGG
caggtgttggaatagatcat

SEQ ID NO: 128199 - DNA, 20 bp, Artificial Sequence
  Description of Artificial Sequence: Synthetic oligonucleotide
  Target: LAMA2; (+) strand; PAM type: NRG; PAM sequence: GGG
aggtgttggaatagatcatg

SEQ ID NO: 128200 - DNA, 20 bp, Artificial Sequence
  Description of Artificial Sequence: Synthetic oligonucleotide
  Target: LAMA2; (+) strand; PAM type: NRG; PAM sequence: TGG
tgttggaatagatcatgggg

SEQ ID NO: 128201 - DNA, 20 bp, Artificial Sequence
  Description of Artificial Sequence: Synthetic oligonucleotide
  Target: LAMA2; (+) strand; PAM type: NRG; PAM sequence: GGG
gttggaatagatcatggggt

SEQ ID NO: 128202 - DNA, 20 bp, Artificial Sequence
  Description of Artificial Sequence: Synthetic oligonucleotide
  Target: LAMA2; (+) strand; PAM type: NRG; PAM sequence: GAG
tggaatagatcatggggtgg

SEQ ID NO: 128203 - DNA, 20 bp, Artificial Sequence
  Description of Artificial Sequence: Synthetic oligonucleotide
  Target: LAMA2; (+) strand; PAM type: NRG; PAM sequence: AAG
catggggtgggagttaattg

SEQ ID NO: 128204 - DNA, 20 bp, Artificial Sequence
  Description of Artificial Sequence: Synthetic oligonucleotide
  Target: LAMA2; (+) strand; PAM type: NRG; PAM sequence: AGG
atggggtgggagttaattga

SEQ ID NO: 128205 - DNA, 20 bp, Artificial Sequence
  Description of Artificial Sequence: Synthetic oligonucleotide
  Target: LAMA2; (+) strand; PAM type: NRG; PAM sequence: GGG
tggggtgggagttaattgaa

SEQ ID NO: 128206 - DNA, 20 bp, Artificial Sequence
  Description of Artificial Sequence: Synthetic oligonucleotide
  Target: LAMA2; (+) strand; PAM type: NRG; PAM sequence: GGG
ggggtgggagttaattgaag

SEQ ID NO: 128207 - DNA, 20 bp, Artificial Sequence
  Description of Artificial Sequence: Synthetic oligonucleotide
  Target: LAMA2; (+) strand; PAM type: NRG; PAM sequence: TAG
gtgggagttaattgaagggg

SEQ ID NO: 128208 - DNA, 20 bp, Artificial Sequence
  Description of Artificial Sequence: Synthetic oligonucleotide
  Target: LAMA2; (+) strand; PAM type: NRG; PAM sequence: AAG
agttaattgaaggggtagtc

SEQ ID NO: 128209 - DNA, 20 bp, Artificial Sequence
  Description of Artificial Sequence: Synthetic oligonucleotide
  Target: LAMA2; (+) strand; PAM type: NRG; PAM sequence: AAG
aattgaaggggtagtcaaga

SEQ ID NO: 128210 - DNA, 20 bp, Artificial Sequence
  Description of Artificial Sequence: Synthetic oligonucleotide
  Target: LAMA2; (+) strand; PAM type: NRG; PAM sequence: AGG
attgaaggggtagtcaagaa

SEQ ID NO: 128211 - DNA, 20 bp, Artificial Sequence
  Description of Artificial Sequence: Synthetic oligonucleotide
  Target: LAMA2; (+) strand; PAM type: NRG; PAM sequence: AAG
agtcaagaaaggccctgcta

SEQ ID NO: 128212 - DNA, 20 bp, Artificial Sequence
  Description of Artificial Sequence: Synthetic oligonucleotide
  Target: LAMA2; (+) strand; PAM type: NRG; PAM sequence: AAG
caagaaaggccctgctaaag

SEQ ID NO: 128213 - DNA, 20 bp, Artificial Sequence
  Description of Artificial Sequence: Synthetic oligonucleotide
  Target: LAMA2; (+) strand; PAM type: NRG; PAM sequence: TGG
aggccctgctaaagaagtgt

SEQ ID NO: 128214 - DNA, 20 bp, Artificial Sequence
  Description of Artificial Sequence: Synthetic oligonucleotide
  Target: LAMA2; (+) strand; PAM type: NRG; PAM sequence: GGG
ggccctgctaaagaagtgtt

SEQ ID NO: 128215 - DNA, 20 bp, Artificial Sequence
  Description of Artificial Sequence: Synthetic oligonucleotide
  Target: LAMA2; (+) strand; PAM type: NRG; PAM sequence: TGG
ctgctaaagaagtgttgggt

SEQ ID NO: 128216 - DNA, 20 bp, Artificial Sequence
  Description of Artificial Sequence: Synthetic oligonucleotide
  Target: LAMA2; (+) strand; PAM type: NRG; PAM sequence: TAG
taaagaagtgttgggttggt

SEQ ID NO: 128217 - DNA, 20 bp, Artificial Sequence
  Description of Artificial Sequence: Synthetic oligonucleotide
  Target: LAMA2; (+) strand; PAM type: NRG; PAM sequence: GAG
aagaagtgttgggttggtta

SEQ ID NO: 128218 - DNA, 20 bp, Artificial Sequence
  Description of Artificial Sequence: Synthetic oligonucleotide
  Target: LAMA2; (+) strand; PAM type: NRG; PAM sequence: CAG
gtgttgggttggttagagcc

SEQ ID NO: 128219 - DNA, 20 bp, Artificial Sequence
  Description of Artificial Sequence: Synthetic oligonucleotide
  Target: LAMA2; (+) strand; PAM type: NRG; PAM sequence: AAG
tgggttggttagagcccagc

SEQ ID NO: 128220 - DNA, 20 bp, Artificial Sequence
  Description of Artificial Sequence: Synthetic oligonucleotide
  Target: LAMA2; (+) strand; PAM type: NRG; PAM sequence: AGG
gggttggttagagcccagca

SEQ ID NO: 128221 - DNA, 20 bp, Artificial Sequence
  Description of Artificial Sequence: Synthetic oligonucleotide
  Target: LAMA2; (+) strand; PAM type: NRG; PAM sequence: GGG
ggttggttagagcccagcaa

SEQ ID NO: 128222 - DNA, 20 bp, Artificial Sequence
  Description of Artificial Sequence: Synthetic oligonucleotide
  Target: LAMA2; (+) strand; PAM type: NRG; PAM sequence: CAG
gagcccagcaagggactttt

SEQ ID NO: 128223 - DNA, 20 bp, Artificial Sequence
  Description of Artificial Sequence: Synthetic oligonucleotide
  Target: LAMA2; (+) strand; PAM type: NRG; PAM sequence: TGG
agcaagggacttttcagctc

SEQ ID NO: 128224 - DNA, 20 bp, Artificial Sequence
  Description of Artificial Sequence: Synthetic oligonucleotide
  Target: LAMA2; (+) strand; PAM type: NRG; PAM sequence: GAG
caagggacttttcagctctg

SEQ ID NO: 128225 - DNA, 20 bp, Artificial Sequence
  Description of Artificial Sequence: Synthetic oligonucleotide
  Target: LAMA2; (+) strand; PAM type: NRG; PAM sequence: TAG
ttcagctctggagatgcttg

SEQ ID NO: 128226 - DNA, 20 bp, Artificial Sequence
  Description of Artificial Sequence: Synthetic oligonucleotide
  Target: LAMA2; (+) strand; PAM type: NRG; PAM sequence: GAG
cagctctggagatgcttgta

SEQ ID NO: 128227 - DNA, 20 bp, Artificial Sequence
  Description of Artificial Sequence: Synthetic oligonucleotide
  Target: LAMA2; (+) strand; PAM type: NRG; PAM sequence: CAG
gagatgcttgtagagaaatg

SEQ ID NO: 128228 - DNA, 20 bp, Artificial Sequence
  Description of Artificial Sequence: Synthetic oligonucleotide
  Target: LAMA2; (+) strand; PAM type: NRG; PAM sequence: GAG
gatgcttgtagagaaatgca

SEQ ID NO: 128229 - DNA, 20 bp, Artificial Sequence
  Description of Artificial Sequence: Synthetic oligonucleotide
  Target: LAMA2; (+) strand; PAM type: NRG; PAM sequence: AGG
atgcttgtagagaaatgcag

SEQ ID NO: 128230 - DNA, 20 bp, Artificial Sequence
  Description of Artificial Sequence: Synthetic oligonucleotide
  Target: LAMA2; (+) strand; PAM type: NRG; PAM sequence: TGG
gaaatgcagaggtcctaata

SEQ ID NO: 128231 - DNA, 20 bp, Artificial Sequence
  Description of Artificial Sequence: Synthetic oligonucleotide
  Target: LAMA2; (+) strand; PAM type: NRG; PAM sequence: GGG
aaatgcagaggtcctaatat

SEQ ID NO: 128232 - DNA, 20 bp, Artificial Sequence
  Description of Artificial Sequence: Synthetic oligonucleotide
  Target: LAMA2; (+) strand; PAM type: NRG; PAM sequence: TAG
atgggaatgaacatctcatg

SEQ ID NO: 128233 - DNA, 20 bp, Artificial Sequence
  Description of Artificial Sequence: Synthetic oligonucleotide
  Target: LAMA2; (+) strand; PAM type: NRG; PAM sequence: AGG
tgggaatgaacatctcatgt

SEQ ID NO: 128234 - DNA, 20 bp, Artificial Sequence
  Description of Artificial Sequence: Synthetic oligonucleotide
  Target: LAMA2; (+) strand; PAM type: NRG; PAM sequence: GGG
gggaatgaacatctcatgta

SEQ ID NO: 128235 - DNA, 20 bp, Artificial Sequence
  Description of Artificial Sequence: Synthetic oligonucleotide
  Target: LAMA2; (+) strand; PAM type: NRG; PAM sequence: TAG
tgaacatctcatgtagggta

SEQ ID NO: 128236 - DNA, 20 bp, Artificial Sequence
  Description of Artificial Sequence: Synthetic oligonucleotide
  Target: LAMA2; (+) strand; PAM type: NRG; PAM sequence: GAG
gggtatagcttctcatgttt

SEQ ID NO: 128237 - DNA, 20 bp, Artificial Sequence
  Description of Artificial Sequence: Synthetic oligonucleotide
  Target: LAMA2; (+) strand; PAM type: NRG; PAM sequence: AGG
ggtatagcttctcatgtttg

SEQ ID NO: 128238 - DNA, 20 bp, Artificial Sequence
  Description of Artificial Sequence: Synthetic oligonucleotide
  Target: LAMA2; (+) strand; PAM type: NRG; PAM sequence: CAG
agcttctcatgtttgaggaa

SEQ ID NO: 128239 - DNA, 20 bp, Artificial Sequence
  Description of Artificial Sequence: Synthetic oligonucleotide
  Target: LAMA2; (+) strand; PAM type: NRG; PAM sequence: AAG
catgtttgaggaacagaaac

SEQ ID NO: 128240 - DNA, 20 bp, Artificial Sequence
  Description of Artificial Sequence: Synthetic oligonucleotide
  Target: LAMA2; (+) strand; PAM type: NRG; PAM sequence: AGG
atgtttgaggaacagaaaca

SEQ ID NO: 128241 - DNA, 20 bp, Artificial Sequence
  Description of Artificial Sequence: Synthetic oligonucleotide
  Target: LAMA2; (+) strand; PAM type: NRG; PAM sequence: AAG
ggaacagaaacaaggcccta

SEQ ID NO: 128242 - DNA, 20 bp, Artificial Sequence
  Description of Artificial Sequence: Synthetic oligonucleotide
  Target: LAMA2; (+) strand; PAM type: NRG; PAM sequence: AGG
gaacagaaacaaggccctaa

SEQ ID NO: 128243 - DNA, 20 bp, Artificial Sequence
  Description of Artificial Sequence: Synthetic oligonucleotide
  Target: LAMA2; (+) strand; PAM type: NRG; PAM sequence: GAG
cctaaaggctctaatattgt

SEQ ID NO: 128244 - DNA, 20 bp, Artificial Sequence
  Description of Artificial Sequence: Synthetic oligonucleotide
  Target: LAMA2; (+) strand; PAM type: NRG; PAM sequence: CAG
aaggctctaatattgtgagc

SEQ ID NO: 128245 - DNA, 20 bp, Artificial Sequence
  Description of Artificial Sequence: Synthetic oligonucleotide
  Target: LAMA2; (+) strand; PAM type: NRG; PAM sequence: AGG
aggctctaatattgtgagcc

SEQ ID NO: 128246 - DNA, 20 bp, Artificial Sequence
  Description of Artificial Sequence: Synthetic oligonucleotide
  Target: LAMA2; (+) strand; PAM type: NRG; PAM sequence: AAG
ctaatattgtgagccaggat

SEQ ID NO: 128247 - DNA, 20 bp, Artificial Sequence
  Description of Artificial Sequence: Synthetic oligonucleotide
  Target: LAMA2; (+) strand; PAM type: NRG; PAM sequence: AGG
taatattgtgagccaggata

SEQ ID NO: 128248 - DNA, 20 bp, Artificial Sequence
  Description of Artificial Sequence: Synthetic oligonucleotide
  Target: LAMA2; (+) strand; PAM type: NRG; PAM sequence: GGG
aatattgtgagccaggataa

SEQ ID NO: 128249 - DNA, 20 bp, Artificial Sequence
  Description of Artificial Sequence: Synthetic oligonucleotide
  Target: LAMA2; (+) strand; PAM type: NRG; PAM sequence: CAG
attgtgagccaggataaggg

SEQ ID NO: 128250 - DNA, 20 bp, Artificial Sequence
  Description of Artificial Sequence: Synthetic oligonucleotide
  Target: LAMA2; (+) strand; PAM type: NRG; PAM sequence: CAG
tgagccaggataagggcagc

SEQ ID NO: 128251 - DNA, 20 bp, Artificial Sequence
  Description of Artificial Sequence: Synthetic oligonucleotide
  Target: LAMA2; (+) strand; PAM type: NRG; PAM sequence: AGG
gagccaggataagggcagcc

SEQ ID NO: 128252 - DNA, 20 bp, Artificial Sequence
  Description of Artificial Sequence: Synthetic oligonucleotide
  Target: LAMA2; (+) strand; PAM type: NRG; PAM sequence: GGG
agccaggataagggcagcca

SEQ ID NO: 128253 - DNA, 20 bp, Artificial Sequence
  Description of Artificial Sequence: Synthetic oligonucleotide
  Target: LAMA2; (+) strand; PAM type: NRG; PAM sequence: AAG
aggataagggcagccagggt

SEQ ID NO: 128254 - DNA, 20 bp, Artificial Sequence
  Description of Artificial Sequence: Synthetic oligonucleotide
  Target: LAMA2; (+) strand; PAM type: NRG; PAM sequence: AGG
ggataagggcagccagggta

SEQ ID NO: 128255 - DNA, 20 bp, Artificial Sequence
  Description of Artificial Sequence: Synthetic oligonucleotide
  Target: LAMA2; (+) strand; PAM type: NRG; PAM sequence: GGG
gataagggcagccagggtaa

SEQ ID NO: 128256 - DNA, 20 bp, Artificial Sequence
  Description of Artificial Sequence: Synthetic oligonucleotide
  Target: LAMA2; (+) strand; PAM type: NRG; PAM sequence: CAG
aagggcagccagggtaaggg

SEQ ID NO: 128257 - DNA, 20 bp, Artificial Sequence
  Description of Artificial Sequence: Synthetic oligonucleotide
  Target: LAMA2; (+) strand; PAM type: NRG; PAM sequence: TGG
gggtaagggcagatgacatc

SEQ ID NO: 128258 - DNA, 20 bp, Artificial Sequence
  Description of Artificial Sequence: Synthetic oligonucleotide
  Target: LAMA2; (+) strand; PAM type: NRG; PAM sequence: GAG
gtaagggcagatgacatctg

SEQ ID NO: 128259 - DNA, 20 bp, Artificial Sequence
  Description of Artificial Sequence: Synthetic oligonucleotide
  Target: LAMA2; (+) strand; PAM type: NRG; PAM sequence: CAG
gggcagatgacatctggaga

SEQ ID NO: 128260 - DNA, 20 bp, Artificial Sequence
  Description of Artificial Sequence: Synthetic oligonucleotide
  Target: LAMA2; (+) strand; PAM type: NRG; PAM sequence: AGG
ggcagatgacatctggagac

SEQ ID NO: 128261 - DNA, 20 bp, Artificial Sequence
  Description of Artificial Sequence: Synthetic oligonucleotide
  Target: LAMA2; (+) strand; PAM type: NRG; PAM sequence: TAG
agatgacatctggagacagg

SEQ ID NO: 128262 - DNA, 20 bp, Artificial Sequence
  Description of Artificial Sequence: Synthetic oligonucleotide
  Target: LAMA2; (+) strand; PAM type: NRG; PAM sequence: AGG
gatgacatctggagacaggt

SEQ ID NO: 128263 - DNA, 20 bp, Artificial Sequence
  Description of Artificial Sequence: Synthetic oligonucleotide
  Target: LAMA2; (+) strand; PAM type: NRG; PAM sequence: GGG
atgacatctggagacaggta

SEQ ID NO: 128264 - DNA, 20 bp, Artificial Sequence
  Description of Artificial Sequence: Synthetic oligonucleotide
  Target: LAMA2; (+) strand; PAM type: NRG; PAM sequence: GGG
tgacatctggagacaggtag

SEQ ID NO: 128265 - DNA, 20 bp, Artificial Sequence
  Description of Artificial Sequence: Synthetic oligonucleotide
  Target: LAMA2; (+) strand; PAM type: NRG; PAM sequence: CAG
atctggagacaggtaggggc

SEQ ID NO: 128266 - DNA, 20 bp, Artificial Sequence
  Description of Artificial Sequence: Synthetic oligonucleotide
  Target: LAMA2; (+) strand; PAM type: NRG; PAM sequence: AGG
tctggagacaggtaggggcc

SEQ ID NO: 128267 - DNA, 20 bp, Artificial Sequence
  Description of Artificial Sequence: Synthetic oligonucleotide
  Target: LAMA2; (+) strand; PAM type: NRG; PAM sequence: TAG
ggagacaggtaggggccagg

SEQ ID NO: 128268 - DNA, 20 bp, Artificial Sequence
  Description of Artificial Sequence: Synthetic oligonucleotide
  Target: LAMA2; (+) strand; PAM type: NRG; PAM sequence: AGG
gagacaggtaggggccaggt

SEQ ID NO: 128269 - DNA, 20 bp, Artificial Sequence
  Description of Artificial Sequence: Synthetic oligonucleotide
  Target: LAMA2; (+) strand; PAM type: NRG; PAM sequence: TAG
aggaccttgtactgtgtacg

SEQ ID NO: 128270 - DNA, 20 bp, Artificial Sequence
  Description of Artificial Sequence: Synthetic oligonucleotide
  Target: LAMA2; (+) strand; PAM type: NRG; PAM sequence: AGG
ggaccttgtactgtgtacgt

SEQ ID NO: 128271 - DNA, 20 bp, Artificial Sequence
  Description of Artificial Sequence: Synthetic oligonucleotide
  Target: LAMA2; (+) strand; PAM type: NRG; PAM sequence: TAG
tacgtaggaccttgtacatg

SEQ ID NO: 128272 - DNA, 20 bp, Artificial Sequence
  Description of Artificial Sequence: Synthetic oligonucleotide
  Target: LAMA2; (+) strand; PAM type: NRG; PAM sequence: AGG
acgtaggaccttgtacatgt

SEQ ID NO: 128273 - DNA, 20 bp, Artificial Sequence
  Description of Artificial Sequence: Synthetic oligonucleotide
  Target: LAMA2; (+) strand; PAM type: NRG; PAM sequence: GAG
gtaggaccttgtacatgtag

SEQ ID NO: 128274 - DNA, 20 bp, Artificial Sequence
  Description of Artificial Sequence: Synthetic oligonucleotide
  Target: LAMA2; (+) strand; PAM type: NRG; PAM sequence: CAG
gaccttgtacatgtaggagt

SEQ ID NO: 128275 - DNA, 20 bp, Artificial Sequence
  Description of Artificial Sequence: Synthetic oligonucleotide
  Target: LAMA2; (+) strand; PAM type: NRG; PAM sequence: TGG
catgtaggagtcagatcacg

SEQ ID NO: 128276 - DNA, 20 bp, Artificial Sequence
  Description of Artificial Sequence: Synthetic oligonucleotide
  Target: LAMA2; (+) strand; PAM type: NRG; PAM sequence: GGG
atgtaggagtcagatcacgt

SEQ ID NO: 128277 - DNA, 20 bp, Artificial Sequence
  Description of Artificial Sequence: Synthetic oligonucleotide
  Target: LAMA2; (+) strand; PAM type: NRG; PAM sequence: TGG
ttgaattttattctaaatgt

SEQ ID NO: 128278 - DNA, 20 bp, Artificial Sequence
  Description of Artificial Sequence: Synthetic oligonucleotide
  Target: LAMA2; (+) strand; PAM type: NRG; PAM sequence: GGG
tgaattttattctaaatgtt

SEQ ID NO: 128279 - DNA, 20 bp, Artificial Sequence
  Description of Artificial Sequence: Synthetic oligonucleotide
  Target: LAMA2; (+) strand; PAM type: NRG; PAM sequence: TAG
tctaaatgttgggaattgat

SEQ ID NO: 128280 - DNA, 20 bp, Artificial Sequence
  Description of Artificial Sequence: Synthetic oligonucleotide
  Target: LAMA2; (+) strand; PAM type: NRG; PAM sequence: GAG
tgtcactctgcctactctct

SEQ ID NO: 128281 - DNA, 20 bp, Artificial Sequence
  Description of Artificial Sequence: Synthetic oligonucleotide
  Target: LAMA2; (+) strand; PAM type: NRG; PAM sequence: CAG
tctgcctactctctgagaaa

SEQ ID NO: 128282 - DNA, 20 bp, Artificial Sequence
  Description of Artificial Sequence: Synthetic oligonucleotide
  Target: LAMA2; (+) strand; PAM type: NRG; PAM sequence: AAG
ctctctgagaaacagatcat

SEQ ID NO: 128283 - DNA, 20 bp, Artificial Sequence
  Description of Artificial Sequence: Synthetic oligonucleotide
  Target: LAMA2; (+) strand; PAM type: NRG; PAM sequence: AGG
tctctgagaaacagatcata

SEQ ID NO: 128284 - DNA, 20 bp, Artificial Sequence
  Description of Artificial Sequence: Synthetic oligonucleotide
  Target: LAMA2; (+) strand; PAM type: NRG; PAM sequence: GAG
tctgagaaacagatcataag

SEQ ID NO: 128285 - DNA, 20 bp, Artificial Sequence
  Description of Artificial Sequence: Synthetic oligonucleotide
  Target: LAMA2; (+) strand; PAM type: NRG; PAM sequence: AAG
gaaacagatcataaggagac

SEQ ID NO: 128286 - DNA, 20 bp, Artificial Sequence
  Description of Artificial Sequence: Synthetic oligonucleotide
  Target: LAMA2; (+) strand; PAM type: NRG; PAM sequence: AGG
aaacagatcataaggagaca

SEQ ID NO: 128287 - DNA, 20 bp, Artificial Sequence
  Description of Artificial Sequence: Synthetic oligonucleotide
  Target: LAMA2; (+) strand; PAM type: NRG; PAM sequence: GGG
aacagatcataaggagacaa

SEQ ID NO: 128288 - DNA, 20 bp, Artificial Sequence
  Description of Artificial Sequence: Synthetic oligonucleotide
  Target: LAMA2; (+) strand; PAM type: NRG; PAM sequence: TGG
gatcataaggagacaagggt

SEQ ID NO: 128289 - DNA, 20 bp, Artificial Sequence
  Description of Artificial Sequence: Synthetic oligonucleotide
  Target: LAMA2; (+) strand; PAM type: NRG; PAM sequence: GAG
tcataaggagacaagggttg

SEQ ID NO: 128290 - DNA, 20 bp, Artificial Sequence
  Description of Artificial Sequence: Synthetic oligonucleotide
  Target: LAMA2; (+) strand; PAM type: NRG; PAM sequence: AGG
cataaggagacaagggttgg

SEQ ID NO: 128291 - DNA, 20 bp, Artificial Sequence
  Description of Artificial Sequence: Synthetic oligonucleotide
  Target: LAMA2; (+) strand; PAM type: NRG; PAM sequence: AAG
aggagacaagggttggaggc

SEQ ID NO: 128292 - DNA, 20 bp, Artificial Sequence
  Description of Artificial Sequence: Synthetic oligonucleotide
  Target: LAMA2; (+) strand; PAM type: NRG; PAM sequence: CAG
ggaggcaagcaatgcttcta

SEQ ID NO: 128293 - DNA, 20 bp, Artificial Sequence
  Description of Artificial Sequence: Synthetic oligonucleotide
  Target: LAMA2; (+) strand; PAM type: NRG; PAM sequence: AAG
ggcaagcaatgcttctacag

SEQ ID NO: 128294 - DNA, 20 bp, Artificial Sequence
  Description of Artificial Sequence: Synthetic oligonucleotide
  Target: LAMA2; (+) strand; PAM type: NRG; PAM sequence: TGG
aatgcttctacagaagactt

SEQ ID NO: 128295 - DNA, 20 bp, Artificial Sequence
  Description of Artificial Sequence: Synthetic oligonucleotide
  Target: LAMA2; (+) strand; PAM type: NRG; PAM sequence: TAG
gcttctacagaagactttgg

SEQ ID NO: 128296 - DNA, 20 bp, Artificial Sequence
  Description of Artificial Sequence: Synthetic oligonucleotide
  Target: LAMA2; (+) strand; PAM type: NRG; PAM sequence: AGG
cttctacagaagactttggt

SEQ ID NO: 128297 - DNA, 20 bp, Artificial Sequence
  Description of Artificial Sequence: Synthetic oligonucleotide
  Target: LAMA2; (+) strand; PAM type: NRG; PAM sequence: CGG
acagaagactttggtaggtt

SEQ ID NO: 128298 - DNA, 20 bp, Artificial Sequence
  Description of Artificial Sequence: Synthetic oligonucleotide
  Target: LAMA2; (+) strand; PAM type: NRG; PAM sequence: AAG
gttcggtttctataatttcc

SEQ ID NO: 128299 - DNA, 20 bp, Artificial Sequence
  Description of Artificial Sequence: Synthetic oligonucleotide
  Target: LAMA2; (+) strand; PAM type: NRG; PAM sequence: CAG
tctataatttccaagctctg

SEQ ID NO: 128300 - DNA, 20 bp, Artificial Sequence
  Description of Artificial Sequence: Synthetic oligonucleotide
  Target: LAMA2; (+) strand; PAM type: NRG; PAM sequence: AGG
ctataatttccaagctctgc

SEQ ID NO: 128301 - DNA, 20 bp, Artificial Sequence
  Description of Artificial Sequence: Synthetic oligonucleotide
  Target: LAMA2; (+) strand; PAM type: NRG; PAM sequence: GAG
ataatttccaagctctgcag

SEQ ID NO: 128302 - DNA, 20 bp, Artificial Sequence
  Description of Artificial Sequence: Synthetic oligonucleotide
  Target: LAMA2; (+) strand; PAM type: NRG; PAM sequence: CAG
agctctgcaggagaccacta

SEQ ID NO: 128303 - DNA, 20 bp, Artificial Sequence
  Description of Artificial Sequence: Synthetic oligonucleotide
  Target: LAMA2; (+) strand; PAM type: NRG; PAM sequence: CAG
gaccactacagcttcctcct

SEQ ID NO: 128304 - DNA, 20 bp, Artificial Sequence
  Description of Artificial Sequence: Synthetic oligonucleotide
  Target: LAMA2; (+) strand; PAM type: NRG; PAM sequence: TGG
cagttactcttatttactta

SEQ ID NO: 128305 - DNA, 20 bp, Artificial Sequence
  Description of Artificial Sequence: Synthetic oligonucleotide
  Target: LAMA2; (+) strand; PAM type: NRG; PAM sequence: GGG
agttactcttatttacttat

SEQ ID NO: 128306 - DNA, 20 bp, Artificial Sequence
  Description of Artificial Sequence: Synthetic oligonucleotide
  Target: LAMA2; (+) strand; PAM type: NRG; PAM sequence: GAG
acttatgggcccaaacccct

SEQ ID NO: 128307 - DNA, 20 bp, Artificial Sequence
  Description of Artificial Sequence: Synthetic oligonucleotide
  Target: LAMA2; (+) strand; PAM type: NRG; PAM sequence: CAG
tatgggcccaaacccctgag

SEQ ID NO: 128308 - DNA, 20 bp, Artificial Sequence
  Description of Artificial Sequence: Synthetic oligonucleotide
  Target: LAMA2; (+) strand; PAM type: NRG; PAM sequence: TGG
acccctgagcagttaaaatc

SEQ ID NO: 128309 - DNA, 20 bp, Artificial Sequence
  Description of Artificial Sequence: Synthetic oligonucleotide
  Target: LAMA2; (+) strand; PAM type: NRG; PAM sequence: TGG
atcaataacactatcaattc

SEQ ID NO: 128310 - DNA, 20 bp, Artificial Sequence
  Description of Artificial Sequence: Synthetic oligonucleotide
  Target: LAMA2; (+) strand; PAM type: NRG; PAM sequence: TGG
atcaattctggctaacacct

SEQ ID NO: 128311 - DNA, 20 bp, Artificial Sequence
  Description of Artificial Sequence: Synthetic oligonucleotide
  Target: LAMA2; (+) strand; PAM type: NRG; PAM sequence: CAG
attctggctaacaccttggc

SEQ ID NO: 128312 - DNA, 20 bp, Artificial Sequence
  Description of Artificial Sequence: Synthetic oligonucleotide
  Target: LAMA2; (+) strand; PAM type: NRG; PAM sequence: GAG
tggctaacaccttggccagt

SEQ ID NO: 128313 - DNA, 20 bp, Artificial Sequence
  Description of Artificial Sequence: Synthetic oligonucleotide
  Target: LAMA2; (+) strand; PAM type: NRG; PAM sequence: AAG
ctaacaccttggccagtgag

SEQ ID NO: 128314 - DNA, 20 bp, Artificial Sequence
  Description of Artificial Sequence: Synthetic oligonucleotide
  Target: LAMA2; (+) strand; PAM type: NRG; PAM sequence: AGG
taacaccttggccagtgaga

SEQ ID NO: 128315 - DNA, 20 bp, Artificial Sequence
  Description of Artificial Sequence: Synthetic oligonucleotide
  Target: LAMA2; (+) strand; PAM type: NRG; PAM sequence: GGG
aacaccttggccagtgagaa

SEQ ID NO: 128316 - DNA, 20 bp, Artificial Sequence
  Description of Artificial Sequence: Synthetic oligonucleotide
  Target: LAMA2; (+) strand; PAM type: NRG; PAM sequence: CAG
agtgagaagggttaatataa

SEQ ID NO: 128317 - DNA, 20 bp, Artificial Sequence
  Description of Artificial Sequence: Synthetic oligonucleotide
  Target: LAMA2; (+) strand; PAM type: NRG; PAM sequence: AGG
gtgagaagggttaatataac

SEQ ID NO: 128318 - DNA, 20 bp, Artificial Sequence
  Description of Artificial Sequence: Synthetic oligonucleotide
  Target: LAMA2; (+) strand; PAM type: NRG; PAM sequence: GAG
gagaagggttaatataacag

SEQ ID NO: 128319 - DNA, 20 bp, Artificial Sequence
  Description of Artificial Sequence: Synthetic oligonucleotide
  Target: LAMA2; (+) strand; PAM type: NRG; PAM sequence: AGG
agaagggttaatataacagg

SEQ ID NO: 128320 - DNA, 20 bp, Artificial Sequence
  Description of Artificial Sequence: Synthetic oligonucleotide
  Target: LAMA2; (+) strand; PAM type: NRG; PAM sequence: GGG
gaagggttaatataacagga

SEQ ID NO: 128321 - DNA, 20 bp, Artificial Sequence
  Description of Artificial Sequence: Synthetic oligonucleotide
  Target: LAMA2; (+) strand; PAM type: NRG; PAM sequence: AAG
gggttaatataacaggaggg

SEQ ID NO: 128322 - DNA, 20 bp, Artificial Sequence
  Description of Artificial Sequence: Synthetic oligonucleotide
  Target: LAMA2; (+) strand; PAM type: NRG; PAM sequence: CAG
tataacaggagggaagatga

SEQ ID NO: 128323 - DNA, 20 bp, Artificial Sequence
  Description of Artificial Sequence: Synthetic oligonucleotide
  Target: LAMA2; (+) strand; PAM type: NRG; PAM sequence: CGG
acaggagggaagatgacaga

SEQ ID NO: 128324 - DNA, 20 bp, Artificial Sequence
  Description of Artificial Sequence: Synthetic oligonucleotide
  Target: LAMA2; (+) strand; PAM type: NRG; PAM sequence: TGG
catttcttttacctcttttt

SEQ ID NO: 128325 - DNA, 20 bp, Artificial Sequence
  Description of Artificial Sequence: Synthetic oligonucleotide
  Target: LAMA2; (+) strand; PAM type: NRG; PAM sequence: CAG
tacctcttttttggtctcca

SEQ ID NO: 128326 - DNA, 20 bp, Artificial Sequence
  Description of Artificial Sequence: Synthetic oligonucleotide
  Target: LAMA2; (+) strand; PAM type: NRG; PAM sequence: AGG
acctcttttttggtctccac

SEQ ID NO: 128327 - DNA, 20 bp, Artificial Sequence
  Description of Artificial Sequence: Synthetic oligonucleotide
  Target: LAMA2; (+) strand; PAM type: NRG; PAM sequence: CAG
atcacatgtatgcaatttac

SEQ ID NO: 128328 - DNA, 20 bp, Artificial Sequence
  Description of Artificial Sequence: Synthetic oligonucleotide
  Target: LAMA2; (+) strand; PAM type: NRG; PAM sequence: AAG
acatgtatgcaatttaccag

SEQ ID NO: 128329 - DNA, 20 bp, Artificial Sequence
  Description of Artificial Sequence: Synthetic oligonucleotide
  Target: LAMA2; (+) strand; PAM type: NRG; PAM sequence: TAG
taccagaagttttgaaatct

SEQ ID NO: 128330 - DNA, 20 bp, Artificial Sequence
  Description of Artificial Sequence: Synthetic oligonucleotide
  Target: LAMA2; (+) strand; PAM type: NRG; PAM sequence: AAG
cactaacattccaatttcta

SEQ ID NO: 128331 - DNA, 20 bp, Artificial Sequence
  Description of Artificial Sequence: Synthetic oligonucleotide
  Target: LAMA2; (+) strand; PAM type: NRG; PAM sequence: CAG
aacattccaatttctaaaga

SEQ ID NO: 128332 - DNA, 20 bp, Artificial Sequence
  Description of Artificial Sequence: Synthetic oligonucleotide
  Target: LAMA2; (+) strand; PAM type: NRG; PAM sequence: TGG
attccaatttctaaagacag

SEQ ID NO: 128333 - DNA, 20 bp, Artificial Sequence
  Description of Artificial Sequence: Synthetic oligonucleotide
  Target: LAMA2; (+) strand; PAM type: NRG; PAM sequence: CAG
acagtggacatgaattcctg

SEQ ID NO: 128334 - DNA, 20 bp, Artificial Sequence
  Description of Artificial Sequence: Synthetic oligonucleotide
  Target: LAMA2; (+) strand; PAM type: NRG; PAM sequence: GAG
atgaattcctgcagctctct

SEQ ID NO: 128335 - DNA, 20 bp, Artificial Sequence
  Description of Artificial Sequence: Synthetic oligonucleotide
  Target: LAMA2; (+) strand; PAM type: NRG; PAM sequence: TAG
ttcctgcagctctctgagaa

SEQ ID NO: 128336 - DNA, 20 bp, Artificial Sequence
  Description of Artificial Sequence: Synthetic oligonucleotide
  Target: LAMA2; (+) strand; PAM type: NRG; PAM sequence: TAG
agctctctgagaatagattt

SEQ ID NO: 128337 - DNA, 20 bp, Artificial Sequence
  Description of Artificial Sequence: Synthetic oligonucleotide
  Target: LAMA2; (+) strand; PAM type: NRG; PAM sequence: TAG
ttatattacaacttcctaca

SEQ ID NO: 128338 - DNA, 20 bp, Artificial Sequence
  Description of Artificial Sequence: Synthetic oligonucleotide
  Target: LAMA2; (+) strand; PAM type: NRG; PAM sequence: TAG
cctacatagttgtaaaaatt

SEQ ID NO: 128339 - DNA, 20 bp, Artificial Sequence
  Description of Artificial Sequence: Synthetic oligonucleotide
  Target: LAMA2; (+) strand; PAM type: NRG; PAM sequence: AGG
ctacatagttgtaaaaattt

SEQ ID NO: 128340 - DNA, 20 bp, Artificial Sequence
  Description of Artificial Sequence: Synthetic oligonucleotide
  Target: LAMA2; (+) strand; PAM type: NRG; PAM sequence: TGG
ttatttttatttttttgaaa

SEQ ID NO: 128341 - DNA, 20 bp, Artificial Sequence
  Description of Artificial Sequence: Synthetic oligonucleotide
  Target: LAMA2; (+) strand; PAM type: NRG; PAM sequence: GGG
tatttttatttttttgaaat

SEQ ID NO: 128342 - DNA, 20 bp, Artificial Sequence
  Description of Artificial Sequence: Synthetic oligonucleotide
  Target: LAMA2; (+) strand; PAM type: NRG; PAM sequence: GGG
atttttatttttttgaaatg

SEQ ID NO: 128343 - DNA, 20 bp, Artificial Sequence
  Description of Artificial Sequence: Synthetic oligonucleotide
  Target: LAMA2; (+) strand; PAM type: NRG; PAM sequence: CAG
tggggtctcactctgttgcc

SEQ ID NO: 128344 - DNA, 20 bp, Artificial Sequence
  Description of Artificial Sequence: Synthetic oligonucleotide
  Target: LAMA2; (+) strand; PAM type: NRG; PAM sequence: AGG
ggggtctcactctgttgccc

SEQ ID NO: 128345 - DNA, 20 bp, Artificial Sequence
  Description of Artificial Sequence: Synthetic oligonucleotide
  Target: LAMA2; (+) strand; PAM type: NRG; PAM sequence: TGG
tctcactctgttgcccaggc

SEQ ID NO: 128346 - DNA, 20 bp, Artificial Sequence
  Description of Artificial Sequence: Synthetic oligonucleotide
  Target: LAMA2; (+) strand; PAM type: NRG; PAM sequence: GAG
tcactctgttgcccaggctg

SEQ ID NO: 128347 - DNA, 20 bp, Artificial Sequence
  Description of Artificial Sequence: Synthetic oligonucleotide
  Target: LAMA2; (+) strand; PAM type: NRG; PAM sequence: TAG
ctgttgcccaggctggagtg

SEQ ID NO: 128348 - DNA, 20 bp, Artificial Sequence
  Description of Artificial Sequence: Synthetic oligonucleotide
  Target: LAMA2; (+) strand; PAM type: NRG; PAM sequence: TGG
ttgcccaggctggagtgtag

SEQ ID NO: 128349 - DNA, 20 bp, Artificial Sequence
  Description of Artificial Sequence: Synthetic oligonucleotide
  Target: LAMA2; (+) strand; PAM type: NRG; PAM sequence: CAG
ggagtgtagtggtgtgatct

SEQ ID NO: 128350 - DNA, 20 bp, Artificial Sequence
  Description of Artificial Sequence: Synthetic oligonucleotide
  Target: LAMA2; (+) strand; PAM type: NRG; PAM sequence: CAG
ctcattgcaactttgcctcc

SEQ ID NO: 128351 - DNA, 20 bp, Artificial Sequence
  Description of Artificial Sequence: Synthetic oligonucleotide
  Target: LAMA2; (+) strand; PAM type: NRG; PAM sequence: AGG
tcattgcaactttgcctccc

SEQ ID NO: 128352 - DNA, 20 bp, Artificial Sequence
  Description of Artificial Sequence: Synthetic oligonucleotide
  Target: LAMA2; (+) strand; PAM type: NRG; PAM sequence: AAG
caactttgcctcccaggctc

SEQ ID NO: 128353 - DNA, 20 bp, Artificial Sequence
  Description of Artificial Sequence: Synthetic oligonucleotide
  Target: LAMA2; (+) strand; PAM type: NRG; PAM sequence: CAG
ctcaagcgatcctcctgcct

SEQ ID NO: 128354 - DNA, 20 bp, Artificial Sequence
  Description of Artificial Sequence: Synthetic oligonucleotide
  Target: LAMA2; (+) strand; PAM type: NRG; PAM sequence: GAG
gatcctcctgcctcagccac

SEQ ID NO: 128355 - DNA, 20 bp, Artificial Sequence
  Description of Artificial Sequence: Synthetic oligonucleotide
  Target: LAMA2; (+) strand; PAM type: NRG; PAM sequence: GAG
tcctcctgcctcagccacga

SEQ ID NO: 128356 - DNA, 20 bp, Artificial Sequence
  Description of Artificial Sequence: Synthetic oligonucleotide
  Target: LAMA2; (+) strand; PAM type: NRG; PAM sequence: TAG
tcctgcctcagccacgagag

SEQ ID NO: 128357 - DNA, 20 bp, Artificial Sequence
  Description of Artificial Sequence: Synthetic oligonucleotide
  Target: LAMA2; (+) strand; PAM type: NRG; PAM sequence: TGG
gcctcagccacgagagtagc

SEQ ID NO: 128358 - DNA, 20 bp, Artificial Sequence
  Description of Artificial Sequence: Synthetic oligonucleotide
  Target: LAMA2; (+) strand; PAM type: NRG; PAM sequence: GGG
cctcagccacgagagtagct

SEQ ID NO: 128359 - DNA, 20 bp, Artificial Sequence
  Description of Artificial Sequence: Synthetic oligonucleotide
  Target: LAMA2; (+) strand; PAM type: NRG; PAM sequence: CAG
cacgagagtagctgggatta

SEQ ID NO: 128360 - DNA, 20 bp, Artificial Sequence
  Description of Artificial Sequence: Synthetic oligonucleotide
  Target: LAMA2; (+) strand; PAM type: NRG; PAM sequence: CAG
cagattcacgccactacacc

SEQ ID NO: 128361 - DNA, 20 bp, Artificial Sequence
  Description of Artificial Sequence: Synthetic oligonucleotide
  Target: LAMA2; (+) strand; PAM type: NRG; PAM sequence: TAG
ccagcaaacttttgtatttt

SEQ ID NO: 128362 - DNA, 20 bp, Artificial Sequence
  Description of Artificial Sequence: Synthetic oligonucleotide
  Target: LAMA2; (+) strand; PAM type: NRG; PAM sequence: TAG
gcaaacttttgtatttttag

SEQ ID NO: 128363 - DNA, 20 bp, Artificial Sequence
  Description of Artificial Sequence: Synthetic oligonucleotide
  Target: LAMA2; (+) strand; PAM type: NRG; PAM sequence: GAG
tttgtatttttagtagatat

SEQ ID NO: 128364 - DNA, 20 bp, Artificial Sequence
  Description of Artificial Sequence: Synthetic oligonucleotide
  Target: LAMA2; (+) strand; PAM type: NRG; PAM sequence: AGG
ttgtatttttagtagatatg

SEQ ID NO: 128365 - DNA, 20 bp, Artificial Sequence
  Description of Artificial Sequence: Synthetic oligonucleotide
  Target: LAMA2; (+) strand; PAM type: NRG; PAM sequence: CAG
tgaggtttcaccatgttgtc

SEQ ID NO: 128366 - DNA, 20 bp, Artificial Sequence
  Description of Artificial Sequence: Synthetic oligonucleotide
  Target: LAMA2; (+) strand; PAM type: NRG; PAM sequence: AGG
gaggtttcaccatgttgtcc

SEQ ID NO: 128367 - DNA, 20 bp, Artificial Sequence
  Description of Artificial Sequence: Synthetic oligonucleotide
  Target: LAMA2; (+) strand; PAM type: NRG; PAM sequence: GAG
caggctgttctcaaactcct

SEQ ID NO: 128368 - DNA, 20 bp, Artificial Sequence
  Description of Artificial Sequence: Synthetic oligonucleotide
  Target: LAMA2; (+) strand; PAM type: NRG; PAM sequence: AAG
gttctcaaactcctgagctc

SEQ ID NO: 128369 - DNA, 20 bp, Artificial Sequence
  Description of Artificial Sequence: Synthetic oligonucleotide
  Target: LAMA2; (+) strand; PAM type: NRG; PAM sequence: TAG
gctcaagtgatccacccacc

SEQ ID NO: 128370 - DNA, 20 bp, Artificial Sequence
  Description of Artificial Sequence: Synthetic oligonucleotide
  Target: LAMA2; (+) strand; PAM type: NRG; PAM sequence: AAG
ccacccacctagacctccca

SEQ ID NO: 128371 - DNA, 20 bp, Artificial Sequence
  Description of Artificial Sequence: Synthetic oligonucleotide
  Target: LAMA2; (+) strand; PAM type: NRG; PAM sequence: TGG
acctagacctcccaaagtgc

SEQ ID NO: 128372 - DNA, 20 bp, Artificial Sequence
  Description of Artificial Sequence: Synthetic oligonucleotide
  Target: LAMA2; (+) strand; PAM type: NRG; PAM sequence: GGG
cctagacctcccaaagtgct

SEQ ID NO: 128373 - DNA, 20 bp, Artificial Sequence
  Description of Artificial Sequence: Synthetic oligonucleotide
  Target: LAMA2; (+) strand; PAM type: NRG; PAM sequence: CAG
ctcccaaagtgctgggacta

SEQ ID NO: 128374 - DNA, 20 bp, Artificial Sequence
  Description of Artificial Sequence: Synthetic oligonucleotide
  Target: LAMA2; (+) strand; PAM type: NRG; PAM sequence: AGG
tcccaaagtgctgggactac

SEQ ID NO: 128375 - DNA, 20 bp, Artificial Sequence
  Description of Artificial Sequence: Synthetic oligonucleotide
  Target: LAMA2; (+) strand; PAM type: NRG; PAM sequence: GAG
agtgctgggactacaggcat

SEQ ID NO: 128376 - DNA, 20 bp, Artificial Sequence
  Description of Artificial Sequence: Synthetic oligonucleotide
  Target: LAMA2; (+) strand; PAM type: NRG; PAM sequence: AAG
atgagccacctgtgaattta

SEQ ID NO: 128377 - DNA, 20 bp, Artificial Sequence
  Description of Artificial Sequence: Synthetic oligonucleotide
  Target: LAMA2; (+) strand; PAM type: NRG; PAM sequence: CAG
gtaaattaatattatgtaca

SEQ ID NO: 128378 - DNA, 20 bp, Artificial Sequence
  Description of Artificial Sequence: Synthetic oligonucleotide
  Target: LAMA2; (+) strand; PAM type: NRG; PAM sequence: AAG
aattaatattatgtacacag

SEQ ID NO: 128379 - DNA, 20 bp, Artificial Sequence
  Description of Artificial Sequence: Synthetic oligonucleotide
  Target: LAMA2; (+) strand; PAM type: NRG; PAM sequence: TGG
acaataaaaatgcttctatt

SEQ ID NO: 128380 - DNA, 20 bp, Artificial Sequence
  Description of Artificial Sequence: Synthetic oligonucleotide
  Target: LAMA2; (+) strand; PAM type: NRG; PAM sequence: AAG
aaaaattaaaactactgtaa

SEQ ID NO: 128381 - DNA, 20 bp, Artificial Sequence
  Description of Artificial Sequence: Synthetic oligonucleotide
  Target: LAMA2; (+) strand; PAM type: NRG; PAM sequence: AAG
taaaactactgtaaaagtga

SEQ ID NO: 128382 - DNA, 20 bp, Artificial Sequence
  Description of Artificial Sequence: Synthetic oligonucleotide
  Target: LAMA2; (+) strand; PAM type: NRG; PAM sequence: TAG
gtgaaagatactacatactt

SEQ ID NO: 128383 - DNA, 20 bp, Artificial Sequence
  Description of Artificial Sequence: Synthetic oligonucleotide
  Target: LAMA2; (+) strand; PAM type: NRG; PAM sequence: AGG
tgaaagatactacatacttt

SEQ ID NO: 128384 - DNA, 20 bp, Artificial Sequence
  Description of Artificial Sequence: Synthetic oligonucleotide
  Target: LAMA2; (+) strand; PAM type: NRG; PAM sequence: TGG
ctacatactttaggaacaac

SEQ ID NO: 128385 - DNA, 20 bp, Artificial Sequence
  Description of Artificial Sequence: Synthetic oligonucleotide
  Target: LAMA2; (+) strand; PAM type: NRG; PAM sequence: AAG
aacaactggtatttgtatgc

SEQ ID NO: 128386 - DNA, 20 bp, Artificial Sequence
  Description of Artificial Sequence: Synthetic oligonucleotide
  Target: LAMA2; (+) strand; PAM type: NRG; PAM sequence: TGG
aactggtatttgtatgcaag

SEQ ID NO: 128387 - DNA, 20 bp, Artificial Sequence
  Description of Artificial Sequence: Synthetic oligonucleotide
  Target: LAMA2; (+) strand; PAM type: NRG; PAM sequence: GGG
actggtatttgtatgcaagt

SEQ ID NO: 128388 - DNA, 20 bp, Artificial Sequence
  Description of Artificial Sequence: Synthetic oligonucleotide
  Target: LAMA2; (+) strand; PAM type: NRG; PAM sequence: AAG
cctaaatctaatgttgtgtg

SEQ ID NO: 128389 - DNA, 20 bp, Artificial Sequence
  Description of Artificial Sequence: Synthetic oligonucleotide
  Target: LAMA2; (+) strand; PAM type: NRG; PAM sequence: AAG
ctaatgttgtgtgaagatca

SEQ ID NO: 128390 - DNA, 20 bp, Artificial Sequence
  Description of Artificial Sequence: Synthetic oligonucleotide
  Target: LAMA2; (+) strand; PAM type: NRG; PAM sequence: AAG
gttgtgtgaagatcaaagcc

SEQ ID NO: 128391 - DNA, 20 bp, Artificial Sequence
  Description of Artificial Sequence: Synthetic oligonucleotide
  Target: LAMA2; (+) strand; PAM type: NRG; PAM sequence: TAG
atcaaagccaagtacaattg

SEQ ID NO: 128392 - DNA, 20 bp, Artificial Sequence
  Description of Artificial Sequence: Synthetic oligonucleotide
  Target: LAMA2; (+) strand; PAM type: NRG; PAM sequence: CAG
tacaattgtagctcatgttg

SEQ ID NO: 128393 - DNA, 20 bp, Artificial Sequence
  Description of Artificial Sequence: Synthetic oligonucleotide
  Target: LAMA2; (+) strand; PAM type: NRG; PAM sequence: GAG
gctcatgttgcagttatttc

SEQ ID NO: 128394 - DNA, 20 bp, Artificial Sequence
  Description of Artificial Sequence: Synthetic oligonucleotide
  Target: LAMA2; (+) strand; PAM type: NRG; PAM sequence: AGG
ctcatgttgcagttatttcg

SEQ ID NO: 128395 - DNA, 20 bp, Artificial Sequence
  Description of Artificial Sequence: Synthetic oligonucleotide
  Target: LAMA2; (+) strand; PAM type: NRG; PAM sequence: AAG
cagttatttcgaggtctcaa

SEQ ID NO: 128396 - DNA, 20 bp, Artificial Sequence
  Description of Artificial Sequence: Synthetic oligonucleotide
  Target: LAMA2; (+) strand; PAM type: NRG; PAM sequence: AGG
agttatttcgaggtctcaaa

SEQ ID NO: 128397 - DNA, 20 bp, Artificial Sequence
  Description of Artificial Sequence: Synthetic oligonucleotide
  Target: LAMA2; (+) strand; PAM type: NRG; PAM sequence: GGG
gttatttcgaggtctcaaaa

SEQ ID NO: 128398 - DNA, 20 bp, Artificial Sequence
  Description of Artificial Sequence: Synthetic oligonucleotide
  Target: LAMA2; (+) strand; PAM type: NRG; PAM sequence: TAG
ataacaacaaaaatctataa

SEQ ID NO: 128399 - DNA, 20 bp, Artificial Sequence
  Description of Artificial Sequence: Synthetic oligonucleotide
  Target: LAMA2; (+) strand; PAM type: NRG; PAM sequence: CAG
caaaaatctataatagaaaa

SEQ ID NO: 128400 - DNA, 20 bp, Artificial Sequence
  Description of Artificial Sequence: Synthetic oligonucleotide
  Target: LAMA2; (+) strand; PAM type: NRG; PAM sequence: TGG
ctataatagaaaacagaatc

SEQ ID NO: 128401 - DNA, 20 bp, Artificial Sequence
  Description of Artificial Sequence: Synthetic oligonucleotide
  Target: LAMA2; (+) strand; PAM type: NRG; PAM sequence: GGG
tataatagaaaacagaatct

SEQ ID NO: 128402 - DNA, 20 bp, Artificial Sequence
  Description of Artificial Sequence: Synthetic oligonucleotide
  Target: LAMA2; (+) strand; PAM type: NRG; PAM sequence: CAG
aacagaatctgggttaaaat

SEQ ID NO: 128403 - DNA, 20 bp, Artificial Sequence
  Description of Artificial Sequence: Synthetic oligonucleotide
  Target: LAMA2; (+) strand; PAM type: NRG; PAM sequence: TGG
agaatctgggttaaaatcag

SEQ ID NO: 128404 - DNA, 20 bp, Artificial Sequence
  Description of Artificial Sequence: Synthetic oligonucleotide
  Target: LAMA2; (+) strand; PAM type: NRG; PAM sequence: CAG
agtggaaataatttttattt

SEQ ID NO: 128405 - DNA, 20 bp, Artificial Sequence
  Description of Artificial Sequence: Synthetic oligonucleotide
  Target: LAMA2; (+) strand; PAM type: NRG; PAM sequence: GAG
atttcagaattaaataaatt

SEQ ID NO: 128406 - DNA, 20 bp, Artificial Sequence
  Description of Artificial Sequence: Synthetic oligonucleotide
  Target: LAMA2; (+) strand; PAM type: NRG; PAM sequence: AAG
taaataaattgagtgaaatg

SEQ ID NO: 128407 - DNA, 20 bp, Artificial Sequence
  Description of Artificial Sequence: Synthetic oligonucleotide
  Target: LAMA2; (+) strand; PAM type: NRG; PAM sequence: TGG
attgagtgaaatgaagtatc

SEQ ID NO: 128408 - DNA, 20 bp, Artificial Sequence
  Description of Artificial Sequence: Synthetic oligonucleotide
  Target: LAMA2; (+) strand; PAM type: NRG; PAM sequence: TGG
gaaatgaagtatctggctct

SEQ ID NO: 128409 - DNA, 20 bp, Artificial Sequence
  Description of Artificial Sequence: Synthetic oligonucleotide
  Target: LAMA2; (+) strand; PAM type: NRG; PAM sequence: GAG
aatgaagtatctggctcttg

SEQ ID NO: 128410 - DNA, 20 bp, Artificial Sequence
  Description of Artificial Sequence: Synthetic oligonucleotide
  Target: LAMA2; (+) strand; PAM type: NRG; PAM sequence: AGG
atgaagtatctggctcttgg

SEQ ID NO: 128411 - DNA, 20 bp, Artificial Sequence
  Description of Artificial Sequence: Synthetic oligonucleotide
  Target: LAMA2; (+) strand; PAM type: NRG; PAM sequence: TGG
ctggctcttggaggaaaata

SEQ ID NO: 128412 - DNA, 20 bp, Artificial Sequence
  Description of Artificial Sequence: Synthetic oligonucleotide
  Target: LAMA2; (+) strand; PAM type: NRG; PAM sequence: AAG
ttaaatgtctttaaatttat

SEQ ID NO: 128413 - DNA, 20 bp, Artificial Sequence
  Description of Artificial Sequence: Synthetic oligonucleotide
  Target: LAMA2; (+) strand; PAM type: NRG; PAM sequence: AAG
tctttaaatttataagtcat

SEQ ID NO: 128414 - DNA, 20 bp, Artificial Sequence
  Description of Artificial Sequence: Synthetic oligonucleotide
  Target: LAMA2; (+) strand; PAM type: NRG; PAM sequence: AAG
atttataagtcataagctgc

SEQ ID NO: 128415 - DNA, 20 bp, Artificial Sequence
  Description of Artificial Sequence: Synthetic oligonucleotide
  Target: LAMA2; (+) strand; PAM type: NRG; PAM sequence: CAG
ataagtcataagctgcaagt

SEQ ID NO: 128416 - DNA, 20 bp, Artificial Sequence
  Description of Artificial Sequence: Synthetic oligonucleotide
  Target: LAMA2; (+) strand; PAM type: NRG; PAM sequence: TAG
agtcataagctgcaagtcag

SEQ ID NO: 128417 - DNA, 20 bp, Artificial Sequence
  Description of Artificial Sequence: Synthetic oligonucleotide
  Target: LAMA2; (+) strand; PAM type: NRG; PAM sequence: CAG
cattatgttgatgaattacc

SEQ ID NO: 128418 - DNA, 20 bp, Artificial Sequence
  Description of Artificial Sequence: Synthetic oligonucleotide
  Target: LAMA2; (+) strand; PAM type: NRG; PAM sequence: AAG
gaaattatcttctgaactct

SEQ ID NO: 128419 - DNA, 20 bp, Artificial Sequence
  Description of Artificial Sequence: Synthetic oligonucleotide
  Target: LAMA2; (+) strand; PAM type: NRG; PAM sequence: TAG
ctgaactctaagtcatattt

SEQ ID NO: 128420 - DNA, 20 bp, Artificial Sequence
  Description of Artificial Sequence: Synthetic oligonucleotide
  Target: LAMA2; (+) strand; PAM type: NRG; PAM sequence: CAG
tctaagtcatattttagcca

SEQ ID NO: 128421 - DNA, 20 bp, Artificial Sequence
  Description of Artificial Sequence: Synthetic oligonucleotide
  Target: LAMA2; (+) strand; PAM type: NRG; PAM sequence: AGG
ctaagtcatattttagccac

SEQ ID NO: 128422 - DNA, 20 bp, Artificial Sequence
  Description of Artificial Sequence: Synthetic oligonucleotide
  Target: LAMA2; (+) strand; PAM type: NRG; PAM sequence: AAG
gtttaatcaataattcctga

SEQ ID NO: 128423 - DNA, 20 bp, Artificial Sequence
  Description of Artificial Sequence: Synthetic oligonucleotide
  Target: LAMA2; (+) strand; PAM type: NRG; PAM sequence: AAG
ttcgacttttattacgtgac

SEQ ID NO: 128424 - DNA, 20 bp, Artificial Sequence
  Description of Artificial Sequence: Synthetic oligonucleotide
  Target: LAMA2; (+) strand; PAM type: NRG; PAM sequence: AGG
tcgacttttattacgtgaca

SEQ ID NO: 128425 - DNA, 20 bp, Artificial Sequence
  Description of Artificial Sequence: Synthetic oligonucleotide
  Target: LAMA2; (+) strand; PAM type: NRG; PAM sequence: TGG
tttgcttgaataaaacatta

SEQ ID NO: 128426 - DNA, 20 bp, Artificial Sequence
  Description of Artificial Sequence: Synthetic oligonucleotide
  Target: LAMA2; (+) strand; PAM type: NRG; PAM sequence: GAG
tgcttgaataaaacattatg

SEQ ID NO: 128427 - DNA, 20 bp, Artificial Sequence
  Description of Artificial Sequence: Synthetic oligonucleotide
  Target: LAMA2; (+) strand; PAM type: NRG; PAM sequence: AAG
cattatggagtctgaattca

SEQ ID NO: 128428 - DNA, 20 bp, Artificial Sequence
  Description of Artificial Sequence: Synthetic oligonucleotide
  Target: LAMA2; (+) strand; PAM type: NRG; PAM sequence: AAG
gagtctgaattcaaagcata

SEQ ID NO: 128429 - DNA, 20 bp, Artificial Sequence
  Description of Artificial Sequence: Synthetic oligonucleotide
  Target: LAMA2; (+) strand; PAM type: NRG; PAM sequence: AGG
agtctgaattcaaagcataa

SEQ ID NO: 128430 - DNA, 20 bp, Artificial Sequence
  Description of Artificial Sequence: Synthetic oligonucleotide
  Target: LAMA2; (+) strand; PAM type: NRG; PAM sequence: CAG
ctgaattcaaagcataaagg

SEQ ID NO: 128431 - DNA, 20 bp, Artificial Sequence
  Description of Artificial Sequence: Synthetic oligonucleotide
  Target: LAMA2; (+) strand; PAM type: NRG; PAM sequence: AAG
attcaaagcataaaggcaga

SEQ ID NO: 128432 - DNA, 20 bp, Artificial Sequence
  Description of Artificial Sequence: Synthetic oligonucleotide
  Target: LAMA2; (+) strand; PAM type: NRG; PAM sequence: AAG
aagcataaaggcagaaagta

SEQ ID NO: 128433 - DNA, 20 bp, Artificial Sequence
  Description of Artificial Sequence: Synthetic oligonucleotide
  Target: LAMA2; (+) strand; PAM type: NRG; PAM sequence: AAG
aaggcagaaagtaaagtatg

SEQ ID NO: 128434 - DNA, 20 bp, Artificial Sequence
  Description of Artificial Sequence: Synthetic oligonucleotide
  Target: LAMA2; (+) strand; PAM type: NRG; PAM sequence: AAG
ttatatgacctacgaatgtt

SEQ ID NO: 128435 - DNA, 20 bp, Artificial Sequence
  Description of Artificial Sequence: Synthetic oligonucleotide
  Target: LAMA2; (+) strand; PAM type: NRG; PAM sequence: GAG
atatgacctacgaatgttaa

SEQ ID NO: 128436 - DNA, 20 bp, Artificial Sequence
  Description of Artificial Sequence: Synthetic oligonucleotide
  Target: LAMA2; (+) strand; PAM type: NRG; PAM sequence: AAG
tacgaatgttaagagtctgt

SEQ ID NO: 128437 - DNA, 20 bp, Artificial Sequence
  Description of Artificial Sequence: Synthetic oligonucleotide
  Target: LAMA2; (+) strand; PAM type: NRG; PAM sequence: GAG
cgaatgttaagagtctgtaa

SEQ ID NO: 128438 - DNA, 20 bp, Artificial Sequence
  Description of Artificial Sequence: Synthetic oligonucleotide
  Target: LAMA2; (+) strand; PAM type: NRG; PAM sequence: CAG
agagtctgtaagagtttctt

SEQ ID NO: 128439 - DNA, 20 bp, Artificial Sequence
  Description of Artificial Sequence: Synthetic oligonucleotide
  Target: LAMA2; (+) strand; PAM type: NRG; PAM sequence: TGG
ttgattttaccaacaccttg

SEQ ID NO: 128440 - DNA, 20 bp, Artificial Sequence
  Description of Artificial Sequence: Synthetic oligonucleotide
  Target: LAMA2; (+) strand; PAM type: NRG; PAM sequence: GGG
tgattttaccaacaccttgt

SEQ ID NO: 128441 - DNA, 20 bp, Artificial Sequence
  Description of Artificial Sequence: Synthetic oligonucleotide
  Target: LAMA2; (+) strand; PAM type: NRG; PAM sequence: CAG
ttaccaacaccttgtgggta

SEQ ID NO: 128442 - DNA, 20 bp, Artificial Sequence
  Description of Artificial Sequence: Synthetic oligonucleotide
  Target: LAMA2; (+) strand; PAM type: NRG; PAM sequence: AAG
aacaccttgtgggtacagtt

SEQ ID NO: 128443 - DNA, 20 bp, Artificial Sequence
  Description of Artificial Sequence: Synthetic oligonucleotide
  Target: LAMA2; (+) strand; PAM type: NRG; PAM sequence: AAG
accttgtgggtacagttaag

SEQ ID NO: 128444 - DNA, 20 bp, Artificial Sequence
  Description of Artificial Sequence: Synthetic oligonucleotide
  Target: LAMA2; (+) strand; PAM type: NRG; PAM sequence: GAG
gttaagaagatgacttattt

SEQ ID NO: 128445 - DNA, 20 bp, Artificial Sequence
  Description of Artificial Sequence: Synthetic oligonucleotide
  Target: LAMA2; (+) strand; PAM type: NRG; PAM sequence: AGG
ttaagaagatgacttatttg

SEQ ID NO: 128446 - DNA, 20 bp, Artificial Sequence
  Description of Artificial Sequence: Synthetic oligonucleotide
  Target: LAMA2; (+) strand; PAM type: NRG; PAM sequence: TGG
tgaggctttataactgaaat

SEQ ID NO: 128447 - DNA, 20 bp, Artificial Sequence
  Description of Artificial Sequence: Synthetic oligonucleotide
  Target: LAMA2; (+) strand; PAM type: NRG; PAM sequence: TGG
tttataactgaaattggata

SEQ ID NO: 128448 - DNA, 20 bp, Artificial Sequence
  Description of Artificial Sequence: Synthetic oligonucleotide
  Target: LAMA2; (+) strand; PAM type: NRG; PAM sequence: CAG
gatatggttcaaacgttcaa

SEQ ID NO: 128449 - DNA, 20 bp, Artificial Sequence
  Description of Artificial Sequence: Synthetic oligonucleotide
  Target: LAMA2; (+) strand; PAM type: NRG; PAM sequence: AAG
gatataaacatattttaatt

SEQ ID NO: 128450 - DNA, 20 bp, Artificial Sequence
  Description of Artificial Sequence: Synthetic oligonucleotide
  Target: LAMA2; (+) strand; PAM type: NRG; PAM sequence: AAG
ttaagaataaatatttttat

SEQ ID NO: 128451 - DNA, 20 bp, Artificial Sequence
  Description of Artificial Sequence: Synthetic oligonucleotide
  Target: LAMA2; (+) strand; PAM type: NRG; PAM sequence: CGG
cttctctcaaaaatttatgc

SEQ ID NO: 128452 - DNA, 20 bp, Artificial Sequence
  Description of Artificial Sequence: Synthetic oligonucleotide
  Target: LAMA2; (+) strand; PAM type: NRG; PAM sequence: TAG
aataaatttgcattacaaaa

SEQ ID NO: 128453 - DNA, 20 bp, Artificial Sequence
  Description of Artificial Sequence: Synthetic oligonucleotide
  Target: LAMA2; (+) strand; PAM type: NRG; PAM sequence: TGG
caaaatagaaaattcaattg

SEQ ID NO: 128454 - DNA, 20 bp, Artificial Sequence
  Description of Artificial Sequence: Synthetic oligonucleotide
  Target: LAMA2; (+) strand; PAM type: NRG; PAM sequence: AAG
tattctaacttattctgatg

SEQ ID NO: 128455 - DNA, 20 bp, Artificial Sequence
  Description of Artificial Sequence: Synthetic oligonucleotide
  Target: LAMA2; (+) strand; PAM type: NRG; PAM sequence: TAG
tctaacttattctgatgaag

SEQ ID NO: 128456 - DNA, 20 bp, Artificial Sequence
  Description of Artificial Sequence: Synthetic oligonucleotide
  Target: LAMA2; (+) strand; PAM type: NRG; PAM sequence: CAG
tgatgaagtagttcccttgt

SEQ ID NO: 128457 - DNA, 20 bp, Artificial Sequence
  Description of Artificial Sequence: Synthetic oligonucleotide
  Target: LAMA2; (+) strand; PAM type: NRG; PAM sequence: AGG
gatgaagtagttcccttgtc

SEQ ID NO: 128458 - DNA, 20 bp, Artificial Sequence
  Description of Artificial Sequence: Synthetic oligonucleotide
  Target: LAMA2; (+) strand; PAM type: NRG; PAM sequence: AAG
gaagtagttcccttgtcagg

SEQ ID NO: 128459 - DNA, 20 bp, Artificial Sequence
  Description of Artificial Sequence: Synthetic oligonucleotide
  Target: LAMA2; (+) strand; PAM type: NRG; PAM sequence: AAG
tgtcaggaagctttttctta

SEQ ID NO: 128460 - DNA, 20 bp, Artificial Sequence
  Description of Artificial Sequence: Synthetic oligonucleotide
  Target: LAMA2; (+) strand; PAM type: NRG; PAM sequence: TAG
gtgtgttttatgatttgtga

SEQ ID NO: 128461 - DNA, 20 bp, Artificial Sequence
  Description of Artificial Sequence: Synthetic oligonucleotide
  Target: LAMA2; (+) strand; PAM type: NRG; PAM sequence: AAG
gtgatagaattaccatcact

SEQ ID NO: 128462 - DNA, 20 bp, Artificial Sequence
  Description of Artificial Sequence: Synthetic oligonucleotide
  Target: LAMA2; (+) strand; PAM type: NRG; PAM sequence: TGG
ctaagtcgatcattgcccat

SEQ ID NO: 128463 - DNA, 20 bp, Artificial Sequence
  Description of Artificial Sequence: Synthetic oligonucleotide
  Target: LAMA2; (+) strand; PAM type: NRG; PAM sequence: TAG
gtcgatcattgcccattggt

SEQ ID NO: 128464 - DNA, 20 bp, Artificial Sequence
  Description of Artificial Sequence: Synthetic oligonucleotide
  Target: LAMA2; (+) strand; PAM type: NRG; PAM sequence: TAG
agtctacatgtactgccttt

SEQ ID NO: 128465 - DNA, 20 bp, Artificial Sequence
  Description of Artificial Sequence: Synthetic oligonucleotide
  Target: LAMA2; (+) strand; PAM type: NRG; PAM sequence: GAG
gtactgccttttagtgacat

SEQ ID NO: 128466 - DNA, 20 bp, Artificial Sequence
  Description of Artificial Sequence: Synthetic oligonucleotide
  Target: LAMA2; (+) strand; PAM type: NRG; PAM sequence: AAG
acatgagttcaattctaatt

SEQ ID NO: 128467 - DNA, 20 bp, Artificial Sequence
  Description of Artificial Sequence: Synthetic oligonucleotide
  Target: LAMA2; (+) strand; PAM type: NRG; PAM sequence: GAG
gttcaattctaattaagaat

SEQ ID NO: 128468 - DNA, 20 bp, Artificial Sequence
  Description of Artificial Sequence: Synthetic oligonucleotide
  Target: LAMA2; (+) strand; PAM type: NRG; PAM sequence: TAG
attctaattaagaatgagaa

SEQ ID NO: 128469 - DNA, 20 bp, Artificial Sequence
  Description of Artificial Sequence: Synthetic oligonucleotide
  Target: LAMA2; (+) strand; PAM type: NRG; PAM sequence: CAG
atagcctataactatgaaca

SEQ ID NO: 128470 - DNA, 20 bp, Artificial Sequence
  Description of Artificial Sequence: Synthetic oligonucleotide
  Target: LAMA2; (+) strand; PAM type: NRG; PAM sequence: TAG
cctataactatgaacacaga

SEQ ID NO: 128471 - DNA, 20 bp, Artificial Sequence
  Description of Artificial Sequence: Synthetic oligonucleotide
  Target: LAMA2; (+) strand; PAM type: NRG; PAM sequence: TAG
cagatagctacatgtgtctc

SEQ ID NO: 128472 - DNA, 20 bp, Artificial Sequence
  Description of Artificial Sequence: Synthetic oligonucleotide
  Target: LAMA2; (+) strand; PAM type: NRG; PAM sequence: GAG
tagctacatgtgtctctagt

SEQ ID NO: 128473 - DNA, 20 bp, Artificial Sequence
  Description of Artificial Sequence: Synthetic oligonucleotide
  Target: LAMA2; (+) strand; PAM type: NRG; PAM sequence: GAG
gctacatgtgtctctagtga

SEQ ID NO: 128474 - DNA, 20 bp, Artificial Sequence
  Description of Artificial Sequence: Synthetic oligonucleotide
  Target: LAMA2; (+) strand; PAM type: NRG; PAM sequence: AGG
ctacatgtgtctctagtgag

SEQ ID NO: 128475 - DNA, 20 bp, Artificial Sequence
  Description of Artificial Sequence: Synthetic oligonucleotide
  Target: LAMA2; (+) strand; PAM type: NRG; PAM sequence: TAG
gtgtctctagtgagaggtac

SEQ ID NO: 128476 - DNA, 20 bp, Artificial Sequence
  Description of Artificial Sequence: Synthetic oligonucleotide
  Target: LAMA2; (+) strand; PAM type: NRG; PAM sequence: AAG
cctctttgacatttctctta

SEQ ID NO: 128477 - DNA, 20 bp, Artificial Sequence
  Description of Artificial Sequence: Synthetic oligonucleotide
  Target: LAMA2; (+) strand; PAM type: NRG; PAM sequence: CGG
ctttgacatttctcttaaag

SEQ ID NO: 128478 - DNA, 20 bp, Artificial Sequence
  Description of Artificial Sequence: Synthetic oligonucleotide
  Target: LAMA2; (+) strand; PAM type: NRG; PAM sequence: TGG
ctcttaaagcggaatttatt

SEQ ID NO: 128479 - DNA, 20 bp, Artificial Sequence
  Description of Artificial Sequence: Synthetic oligonucleotide
  Target: LAMA2; (+) strand; PAM type: NRG; PAM sequence: GGG
tcttaaagcggaatttattt

SEQ ID NO: 128480 - DNA, 20 bp, Artificial Sequence
  Description of Artificial Sequence: Synthetic oligonucleotide
  Target: LAMA2; (+) strand; PAM type: NRG; PAM sequence: GGG
cttaaagcggaatttatttg

SEQ ID NO: 128481 - DNA, 20 bp, Artificial Sequence
  Description of Artificial Sequence: Synthetic oligonucleotide
  Target: LAMA2; (+) strand; PAM type: NRG; PAM sequence: TAG
aaagcggaatttatttgggg

SEQ ID NO: 128482 - DNA, 20 bp, Artificial Sequence
  Description of Artificial Sequence: Synthetic oligonucleotide
  Target: LAMA2; (+) strand; PAM type: NRG; PAM sequence: TGG
gaatttatttggggtagtga

SEQ ID NO: 128483 - DNA, 20 bp, Artificial Sequence
  Description of Artificial Sequence: Synthetic oligonucleotide
  Target: LAMA2; (+) strand; PAM type: NRG; PAM sequence: TGG
tggggtagtgatggttttac

SEQ ID NO: 128484 - DNA, 20 bp, Artificial Sequence
  Description of Artificial Sequence: Synthetic oligonucleotide
  Target: LAMA2; (+) strand; PAM type: NRG; PAM sequence: TAG
ggtagtgatggttttactgg

SEQ ID NO: 128485 - DNA, 20 bp, Artificial Sequence
  Description of Artificial Sequence: Synthetic oligonucleotide
  Target: LAMA2; (+) strand; PAM type: NRG; PAM sequence: TAG
gatggttttactggtagcca

SEQ ID NO: 128486 - DNA, 20 bp, Artificial Sequence
  Description of Artificial Sequence: Synthetic oligonucleotide
  Target: LAMA2; (+) strand; PAM type: NRG; PAM sequence: AGG
atggttttactggtagccat

SEQ ID NO: 128487 - DNA, 20 bp, Artificial Sequence
  Description of Artificial Sequence: Synthetic oligonucleotide
  Target: LAMA2; (+) strand; PAM type: NRG; PAM sequence: GGG
tggttttactggtagccata

SEQ ID NO: 128488 - DNA, 20 bp, Artificial Sequence
  Description of Artificial Sequence: Synthetic oligonucleotide
  Target: LAMA2; (+) strand; PAM type: NRG; PAM sequence: GGG
ggttttactggtagccatag

SEQ ID NO: 128489 - DNA, 20 bp, Artificial Sequence
  Description of Artificial Sequence: Synthetic oligonucleotide
  Target: LAMA2; (+) strand; PAM type: NRG; PAM sequence: AAG
tttactggtagccatagggg

SEQ ID NO: 128490 - DNA, 20 bp, Artificial Sequence
  Description of Artificial Sequence: Synthetic oligonucleotide
  Target: LAMA2; (+) strand; PAM type: NRG; PAM sequence: AAG
tggtagccataggggaagat

SEQ ID NO: 128491 - DNA, 20 bp, Artificial Sequence
  Description of Artificial Sequence: Synthetic oligonucleotide
  Target: LAMA2; (+) strand; PAM type: NRG; PAM sequence: AAG
gccataggggaagataagaa

SEQ ID NO: 128492 - DNA, 20 bp, Artificial Sequence
  Description of Artificial Sequence: Synthetic oligonucleotide
  Target: LAMA2; (+) strand; PAM type: NRG; PAM sequence: AGG
ccataggggaagataagaaa

SEQ ID NO: 128493 - DNA, 20 bp, Artificial Sequence
  Description of Artificial Sequence: Synthetic oligonucleotide
  Target: LAMA2; (+) strand; PAM type: NRG; PAM sequence: GGG
cataggggaagataagaaaa

SEQ ID NO: 128494 - DNA, 20 bp, Artificial Sequence
  Description of Artificial Sequence: Synthetic oligonucleotide
  Target: LAMA2; (+) strand; PAM type: NRG; PAM sequence: GGG
ataggggaagataagaaaag

SEQ ID NO: 128495 - DNA, 20 bp, Artificial Sequence
  Description of Artificial Sequence: Synthetic oligonucleotide
  Target: LAMA2; (+) strand; PAM type: NRG; PAM sequence: GGG
taggggaagataagaaaagg

SEQ ID NO: 128496 - DNA, 20 bp, Artificial Sequence
  Description of Artificial Sequence: Synthetic oligonucleotide
  Target: LAMA2; (+) strand; PAM type: NRG; PAM sequence: AAG
gaagataagaaaagggggcc

SEQ ID NO: 128497 - DNA, 20 bp, Artificial Sequence
  Description of Artificial Sequence: Synthetic oligonucleotide
  Target: LAMA2; (+) strand; PAM type: NRG; PAM sequence: TGG
aagatattcatttctactgc

SEQ ID NO: 128498 - DNA, 20 bp, Artificial Sequence
  Description of Artificial Sequence: Synthetic oligonucleotide
  Target: LAMA2; (+) strand; PAM type: NRG; PAM sequence: TGG
tcatttctactgctggcatg

SEQ ID NO: 128499 - DNA, 20 bp, Artificial Sequence
  Description of Artificial Sequence: Synthetic oligonucleotide
  Target: LAMA2; (+) strand; PAM type: NRG; PAM sequence: CAG
gctcttttcctgctccatgc

SEQ ID NO: 128500 - DNA, 20 bp, Artificial Sequence
  Description of Artificial Sequence: Synthetic oligonucleotide
  Target: LAMA2; (+) strand; PAM type: NRG; PAM sequence: TAG
tgccagtctctcacttgatt

SEQ ID NO: 128501 - DNA, 20 bp, Artificial Sequence
  Description of Artificial Sequence: Synthetic oligonucleotide
  Target: LAMA2; (+) strand; PAM type: NRG; PAM sequence: AAG
agtctctcacttgatttaga

SEQ ID NO: 128502 - DNA, 20 bp, Artificial Sequence
  Description of Artificial Sequence: Synthetic oligonucleotide
  Target: LAMA2; (+) strand; PAM type: NRG; PAM sequence: TAG
tagaaagatttgtgcgtcct

SEQ ID NO: 128503 - DNA, 20 bp, Artificial Sequence
  Description of Artificial Sequence: Synthetic oligonucleotide
  Target: LAMA2; (+) strand; PAM type: NRG; PAM sequence: AAG
cgtccttagctttgaccatc

SEQ ID NO: 128504 - DNA, 20 bp, Artificial Sequence
  Description of Artificial Sequence: Synthetic oligonucleotide
  Target: LAMA2; (+) strand; PAM type: NRG; PAM sequence: AAG
ccttagctttgaccatcaag

SEQ ID NO: 128505 - DNA, 20 bp, Artificial Sequence
  Description of Artificial Sequence: Synthetic oligonucleotide
  Target: LAMA2; (+) strand; PAM type: NRG; PAM sequence: GAG
ttagctttgaccatcaagaa

SEQ ID NO: 128506 - DNA, 20 bp, Artificial Sequence
  Description of Artificial Sequence: Synthetic oligonucleotide
  Target: LAMA2; (+) strand; PAM type: NRG; PAM sequence: TGG
ctcctttgccttcctgtgcc

SEQ ID NO: 128507 - DNA, 20 bp, Artificial Sequence
  Description of Artificial Sequence: Synthetic oligonucleotide
  Target: LAMA2; (+) strand; PAM type: NRG; PAM sequence: AAG
ttcctgtgcctggtacctga

SEQ ID NO: 128508 - DNA, 20 bp, Artificial Sequence
  Description of Artificial Sequence: Synthetic oligonucleotide
  Target: LAMA2; (+) strand; PAM type: NRG; PAM sequence: TAG
tgcctggtacctgaaagacc

SEQ ID NO: 128509 - DNA, 20 bp, Artificial Sequence
  Description of Artificial Sequence: Synthetic oligonucleotide
  Target: LAMA2; (+) strand; PAM type: NRG; PAM sequence: AAG
ggtacctgaaagacctagtg

SEQ ID NO: 128510 - DNA, 20 bp, Artificial Sequence
  Description of Artificial Sequence: Synthetic oligonucleotide
  Target: LAMA2; (+) strand; PAM type: NRG; PAM sequence: AAG
aaagacctagtgaagactga

SEQ ID NO: 128511 - DNA, 20 bp, Artificial Sequence
  Description of Artificial Sequence: Synthetic oligonucleotide
  Target: LAMA2; (+) strand; PAM type: NRG; PAM sequence: AAG
cctagtgaagactgaaagaa

SEQ ID NO: 128512 - DNA, 20 bp, Artificial Sequence
  Description of Artificial Sequence: Synthetic oligonucleotide
  Target: LAMA2; (+) strand; PAM type: NRG; PAM sequence: TAG
aaagtttttattttcttaca

SEQ ID NO: 128513 - DNA, 20 bp, Artificial Sequence
  Description of Artificial Sequence: Synthetic oligonucleotide
  Target: LAMA2; (+) strand; PAM type: NRG; PAM sequence: AAG
tttattttcttacatagtga

SEQ ID NO: 128514 - DNA, 20 bp, Artificial Sequence
  Description of Artificial Sequence: Synthetic oligonucleotide
  Target: LAMA2; (+) strand; PAM type: NRG; PAM sequence: AAG
tacatagtgaaagcactttg

SEQ ID NO: 128515 - DNA, 20 bp, Artificial Sequence
  Description of Artificial Sequence: Synthetic oligonucleotide
  Target: LAMA2; (+) strand; PAM type: NRG; PAM sequence: TAG
tacaattctacacattattt

SEQ ID NO: 128516 - DNA, 20 bp, Artificial Sequence
  Description of Artificial Sequence: Synthetic oligonucleotide
  Target: LAMA2; (+) strand; PAM type: NRG; PAM sequence: AAG
attctacacattattttagc

SEQ ID NO: 128517 - DNA, 20 bp, Artificial Sequence
  Description of Artificial Sequence: Synthetic oligonucleotide
  Target: LAMA2; (+) strand; PAM type: NRG; PAM sequence: AAG
agcaagtaatgaacgttctt

SEQ ID NO: 128518 - DNA, 20 bp, Artificial Sequence
  Description of Artificial Sequence: Synthetic oligonucleotide
  Target: LAMA2; (+) strand; PAM type: NRG; PAM sequence: TAG
aatgaacgttcttaagtgcc

SEQ ID NO: 128519 - DNA, 20 bp, Artificial Sequence
  Description of Artificial Sequence: Synthetic oligonucleotide
  Target: LAMA2; (+) strand; PAM type: NRG; PAM sequence: TAG
ttaagtgcctagtgttgtca

SEQ ID NO: 128520 - DNA, 20 bp, Artificial Sequence
  Description of Artificial Sequence: Synthetic oligonucleotide
  Target: LAMA2; (+) strand; PAM type: NRG; PAM sequence: AGG
taagtgcctagtgttgtcat

SEQ ID NO: 128521 - DNA, 20 bp, Artificial Sequence
  Description of Artificial Sequence: Synthetic oligonucleotide
  Target: LAMA2; (+) strand; PAM type: NRG; PAM sequence: AAG
tgttgtcataggtataaatc

SEQ ID NO: 128522 - DNA, 20 bp, Artificial Sequence
  Description of Artificial Sequence: Synthetic oligonucleotide
  Target: LAMA2; (+) strand; PAM type: NRG; PAM sequence: TAG
tgtcataggtataaatcaag

SEQ ID NO: 128523 - DNA, 20 bp, Artificial Sequence
  Description of Artificial Sequence: Synthetic oligonucleotide
  Target: LAMA2; (+) strand; PAM type: NRG; PAM sequence: AGG
gtcataggtataaatcaagt

SEQ ID NO: 128524 - DNA, 20 bp, Artificial Sequence
  Description of Artificial Sequence: Synthetic oligonucleotide
  Target: LAMA2; (+) strand; PAM type: NRG; PAM sequence: AAG
caagtaggatacctgccctc

SEQ ID NO: 128525 - DNA, 20 bp, Artificial Sequence
  Description of Artificial Sequence: Synthetic oligonucleotide
  Target: LAMA2; (+) strand; PAM type: NRG; PAM sequence: AAG
taggatacctgccctcaaga

SEQ ID NO: 128526 - DNA, 20 bp, Artificial Sequence
  Description of Artificial Sequence: Synthetic oligonucleotide
  Target: LAMA2; (+) strand; PAM type: NRG; PAM sequence: TAG
aaagtgtataattttatgcg

SEQ ID NO: 128527 - DNA, 20 bp, Artificial Sequence
  Description of Artificial Sequence: Synthetic oligonucleotide
  Target: LAMA2; (+) strand; PAM type: NRG; PAM sequence: GAG
agtgtataattttatgcgta

SEQ ID NO: 128528 - DNA, 20 bp, Artificial Sequence
  Description of Artificial Sequence: Synthetic oligonucleotide
  Target: LAMA2; (+) strand; PAM type: NRG; PAM sequence: AAG
ataattttatgcgtagagat

SEQ ID NO: 128529 - DNA, 20 bp, Artificial Sequence
  Description of Artificial Sequence: Synthetic oligonucleotide
  Target: LAMA2; (+) strand; PAM type: NRG; PAM sequence: GAG
aattttatgcgtagagataa

SEQ ID NO: 128530 - DNA, 20 bp, Artificial Sequence
  Description of Artificial Sequence: Synthetic oligonucleotide
  Target: LAMA2; (+) strand; PAM type: NRG; PAM sequence: GAG
tatgcgtagagataagagat

SEQ ID NO: 128531 - DNA, 20 bp, Artificial Sequence
  Description of Artificial Sequence: Synthetic oligonucleotide
  Target: LAMA2; (+) strand; PAM type: NRG; PAM sequence: CAG
ataagagatgagtactttcg

SEQ ID NO: 128532 - DNA, 20 bp, Artificial Sequence
  Description of Artificial Sequence: Synthetic oligonucleotide
  Target: LAMA2; (+) strand; PAM type: NRG; PAM sequence: TGG
tgaataattatataccaaca

SEQ ID NO: 128533 - DNA, 20 bp, Artificial Sequence
  Description of Artificial Sequence: Synthetic oligonucleotide
  Target: LAMA2; (+) strand; PAM type: NRG; PAM sequence: GAG
aataattatataccaacatg

SEQ ID NO: 128534 - DNA, 20 bp, Artificial Sequence
  Description of Artificial Sequence: Synthetic oligonucleotide
  Target: LAMA2; (+) strand; PAM type: NRG; PAM sequence: AAG
tataccaacatggagaactt

SEQ ID NO: 128535 - DNA, 20 bp, Artificial Sequence
  Description of Artificial Sequence: Synthetic oligonucleotide
  Target: LAMA2; (+) strand; PAM type: NRG; PAM sequence: TAG
acatggagaacttaagctca

SEQ ID NO: 128536 - DNA, 20 bp, Artificial Sequence
  Description of Artificial Sequence: Synthetic oligonucleotide
  Target: LAMA2; (+) strand; PAM type: NRG; PAM sequence: AGG
catggagaacttaagctcat

SEQ ID NO: 128537 - DNA, 20 bp, Artificial Sequence
  Description of Artificial Sequence: Synthetic oligonucleotide
  Target: LAMA2; (+) strand; PAM type: NRG; PAM sequence: TGG
cttaagctcataggtgaatg

SEQ ID NO: 128538 - DNA, 20 bp, Artificial Sequence
  Description of Artificial Sequence: Synthetic oligonucleotide
  Target: LAMA2; (+) strand; PAM type: NRG; PAM sequence: GGG
ttaagctcataggtgaatgt

SEQ ID NO: 128539 - DNA, 20 bp, Artificial Sequence
  Description of Artificial Sequence: Synthetic oligonucleotide
  Target: LAMA2; (+) strand; PAM type: NRG; PAM sequence: TGG
cataggtgaatgtgggaata

SEQ ID NO: 128540 - DNA, 20 bp, Artificial Sequence
  Description of Artificial Sequence: Synthetic oligonucleotide
  Target: LAMA2; (+) strand; PAM type: NRG; PAM sequence: GAG
taggtgaatgtgggaatatg

SEQ ID NO: 128541 - DNA, 20 bp, Artificial Sequence
  Description of Artificial Sequence: Synthetic oligonucleotide
  Target: LAMA2; (+) strand; PAM type: NRG; PAM sequence: AGG
aggtgaatgtgggaatatgg

SEQ ID NO: 128542 - DNA, 20 bp, Artificial Sequence
  Description of Artificial Sequence: Synthetic oligonucleotide
  Target: LAMA2; (+) strand; PAM type: NRG; PAM sequence: GAG
gtgaatgtgggaatatggag

SEQ ID NO: 128543 - DNA, 20 bp, Artificial Sequence
  Description of Artificial Sequence: Synthetic oligonucleotide
  Target: LAMA2; (+) strand; PAM type: NRG; PAM sequence: CAG
aggagaatgaaaatcattgc

SEQ ID NO: 128544 - DNA, 20 bp, Artificial Sequence
  Description of Artificial Sequence: Synthetic oligonucleotide
  Target: LAMA2; (+) strand; PAM type: NRG; PAM sequence: AGG
ggagaatgaaaatcattgcc

SEQ ID NO: 128545 - DNA, 20 bp, Artificial Sequence
  Description of Artificial Sequence: Synthetic oligonucleotide
  Target: LAMA2; (+) strand; PAM type: NRG; PAM sequence: GAG
aatgaaaatcattgccaggt

SEQ ID NO: 128546 - DNA, 20 bp, Artificial Sequence
  Description of Artificial Sequence: Synthetic oligonucleotide
  Target: LAMA2; (+) strand; PAM type: NRG; PAM sequence: AAG
cattgccaggtgagtgatca

SEQ ID NO: 128547 - DNA, 20 bp, Artificial Sequence
  Description of Artificial Sequence: Synthetic oligonucleotide
  Target: LAMA2; (+) strand; PAM type: NRG; PAM sequence: GAG
ttgccaggtgagtgatcaaa

SEQ ID NO: 128548 - DNA, 20 bp, Artificial Sequence
  Description of Artificial Sequence: Synthetic oligonucleotide
  Target: LAMA2; (+) strand; PAM type: NRG; PAM sequence: TAG
agtgatcaaagagtgcattc

SEQ ID NO: 128549 - DNA, 20 bp, Artificial Sequence
  Description of Artificial Sequence: Synthetic oligonucleotide
  Target: LAMA2; (+) strand; PAM type: NRG; PAM sequence: AAG
tcaaagagtgcattctagaa

SEQ ID NO: 128550 - DNA, 20 bp, Artificial Sequence
  Description of Artificial Sequence: Synthetic oligonucleotide
  Target: LAMA2; (+) strand; PAM type: NRG; PAM sequence: AGG
caaagagtgcattctagaaa

SEQ ID NO: 128551 - DNA, 20 bp, Artificial Sequence
  Description of Artificial Sequence: Synthetic oligonucleotide
  Target: LAMA2; (+) strand; PAM type: NRG; PAM sequence: TGG
agagtgcattctagaaaagg

SEQ ID NO: 128552 - DNA, 20 bp, Artificial Sequence
  Description of Artificial Sequence: Synthetic oligonucleotide
  Target: LAMA2; (+) strand; PAM type: NRG; PAM sequence: CAG
tagaaaaggtggtacctgta

SEQ ID NO: 128553 - DNA, 20 bp, Artificial Sequence
  Description of Artificial Sequence: Synthetic oligonucleotide
  Target: LAMA2; (+) strand; PAM type: NRG; PAM sequence: AGG
agaaaaggtggtacctgtac

SEQ ID NO: 128554 - DNA, 20 bp, Artificial Sequence
  Description of Artificial Sequence: Synthetic oligonucleotide
  Target: LAMA2; (+) strand; PAM type: NRG; PAM sequence: GGG
gaaaaggtggtacctgtaca

SEQ ID NO: 128555 - DNA, 20 bp, Artificial Sequence
  Description of Artificial Sequence: Synthetic oligonucleotide
  Target: LAMA2; (+) strand; PAM type: NRG; PAM sequence: GGG
aaaaggtggtacctgtacag

SEQ ID NO: 128556 - DNA, 20 bp, Artificial Sequence
  Description of Artificial Sequence: Synthetic oligonucleotide
  Target: LAMA2; (+) strand; PAM type: NRG; PAM sequence: TGG
gtggtacctgtacaggggtt

SEQ ID NO: 128557 - DNA, 20 bp, Artificial Sequence
  Description of Artificial Sequence: Synthetic oligonucleotide
  Target: LAMA2; (+) strand; PAM type: NRG; PAM sequence: GAG
ggtacctgtacaggggtttg

SEQ ID NO: 128558 - DNA, 20 bp, Artificial Sequence
  Description of Artificial Sequence: Synthetic oligonucleotide
  Target: LAMA2; (+) strand; PAM type: NRG; PAM sequence: AGG
gtacctgtacaggggtttgg

SEQ ID NO: 128559 - DNA, 20 bp, Artificial Sequence
  Description of Artificial Sequence: Synthetic oligonucleotide
  Target: LAMA2; (+) strand; PAM type: NRG; PAM sequence: TGG
caggggtttggaggatgcat

SEQ ID NO: 128560 - DNA, 20 bp, Artificial Sequence
  Description of Artificial Sequence: Synthetic oligonucleotide
  Target: LAMA2; (+) strand; PAM type: NRG; PAM sequence: AAG
aggatgcattggtattaaat

SEQ ID NO: 128561 - DNA, 20 bp, Artificial Sequence
  Description of Artificial Sequence: Synthetic oligonucleotide
  Target: LAMA2; (+) strand; PAM type: NRG; PAM sequence: GAG
gatgcattggtattaaataa

SEQ ID NO: 128562 - DNA, 20 bp, Artificial Sequence
  Description of Artificial Sequence: Synthetic oligonucleotide
  Target: LAMA2; (+) strand; PAM type: NRG; PAM sequence: GAG
tgcattggtattaaataaga

SEQ ID NO: 128563 - DNA, 20 bp, Artificial Sequence
  Description of Artificial Sequence: Synthetic oligonucleotide
  Target: LAMA2; (+) strand; PAM type: NRG; PAM sequence: TAG
gtattaaataagagagaaat

SEQ ID NO: 128564 - DNA, 20 bp, Artificial Sequence
  Description of Artificial Sequence: Synthetic oligonucleotide
  Target: LAMA2; (+) strand; PAM type: NRG; PAM sequence: GAG
attaaataagagagaaatta

SEQ ID NO: 128565 - DNA, 20 bp, Artificial Sequence
  Description of Artificial Sequence: Synthetic oligonucleotide
  Target: LAMA2; (+) strand; PAM type: NRG; PAM sequence: AGG
ttaaataagagagaaattag

SEQ ID NO: 128566 - DNA, 20 bp, Artificial Sequence
  Description of Artificial Sequence: Synthetic oligonucleotide
  Target: LAMA2; (+) strand; PAM type: NRG; PAM sequence: GGG
taaataagagagaaattaga

SEQ ID NO: 128567 - DNA, 20 bp, Artificial Sequence
  Description of Artificial Sequence: Synthetic oligonucleotide
  Target: LAMA2; (+) strand; PAM type: NRG; PAM sequence: AAG
ataagagagaaattagaggg

SEQ ID NO: 128568 - DNA, 20 bp, Artificial Sequence
  Description of Artificial Sequence: Synthetic oligonucleotide
  Target: LAMA2; (+) strand; PAM type: NRG; PAM sequence: CAG
tagagggaagacacatcttc

SEQ ID NO: 128569 - DNA, 20 bp, Artificial Sequence
  Description of Artificial Sequence: Synthetic oligonucleotide
  Target: LAMA2; (+) strand; PAM type: NRG; PAM sequence: AGG
agagggaagacacatcttcc

SEQ ID NO: 128570 - DNA, 20 bp, Artificial Sequence
  Description of Artificial Sequence: Synthetic oligonucleotide
  Target: LAMA2; (+) strand; PAM type: NRG; PAM sequence: CAG
gggaagacacatcttccagg

SEQ ID NO: 128571 - DNA, 20 bp, Artificial Sequence
  Description of Artificial Sequence: Synthetic oligonucleotide
  Target: LAMA2; (+) strand; PAM type: NRG; PAM sequence: GAG
gaagacacatcttccaggca

SEQ ID NO: 128572 - DNA, 20 bp, Artificial Sequence
  Description of Artificial Sequence: Synthetic oligonucleotide
  Target: LAMA2; (+) strand; PAM type: NRG; PAM sequence: TAG
catcttccaggcagagtgtc

SEQ ID NO: 128573 - DNA, 20 bp, Artificial Sequence
  Description of Artificial Sequence: Synthetic oligonucleotide
  Target: LAMA2; (+) strand; PAM type: NRG; PAM sequence: AAG
cttccaggcagagtgtctag

SEQ ID NO: 128574 - DNA, 20 bp, Artificial Sequence
  Description of Artificial Sequence: Synthetic oligonucleotide
  Target: LAMA2; (+) strand; PAM type: NRG; PAM sequence: CAG
ccaggcagagtgtctagaag

SEQ ID NO: 128575 - DNA, 20 bp, Artificial Sequence
  Description of Artificial Sequence: Synthetic oligonucleotide
  Target: LAMA2; (+) strand; PAM type: NRG; PAM sequence: GAG
aggcagagtgtctagaagca

SEQ ID NO: 128576 - DNA, 20 bp, Artificial Sequence
  Description of Artificial Sequence: Synthetic oligonucleotide
  Target: LAMA2; (+) strand; PAM type: NRG; PAM sequence: CAG
agagtgtctagaagcagagc

SEQ ID NO: 128577 - DNA, 20 bp, Artificial Sequence
  Description of Artificial Sequence: Synthetic oligonucleotide
  Target: LAMA2; (+) strand; PAM type: NRG; PAM sequence: CAG
gtgtctagaagcagagccag

SEQ ID NO: 128578 - DNA, 20 bp, Artificial Sequence
  Description of Artificial Sequence: Synthetic oligonucleotide
  Target: LAMA2; (+) strand; PAM type: NRG; PAM sequence: CAG
tctagaagcagagccagcag

SEQ ID NO: 128579 - DNA, 20 bp, Artificial Sequence
  Description of Artificial Sequence: Synthetic oligonucleotide
  Target: LAMA2; (+) strand; PAM type: NRG; PAM sequence: TAG
gcagagccagcagcagattt

SEQ ID NO: 128580 - DNA, 20 bp, Artificial Sequence
  Description of Artificial Sequence: Synthetic oligonucleotide
  Target: LAMA2; (+) strand; PAM type: NRG; PAM sequence: AAG
ccagcagcagattttagtgt

SEQ ID NO: 128581 - DNA, 20 bp, Artificial Sequence
  Description of Artificial Sequence: Synthetic oligonucleotide
  Target: LAMA2; (+) strand; PAM type: NRG; PAM sequence: AAG
gtgtaagcaatttattgaaa

SEQ ID NO: 128582 - DNA, 20 bp, Artificial Sequence
  Description of Artificial Sequence: Synthetic oligonucleotide
  Target: LAMA2; (+) strand; PAM type: NRG; PAM sequence: CAG
atttattgaaaaagtcctct

SEQ ID NO: 128583 - DNA, 20 bp, Artificial Sequence
  Description of Artificial Sequence: Synthetic oligonucleotide
  Target: LAMA2; (+) strand; PAM type: NRG; PAM sequence: AAG
tattgaaaaagtcctctcag

SEQ ID NO: 128584 - DNA, 20 bp, Artificial Sequence
  Description of Artificial Sequence: Synthetic oligonucleotide
  Target: LAMA2; (+) strand; PAM type: NRG; PAM sequence: GAG
tcctctcagaagatatctat

SEQ ID NO: 128585 - DNA, 20 bp, Artificial Sequence
  Description of Artificial Sequence: Synthetic oligonucleotide
  Target: LAMA2; (+) strand; PAM type: NRG; PAM sequence: TGG
ctcagaagatatctatgaga

SEQ ID NO: 128586 - DNA, 20 bp, Artificial Sequence
  Description of Artificial Sequence: Synthetic oligonucleotide
  Target: LAMA2; (+) strand; PAM type: NRG; PAM sequence: AAG
gaagatatctatgagatggt

SEQ ID NO: 128587 - DNA, 20 bp, Artificial Sequence
  Description of Artificial Sequence: Synthetic oligonucleotide
  Target: LAMA2; (+) strand; PAM type: NRG; PAM sequence: AAG
tatctatgagatggtaagaa

SEQ ID NO: 128588 - DNA, 20 bp, Artificial Sequence
  Description of Artificial Sequence: Synthetic oligonucleotide
  Target: LAMA2; (+) strand; PAM type: NRG; PAM sequence: AAG
gatggtaagaaaagctgaaa

SEQ ID NO: 128589 - DNA, 20 bp, Artificial Sequence
  Description of Artificial Sequence: Synthetic oligonucleotide
  Target: LAMA2; (+) strand; PAM type: NRG; PAM sequence: AGG
atggtaagaaaagctgaaaa

SEQ ID NO: 128590 - DNA, 20 bp, Artificial Sequence
  Description of Artificial Sequence: Synthetic oligonucleotide
  Target: LAMA2; (+) strand; PAM type: NRG; PAM sequence: TAG
gtaagaaaagctgaaaaagg

SEQ ID NO: 128591 - DNA, 20 bp, Artificial Sequence
  Description of Artificial Sequence: Synthetic oligonucleotide
  Target: LAMA2; (+) strand; PAM type: NRG; PAM sequence: AGG
taagaaaagctgaaaaaggt

SEQ ID NO: 128592 - DNA, 20 bp, Artificial Sequence
  Description of Artificial Sequence: Synthetic oligonucleotide
  Target: LAMA2; (+) strand; PAM type: NRG; PAM sequence: GGG
aagaaaagctgaaaaaggta

SEQ ID NO: 128593 - DNA, 20 bp, Artificial Sequence
  Description of Artificial Sequence: Synthetic oligonucleotide
  Target: LAMA2; (+) strand; PAM type: NRG; PAM sequence: GGG
agaaaagctgaaaaaggtag

SEQ ID NO: 128594 - DNA, 20 bp, Artificial Sequence
  Description of Artificial Sequence: Synthetic oligonucleotide
  Target: LAMA2; (+) strand; PAM type: NRG; PAM sequence: GAG
aaaagctgaaaaaggtaggg

SEQ ID NO: 128595 - DNA, 20 bp, Artificial Sequence
  Description of Artificial Sequence: Synthetic oligonucleotide
  Target: LAMA2; (+) strand; PAM type: NRG; PAM sequence: AAG
gctgaaaaaggtaggggaga

SEQ ID NO: 128596 - DNA, 20 bp, Artificial Sequence
  Description of Artificial Sequence: Synthetic oligonucleotide
  Target: LAMA2; (+) strand; PAM type: NRG; PAM sequence: TGG
gaaaaaggtaggggagaaag

SEQ ID NO: 128597 - DNA, 20 bp, Artificial Sequence
  Description of Artificial Sequence: Synthetic oligonucleotide
  Target: LAMA2; (+) strand; PAM type: NRG; PAM sequence: AAG
ggtaggggagaaagtggaca

SEQ ID NO: 128598 - DNA, 20 bp, Artificial Sequence
  Description of Artificial Sequence: Synthetic oligonucleotide
  Target: LAMA2; (+) strand; PAM type: NRG; PAM sequence: AAG
ggacaaagatgtgatctcta

SEQ ID NO: 128599 - DNA, 20 bp, Artificial Sequence
  Description of Artificial Sequence: Synthetic oligonucleotide
  Target: LAMA2; (+) strand; PAM type: NRG; PAM sequence: GAG
aagatgtgatctctaaagtt

SEQ ID NO: 128600 - DNA, 20 bp, Artificial Sequence
  Description of Artificial Sequence: Synthetic oligonucleotide
  Target: LAMA2; (+) strand; PAM type: NRG; PAM sequence: CAG
tgatctctaaagttgagcct

SEQ ID NO: 128601 - DNA, 20 bp, Artificial Sequence
  Description of Artificial Sequence: Synthetic oligonucleotide
  Target: LAMA2; (+) strand; PAM type: NRG; PAM sequence: TGG
ttgagcctcagactgataca

SEQ ID NO: 128602 - DNA, 20 bp, Artificial Sequence
  Description of Artificial Sequence: Synthetic oligonucleotide
  Target: LAMA2; (+) strand; PAM type: NRG; PAM sequence: TGG
cctcagactgatacatggca

SEQ ID NO: 128603 - DNA, 20 bp, Artificial Sequence
  Description of Artificial Sequence: Synthetic oligonucleotide
  Target: LAMA2; (+) strand; PAM type: NRG; PAM sequence: TGG
gactgatacatggcatggtc

SEQ ID NO: 128604 - DNA, 20 bp, Artificial Sequence
  Description of Artificial Sequence: Synthetic oligonucleotide
  Target: LAMA2; (+) strand; PAM type: NRG; PAM sequence: GAG
ctgatacatggcatggtctg

SEQ ID NO: 128605 - DNA, 20 bp, Artificial Sequence
  Description of Artificial Sequence: Synthetic oligonucleotide
  Target: LAMA2; (+) strand; PAM type: NRG; PAM sequence: AGG
tgatacatggcatggtctgg

SEQ ID NO: 128606 - DNA, 20 bp, Artificial Sequence
  Description of Artificial Sequence: Synthetic oligonucleotide
  Target: LAMA2; (+) strand; PAM type: NRG; PAM sequence: GGG
gatacatggcatggtctgga

SEQ ID NO: 128607 - DNA, 20 bp, Artificial Sequence
  Description of Artificial Sequence: Synthetic oligonucleotide
  Target: LAMA2; (+) strand; PAM type: NRG; PAM sequence: CAG
ctggagggaaaattgcacca

SEQ ID NO: 128608 - DNA, 20 bp, Artificial Sequence
  Description of Artificial Sequence: Synthetic oligonucleotide
  Target: LAMA2; (+) strand; PAM type: NRG; PAM sequence: AAG
agggaaaattgcaccacaga

SEQ ID NO: 128609 - DNA, 20 bp, Artificial Sequence
  Description of Artificial Sequence: Synthetic oligonucleotide
  Target: LAMA2; (+) strand; PAM type: NRG; PAM sequence: GAG
ggaaaattgcaccacagaaa

SEQ ID NO: 128610 - DNA, 20 bp, Artificial Sequence
  Description of Artificial Sequence: Synthetic oligonucleotide
  Target: LAMA2; (+) strand; PAM type: NRG; PAM sequence: AGG
gaaaattgcaccacagaaag

SEQ ID NO: 128611 - DNA, 20 bp, Artificial Sequence
  Description of Artificial Sequence: Synthetic oligonucleotide
  Target: LAMA2; (+) strand; PAM type: NRG; PAM sequence: AAG
cacagaaagaggtacccctt

SEQ ID NO: 128612 - DNA, 20 bp, Artificial Sequence
  Description of Artificial Sequence: Synthetic oligonucleotide
  Target: LAMA2; (+) strand; PAM type: NRG; PAM sequence: AGG
acagaaagaggtacccctta

SEQ ID NO: 128613 - DNA, 20 bp, Artificial Sequence
  Description of Artificial Sequence: Synthetic oligonucleotide
  Target: LAMA2; (+) strand; PAM type: NRG; PAM sequence: CAG
aagaggtaccccttaaggaa

SEQ ID NO: 128614 - DNA, 20 bp, Artificial Sequence
  Description of Artificial Sequence: Synthetic oligonucleotide
  Target: LAMA2; (+) strand; PAM type: NRG; PAM sequence: AGG
agaggtaccccttaaggaac

SEQ ID NO: 128615 - DNA, 20 bp, Artificial Sequence
  Description of Artificial Sequence: Synthetic oligonucleotide
  Target: LAMA2; (+) strand; PAM type: NRG; PAM sequence: CAG
ccccttaaggaacaggatgc

SEQ ID NO: 128616 - DNA, 20 bp, Artificial Sequence
  Description of Artificial Sequence: Synthetic oligonucleotide
  Target: LAMA2; (+) strand; PAM type: NRG; PAM sequence: AGG
cccttaaggaacaggatgcc

SEQ ID NO: 128617 - DNA, 20 bp, Artificial Sequence
  Description of Artificial Sequence: Synthetic oligonucleotide
  Target: LAMA2; (+) strand; PAM type: NRG; PAM sequence: CAG
attttacccctcatatctgt

SEQ ID NO: 128618 - DNA, 20 bp, Artificial Sequence
  Description of Artificial Sequence: Synthetic oligonucleotide
  Target: LAMA2; (+) strand; PAM type: NRG; PAM sequence: CGG
ccctcatatctgtcagttat

SEQ ID NO: 128619 - DNA, 20 bp, Artificial Sequence
  Description of Artificial Sequence: Synthetic oligonucleotide
  Target: LAMA2; (+) strand; PAM type: NRG; PAM sequence: AAG
atctgtcagttatcggctac

SEQ ID NO: 128620 - DNA, 20 bp, Artificial Sequence
  Description of Artificial Sequence: Synthetic oligonucleotide
  Target: LAMA2; (+) strand; PAM type: NRG; PAM sequence: AAG
cagttatcggctacaagtcc

SEQ ID NO: 128621 - DNA, 20 bp, Artificial Sequence
  Description of Artificial Sequence: Synthetic oligonucleotide
  Target: LAMA2; (+) strand; PAM type: NRG; PAM sequence: AGG
agttatcggctacaagtcca

SEQ ID NO: 128622 - DNA, 20 bp, Artificial Sequence
  Description of Artificial Sequence: Synthetic oligonucleotide
  Target: LAMA2; (+) strand; PAM type: NRG; PAM sequence: GGG
gttatcggctacaagtccaa

SEQ ID NO: 128623 - DNA, 20 bp, Artificial Sequence
  Description of Artificial Sequence: Synthetic oligonucleotide
  Target: LAMA2; (+) strand; PAM type: NRG; PAM sequence: GGG
ttatcggctacaagtccaag

SEQ ID NO: 128624 - DNA, 20 bp, Artificial Sequence
  Description of Artificial Sequence: Synthetic oligonucleotide
  Target: LAMA2; (+) strand; PAM type: NRG; PAM sequence: CAG
tcggctacaagtccaagggg

SEQ ID NO: 128625 - DNA, 20 bp, Artificial Sequence
  Description of Artificial Sequence: Synthetic oligonucleotide
  Target: LAMA2; (+) strand; PAM type: NRG; PAM sequence: AGG
cggctacaagtccaaggggc

SEQ ID NO: 128626 - DNA, 20 bp, Artificial Sequence
  Description of Artificial Sequence: Synthetic oligonucleotide
  Target: LAMA2; (+) strand; PAM type: NRG; PAM sequence: GGG
ggctacaagtccaaggggca

SEQ ID NO: 128627 - DNA, 20 bp, Artificial Sequence
  Description of Artificial Sequence: Synthetic oligonucleotide
  Target: LAMA2; (+) strand; PAM type: NRG; PAM sequence: GGG
gctacaagtccaaggggcag

SEQ ID NO: 128628 - DNA, 20 bp, Artificial Sequence
  Description of Artificial Sequence: Synthetic oligonucleotide
  Target: LAMA2; (+) strand; PAM type: NRG; PAM sequence: GGG
ctacaagtccaaggggcagg

SEQ ID NO: 128629 - DNA, 20 bp, Artificial Sequence
  Description of Artificial Sequence: Synthetic oligonucleotide
  Target: LAMA2; (+) strand; PAM type: NRG; PAM sequence: AAG
caagtccaaggggcaggggg

SEQ ID NO: 128630 - DNA, 20 bp, Artificial Sequence
  Description of Artificial Sequence: Synthetic oligonucleotide
  Target: LAMA2; (+) strand; PAM type: NRG; PAM sequence: AAG
caaggggcagggggaagtgc

SEQ ID NO: 128631 - DNA, 20 bp, Artificial Sequence
  Description of Artificial Sequence: Synthetic oligonucleotide
  Target: LAMA2; (+) strand; PAM type: NRG; PAM sequence: TGG
gtgcaagtgatgtatcttgc

SEQ ID NO: 128632 - DNA, 20 bp, Artificial Sequence
  Description of Artificial Sequence: Synthetic oligonucleotide
  Target: LAMA2; (+) strand; PAM type: NRG; PAM sequence: AAG
caagtgatgtatcttgctgg

SEQ ID NO: 128633 - DNA, 20 bp, Artificial Sequence
  Description of Artificial Sequence: Synthetic oligonucleotide
  Target: LAMA2; (+) strand; PAM type: NRG; PAM sequence: CAG
atgtatcttgctggaagtct

SEQ ID NO: 128634 - DNA, 20 bp, Artificial Sequence
  Description of Artificial Sequence: Synthetic oligonucleotide
  Target: LAMA2; (+) strand; PAM type: NRG; PAM sequence: AGG
tgtatcttgctggaagtctc

SEQ ID NO: 128635 - DNA, 20 bp, Artificial Sequence
  Description of Artificial Sequence: Synthetic oligonucleotide
  Target: LAMA2; (+) strand; PAM type: NRG; PAM sequence: GGG
gtatcttgctggaagtctca

SEQ ID NO: 128636 - DNA, 20 bp, Artificial Sequence
  Description of Artificial Sequence: Synthetic oligonucleotide
  Target: LAMA2; (+) strand; PAM type: NRG; PAM sequence: CAG
cttgctggaagtctcagggt

SEQ ID NO: 128637 - DNA, 20 bp, Artificial Sequence
  Description of Artificial Sequence: Synthetic oligonucleotide
  Target: LAMA2; (+) strand; PAM type: NRG; PAM sequence: AGG
ttgctggaagtctcagggtc

SEQ ID NO: 128638 - DNA, 20 bp, Artificial Sequence
  Description of Artificial Sequence: Synthetic oligonucleotide
  Target: LAMA2; (+) strand; PAM type: NRG; PAM sequence: GAG
gctggaagtctcagggtcag

SEQ ID NO: 128639 - DNA, 20 bp, Artificial Sequence
  Description of Artificial Sequence: Synthetic oligonucleotide
  Target: LAMA2; (+) strand; PAM type: NRG; PAM sequence: AGG
ctggaagtctcagggtcagg

SEQ ID NO: 128640 - DNA, 20 bp, Artificial Sequence
  Description of Artificial Sequence: Synthetic oligonucleotide
  Target: LAMA2; (+) strand; PAM type: NRG; PAM sequence: AAG
ggtcaggaggctctcattca

SEQ ID NO: 128641 - DNA, 20 bp, Artificial Sequence
  Description of Artificial Sequence: Synthetic oligonucleotide
  Target: LAMA2; (+) strand; PAM type: NRG; PAM sequence: GAG
tcaggaggctctcattcaaa

SEQ ID NO: 128642 - DNA, 20 bp, Artificial Sequence
  Description of Artificial Sequence: Synthetic oligonucleotide
  Target: LAMA2; (+) strand; PAM type: NRG; PAM sequence: AGG
caggaggctctcattcaaag

SEQ ID NO: 128643 - DNA, 20 bp, Artificial Sequence
  Description of Artificial Sequence: Synthetic oligonucleotide
  Target: LAMA2; (+) strand; PAM type: NRG; PAM sequence: CAG
gaggctctcattcaaagagg

SEQ ID NO: 128644 - DNA, 20 bp, Artificial Sequence
  Description of Artificial Sequence: Synthetic oligonucleotide
  Target: LAMA2; (+) strand; PAM type: NRG; PAM sequence: AGG
aggctctcattcaaagaggc

SEQ ID NO: 128645 - DNA, 20 bp, Artificial Sequence
  Description of Artificial Sequence: Synthetic oligonucleotide
  Target: LAMA2; (+) strand; PAM type: NRG; PAM sequence: TGG
cattcaaagaggcaggtctc

SEQ ID NO: 128646 - DNA, 20 bp, Artificial Sequence
  Description of Artificial Sequence: Synthetic oligonucleotide
  Target: LAMA2; (+) strand; PAM type: NRG; PAM sequence: CAG
ggcaggtctctggaatgatg

SEQ ID NO: 128647 - DNA, 20 bp, Artificial Sequence
  Description of Artificial Sequence: Synthetic oligonucleotide
  Target: LAMA2; (+) strand; PAM type: NRG; PAM sequence: AAG
ctctggaatgatgcagctgc

SEQ ID NO: 128648 - DNA, 20 bp, Artificial Sequence
  Description of Artificial Sequence: Synthetic oligonucleotide
  Target: LAMA2; (+) strand; PAM type: NRG; PAM sequence: TAG
atgatgcagctgcaagccat

SEQ ID NO: 128649 - DNA, 20 bp, Artificial Sequence
  Description of Artificial Sequence: Synthetic oligonucleotide
  Target: LAMA2; (+) strand; PAM type: NRG; PAM sequence: CAG
atgcagctgcaagccattag

SEQ ID NO: 128650 - DNA, 20 bp, Artificial Sequence
  Description of Artificial Sequence: Synthetic oligonucleotide
  Target: LAMA2; (+) strand; PAM type: NRG; PAM sequence: CAG
ttagcagccaacccttgcct

SEQ ID NO: 128651 - DNA, 20 bp, Artificial Sequence
  Description of Artificial Sequence: Synthetic oligonucleotide
  Target: LAMA2; (+) strand; PAM type: NRG; PAM sequence: GAG
agccaacccttgcctcagct

SEQ ID NO: 128652 - DNA, 20 bp, Artificial Sequence
  Description of Artificial Sequence: Synthetic oligonucleotide
  Target: LAMA2; (+) strand; PAM type: NRG; PAM sequence: GAG
ccaacccttgcctcagctga

SEQ ID NO: 128653 - DNA, 20 bp, Artificial Sequence
  Description of Artificial Sequence: Synthetic oligonucleotide
  Target: LAMA2; (+) strand; PAM type: NRG; PAM sequence: TGG
cccttgcctcagctgagaga

SEQ ID NO: 128654 - DNA, 20 bp, Artificial Sequence
  Description of Artificial Sequence: Synthetic oligonucleotide
  Target: LAMA2; (+) strand; PAM type: NRG; PAM sequence: GGG
ccttgcctcagctgagagat

SEQ ID NO: 128655 - DNA, 20 bp, Artificial Sequence
  Description of Artificial Sequence: Synthetic oligonucleotide
  Target: LAMA2; (+) strand; PAM type: NRG; PAM sequence: CAG
ctcagctgagagatgggtac

SEQ ID NO: 128656 - DNA, 20 bp, Artificial Sequence
  Description of Artificial Sequence: Synthetic oligonucleotide
  Target: LAMA2; (+) strand; PAM type: NRG; PAM sequence: AGG
tcagctgagagatgggtacc

SEQ ID NO: 128657 - DNA, 20 bp, Artificial Sequence
  Description of Artificial Sequence: Synthetic oligonucleotide
  Target: LAMA2; (+) strand; PAM type: NRG; PAM sequence: AAG
agagatgggtaccaggatga

SEQ ID NO: 128658 - DNA, 20 bp, Artificial Sequence
  Description of Artificial Sequence: Synthetic oligonucleotide
  Target: LAMA2; (+) strand; PAM type: NRG; PAM sequence: AGG
gagatgggtaccaggatgaa

SEQ ID NO: 128659 - DNA, 20 bp, Artificial Sequence
  Description of Artificial Sequence: Synthetic oligonucleotide
  Target: LAMA2; (+) strand; PAM type: NRG; PAM sequence: TGG
gggtaccaggatgaaaggcc

SEQ ID NO: 128660 - DNA, 20 bp, Artificial Sequence
  Description of Artificial Sequence: Synthetic oligonucleotide
  Target: LAMA2; (+) strand; PAM type: NRG; PAM sequence: AAG
ccaggatgaaaggcctggta

SEQ ID NO: 128661 - DNA, 20 bp, Artificial Sequence
  Description of Artificial Sequence: Synthetic oligonucleotide
  Target: LAMA2; (+) strand; PAM type: NRG; PAM sequence: AGG
caggatgaaaggcctggtaa

SEQ ID NO: 128662 - DNA, 20 bp, Artificial Sequence
  Description of Artificial Sequence: Synthetic oligonucleotide
  Target: LAMA2; (+) strand; PAM type: NRG; PAM sequence: GGG
aggatgaaaggcctggtaaa

SEQ ID NO: 128663 - DNA, 20 bp, Artificial Sequence
  Description of Artificial Sequence: Synthetic oligonucleotide
  Target: LAMA2; (+) strand; PAM type: NRG; PAM sequence: TGG
aaaggcctggtaaagggtta

SEQ ID NO: 128664 - DNA, 20 bp, Artificial Sequence
  Description of Artificial Sequence: Synthetic oligonucleotide
  Target: LAMA2; (+) strand; PAM type: NRG; PAM sequence: CAG
aagggttatggctgtgccac

SEQ ID NO: 128665 - DNA, 20 bp, Artificial Sequence
  Description of Artificial Sequence: Synthetic oligonucleotide
  Target: LAMA2; (+) strand; PAM type: NRG; PAM sequence: TGG
ggttatggctgtgccaccag

SEQ ID NO: 128666 - DNA, 20 bp, Artificial Sequence
  Description of Artificial Sequence: Synthetic oligonucleotide
  Target: LAMA2; (+) strand; PAM type: NRG; PAM sequence: TGG
accagtggaatttcctacac

SEQ ID NO: 128667 - DNA, 20 bp, Artificial Sequence
  Description of Artificial Sequence: Synthetic oligonucleotide
  Target: LAMA2; (+) strand; PAM type: NRG; PAM sequence: GGG
ccagtggaatttcctacact

SEQ ID NO: 128668 - DNA, 20 bp, Artificial Sequence
  Description of Artificial Sequence: Synthetic oligonucleotide
  Target: LAMA2; (+) strand; PAM type: NRG; PAM sequence: TAG
tacactgggaatatacatgc

SEQ ID NO: 128669 - DNA, 20 bp, Artificial Sequence
  Description of Artificial Sequence: Synthetic oligonucleotide
  Target: LAMA2; (+) strand; PAM type: NRG; PAM sequence: AGG
acactgggaatatacatgct

SEQ ID NO: 128670 - DNA, 20 bp, Artificial Sequence
  Description of Artificial Sequence: Synthetic oligonucleotide
  Target: LAMA2; (+) strand; PAM type: NRG; PAM sequence: TAG
gaatatacatgctaggtgca

SEQ ID NO: 128671 - DNA, 20 bp, Artificial Sequence
  Description of Artificial Sequence: Synthetic oligonucleotide
  Target: LAMA2; (+) strand; PAM type: NRG; PAM sequence: TAG
atgctaggtgcatagaatgt

SEQ ID NO: 128672 - DNA, 20 bp, Artificial Sequence
  Description of Artificial Sequence: Synthetic oligonucleotide
  Target: LAMA2; (+) strand; PAM type: NRG; PAM sequence: AGG
tgctaggtgcatagaatgtt

SEQ ID NO: 128673 - DNA, 20 bp, Artificial Sequence
  Description of Artificial Sequence: Synthetic oligonucleotide
  Target: LAMA2; (+) strand; PAM type: NRG; PAM sequence: GAG
gtgcatagaatgttaggtgt

SEQ ID NO: 128674 - DNA, 20 bp, Artificial Sequence
  Description of Artificial Sequence: Synthetic oligonucleotide
  Target: LAMA2; (+) strand; PAM type: NRG; PAM sequence: GAG
gcatagaatgttaggtgtga

SEQ ID NO: 128675 - DNA, 20 bp, Artificial Sequence
  Description of Artificial Sequence: Synthetic oligonucleotide
  Target: LAMA2; (+) strand; PAM type: NRG; PAM sequence: AGG
catagaatgttaggtgtgag

SEQ ID NO: 128676 - DNA, 20 bp, Artificial Sequence
  Description of Artificial Sequence: Synthetic oligonucleotide
  Target: LAMA2; (+) strand; PAM type: NRG; PAM sequence: GGG
atagaatgttaggtgtgaga

SEQ ID NO: 128677 - DNA, 20 bp, Artificial Sequence
  Description of Artificial Sequence: Synthetic oligonucleotide
  Target: LAMA2; (+) strand; PAM type: NRG; PAM sequence: GGG
tagaatgttaggtgtgagag

SEQ ID NO: 128678 - DNA, 20 bp, Artificial Sequence
  Description of Artificial Sequence: Synthetic oligonucleotide
  Target: LAMA2; (+) strand; PAM type: NRG; PAM sequence: GAG
gaatgttaggtgtgagaggg

SEQ ID NO: 128679 - DNA, 20 bp, Artificial Sequence
  Description of Artificial Sequence: Synthetic oligonucleotide
  Target: LAMA2; (+) strand; PAM type: NRG; PAM sequence: CAG
ttaggtgtgagaggggagac

SEQ ID NO: 128680 - DNA, 20 bp, Artificial Sequence
  Description of Artificial Sequence: Synthetic oligonucleotide
  Target: LAMA2; (+) strand; PAM type: NRG; PAM sequence: TGG
gagaggggagaccagcctgt

SEQ ID NO: 128681 - DNA, 20 bp, Artificial Sequence
  Description of Artificial Sequence: Synthetic oligonucleotide
  Target: LAMA2; (+) strand; PAM type: NRG; PAM sequence: AAG
ggggagaccagcctgttgga

SEQ ID NO: 128682 - DNA, 20 bp, Artificial Sequence
  Description of Artificial Sequence: Synthetic oligonucleotide
  Target: LAMA2; (+) strand; PAM type: NRG; PAM sequence: AAG
ttcattaatgcatatttgtc

SEQ ID NO: 128683 - DNA, 20 bp, Artificial Sequence
  Description of Artificial Sequence: Synthetic oligonucleotide
  Target: LAMA2; (+) strand; PAM type: NRG; PAM sequence: TAG
tgcatatttgtcaagaattc

SEQ ID NO: 128684 - DNA, 20 bp, Artificial Sequence
  Description of Artificial Sequence: Synthetic oligonucleotide
  Target: LAMA2; (+) strand; PAM type: NRG; PAM sequence: TGG
tatttgtcaagaattctagc

SEQ ID NO: 128685 - DNA, 20 bp, Artificial Sequence
  Description of Artificial Sequence: Synthetic oligonucleotide
  Target: LAMA2; (+) strand; PAM type: NRG; PAM sequence: TAG
ggtaacactttattaaacat

SEQ ID NO: 128686 - DNA, 20 bp, Artificial Sequence
  Description of Artificial Sequence: Synthetic oligonucleotide
  Target: LAMA2; (+) strand; PAM type: NRG; PAM sequence: AAG
ttgctattttatgtgctttg

SEQ ID NO: 128687 - DNA, 20 bp, Artificial Sequence
  Description of Artificial Sequence: Synthetic oligonucleotide
  Target: LAMA2; (+) strand; PAM type: NRG; PAM sequence: CAG
ctgttctattcactgtctca

SEQ ID NO: 128688 - DNA, 20 bp, Artificial Sequence
  Description of Artificial Sequence: Synthetic oligonucleotide
  Target: LAMA2; (+) strand; PAM type: NRG; PAM sequence: TAG
tattcactgtctcacagatt

SEQ ID NO: 128689 - DNA, 20 bp, Artificial Sequence
  Description of Artificial Sequence: Synthetic oligonucleotide
  Target: LAMA2; (+) strand; PAM type: NRG; PAM sequence: AGG
attcactgtctcacagattt

SEQ ID NO: 128690 - DNA, 20 bp, Artificial Sequence
  Description of Artificial Sequence: Synthetic oligonucleotide
  Target: LAMA2; (+) strand; PAM type: NRG; PAM sequence: CAG
actgtctcacagatttagga

SEQ ID NO: 128691 - DNA, 20 bp, Artificial Sequence
  Description of Artificial Sequence: Synthetic oligonucleotide
  Target: LAMA2; (+) strand; PAM type: NRG; PAM sequence: AAG
tttaggacagtttattaatt

SEQ ID NO: 128692 - DNA, 20 bp, Artificial Sequence
  Description of Artificial Sequence: Synthetic oligonucleotide
  Target: LAMA2; (+) strand; PAM type: NRG; PAM sequence: TAG
agtttattaattaagaacac

SEQ ID NO: 128693 - DNA, 20 bp, Artificial Sequence
  Description of Artificial Sequence: Synthetic oligonucleotide
  Target: LAMA2; (+) strand; PAM type: NRG; PAM sequence: AAG
aattaagaacactagatttc

SEQ ID NO: 128694 - DNA, 20 bp, Artificial Sequence
  Description of Artificial Sequence: Synthetic oligonucleotide
  Target: LAMA2; (+) strand; PAM type: NRG; PAM sequence: CAG
acactagatttcaagtcaaa

SEQ ID NO: 128695 - DNA, 20 bp, Artificial Sequence
  Description of Artificial Sequence: Synthetic oligonucleotide
  Target: LAMA2; (+) strand; PAM type: NRG; PAM sequence: TGG
cttgttctttgctgtataaa

SEQ ID NO: 128696 - DNA, 20 bp, Artificial Sequence
  Description of Artificial Sequence: Synthetic oligonucleotide
  Target: LAMA2; (+) strand; PAM type: NRG; PAM sequence: GAG
ctgtataaatggttttgtat

SEQ ID NO: 128697 - DNA, 20 bp, Artificial Sequence
  Description of Artificial Sequence: Synthetic oligonucleotide
  Target: LAMA2; (+) strand; PAM type: NRG; PAM sequence: GAG
atgagttacttaaccacact

SEQ ID NO: 128698 - DNA, 20 bp, Artificial Sequence
  Description of Artificial Sequence: Synthetic oligonucleotide
  Target: LAMA2; (+) strand; PAM type: NRG; PAM sequence: CAG
actgagcctcaaattcccat

SEQ ID NO: 128699 - DNA, 20 bp, Artificial Sequence
  Description of Artificial Sequence: Synthetic oligonucleotide
  Target: LAMA2; (+) strand; PAM type: NRG; PAM sequence: TGG
aaattcccatcagttatatg

SEQ ID NO: 128700 - DNA, 20 bp, Artificial Sequence
  Description of Artificial Sequence: Synthetic oligonucleotide
  Target: LAMA2; (+) strand; PAM type: NRG; PAM sequence: AAG
tcaatgtaatcattcatatg

SEQ ID NO: 128701 - DNA, 20 bp, Artificial Sequence
  Description of Artificial Sequence: Synthetic oligonucleotide
  Target: LAMA2; (+) strand; PAM type: NRG; PAM sequence: AAG
atgtaatcattcatatgaag

SEQ ID NO: 128702 - DNA, 20 bp, Artificial Sequence
  Description of Artificial Sequence: Synthetic oligonucleotide
  Target: LAMA2; (+) strand; PAM type: NRG; PAM sequence: CAG
atatgaagaagcaatgaaca

SEQ ID NO: 128703 - DNA, 20 bp, Artificial Sequence
  Description of Artificial Sequence: Synthetic oligonucleotide
  Target: LAMA2; (+) strand; PAM type: NRG; PAM sequence: AGG
tatgaagaagcaatgaacac

SEQ ID NO: 128704 - DNA, 20 bp, Artificial Sequence
  Description of Artificial Sequence: Synthetic oligonucleotide
  Target: LAMA2; (+) strand; PAM type: NRG; PAM sequence: GGG
atgaagaagcaatgaacaca

SEQ ID NO: 128705 - DNA, 20 bp, Artificial Sequence
  Description of Artificial Sequence: Synthetic oligonucleotide
  Target: LAMA2; (+) strand; PAM type: NRG; PAM sequence: TGG
gaagcaatgaacacagggtc

SEQ ID NO: 128706 - DNA, 20 bp, Artificial Sequence
  Description of Artificial Sequence: Synthetic oligonucleotide
  Target: LAMA2; (+) strand; PAM type: NRG; PAM sequence: TAG
cataaatgttcaacaaatga

SEQ ID NO: 128707 - DNA, 20 bp, Artificial Sequence
  Description of Artificial Sequence: Synthetic oligonucleotide
  Target: LAMA2; (+) strand; PAM type: NRG; PAM sequence: TGG
tgatagacattacttccttc

SEQ ID NO: 128708 - DNA, 20 bp, Artificial Sequence
  Description of Artificial Sequence: Synthetic oligonucleotide
  Target: LAMA2; (+) strand; PAM type: NRG; PAM sequence: GAG
gacattacttccttctggat

SEQ ID NO: 128709 - DNA, 20 bp, Artificial Sequence
  Description of Artificial Sequence: Synthetic oligonucleotide
  Target: LAMA2; (+) strand; PAM type: NRG; PAM sequence: CAG
gagcaaaaccttgatgcttt

SEQ ID NO: 128710 - DNA, 20 bp, Artificial Sequence
  Description of Artificial Sequence: Synthetic oligonucleotide
  Target: LAMA2; (+) strand; PAM type: NRG; PAM sequence: TAG
caaaaccttgatgctttcag

SEQ ID NO: 128711 - DNA, 20 bp, Artificial Sequence
  Description of Artificial Sequence: Synthetic oligonucleotide
  Target: LAMA2; (+) strand; PAM type: NRG; PAM sequence: AAG
aaccttgatgctttcagtag

SEQ ID NO: 128712 - DNA, 20 bp, Artificial Sequence
  Description of Artificial Sequence: Synthetic oligonucleotide
  Target: LAMA2; (+) strand; PAM type: NRG; PAM sequence: AGG
accttgatgctttcagtaga

SEQ ID NO: 128713 - DNA, 20 bp, Artificial Sequence
  Description of Artificial Sequence: Synthetic oligonucleotide
  Target: LAMA2; (+) strand; PAM type: NRG; PAM sequence: TGG
tgctttcagtagaaggtatt

SEQ ID NO: 128714 - DNA, 20 bp, Artificial Sequence
  Description of Artificial Sequence: Synthetic oligonucleotide
  Target: LAMA2; (+) strand; PAM type: NRG; PAM sequence: TGG
gtagaaggtatttggaacta

SEQ ID NO: 128715 - DNA, 20 bp, Artificial Sequence
  Description of Artificial Sequence: Synthetic oligonucleotide
  Target: LAMA2; (+) strand; PAM type: NRG; PAM sequence: TGG
aactatggttgaatcttttc

SEQ ID NO: 128716 - DNA, 20 bp, Artificial Sequence
  Description of Artificial Sequence: Synthetic oligonucleotide
  Target: LAMA2; (+) strand; PAM type: NRG; PAM sequence: GGG
actatggttgaatcttttct

SEQ ID NO: 128717 - DNA, 20 bp, Artificial Sequence
  Description of Artificial Sequence: Synthetic oligonucleotide
  Target: LAMA2; (+) strand; PAM type: NRG; PAM sequence: GGG
ctatggttgaatcttttctg

SEQ ID NO: 128718 - DNA, 20 bp, Artificial Sequence
  Description of Artificial Sequence: Synthetic oligonucleotide
  Target: LAMA2; (+) strand; PAM type: NRG; PAM sequence: GGG
tatggttgaatcttttctgg

SEQ ID NO: 128719 - DNA, 20 bp, Artificial Sequence
  Description of Artificial Sequence: Synthetic oligonucleotide
  Target: LAMA2; (+) strand; PAM type: NRG; PAM sequence: TGG
atcttttctgggggtattga

SEQ ID NO: 128720 - DNA, 20 bp, Artificial Sequence
  Description of Artificial Sequence: Synthetic oligonucleotide
  Target: LAMA2; (+) strand; PAM type: NRG; PAM sequence: GGG
tcttttctgggggtattgat

SEQ ID NO: 128721 - DNA, 20 bp, Artificial Sequence
  Description of Artificial Sequence: Synthetic oligonucleotide
  Target: LAMA2; (+) strand; PAM type: NRG; PAM sequence: TAG
tctgggggtattgatgggac

SEQ ID NO: 128722 - DNA, 20 bp, Artificial Sequence
  Description of Artificial Sequence: Synthetic oligonucleotide
  Target: LAMA2; (+) strand; PAM type: NRG; PAM sequence: GAG
tgggggtattgatgggacta

SEQ ID NO: 128723 - DNA, 20 bp, Artificial Sequence
  Description of Artificial Sequence: Synthetic oligonucleotide
  Target: LAMA2; (+) strand; PAM type: NRG; PAM sequence: CAG
ggtattgatgggactagagt

SEQ ID NO: 128724 - DNA, 20 bp, Artificial Sequence
  Description of Artificial Sequence: Synthetic oligonucleotide
  Target: LAMA2; (+) strand; PAM type: NRG; PAM sequence: AGG
gtattgatgggactagagtc

SEQ ID NO: 128725 - DNA, 20 bp, Artificial Sequence
  Description of Artificial Sequence: Synthetic oligonucleotide
  Target: LAMA2; (+) strand; PAM type: NRG; PAM sequence: GAG
gatgggactagagtcaggat

SEQ ID NO: 128726 - DNA, 20 bp, Artificial Sequence
  Description of Artificial Sequence: Synthetic oligonucleotide
  Target: LAMA2; (+) strand; PAM type: NRG; PAM sequence: AGG
atgggactagagtcaggatg

SEQ ID NO: 128727 - DNA, 20 bp, Artificial Sequence
  Description of Artificial Sequence: Synthetic oligonucleotide
  Target: LAMA2; (+) strand; PAM type: NRG; PAM sequence: TGG
ggactagagtcaggatgagg

SEQ ID NO: 128728 - DNA, 20 bp, Artificial Sequence
  Description of Artificial Sequence: Synthetic oligonucleotide
  Target: LAMA2; (+) strand; PAM type: NRG; PAM sequence: CAG
ggatgaggtggatgaaatgc

SEQ ID NO: 128729 - DNA, 20 bp, Artificial Sequence
  Description of Artificial Sequence: Synthetic oligonucleotide
  Target: LAMA2; (+) strand; PAM type: NRG; PAM sequence: AGG
gatgaggtggatgaaatgcc

SEQ ID NO: 128730 - DNA, 20 bp, Artificial Sequence
  Description of Artificial Sequence: Synthetic oligonucleotide
  Target: LAMA2; (+) strand; PAM type: NRG; PAM sequence: GAG
tactttcatctgtatgactt

SEQ ID NO: 128731 - DNA, 20 bp, Artificial Sequence
  Description of Artificial Sequence: Synthetic oligonucleotide
  Target: LAMA2; (+) strand; PAM type: NRG; PAM sequence: GAG
ctttcatctgtatgacttga

SEQ ID NO: 128732 - DNA, 20 bp, Artificial Sequence
  Description of Artificial Sequence: Synthetic oligonucleotide
  Target: LAMA2; (+) strand; PAM type: NRG; PAM sequence: GAG
gcatcaaattttgcaccctc

SEQ ID NO: 128733 - DNA, 20 bp, Artificial Sequence
  Description of Artificial Sequence: Synthetic oligonucleotide
  Target: LAMA2; (+) strand; PAM type: NRG; PAM sequence: CAG
acattgaaaaaaatacatgc

SEQ ID NO: 128734 - DNA, 20 bp, Artificial Sequence
  Description of Artificial Sequence: Synthetic oligonucleotide
  Target: LAMA2; (+) strand; PAM type: NRG; PAM sequence: TGG
cagattaaaaaaaatgaaat

SEQ ID NO: 128735 - DNA, 20 bp, Artificial Sequence
  Description of Artificial Sequence: Synthetic oligonucleotide
  Target: LAMA2; (+) strand; PAM type: NRG; PAM sequence: AAG
ttaaaaaaaatgaaattgga

SEQ ID NO: 128736 - DNA, 20 bp, Artificial Sequence
  Description of Artificial Sequence: Synthetic oligonucleotide
  Target: LAMA2; (+) strand; PAM type: NRG; PAM sequence: AGG
taaaaaaaatgaaattggaa

SEQ ID NO: 128737 - DNA, 20 bp, Artificial Sequence
  Description of Artificial Sequence: Synthetic oligonucleotide
  Target: LAMA2; (+) strand; PAM type: NRG; PAM sequence: TGG
aaaaatgaaattggaaagga

SEQ ID NO: 128738 - DNA, 20 bp, Artificial Sequence
  Description of Artificial Sequence: Synthetic oligonucleotide
  Target: LAMA2; (+) strand; PAM type: NRG; PAM sequence: TAG
aaattggaaaggatggtttg

SEQ ID NO: 128739 - DNA, 20 bp, Artificial Sequence
  Description of Artificial Sequence: Synthetic oligonucleotide
  Target: LAMA2; (+) strand; PAM type: NRG; PAM sequence: TAG
aggatggtttgtagaactgt

SEQ ID NO: 128740 - DNA, 20 bp, Artificial Sequence
  Description of Artificial Sequence: Synthetic oligonucleotide
  Target: LAMA2; (+) strand; PAM type: NRG; PAM sequence: GAG
gatggtttgtagaactgtta

SEQ ID NO: 128741 - DNA, 20 bp, Artificial Sequence
  Description of Artificial Sequence: Synthetic oligonucleotide
  Target: LAMA2; (+) strand; PAM type: NRG; PAM sequence: AAG
catccataaaactcattaca

SEQ ID NO: 128742 - DNA, 20 bp, Artificial Sequence
  Description of Artificial Sequence: Synthetic oligonucleotide
  Target: LAMA2; (+) strand; PAM type: NRG; PAM sequence: TAG
cattacaaagtaaaatatat

SEQ ID NO: 128743 - DNA, 20 bp, Artificial Sequence
  Description of Artificial Sequence: Synthetic oligonucleotide
  Target: LAMA2; (+) strand; PAM type: NRG; PAM sequence: TAG
tattagtaataaaatgattt

SEQ ID NO: 128744 - DNA, 20 bp, Artificial Sequence
  Description of Artificial Sequence: Synthetic oligonucleotide
  Target: LAMA2; (+) strand; PAM type: NRG; PAM sequence: CGG
aaatgattttagtaatacct

SEQ ID NO: 128745 - DNA, 20 bp, Artificial Sequence
  Description of Artificial Sequence: Synthetic oligonucleotide
  Target: LAMA2; (+) strand; PAM type: NRG; PAM sequence: GGG
aatgattttagtaatacctc

SEQ ID NO: 128746 - DNA, 20 bp, Artificial Sequence
  Description of Artificial Sequence: Synthetic oligonucleotide
  Target: LAMA2; (+) strand; PAM type: NRG; PAM sequence: TGG
catctctctgtctcttgtaa

SEQ ID NO: 128747 - DNA, 20 bp, Artificial Sequence
  Description of Artificial Sequence: Synthetic oligonucleotide
  Target: LAMA2; (+) strand; PAM type: NRG; PAM sequence: GAG
aatattctttgaaaaatatt

SEQ ID NO: 128748 - DNA, 20 bp, Artificial Sequence
  Description of Artificial Sequence: Synthetic oligonucleotide
  Target: LAMA2; (+) strand; PAM type: NRG; PAM sequence: AGG
atattctttgaaaaatattg

SEQ ID NO: 128749 - DNA, 20 bp, Artificial Sequence
  Description of Artificial Sequence: Synthetic oligonucleotide
  Target: LAMA2; (+) strand; PAM type: NRG; PAM sequence: TAG
gaaaaatattgaggttattt

SEQ ID NO: 128750 - DNA, 20 bp, Artificial Sequence
  Description of Artificial Sequence: Synthetic oligonucleotide
  Target: LAMA2; (+) strand; PAM type: NRG; PAM sequence: TGG
ggttattttagttatgatat

SEQ ID NO: 128751 - DNA, 20 bp, Artificial Sequence
  Description of Artificial Sequence: Synthetic oligonucleotide
  Target: LAMA2; (+) strand; PAM type: NRG; PAM sequence: TGG
atgatattggtactttgatt

SEQ ID NO: 128752 - DNA, 20 bp, Artificial Sequence
  Description of Artificial Sequence: Synthetic oligonucleotide
  Target: LAMA2; (+) strand; PAM type: NRG; PAM sequence: GAG
ttaaatatccttttattctt

SEQ ID NO: 128753 - DNA, 20 bp, Artificial Sequence
  Description of Artificial Sequence: Synthetic oligonucleotide
  Target: LAMA2; (+) strand; PAM type: NRG; PAM sequence: TGG
gatatacaatttcaactgaa

SEQ ID NO: 128754 - DNA, 20 bp, Artificial Sequence
  Description of Artificial Sequence: Synthetic oligonucleotide
  Target: LAMA2; (+) strand; PAM type: NRG; PAM sequence: CAG
caactgaatggcaactatga

SEQ ID NO: 128755 - DNA, 20 bp, Artificial Sequence
  Description of Artificial Sequence: Synthetic oligonucleotide
  Target: LAMA2; (+) strand; PAM type: NRG; PAM sequence: GAG
actgaatggcaactatgaca

SEQ ID NO: 128756 - DNA, 20 bp, Artificial Sequence
  Description of Artificial Sequence: Synthetic oligonucleotide
  Target: LAMA2; (+) strand; PAM type: NRG; PAM sequence: CAG
atgacagagttgaaaatgta

SEQ ID NO: 128757 - DNA, 20 bp, Artificial Sequence
  Description of Artificial Sequence: Synthetic oligonucleotide
  Target: LAMA2; (+) strand; PAM type: NRG; PAM sequence: TAG
atgtacagaaaaataaatta

SEQ ID NO: 128758 - DNA, 20 bp, Artificial Sequence
  Description of Artificial Sequence: Synthetic oligonucleotide
  Target: LAMA2; (+) strand; PAM type: NRG; PAM sequence: TAG
cagaaaaataaattatagat

SEQ ID NO: 128759 - DNA, 20 bp, Artificial Sequence
  Description of Artificial Sequence: Synthetic oligonucleotide
  Target: LAMA2; (+) strand; PAM type: NRG; PAM sequence: AAG
tagacaacgtattaatttaa

SEQ ID NO: 128760 - DNA, 20 bp, Artificial Sequence
  Description of Artificial Sequence: Synthetic oligonucleotide
  Target: LAMA2; (+) strand; PAM type: NRG; PAM sequence: CAG
acaacgtattaatttaaaag

SEQ ID NO: 128761 - DNA, 20 bp, Artificial Sequence
  Description of Artificial Sequence: Synthetic oligonucleotide
  Target: LAMA2; (+) strand; PAM type: NRG; PAM sequence: AAG
attaatttaaaagcagttgc

SEQ ID NO: 128762 - DNA, 20 bp, Artificial Sequence
  Description of Artificial Sequence: Synthetic oligonucleotide
  Target: LAMA2; (+) strand; PAM type: NRG; PAM sequence: AAG
atttaaaagcagttgcaagc

SEQ ID NO: 128763 - DNA, 20 bp, Artificial Sequence
  Description of Artificial Sequence: Synthetic oligonucleotide
  Target: LAMA2; (+) strand; PAM type: NRG; PAM sequence: AAG
actatattgcaatgaaaaaa

SEQ ID NO: 128764 - DNA, 20 bp, Artificial Sequence
  Description of Artificial Sequence: Synthetic oligonucleotide
  Target: LAMA2; (+) strand; PAM type: NRG; PAM sequence: TGG
gaaaaaaaagttcctaaaat

SEQ ID NO: 128765 - DNA, 20 bp, Artificial Sequence
  Description of Artificial Sequence: Synthetic oligonucleotide
  Target: LAMA2; (+) strand; PAM type: NRG; PAM sequence: TAG
ttcaactattgctgtcctaa

SEQ ID NO: 128766 - DNA, 20 bp, Artificial Sequence
  Description of Artificial Sequence: Synthetic oligonucleotide
  Target: LAMA2; (+) strand; PAM type: NRG; PAM sequence: AAG
tattgctgtcctaatagctg

SEQ ID NO: 128767 - DNA, 20 bp, Artificial Sequence
  Description of Artificial Sequence: Synthetic oligonucleotide
  Target: LAMA2; (+) strand; PAM type: NRG; PAM sequence: TGG
gctgaagtcatttttatgta

SEQ ID NO: 128768 - DNA, 20 bp, Artificial Sequence
  Description of Artificial Sequence: Synthetic oligonucleotide
  Target: LAMA2; (+) strand; PAM type: NRG; PAM sequence: AAG
tgtatggcaatcctaaatca

SEQ ID NO: 128769 - DNA, 20 bp, Artificial Sequence
  Description of Artificial Sequence: Synthetic oligonucleotide
  Target: LAMA2; (+) strand; PAM type: NRG; PAM sequence: AAG
tcctaaatcaaagccatcat

SEQ ID NO: 128770 - DNA, 20 bp, Artificial Sequence
  Description of Artificial Sequence: Synthetic oligonucleotide
  Target: LAMA2; (+) strand; PAM type: NRG; PAM sequence: CAG
aaagccatcataagatgctg

SEQ ID NO: 128771 - DNA, 20 bp, Artificial Sequence
  Description of Artificial Sequence: Synthetic oligonucleotide
  Target: LAMA2; (+) strand; PAM type: NRG; PAM sequence: TAG
agatgctgcagacctcttaa

SEQ ID NO: 128772 - DNA, 20 bp, Artificial Sequence
  Description of Artificial Sequence: Synthetic oligonucleotide
  Target: LAMA2; (+) strand; PAM type: NRG; PAM sequence: TGG
ctgcagacctcttaatagct

SEQ ID NO: 128773 - DNA, 20 bp, Artificial Sequence
  Description of Artificial Sequence: Synthetic oligonucleotide
  Target: LAMA2; (+) strand; PAM type: NRG; PAM sequence: CAG
acctcttaatagcttggctc

SEQ ID NO: 128774 - DNA, 20 bp, Artificial Sequence
  Description of Artificial Sequence: Synthetic oligonucleotide
  Target: LAMA2; (+) strand; PAM type: NRG; PAM sequence: GAG
agcttggctccagtgataat

SEQ ID NO: 128775 - DNA, 20 bp, Artificial Sequence
  Description of Artificial Sequence: Synthetic oligonucleotide
  Target: LAMA2; (+) strand; PAM type: NRG; PAM sequence: CAG
ggctccagtgataatgagcc

SEQ ID NO: 128776 - DNA, 20 bp, Artificial Sequence
  Description of Artificial Sequence: Synthetic oligonucleotide
  Target: LAMA2; (+) strand; PAM type: NRG; PAM sequence: AGG
gctccagtgataatgagccc

SEQ ID NO: 128777 - DNA, 20 bp, Artificial Sequence
  Description of Artificial Sequence: Synthetic oligonucleotide
  Target: LAMA2; (+) strand; PAM type: NRG; PAM sequence: TAG
tgataatgagcccaggacat

SEQ ID NO: 128778 - DNA, 20 bp, Artificial Sequence
  Description of Artificial Sequence: Synthetic oligonucleotide
  Target: LAMA2; (+) strand; PAM type: NRG; PAM sequence: GAG
ataatgagcccaggacatta

SEQ ID NO: 128779 - DNA, 20 bp, Artificial Sequence
  Description of Artificial Sequence: Synthetic oligonucleotide
  Target: LAMA2; (+) strand; PAM type: NRG; PAM sequence: GAG
caggacattagagctcattt

SEQ ID NO: 128780 - DNA, 20 bp, Artificial Sequence
  Description of Artificial Sequence: Synthetic oligonucleotide
  Target: LAMA2; (+) strand; PAM type: NRG; PAM sequence: GAG
ggacattagagctcatttga

SEQ ID NO: 128781 - DNA, 20 bp, Artificial Sequence
  Description of Artificial Sequence: Synthetic oligonucleotide
  Target: LAMA2; (+) strand; PAM type: NRG; PAM sequence: CAG
cattagagctcatttgagag

SEQ ID NO: 128782 - DNA, 20 bp, Artificial Sequence
  Description of Artificial Sequence: Synthetic oligonucleotide
  Target: LAMA2; (+) strand; PAM type: NRG; PAM sequence: AGG
attagagctcatttgagagc

SEQ ID NO: 128783 - DNA, 20 bp, Artificial Sequence
  Description of Artificial Sequence: Synthetic oligonucleotide
  Target: LAMA2; (+) strand; PAM type: NRG; PAM sequence: TGG
ctgtgcaattttcctacctc

SEQ ID NO: 128784 - DNA, 20 bp, Artificial Sequence
  Description of Artificial Sequence: Synthetic oligonucleotide
  Target: LAMA2; (+) strand; PAM type: NRG; PAM sequence: AAG
ctacctctggctttgtctca

SEQ ID NO: 128785 - DNA, 20 bp, Artificial Sequence
  Description of Artificial Sequence: Synthetic oligonucleotide
  Target: LAMA2; (+) strand; PAM type: NRG; PAM sequence: TAG
ctggctttgtctcaaagaca

SEQ ID NO: 128786 - DNA, 20 bp, Artificial Sequence
  Description of Artificial Sequence: Synthetic oligonucleotide
  Target: LAMA2; (+) strand; PAM type: NRG; PAM sequence: TGG
ctcaaagacatagccacaca

SEQ ID NO: 128787 - DNA, 20 bp, Artificial Sequence
  Description of Artificial Sequence: Synthetic oligonucleotide
  Target: LAMA2; (+) strand; PAM type: NRG; PAM sequence: GAG
caaagacatagccacacatg

SEQ ID NO: 128788 - DNA, 20 bp, Artificial Sequence
  Description of Artificial Sequence: Synthetic oligonucleotide
  Target: LAMA2; (+) strand; PAM type: NRG; PAM sequence: AAG
agacatagccacacatggag

SEQ ID NO: 128789 - DNA, 20 bp, Artificial Sequence
  Description of Artificial Sequence: Synthetic oligonucleotide
  Target: LAMA2; (+) strand; PAM type: NRG; PAM sequence: AGG
gacatagccacacatggaga

SEQ ID NO: 128790 - DNA, 20 bp, Artificial Sequence
  Description of Artificial Sequence: Synthetic oligonucleotide
  Target: LAMA2; (+) strand; PAM type: NRG; PAM sequence: AAG
tggagaaggacactgataat

SEQ ID NO: 128791 - DNA, 20 bp, Artificial Sequence
  Description of Artificial Sequence: Synthetic oligonucleotide
  Target: LAMA2; (+) strand; PAM type: NRG; PAM sequence: GAG
gagaaggacactgataataa

SEQ ID NO: 128792 - DNA, 20 bp, Artificial Sequence
  Description of Artificial Sequence: Synthetic oligonucleotide
  Target: LAMA2; (+) strand; PAM type: NRG; PAM sequence: GAG
gaaggacactgataataaga

SEQ ID NO: 128793 - DNA, 20 bp, Artificial Sequence
  Description of Artificial Sequence: Synthetic oligonucleotide
  Target: LAMA2; (+) strand; PAM type: NRG; PAM sequence: CAG
ctttataatttttcttttgc

SEQ ID NO: 128794 - DNA, 20 bp, Artificial Sequence
  Description of Artificial Sequence: Synthetic oligonucleotide
  Target: LAMA2; (+) strand; PAM type: NRG; PAM sequence: AGG
tttataatttttcttttgcc

SEQ ID NO: 128795 - DNA, 20 bp, Artificial Sequence
  Description of Artificial Sequence: Synthetic oligonucleotide
  Target: LAMA2; (+) strand; PAM type: NRG; PAM sequence: AAG
tccttgaatcaaaatgattg

SEQ ID NO: 128796 - DNA, 20 bp, Artificial Sequence
  Description of Artificial Sequence: Synthetic oligonucleotide
  Target: LAMA2; (+) strand; PAM type: NRG; PAM sequence: CAG
ttgaatcaaaatgattgaag

SEQ ID NO: 128797 - DNA, 20 bp, Artificial Sequence
  Description of Artificial Sequence: Synthetic oligonucleotide
  Target: LAMA2; (+) strand; PAM type: NRG; PAM sequence: TAG
gaagcagttatttttaaaaa

SEQ ID NO: 128798 - DNA, 20 bp, Artificial Sequence
  Description of Artificial Sequence: Synthetic oligonucleotide
  Target: LAMA2; (+) strand; PAM type: NRG; PAM sequence: AAG
gcagttatttttaaaaatag

SEQ ID NO: 128799 - DNA, 20 bp, Artificial Sequence
  Description of Artificial Sequence: Synthetic oligonucleotide
  Target: LAMA2; (+) strand; PAM type: NRG; PAM sequence: TAG
ttatttttaaaaatagaagc

SEQ ID NO: 128800 - DNA, 20 bp, Artificial Sequence
  Description of Artificial Sequence: Synthetic oligonucleotide
  Target: LAMA2; (+) strand; PAM type: NRG; PAM sequence: TAG
tcttttgacattattttgtt

SEQ ID NO: 128801 - DNA, 20 bp, Artificial Sequence
  Description of Artificial Sequence: Synthetic oligonucleotide
  Target: LAMA2; (+) strand; PAM type: NRG; PAM sequence: GAG
ttttgacattattttgttta

SEQ ID NO: 128802 - DNA, 20 bp, Artificial Sequence
  Description of Artificial Sequence: Synthetic oligonucleotide
  Target: LAMA2; (+) strand; PAM type: NRG; PAM sequence: TGG
agcacctttaaaaactctac

SEQ ID NO: 128803 - DNA, 20 bp, Artificial Sequence
  Description of Artificial Sequence: Synthetic oligonucleotide
  Target: LAMA2; (+) strand; PAM type: NRG; PAM sequence: CAG
ttaaaatattgaaactataa

SEQ ID NO: 128804 - DNA, 20 bp, Artificial Sequence
  Description of Artificial Sequence: Synthetic oligonucleotide
  Target: LAMA2; (+) strand; PAM type: NRG; PAM sequence: TGG
tgaaactataacagtatttt

SEQ ID NO: 128805 - DNA, 20 bp, Artificial Sequence
  Description of Artificial Sequence: Synthetic oligonucleotide
  Target: LAMA2; (+) strand; PAM type: NRG; PAM sequence: CAG
tgatttttaaatacttcttt

SEQ ID NO: 128806 - DNA, 20 bp, Artificial Sequence
  Description of Artificial Sequence: Synthetic oligonucleotide
  Target: LAMA2; (+) strand; PAM type: NRG; PAM sequence: TGG
tatatacttctctaacttat

SEQ ID NO: 128807 - DNA, 20 bp, Artificial Sequence
  Description of Artificial Sequence: Synthetic oligonucleotide
  Target: LAMA2; (+) strand; PAM type: NRG; PAM sequence: TAG
ttatttgatttaattgtcct

SEQ ID NO: 128808 - DNA, 20 bp, Artificial Sequence
  Description of Artificial Sequence: Synthetic oligonucleotide
  Target: LAMA2; (+) strand; PAM type: NRG; PAM sequence: AGG
tatttgatttaattgtcctt

SEQ ID NO: 128809 - DNA, 20 bp, Artificial Sequence
  Description of Artificial Sequence: Synthetic oligonucleotide
  Target: LAMA2; (+) strand; PAM type: NRG; PAM sequence: CAG
ttgatttaattgtccttagg

SEQ ID NO: 128810 - DNA, 20 bp, Artificial Sequence
  Description of Artificial Sequence: Synthetic oligonucleotide
  Target: LAMA2; (+) strand; PAM type: NRG; PAM sequence: GAG
ccttaggcagtgttaattat

SEQ ID NO: 128811 - DNA, 20 bp, Artificial Sequence
  Description of Artificial Sequence: Synthetic oligonucleotide
  Target: LAMA2; (+) strand; PAM type: NRG; PAM sequence: GAG
ttaggcagtgttaattatga

SEQ ID NO: 128812 - DNA, 20 bp, Artificial Sequence
  Description of Artificial Sequence: Synthetic oligonucleotide
  Target: LAMA2; (+) strand; PAM type: NRG; PAM sequence: GAG
gttaattatgagagtttgcc

SEQ ID NO: 128813 - DNA, 20 bp, Artificial Sequence
  Description of Artificial Sequence: Synthetic oligonucleotide
  Target: LAMA2; (+) strand; PAM type: NRG; PAM sequence: TGG
gagtttgccgagtttcttct

SEQ ID NO: 128814 - DNA, 20 bp, Artificial Sequence
  Description of Artificial Sequence: Synthetic oligonucleotide
  Target: LAMA2; (+) strand; PAM type: NRG; PAM sequence: GGG
agtttgccgagtttcttctt

SEQ ID NO: 128815 - DNA, 20 bp, Artificial Sequence
  Description of Artificial Sequence: Synthetic oligonucleotide
  Target: LAMA2; (+) strand; PAM type: NRG; PAM sequence: GAG
gagtttcttcttgggaattt

SEQ ID NO: 128816 - DNA, 20 bp, Artificial Sequence
  Description of Artificial Sequence: Synthetic oligonucleotide
  Target: LAMA2; (+) strand; PAM type: NRG; PAM sequence: AAG
ttcttgggaatttgagaata

SEQ ID NO: 128817 - DNA, 20 bp, Artificial Sequence
  Description of Artificial Sequence: Synthetic oligonucleotide
  Target: LAMA2; (+) strand; PAM type: NRG; PAM sequence: AGG
tcttgggaatttgagaataa

SEQ ID NO: 128818 - DNA, 20 bp, Artificial Sequence
  Description of Artificial Sequence: Synthetic oligonucleotide
  Target: LAMA2; (+) strand; PAM type: NRG; PAM sequence: CGG
gaatttgagaataaaggatg

SEQ ID NO: 128819 - DNA, 20 bp, Artificial Sequence
  Description of Artificial Sequence: Synthetic oligonucleotide
  Target: LAMA2; (+) strand; PAM type: NRG; PAM sequence: GGG
aatttgagaataaaggatgc

SEQ ID NO: 128820 - DNA, 20 bp, Artificial Sequence
  Description of Artificial Sequence: Synthetic oligonucleotide
  Target: LAMA2; (+) strand; PAM type: NRG; PAM sequence: AAG
tgagaataaaggatgcggga

SEQ ID NO: 128821 - DNA, 20 bp, Artificial Sequence
  Description of Artificial Sequence: Synthetic oligonucleotide
  Target: LAMA2; (+) strand; PAM type: NRG; PAM sequence: GAG
agaataaaggatgcgggaaa

SEQ ID NO: 128822 - DNA, 20 bp, Artificial Sequence
  Description of Artificial Sequence: Synthetic oligonucleotide
  Target: LAMA2; (+) strand; PAM type: NRG; PAM sequence: AGG
gaataaaggatgcgggaaag

SEQ ID NO: 128823 - DNA, 20 bp, Artificial Sequence
  Description of Artificial Sequence: Synthetic oligonucleotide
  Target: LAMA2; (+) strand; PAM type: NRG; PAM sequence: GAG
ataaaggatgcgggaaagag

SEQ ID NO: 128824 - DNA, 20 bp, Artificial Sequence
  Description of Artificial Sequence: Synthetic oligonucleotide
  Target: LAMA2; (+) strand; PAM type: NRG; PAM sequence: AGG
taaaggatgcgggaaagagg

SEQ ID NO: 128825 - DNA, 20 bp, Artificial Sequence
  Description of Artificial Sequence: Synthetic oligonucleotide
  Target: LAMA2; (+) strand; PAM type: NRG; PAM sequence: TGG
aggatgcgggaaagaggagg

SEQ ID NO: 128826 - DNA, 20 bp, Artificial Sequence
  Description of Artificial Sequence: Synthetic oligonucleotide
  Target: LAMA2; (+) strand; PAM type: NRG; PAM sequence: GGG
ggatgcgggaaagaggaggt

SEQ ID NO: 128827 - DNA, 20 bp, Artificial Sequence
  Description of Artificial Sequence: Synthetic oligonucleotide
  Target: LAMA2; (+) strand; PAM type: NRG; PAM sequence: TGG
tgcgggaaagaggaggtggg

SEQ ID NO: 128828 - DNA, 20 bp, Artificial Sequence
  Description of Artificial Sequence: Synthetic oligonucleotide
  Target: LAMA2; (+) strand; PAM type: NRG; PAM sequence: GAG
cgggaaagaggaggtgggtg

SEQ ID NO: 128829 - DNA, 20 bp, Artificial Sequence
  Description of Artificial Sequence: Synthetic oligonucleotide
  Target: LAMA2; (+) strand; PAM type: NRG; PAM sequence: AGG
gggaaagaggaggtgggtgg

SEQ ID NO: 128830 - DNA, 20 bp, Artificial Sequence
  Description of Artificial Sequence: Synthetic oligonucleotide
  Target: LAMA2; (+) strand; PAM type: NRG; PAM sequence: TGG
aagaggaggtgggtggagga

SEQ ID NO: 128831 - DNA, 20 bp, Artificial Sequence
  Description of Artificial Sequence: Synthetic oligonucleotide
  Target: LAMA2; (+) strand; PAM type: NRG; PAM sequence: AAG
actgttttttcaatgtactg

SEQ ID NO: 128832 - DNA, 20 bp, Artificial Sequence
  Description of Artificial Sequence: Synthetic oligonucleotide
  Target: LAMA2; (+) strand; PAM type: NRG; PAM sequence: AGG
ctgttttttcaatgtactga

SEQ ID NO: 128833 - DNA, 20 bp, Artificial Sequence
  Description of Artificial Sequence: Synthetic oligonucleotide
  Target: LAMA2; (+) strand; PAM type: NRG; PAM sequence: CAG
tcaatgtactgaaggcattt

SEQ ID NO: 128834 - DNA, 20 bp, Artificial Sequence
  Description of Artificial Sequence: Synthetic oligonucleotide
  Target: LAMA2; (+) strand; PAM type: NRG; PAM sequence: CAG
ctgaaggcatttcagattac

SEQ ID NO: 128835 - DNA, 20 bp, Artificial Sequence
  Description of Artificial Sequence: Synthetic oligonucleotide
  Target: LAMA2; (+) strand; PAM type: NRG; PAM sequence: AAG
aaggcatttcagattaccag

SEQ ID NO: 128836 - DNA, 20 bp, Artificial Sequence
  Description of Artificial Sequence: Synthetic oligonucleotide
  Target: LAMA2; (+) strand; PAM type: NRG; PAM sequence: CAG
tcagattaccagaagaatca

SEQ ID NO: 128837 - DNA, 20 bp, Artificial Sequence
  Description of Artificial Sequence: Synthetic oligonucleotide
  Target: LAMA2; (+) strand; PAM type: NRG; PAM sequence: GAG
agattaccagaagaatcaca

SEQ ID NO: 128838 - DNA, 20 bp, Artificial Sequence
  Description of Artificial Sequence: Synthetic oligonucleotide
  Target: LAMA2; (+) strand; PAM type: NRG; PAM sequence: AAG
accagaagaatcacagagac

SEQ ID NO: 128839 - DNA, 20 bp, Artificial Sequence
  Description of Artificial Sequence: Synthetic oligonucleotide
  Target: LAMA2; (+) strand; PAM type: NRG; PAM sequence: AGG
ccagaagaatcacagagaca

SEQ ID NO: 128840 - DNA, 20 bp, Artificial Sequence
  Description of Artificial Sequence: Synthetic oligonucleotide
  Target: LAMA2; (+) strand; PAM type: NRG; PAM sequence: GGG
cagaagaatcacagagacaa

SEQ ID NO: 128841 - DNA, 20 bp, Artificial Sequence
  Description of Artificial Sequence: Synthetic oligonucleotide
  Target: LAMA2; (+) strand; PAM type: NRG; PAM sequence: TAG
cacagagacaagggaccatt

SEQ ID NO: 128842 - DNA, 20 bp, Artificial Sequence
  Description of Artificial Sequence: Synthetic oligonucleotide
  Target: LAMA2; (+) strand; PAM type: NRG; PAM sequence: TAG
gacaagggaccatttagcca

SEQ ID NO: 128843 - DNA, 20 bp, Artificial Sequence
  Description of Artificial Sequence: Synthetic oligonucleotide
  Target: LAMA2; (+) strand; PAM type: NRG; PAM sequence: AGG
acaagggaccatttagccat

SEQ ID NO: 128844 - DNA, 20 bp, Artificial Sequence
  Description of Artificial Sequence: Synthetic oligonucleotide
  Target: LAMA2; (+) strand; PAM type: NRG; PAM sequence: GGG
caagggaccatttagccata

SEQ ID NO: 128845 - DNA, 20 bp, Artificial Sequence
  Description of Artificial Sequence: Synthetic oligonucleotide
  Target: LAMA2; (+) strand; PAM type: NRG; PAM sequence: AAG
actttacctaccccacaaat

SEQ ID NO: 128846 - DNA, 20 bp, Artificial Sequence
  Description of Artificial Sequence: Synthetic oligonucleotide
  Target: LAMA2; (+) strand; PAM type: NRG; PAM sequence: TGG
accccacaaataagtaacta

SEQ ID NO: 128847 - DNA, 20 bp, Artificial Sequence
  Description of Artificial Sequence: Synthetic oligonucleotide
  Target: LAMA2; (+) strand; PAM type: NRG; PAM sequence: AAG
taactatggcaactcactga

SEQ ID NO: 128848 - DNA, 20 bp, Artificial Sequence
  Description of Artificial Sequence: Synthetic oligonucleotide
  Target: LAMA2; (+) strand; PAM type: NRG; PAM sequence: TAG
ggcaactcactgaaagtgct

SEQ ID NO: 128849 - DNA, 20 bp, Artificial Sequence
  Description of Artificial Sequence: Synthetic oligonucleotide
  Target: LAMA2; (+) strand; PAM type: NRG; PAM sequence: TGG
ctgaaagtgcttagctacca

SEQ ID NO: 128850 - DNA, 20 bp, Artificial Sequence
  Description of Artificial Sequence: Synthetic oligonucleotide
  Target: LAMA2; (+) strand; PAM type: NRG; PAM sequence: GGG
tgaaagtgcttagctaccat

SEQ ID NO: 128851 - DNA, 20 bp, Artificial Sequence
  Description of Artificial Sequence: Synthetic oligonucleotide
  Target: LAMA2; (+) strand; PAM type: NRG; PAM sequence: GAG
aaagtgcttagctaccatgg

SEQ ID NO: 128852 - DNA, 20 bp, Artificial Sequence
  Description of Artificial Sequence: Synthetic oligonucleotide
  Target: LAMA2; (+) strand; PAM type: NRG; PAM sequence: TGG
gtgcttagctaccatgggag

SEQ ID NO: 128853 - DNA, 20 bp, Artificial Sequence
  Description of Artificial Sequence: Synthetic oligonucleotide
  Target: LAMA2; (+) strand; PAM type: NRG; PAM sequence: TGG
ttagctaccatgggagtgga

SEQ ID NO: 128854 - DNA, 20 bp, Artificial Sequence
  Description of Artificial Sequence: Synthetic oligonucleotide
  Target: LAMA2; (+) strand; PAM type: NRG; PAM sequence: GAG
agctaccatgggagtggatg

SEQ ID NO: 128855 - DNA, 20 bp, Artificial Sequence
  Description of Artificial Sequence: Synthetic oligonucleotide
  Target: LAMA2; (+) strand; PAM type: NRG; PAM sequence: TGG
tggatggagttcgtgctttg

SEQ ID NO: 128856 - DNA, 20 bp, Artificial Sequence
  Description of Artificial Sequence: Synthetic oligonucleotide
  Target: LAMA2; (+) strand; PAM type: NRG; PAM sequence: GGG
ggatggagttcgtgctttgt

SEQ ID NO: 128857 - DNA, 20 bp, Artificial Sequence
  Description of Artificial Sequence: Synthetic oligonucleotide
  Target: LAMA2; (+) strand; PAM type: NRG; PAM sequence: GGG
gatggagttcgtgctttgtg

SEQ ID NO: 128858 - DNA, 20 bp, Artificial Sequence
  Description of Artificial Sequence: Synthetic oligonucleotide
  Target: LAMA2; (+) strand; PAM type: NRG; PAM sequence: TGG
gctttgtggggacaatgctg

SEQ ID NO: 128859 - DNA, 20 bp, Artificial Sequence
  Description of Artificial Sequence: Synthetic oligonucleotide
  Target: LAMA2; (+) strand; PAM type: NRG; PAM sequence: GGG
ctttgtggggacaatgctgt

SEQ ID NO: 128860 - DNA, 20 bp, Artificial Sequence
  Description of Artificial Sequence: Synthetic oligonucleotide
  Target: LAMA2; (+) strand; PAM type: NRG; PAM sequence: AAG
acctctatgcccccatccat

SEQ ID NO: 128861 - DNA, 20 bp, Artificial Sequence
  Description of Artificial Sequence: Synthetic oligonucleotide
  Target: LAMA2; (+) strand; PAM type: NRG; PAM sequence: AGG
cctctatgcccccatccata

SEQ ID NO: 128862 - DNA, 20 bp, Artificial Sequence
  Description of Artificial Sequence: Synthetic oligonucleotide
  Target: LAMA2; (+) strand; PAM type: NRG; PAM sequence: GGG
ctctatgcccccatccataa

SEQ ID NO: 128863 - DNA, 20 bp, Artificial Sequence
  Description of Artificial Sequence: Synthetic oligonucleotide
  Target: LAMA2; (+) strand; PAM type: NRG; PAM sequence: TGG
cccccatccataagggaccc

SEQ ID NO: 128864 - DNA, 20 bp, Artificial Sequence
  Description of Artificial Sequence: Synthetic oligonucleotide
  Target: LAMA2; (+) strand; PAM type: NRG; PAM sequence: GGG
ccccatccataagggaccct

SEQ ID NO: 128865 - DNA, 20 bp, Artificial Sequence
  Description of Artificial Sequence: Synthetic oligonucleotide
  Target: LAMA2; (+) strand; PAM type: NRG; PAM sequence: TAG
ggaccctgggaattgccttc

SEQ ID NO: 128866 - DNA, 20 bp, Artificial Sequence
  Description of Artificial Sequence: Synthetic oligonucleotide
  Target: LAMA2; (+) strand; PAM type: NRG; PAM sequence: CAG
ccctgggaattgccttctag

SEQ ID NO: 128867 - DNA, 20 bp, Artificial Sequence
  Description of Artificial Sequence: Synthetic oligonucleotide
  Target: LAMA2; (+) strand; PAM type: NRG; PAM sequence: GAG
ctgggaattgccttctagca

SEQ ID NO: 128868 - DNA, 20 bp, Artificial Sequence
  Description of Artificial Sequence: Synthetic oligonucleotide
  Target: LAMA2; (+) strand; PAM type: NRG; PAM sequence: GAG
gggaattgccttctagcaga

SEQ ID NO: 128869 - DNA, 20 bp, Artificial Sequence
  Description of Artificial Sequence: Synthetic oligonucleotide
  Target: LAMA2; (+) strand; PAM type: NRG; PAM sequence: AGG
ggaattgccttctagcagag

SEQ ID NO: 128870 - DNA, 20 bp, Artificial Sequence
  Description of Artificial Sequence: Synthetic oligonucleotide
  Target: LAMA2; (+) strand; PAM type: NRG; PAM sequence: AAG
ggccaactcacatttcaaat

SEQ ID NO: 128871 - DNA, 20 bp, Artificial Sequence
  Description of Artificial Sequence: Synthetic oligonucleotide
  Target: LAMA2; (+) strand; PAM type: NRG; PAM sequence: AAG
ccctcctcaactgcttttct

SEQ ID NO: 128872 - DNA, 20 bp, Artificial Sequence
  Description of Artificial Sequence: Synthetic oligonucleotide
  Target: LAMA2; (+) strand; PAM type: NRG; PAM sequence: TAG
tttgcacattaacactgacc

SEQ ID NO: 128873 - DNA, 20 bp, Artificial Sequence
  Description of Artificial Sequence: Synthetic oligonucleotide
  Target: LAMA2; (+) strand; PAM type: NRG; PAM sequence: AAG
tgacctagtgcaccatttaa

SEQ ID NO: 128874 - DNA, 20 bp, Artificial Sequence
  Description of Artificial Sequence: Synthetic oligonucleotide
  Target: LAMA2; (+) strand; PAM type: NRG; PAM sequence: CAG
aaagtcctaaatatatcaca

SEQ ID NO: 128875 - DNA, 20 bp, Artificial Sequence
  Description of Artificial Sequence: Synthetic oligonucleotide
  Target: LAMA2; (+) strand; PAM type: NRG; PAM sequence: CAG
taaatatatcacacagtcgc

SEQ ID NO: 128876 - DNA, 20 bp, Artificial Sequence
  Description of Artificial Sequence: Synthetic oligonucleotide
  Target: LAMA2; (+) strand; PAM type: NRG; PAM sequence: AAG
acacagtcgccagcccaatc

SEQ ID NO: 128877 - DNA, 20 bp, Artificial Sequence
  Description of Artificial Sequence: Synthetic oligonucleotide
  Target: LAMA2; (+) strand; PAM type: NRG; PAM sequence: AGG
cacagtcgccagcccaatca

SEQ ID NO: 128878 - DNA, 20 bp, Artificial Sequence
  Description of Artificial Sequence: Synthetic oligonucleotide
  Target: LAMA2; (+) strand; PAM type: NRG; PAM sequence: GAG
gtcgccagcccaatcaaggt

SEQ ID NO: 128879 - DNA, 20 bp, Artificial Sequence
  Description of Artificial Sequence: Synthetic oligonucleotide
  Target: LAMA2; (+) strand; PAM type: NRG; PAM sequence: TGG
gccagcccaatcaaggtgag

SEQ ID NO: 128880 - DNA, 20 bp, Artificial Sequence
  Description of Artificial Sequence: Synthetic oligonucleotide
  Target: LAMA2; (+) strand; PAM type: NRG; PAM sequence: CAG
gcccaatcaaggtgagtggt

SEQ ID NO: 128881 - DNA, 20 bp, Artificial Sequence
  Description of Artificial Sequence: Synthetic oligonucleotide
  Target: LAMA2; (+) strand; PAM type: NRG; PAM sequence: CAG
caaggtgagtggtcagacac

SEQ ID NO: 128882 - DNA, 20 bp, Artificial Sequence
  Description of Artificial Sequence: Synthetic oligonucleotide
  Target: LAMA2; (+) strand; PAM type: NRG; PAM sequence: CAG
agacaccagcatgctgtgca

SEQ ID NO: 128883 - DNA, 20 bp, Artificial Sequence
  Description of Artificial Sequence: Synthetic oligonucleotide
  Target: LAMA2; (+) strand; PAM type: NRG; PAM sequence: TAG
gcatgctgtgcacagtatgc

SEQ ID NO: 128884 - DNA, 20 bp, Artificial Sequence
  Description of Artificial Sequence: Synthetic oligonucleotide
  Target: LAMA2; (+) strand; PAM type: NRG; PAM sequence: TGG
gctgtgcacagtatgctagt

SEQ ID NO: 128885 - DNA, 20 bp, Artificial Sequence
  Description of Artificial Sequence: Synthetic oligonucleotide
  Target: LAMA2; (+) strand; PAM type: NRG; PAM sequence: TAG
cacagtatgctagttggcct

SEQ ID NO: 128886 - DNA, 20 bp, Artificial Sequence
  Description of Artificial Sequence: Synthetic oligonucleotide
  Target: LAMA2; (+) strand; PAM type: NRG; PAM sequence: GAG
cagtatgctagttggcctta

SEQ ID NO: 128887 - DNA, 20 bp, Artificial Sequence
  Description of Artificial Sequence: Synthetic oligonucleotide
  Target: LAMA2; (+) strand; PAM type: NRG; PAM sequence: CAG
tagttggccttagagtaata

SEQ ID NO: 128888 - DNA, 20 bp, Artificial Sequence
  Description of Artificial Sequence: Synthetic oligonucleotide
  Target: LAMA2; (+) strand; PAM type: NRG; PAM sequence: AGG
agttggccttagagtaatac

SEQ ID NO: 128889 - DNA, 20 bp, Artificial Sequence
  Description of Artificial Sequence: Synthetic oligonucleotide
  Target: LAMA2; (+) strand; PAM type: NRG; PAM sequence: GGG
gttggccttagagtaataca

SEQ ID NO: 128890 - DNA, 20 bp, Artificial Sequence
  Description of Artificial Sequence: Synthetic oligonucleotide
  Target: LAMA2; (+) strand; PAM type: NRG; PAM sequence: CAG
cagggtacaccatttatgtc

SEQ ID NO: 128891 - DNA, 20 bp, Artificial Sequence
  Description of Artificial Sequence: Synthetic oligonucleotide
  Target: LAMA2; (+) strand; PAM type: NRG; PAM sequence: CAG
accatttatgtccagttaac

SEQ ID NO: 128892 - DNA, 20 bp, Artificial Sequence
  Description of Artificial Sequence: Synthetic oligonucleotide
  Target: LAMA2; (+) strand; PAM type: NRG; PAM sequence: AGG
ccatttatgtccagttaacc

SEQ ID NO: 128893 - DNA, 20 bp, Artificial Sequence
  Description of Artificial Sequence: Synthetic oligonucleotide
  Target: LAMA2; (+) strand; PAM type: NRG; PAM sequence: TAG
cagttaaccaggtgaccctc

SEQ ID NO: 128894 - DNA, 20 bp, Artificial Sequence
  Description of Artificial Sequence: Synthetic oligonucleotide
  Target: LAMA2; (+) strand; PAM type: NRG; PAM sequence: AAG
gaccctctagttgctttatt

SEQ ID NO: 128895 - DNA, 20 bp, Artificial Sequence
  Description of Artificial Sequence: Synthetic oligonucleotide
  Target: LAMA2; (+) strand; PAM type: NRG; PAM sequence: CAG
tctagttgctttattaagca

SEQ ID NO: 128896 - DNA, 20 bp, Artificial Sequence
  Description of Artificial Sequence: Synthetic oligonucleotide
  Target: LAMA2; (+) strand; PAM type: NRG; PAM sequence: AGG
ctagttgctttattaagcac

SEQ ID NO: 128897 - DNA, 20 bp, Artificial Sequence
  Description of Artificial Sequence: Synthetic oligonucleotide
  Target: LAMA2; (+) strand; PAM type: NRG; PAM sequence: CAG
gcacaggcttgactgtcaaa

SEQ ID NO: 128898 - DNA, 20 bp, Artificial Sequence
  Description of Artificial Sequence: Synthetic oligonucleotide
  Target: LAMA2; (+) strand; PAM type: NRG; PAM sequence: AGG
cacaggcttgactgtcaaac

SEQ ID NO: 128899 - DNA, 20 bp, Artificial Sequence
  Description of Artificial Sequence: Synthetic oligonucleotide
  Target: LAMA2; (+) strand; PAM type: NRG; PAM sequence: AAG
ttgactgtcaaacaggtcac

SEQ ID NO: 128900 - DNA, 20 bp, Artificial Sequence
  Description of Artificial Sequence: Synthetic oligonucleotide
  Target: LAMA2; (+) strand; PAM type: NRG; PAM sequence: AGG
tgactgtcaaacaggtcaca

SEQ ID NO: 128901 - DNA, 20 bp, Artificial Sequence
  Description of Artificial Sequence: Synthetic oligonucleotide
  Target: LAMA2; (+) strand; PAM type: NRG; PAM sequence: GAG
actgtcaaacaggtcacaag

SEQ ID NO: 128902 - DNA, 20 bp, Artificial Sequence
  Description of Artificial Sequence: Synthetic oligonucleotide
  Target: LAMA2; (+) strand; PAM type: NRG; PAM sequence: AGG
ctgtcaaacaggtcacaagg

SEQ ID NO: 128903 - DNA, 20 bp, Artificial Sequence
  Description of Artificial Sequence: Synthetic oligonucleotide
  Target: LAMA2; (+) strand; PAM type: NRG; PAM sequence: AAG
caggtcacaaggaggacaaa

SEQ ID NO: 128904 - DNA, 20 bp, Artificial Sequence
  Description of Artificial Sequence: Synthetic oligonucleotide
  Target: LAMA2; (+) strand; PAM type: NRG; PAM sequence: AAG
gtgtccttgcatcgtatgaa

SEQ ID NO: 128905 - DNA, 20 bp, Artificial Sequence
  Description of Artificial Sequence: Synthetic oligonucleotide
  Target: LAMA2; (+) strand; PAM type: NRG; PAM sequence: GAG
gtccttgcatcgtatgaaaa

SEQ ID NO: 128906 - DNA, 20 bp, Artificial Sequence
  Description of Artificial Sequence: Synthetic oligonucleotide
  Target: LAMA2; (+) strand; PAM type: NRG; PAM sequence: CAG
aaaagagttgcttgaaatca

SEQ ID NO: 128907 - DNA, 20 bp, Artificial Sequence
  Description of Artificial Sequence: Synthetic oligonucleotide
  Target: LAMA2; (+) strand; PAM type: NRG; PAM sequence: AAG
taaaatccaatttccacctg

SEQ ID NO: 128908 - DNA, 20 bp, Artificial Sequence
  Description of Artificial Sequence: Synthetic oligonucleotide
  Target: LAMA2; (+) strand; PAM type: NRG; PAM sequence: GAG
gacatgcctccatgactcgt

SEQ ID NO: 128909 - DNA, 20 bp, Artificial Sequence
  Description of Artificial Sequence: Synthetic oligonucleotide
  Target: LAMA2; (+) strand; PAM type: NRG; PAM sequence: TAG
cgtgagaaaaatcaattatt

SEQ ID NO: 128910 - DNA, 20 bp, Artificial Sequence
  Description of Artificial Sequence: Synthetic oligonucleotide
  Target: LAMA2; (+) strand; PAM type: NRG; PAM sequence: AGG
gtgagaaaaatcaattattt

SEQ ID NO: 128911 - DNA, 20 bp, Artificial Sequence
  Description of Artificial Sequence: Synthetic oligonucleotide
  Target: LAMA2; (+) strand; PAM type: NRG; PAM sequence: TAG
aaatcaattatttaggtaaa

SEQ ID NO: 128912 - DNA, 20 bp, Artificial Sequence
  Description of Artificial Sequence: Synthetic oligonucleotide
  Target: LAMA2; (+) strand; PAM type: NRG; PAM sequence: AGG
aatcaattatttaggtaaat

SEQ ID NO: 128913 - DNA, 20 bp, Artificial Sequence
  Description of Artificial Sequence: Synthetic oligonucleotide
  Target: LAMA2; (+) strand; PAM type: NRG; PAM sequence: CAG
ggatctgcaactcaaacact

SEQ ID NO: 128914 - DNA, 20 bp, Artificial Sequence
  Description of Artificial Sequence: Synthetic oligonucleotide
  Target: LAMA2; (+) strand; PAM type: NRG; PAM sequence: TAG
actcaaacactcagacctat

SEQ ID NO: 128915 - DNA, 20 bp, Artificial Sequence
  Description of Artificial Sequence: Synthetic oligonucleotide
  Target: LAMA2; (+) strand; PAM type: NRG; PAM sequence: GAG
tcaaacactcagacctatta

SEQ ID NO: 128916 - DNA, 20 bp, Artificial Sequence
  Description of Artificial Sequence: Synthetic oligonucleotide
  Target: LAMA2; (+) strand; PAM type: NRG; PAM sequence: TAG
ctcagacctattagagtatc

SEQ ID NO: 128917 - DNA, 20 bp, Artificial Sequence
  Description of Artificial Sequence: Synthetic oligonucleotide
  Target: LAMA2; (+) strand; PAM type: NRG; PAM sequence: CAG
agacctattagagtatctag

SEQ ID NO: 128918 - DNA, 20 bp, Artificial Sequence
  Description of Artificial Sequence: Synthetic oligonucleotide
  Target: LAMA2; (+) strand; PAM type: NRG; PAM sequence: CAG
tagagtatctagcagcatgc

SEQ ID NO: 128919 - DNA, 20 bp, Artificial Sequence
  Description of Artificial Sequence: Synthetic oligonucleotide
  Target: LAMA2; (+) strand; PAM type: NRG; PAM sequence: AGG
agagtatctagcagcatgcc

SEQ ID NO: 128920 - DNA, 20 bp, Artificial Sequence
  Description of Artificial Sequence: Synthetic oligonucleotide
  Target: LAMA2; (+) strand; PAM type: NRG; PAM sequence: GAG
agtatctagcagcatgccag

SEQ ID NO: 128921 - DNA, 20 bp, Artificial Sequence
  Description of Artificial Sequence: Synthetic oligonucleotide
  Target: LAMA2; (+) strand; PAM type: NRG; PAM sequence: TAG
tctagcagcatgccaggaga

SEQ ID NO: 128922 - DNA, 20 bp, Artificial Sequence
  Description of Artificial Sequence: Synthetic oligonucleotide
  Target: LAMA2; (+) strand; PAM type: NRG; PAM sequence: GAG
agcatgccaggagatagact

SEQ ID NO: 128923 - DNA, 20 bp, Artificial Sequence
  Description of Artificial Sequence: Synthetic oligonucleotide
  Target: LAMA2; (+) strand; PAM type: NRG; PAM sequence: AAG
caggagatagactgagctgc

SEQ ID NO: 128924 - DNA, 20 bp, Artificial Sequence
  Description of Artificial Sequence: Synthetic oligonucleotide
  Target: LAMA2; (+) strand; PAM type: NRG; PAM sequence: TGG
actgagctgcaagataaata

SEQ ID NO: 128925 - DNA, 20 bp, Artificial Sequence
  Description of Artificial Sequence: Synthetic oligonucleotide
  Target: LAMA2; (+) strand; PAM type: NRG; PAM sequence: TGG
ataaatatggaaccatcttg

SEQ ID NO: 128926 - DNA, 20 bp, Artificial Sequence
  Description of Artificial Sequence: Synthetic oligonucleotide
  Target: LAMA2; (+) strand; PAM type: NRG; PAM sequence: CAG
atcttgtggaatataaattt

SEQ ID NO: 128927 - DNA, 20 bp, Artificial Sequence
  Description of Artificial Sequence: Synthetic oligonucleotide
  Target: LAMA2; (+) strand; PAM type: NRG; PAM sequence: AAG
tggaatataaatttcagtta

SEQ ID NO: 128928 - DNA, 20 bp, Artificial Sequence
  Description of Artificial Sequence: Synthetic oligonucleotide
  Target: LAMA2; (+) strand; PAM type: NRG; PAM sequence: AGG
ggaatataaatttcagttaa

SEQ ID NO: 128929 - DNA, 20 bp, Artificial Sequence
  Description of Artificial Sequence: Synthetic oligonucleotide
  Target: LAMA2; (+) strand; PAM type: NRG; PAM sequence: AAG
aaatttcagttaaaggtttt

SEQ ID NO: 128930 - DNA, 20 bp, Artificial Sequence
  Description of Artificial Sequence: Synthetic oligonucleotide
  Target: LAMA2; (+) strand; PAM type: NRG; PAM sequence: AGG
aatttcagttaaaggtttta

SEQ ID NO: 128931 - DNA, 20 bp, Artificial Sequence
  Description of Artificial Sequence: Synthetic oligonucleotide
  Target: LAMA2; (+) strand; PAM type: NRG; PAM sequence: GAG
tttcagttaaaggttttaag

SEQ ID NO: 128932 - DNA, 20 bp, Artificial Sequence
  Description of Artificial Sequence: Synthetic oligonucleotide
  Target: LAMA2; (+) strand; PAM type: NRG; PAM sequence: AAG
ggttttaaggagtatataat

SEQ ID NO: 128933 - DNA, 20 bp, Artificial Sequence
  Description of Artificial Sequence: Synthetic oligonucleotide
  Target: LAMA2; (+) strand; PAM type: NRG; PAM sequence: AGG
gttttaaggagtatataata

SEQ ID NO: 128934 - DNA, 20 bp, Artificial Sequence
  Description of Artificial Sequence: Synthetic oligonucleotide
  Target: LAMA2; (+) strand; PAM type: NRG; PAM sequence: AAG
taaggagtatataataagga

SEQ ID NO: 128935 - DNA, 20 bp, Artificial Sequence
  Description of Artificial Sequence: Synthetic oligonucleotide
  Target: LAMA2; (+) strand; PAM type: NRG; PAM sequence: TGG
aaatgtattcaattatatta

SEQ ID NO: 128936 - DNA, 20 bp, Artificial Sequence
  Description of Artificial Sequence: Synthetic oligonucleotide
  Target: LAMA2; (+) strand; PAM type: NRG; PAM sequence: GGG
aatgtattcaattatattat

SEQ ID NO: 128937 - DNA, 20 bp, Artificial Sequence
  Description of Artificial Sequence: Synthetic oligonucleotide
  Target: LAMA2; (+) strand; PAM type: NRG; PAM sequence: TGG
tattcaattatattatggga

SEQ ID NO: 128938 - DNA, 20 bp, Artificial Sequence
  Description of Artificial Sequence: Synthetic oligonucleotide
  Target: LAMA2; (+) strand; PAM type: NRG; PAM sequence: AAG
atattatgggatggaactga

SEQ ID NO: 128939 - DNA, 20 bp, Artificial Sequence
  Description of Artificial Sequence: Synthetic oligonucleotide
  Target: LAMA2; (+) strand; PAM type: NRG; PAM sequence: CAG
tggaactgaaagttcacatg

SEQ ID NO: 128940 - DNA, 20 bp, Artificial Sequence
  Description of Artificial Sequence: Synthetic oligonucleotide
  Target: LAMA2; (+) strand; PAM type: NRG; PAM sequence: CAG
gaaagttcacatgcagtttt

SEQ ID NO: 128941 - DNA, 20 bp, Artificial Sequence
  Description of Artificial Sequence: Synthetic oligonucleotide
  Target: LAMA2; (+) strand; PAM type: NRG; PAM sequence: AAG
gttttcagatgtgtccccca

SEQ ID NO: 128942 - DNA, 20 bp, Artificial Sequence
  Description of Artificial Sequence: Synthetic oligonucleotide
  Target: LAMA2; (+) strand; PAM type: NRG; PAM sequence: TGG
cccaaagttaatatatttcc

SEQ ID NO: 128943 - DNA, 20 bp, Artificial Sequence
  Description of Artificial Sequence: Synthetic oligonucleotide
  Target: LAMA2; (+) strand; PAM type: NRG; PAM sequence: GGG
ccaaagttaatatatttcct

SEQ ID NO: 128944 - DNA, 20 bp, Artificial Sequence
  Description of Artificial Sequence: Synthetic oligonucleotide
  Target: LAMA2; (+) strand; PAM type: NRG; PAM sequence: TAG
cattcacactcttctgccaa

SEQ ID NO: 128945 - DNA, 20 bp, Artificial Sequence
  Description of Artificial Sequence: Synthetic oligonucleotide
  Target: LAMA2; (+) strand; PAM type: NRG; PAM sequence: TGG
tgccaatagtattaatgctt

SEQ ID NO: 128946 - DNA, 20 bp, Artificial Sequence
  Description of Artificial Sequence: Synthetic oligonucleotide
  Target: LAMA2; (+) strand; PAM type: NRG; PAM sequence: GGG
gccaatagtattaatgcttt

SEQ ID NO: 128947 - DNA, 20 bp, Artificial Sequence
  Description of Artificial Sequence: Synthetic oligonucleotide
  Target: LAMA2; (+) strand; PAM type: NRG; PAM sequence: GAG
taatgctttgggaaatgttt

SEQ ID NO: 128948 - DNA, 20 bp, Artificial Sequence
  Description of Artificial Sequence: Synthetic oligonucleotide
  Target: LAMA2; (+) strand; PAM type: NRG; PAM sequence: AAG
tgctttgggaaatgtttgag

SEQ ID NO: 128949 - DNA, 20 bp, Artificial Sequence
  Description of Artificial Sequence: Synthetic oligonucleotide
  Target: LAMA2; (+) strand; PAM type: NRG; PAM sequence: CAG
atgtttgagaagtgttgttc

SEQ ID NO: 128950 - DNA, 20 bp, Artificial Sequence
  Description of Artificial Sequence: Synthetic oligonucleotide
  Target: LAMA2; (+) strand; PAM type: NRG; PAM sequence: TGG
tttgagaagtgttgttccag

SEQ ID NO: 128951 - DNA, 20 bp, Artificial Sequence
  Description of Artificial Sequence: Synthetic oligonucleotide
  Target: LAMA2; (+) strand; PAM type: NRG; PAM sequence: GAG
agtgttgttccagtggaaat

SEQ ID NO: 128952 - DNA, 20 bp, Artificial Sequence
  Description of Artificial Sequence: Synthetic oligonucleotide
  Target: LAMA2; (+) strand; PAM type: NRG; PAM sequence: TGG
ttccagtggaaatgagcctg

SEQ ID NO: 128953 - DNA, 20 bp, Artificial Sequence
  Description of Artificial Sequence: Synthetic oligonucleotide
  Target: LAMA2; (+) strand; PAM type: NRG; PAM sequence: GGG
tccagtggaaatgagcctgt

SEQ ID NO: 128954 - DNA, 20 bp, Artificial Sequence
  Description of Artificial Sequence: Synthetic oligonucleotide
  Target: LAMA2; (+) strand; PAM type: NRG; PAM sequence: CAG
cattcatttattccttcata

SEQ ID NO: 128955 - DNA, 20 bp, Artificial Sequence
  Description of Artificial Sequence: Synthetic oligonucleotide
  Target: LAMA2; (+) strand; PAM type: NRG; PAM sequence: TAG
ttattccttcatacagtata

SEQ ID NO: 128956 - DNA, 20 bp, Artificial Sequence
  Description of Artificial Sequence: Synthetic oligonucleotide
  Target: LAMA2; (+) strand; PAM type: NRG; PAM sequence: AAG
tcatacagtatatagctttc

SEQ ID NO: 128957 - DNA, 20 bp, Artificial Sequence
  Description of Artificial Sequence: Synthetic oligonucleotide
  Target: LAMA2; (+) strand; PAM type: NRG; PAM sequence: TGG
tagctttcaagccactttta

SEQ ID NO: 128958 - DNA, 20 bp, Artificial Sequence
  Description of Artificial Sequence: Synthetic oligonucleotide
  Target: LAMA2; (+) strand; PAM type: NRG; PAM sequence: TAG
gaatatcaaaaccaataaaa

SEQ ID NO: 128959 - DNA, 20 bp, Artificial Sequence
  Description of Artificial Sequence: Synthetic oligonucleotide
  Target: LAMA2; (+) strand; PAM type: NRG; PAM sequence: GAG
gctttgtgacacaatttaat

SEQ ID NO: 128960 - DNA, 20 bp, Artificial Sequence
  Description of Artificial Sequence: Synthetic oligonucleotide
  Target: LAMA2; (+) strand; PAM type: NRG; PAM sequence: GAG
acaatttttttttttttttt

SEQ ID NO: 128961 - DNA, 20 bp, Artificial Sequence
  Description of Artificial Sequence: Synthetic oligonucleotide
  Target: LAMA2; (+) strand; PAM type: NRG; PAM sequence: AAG
attttttttttttttttgag

SEQ ID NO: 128962 - DNA, 20 bp, Artificial Sequence
  Description of Artificial Sequence: Synthetic oligonucleotide
  Target: LAMA2; (+) strand; PAM type: NRG; PAM sequence: AGG
ttttttttttttttttgaga

SEQ ID NO: 128963 - DNA, 20 bp, Artificial Sequence
  Description of Artificial Sequence: Synthetic oligonucleotide
  Target: LAMA2; (+) strand; PAM type: NRG; PAM sequence: GAG
ttttttttttttttgagaag

SEQ ID NO: 128964 - DNA, 20 bp, Artificial Sequence
  Description of Artificial Sequence: Synthetic oligonucleotide
  Target: LAMA2; (+) strand; PAM type: NRG; PAM sequence: CAG
aggagtctcactctgttgcc

SEQ ID NO: 128965 - DNA, 20 bp, Artificial Sequence
  Description of Artificial Sequence: Synthetic oligonucleotide
  Target: LAMA2; (+) strand; PAM type: NRG; PAM sequence: AGG
ggagtctcactctgttgccc

SEQ ID NO: 128966 - DNA, 20 bp, Artificial Sequence
  Description of Artificial Sequence: Synthetic oligonucleotide
  Target: LAMA2; (+) strand; PAM type: NRG; PAM sequence: TGG
tctcactctgttgcccaggc

SEQ ID NO: 128967 - DNA, 20 bp, Artificial Sequence
  Description of Artificial Sequence: Synthetic oligonucleotide
  Target: LAMA2; (+) strand; PAM type: NRG; PAM sequence: GAG
tcactctgttgcccaggctg

SEQ ID NO: 128968 - DNA, 20 bp, Artificial Sequence
  Description of Artificial Sequence: Synthetic oligonucleotide
  Target: LAMA2; (+) strand; PAM type: NRG; PAM sequence: CAG
ctgttgcccaggctggagtg

SEQ ID NO: 128969 - DNA, 20 bp, Artificial Sequence
  Description of Artificial Sequence: Synthetic oligonucleotide
  Target: LAMA2; (+) strand; PAM type: NRG; PAM sequence: TGG
ttgcccaggctggagtgcag

SEQ ID NO: 128970 - DNA, 20 bp, Artificial Sequence
  Description of Artificial Sequence: Synthetic oligonucleotide
  Target: LAMA2; (+) strand; PAM type: NRG; PAM sequence: TGG
ggagtgcagtggcacgatct

SEQ ID NO: 128971 - DNA, 20 bp, Artificial Sequence
  Description of Artificial Sequence: Synthetic oligonucleotide
  Target: LAMA2; (+) strand; PAM type: NRG; PAM sequence: AAG
gcacgatcttggttcactgc

SEQ ID NO: 128972 - DNA, 20 bp, Artificial Sequence
  Description of Artificial Sequence: Synthetic oligonucleotide
  Target: LAMA2; (+) strand; PAM type: NRG; PAM sequence: CGG
tcactgcaagctccgcctca

SEQ ID NO: 128973 - DNA, 20 bp, Artificial Sequence
  Description of Artificial Sequence: Synthetic oligonucleotide
  Target: LAMA2; (+) strand; PAM type: NRG; PAM sequence: GGG
cactgcaagctccgcctcac

SEQ ID NO: 128974 - DNA, 20 bp, Artificial Sequence
  Description of Artificial Sequence: Synthetic oligonucleotide
  Target: LAMA2; (+) strand; PAM type: NRG; PAM sequence: CGG
ttcacgccattctcctgcct

SEQ ID NO: 128975 - DNA, 20 bp, Artificial Sequence
  Description of Artificial Sequence: Synthetic oligonucleotide
  Target: LAMA2; (+) strand; PAM type: NRG; PAM sequence: CGG
cattctcctgcctcggcctc

SEQ ID NO: 128976 - DNA, 20 bp, Artificial Sequence
  Description of Artificial Sequence: Synthetic oligonucleotide
  Target: LAMA2; (+) strand; PAM type: NRG; PAM sequence: GAG
ttctcctgcctcggcctccg

SEQ ID NO: 128977 - DNA, 20 bp, Artificial Sequence
  Description of Artificial Sequence: Synthetic oligonucleotide
  Target: LAMA2; (+) strand; PAM type: NRG; PAM sequence: TAG
tcctgcctcggcctccggag

SEQ ID NO: 128978 - DNA, 20 bp, Artificial Sequence
  Description of Artificial Sequence: Synthetic oligonucleotide
  Target: LAMA2; (+) strand; PAM type: NRG; PAM sequence: TGG
gcctcggcctccggagtagc

SEQ ID NO: 128979 - DNA, 20 bp, Artificial Sequence
  Description of Artificial Sequence: Synthetic oligonucleotide
  Target: LAMA2; (+) strand; PAM type: NRG; PAM sequence: GGG
cctcggcctccggagtagct

SEQ ID NO: 128980 - DNA, 20 bp, Artificial Sequence
  Description of Artificial Sequence: Synthetic oligonucleotide
  Target: LAMA2; (+) strand; PAM type: NRG; PAM sequence: CAG
ctccggagtagctgggacta

SEQ ID NO: 128981 - DNA, 20 bp, Artificial Sequence
  Description of Artificial Sequence: Synthetic oligonucleotide
  Target: LAMA2; (+) strand; PAM type: NRG; PAM sequence: AGG
tccggagtagctgggactac

SEQ ID NO: 128982 - DNA, 20 bp, Artificial Sequence
  Description of Artificial Sequence: Synthetic oligonucleotide
  Target: LAMA2; (+) strand; PAM type: NRG; PAM sequence: CAG
caggcgcccaccaccatgcc

SEQ ID NO: 128983 - DNA, 20 bp, Artificial Sequence
  Description of Artificial Sequence: Synthetic oligonucleotide
  Target: LAMA2; (+) strand; PAM type: NRG; PAM sequence: TAG
agctaatttttttgtatttt

SEQ ID NO: 128984 - DNA, 20 bp, Artificial Sequence
  Description of Artificial Sequence: Synthetic oligonucleotide
  Target: LAMA2; (+) strand; PAM type: NRG; PAM sequence: TAG
taatttttttgtatttttag

SEQ ID NO: 128985 - DNA, 20 bp, Artificial Sequence
  Description of Artificial Sequence: Synthetic oligonucleotide
  Target: LAMA2; (+) strand; PAM type: NRG; PAM sequence: GAG
atttttttgtatttttagta

SEQ ID NO: 128986 - DNA, 20 bp, Artificial Sequence
  Description of Artificial Sequence: Synthetic oligonucleotide
  Target: LAMA2; (+) strand; PAM type: NRG; PAM sequence: GAG
tttgtatttttagtagagac

SEQ ID NO: 128987 - DNA, 20 bp, Artificial Sequence
  Description of Artificial Sequence: Synthetic oligonucleotide
  Target: LAMA2; (+) strand; PAM type: NRG; PAM sequence: AGG
ttgtatttttagtagagacg

SEQ ID NO: 128988 - DNA, 20 bp, Artificial Sequence
  Description of Artificial Sequence: Synthetic oligonucleotide
  Target: LAMA2; (+) strand; PAM type: NRG; PAM sequence: TAG
gagacgaggtttcactgtgt

SEQ ID NO: 128989 - DNA, 20 bp, Artificial Sequence
  Description of Artificial Sequence: Synthetic oligonucleotide
  Target: LAMA2; (+) strand; PAM type: NRG; PAM sequence: CAG
cgaggtttcactgtgttagc

SEQ ID NO: 128990 - DNA, 20 bp, Artificial Sequence
  Description of Artificial Sequence: Synthetic oligonucleotide
  Target: LAMA2; (+) strand; PAM type: NRG; PAM sequence: AGG
gaggtttcactgtgttagcc

SEQ ID NO: 128991 - DNA, 20 bp, Artificial Sequence
  Description of Artificial Sequence: Synthetic oligonucleotide
  Target: LAMA2; (+) strand; PAM type: NRG; PAM sequence: TGG
tttcactgtgttagccagga

SEQ ID NO: 128992 - DNA, 20 bp, Artificial Sequence
  Description of Artificial Sequence: Synthetic oligonucleotide
  Target: LAMA2; (+) strand; PAM type: NRG; PAM sequence: AAG
ccgcctgcctctgcctccca

SEQ ID NO: 128993 - DNA, 20 bp, Artificial Sequence
  Description of Artificial Sequence: Synthetic oligonucleotide
  Target: LAMA2; (+) strand; PAM type: NRG; PAM sequence: TGG
gcctctgcctcccaaagtgc

SEQ ID NO: 128994 - DNA, 20 bp, Artificial Sequence
  Description of Artificial Sequence: Synthetic oligonucleotide
  Target: LAMA2; (+) strand; PAM type: NRG; PAM sequence: GGG
cctctgcctcccaaagtgct

SEQ ID NO: 128995 - DNA, 20 bp, Artificial Sequence
  Description of Artificial Sequence: Synthetic oligonucleotide
  Target: LAMA2; (+) strand; PAM type: NRG; PAM sequence: CAG
ctcccaaagtgctgggatta

SEQ ID NO: 128996 - DNA, 20 bp, Artificial Sequence
  Description of Artificial Sequence: Synthetic oligonucleotide
  Target: LAMA2; (+) strand; PAM type: NRG; PAM sequence: AGG
tcccaaagtgctgggattac

SEQ ID NO: 128997 - DNA, 20 bp, Artificial Sequence
  Description of Artificial Sequence: Synthetic oligonucleotide
  Target: LAMA2; (+) strand; PAM type: NRG; PAM sequence: GAG
agtgctgggattacaggcct

SEQ ID NO: 128998 - DNA, 20 bp, Artificial Sequence
  Description of Artificial Sequence: Synthetic oligonucleotide
  Target: LAMA2; (+) strand; PAM type: NRG; PAM sequence: TGG
caggcctgagccatcgcgcc

SEQ ID NO: 128999 - DNA, 20 bp, Artificial Sequence
  Description of Artificial Sequence: Synthetic oligonucleotide
  Target: LAMA2; (+) strand; PAM type: NRG; PAM sequence: GAG
gagccatcgcgcctggccat

SEQ ID NO: 129000 - DNA, 20 bp, Artificial Sequence
  Description of Artificial Sequence: Synthetic oligonucleotide
  Target: LAMA2; (+) strand; PAM type: NRG; PAM sequence: TAG
atttttaaaataaaaataaa

SEQ ID NO: 129001 - DNA, 20 bp, Artificial Sequence
  Description of Artificial Sequence: Synthetic oligonucleotide
  Target: LAMA2; (+) strand; PAM type: NRG; PAM sequence: GAG
aaaaataaatagcaaatgat

SEQ ID NO: 129002 - DNA, 20 bp, Artificial Sequence
  Description of Artificial Sequence: Synthetic oligonucleotide
  Target: LAMA2; (+) strand; PAM type: NRG; PAM sequence: AAG
taaatagcaaatgatgagta

SEQ ID NO: 129003 - DNA, 20 bp, Artificial Sequence
  Description of Artificial Sequence: Synthetic oligonucleotide
  Target: LAMA2; (+) strand; PAM type: NRG; PAM sequence: TAG
taaatcaaacaaaatgctat

SEQ ID NO: 129004 - DNA, 20 bp, Artificial Sequence
  Description of Artificial Sequence: Synthetic oligonucleotide
  Target: LAMA2; (+) strand; PAM type: NRG; PAM sequence: AGG
aaatcaaacaaaatgctatt

SEQ ID NO: 129005 - DNA, 20 bp, Artificial Sequence
  Description of Artificial Sequence: Synthetic oligonucleotide
  Target: LAMA2; (+) strand; PAM type: NRG; PAM sequence: TGG
aaaatgctattaggaccata

SEQ ID NO: 129006 - DNA, 20 bp, Artificial Sequence
  Description of Artificial Sequence: Synthetic oligonucleotide
  Target: LAMA2; (+) strand; PAM type: NRG; PAM sequence: CAG
atgctattaggaccatatgg

SEQ ID NO: 129007 - DNA, 20 bp, Artificial Sequence
  Description of Artificial Sequence: Synthetic oligonucleotide
  Target: LAMA2; (+) strand; PAM type: NRG; PAM sequence: CAG
accatatggcagaaaaacaa

SEQ ID NO: 129008 - DNA, 20 bp, Artificial Sequence
  Description of Artificial Sequence: Synthetic oligonucleotide
  Target: LAMA2; (+) strand; PAM type: NRG; PAM sequence: TAG
gcagaaaaacaacagaatct

SEQ ID NO: 129009 - DNA, 20 bp, Artificial Sequence
  Description of Artificial Sequence: Synthetic oligonucleotide
  Target: LAMA2; (+) strand; PAM type: NRG; PAM sequence: AAG
gaaaaacaacagaatcttag

SEQ ID NO: 129010 - DNA, 20 bp, Artificial Sequence
  Description of Artificial Sequence: Synthetic oligonucleotide
  Target: LAMA2; (+) strand; PAM type: NRG; PAM sequence: GAG
aaaacaacagaatcttagaa

SEQ ID NO: 129011 - DNA, 20 bp, Artificial Sequence
  Description of Artificial Sequence: Synthetic oligonucleotide
  Target: LAMA2; (+) strand; PAM type: NRG; PAM sequence: TAG
caacagaatcttagaagagt

SEQ ID NO: 129012 - DNA, 20 bp, Artificial Sequence
  Description of Artificial Sequence: Synthetic oligonucleotide
  Target: LAMA2; (+) strand; PAM type: NRG; PAM sequence: AGG
aacagaatcttagaagagtt

SEQ ID NO: 129013 - DNA, 20 bp, Artificial Sequence
  Description of Artificial Sequence: Synthetic oligonucleotide
  Target: LAMA2; (+) strand; PAM type: NRG; PAM sequence: GGG
acagaatcttagaagagtta

SEQ ID NO: 129014 - DNA, 20 bp, Artificial Sequence
  Description of Artificial Sequence: Synthetic oligonucleotide
  Target: LAMA2; (+) strand; PAM type: NRG; PAM sequence: AAG
gaatcttagaagagttaggg

SEQ ID NO: 129015 - DNA, 20 bp, Artificial Sequence
  Description of Artificial Sequence: Synthetic oligonucleotide
  Target: LAMA2; (+) strand; PAM type: NRG; PAM sequence: AAG
gagttagggaagacttccca

SEQ ID NO: 129016 - DNA, 20 bp, Artificial Sequence
  Description of Artificial Sequence: Synthetic oligonucleotide
  Target: LAMA2; (+) strand; PAM type: NRG; PAM sequence: AGG
agttagggaagacttcccaa

SEQ ID NO: 129017 - DNA, 20 bp, Artificial Sequence
  Description of Artificial Sequence: Synthetic oligonucleotide
  Target: LAMA2; (+) strand; PAM type: NRG; PAM sequence: AAG
tagggaagacttcccaaagg

SEQ ID NO: 129018 - DNA, 20 bp, Artificial Sequence
  Description of Artificial Sequence: Synthetic oligonucleotide
  Target: LAMA2; (+) strand; PAM type: NRG; PAM sequence: TGG
ggaagacttcccaaaggaag

SEQ ID NO: 129019 - DNA, 20 bp, Artificial Sequence
  Description of Artificial Sequence: Synthetic oligonucleotide
  Target: LAMA2; (+) strand; PAM type: NRG; PAM sequence: GAG
aaggaagtggcaattaacct

SEQ ID NO: 129020 - DNA, 20 bp, Artificial Sequence
  Description of Artificial Sequence: Synthetic oligonucleotide
  Target: LAMA2; (+) strand; PAM type: NRG; PAM sequence: AAG
caattaacctgagattttta

SEQ ID NO: 129021 - DNA, 20 bp, Artificial Sequence
  Description of Artificial Sequence: Synthetic oligonucleotide
  Target: LAMA2; (+) strand; PAM type: NRG; PAM sequence: GAG
aacctgagatttttaaagat

SEQ ID NO: 129022 - DNA, 20 bp, Artificial Sequence
  Description of Artificial Sequence: Synthetic oligonucleotide
  Target: LAMA2; (+) strand; PAM type: NRG; PAM sequence: CAG
ctgagatttttaaagatgag

SEQ ID NO: 129023 - DNA, 20 bp, Artificial Sequence
  Description of Artificial Sequence: Synthetic oligonucleotide
  Target: LAMA2; (+) strand; PAM type: NRG; PAM sequence: AGG
tgagatttttaaagatgagc

SEQ ID NO: 129024 - DNA, 20 bp, Artificial Sequence
  Description of Artificial Sequence: Synthetic oligonucleotide
  Target: LAMA2; (+) strand; PAM type: NRG; PAM sequence: GAG
agatttttaaagatgagcag

SEQ ID NO: 129025 - DNA, 20 bp, Artificial Sequence
  Description of Artificial Sequence: Synthetic oligonucleotide
  Target: LAMA2; (+) strand; PAM type: NRG; PAM sequence: CAG
aaagatgagcaggagaattt

SEQ ID NO: 129026 - DNA, 20 bp, Artificial Sequence
  Description of Artificial Sequence: Synthetic oligonucleotide
  Target: LAMA2; (+) strand; PAM type: NRG; PAM sequence: AGG
aagatgagcaggagaatttc

SEQ ID NO: 129027 - DNA, 20 bp, Artificial Sequence
  Description of Artificial Sequence: Synthetic oligonucleotide
  Target: LAMA2; (+) strand; PAM type: NRG; PAM sequence: CAG
tttcaggcaaataaaacttg

SEQ ID NO: 129028 - DNA, 20 bp, Artificial Sequence
  Description of Artificial Sequence: Synthetic oligonucleotide
  Target: LAMA2; (+) strand; PAM type: NRG; PAM sequence: TGG
caggcaaataaaacttgcag

SEQ ID NO: 129029 - DNA, 20 bp, Artificial Sequence
  Description of Artificial Sequence: Synthetic oligonucleotide
  Target: LAMA2; (+) strand; PAM type: NRG; PAM sequence: GGG
aggcaaataaaacttgcagt

SEQ ID NO: 129030 - DNA, 20 bp, Artificial Sequence
  Description of Artificial Sequence: Synthetic oligonucleotide
  Target: LAMA2; (+) strand; PAM type: NRG; PAM sequence: GGG
ggcaaataaaacttgcagtg

SEQ ID NO: 129031 - DNA, 20 bp, Artificial Sequence
  Description of Artificial Sequence: Synthetic oligonucleotide
  Target: LAMA2; (+) strand; PAM type: NRG; PAM sequence: TGG
aataaaacttgcagtggggt

SEQ ID NO: 129032 - DNA, 20 bp, Artificial Sequence
  Description of Artificial Sequence: Synthetic oligonucleotide
  Target: LAMA2; (+) strand; PAM type: NRG; PAM sequence: GGG
ataaaacttgcagtggggtt

SEQ ID NO: 129033 - DNA, 20 bp, Artificial Sequence
  Description of Artificial Sequence: Synthetic oligonucleotide
  Target: LAMA2; (+) strand; PAM type: NRG; PAM sequence: GAG
aaaacttgcagtggggttgg

SEQ ID NO: 129034 - DNA, 20 bp, Artificial Sequence
  Description of Artificial Sequence: Synthetic oligonucleotide
  Target: LAMA2; (+) strand; PAM type: NRG; PAM sequence: TAG
acttgcagtggggttgggag

SEQ ID NO: 129035 - DNA, 20 bp, Artificial Sequence
  Description of Artificial Sequence: Synthetic oligonucleotide
  Target: LAMA2; (+) strand; PAM type: NRG; PAM sequence: AGG
cttgcagtggggttgggagt

SEQ ID NO: 129036 - DNA, 20 bp, Artificial Sequence
  Description of Artificial Sequence: Synthetic oligonucleotide
  Target: LAMA2; (+) strand; PAM type: NRG; PAM sequence: TGG
gcagtggggttgggagtagg

SEQ ID NO: 129037 - DNA, 20 bp, Artificial Sequence
  Description of Artificial Sequence: Synthetic oligonucleotide
  Target: LAMA2; (+) strand; PAM type: NRG; PAM sequence: TGG
tggggttgggagtaggtgga

SEQ ID NO: 129038 - DNA, 20 bp, Artificial Sequence
  Description of Artificial Sequence: Synthetic oligonucleotide
  Target: LAMA2; (+) strand; PAM type: NRG; PAM sequence: CAG
gtggatggaccatgatattc

SEQ ID NO: 129039 - DNA, 20 bp, Artificial Sequence
  Description of Artificial Sequence: Synthetic oligonucleotide
  Target: LAMA2; (+) strand; PAM type: NRG; PAM sequence: AGG
tggatggaccatgatattcc

SEQ ID NO: 129040 - DNA, 20 bp, Artificial Sequence
  Description of Artificial Sequence: Synthetic oligonucleotide
  Target: LAMA2; (+) strand; PAM type: NRG; PAM sequence: GAG
gatattccaggtgaataatt

SEQ ID NO: 129041 - DNA, 20 bp, Artificial Sequence
  Description of Artificial Sequence: Synthetic oligonucleotide
  Target: LAMA2; (+) strand; PAM type: NRG; PAM sequence: TAG
aggtgaataattgagcactt

SEQ ID NO: 129042 - DNA, 20 bp, Artificial Sequence
  Description of Artificial Sequence: Synthetic oligonucleotide
  Target: LAMA2; (+) strand; PAM type: NRG; PAM sequence: TGG
aataattgagcactttagct

SEQ ID NO: 129043 - DNA, 20 bp, Artificial Sequence
  Description of Artificial Sequence: Synthetic oligonucleotide
  Target: LAMA2; (+) strand; PAM type: NRG; PAM sequence: GGG
ataattgagcactttagctt

SEQ ID NO: 129044 - DNA, 20 bp, Artificial Sequence
  Description of Artificial Sequence: Synthetic oligonucleotide
  Target: LAMA2; (+) strand; PAM type: NRG; PAM sequence: GAG
aattgagcactttagcttgg

SEQ ID NO: 129045 - DNA, 20 bp, Artificial Sequence
  Description of Artificial Sequence: Synthetic oligonucleotide
  Target: LAMA2; (+) strand; PAM type: NRG; PAM sequence: AGG
attgagcactttagcttggg

SEQ ID NO: 129046 - DNA, 20 bp, Artificial Sequence
  Description of Artificial Sequence: Synthetic oligonucleotide
  Target: LAMA2; (+) strand; PAM type: NRG; PAM sequence: GAG
tgagcactttagcttgggag

SEQ ID NO: 129047 - DNA, 20 bp, Artificial Sequence
  Description of Artificial Sequence: Synthetic oligonucleotide
  Target: LAMA2; (+) strand; PAM type: NRG; PAM sequence: AGG
gagcactttagcttgggagg

SEQ ID NO: 129048 - DNA, 20 bp, Artificial Sequence
  Description of Artificial Sequence: Synthetic oligonucleotide
  Target: LAMA2; (+) strand; PAM type: NRG; PAM sequence: GGG
agcactttagcttgggagga

SEQ ID NO: 129049 - DNA, 20 bp, Artificial Sequence
  Description of Artificial Sequence: Synthetic oligonucleotide
  Target: LAMA2; (+) strand; PAM type: NRG; PAM sequence: GAG
ttgggaggagggccctaaat

SEQ ID NO: 129050 - DNA, 20 bp, Artificial Sequence
  Description of Artificial Sequence: Synthetic oligonucleotide
  Target: LAMA2; (+) strand; PAM type: NRG; PAM sequence: AAG
gaggagggccctaaatgaga

SEQ ID NO: 129051 - DNA, 20 bp, Artificial Sequence
  Description of Artificial Sequence: Synthetic oligonucleotide
  Target: LAMA2; (+) strand; PAM type: NRG; PAM sequence: CAG
agaaagtatatgacctattt

SEQ ID NO: 129052 - DNA, 20 bp, Artificial Sequence
  Description of Artificial Sequence: Synthetic oligonucleotide
  Target: LAMA2; (+) strand; PAM type: NRG; PAM sequence: AGG
gaaagtatatgacctatttc

SEQ ID NO: 129053 - DNA, 20 bp, Artificial Sequence
  Description of Artificial Sequence: Synthetic oligonucleotide
  Target: LAMA2; (+) strand; PAM type: NRG; PAM sequence: AAG
tgacctatttcaggaactga

SEQ ID NO: 129054 - DNA, 20 bp, Artificial Sequence
  Description of Artificial Sequence: Synthetic oligonucleotide
  Target: LAMA2; (+) strand; PAM type: NRG; PAM sequence: TGG
ttcaggaactgaaagaaatt

SEQ ID NO: 129055 - DNA, 20 bp, Artificial Sequence
  Description of Artificial Sequence: Synthetic oligonucleotide
  Target: LAMA2; (+) strand; PAM type: NRG; PAM sequence: TGG
tgaaagaaatttggaatgct

SEQ ID NO: 129056 - DNA, 20 bp, Artificial Sequence
  Description of Artificial Sequence: Synthetic oligonucleotide
  Target: LAMA2; (+) strand; PAM type: NRG; PAM sequence: AAG
tttggaatgcttggaatata

SEQ ID NO: 129057 - DNA, 20 bp, Artificial Sequence
  Description of Artificial Sequence: Synthetic oligonucleotide
  Target: LAMA2; (+) strand; PAM type: NRG; PAM sequence: TGG
aatgcttggaatataaagtg

SEQ ID NO: 129058 - DNA, 20 bp, Artificial Sequence
  Description of Artificial Sequence: Synthetic oligonucleotide
  Target: LAMA2; (+) strand; PAM type: NRG; PAM sequence: GGG
atgcttggaatataaagtgt

SEQ ID NO: 129059 - DNA, 20 bp, Artificial Sequence
  Description of Artificial Sequence: Synthetic oligonucleotide
  Target: LAMA2; (+) strand; PAM type: NRG; PAM sequence: GGG
tgcttggaatataaagtgtg

SEQ ID NO: 129060 - DNA, 20 bp, Artificial Sequence
  Description of Artificial Sequence: Synthetic oligonucleotide
  Target: LAMA2; (+) strand; PAM type: NRG; PAM sequence: TGG
ataaagtgtggggcaaatga

SEQ ID NO: 129061 - DNA, 20 bp, Artificial Sequence
  Description of Artificial Sequence: Synthetic oligonucleotide
  Target: LAMA2; (+) strand; PAM type: NRG; PAM sequence: GAG
aaagtgtggggcaaatgatg

SEQ ID NO: 129062 - DNA, 20 bp, Artificial Sequence
  Description of Artificial Sequence: Synthetic oligonucleotide
  Target: LAMA2; (+) strand; PAM type: NRG; PAM sequence: AGG
aagtgtggggcaaatgatgg

SEQ ID NO: 129063 - DNA, 20 bp, Artificial Sequence
  Description of Artificial Sequence: Synthetic oligonucleotide
  Target: LAMA2; (+) strand; PAM type: NRG; PAM sequence: AAG
ggggcaaatgatggaggaca

SEQ ID NO: 129064 - DNA, 20 bp, Artificial Sequence
  Description of Artificial Sequence: Synthetic oligonucleotide
  Target: LAMA2; (+) strand; PAM type: NRG; PAM sequence: GAG
ggcaaatgatggaggacaaa

SEQ ID NO: 129065 - DNA, 20 bp, Artificial Sequence
  Description of Artificial Sequence: Synthetic oligonucleotide
  Target: LAMA2; (+) strand; PAM type: NRG; PAM sequence: AGG
gcaaatgatggaggacaaag

SEQ ID NO: 129066 - DNA, 20 bp, Artificial Sequence
  Description of Artificial Sequence: Synthetic oligonucleotide
  Target: LAMA2; (+) strand; PAM type: NRG; PAM sequence: CAG
aatgatggaggacaaagagg

SEQ ID NO: 129067 - DNA, 20 bp, Artificial Sequence
  Description of Artificial Sequence: Synthetic oligonucleotide
  Target: LAMA2; (+) strand; PAM type: NRG; PAM sequence: CAG
gatggaggacaaagaggcag

SEQ ID NO: 129068 - DNA, 20 bp, Artificial Sequence
  Description of Artificial Sequence: Synthetic oligonucleotide
  Target: LAMA2; (+) strand; PAM type: NRG; PAM sequence: AGG
atggaggacaaagaggcagc

SEQ ID NO: 129069 - DNA, 20 bp, Artificial Sequence
  Description of Artificial Sequence: Synthetic oligonucleotide
  Target: LAMA2; (+) strand; PAM type: NRG; PAM sequence: GGG
tggaggacaaagaggcagca

SEQ ID NO: 129070 - DNA, 20 bp, Artificial Sequence
  Description of Artificial Sequence: Synthetic oligonucleotide
  Target: LAMA2; (+) strand; PAM type: NRG; PAM sequence: TAG
aagaggcagcagggataata

SEQ ID NO: 129071 - DNA, 20 bp, Artificial Sequence
  Description of Artificial Sequence: Synthetic oligonucleotide
  Target: LAMA2; (+) strand; PAM type: NRG; PAM sequence: TGG
gcagcagggataatatagtt

SEQ ID NO: 129072 - DNA, 20 bp, Artificial Sequence
  Description of Artificial Sequence: Synthetic oligonucleotide
  Target: LAMA2; (+) strand; PAM type: NRG; PAM sequence: CAG
agtttggctgtgtctccacc

SEQ ID NO: 129073 - DNA, 20 bp, Artificial Sequence
  Description of Artificial Sequence: Synthetic oligonucleotide
  Target: LAMA2; (+) strand; PAM type: NRG; PAM sequence: CAG
ccagatctcatcttgaattg

SEQ ID NO: 129074 - DNA, 20 bp, Artificial Sequence
  Description of Artificial Sequence: Synthetic oligonucleotide
  Target: LAMA2; (+) strand; PAM type: NRG; PAM sequence: AAG
ttgcagttcccacaattccc

SEQ ID NO: 129075 - DNA, 20 bp, Artificial Sequence
  Description of Artificial Sequence: Synthetic oligonucleotide
  Target: LAMA2; (+) strand; PAM type: NRG; PAM sequence: AGG
tgcagttcccacaattccca

SEQ ID NO: 129076 - DNA, 20 bp, Artificial Sequence
  Description of Artificial Sequence: Synthetic oligonucleotide
  Target: LAMA2; (+) strand; PAM type: NRG; PAM sequence: GGG
gcagttcccacaattcccaa

SEQ ID NO: 129077 - DNA, 20 bp, Artificial Sequence
  Description of Artificial Sequence: Synthetic oligonucleotide
  Target: LAMA2; (+) strand; PAM type: NRG; PAM sequence: TGG
cccacaattcccaagggtca

SEQ ID NO: 129078 - DNA, 20 bp, Artificial Sequence
  Description of Artificial Sequence: Synthetic oligonucleotide
  Target: LAMA2; (+) strand; PAM type: NRG; PAM sequence: GGG
ccacaattcccaagggtcat

SEQ ID NO: 129079 - DNA, 20 bp, Artificial Sequence
  Description of Artificial Sequence: Synthetic oligonucleotide
  Target: LAMA2; (+) strand; PAM type: NRG; PAM sequence: GAG
acaattcccaagggtcatgg

SEQ ID NO: 129080 - DNA, 20 bp, Artificial Sequence
  Description of Artificial Sequence: Synthetic oligonucleotide
  Target: LAMA2; (+) strand; PAM type: NRG; PAM sequence: AGG
caattcccaagggtcatggg

SEQ ID NO: 129081 - DNA, 20 bp, Artificial Sequence
  Description of Artificial Sequence: Synthetic oligonucleotide
  Target: LAMA2; (+) strand; PAM type: NRG; PAM sequence: GGG
aattcccaagggtcatggga

SEQ ID NO: 129082 - DNA, 20 bp, Artificial Sequence
  Description of Artificial Sequence: Synthetic oligonucleotide
  Target: LAMA2; (+) strand; PAM type: NRG; PAM sequence: TGG
caagggtcatgggagggacc

SEQ ID NO: 129083 - DNA, 20 bp, Artificial Sequence
  Description of Artificial Sequence: Synthetic oligonucleotide
  Target: LAMA2; (+) strand; PAM type: NRG; PAM sequence: GAG
agggtcatgggagggacctg

SEQ ID NO: 129084 - DNA, 20 bp, Artificial Sequence
  Description of Artificial Sequence: Synthetic oligonucleotide
  Target: LAMA2; (+) strand; PAM type: NRG; PAM sequence: AGG
gggtcatgggagggacctgg

SEQ ID NO: 129085 - DNA, 20 bp, Artificial Sequence
  Description of Artificial Sequence: Synthetic oligonucleotide
  Target: LAMA2; (+) strand; PAM type: NRG; PAM sequence: GGG
ggtcatgggagggacctgga

SEQ ID NO: 129086 - DNA, 20 bp, Artificial Sequence
  Description of Artificial Sequence: Synthetic oligonucleotide
  Target: LAMA2; (+) strand; PAM type: NRG; PAM sequence: GAG
tcatgggagggacctggagg

SEQ ID NO: 129087 - DNA, 20 bp, Artificial Sequence
  Description of Artificial Sequence: Synthetic oligonucleotide
  Target: LAMA2; (+) strand; PAM type: NRG; PAM sequence: AGG
catgggagggacctggaggg

SEQ ID NO: 129088 - DNA, 20 bp, Artificial Sequence
  Description of Artificial Sequence: Synthetic oligonucleotide
  Target: LAMA2; (+) strand; PAM type: NRG; PAM sequence: TAG
ggagggaggcaattcaatca

SEQ ID NO: 129089 - DNA, 20 bp, Artificial Sequence
  Description of Artificial Sequence: Synthetic oligonucleotide
  Target: LAMA2; (+) strand; PAM type: NRG; PAM sequence: AGG
gagggaggcaattcaatcat

SEQ ID NO: 129090 - DNA, 20 bp, Artificial Sequence
  Description of Artificial Sequence: Synthetic oligonucleotide
  Target: LAMA2; (+) strand; PAM type: NRG; PAM sequence: GGG
agggaggcaattcaatcata

SEQ ID NO: 129091 - DNA, 20 bp, Artificial Sequence
  Description of Artificial Sequence: Synthetic oligonucleotide
  Target: LAMA2; (+) strand; PAM type: NRG; PAM sequence: GGG
gggaggcaattcaatcatag

SEQ ID NO: 129092 - DNA, 20 bp, Artificial Sequence
  Description of Artificial Sequence: Synthetic oligonucleotide
  Target: LAMA2; (+) strand; PAM type: NRG; PAM sequence: CAG
aggcaattcaatcatagggg

SEQ ID NO: 129093 - DNA, 20 bp, Artificial Sequence
  Description of Artificial Sequence: Synthetic oligonucleotide
  Target: LAMA2; (+) strand; PAM type: NRG; PAM sequence: AGG
ggcaattcaatcataggggc

SEQ ID NO: 129094 - DNA, 20 bp, Artificial Sequence
  Description of Artificial Sequence: Synthetic oligonucleotide
  Target: LAMA2; (+) strand; PAM type: NRG; PAM sequence: TAG
ttcccatgcttttctcatga

SEQ ID NO: 129095 - DNA, 20 bp, Artificial Sequence
  Description of Artificial Sequence: Synthetic oligonucleotide
  Target: LAMA2; (+) strand; PAM type: NRG; PAM sequence: AAG
cttttctcatgatagtgaat

SEQ ID NO: 129096 - DNA, 20 bp, Artificial Sequence
  Description of Artificial Sequence: Synthetic oligonucleotide
  Target: LAMA2; (+) strand; PAM type: NRG; PAM sequence: GAG
tgatagtgaataagtctcac

SEQ ID NO: 129097 - DNA, 20 bp, Artificial Sequence
  Description of Artificial Sequence: Synthetic oligonucleotide
  Target: LAMA2; (+) strand; PAM type: NRG; PAM sequence: AAG
cgagatctgatgattttata

SEQ ID NO: 129098 - DNA, 20 bp, Artificial Sequence
  Description of Artificial Sequence: Synthetic oligonucleotide
  Target: LAMA2; (+) strand; PAM type: NRG; PAM sequence: AGG
gagatctgatgattttataa

SEQ ID NO: 129099 - DNA, 20 bp, Artificial Sequence
  Description of Artificial Sequence: Synthetic oligonucleotide
  Target: LAMA2; (+) strand; PAM type: NRG; PAM sequence: GAG
gatctgatgattttataaag

SEQ ID NO: 129100 - DNA, 20 bp, Artificial Sequence
  Description of Artificial Sequence: Synthetic oligonucleotide
  Target: LAMA2; (+) strand; PAM type: NRG; PAM sequence: GAG
tctgatgattttataaagga

SEQ ID NO: 129101 - DNA, 20 bp, Artificial Sequence
  Description of Artificial Sequence: Synthetic oligonucleotide
  Target: LAMA2; (+) strand; PAM type: NRG; PAM sequence: AAG
cctcttgcctgccaccatgt

SEQ ID NO: 129102 - DNA, 20 bp, Artificial Sequence
  Description of Artificial Sequence: Synthetic oligonucleotide
  Target: LAMA2; (+) strand; PAM type: NRG; PAM sequence: AAG
aagacgtgactttgctcttc

SEQ ID NO: 129103 - DNA, 20 bp, Artificial Sequence
  Description of Artificial Sequence: Synthetic oligonucleotide
  Target: LAMA2; (+) strand; PAM type: NRG; PAM sequence: GAG
gtactttctgccatgattgt

SEQ ID NO: 129104 - DNA, 20 bp, Artificial Sequence
  Description of Artificial Sequence: Synthetic oligonucleotide
  Target: LAMA2; (+) strand; PAM type: NRG; PAM sequence: AGG
tactttctgccatgattgtg

SEQ ID NO: 129105 - DNA, 20 bp, Artificial Sequence
  Description of Artificial Sequence: Synthetic oligonucleotide
  Target: LAMA2; (+) strand; PAM type: NRG; PAM sequence: CAG
ccatgattgtgaggcctccc

SEQ ID NO: 129106 - DNA, 20 bp, Artificial Sequence
  Description of Artificial Sequence: Synthetic oligonucleotide
  Target: LAMA2; (+) strand; PAM type: NRG; PAM sequence: TGG
gtgaggcctccccagccatg

SEQ ID NO: 129107 - DNA, 20 bp, Artificial Sequence
  Description of Artificial Sequence: Synthetic oligonucleotide
  Target: LAMA2; (+) strand; PAM type: NRG; PAM sequence: GAG
ccccagccatgtggaattgt

SEQ ID NO: 129108 - DNA, 20 bp, Artificial Sequence
  Description of Artificial Sequence: Synthetic oligonucleotide
  Target: LAMA2; (+) strand; PAM type: NRG; PAM sequence: TGG
ctttataaattaccctgtct

SEQ ID NO: 129109 - DNA, 20 bp, Artificial Sequence
  Description of Artificial Sequence: Synthetic oligonucleotide
  Target: LAMA2; (+) strand; PAM type: NRG; PAM sequence: GGG
tttataaattaccctgtctt

SEQ ID NO: 129110 - DNA, 20 bp, Artificial Sequence
  Description of Artificial Sequence: Synthetic oligonucleotide
  Target: LAMA2; (+) strand; PAM type: NRG; PAM sequence: TAG
tgtcttgggtatttctttat

SEQ ID NO: 129111 - DNA, 20 bp, Artificial Sequence
  Description of Artificial Sequence: Synthetic oligonucleotide
  Target: LAMA2; (+) strand; PAM type: NRG; PAM sequence: CAG
cttgggtatttctttattag

SEQ ID NO: 129112 - DNA, 20 bp, Artificial Sequence
  Description of Artificial Sequence: Synthetic oligonucleotide
  Target: LAMA2; (+) strand; PAM type: NRG; PAM sequence: GAG
tatttctttattagcagcat

SEQ ID NO: 129113 - DNA, 20 bp, Artificial Sequence
  Description of Artificial Sequence: Synthetic oligonucleotide
  Target: LAMA2; (+) strand; PAM type: NRG; PAM sequence: TGG
ctttattagcagcatgagaa

SEQ ID NO: 129114 - DNA, 20 bp, Artificial Sequence
  Description of Artificial Sequence: Synthetic oligonucleotide
  Target: LAMA2; (+) strand; PAM type: NRG; PAM sequence: AAG
gcatgagaatggattaatac

SEQ ID NO: 129115 - DNA, 20 bp, Artificial Sequence
  Description of Artificial Sequence: Synthetic oligonucleotide
  Target: LAMA2; (+) strand; PAM type: NRG; PAM sequence: AGG
catgagaatggattaataca

SEQ ID NO: 129116 - DNA, 20 bp, Artificial Sequence
  Description of Artificial Sequence: Synthetic oligonucleotide
  Target: LAMA2; (+) strand; PAM type: NRG; PAM sequence: TAG
aatggattaatacaaggcat

SEQ ID NO: 129117 - DNA, 20 bp, Artificial Sequence
  Description of Artificial Sequence: Synthetic oligonucleotide
  Target: LAMA2; (+) strand; PAM type: NRG; PAM sequence: GAG
tggattaatacaaggcatta

SEQ ID NO: 129118 - DNA, 20 bp, Artificial Sequence
  Description of Artificial Sequence: Synthetic oligonucleotide
  Target: LAMA2; (+) strand; PAM type: NRG; PAM sequence: AGG
ggattaatacaaggcattag

SEQ ID NO: 129119 - DNA, 20 bp, Artificial Sequence
  Description of Artificial Sequence: Synthetic oligonucleotide
  Target: LAMA2; (+) strand; PAM type: NRG; PAM sequence: GGG
gattaatacaaggcattaga

SEQ ID NO: 129120 - DNA, 20 bp, Artificial Sequence
  Description of Artificial Sequence: Synthetic oligonucleotide
  Target: LAMA2; (+) strand; PAM type: NRG; PAM sequence: AAG
aatacaaggcattagaggga

SEQ ID NO: 129121 - DNA, 20 bp, Artificial Sequence
  Description of Artificial Sequence: Synthetic oligonucleotide
  Target: LAMA2; (+) strand; PAM type: NRG; PAM sequence: GAG
tacaaggcattagagggaaa

SEQ ID NO: 129122 - DNA, 20 bp, Artificial Sequence
  Description of Artificial Sequence: Synthetic oligonucleotide
  Target: LAMA2; (+) strand; PAM type: NRG; PAM sequence: TGG
aaggcattagagggaaagag

SEQ ID NO: 129123 - DNA, 20 bp, Artificial Sequence
  Description of Artificial Sequence: Synthetic oligonucleotide
  Target: LAMA2; (+) strand; PAM type: NRG; PAM sequence: GGG
aggcattagagggaaagagt

SEQ ID NO: 129124 - DNA, 20 bp, Artificial Sequence
  Description of Artificial Sequence: Synthetic oligonucleotide
  Target: LAMA2; (+) strand; PAM type: NRG; PAM sequence: GGG
ggcattagagggaaagagtg

SEQ ID NO: 129125 - DNA, 20 bp, Artificial Sequence
  Description of Artificial Sequence: Synthetic oligonucleotide
  Target: LAMA2; (+) strand; PAM type: NRG; PAM sequence: GAG
cattagagggaaagagtggg

SEQ ID NO: 129126 - DNA, 20 bp, Artificial Sequence
  Description of Artificial Sequence: Synthetic oligonucleotide
  Target: LAMA2; (+) strand; PAM type: NRG; PAM sequence: GAG
ttagagggaaagagtgggga

SEQ ID NO: 129127 - DNA, 20 bp, Artificial Sequence
  Description of Artificial Sequence: Synthetic oligonucleotide
  Target: LAMA2; (+) strand; PAM type: NRG; PAM sequence: AGG
tagagggaaagagtggggag

SEQ ID NO: 129128 - DNA, 20 bp, Artificial Sequence
  Description of Artificial Sequence: Synthetic oligonucleotide
  Target: LAMA2; (+) strand; PAM type: NRG; PAM sequence: AAG
ggaaagagtggggagaggta

SEQ ID NO: 129129 - DNA, 20 bp, Artificial Sequence
  Description of Artificial Sequence: Synthetic oligonucleotide
  Target: LAMA2; (+) strand; PAM type: NRG; PAM sequence: AAG
gtggggagaggtaaagttga

SEQ ID NO: 129130 - DNA, 20 bp, Artificial Sequence
  Description of Artificial Sequence: Synthetic oligonucleotide
  Target: LAMA2; (+) strand; PAM type: NRG; PAM sequence: AAG
gagaggtaaagttgaaagac

SEQ ID NO: 129131 - DNA, 20 bp, Artificial Sequence
  Description of Artificial Sequence: Synthetic oligonucleotide
  Target: LAMA2; (+) strand; PAM type: NRG; PAM sequence: AAG
ggtaaagttgaaagacaagc

SEQ ID NO: 129132 - DNA, 20 bp, Artificial Sequence
  Description of Artificial Sequence: Synthetic oligonucleotide
  Target: LAMA2; (+) strand; PAM type: NRG; PAM sequence: AAG
aaagttgaaagacaagcaag

SEQ ID NO: 129133 - DNA, 20 bp, Artificial Sequence
  Description of Artificial Sequence: Synthetic oligonucleotide
  Target: LAMA2; (+) strand; PAM type: NRG; PAM sequence: CAG
gttgaaagacaagcaagaag

SEQ ID NO: 129134 - DNA, 20 bp, Artificial Sequence
  Description of Artificial Sequence: Synthetic oligonucleotide
  Target: LAMA2; (+) strand; PAM type: NRG; PAM sequence: GAG
cagatcatgaaacgctttgt

SEQ ID NO: 129135 - DNA, 20 bp, Artificial Sequence
  Description of Artificial Sequence: Synthetic oligonucleotide
  Target: LAMA2; (+) strand; PAM type: NRG; PAM sequence: TAG
aaacgctttgtgagccttgt

SEQ ID NO: 129136 - DNA, 20 bp, Artificial Sequence
  Description of Artificial Sequence: Synthetic oligonucleotide
  Target: LAMA2; (+) strand; PAM type: NRG; PAM sequence: GAG
gctttgtgagccttgttagt

SEQ ID NO: 129137 - DNA, 20 bp, Artificial Sequence
  Description of Artificial Sequence: Synthetic oligonucleotide
  Target: LAMA2; (+) strand; PAM type: NRG; PAM sequence: CAG
tgagccttgttagtgagttt

SEQ ID NO: 129138 - DNA, 20 bp, Artificial Sequence
  Description of Artificial Sequence: Synthetic oligonucleotide
  Target: LAMA2; (+) strand; PAM type: NRG; PAM sequence: AGG
gagccttgttagtgagtttc

SEQ ID NO: 129139 - DNA, 20 bp, Artificial Sequence
  Description of Artificial Sequence: Synthetic oligonucleotide
  Target: LAMA2; (+) strand; PAM type: NRG; PAM sequence: GGG
agccttgttagtgagtttca

SEQ ID NO: 129140 - DNA, 20 bp, Artificial Sequence
  Description of Artificial Sequence: Synthetic oligonucleotide
  Target: LAMA2; (+) strand; PAM type: NRG; PAM sequence: TGG
aaatccctctaactgcaatg

SEQ ID NO: 129141 - DNA, 20 bp, Artificial Sequence
  Description of Artificial Sequence: Synthetic oligonucleotide
  Target: LAMA2; (+) strand; PAM type: NRG; PAM sequence: TGG
ctgcaatgtggaaaatgaat

SEQ ID NO: 129142 - DNA, 20 bp, Artificial Sequence
  Description of Artificial Sequence: Synthetic oligonucleotide
  Target: LAMA2; (+) strand; PAM type: NRG; PAM sequence: AAG
atgtggaaaatgaattggaa

SEQ ID NO: 129143 - DNA, 20 bp, Artificial Sequence
  Description of Artificial Sequence: Synthetic oligonucleotide
  Target: LAMA2; (+) strand; PAM type: NRG; PAM sequence: CAG
ggaaaatgaattggaaaagt

SEQ ID NO: 129144 - DNA, 20 bp, Artificial Sequence
  Description of Artificial Sequence: Synthetic oligonucleotide
  Target: LAMA2; (+) strand; PAM type: NRG; PAM sequence: AAG
aaatgaattggaaaagtcag

SEQ ID NO: 129145 - DNA, 20 bp, Artificial Sequence
  Description of Artificial Sequence: Synthetic oligonucleotide
  Target: LAMA2; (+) strand; PAM type: NRG; PAM sequence: GAG
atgaattggaaaagtcagaa

SEQ ID NO: 129146 - DNA, 20 bp, Artificial Sequence
  Description of Artificial Sequence: Synthetic oligonucleotide
  Target: LAMA2; (+) strand; PAM type: NRG; PAM sequence: AGG
tgaattggaaaagtcagaag

SEQ ID NO: 129147 - DNA, 20 bp, Artificial Sequence
  Description of Artificial Sequence: Synthetic oligonucleotide
  Target: LAMA2; (+) strand; PAM type: NRG; PAM sequence: AAG
agaagaggaaaattcattaa

SEQ ID NO: 129148 - DNA, 20 bp, Artificial Sequence
  Description of Artificial Sequence: Synthetic oligonucleotide
  Target: LAMA2; (+) strand; PAM type: NRG; PAM sequence: AGG
gaagaggaaaattcattaaa

SEQ ID NO: 129149 - DNA, 20 bp, Artificial Sequence
  Description of Artificial Sequence: Synthetic oligonucleotide
  Target: LAMA2; (+) strand; PAM type: NRG; PAM sequence: AAG
aaattcattaaaaggatgtg

SEQ ID NO: 129150 - DNA, 20 bp, Artificial Sequence
  Description of Artificial Sequence: Synthetic oligonucleotide
  Target: LAMA2; (+) strand; PAM type: NRG; PAM sequence: AAG
aaaaggatgtgaagtaatta

SEQ ID NO: 129151 - DNA, 20 bp, Artificial Sequence
  Description of Artificial Sequence: Synthetic oligonucleotide
  Target: LAMA2; (+) strand; PAM type: NRG; PAM sequence: AGG
aaaggatgtgaagtaattaa

SEQ ID NO: 129152 - DNA, 20 bp, Artificial Sequence
  Description of Artificial Sequence: Synthetic oligonucleotide
  Target: LAMA2; (+) strand; PAM type: NRG; PAM sequence: GGG
aaggatgtgaagtaattaaa

SEQ ID NO: 129153 - DNA, 20 bp, Artificial Sequence
  Description of Artificial Sequence: Synthetic oligonucleotide
  Target: LAMA2; (+) strand; PAM type: NRG; PAM sequence: TAG
gtgaagtaattaaagggatt

SEQ ID NO: 129154 - DNA, 20 bp, Artificial Sequence
  Description of Artificial Sequence: Synthetic oligonucleotide
  Target: LAMA2; (+) strand; PAM type: NRG; PAM sequence: AGG
tgaagtaattaaagggattt

SEQ ID NO: 129155 - DNA, 20 bp, Artificial Sequence
  Description of Artificial Sequence: Synthetic oligonucleotide
  Target: LAMA2; (+) strand; PAM type: NRG; PAM sequence: TGG
attaaagggatttaggataa

SEQ ID NO: 129156 - DNA, 20 bp, Artificial Sequence
  Description of Artificial Sequence: Synthetic oligonucleotide
  Target: LAMA2; (+) strand; PAM type: NRG; PAM sequence: AAG
ttaggataatggcctgaact

SEQ ID NO: 129157 - DNA, 20 bp, Artificial Sequence
  Description of Artificial Sequence: Synthetic oligonucleotide
  Target: LAMA2; (+) strand; PAM type: NRG; PAM sequence: TGG
gataatggcctgaactaaga

SEQ ID NO: 129158 - DNA, 20 bp, Artificial Sequence
  Description of Artificial Sequence: Synthetic oligonucleotide
  Target: LAMA2; (+) strand; PAM type: NRG; PAM sequence: TGG
aatggcctgaactaagatgg

SEQ ID NO: 129159 - DNA, 20 bp, Artificial Sequence
  Description of Artificial Sequence: Synthetic oligonucleotide
  Target: LAMA2; (+) strand; PAM type: NRG; PAM sequence: CAG
ggcctgaactaagatggtgg

SEQ ID NO: 129160 - DNA, 20 bp, Artificial Sequence
  Description of Artificial Sequence: Synthetic oligonucleotide
  Target: LAMA2; (+) strand; PAM type: NRG; PAM sequence: TGG
ctgaactaagatggtggcag

SEQ ID NO: 129161 - DNA, 20 bp, Artificial Sequence
  Description of Artificial Sequence: Synthetic oligonucleotide
  Target: LAMA2; (+) strand; PAM type: NRG; PAM sequence: GGG
tgaactaagatggtggcagt

SEQ ID NO: 129162 - DNA, 20 bp, Artificial Sequence
  Description of Artificial Sequence: Synthetic oligonucleotide
  Target: LAMA2; (+) strand; PAM type: NRG; PAM sequence: TGG
gtgggaatgaataatatgaa

SEQ ID NO: 129163 - DNA, 20 bp, Artificial Sequence
  Description of Artificial Sequence: Synthetic oligonucleotide
  Target: LAMA2; (+) strand; PAM type: NRG; PAM sequence: CAG
gaataatatgaatggactga

SEQ ID NO: 129164 - DNA, 20 bp, Artificial Sequence
  Description of Artificial Sequence: Synthetic oligonucleotide
  Target: LAMA2; (+) strand; PAM type: NRG; PAM sequence: AGG
aataatatgaatggactgac

SEQ ID NO: 129165 - DNA, 20 bp, Artificial Sequence
  Description of Artificial Sequence: Synthetic oligonucleotide
  Target: LAMA2; (+) strand; PAM type: NRG; PAM sequence: CAG
attttttttgtattttgact

SEQ ID NO: 129166 - DNA, 20 bp, Artificial Sequence
  Description of Artificial Sequence: Synthetic oligonucleotide
  Target: LAMA2; (+) strand; PAM type: NRG; PAM sequence: CAG
ttttttgtattttgactcag

SEQ ID NO: 129167 - DNA, 20 bp, Artificial Sequence
  Description of Artificial Sequence: Synthetic oligonucleotide
  Target: LAMA2; (+) strand; PAM type: NRG; PAM sequence: AGG
tttttgtattttgactcagc

SEQ ID NO: 129168 - DNA, 20 bp, Artificial Sequence
  Description of Artificial Sequence: Synthetic oligonucleotide
  Target: LAMA2; (+) strand; PAM type: NRG; PAM sequence: TGG
tattttgactcagcaggtgt

SEQ ID NO: 129169 - DNA, 20 bp, Artificial Sequence
  Description of Artificial Sequence: Synthetic oligonucleotide
  Target: LAMA2; (+) strand; PAM type: NRG; PAM sequence: TAG
tttgactcagcaggtgttgg

SEQ ID NO: 129170 - DNA, 20 bp, Artificial Sequence
  Description of Artificial Sequence: Synthetic oligonucleotide
  Target: LAMA2; (+) strand; PAM type: NRG; PAM sequence: TAG
tcagcaggtgttggtagcat

SEQ ID NO: 129171 - DNA, 20 bp, Artificial Sequence
  Description of Artificial Sequence: Synthetic oligonucleotide
  Target: LAMA2; (+) strand; PAM type: NRG; PAM sequence: TAG
ggtgttggtagcattagata

SEQ ID NO: 129172 - DNA, 20 bp, Artificial Sequence
  Description of Artificial Sequence: Synthetic oligonucleotide
  Target: LAMA2; (+) strand; PAM type: NRG; PAM sequence: GAG
tgttggtagcattagatata

SEQ ID NO: 129173 - DNA, 20 bp, Artificial Sequence
  Description of Artificial Sequence: Synthetic oligonucleotide
  Target: LAMA2; (+) strand; PAM type: NRG; PAM sequence: GAG
ttggtagcattagatataga

SEQ ID NO: 129174 - DNA, 20 bp, Artificial Sequence
  Description of Artificial Sequence: Synthetic oligonucleotide
  Target: LAMA2; (+) strand; PAM type: NRG; PAM sequence: TGG
gtagcattagatatagagag

SEQ ID NO: 129175 - DNA, 20 bp, Artificial Sequence
  Description of Artificial Sequence: Synthetic oligonucleotide
  Target: LAMA2; (+) strand; PAM type: NRG; PAM sequence: GGG
tagcattagatatagagagt

SEQ ID NO: 129176 - DNA, 20 bp, Artificial Sequence
  Description of Artificial Sequence: Synthetic oligonucleotide
  Target: LAMA2; (+) strand; PAM type: NRG; PAM sequence: GGG
agcattagatatagagagtg

SEQ ID NO: 129177 - DNA, 20 bp, Artificial Sequence
  Description of Artificial Sequence: Synthetic oligonucleotide
  Target: LAMA2; (+) strand; PAM type: NRG; PAM sequence: GAG
cattagatatagagagtggg

SEQ ID NO: 129178 - DNA, 20 bp, Artificial Sequence
  Description of Artificial Sequence: Synthetic oligonucleotide
  Target: LAMA2; (+) strand; PAM type: NRG; PAM sequence: AGG
attagatatagagagtgggg

SEQ ID NO: 129179 - DNA, 20 bp, Artificial Sequence
  Description of Artificial Sequence: Synthetic oligonucleotide
  Target: LAMA2; (+) strand; PAM type: NRG; PAM sequence: AAG
agatatagagagtggggagg

SEQ ID NO: 129180 - DNA, 20 bp, Artificial Sequence
  Description of Artificial Sequence: Synthetic oligonucleotide
  Target: LAMA2; (+) strand; PAM type: NRG; PAM sequence: AAG
tatagagagtggggaggaag

SEQ ID NO: 129181 - DNA, 20 bp, Artificial Sequence
  Description of Artificial Sequence: Synthetic oligonucleotide
  Target: LAMA2; (+) strand; PAM type: NRG; PAM sequence: AGG
atagagagtggggaggaaga

SEQ ID NO: 129182 - DNA, 20 bp, Artificial Sequence
  Description of Artificial Sequence: Synthetic oligonucleotide
  Target: LAMA2; (+) strand; PAM type: NRG; PAM sequence: TAG
agtggggaggaagaaggctc

SEQ ID NO: 129183 - DNA, 20 bp, Artificial Sequence
  Description of Artificial Sequence: Synthetic oligonucleotide
  Target: LAMA2; (+) strand; PAM type: NRG; PAM sequence: AGG
gtggggaggaagaaggctct

SEQ ID NO: 129184 - DNA, 20 bp, Artificial Sequence
  Description of Artificial Sequence: Synthetic oligonucleotide
  Target: LAMA2; (+) strand; PAM type: NRG; PAM sequence: CAG
aaggctctaggcatgatgct

SEQ ID NO: 129185 - DNA, 20 bp, Artificial Sequence
  Description of Artificial Sequence: Synthetic oligonucleotide
  Target: LAMA2; (+) strand; PAM type: NRG; PAM sequence: TGG
tgatgctcagattgctgatt

SEQ ID NO: 129186 - DNA, 20 bp, Artificial Sequence
  Description of Artificial Sequence: Synthetic oligonucleotide
  Target: LAMA2; (+) strand; PAM type: NRG; PAM sequence: AAG
tcagattgctgatttggtta

SEQ ID NO: 129187 - DNA, 20 bp, Artificial Sequence
  Description of Artificial Sequence: Synthetic oligonucleotide
  Target: LAMA2; (+) strand; PAM type: NRG; PAM sequence: AGG
cagattgctgatttggttaa

SEQ ID NO: 129188 - DNA, 20 bp, Artificial Sequence
  Description of Artificial Sequence: Synthetic oligonucleotide
  Target: LAMA2; (+) strand; PAM type: NRG; PAM sequence: AAG
attgctgatttggttaaagg

SEQ ID NO: 129189 - DNA, 20 bp, Artificial Sequence
  Description of Artificial Sequence: Synthetic oligonucleotide
  Target: LAMA2; (+) strand; PAM type: NRG; PAM sequence: CAG
gctgatttggttaaaggaag

SEQ ID NO: 129190 - DNA, 20 bp, Artificial Sequence
  Description of Artificial Sequence: Synthetic oligonucleotide
  Target: LAMA2; (+) strand; PAM type: NRG; PAM sequence: GAG
tgatttggttaaaggaagca

SEQ ID NO: 129191 - DNA, 20 bp, Artificial Sequence
  Description of Artificial Sequence: Synthetic oligonucleotide
  Target: LAMA2; (+) strand; PAM type: NRG; PAM sequence: AAG
ttggttaaaggaagcagaga

SEQ ID NO: 129192 - DNA, 20 bp, Artificial Sequence
  Description of Artificial Sequence: Synthetic oligonucleotide
  Target: LAMA2; (+) strand; PAM type: NRG; PAM sequence: TGG
gaagcagagaaagatacatc

SEQ ID NO: 129193 - DNA, 20 bp, Artificial Sequence
  Description of Artificial Sequence: Synthetic oligonucleotide
  Target: LAMA2; (+) strand; PAM type: NRG; PAM sequence: GAG
agcagagaaagatacatctg

SEQ ID NO: 129194 - DNA, 20 bp, Artificial Sequence
  Description of Artificial Sequence: Synthetic oligonucleotide
  Target: LAMA2; (+) strand; PAM type: NRG; PAM sequence: GAG
cagagaaagatacatctgga

SEQ ID NO: 129195 - DNA, 20 bp, Artificial Sequence
  Description of Artificial Sequence: Synthetic oligonucleotide
  Target: LAMA2; (+) strand; PAM type: NRG; PAM sequence: AGG
agagaaagatacatctggag

SEQ ID NO: 129196 - DNA, 20 bp, Artificial Sequence
  Description of Artificial Sequence: Synthetic oligonucleotide
  Target: LAMA2; (+) strand; PAM type: NRG; PAM sequence: AAG
gatacatctggagaggaaac

SEQ ID NO: 129197 - DNA, 20 bp, Artificial Sequence
  Description of Artificial Sequence: Synthetic oligonucleotide
  Target: LAMA2; (+) strand; PAM type: NRG; PAM sequence: CAG
actttttgttttgttttttc

SEQ ID NO: 129198 - DNA, 20 bp, Artificial Sequence
  Description of Artificial Sequence: Synthetic oligonucleotide
  Target: LAMA2; (+) strand; PAM type: NRG; PAM sequence: TAG
ttgttttttccagttcctga

SEQ ID NO: 129199 - DNA, 20 bp, Artificial Sequence
  Description of Artificial Sequence: Synthetic oligonucleotide
  Target: LAMA2; (+) strand; PAM type: NRG; PAM sequence: TAG
tttttccagttcctgataga

SEQ ID NO: 129200 - DNA, 20 bp, Artificial Sequence
  Description of Artificial Sequence: Synthetic oligonucleotide
  Target: LAMA2; (+) strand; PAM type: NRG; PAM sequence: AAG
cctgatagatagccatgctc

SEQ ID NO: 129201 - DNA, 20 bp, Artificial Sequence
  Description of Artificial Sequence: Synthetic oligonucleotide
  Target: LAMA2; (+) strand; PAM type: NRG; PAM sequence: CAG
atagccatgctcaagtgtcc

SEQ ID NO: 129202 - DNA, 20 bp, Artificial Sequence
  Description of Artificial Sequence: Synthetic oligonucleotide
  Target: LAMA2; (+) strand; PAM type: NRG; PAM sequence: TGG
gccatgctcaagtgtcccag

SEQ ID NO: 129203 - DNA, 20 bp, Artificial Sequence
  Description of Artificial Sequence: Synthetic oligonucleotide
  Target: LAMA2; (+) strand; PAM type: NRG; PAM sequence: CAG
atgctcaagtgtcccagtgg

SEQ ID NO: 129204 - DNA, 20 bp, Artificial Sequence
  Description of Artificial Sequence: Synthetic oligonucleotide
  Target: LAMA2; (+) strand; PAM type: NRG; PAM sequence: GAG
caagtgtcccagtggcagtt

SEQ ID NO: 129205 - DNA, 20 bp, Artificial Sequence
  Description of Artificial Sequence: Synthetic oligonucleotide
  Target: LAMA2; (+) strand; PAM type: NRG; PAM sequence: TAG
cccagtggcagttgagtatt

SEQ ID NO: 129206 - DNA, 20 bp, Artificial Sequence
  Description of Artificial Sequence: Synthetic oligonucleotide
  Target: LAMA2; (+) strand; PAM type: NRG; PAM sequence: GAG
cagtggcagttgagtattta

SEQ ID NO: 129207 - DNA, 20 bp, Artificial Sequence
  Description of Artificial Sequence: Synthetic oligonucleotide
  Target: LAMA2; (+) strand; PAM type: NRG; PAM sequence: AAG
cagttgagtatttagagtca

SEQ ID NO: 129208 - DNA, 20 bp, Artificial Sequence
  Description of Artificial Sequence: Synthetic oligonucleotide
  Target: LAMA2; (+) strand; PAM type: NRG; PAM sequence: CAG
gagtatttagagtcaaagct

SEQ ID NO: 129209 - DNA, 20 bp, Artificial Sequence
  Description of Artificial Sequence: Synthetic oligonucleotide
  Target: LAMA2; (+) strand; PAM type: NRG; PAM sequence: AGG
agtatttagagtcaaagctc

SEQ ID NO: 129210 - DNA, 20 bp, Artificial Sequence
  Description of Artificial Sequence: Synthetic oligonucleotide
  Target: LAMA2; (+) strand; PAM type: NRG; PAM sequence: GGG
gtatttagagtcaaagctca

SEQ ID NO: 129211 - DNA, 20 bp, Artificial Sequence
  Description of Artificial Sequence: Synthetic oligonucleotide
  Target: LAMA2; (+) strand; PAM type: NRG; PAM sequence: GGG
tatttagagtcaaagctcag

SEQ ID NO: 129212 - DNA, 20 bp, Artificial Sequence
  Description of Artificial Sequence: Synthetic oligonucleotide
  Target: LAMA2; (+) strand; PAM type: NRG; PAM sequence: GAG
tttagagtcaaagctcaggg

SEQ ID NO: 129213 - DNA, 20 bp, Artificial Sequence
  Description of Artificial Sequence: Synthetic oligonucleotide
  Target: LAMA2; (+) strand; PAM type: NRG; PAM sequence: TAG
caaagctcaggggagaactc

SEQ ID NO: 129214 - DNA, 20 bp, Artificial Sequence
  Description of Artificial Sequence: Synthetic oligonucleotide
  Target: LAMA2; (+) strand; PAM type: NRG; PAM sequence: TGG
gctcaggggagaactctagc

SEQ ID NO: 129215 - DNA, 20 bp, Artificial Sequence
  Description of Artificial Sequence: Synthetic oligonucleotide
  Target: LAMA2; (+) strand; PAM type: NRG; PAM sequence: TGG
tctagctggtgataatgatt

SEQ ID NO: 129216 - DNA, 20 bp, Artificial Sequence
  Description of Artificial Sequence: Synthetic oligonucleotide
  Target: LAMA2; (+) strand; PAM type: NRG; PAM sequence: GGG
ctagctggtgataatgattt

SEQ ID NO: 129217 - DNA, 20 bp, Artificial Sequence
  Description of Artificial Sequence: Synthetic oligonucleotide
  Target: LAMA2; (+) strand; PAM type: NRG; PAM sequence: TGG
tgataatgatttgggaattt

SEQ ID NO: 129218 - DNA, 20 bp, Artificial Sequence
  Description of Artificial Sequence: Synthetic oligonucleotide
  Target: LAMA2; (+) strand; PAM type: NRG; PAM sequence: CAG
taaaaatactcatttgaacc

SEQ ID NO: 129219 - DNA, 20 bp, Artificial Sequence
  Description of Artificial Sequence: Synthetic oligonucleotide
  Target: LAMA2; (+) strand; PAM type: NRG; PAM sequence: AGG
aaaaatactcatttgaaccc

SEQ ID NO: 129220 - DNA, 20 bp, Artificial Sequence
  Description of Artificial Sequence: Synthetic oligonucleotide
  Target: LAMA2; (+) strand; PAM type: NRG; PAM sequence: GGG
aaaatactcatttgaaccca

SEQ ID NO: 129221 - DNA, 20 bp, Artificial Sequence
  Description of Artificial Sequence: Synthetic oligonucleotide
  Target: LAMA2; (+) strand; PAM type: NRG; PAM sequence: TGG
ctcatttgaacccagggaaa

SEQ ID NO: 129222 - DNA, 20 bp, Artificial Sequence
  Description of Artificial Sequence: Synthetic oligonucleotide
  Target: LAMA2; (+) strand; PAM type: NRG; PAM sequence: GGG
tcatttgaacccagggaaat

SEQ ID NO: 129223 - DNA, 20 bp, Artificial Sequence
  Description of Artificial Sequence: Synthetic oligonucleotide
  Target: LAMA2; (+) strand; PAM type: NRG; PAM sequence: GAG
atttgaacccagggaaatgg

SEQ ID NO: 129224 - DNA, 20 bp, Artificial Sequence
  Description of Artificial Sequence: Synthetic oligonucleotide
  Target: LAMA2; (+) strand; PAM type: NRG; PAM sequence: AGG
tttgaacccagggaaatggg

SEQ ID NO: 129225 - DNA, 20 bp, Artificial Sequence
  Description of Artificial Sequence: Synthetic oligonucleotide
  Target: LAMA2; (+) strand; PAM type: NRG; PAM sequence: CAG
gggaaatgggaggtaacatc

SEQ ID NO: 129226 - DNA, 20 bp, Artificial Sequence
  Description of Artificial Sequence: Synthetic oligonucleotide
  Target: LAMA2; (+) strand; PAM type: NRG; PAM sequence: AGG
ggaaatgggaggtaacatcc

SEQ ID NO: 129227 - DNA, 20 bp, Artificial Sequence
  Description of Artificial Sequence: Synthetic oligonucleotide
  Target: LAMA2; (+) strand; PAM type: NRG; PAM sequence: AAG
tgggaggtaacatccaggat

SEQ ID NO: 129228 - DNA, 20 bp, Artificial Sequence
  Description of Artificial Sequence: Synthetic oligonucleotide
  Target: LAMA2; (+) strand; PAM type: NRG; PAM sequence: TAG
taacatccaggataagcttg

SEQ ID NO: 129229 - DNA, 20 bp, Artificial Sequence
  Description of Artificial Sequence: Synthetic oligonucleotide
  Target: LAMA2; (+) strand; PAM type: NRG; PAM sequence: AAG
catccaggataagcttgtag

SEQ ID NO: 129230 - DNA, 20 bp, Artificial Sequence
  Description of Artificial Sequence: Synthetic oligonucleotide
  Target: LAMA2; (+) strand; PAM type: NRG; PAM sequence: AGG
atccaggataagcttgtaga

SEQ ID NO: 129231 - DNA, 20 bp, Artificial Sequence
  Description of Artificial Sequence: Synthetic oligonucleotide
  Target: LAMA2; (+) strand; PAM type: NRG; PAM sequence: AAG
caggataagcttgtagaagg

SEQ ID NO: 129232 - DNA, 20 bp, Artificial Sequence
  Description of Artificial Sequence: Synthetic oligonucleotide
  Target: LAMA2; (+) strand; PAM type: NRG; PAM sequence: GAG
ggataagcttgtagaaggaa

SEQ ID NO: 129233 - DNA, 20 bp, Artificial Sequence
  Description of Artificial Sequence: Synthetic oligonucleotide
  Target: LAMA2; (+) strand; PAM type: NRG; PAM sequence: TAG
tgtagaaggaagagactgtg

SEQ ID NO: 129234 - DNA, 20 bp, Artificial Sequence
  Description of Artificial Sequence: Synthetic oligonucleotide
  Target: LAMA2; (+) strand; PAM type: NRG; PAM sequence: TAG
agaaggaagagactgtgtag

SEQ ID NO: 129235 - DNA, 20 bp, Artificial Sequence
  Description of Artificial Sequence: Synthetic oligonucleotide
  Target: LAMA2; (+) strand; PAM type: NRG; PAM sequence: AGG
gaaggaagagactgtgtagt

SEQ ID NO: 129236 - DNA, 20 bp, Artificial Sequence
  Description of Artificial Sequence: Synthetic oligonucleotide
  Target: LAMA2; (+) strand; PAM type: NRG; PAM sequence: CAG
gagactgtgtagtaggaaca

SEQ ID NO: 129237 - DNA, 20 bp, Artificial Sequence
  Description of Artificial Sequence: Synthetic oligonucleotide
  Target: LAMA2; (+) strand; PAM type: NRG; PAM sequence: AGG
agactgtgtagtaggaacac

SEQ ID NO: 129238 - DNA, 20 bp, Artificial Sequence
  Description of Artificial Sequence: Synthetic oligonucleotide
  Target: LAMA2; (+) strand; PAM type: NRG; PAM sequence: GGG
gactgtgtagtaggaacaca

SEQ ID NO: 129239 - DNA, 20 bp, Artificial Sequence
  Description of Artificial Sequence: Synthetic oligonucleotide
  Target: LAMA2; (+) strand; PAM type: NRG; PAM sequence: AAG
gtgtagtaggaacacaggga

SEQ ID NO: 129240 - DNA, 20 bp, Artificial Sequence
  Description of Artificial Sequence: Synthetic oligonucleotide
  Target: LAMA2; (+) strand; PAM type: NRG; PAM sequence: CAG
acagggaaagatatcaacac

SEQ ID NO: 129241 - DNA, 20 bp, Artificial Sequence
  Description of Artificial Sequence: Synthetic oligonucleotide
  Target: LAMA2; (+) strand; PAM type: NRG; PAM sequence: GAG
agggaaagatatcaacacca

SEQ ID NO: 129242 - DNA, 20 bp, Artificial Sequence
  Description of Artificial Sequence: Synthetic oligonucleotide
  Target: LAMA2; (+) strand; PAM type: NRG; PAM sequence: GAG
ggaaagatatcaacaccaga

SEQ ID NO: 129243 - DNA, 20 bp, Artificial Sequence
  Description of Artificial Sequence: Synthetic oligonucleotide
  Target: LAMA2; (+) strand; PAM type: NRG; PAM sequence: AGG
gaaagatatcaacaccagag

SEQ ID NO: 129244 - DNA, 20 bp, Artificial Sequence
  Description of Artificial Sequence: Synthetic oligonucleotide
  Target: LAMA2; (+) strand; PAM type: NRG; PAM sequence: AAG
agatatcaacaccagagagg

SEQ ID NO: 129245 - DNA, 20 bp, Artificial Sequence
  Description of Artificial Sequence: Synthetic oligonucleotide
  Target: LAMA2; (+) strand; PAM type: NRG; PAM sequence: GAG
atatcaacaccagagaggaa

SEQ ID NO: 129246 - DNA, 20 bp, Artificial Sequence
  Description of Artificial Sequence: Synthetic oligonucleotide
  Target: LAMA2; (+) strand; PAM type: NRG; PAM sequence: GAG
gaggaagagatgctttgctt

SEQ ID NO: 129247 - DNA, 20 bp, Artificial Sequence
  Description of Artificial Sequence: Synthetic oligonucleotide
  Target: LAMA2; (+) strand; PAM type: NRG; PAM sequence: AGG
aggaagagatgctttgcttg

SEQ ID NO: 129248 - DNA, 20 bp, Artificial Sequence
  Description of Artificial Sequence: Synthetic oligonucleotide
  Target: LAMA2; (+) strand; PAM type: NRG; PAM sequence: GGG
ggaagagatgctttgcttga

SEQ ID NO: 129249 - DNA, 20 bp, Artificial Sequence
  Description of Artificial Sequence: Synthetic oligonucleotide
  Target: LAMA2; (+) strand; PAM type: NRG; PAM sequence: GAG
acatttaaatttttctcttt

SEQ ID NO: 129250 - DNA, 20 bp, Artificial Sequence
  Description of Artificial Sequence: Synthetic oligonucleotide
  Target: LAMA2; (+) strand; PAM type: NRG; PAM sequence: GAG
atttaaatttttctctttga

SEQ ID NO: 129251 - DNA, 20 bp, Artificial Sequence
  Description of Artificial Sequence: Synthetic oligonucleotide
  Target: LAMA2; (+) strand; PAM type: NRG; PAM sequence: AAG
taaatttttctctttgagag

SEQ ID NO: 129252 - DNA, 20 bp, Artificial Sequence
  Description of Artificial Sequence: Synthetic oligonucleotide
  Target: LAMA2; (+) strand; PAM type: NRG; PAM sequence: AAG
gagagaagaatcatgacaat

SEQ ID NO: 129253 - DNA, 20 bp, Artificial Sequence
  Description of Artificial Sequence: Synthetic oligonucleotide
  Target: LAMA2; (+) strand; PAM type: NRG; PAM sequence: CAG
atttgatttattccatattt

SEQ ID NO: 129254 - DNA, 20 bp, Artificial Sequence
  Description of Artificial Sequence: Synthetic oligonucleotide
  Target: LAMA2; (+) strand; PAM type: NRG; PAM sequence: AAG
catatttcagattgttttga

SEQ ID NO: 129255 - DNA, 20 bp, Artificial Sequence
  Description of Artificial Sequence: Synthetic oligonucleotide
  Target: LAMA2; (+) strand; PAM type: NRG; PAM sequence: TGG
atttcagattgttttgaaag

SEQ ID NO: 129256 - DNA, 20 bp, Artificial Sequence
  Description of Artificial Sequence: Synthetic oligonucleotide
  Target: LAMA2; (+) strand; PAM type: NRG; PAM sequence: AAG
aagtggtatgtcactaatga

SEQ ID NO: 129257 - DNA, 20 bp, Artificial Sequence
  Description of Artificial Sequence: Synthetic oligonucleotide
  Target: LAMA2; (+) strand; PAM type: NRG; PAM sequence: AGG
agtggtatgtcactaatgaa

SEQ ID NO: 129258 - DNA, 20 bp, Artificial Sequence
  Description of Artificial Sequence: Synthetic oligonucleotide
  Target: LAMA2; (+) strand; PAM type: NRG; PAM sequence: GAG
tggtatgtcactaatgaaag

SEQ ID NO: 129259 - DNA, 20 bp, Artificial Sequence
  Description of Artificial Sequence: Synthetic oligonucleotide
  Target: LAMA2; (+) strand; PAM type: NRG; PAM sequence: AAG
tcactaatgaaaggagtgtg

SEQ ID NO: 129260 - DNA, 20 bp, Artificial Sequence
  Description of Artificial Sequence: Synthetic oligonucleotide
  Target: LAMA2; (+) strand; PAM type: NRG; PAM sequence: GAG
tgaatactgttgacattcct

SEQ ID NO: 129261 - DNA, 20 bp, Artificial Sequence
  Description of Artificial Sequence: Synthetic oligonucleotide
  Target: LAMA2; (+) strand; PAM type: NRG; PAM sequence: TGG
acattcctgagaaatgtatc

SEQ ID NO: 129262 - DNA, 20 bp, Artificial Sequence
  Description of Artificial Sequence: Synthetic oligonucleotide
  Target: LAMA2; (+) strand; PAM type: NRG; PAM sequence: GGG
cattcctgagaaatgtatct

SEQ ID NO: 129263 - DNA, 20 bp, Artificial Sequence
  Description of Artificial Sequence: Synthetic oligonucleotide
  Target: LAMA2; (+) strand; PAM type: NRG; PAM sequence: GGG
attcctgagaaatgtatctg

SEQ ID NO: 129264 - DNA, 20 bp, Artificial Sequence
  Description of Artificial Sequence: Synthetic oligonucleotide
  Target: LAMA2; (+) strand; PAM type: NRG; PAM sequence: GGG
ttcctgagaaatgtatctgg

SEQ ID NO: 129265 - DNA, 20 bp, Artificial Sequence
  Description of Artificial Sequence: Synthetic oligonucleotide
  Target: LAMA2; (+) strand; PAM type: NRG; PAM sequence: GGG
tcctgagaaatgtatctggg

SEQ ID NO: 129266 - DNA, 20 bp, Artificial Sequence
  Description of Artificial Sequence: Synthetic oligonucleotide
  Target: LAMA2; (+) strand; PAM type: NRG; PAM sequence: AAG
ataaatatcatacgaatcct

SEQ ID NO: 129267 - DNA, 20 bp, Artificial Sequence
  Description of Artificial Sequence: Synthetic oligonucleotide
  Target: LAMA2; (+) strand; PAM type: NRG; PAM sequence: TGG
atacgaatcctaagaaattc

SEQ ID NO: 129268 - DNA, 20 bp, Artificial Sequence
  Description of Artificial Sequence: Synthetic oligonucleotide
  Target: LAMA2; (+) strand; PAM type: NRG; PAM sequence: GGG
tacgaatcctaagaaattct

SEQ ID NO: 129269 - DNA, 20 bp, Artificial Sequence
  Description of Artificial Sequence: Synthetic oligonucleotide
  Target: LAMA2; (+) strand; PAM type: NRG; PAM sequence: AAG
cctaagaaattctgggattt

SEQ ID NO: 129270 - DNA, 20 bp, Artificial Sequence
  Description of Artificial Sequence: Synthetic oligonucleotide
  Target: LAMA2; (+) strand; PAM type: NRG; PAM sequence: AGG
ctaagaaattctgggattta

SEQ ID NO: 129271 - DNA, 20 bp, Artificial Sequence
  Description of Artificial Sequence: Synthetic oligonucleotide
  Target: LAMA2; (+) strand; PAM type: NRG; PAM sequence: GAG
aaattctgggatttaaggat

SEQ ID NO: 129272 - DNA, 20 bp, Artificial Sequence
  Description of Artificial Sequence: Synthetic oligonucleotide
  Target: LAMA2; (+) strand; PAM type: NRG; PAM sequence: TGG
ttctgggatttaaggatgag

SEQ ID NO: 129273 - DNA, 20 bp, Artificial Sequence
  Description of Artificial Sequence: Synthetic oligonucleotide
  Target: LAMA2; (+) strand; PAM type: NRG; PAM sequence: GGG
tctgggatttaaggatgagt

SEQ ID NO: 129274 - DNA, 20 bp, Artificial Sequence
  Description of Artificial Sequence: Synthetic oligonucleotide
  Target: LAMA2; (+) strand; PAM type: NRG; PAM sequence: GAG
tgggatttaaggatgagtgg

SEQ ID NO: 129275 - DNA, 20 bp, Artificial Sequence
  Description of Artificial Sequence: Synthetic oligonucleotide
  Target: LAMA2; (+) strand; PAM type: NRG; PAM sequence: TAG
ttaaggatgagtgggagact

SEQ ID NO: 129276 - DNA, 20 bp, Artificial Sequence
  Description of Artificial Sequence: Synthetic oligonucleotide
  Target: LAMA2; (+) strand; PAM type: NRG; PAM sequence: AGG
taaggatgagtgggagactt

SEQ ID NO: 129277 - DNA, 20 bp, Artificial Sequence
  Description of Artificial Sequence: Synthetic oligonucleotide
  Target: LAMA2; (+) strand; PAM type: NRG; PAM sequence: TGG
gagtgggagacttaggttct

SEQ ID NO: 129278 - DNA, 20 bp, Artificial Sequence
  Description of Artificial Sequence: Synthetic oligonucleotide
  Target: LAMA2; (+) strand; PAM type: NRG; PAM sequence: AAG
ggttcttggttctgtgttgt

SEQ ID NO: 129279 - DNA, 20 bp, Artificial Sequence
  Description of Artificial Sequence: Synthetic oligonucleotide
  Target: LAMA2; (+) strand; PAM type: NRG; PAM sequence: AAG
tgtgttgtaagtcattctcc

SEQ ID NO: 129280 - DNA, 20 bp, Artificial Sequence
  Description of Artificial Sequence: Synthetic oligonucleotide
  Target: LAMA2; (+) strand; PAM type: NRG; PAM sequence: TAG
tgtaagtcattctccaagtg

SEQ ID NO: 129281 - DNA, 20 bp, Artificial Sequence
  Description of Artificial Sequence: Synthetic oligonucleotide
  Target: LAMA2; (+) strand; PAM type: NRG; PAM sequence: CAG
aagtcattctccaagtgtag

SEQ ID NO: 129282 - DNA, 20 bp, Artificial Sequence
  Description of Artificial Sequence: Synthetic oligonucleotide
  Target: LAMA2; (+) strand; PAM type: NRG; PAM sequence: AGG
agtcattctccaagtgtagc

SEQ ID NO: 129283 - DNA, 20 bp, Artificial Sequence
  Description of Artificial Sequence: Synthetic oligonucleotide
  Target: LAMA2; (+) strand; PAM type: NRG; PAM sequence: TAG
ctccaagtgtagcaggacca

SEQ ID NO: 129284 - DNA, 20 bp, Artificial Sequence
  Description of Artificial Sequence: Synthetic oligonucleotide
  Target: LAMA2; (+) strand; PAM type: NRG; PAM sequence: CAG
actgatgaaaatgatttata

SEQ ID NO: 129285 - DNA, 20 bp, Artificial Sequence
  Description of Artificial Sequence: Synthetic oligonucleotide
  Target: LAMA2; (+) strand; PAM type: NRG; PAM sequence: TAG
gatgaaaatgatttatacag

SEQ ID NO: 129286 - DNA, 20 bp, Artificial Sequence
  Description of Artificial Sequence: Synthetic oligonucleotide
  Target: LAMA2; (+) strand; PAM type: NRG; PAM sequence: AAG
ccaatgcccatgtatgaaca

SEQ ID NO: 129287 - DNA, 20 bp, Artificial Sequence
  Description of Artificial Sequence: Synthetic oligonucleotide
  Target: LAMA2; (+) strand; PAM type: NRG; PAM sequence: AGG
caatgcccatgtatgaacaa

SEQ ID NO: 129288 - DNA, 20 bp, Artificial Sequence
  Description of Artificial Sequence: Synthetic oligonucleotide
  Target: LAMA2; (+) strand; PAM type: NRG; PAM sequence: TGG
actgttcctgtcttctaaat

SEQ ID NO: 129289 - DNA, 20 bp, Artificial Sequence
  Description of Artificial Sequence: Synthetic oligonucleotide
  Target: LAMA2; (+) strand; PAM type: NRG; PAM sequence: GGG
ctgttcctgtcttctaaatt

SEQ ID NO: 129290 - DNA, 20 bp, Artificial Sequence
  Description of Artificial Sequence: Synthetic oligonucleotide
  Target: LAMA2; (+) strand; PAM type: NRG; PAM sequence: GGG
tgttcctgtcttctaaattg

SEQ ID NO: 129291 - DNA, 20 bp, Artificial Sequence
  Description of Artificial Sequence: Synthetic oligonucleotide
  Target: LAMA2; (+) strand; PAM type: NRG; PAM sequence: CAG
gtcttctaaattggggttcc

SEQ ID NO: 129292 - DNA, 20 bp, Artificial Sequence
  Description of Artificial Sequence: Synthetic oligonucleotide
  Target: LAMA2; (+) strand; PAM type: NRG; PAM sequence: CAG
ttggggttcccagtgtaata

SEQ ID NO: 129293 - DNA, 20 bp, Artificial Sequence
  Description of Artificial Sequence: Synthetic oligonucleotide
  Target: LAMA2; (+) strand; PAM type: NRG; PAM sequence: AGG
tggggttcccagtgtaatac

SEQ ID NO: 129294 - DNA, 20 bp, Artificial Sequence
  Description of Artificial Sequence: Synthetic oligonucleotide
  Target: LAMA2; (+) strand; PAM type: NRG; PAM sequence: AAG
ggttcccagtgtaatacagg

SEQ ID NO: 129295 - DNA, 20 bp, Artificial Sequence
  Description of Artificial Sequence: Synthetic oligonucleotide
  Target: LAMA2; (+) strand; PAM type: NRG; PAM sequence: TAG
acaggaagactactgtgtgc

SEQ ID NO: 129296 - DNA, 20 bp, Artificial Sequence
  Description of Artificial Sequence: Synthetic oligonucleotide
  Target: LAMA2; (+) strand; PAM type: NRG; PAM sequence: CAG
gactactgtgtgctagtaaa

SEQ ID NO: 129297 - DNA, 20 bp, Artificial Sequence
  Description of Artificial Sequence: Synthetic oligonucleotide
  Target: LAMA2; (+) strand; PAM type: NRG; PAM sequence: AAG
actgtgtgctagtaaacaga

SEQ ID NO: 129298 - DNA, 20 bp, Artificial Sequence
  Description of Artificial Sequence: Synthetic oligonucleotide
  Target: LAMA2; (+) strand; PAM type: NRG; PAM sequence: TGG
tttgaccatattttcctcgt

SEQ ID NO: 129299 - DNA, 20 bp, Artificial Sequence
  Description of Artificial Sequence: Synthetic oligonucleotide
  Target: LAMA2; (+) strand; PAM type: NRG; PAM sequence: TGG
ttcctcgttggatgtgttta

SEQ ID NO: 129300 - DNA, 20 bp, Artificial Sequence
  Description of Artificial Sequence: Synthetic oligonucleotide
  Target: LAMA2; (+) strand; PAM type: NRG; PAM sequence: GAG
tattctgcttttatctttct

SEQ ID NO: 129301 - DNA, 20 bp, Artificial Sequence
  Description of Artificial Sequence: Synthetic oligonucleotide
  Target: LAMA2; (+) strand; PAM type: NRG; PAM sequence: TGG
tctgagattaatgccttatc

SEQ ID NO: 129302 - DNA, 20 bp, Artificial Sequence
  Description of Artificial Sequence: Synthetic oligonucleotide
  Target: LAMA2; (+) strand; PAM type: NRG; PAM sequence: GAG
tatctggccttttttcctat

SEQ ID NO: 129303 - DNA, 20 bp, Artificial Sequence
  Description of Artificial Sequence: Synthetic oligonucleotide
  Target: LAMA2; (+) strand; PAM type: NRG; PAM sequence: TGG
ttttttcctatgagtacctt

SEQ ID NO: 129304 - DNA, 20 bp, Artificial Sequence
  Description of Artificial Sequence: Synthetic oligonucleotide
  Target: LAMA2; (+) strand; PAM type: NRG; PAM sequence: AAG
tatgagtacctttggttata

SEQ ID NO: 129305 - DNA, 20 bp, Artificial Sequence
  Description of Artificial Sequence: Synthetic oligonucleotide
  Target: LAMA2; (+) strand; PAM type: NRG; PAM sequence: CAG
attgctacattatcaatttt

SEQ ID NO: 129306 - DNA, 20 bp, Artificial Sequence
  Description of Artificial Sequence: Synthetic oligonucleotide
  Target: LAMA2; (+) strand; PAM type: NRG; PAM sequence: AAG
tttctttttttttttttttc

SEQ ID NO: 129307 - DNA, 20 bp, Artificial Sequence
  Description of Artificial Sequence: Synthetic oligonucleotide
  Target: LAMA2; (+) strand; PAM type: NRG; PAM sequence: AGG
ttctttttttttttttttca

SEQ ID NO: 129308 - DNA, 20 bp, Artificial Sequence
  Description of Artificial Sequence: Synthetic oligonucleotide
  Target: LAMA2; (+) strand; PAM type: NRG; PAM sequence: CAG
caaggtcttgacgtgttgcc

SEQ ID NO: 129309 - DNA, 20 bp, Artificial Sequence
  Description of Artificial Sequence: Synthetic oligonucleotide
  Target: LAMA2; (+) strand; PAM type: NRG; PAM sequence: AGG
aaggtcttgacgtgttgccc

SEQ ID NO: 129310 - DNA, 20 bp, Artificial Sequence
  Description of Artificial Sequence: Synthetic oligonucleotide
  Target: LAMA2; (+) strand; PAM type: NRG; PAM sequence: TGG
tcttgacgtgttgcccaggc

SEQ ID NO: 129311 - DNA, 20 bp, Artificial Sequence
  Description of Artificial Sequence: Synthetic oligonucleotide
  Target: LAMA2; (+) strand; PAM type: NRG; PAM sequence: GAG
ttgacgtgttgcccaggctg

SEQ ID NO: 129312 - DNA, 20 bp, Artificial Sequence
  Description of Artificial Sequence: Synthetic oligonucleotide
  Target: LAMA2; (+) strand; PAM type: NRG; PAM sequence: CAG
gtgttgcccaggctggagtg

SEQ ID NO: 129313 - DNA, 20 bp, Artificial Sequence
  Description of Artificial Sequence: Synthetic oligonucleotide
  Target: LAMA2; (+) strand; PAM type: NRG; PAM sequence: TAG
ttgcccaggctggagtgcag

SEQ ID NO: 129314 - DNA, 20 bp, Artificial Sequence
  Description of Artificial Sequence: Synthetic oligonucleotide
  Target: LAMA2; (+) strand; PAM type: NRG; PAM sequence: TGG
ggagtgcagtagtgaaatca

SEQ ID NO: 129315 - DNA, 20 bp, Artificial Sequence
  Description of Artificial Sequence: Synthetic oligonucleotide
  Target: LAMA2; (+) strand; PAM type: NRG; PAM sequence: CAG
agtgaaatcatggctcactg

SEQ ID NO: 129316 - DNA, 20 bp, Artificial Sequence
  Description of Artificial Sequence: Synthetic oligonucleotide
  Target: LAMA2; (+) strand; PAM type: NRG; PAM sequence: TGG
tcactgcagcctcaacctcc

SEQ ID NO: 129317 - DNA, 20 bp, Artificial Sequence
  Description of Artificial Sequence: Synthetic oligonucleotide
  Target: LAMA2; (+) strand; PAM type: NRG; PAM sequence: GGG
cactgcagcctcaacctcct

SEQ ID NO: 129318 - DNA, 20 bp, Artificial Sequence
  Description of Artificial Sequence: Synthetic oligonucleotide
  Target: LAMA2; (+) strand; PAM type: NRG; PAM sequence: AAG
agcctcaacctcctgggctc

SEQ ID NO: 129319 - DNA, 20 bp, Artificial Sequence
  Description of Artificial Sequence: Synthetic oligonucleotide
  Target: LAMA2; (+) strand; PAM type: NRG; PAM sequence: AAG
ccttccacctccgcaccccc

SEQ ID NO: 129320 - DNA, 20 bp, Artificial Sequence
  Description of Artificial Sequence: Synthetic oligonucleotide
  Target: LAMA2; (+) strand; PAM type: NRG; PAM sequence: CAG
tccacctccgcacccccaag

SEQ ID NO: 129321 - DNA, 20 bp, Artificial Sequence
  Description of Artificial Sequence: Synthetic oligonucleotide
  Target: LAMA2; (+) strand; PAM type: NRG; PAM sequence: TGG
cctccgcacccccaagcagc

SEQ ID NO: 129322 - DNA, 20 bp, Artificial Sequence
  Description of Artificial Sequence: Synthetic oligonucleotide
  Target: LAMA2; (+) strand; PAM type: NRG; PAM sequence: GGG
ctccgcacccccaagcagct

SEQ ID NO: 129323 - DNA, 20 bp, Artificial Sequence
  Description of Artificial Sequence: Synthetic oligonucleotide
  Target: LAMA2; (+) strand; PAM type: NRG; PAM sequence: CAG
cccccaagcagctgggacta

SEQ ID NO: 129324 - DNA, 20 bp, Artificial Sequence
  Description of Artificial Sequence: Synthetic oligonucleotide
  Target: LAMA2; (+) strand; PAM type: NRG; PAM sequence: AGG
ccccaagcagctgggactac

SEQ ID NO: 129325 - DNA, 20 bp, Artificial Sequence
  Description of Artificial Sequence: Synthetic oligonucleotide
  Target: LAMA2; (+) strand; PAM type: NRG; PAM sequence: AAG
aagcagctgggactacaggc

SEQ ID NO: 129326 - DNA, 20 bp, Artificial Sequence
  Description of Artificial Sequence: Synthetic oligonucleotide
  Target: LAMA2; (+) strand; PAM type: NRG; PAM sequence: AGG
agcagctgggactacaggca

SEQ ID NO: 129327 - DNA, 20 bp, Artificial Sequence
  Description of Artificial Sequence: Synthetic oligonucleotide
  Target: LAMA2; (+) strand; PAM type: NRG; PAM sequence: GGG
gcagctgggactacaggcaa

SEQ ID NO: 129328 - DNA, 20 bp, Artificial Sequence
  Description of Artificial Sequence: Synthetic oligonucleotide
  Target: LAMA2; (+) strand; PAM type: NRG; PAM sequence: TAG
taatttatttttgtttttca

SEQ ID NO: 129329 - DNA, 20 bp, Artificial Sequence
  Description of Artificial Sequence: Synthetic oligonucleotide
  Target: LAMA2; (+) strand; PAM type: NRG; PAM sequence: GAG
atttatttttgtttttcata

SEQ ID NO: 129330 - DNA, 20 bp, Artificial Sequence
  Description of Artificial Sequence: Synthetic oligonucleotide
  Target: LAMA2; (+) strand; PAM type: NRG; PAM sequence: GAG
tttttgtttttcatagagat

SEQ ID NO: 129331 - DNA, 20 bp, Artificial Sequence
  Description of Artificial Sequence: Synthetic oligonucleotide
  Target: LAMA2; (+) strand; PAM type: NRG; PAM sequence: AGG
ttttgtttttcatagagatg

SEQ ID NO: 129332 - DNA, 20 bp, Artificial Sequence
  Description of Artificial Sequence: Synthetic oligonucleotide
  Target: LAMA2; (+) strand; PAM type: NRG; PAM sequence: CAG
tgaggtctcactatgttgcc

SEQ ID NO: 129333 - DNA, 20 bp, Artificial Sequence
  Description of Artificial Sequence: Synthetic oligonucleotide
  Target: LAMA2; (+) strand; PAM type: NRG; PAM sequence: AGG
gaggtctcactatgttgccc

SEQ ID NO: 129334 - DNA, 20 bp, Artificial Sequence
  Description of Artificial Sequence: Synthetic oligonucleotide
  Target: LAMA2; (+) strand; PAM type: NRG; PAM sequence: TGG
ccaggctgctctcaaactcc

SEQ ID NO: 129335 - DNA, 20 bp, Artificial Sequence
  Description of Artificial Sequence: Synthetic oligonucleotide
  Target: LAMA2; (+) strand; PAM type: NRG; PAM sequence: GGG
caggctgctctcaaactcct

SEQ ID NO: 129336 - DNA, 20 bp, Artificial Sequence
  Description of Artificial Sequence: Synthetic oligonucleotide
  Target: LAMA2; (+) strand; PAM type: NRG; PAM sequence: AAG
tgctctcaaactcctgggcc

SEQ ID NO: 129337 - DNA, 20 bp, Artificial Sequence
  Description of Artificial Sequence: Synthetic oligonucleotide
  Target: LAMA2; (+) strand; PAM type: NRG; PAM sequence: CAG
gccaagtgatccttctgcct

SEQ ID NO: 129338 - DNA, 20 bp, Artificial Sequence
  Description of Artificial Sequence: Synthetic oligonucleotide
  Target: LAMA2; (+) strand; PAM type: NRG; PAM sequence: AAG
ccttctgcctcagcctttca

SEQ ID NO: 129339 - DNA, 20 bp, Artificial Sequence
  Description of Artificial Sequence: Synthetic oligonucleotide
  Target: LAMA2; (+) strand; PAM type: NRG; PAM sequence: TGG
gcctcagcctttcaaagtgc

SEQ ID NO: 129340 - DNA, 20 bp, Artificial Sequence
  Description of Artificial Sequence: Synthetic oligonucleotide
  Target: LAMA2; (+) strand; PAM type: NRG; PAM sequence: GGG
cctcagcctttcaaagtgct

SEQ ID NO: 129341 - DNA, 20 bp, Artificial Sequence
  Description of Artificial Sequence: Synthetic oligonucleotide
  Target: LAMA2; (+) strand; PAM type: NRG; PAM sequence: CAG
ctttcaaagtgctgggatta

SEQ ID NO: 129342 - DNA, 20 bp, Artificial Sequence
  Description of Artificial Sequence: Synthetic oligonucleotide
  Target: LAMA2; (+) strand; PAM type: NRG; PAM sequence: GAG
agtgctgggattacagacat

SEQ ID NO: 129343 - DNA, 20 bp, Artificial Sequence
  Description of Artificial Sequence: Synthetic oligonucleotide
  Target: LAMA2; (+) strand; PAM type: NRG; PAM sequence: GAG
ccaaacttttcttttttttt

SEQ ID NO: 129344 - DNA, 20 bp, Artificial Sequence
  Description of Artificial Sequence: Synthetic oligonucleotide
  Target: LAMA2; (+) strand; PAM type: NRG; PAM sequence: GAG
aaacttttctttttttttga

SEQ ID NO: 129345 - DNA, 20 bp, Artificial Sequence
  Description of Artificial Sequence: Synthetic oligonucleotide
  Target: LAMA2; (+) strand; PAM type: NRG; PAM sequence: TAG
tttttgagagattcttaaac

SEQ ID NO: 129346 - DNA, 20 bp, Artificial Sequence
  Description of Artificial Sequence: Synthetic oligonucleotide
  Target: LAMA2; (+) strand; PAM type: NRG; PAM sequence: CAG
gactgattcattaccttcaa

SEQ ID NO: 129347 - DNA, 20 bp, Artificial Sequence
  Description of Artificial Sequence: Synthetic oligonucleotide
  Target: LAMA2; (+) strand; PAM type: NRG; PAM sequence: CAG
attaccttcaacagtgcttt

SEQ ID NO: 129348 - DNA, 20 bp, Artificial Sequence
  Description of Artificial Sequence: Synthetic oligonucleotide
  Target: LAMA2; (+) strand; PAM type: NRG; PAM sequence: TGG
acagtgctttcagcctctga

SEQ ID NO: 129349 - DNA, 20 bp, Artificial Sequence
  Description of Artificial Sequence: Synthetic oligonucleotide
  Target: LAMA2; (+) strand; PAM type: NRG; PAM sequence: CAG
gctttcagcctctgatggtt

SEQ ID NO: 129350 - DNA, 20 bp, Artificial Sequence
  Description of Artificial Sequence: Synthetic oligonucleotide
  Target: LAMA2; (+) strand; PAM type: NRG; PAM sequence: GAG
tttcagcctctgatggttca

SEQ ID NO: 129351 - DNA, 20 bp, Artificial Sequence
  Description of Artificial Sequence: Synthetic oligonucleotide
  Target: LAMA2; (+) strand; PAM type: NRG; PAM sequence: CAG
actttatatttcacctgaat

SEQ ID NO: 129352 - DNA, 20 bp, Artificial Sequence
  Description of Artificial Sequence: Synthetic oligonucleotide
  Target: LAMA2; (+) strand; PAM type: NRG; PAM sequence: AGG
ctttatatttcacctgaatc

SEQ ID NO: 129353 - DNA, 20 bp, Artificial Sequence
  Description of Artificial Sequence: Synthetic oligonucleotide
  Target: LAMA2; (+) strand; PAM type: NRG; PAM sequence: CGG
atttcacctgaatcaggttt

SEQ ID NO: 129354 - DNA, 20 bp, Artificial Sequence
  Description of Artificial Sequence: Synthetic oligonucleotide
  Target: LAMA2; (+) strand; PAM type: NRG; PAM sequence: GAG
acctgaatcaggtttcggtt

SEQ ID NO: 129355 - DNA, 20 bp, Artificial Sequence
  Description of Artificial Sequence: Synthetic oligonucleotide
  Target: LAMA2; (+) strand; PAM type: NRG; PAM sequence: GAG
ggttgagacaataattttct

SEQ ID NO: 129356 - DNA, 20 bp, Artificial Sequence
  Description of Artificial Sequence: Synthetic oligonucleotide
  Target: LAMA2; (+) strand; PAM type: NRG; PAM sequence: TAG
atttattttcaacttttctc

SEQ ID NO: 129357 - DNA, 20 bp, Artificial Sequence
  Description of Artificial Sequence: Synthetic oligonucleotide
  Target: LAMA2; (+) strand; PAM type: NRG; PAM sequence: CAG
tgttttgataaataatctta

SEQ ID NO: 129358 - DNA, 20 bp, Artificial Sequence
  Description of Artificial Sequence: Synthetic oligonucleotide
  Target: LAMA2; (+) strand; PAM type: NRG; PAM sequence: TGG
tttgataaataatcttacag

SEQ ID NO: 129359 - DNA, 20 bp, Artificial Sequence
  Description of Artificial Sequence: Synthetic oligonucleotide
  Target: LAMA2; (+) strand; PAM type: NRG; PAM sequence: GAG
tgataaataatcttacagtg

SEQ ID NO: 129360 - DNA, 20 bp, Artificial Sequence
  Description of Artificial Sequence: Synthetic oligonucleotide
  Target: LAMA2; (+) strand; PAM type: NRG; PAM sequence: AGG
gataaataatcttacagtgg

SEQ ID NO: 129361 - DNA, 20 bp, Artificial Sequence
  Description of Artificial Sequence: Synthetic oligonucleotide
  Target: LAMA2; (+) strand; PAM type: NRG; PAM sequence: AAG
aaataatcttacagtggagg

SEQ ID NO: 129362 - DNA, 20 bp, Artificial Sequence
  Description of Artificial Sequence: Synthetic oligonucleotide
  Target: LAMA2; (+) strand; PAM type: NRG; PAM sequence: CAG
tttttttctcttgtttgcct

SEQ ID NO: 129363 - DNA, 20 bp, Artificial Sequence
  Description of Artificial Sequence: Synthetic oligonucleotide
  Target: LAMA2; (+) strand; PAM type: NRG; PAM sequence: GAG
tttttctcttgtttgcctca

SEQ ID NO: 129364 - DNA, 20 bp, Artificial Sequence
  Description of Artificial Sequence: Synthetic oligonucleotide
  Target: LAMA2; (+) strand; PAM type: NRG; PAM sequence: TGG
ctcttgtttgcctcagagta

SEQ ID NO: 129365 - DNA, 20 bp, Artificial Sequence
  Description of Artificial Sequence: Synthetic oligonucleotide
  Target: LAMA2; (+) strand; PAM type: NRG; PAM sequence: TAG
tggttgattcattctctccc

SEQ ID NO: 129366 - DNA, 20 bp, Artificial Sequence
  Description of Artificial Sequence: Synthetic oligonucleotide
  Target: LAMA2; (+) strand; PAM type: NRG; PAM sequence: AGG
ggttgattcattctctccct

SEQ ID NO: 129367 - DNA, 20 bp, Artificial Sequence
  Description of Artificial Sequence: Synthetic oligonucleotide
  Target: LAMA2; (+) strand; PAM type: NRG; PAM sequence: TGG
gattcattctctccctaggt

SEQ ID NO: 129368 - DNA, 20 bp, Artificial Sequence
  Description of Artificial Sequence: Synthetic oligonucleotide
  Target: LAMA2; (+) strand; PAM type: NRG; PAM sequence: GAG
ttcattctctccctaggttg

SEQ ID NO: 129369 - DNA, 20 bp, Artificial Sequence
  Description of Artificial Sequence: Synthetic oligonucleotide
  Target: LAMA2; (+) strand; PAM type: NRG; PAM sequence: CAG
tccctaggttggagccattg

SEQ ID NO: 129370 - DNA, 20 bp, Artificial Sequence
  Description of Artificial Sequence: Synthetic oligonucleotide
  Target: LAMA2; (+) strand; PAM type: NRG; PAM sequence: TAG
actccaaaatatatacattc

SEQ ID NO: 129371 - DNA, 20 bp, Artificial Sequence
  Description of Artificial Sequence: Synthetic oligonucleotide
  Target: LAMA2; (+) strand; PAM type: NRG; PAM sequence: AAG
aaaatatatacattctagct

SEQ ID NO: 129372 - DNA, 20 bp, Artificial Sequence
  Description of Artificial Sequence: Synthetic oligonucleotide
  Target: LAMA2; (+) strand; PAM type: NRG; PAM sequence: CAG
acattctagctaagtacttt

SEQ ID NO: 129373 - DNA, 20 bp, Artificial Sequence
  Description of Artificial Sequence: Synthetic oligonucleotide
  Target: LAMA2; (+) strand; PAM type: NRG; PAM sequence: GAG
ctaagtactttcagcactat

SEQ ID NO: 129374 - DNA, 20 bp, Artificial Sequence
  Description of Artificial Sequence: Synthetic oligonucleotide
  Target: LAMA2; (+) strand; PAM type: NRG; PAM sequence: AAG
tatgagttgtccttctttta

SEQ ID NO: 129375 - DNA, 20 bp, Artificial Sequence
  Description of Artificial Sequence: Synthetic oligonucleotide
  Target: LAMA2; (+) strand; PAM type: NRG; PAM sequence: GAG
tgagttgtccttcttttaaa

SEQ ID NO: 129376 - DNA, 20 bp, Artificial Sequence
  Description of Artificial Sequence: Synthetic oligonucleotide
  Target: LAMA2; (+) strand; PAM type: NRG; PAM sequence: AAG
aaaatgatatcattaaaaac

SEQ ID NO: 129377 - DNA, 20 bp, Artificial Sequence
  Description of Artificial Sequence: Synthetic oligonucleotide
  Target: LAMA2; (+) strand; PAM type: NRG; PAM sequence: AAG
cattccatgatttattgtat

SEQ ID NO: 129378 - DNA, 20 bp, Artificial Sequence
  Description of Artificial Sequence: Synthetic oligonucleotide
  Target: LAMA2; (+) strand; PAM type: NRG; PAM sequence: GAG
ttccatgatttattgtataa

SEQ ID NO: 129379 - DNA, 20 bp, Artificial Sequence
  Description of Artificial Sequence: Synthetic oligonucleotide
  Target: LAMA2; (+) strand; PAM type: NRG; PAM sequence: AAG
catgatttattgtataagag

SEQ ID NO: 129380 - DNA, 20 bp, Artificial Sequence
  Description of Artificial Sequence: Synthetic oligonucleotide
  Target: LAMA2; (+) strand; PAM type: NRG; PAM sequence: AAG
tttattgtataagagaagat

SEQ ID NO: 129381 - DNA, 20 bp, Artificial Sequence
  Description of Artificial Sequence: Synthetic oligonucleotide
  Target: LAMA2; (+) strand; PAM type: NRG; PAM sequence: CGG
tgtataagagaagataagta

SEQ ID NO: 129382 - DNA, 20 bp, Artificial Sequence
  Description of Artificial Sequence: Synthetic oligonucleotide
  Target: LAMA2; (+) strand; PAM type: NRG; PAM sequence: GAG
tataagagaagataagtacg

SEQ ID NO: 129383 - DNA, 20 bp, Artificial Sequence
  Description of Artificial Sequence: Synthetic oligonucleotide
  Target: LAMA2; (+) strand; PAM type: NRG; PAM sequence: TAG
acggagttgtaaacctgcaa

SEQ ID NO: 129384 - DNA, 20 bp, Artificial Sequence
  Description of Artificial Sequence: Synthetic oligonucleotide
  Target: LAMA2; (+) strand; PAM type: NRG; PAM sequence: TGG
cctgcaatagaataataccc

SEQ ID NO: 129385 - DNA, 20 bp, Artificial Sequence
  Description of Artificial Sequence: Synthetic oligonucleotide
  Target: LAMA2; (+) strand; PAM type: NRG; PAM sequence: GAG
ggatatccaccttcactgat

SEQ ID NO: 129386 - DNA, 20 bp, Artificial Sequence
  Description of Artificial Sequence: Synthetic oligonucleotide
  Target: LAMA2; (+) strand; PAM type: NRG; PAM sequence: GAG
cctgttaaccaaatgctttt

SEQ ID NO: 129387 - DNA, 20 bp, Artificial Sequence
  Description of Artificial Sequence: Synthetic oligonucleotide
  Target: LAMA2; (+) strand; PAM type: NRG; PAM sequence: GAG
tgttaaccaaatgcttttga

SEQ ID NO: 129388 - DNA, 20 bp, Artificial Sequence
  Description of Artificial Sequence: Synthetic oligonucleotide
  Target: LAMA2; (+) strand; PAM type: NRG; PAM sequence: AAG
ccaaatgcttttgagagtca

SEQ ID NO: 129389 - DNA, 20 bp, Artificial Sequence
  Description of Artificial Sequence: Synthetic oligonucleotide
  Target: LAMA2; (+) strand; PAM type: NRG; PAM sequence: AGG
caaatgcttttgagagtcaa

SEQ ID NO: 129390 - DNA, 20 bp, Artificial Sequence
  Description of Artificial Sequence: Synthetic oligonucleotide
  Target: LAMA2; (+) strand; PAM type: NRG; PAM sequence: CAG
atgcttttgagagtcaaagg

SEQ ID NO: 129391 - DNA, 20 bp, Artificial Sequence
  Description of Artificial Sequence: Synthetic oligonucleotide
  Target: LAMA2; (+) strand; PAM type: NRG; PAM sequence: AGG
tgcttttgagagtcaaaggc

SEQ ID NO: 129392 - DNA, 20 bp, Artificial Sequence
  Description of Artificial Sequence: Synthetic oligonucleotide
  Target: LAMA2; (+) strand; PAM type: NRG; PAM sequence: GGG
gcttttgagagtcaaaggca

SEQ ID NO: 129393 - DNA, 20 bp, Artificial Sequence
  Description of Artificial Sequence: Synthetic oligonucleotide
  Target: LAMA2; (+) strand; PAM type: NRG; PAM sequence: GAG
gagagtcaaaggcagggtct

SEQ ID NO: 129394 - DNA, 20 bp, Artificial Sequence
  Description of Artificial Sequence: Synthetic oligonucleotide
  Target: LAMA2; (+) strand; PAM type: NRG; PAM sequence: GAG
gagtcaaaggcagggtctga

SEQ ID NO: 129395 - DNA, 20 bp, Artificial Sequence
  Description of Artificial Sequence: Synthetic oligonucleotide
  Target: LAMA2; (+) strand; PAM type: NRG; PAM sequence: AGG
agtcaaaggcagggtctgag

SEQ ID NO: 129396 - DNA, 20 bp, Artificial Sequence
  Description of Artificial Sequence: Synthetic oligonucleotide
  Target: LAMA2; (+) strand; PAM type: NRG; PAM sequence: GAG
aatatttgtaatgaatcatt

SEQ ID NO: 129397 - DNA, 20 bp, Artificial Sequence
  Description of Artificial Sequence: Synthetic oligonucleotide
  Target: LAMA2; (+) strand; PAM type: NRG; PAM sequence: AGG
atatttgtaatgaatcattg

SEQ ID NO: 129398 - DNA, 20 bp, Artificial Sequence
  Description of Artificial Sequence: Synthetic oligonucleotide
  Target: LAMA2; (+) strand; PAM type: NRG; PAM sequence: TAG
tcattgaggtcgcttgtgaa

SEQ ID NO: 129399 - DNA, 20 bp, Artificial Sequence
  Description of Artificial Sequence: Synthetic oligonucleotide
  Target: LAMA2; (+) strand; PAM type: NRG; PAM sequence: AAG
tagttgaaacttccaatatt

SEQ ID NO: 129400 - DNA, 20 bp, Artificial Sequence
  Description of Artificial Sequence: Synthetic oligonucleotide
  Target: LAMA2; (+) strand; PAM type: NRG; PAM sequence: AGG
agttgaaacttccaatatta

SEQ ID NO: 129401 - DNA, 20 bp, Artificial Sequence
  Description of Artificial Sequence: Synthetic oligonucleotide
  Target: LAMA2; (+) strand; PAM type: NRG; PAM sequence: TAG
cttccaatattaaggctgtg

SEQ ID NO: 129402 - DNA, 20 bp, Artificial Sequence
  Description of Artificial Sequence: Synthetic oligonucleotide
  Target: LAMA2; (+) strand; PAM type: NRG; PAM sequence: AGG
ttccaatattaaggctgtgt

SEQ ID NO: 129403 - DNA, 20 bp, Artificial Sequence
  Description of Artificial Sequence: Synthetic oligonucleotide
  Target: LAMA2; (+) strand; PAM type: NRG; PAM sequence: AAG
atattaaggctgtgtaggcc

SEQ ID NO: 129404 - DNA, 20 bp, Artificial Sequence
  Description of Artificial Sequence: Synthetic oligonucleotide
  Target: LAMA2; (+) strand; PAM type: NRG; PAM sequence: TAG
ggctgtgtaggccaagaatc

SEQ ID NO: 129405 - DNA, 20 bp, Artificial Sequence
  Description of Artificial Sequence: Synthetic oligonucleotide
  Target: LAMA2; (+) strand; PAM type: NRG; PAM sequence: CAG
caagaatctagttatccttt

SEQ ID NO: 129406 - DNA, 20 bp, Artificial Sequence
  Description of Artificial Sequence: Synthetic oligonucleotide
  Target: LAMA2; (+) strand; PAM type: NRG; PAM sequence: AAG
gaccacctactctgtgcctt

SEQ ID NO: 129407 - DNA, 20 bp, Artificial Sequence
  Description of Artificial Sequence: Synthetic oligonucleotide
  Target: LAMA2; (+) strand; PAM type: NRG; PAM sequence: AAG
ctactctgtgccttaagcaa

SEQ ID NO: 129408 - DNA, 20 bp, Artificial Sequence
  Description of Artificial Sequence: Synthetic oligonucleotide
  Target: LAMA2; (+) strand; PAM type: NRG; PAM sequence: GAG
tctttttttttttttttttt

SEQ ID NO: 129409 - DNA, 20 bp, Artificial Sequence
  Description of Artificial Sequence: Synthetic oligonucleotide
  Target: LAMA2; (+) strand; PAM type: NRG; PAM sequence: GAG
ttttttttttttttttttga

SEQ ID NO: 129410 - DNA, 20 bp, Artificial Sequence
  Description of Artificial Sequence: Synthetic oligonucleotide
  Target: LAMA2; (+) strand; PAM type: NRG; PAM sequence: TGG
tttttttttttttgagagca

SEQ ID NO: 129411 - DNA, 20 bp, Artificial Sequence
  Description of Artificial Sequence: Synthetic oligonucleotide
  Target: LAMA2; (+) strand; PAM type: NRG; PAM sequence: TGG
ttttttttgagagcatggtg

SEQ ID NO: 129412 - DNA, 20 bp, Artificial Sequence
  Description of Artificial Sequence: Synthetic oligonucleotide
  Target: LAMA2; (+) strand; PAM type: NRG; PAM sequence: CGG
ttgagagcatggtgtggtct

SEQ ID NO: 129413 - DNA, 20 bp, Artificial Sequence
  Description of Artificial Sequence: Synthetic oligonucleotide
  Target: LAMA2; (+) strand; PAM type: NRG; PAM sequence: CGG
tcactgcaacattcgcctcc

SEQ ID NO: 129414 - DNA, 20 bp, Artificial Sequence
  Description of Artificial Sequence: Synthetic oligonucleotide
  Target: LAMA2; (+) strand; PAM type: NRG; PAM sequence: GGG
cactgcaacattcgcctccc

SEQ ID NO: 129415 - DNA, 20 bp, Artificial Sequence
  Description of Artificial Sequence: Synthetic oligonucleotide
  Target: LAMA2; (+) strand; PAM type: NRG; PAM sequence: AAG
aacattcgcctcccgggttc

SEQ ID NO: 129416 - DNA, 20 bp, Artificial Sequence
  Description of Artificial Sequence: Synthetic oligonucleotide
  Target: LAMA2; (+) strand; PAM type: NRG; PAM sequence: CAG
ttcaagcgattcacttgcct

SEQ ID NO: 129417 - DNA, 20 bp, Artificial Sequence
  Description of Artificial Sequence: Synthetic oligonucleotide
  Target: LAMA2; (+) strand; PAM type: NRG; PAM sequence: GAG
ttcacttgcctcagcctcct

SEQ ID NO: 129418 - DNA, 20 bp, Artificial Sequence
  Description of Artificial Sequence: Synthetic oligonucleotide
  Target: LAMA2; (+) strand; PAM type: NRG; PAM sequence: TAG
acttgcctcagcctcctgag

SEQ ID NO: 129419 - DNA, 20 bp, Artificial Sequence
  Description of Artificial Sequence: Synthetic oligonucleotide
  Target: LAMA2; (+) strand; PAM type: NRG; PAM sequence: TGG
gcctcagcctcctgagtagc

SEQ ID NO: 129420 - DNA, 20 bp, Artificial Sequence
  Description of Artificial Sequence: Synthetic oligonucleotide
  Target: LAMA2; (+) strand; PAM type: NRG; PAM sequence: GGG
cctcagcctcctgagtagct

SEQ ID NO: 129421 - DNA, 20 bp, Artificial Sequence
  Description of Artificial Sequence: Synthetic oligonucleotide
  Target: LAMA2; (+) strand; PAM type: NRG; PAM sequence: CAG
ctcctgagtagctgggatta

SEQ ID NO: 129422 - DNA, 20 bp, Artificial Sequence
  Description of Artificial Sequence: Synthetic oligonucleotide
  Target: LAMA2; (+) strand; PAM type: NRG; PAM sequence: AGG
tcctgagtagctgggattac

SEQ ID NO: 129423 - DNA, 20 bp, Artificial Sequence
  Description of Artificial Sequence: Synthetic oligonucleotide
  Target: LAMA2; (+) strand; PAM type: NRG; PAM sequence: AAG
gattacaggcgcctgccacc

SEQ ID NO: 129424 - DNA, 20 bp, Artificial Sequence
  Description of Artificial Sequence: Synthetic oligonucleotide
  Target: LAMA2; (+) strand; PAM type: NRG; PAM sequence: TGG
acaggcgcctgccaccaagc

SEQ ID NO: 129425 - DNA, 20 bp, Artificial Sequence
  Description of Artificial Sequence: Synthetic oligonucleotide
  Target: LAMA2; (+) strand; PAM type: NRG; PAM sequence: GGG
caggcgcctgccaccaagct

SEQ ID NO: 129426 - DNA, 20 bp, Artificial Sequence
  Description of Artificial Sequence: Synthetic oligonucleotide
  Target: LAMA2; (+) strand; PAM type: NRG; PAM sequence: TAG
tgggctaatttttgtatttt

SEQ ID NO: 129427 - DNA, 20 bp, Artificial Sequence
  Description of Artificial Sequence: Synthetic oligonucleotide
  Target: LAMA2; (+) strand; PAM type: NRG; PAM sequence: TAG
gctaatttttgtatttttag

SEQ ID NO: 129428 - DNA, 20 bp, Artificial Sequence
  Description of Artificial Sequence: Synthetic oligonucleotide
  Target: LAMA2; (+) strand; PAM type: NRG; PAM sequence: GAG
taatttttgtatttttagta

SEQ ID NO: 129429 - DNA, 20 bp, Artificial Sequence
  Description of Artificial Sequence: Synthetic oligonucleotide
  Target: LAMA2; (+) strand; PAM type: NRG; PAM sequence: AAG
tttgtatttttagtagagac

SEQ ID NO: 129430 - DNA, 20 bp, Artificial Sequence
  Description of Artificial Sequence: Synthetic oligonucleotide
  Target: LAMA2; (+) strand; PAM type: NRG; PAM sequence: AGG
ttgtatttttagtagagaca

SEQ ID NO: 129431 - DNA, 20 bp, Artificial Sequence
  Description of Artificial Sequence: Synthetic oligonucleotide
  Target: LAMA2; (+) strand; PAM type: NRG; PAM sequence: TGG
gagacaaggtttcaccatgt

SEQ ID NO: 129432 - DNA, 20 bp, Artificial Sequence
  Description of Artificial Sequence: Synthetic oligonucleotide
  Target: LAMA2; (+) strand; PAM type: NRG; PAM sequence: CAG
caaggtttcaccatgttggc

SEQ ID NO: 129433 - DNA, 20 bp, Artificial Sequence
  Description of Artificial Sequence: Synthetic oligonucleotide
  Target: LAMA2; (+) strand; PAM type: NRG; PAM sequence: TGG
tttcaccatgttggccagac

SEQ ID NO: 129434 - DNA, 20 bp, Artificial Sequence
  Description of Artificial Sequence: Synthetic oligonucleotide
  Target: LAMA2; (+) strand; PAM type: NRG; PAM sequence: GAG
acctcatgatctgcatgcct

SEQ ID NO: 129435 - DNA, 20 bp, Artificial Sequence
  Description of Artificial Sequence: Synthetic oligonucleotide
  Target: LAMA2; (+) strand; PAM type: NRG; PAM sequence: AAG
ctgcatgcctgagcctccca

SEQ ID NO: 129436 - DNA, 20 bp, Artificial Sequence
  Description of Artificial Sequence: Synthetic oligonucleotide
  Target: LAMA2; (+) strand; PAM type: NRG; PAM sequence: TGG
gcctgagcctcccaaagtgc

SEQ ID NO: 129437 - DNA, 20 bp, Artificial Sequence
  Description of Artificial Sequence: Synthetic oligonucleotide
  Target: LAMA2; (+) strand; PAM type: NRG; PAM sequence: GGG
cctgagcctcccaaagtgct

SEQ ID NO: 129438 - DNA, 20 bp, Artificial Sequence
  Description of Artificial Sequence: Synthetic oligonucleotide
  Target: LAMA2; (+) strand; PAM type: NRG; PAM sequence: AAG
tcccaaagtgctgggattac

SEQ ID NO: 129439 - DNA, 20 bp, Artificial Sequence
  Description of Artificial Sequence: Synthetic oligonucleotide
  Target: LAMA2; (+) strand; PAM type: NRG; PAM sequence: GAG
agtgctgggattacaagcgt

SEQ ID NO: 129440 - DNA, 20 bp, Artificial Sequence
  Description of Artificial Sequence: Synthetic oligonucleotide
  Target: LAMA2; (+) strand; PAM type: NRG; PAM sequence: CGG
caagcgtgagccaccatgcc

SEQ ID NO: 129441 - DNA, 20 bp, Artificial Sequence
  Description of Artificial Sequence: Synthetic oligonucleotide
  Target: LAMA2; (+) strand; PAM type: NRG; PAM sequence: CAG
cgtgagccaccatgcccggt

SEQ ID NO: 129442 - DNA, 20 bp, Artificial Sequence
  Description of Artificial Sequence: Synthetic oligonucleotide
  Target: LAMA2; (+) strand; PAM type: NRG; PAM sequence: AAG
tcagtacctgcccttctcta

SEQ ID NO: 129443 - DNA, 20 bp, Artificial Sequence
  Description of Artificial Sequence: Synthetic oligonucleotide
  Target: LAMA2; (+) strand; PAM type: NRG; PAM sequence: AGG
cagtacctgcccttctctaa

SEQ ID NO: 129444 - DNA, 20 bp, Artificial Sequence
  Description of Artificial Sequence: Synthetic oligonucleotide
  Target: LAMA2; (+) strand; PAM type: NRG; PAM sequence: CAG
tctctaaaggcacttgcttg

SEQ ID NO: 129445 - DNA, 20 bp, Artificial Sequence
  Description of Artificial Sequence: Synthetic oligonucleotide
  Target: LAMA2; (+) strand; PAM type: NRG; PAM sequence: TGG
aggcacttgcttgcagtctt

SEQ ID NO: 129446 - DNA, 20 bp, Artificial Sequence
  Description of Artificial Sequence: Synthetic oligonucleotide
  Target: LAMA2; (+) strand; PAM type: NRG; PAM sequence: GAG
gcacttgcttgcagtctttg

SEQ ID NO: 129447 - DNA, 20 bp, Artificial Sequence
  Description of Artificial Sequence: Synthetic oligonucleotide
  Target: LAMA2; (+) strand; PAM type: NRG; PAM sequence: AGG
cacttgcttgcagtctttgg

SEQ ID NO: 129448 - DNA, 20 bp, Artificial Sequence
  Description of Artificial Sequence: Synthetic oligonucleotide
  Target: LAMA2; (+) strand; PAM type: NRG; PAM sequence: GAG
cttgcttgcagtctttggag

SEQ ID NO: 129449 - DNA, 20 bp, Artificial Sequence
  Description of Artificial Sequence: Synthetic oligonucleotide
  Target: LAMA2; (+) strand; PAM type: NRG; PAM sequence: AAG
ttgcagtctttggaggagat

SEQ ID NO: 129450 - DNA, 20 bp, Artificial Sequence
  Description of Artificial Sequence: Synthetic oligonucleotide
  Target: LAMA2; (+) strand; PAM type: NRG; PAM sequence: TGG
tgatcaactcatcaacctaa

SEQ ID NO: 129451 - DNA, 20 bp, Artificial Sequence
  Description of Artificial Sequence: Synthetic oligonucleotide
  Target: LAMA2; (+) strand; PAM type: NRG; PAM sequence: AAG
caactcatcaacctaatggc

SEQ ID NO: 129452 - DNA, 20 bp, Artificial Sequence
  Description of Artificial Sequence: Synthetic oligonucleotide
  Target: LAMA2; (+) strand; PAM type: NRG; PAM sequence: GAG
tggcaagtatcatttgactt

SEQ ID NO: 129453 - DNA, 20 bp, Artificial Sequence
  Description of Artificial Sequence: Synthetic oligonucleotide
  Target: LAMA2; (+) strand; PAM type: NRG; PAM sequence: AAG
agtatcatttgacttgagaa

SEQ ID NO: 129454 - DNA, 20 bp, Artificial Sequence
  Description of Artificial Sequence: Synthetic oligonucleotide
  Target: LAMA2; (+) strand; PAM type: NRG; PAM sequence: AAG
catttgacttgagaaaagat

SEQ ID NO: 129455 - DNA, 20 bp, Artificial Sequence
  Description of Artificial Sequence: Synthetic oligonucleotide
  Target: LAMA2; (+) strand; PAM type: NRG; PAM sequence: CAG
acttgagaaaagataagaaa

SEQ ID NO: 129456 - DNA, 20 bp, Artificial Sequence
  Description of Artificial Sequence: Synthetic oligonucleotide
  Target: LAMA2; (+) strand; PAM type: NRG; PAM sequence: AGG
cttgagaaaagataagaaac

SEQ ID NO: 129457 - DNA, 20 bp, Artificial Sequence
  Description of Artificial Sequence: Synthetic oligonucleotide
  Target: LAMA2; (+) strand; PAM type: NRG; PAM sequence: GGG
ttgagaaaagataagaaaca

SEQ ID NO: 129458 - DNA, 20 bp, Artificial Sequence
  Description of Artificial Sequence: Synthetic oligonucleotide
  Target: LAMA2; (+) strand; PAM type: NRG; PAM sequence: TAG
ataagaaacagggttctcaa

SEQ ID NO: 129459 - DNA, 20 bp, Artificial Sequence
  Description of Artificial Sequence: Synthetic oligonucleotide
  Target: LAMA2; (+) strand; PAM type: NRG; PAM sequence: AAG
ttctcaatagtgtgatctac

SEQ ID NO: 129460 - DNA, 20 bp, Artificial Sequence
  Description of Artificial Sequence: Synthetic oligonucleotide
  Target: LAMA2; (+) strand; PAM type: NRG; PAM sequence: TAG
caatagtgtgatctacaaga

SEQ ID NO: 129461 - DNA, 20 bp, Artificial Sequence
  Description of Artificial Sequence: Synthetic oligonucleotide
  Target: LAMA2; (+) strand; PAM type: NRG; PAM sequence: CAG
agtgtgatctacaagataga

SEQ ID NO: 129462 - DNA, 20 bp, Artificial Sequence
  Description of Artificial Sequence: Synthetic oligonucleotide
  Target: LAMA2; (+) strand; PAM type: NRG; PAM sequence: CAG
gtgatctacaagatagacag

SEQ ID NO: 129463 - DNA, 20 bp, Artificial Sequence
  Description of Artificial Sequence: Synthetic oligonucleotide
  Target: LAMA2; (+) strand; PAM type: NRG; PAM sequence: CAG
tctacaagatagacagcagt

SEQ ID NO: 129464 - DNA, 20 bp, Artificial Sequence
  Description of Artificial Sequence: Synthetic oligonucleotide
  Target: LAMA2; (+) strand; PAM type: NRG; PAM sequence: TAG
acaagatagacagcagtcag

SEQ ID NO: 129465 - DNA, 20 bp, Artificial Sequence
  Description of Artificial Sequence: Synthetic oligonucleotide
  Target: LAMA2; (+) strand; PAM type: NRG; PAM sequence: GAG
cagtagacgcttgcttctct

SEQ ID NO: 129466 - DNA, 20 bp, Artificial Sequence
  Description of Artificial Sequence: Synthetic oligonucleotide
  Target: LAMA2; (+) strand; PAM type: NRG; PAM sequence: AGG
agtagacgcttgcttctctg

SEQ ID NO: 129467 - DNA, 20 bp, Artificial Sequence
  Description of Artificial Sequence: Synthetic oligonucleotide
  Target: LAMA2; (+) strand; PAM type: NRG; PAM sequence: AAG
agacgcttgcttctctgagg

SEQ ID NO: 129468 - DNA, 20 bp, Artificial Sequence
  Description of Artificial Sequence: Synthetic oligonucleotide
  Target: LAMA2; (+) strand; PAM type: NRG; PAM sequence: TGG
ttctctgaggaagtgactct

SEQ ID NO: 129469 - DNA, 20 bp, Artificial Sequence
  Description of Artificial Sequence: Synthetic oligonucleotide
  Target: LAMA2; (+) strand; PAM type: NRG; PAM sequence: AAG
tctgaggaagtgactcttgg

SEQ ID NO: 129470 - DNA, 20 bp, Artificial Sequence
  Description of Artificial Sequence: Synthetic oligonucleotide
  Target: LAMA2; (+) strand; PAM type: NRG; PAM sequence: TAG
gaagtgactcttggaagaat

SEQ ID NO: 129471 - DNA, 20 bp, Artificial Sequence
  Description of Artificial Sequence: Synthetic oligonucleotide
  Target: LAMA2; (+) strand; PAM type: NRG; PAM sequence: AAG
tgactcttggaagaattagt

SEQ ID NO: 129472 - DNA, 20 bp, Artificial Sequence
  Description of Artificial Sequence: Synthetic oligonucleotide
  Target: LAMA2; (+) strand; PAM type: NRG; PAM sequence: GAG
actcttggaagaattagtaa

SEQ ID NO: 129473 - DNA, 20 bp, Artificial Sequence
  Description of Artificial Sequence: Synthetic oligonucleotide
  Target: LAMA2; (+) strand; PAM type: NRG; PAM sequence: TAG
ttggaagaattagtaagagc

SEQ ID NO: 129474 - DNA, 20 bp, Artificial Sequence
  Description of Artificial Sequence: Synthetic oligonucleotide
  Target: LAMA2; (+) strand; PAM type: NRG; PAM sequence: AGG
tggaagaattagtaagagct

SEQ ID NO: 129475 - DNA, 20 bp, Artificial Sequence
  Description of Artificial Sequence: Synthetic oligonucleotide
  Target: LAMA2; (+) strand; PAM type: NRG; PAM sequence: TGG
aagaattagtaagagctagg

SEQ ID NO: 129476 - DNA, 20 bp, Artificial Sequence
  Description of Artificial Sequence: Synthetic oligonucleotide
  Target: LAMA2; (+) strand; PAM type: NRG; PAM sequence: GGG
agaattagtaagagctaggt

SEQ ID NO: 129477 - DNA, 20 bp, Artificial Sequence
  Description of Artificial Sequence: Synthetic oligonucleotide
  Target: LAMA2; (+) strand; PAM type: NRG; PAM sequence: CGG
aagagctaggtgggcaaatt

SEQ ID NO: 129478 - DNA, 20 bp, Artificial Sequence
  Description of Artificial Sequence: Synthetic oligonucleotide
  Target: LAMA2; (+) strand; PAM type: NRG; PAM sequence: GGG
agagctaggtgggcaaattc

SEQ ID NO: 129479 - DNA, 20 bp, Artificial Sequence
  Description of Artificial Sequence: Synthetic oligonucleotide
  Target: LAMA2; (+) strand; PAM type: NRG; PAM sequence: AAG
ctaggtgggcaaattcgggt

SEQ ID NO: 129480 - DNA, 20 bp, Artificial Sequence
  Description of Artificial Sequence: Synthetic oligonucleotide
  Target: LAMA2; (+) strand; PAM type: NRG; PAM sequence: CAG
gtgggcaaattcgggtaaga

SEQ ID NO: 129481 - DNA, 20 bp, Artificial Sequence
  Description of Artificial Sequence: Synthetic oligonucleotide
  Target: LAMA2; (+) strand; PAM type: NRG; PAM sequence: AAG
ggcaaattcgggtaagacag

SEQ ID NO: 129482 - DNA, 20 bp, Artificial Sequence
  Description of Artificial Sequence: Synthetic oligonucleotide
  Target: LAMA2; (+) strand; PAM type: NRG; PAM sequence: AGG
gcaaattcgggtaagacaga

SEQ ID NO: 129483 - DNA, 20 bp, Artificial Sequence
  Description of Artificial Sequence: Synthetic oligonucleotide
  Target: LAMA2; (+) strand; PAM type: NRG; PAM sequence: GAG
ttcgggtaagacagaaggtt

SEQ ID NO: 129484 - DNA, 20 bp, Artificial Sequence
  Description of Artificial Sequence: Synthetic oligonucleotide
  Target: LAMA2; (+) strand; PAM type: NRG; PAM sequence: AAG
ggtaagacagaaggttgaga

SEQ ID NO: 129485 - DNA, 20 bp, Artificial Sequence
  Description of Artificial Sequence: Synthetic oligonucleotide
  Target: LAMA2; (+) strand; PAM type: NRG; PAM sequence: CAG
aaggttgagaaagatgtttt

SEQ ID NO: 129486 - DNA, 20 bp, Artificial Sequence
  Description of Artificial Sequence: Synthetic oligonucleotide
  Target: LAMA2; (+) strand; PAM type: NRG; PAM sequence: GAG
ggttgagaaagatgttttca

SEQ ID NO: 129487 - DNA, 20 bp, Artificial Sequence
  Description of Artificial Sequence: Synthetic oligonucleotide
  Target: LAMA2; (+) strand; PAM type: NRG; PAM sequence: AAG
tgagaaagatgttttcagag

SEQ ID NO: 129488 - DNA, 20 bp, Artificial Sequence
  Description of Artificial Sequence: Synthetic oligonucleotide
  Target: LAMA2; (+) strand; PAM type: NRG; PAM sequence: AGG
gagaaagatgttttcagaga

SEQ ID NO: 129489 - DNA, 20 bp, Artificial Sequence
  Description of Artificial Sequence: Synthetic oligonucleotide
  Target: LAMA2; (+) strand; PAM type: NRG; PAM sequence: CAG
tgttttcagagaaggctcca

SEQ ID NO: 129490 - DNA, 20 bp, Artificial Sequence
  Description of Artificial Sequence: Synthetic oligonucleotide
  Target: LAMA2; (+) strand; PAM type: NRG; PAM sequence: AGG
gttttcagagaaggctccac

SEQ ID NO: 129491 - DNA, 20 bp, Artificial Sequence
  Description of Artificial Sequence: Synthetic oligonucleotide
  Target: LAMA2; (+) strand; PAM type: NRG; PAM sequence: TAG
gagaaggctccacaggaaca

SEQ ID NO: 129492 - DNA, 20 bp, Artificial Sequence
  Description of Artificial Sequence: Synthetic oligonucleotide
  Target: LAMA2; (+) strand; PAM type: NRG; PAM sequence: TGG
gttcctctcctgctgtatta

SEQ ID NO: 129493 - DNA, 20 bp, Artificial Sequence
  Description of Artificial Sequence: Synthetic oligonucleotide
  Target: LAMA2; (+) strand; PAM type: NRG; PAM sequence: GAG
tcctctcctgctgtattatg

SEQ ID NO: 129494 - DNA, 20 bp, Artificial Sequence
  Description of Artificial Sequence: Synthetic oligonucleotide
  Target: LAMA2; (+) strand; PAM type: NRG; PAM sequence: GAG
ctctcctgctgtattatgga

SEQ ID NO: 129495 - DNA, 20 bp, Artificial Sequence
  Description of Artificial Sequence: Synthetic oligonucleotide
  Target: LAMA2; (+) strand; PAM type: NRG; PAM sequence: TGG
gctgtattatggagagaaca

SEQ ID NO: 129496 - DNA, 20 bp, Artificial Sequence
  Description of Artificial Sequence: Synthetic oligonucleotide
  Target: LAMA2; (+) strand; PAM type: NRG; PAM sequence: GAG
tgtattatggagagaacatg

SEQ ID NO: 129497 - DNA, 20 bp, Artificial Sequence
  Description of Artificial Sequence: Synthetic oligonucleotide
  Target: LAMA2; (+) strand; PAM type: NRG; PAM sequence: CAG
tggagagaacatggagcctt

SEQ ID NO: 129498 - DNA, 20 bp, Artificial Sequence
  Description of Artificial Sequence: Synthetic oligonucleotide
  Target: LAMA2; (+) strand; PAM type: NRG; PAM sequence: GAG
gagagaacatggagccttca

SEQ ID NO: 129499 - DNA, 20 bp, Artificial Sequence
  Description of Artificial Sequence: Synthetic oligonucleotide
  Target: LAMA2; (+) strand; PAM type: NRG; PAM sequence: TGG
gagatataaaaatgtcattg

SEQ ID NO: 129500 - DNA, 20 bp, Artificial Sequence
  Description of Artificial Sequence: Synthetic oligonucleotide
  Target: LAMA2; (+) strand; PAM type: NRG; PAM sequence: TGG
tataaaaatgtcattgtggc

SEQ ID NO: 129501 - DNA, 20 bp, Artificial Sequence
  Description of Artificial Sequence: Synthetic oligonucleotide
  Target: LAMA2; (+) strand; PAM type: NRG; PAM sequence: AAG
gtcattgtggctggaatgca

SEQ ID NO: 129502 - DNA, 20 bp, Artificial Sequence
  Description of Artificial Sequence: Synthetic oligonucleotide
  Target: LAMA2; (+) strand; PAM type: NRG; PAM sequence: AAG
gtggctggaatgcaaagatg

SEQ ID NO: 129503 - DNA, 20 bp, Artificial Sequence
  Description of Artificial Sequence: Synthetic oligonucleotide
  Target: LAMA2; (+) strand; PAM type: NRG; PAM sequence: AGG
tggctggaatgcaaagatga

SEQ ID NO: 129504 - DNA, 20 bp, Artificial Sequence
  Description of Artificial Sequence: Synthetic oligonucleotide
  Target: LAMA2; (+) strand; PAM type: NRG; PAM sequence: GGG
ggctggaatgcaaagatgaa

SEQ ID NO: 129505 - DNA, 20 bp, Artificial Sequence
  Description of Artificial Sequence: Synthetic oligonucleotide
  Target: LAMA2; (+) strand; PAM type: NRG; PAM sequence: AAG
ggaatgcaaagatgaaggga

SEQ ID NO: 129506 - DNA, 20 bp, Artificial Sequence
  Description of Artificial Sequence: Synthetic oligonucleotide
  Target: LAMA2; (+) strand; PAM type: NRG; PAM sequence: GAG
aatgcaaagatgaagggaaa

SEQ ID NO: 129507 - DNA, 20 bp, Artificial Sequence
  Description of Artificial Sequence: Synthetic oligonucleotide
  Target: LAMA2; (+) strand; PAM type: NRG; PAM sequence: GAG
gaagggaaagagtttgaatt

SEQ ID NO: 129508 - DNA, 20 bp, Artificial Sequence
  Description of Artificial Sequence: Synthetic oligonucleotide
  Target: LAMA2; (+) strand; PAM type: NRG; PAM sequence: AGG
aagggaaagagtttgaattg

SEQ ID NO: 129509 - DNA, 20 bp, Artificial Sequence
  Description of Artificial Sequence: Synthetic oligonucleotide
  Target: LAMA2; (+) strand; PAM type: NRG; PAM sequence: AAG
ggaaagagtttgaattgagg

SEQ ID NO: 129510 - DNA, 20 bp, Artificial Sequence
  Description of Artificial Sequence: Synthetic oligonucleotide
  Target: LAMA2; (+) strand; PAM type: NRG; PAM sequence: AGG
gaaagagtttgaattgagga

SEQ ID NO: 129511 - DNA, 20 bp, Artificial Sequence
  Description of Artificial Sequence: Synthetic oligonucleotide
  Target: LAMA2; (+) strand; PAM type: NRG; PAM sequence: GGG
aaagagtttgaattgaggaa

SEQ ID NO: 129512 - DNA, 20 bp, Artificial Sequence
  Description of Artificial Sequence: Synthetic oligonucleotide
  Target: LAMA2; (+) strand; PAM type: NRG; PAM sequence: CAG
gtttgaattgaggaagggat

SEQ ID NO: 129513 - DNA, 20 bp, Artificial Sequence
  Description of Artificial Sequence: Synthetic oligonucleotide
  Target: LAMA2; (+) strand; PAM type: NRG; PAM sequence: GAG
ttgaattgaggaagggatca

SEQ ID NO: 129514 - DNA, 20 bp, Artificial Sequence
  Description of Artificial Sequence: Synthetic oligonucleotide
  Target: LAMA2; (+) strand; PAM type: NRG; PAM sequence: AAG
aggaagggatcagagcatgc

SEQ ID NO: 129515 - DNA, 20 bp, Artificial Sequence
  Description of Artificial Sequence: Synthetic oligonucleotide
  Target: LAMA2; (+) strand; PAM type: NRG; PAM sequence: AGG
ggaagggatcagagcatgca

SEQ ID NO: 129516 - DNA, 20 bp, Artificial Sequence
  Description of Artificial Sequence: Synthetic oligonucleotide
  Target: LAMA2; (+) strand; PAM type: NRG; PAM sequence: AAG
tcagagcatgcaaggattta

SEQ ID NO: 129517 - DNA, 20 bp, Artificial Sequence
  Description of Artificial Sequence: Synthetic oligonucleotide
  Target: LAMA2; (+) strand; PAM type: NRG; PAM sequence: AAG
aaggatttaaagattacttt

SEQ ID NO: 129518 - DNA, 20 bp, Artificial Sequence
  Description of Artificial Sequence: Synthetic oligonucleotide
  Target: LAMA2; (+) strand; PAM type: NRG; PAM sequence: TGG
taaagattactttaagaatt

SEQ ID NO: 129519 - DNA, 20 bp, Artificial Sequence
  Description of Artificial Sequence: Synthetic oligonucleotide
  Target: LAMA2; (+) strand; PAM type: NRG; PAM sequence: TGG
attaaatgatgtttgccact

SEQ ID NO: 129520 - DNA, 20 bp, Artificial Sequence
  Description of Artificial Sequence: Synthetic oligonucleotide
  Target: LAMA2; (+) strand; PAM type: NRG; PAM sequence: GGG
ttaaatgatgtttgccactt

SEQ ID NO: 129521 - DNA, 20 bp, Artificial Sequence
  Description of Artificial Sequence: Synthetic oligonucleotide
  Target: LAMA2; (+) strand; PAM type: NRG; PAM sequence: AAG
gggtcaacaaacattctgta

SEQ ID NO: 129522 - DNA, 20 bp, Artificial Sequence
  Description of Artificial Sequence: Synthetic oligonucleotide
  Target: LAMA2; (+) strand; PAM type: NRG; PAM sequence: AGG
ggtcaacaaacattctgtaa

SEQ ID NO: 129523 - DNA, 20 bp, Artificial Sequence
  Description of Artificial Sequence: Synthetic oligonucleotide
  Target: LAMA2; (+) strand; PAM type: NRG; PAM sequence: TAG
acaaacattctgtaaaggct

SEQ ID NO: 129524 - DNA, 20 bp, Artificial Sequence
  Description of Artificial Sequence: Synthetic oligonucleotide
  Target: LAMA2; (+) strand; PAM type: NRG; PAM sequence: TAG
acattctgtaaaggcttaga

SEQ ID NO: 129525 - DNA, 20 bp, Artificial Sequence
  Description of Artificial Sequence: Synthetic oligonucleotide
  Target: LAMA2; (+) strand; PAM type: NRG; PAM sequence: AAG
tctgtaaaggcttagatagt

SEQ ID NO: 129526 - DNA, 20 bp, Artificial Sequence
  Description of Artificial Sequence: Synthetic oligonucleotide
  Target: LAMA2; (+) strand; PAM type: NRG; PAM sequence: CAG
agtaagtattataaatattg

SEQ ID NO: 129527 - DNA, 20 bp, Artificial Sequence
  Description of Artificial Sequence: Synthetic oligonucleotide
  Target: LAMA2; (+) strand; PAM type: NRG; PAM sequence: AGG
gtaagtattataaatattgc

SEQ ID NO: 129528 - DNA, 20 bp, Artificial Sequence
  Description of Artificial Sequence: Synthetic oligonucleotide
  Target: LAMA2; (+) strand; PAM type: NRG; PAM sequence: TGG
tataaatattgcaggtgata

SEQ ID NO: 129529 - DNA, 20 bp, Artificial Sequence
  Description of Artificial Sequence: Synthetic oligonucleotide
  Target: LAMA2; (+) strand; PAM type: NRG; PAM sequence: AAG
ttactcaactctgctgttgt

SEQ ID NO: 129530 - DNA, 20 bp, Artificial Sequence
  Description of Artificial Sequence: Synthetic oligonucleotide
  Target: LAMA2; (+) strand; PAM type: NRG; PAM sequence: AGG
tactcaactctgctgttgta

SEQ ID NO: 129531 - DNA, 20 bp, Artificial Sequence
  Description of Artificial Sequence: Synthetic oligonucleotide
  Target: LAMA2; (+) strand; PAM type: NRG; PAM sequence: GGG
actcaactctgctgttgtaa

SEQ ID NO: 129532 - DNA, 20 bp, Artificial Sequence
  Description of Artificial Sequence: Synthetic oligonucleotide
  Target: LAMA2; (+) strand; PAM type: NRG; PAM sequence: GAG
tcaactctgctgttgtaagg

SEQ ID NO: 129533 - DNA, 20 bp, Artificial Sequence
  Description of Artificial Sequence: Synthetic oligonucleotide
  Target: LAMA2; (+) strand; PAM type: NRG; PAM sequence: AAG
actctgctgttgtaagggag

SEQ ID NO: 129534 - DNA, 20 bp, Artificial Sequence
  Description of Artificial Sequence: Synthetic oligonucleotide
  Target: LAMA2; (+) strand; PAM type: NRG; PAM sequence: CAG
ctgctgttgtaagggagaag

SEQ ID NO: 129535 - DNA, 20 bp, Artificial Sequence
  Description of Artificial Sequence: Synthetic oligonucleotide
  Target: LAMA2; (+) strand; PAM type: NRG; PAM sequence: GAG
tataaacaatatgtatgtgt

SEQ ID NO: 129536 - DNA, 20 bp, Artificial Sequence
  Description of Artificial Sequence: Synthetic oligonucleotide
  Target: LAMA2; (+) strand; PAM type: NRG; PAM sequence: TAG
aaacaatatgtatgtgtgag

SEQ ID NO: 129537 - DNA, 20 bp, Artificial Sequence
  Description of Artificial Sequence: Synthetic oligonucleotide
  Target: LAMA2; (+) strand; PAM type: NRG; PAM sequence: AAG
tgtgagtagatgtttccata

SEQ ID NO: 129538 - DNA, 20 bp, Artificial Sequence
  Description of Artificial Sequence: Synthetic oligonucleotide
  Target: LAMA2; (+) strand; PAM type: NRG; PAM sequence: CAG
tttccataaagctttattta

SEQ ID NO: 129539 - DNA, 20 bp, Artificial Sequence
  Description of Artificial Sequence: Synthetic oligonucleotide
  Target: LAMA2; (+) strand; PAM type: NRG; PAM sequence: AAG
aaagctttatttacagaaac

SEQ ID NO: 129540 - DNA, 20 bp, Artificial Sequence
  Description of Artificial Sequence: Synthetic oligonucleotide
  Target: LAMA2; (+) strand; PAM type: NRG; PAM sequence: CAG
tttacagaaacaagccatga

SEQ ID NO: 129541 - DNA, 20 bp, Artificial Sequence
  Description of Artificial Sequence: Synthetic oligonucleotide
  Target: LAMA2; (+) strand; PAM type: NRG; PAM sequence: TGG
aaacaagccatgacagtatc

SEQ ID NO: 129542 - DNA, 20 bp, Artificial Sequence
  Description of Artificial Sequence: Synthetic oligonucleotide
  Target: LAMA2; (+) strand; PAM type: NRG; PAM sequence: CAG
tatctggcatatctcctgat

SEQ ID NO: 129543 - DNA, 20 bp, Artificial Sequence
  Description of Artificial Sequence: Synthetic oligonucleotide
  Target: LAMA2; (+) strand; PAM type: NRG; PAM sequence: TAG
cccaatgtctccgtttgaac

SEQ ID NO: 129544 - DNA, 20 bp, Artificial Sequence
  Description of Artificial Sequence: Synthetic oligonucleotide
  Target: LAMA2; (+) strand; PAM type: NRG; PAM sequence: CAG
tgtctccgtttgaactagtg

SEQ ID NO: 129545 - DNA, 20 bp, Artificial Sequence
  Description of Artificial Sequence: Synthetic oligonucleotide
  Target: LAMA2; (+) strand; PAM type: NRG; PAM sequence: AGG
gtctccgtttgaactagtgc

SEQ ID NO: 129546 - DNA, 20 bp, Artificial Sequence
  Description of Artificial Sequence: Synthetic oligonucleotide
  Target: LAMA2; (+) strand; PAM type: NRG; PAM sequence: GGG
tctccgtttgaactagtgca

SEQ ID NO: 129547 - DNA, 20 bp, Artificial Sequence
  Description of Artificial Sequence: Synthetic oligonucleotide
  Target: LAMA2; (+) strand; PAM type: NRG; PAM sequence: TGG
gaactagtgcagggatattt

SEQ ID NO: 129548 - DNA, 20 bp, Artificial Sequence
  Description of Artificial Sequence: Synthetic oligonucleotide
  Target: LAMA2; (+) strand; PAM type: NRG; PAM sequence: GAG
actagtgcagggatattttg

SEQ ID NO: 129549 - DNA, 20 bp, Artificial Sequence
  Description of Artificial Sequence: Synthetic oligonucleotide
  Target: LAMA2; (+) strand; PAM type: NRG; PAM sequence: TAG
cagggatattttggagactt

SEQ ID NO: 129550 - DNA, 20 bp, Artificial Sequence
  Description of Artificial Sequence: Synthetic oligonucleotide
  Target: LAMA2; (+) strand; PAM type: NRG; PAM sequence: TAG
ttggagactttagcaatgcc

SEQ ID NO: 129551 - DNA, 20 bp, Artificial Sequence
  Description of Artificial Sequence: Synthetic oligonucleotide
  Target: LAMA2; (+) strand; PAM type: NRG; PAM sequence: CAG
agactttagcaatgcctagt

SEQ ID NO: 129552 - DNA, 20 bp, Artificial Sequence
  Description of Artificial Sequence: Synthetic oligonucleotide
  Target: LAMA2; (+) strand; PAM type: NRG; PAM sequence: AAG
tttagcaatgcctagtcagc

SEQ ID NO: 129553 - DNA, 20 bp, Artificial Sequence
  Description of Artificial Sequence: Synthetic oligonucleotide
  Target: LAMA2; (+) strand; PAM type: NRG; PAM sequence: CAG
aatgcctagtcagcaagcat

SEQ ID NO: 129554 - DNA, 20 bp, Artificial Sequence
  Description of Artificial Sequence: Synthetic oligonucleotide
  Target: LAMA2; (+) strand; PAM type: NRG; PAM sequence: TAG
cagcaagcatcagtgtactt

SEQ ID NO: 129555 - DNA, 20 bp, Artificial Sequence
  Description of Artificial Sequence: Synthetic oligonucleotide
  Target: LAMA2; (+) strand; PAM type: NRG; PAM sequence: CGG
gtactttagacattgaaaat

SEQ ID NO: 129556 - DNA, 20 bp, Artificial Sequence
  Description of Artificial Sequence: Synthetic oligonucleotide
  Target: LAMA2; (+) strand; PAM type: NRG; PAM sequence: GGG
tactttagacattgaaaatc

SEQ ID NO: 129557 - DNA, 20 bp, Artificial Sequence
  Description of Artificial Sequence: Synthetic oligonucleotide
  Target: LAMA2; (+) strand; PAM type: NRG; PAM sequence: TAG
ttagacattgaaaatcgggt

SEQ ID NO: 129558 - DNA, 20 bp, Artificial Sequence
  Description of Artificial Sequence: Synthetic oligonucleotide
  Target: LAMA2; (+) strand; PAM type: NRG; PAM sequence: AGG
tagacattgaaaatcgggtt

SEQ ID NO: 129559 - DNA, 20 bp, Artificial Sequence
  Description of Artificial Sequence: Synthetic oligonucleotide
  Target: LAMA2; (+) strand; PAM type: NRG; PAM sequence: TGG
gggttaggaaaaaaaaaata

SEQ ID NO: 129560 - DNA, 20 bp, Artificial Sequence
  Description of Artificial Sequence: Synthetic oligonucleotide
  Target: LAMA2; (+) strand; PAM type: NRG; PAM sequence: AAG
actgctttgattttcctttg

SEQ ID NO: 129561 - DNA, 20 bp, Artificial Sequence
  Description of Artificial Sequence: Synthetic oligonucleotide
  Target: LAMA2; (+) strand; PAM type: NRG; PAM sequence: AAG
ttcctttgaagtaatgtcac

SEQ ID NO: 129562 - DNA, 20 bp, Artificial Sequence
  Description of Artificial Sequence: Synthetic oligonucleotide
  Target: LAMA2; (+) strand; PAM type: NRG; PAM sequence: AAG
ctttgaagtaatgtcacaag

SEQ ID NO: 129563 - DNA, 20 bp, Artificial Sequence
  Description of Artificial Sequence: Synthetic oligonucleotide
  Target: LAMA2; (+) strand; PAM type: NRG; PAM sequence: CAG
gtaatgtcacaagaagaaaa

SEQ ID NO: 129564 - DNA, 20 bp, Artificial Sequence
  Description of Artificial Sequence: Synthetic oligonucleotide
  Target: LAMA2; (+) strand; PAM type: NRG; PAM sequence: AAG
tgtcacaagaagaaaacagc

SEQ ID NO: 129565 - DNA, 20 bp, Artificial Sequence
  Description of Artificial Sequence: Synthetic oligonucleotide
  Target: LAMA2; (+) strand; PAM type: NRG; PAM sequence: TGG
acaagaagaaaacagcaagc

SEQ ID NO: 129566 - DNA, 20 bp, Artificial Sequence
  Description of Artificial Sequence: Synthetic oligonucleotide
  Target: LAMA2; (+) strand; PAM type: NRG; PAM sequence: AAG
agcaagctggttcatttgcc

SEQ ID NO: 129567 - DNA, 20 bp, Artificial Sequence
  Description of Artificial Sequence: Synthetic oligonucleotide
  Target: LAMA2; (+) strand; PAM type: NRG; PAM sequence: AGG
gcaagctggttcatttgcca

SEQ ID NO: 129568 - DNA, 20 bp, Artificial Sequence
  Description of Artificial Sequence: Synthetic oligonucleotide
  Target: LAMA2; (+) strand; PAM type: NRG; PAM sequence: AAG
agctggttcatttgccaagg

SEQ ID NO: 129569 - DNA, 20 bp, Artificial Sequence
  Description of Artificial Sequence: Synthetic oligonucleotide
  Target: LAMA2; (+) strand; PAM type: NRG; PAM sequence: AGG
gctggttcatttgccaagga

SEQ ID NO: 129570 - DNA, 20 bp, Artificial Sequence
  Description of Artificial Sequence: Synthetic oligonucleotide
  Target: LAMA2; (+) strand; PAM type: NRG; PAM sequence: AAG
ggttcatttgccaaggaagg

SEQ ID NO: 129571 - DNA, 20 bp, Artificial Sequence
  Description of Artificial Sequence: Synthetic oligonucleotide
  Target: LAMA2; (+) strand; PAM type: NRG; PAM sequence: GAG
ttcatttgccaaggaaggaa

SEQ ID NO: 129572 - DNA, 20 bp, Artificial Sequence
  Description of Artificial Sequence: Synthetic oligonucleotide
  Target: LAMA2; (+) strand; PAM type: NRG; PAM sequence: AAG
ccaaggaaggaagagcatga

SEQ ID NO: 129573 - DNA, 20 bp, Artificial Sequence
  Description of Artificial Sequence: Synthetic oligonucleotide
  Target: LAMA2; (+) strand; PAM type: NRG; PAM sequence: CAG
tgaaagacaaaatgaaatgc

SEQ ID NO: 129574 - DNA, 20 bp, Artificial Sequence
  Description of Artificial Sequence: Synthetic oligonucleotide
  Target: LAMA2; (+) strand; PAM type: NRG; PAM sequence: TAG
caaaatgaaatgccagtaac

SEQ ID NO: 129575 - DNA, 20 bp, Artificial Sequence
  Description of Artificial Sequence: Synthetic oligonucleotide
  Target: LAMA2; (+) strand; PAM type: NRG; PAM sequence: AGG
aaaatgaaatgccagtaact

SEQ ID NO: 129576 - DNA, 20 bp, Artificial Sequence
  Description of Artificial Sequence: Synthetic oligonucleotide
  Target: LAMA2; (+) strand; PAM type: NRG; PAM sequence: TAG
aaatgccagtaactaggtac

SEQ ID NO: 129577 - DNA, 20 bp, Artificial Sequence
  Description of Artificial Sequence: Synthetic oligonucleotide
  Target: LAMA2; (+) strand; PAM type: NRG; PAM sequence: GAG
atgccagtaactaggtacta

SEQ ID NO: 129578 - DNA, 20 bp, Artificial Sequence
  Description of Artificial Sequence: Synthetic oligonucleotide
  Target: LAMA2; (+) strand; PAM type: NRG; PAM sequence: AGG
tgccagtaactaggtactag

SEQ ID NO: 129579 - DNA, 20 bp, Artificial Sequence
  Description of Artificial Sequence: Synthetic oligonucleotide
  Target: LAMA2; (+) strand; PAM type: NRG; PAM sequence: AAG
agtaactaggtactagagga

SEQ ID NO: 129580 - DNA, 20 bp, Artificial Sequence
  Description of Artificial Sequence: Synthetic oligonucleotide
  Target: LAMA2; (+) strand; PAM type: NRG; PAM sequence: AGG
gtaactaggtactagaggaa

SEQ ID NO: 129581 - DNA, 20 bp, Artificial Sequence
  Description of Artificial Sequence: Synthetic oligonucleotide
  Target: LAMA2; (+) strand; PAM type: NRG; PAM sequence: GAG
aactaggtactagaggaaag

SEQ ID NO: 129582 - DNA, 20 bp, Artificial Sequence
  Description of Artificial Sequence: Synthetic oligonucleotide
  Target: LAMA2; (+) strand; PAM type: NRG; PAM sequence: AAG
tactagaggaaaggagtgct

SEQ ID NO: 129583 - DNA, 20 bp, Artificial Sequence
  Description of Artificial Sequence: Synthetic oligonucleotide
  Target: LAMA2; (+) strand; PAM type: NRG; PAM sequence: AAG
agtgctaagaaaatgttcaa

SEQ ID NO: 129584 - DNA, 20 bp, Artificial Sequence
  Description of Artificial Sequence: Synthetic oligonucleotide
  Target: LAMA2; (+) strand; PAM type: NRG; PAM sequence: AGG
gtgctaagaaaatgttcaaa

SEQ ID NO: 129585 - DNA, 20 bp, Artificial Sequence
  Description of Artificial Sequence: Synthetic oligonucleotide
  Target: LAMA2; (+) strand; PAM type: NRG; PAM sequence: GGG
tgctaagaaaatgttcaaaa

SEQ ID NO: 129586 - DNA, 20 bp, Artificial Sequence
  Description of Artificial Sequence: Synthetic oligonucleotide
  Target: LAMA2; (+) strand; PAM type: NRG; PAM sequence: AAG
tgttcaaaagggatcttgaa

SEQ ID NO: 129587 - DNA, 20 bp, Artificial Sequence
  Description of Artificial Sequence: Synthetic oligonucleotide
  Target: LAMA2; (+) strand; PAM type: NRG; PAM sequence: AAG
aaaagggatcttgaaaagca

SEQ ID NO: 129588 - DNA, 20 bp, Artificial Sequence
  Description of Artificial Sequence: Synthetic oligonucleotide
  Target: LAMA2; (+) strand; PAM type: NRG; PAM sequence: TGG
cttgaaaagcaaagatcact

SEQ ID NO: 129589 - DNA, 20 bp, Artificial Sequence
  Description of Artificial Sequence: Synthetic oligonucleotide
  Target: LAMA2; (+) strand; PAM type: NRG; PAM sequence: TAG
gaaaagcaaagatcacttgg

SEQ ID NO: 129590 - DNA, 20 bp, Artificial Sequence
  Description of Artificial Sequence: Synthetic oligonucleotide
  Target: LAMA2; (+) strand; PAM type: NRG; PAM sequence: AAG
ttggtagatgaacttgttca

SEQ ID NO: 129591 - DNA, 20 bp, Artificial Sequence
  Description of Artificial Sequence: Synthetic oligonucleotide
  Target: LAMA2; (+) strand; PAM type: NRG; PAM sequence: AAG
ttcgctaactcacctcttgc

SEQ ID NO: 129592 - DNA, 20 bp, Artificial Sequence
  Description of Artificial Sequence: Synthetic oligonucleotide
  Target: LAMA2; (+) strand; PAM type: NRG; PAM sequence: AAG
gcaagaacaaactatcttgc

SEQ ID NO: 129593 - DNA, 20 bp, Artificial Sequence
  Description of Artificial Sequence: Synthetic oligonucleotide
  Target: LAMA2; (+) strand; PAM type: NRG; PAM sequence: AGG
caagaacaaactatcttgca

SEQ ID NO: 129594 - DNA, 20 bp, Artificial Sequence
  Description of Artificial Sequence: Synthetic oligonucleotide
  Target: LAMA2; (+) strand; PAM type: NRG; PAM sequence: CAG
actgcaacatgtctgataca

SEQ ID NO: 129595 - DNA, 20 bp, Artificial Sequence
  Description of Artificial Sequence: Synthetic oligonucleotide
  Target: LAMA2; (+) strand; PAM type: NRG; PAM sequence: CAG
tgtctgatacacagcacctg

SEQ ID NO: 129596 - DNA, 20 bp, Artificial Sequence
  Description of Artificial Sequence: Synthetic oligonucleotide
  Target: LAMA2; (+) strand; PAM type: NRG; PAM sequence: CAG
tacacagcacctgcagtcaa

SEQ ID NO: 129597 - DNA, 20 bp, Artificial Sequence
  Description of Artificial Sequence: Synthetic oligonucleotide
  Target: LAMA2; (+) strand; PAM type: NRG; PAM sequence: TAG
cctgcagtcaacagactctg

SEQ ID NO: 129598 - DNA, 20 bp, Artificial Sequence
  Description of Artificial Sequence: Synthetic oligonucleotide
  Target: LAMA2; (+) strand; PAM type: NRG; PAM sequence: AAG
caacagactctgtagttgca

SEQ ID NO: 129599 - DNA, 20 bp, Artificial Sequence
  Description of Artificial Sequence: Synthetic oligonucleotide
  Target: LAMA2; (+) strand; PAM type: NRG; PAM sequence: GAG
ctctgtagttgcaaagtatt

SEQ ID NO: 129600 - DNA, 20 bp, Artificial Sequence
  Description of Artificial Sequence: Synthetic oligonucleotide
  Target: LAMA2; (+) strand; PAM type: NRG; PAM sequence: AAG
aagtattgagttttgtgctc

SEQ ID NO: 129601 - DNA, 20 bp, Artificial Sequence
  Description of Artificial Sequence: Synthetic oligonucleotide
  Target: LAMA2; (+) strand; PAM type: NRG; PAM sequence: TAG
tgagttttgtgctcaagcta

SEQ ID NO: 129602 - DNA, 20 bp, Artificial Sequence
  Description of Artificial Sequence: Synthetic oligonucleotide
  Target: LAMA2; (+) strand; PAM type: NRG; PAM sequence: AAG
gttttgtgctcaagctatag

SEQ ID NO: 129603 - DNA, 20 bp, Artificial Sequence
  Description of Artificial Sequence: Synthetic oligonucleotide
  Target: LAMA2; (+) strand; PAM type: NRG; PAM sequence: TGG
gctcaagctatagaagttaa

SEQ ID NO: 129604 - DNA, 20 bp, Artificial Sequence
  Description of Artificial Sequence: Synthetic oligonucleotide
  Target: LAMA2; (+) strand; PAM type: NRG; PAM sequence: CAG
tggactgtcataacattgtt

SEQ ID NO: 129605 - DNA, 20 bp, Artificial Sequence
  Description of Artificial Sequence: Synthetic oligonucleotide
  Target: LAMA2; (+) strand; PAM type: NRG; PAM sequence: CAG
aacattgttcagatgaaacc

SEQ ID NO: 129606 - DNA, 20 bp, Artificial Sequence
  Description of Artificial Sequence: Synthetic oligonucleotide
  Target: LAMA2; (+) strand; PAM type: NRG; PAM sequence: AAG
tgttcagatgaaacccagca

SEQ ID NO: 129607 - DNA, 20 bp, Artificial Sequence
  Description of Artificial Sequence: Synthetic oligonucleotide
  Target: LAMA2; (+) strand; PAM type: NRG; PAM sequence: CAG
tgaaacccagcaaagcttaa

SEQ ID NO: 129608 - DNA, 20 bp, Artificial Sequence
  Description of Artificial Sequence: Synthetic oligonucleotide
  Target: LAMA2; (+) strand; PAM type: NRG; PAM sequence: AAG
ccagcaaagcttaacagact

SEQ ID NO: 129609 - DNA, 20 bp, Artificial Sequence
  Description of Artificial Sequence: Synthetic oligonucleotide
  Target: LAMA2; (+) strand; PAM type: NRG; PAM sequence: AGG
cagcaaagcttaacagacta

SEQ ID NO: 129610 - DNA, 20 bp, Artificial Sequence
  Description of Artificial Sequence: Synthetic oligonucleotide
  Target: LAMA2; (+) strand; PAM type: NRG; PAM sequence: TGG
caaagcttaacagactaagg

SEQ ID NO: 129611 - DNA, 20 bp, Artificial Sequence
  Description of Artificial Sequence: Synthetic oligonucleotide
  Target: LAMA2; (+) strand; PAM type: NRG; PAM sequence: CAG
ttttgcctccccttttaatc

SEQ ID NO: 129612 - DNA, 20 bp, Artificial Sequence
  Description of Artificial Sequence: Synthetic oligonucleotide
  Target: LAMA2; (+) strand; PAM type: NRG; PAM sequence: GAG
aatccagtgctaatttcttt

SEQ ID NO: 129613 - DNA, 20 bp, Artificial Sequence
  Description of Artificial Sequence: Synthetic oligonucleotide
  Target: LAMA2; (+) strand; PAM type: NRG; PAM sequence: CAG
ctaatttctttgagtaatct

SEQ ID NO: 129614 - DNA, 20 bp, Artificial Sequence
  Description of Artificial Sequence: Synthetic oligonucleotide
  Target: LAMA2; (+) strand; PAM type: NRG; PAM sequence: AAG
cagaaaacttttttatgcta

SEQ ID NO: 129615 - DNA, 20 bp, Artificial Sequence
  Description of Artificial Sequence: Synthetic oligonucleotide
  Target: LAMA2; (+) strand; PAM type: NRG; PAM sequence: AAG
gctaaagtgattcatttata

SEQ ID NO: 129616 - DNA, 20 bp, Artificial Sequence
  Description of Artificial Sequence: Synthetic oligonucleotide
  Target: LAMA2; (+) strand; PAM type: NRG; PAM sequence: CAG
aaagttcttgtcaaaacaac

SEQ ID NO: 129617 - DNA, 20 bp, Artificial Sequence
  Description of Artificial Sequence: Synthetic oligonucleotide
  Target: LAMA2; (+) strand; PAM type: NRG; PAM sequence: TGG
ccagtgtatttaaaatattt

SEQ ID NO: 129618 - DNA, 20 bp, Artificial Sequence
  Description of Artificial Sequence: Synthetic oligonucleotide
  Target: LAMA2; (+) strand; PAM type: NRG; PAM sequence: CAG
aatattttggaattataata

SEQ ID NO: 129619 - DNA, 20 bp, Artificial Sequence
  Description of Artificial Sequence: Synthetic oligonucleotide
  Target: LAMA2; (+) strand; PAM type: NRG; PAM sequence: AGG
atattttggaattataatac

SEQ ID NO: 129620 - DNA, 20 bp, Artificial Sequence
  Description of Artificial Sequence: Synthetic oligonucleotide
  Target: LAMA2; (+) strand; PAM type: NRG; PAM sequence: AAG
ataatacaggacacaaatga

SEQ ID NO: 129621 - DNA, 20 bp, Artificial Sequence
  Description of Artificial Sequence: Synthetic oligonucleotide
  Target: LAMA2; (+) strand; PAM type: NRG; PAM sequence: AAG
atacaggacacaaatgaaag

SEQ ID NO: 129622 - DNA, 20 bp, Artificial Sequence
  Description of Artificial Sequence: Synthetic oligonucleotide
  Target: LAMA2; (+) strand; PAM type: NRG; PAM sequence: TAG
atgaaagaagatatttatac

SEQ ID NO: 129623 - DNA, 20 bp, Artificial Sequence
  Description of Artificial Sequence: Synthetic oligonucleotide
  Target: LAMA2; (+) strand; PAM type: NRG; PAM sequence: AGG
tgaaagaagatatttatact

SEQ ID NO: 129624 - DNA, 20 bp, Artificial Sequence
  Description of Artificial Sequence: Synthetic oligonucleotide
  Target: LAMA2; (+) strand; PAM type: NRG; PAM sequence: CAG
aagaagatatttatactagg

SEQ ID NO: 129625 - DNA, 20 bp, Artificial Sequence
  Description of Artificial Sequence: Synthetic oligonucleotide
  Target: LAMA2; (+) strand; PAM type: NRG; PAM sequence: TGG
agatatttatactaggcaga

SEQ ID NO: 129626 - DNA, 20 bp, Artificial Sequence
  Description of Artificial Sequence: Synthetic oligonucleotide
  Target: LAMA2; (+) strand; PAM type: NRG; PAM sequence: GGG
gatatttatactaggcagat

SEQ ID NO: 129627 - DNA, 20 bp, Artificial Sequence
  Description of Artificial Sequence: Synthetic oligonucleotide
  Target: LAMA2; (+) strand; PAM type: NRG; PAM sequence: TAG
tttatactaggcagatgggc

SEQ ID NO: 129628 - DNA, 20 bp, Artificial Sequence
  Description of Artificial Sequence: Synthetic oligonucleotide
  Target: LAMA2; (+) strand; PAM type: NRG; PAM sequence: AGG
ttatactaggcagatgggct

SEQ ID NO: 129629 - DNA, 20 bp, Artificial Sequence
  Description of Artificial Sequence: Synthetic oligonucleotide
  Target: LAMA2; (+) strand; PAM type: NRG; PAM sequence: TAG
aatgaacaaccccaaaatct

SEQ ID NO: 129630 - DNA, 20 bp, Artificial Sequence
  Description of Artificial Sequence: Synthetic oligonucleotide
  Target: LAMA2; (+) strand; PAM type: NRG; PAM sequence: TGG
gaacaaccccaaaatcttag

SEQ ID NO: 129631 - DNA, 20 bp, Artificial Sequence
  Description of Artificial Sequence: Synthetic oligonucleotide
  Target: LAMA2; (+) strand; PAM type: NRG; PAM sequence: CAG
tttttctcccactcacaata

SEQ ID NO: 129632 - DNA, 20 bp, Artificial Sequence
  Description of Artificial Sequence: Synthetic oligonucleotide
  Target: LAMA2; (+) strand; PAM type: NRG; PAM sequence: AGG
ttttctcccactcacaatac

SEQ ID NO: 129633 - DNA, 20 bp, Artificial Sequence
  Description of Artificial Sequence: Synthetic oligonucleotide
  Target: LAMA2; (+) strand; PAM type: NRG; PAM sequence: TAG
ctcacaatacaggttcatca

SEQ ID NO: 129634 - DNA, 20 bp, Artificial Sequence
  Description of Artificial Sequence: Synthetic oligonucleotide
  Target: LAMA2; (+) strand; PAM type: NRG; PAM sequence: CAG
caatacaggttcatcatagt

SEQ ID NO: 129635 - DNA, 20 bp, Artificial Sequence
  Description of Artificial Sequence: Synthetic oligonucleotide
  Target: LAMA2; (+) strand; PAM type: NRG; PAM sequence: CAG
tacaggttcatcatagtcag

SEQ ID NO: 129636 - DNA, 20 bp, Artificial Sequence
  Description of Artificial Sequence: Synthetic oligonucleotide
  Target: LAMA2; (+) strand; PAM type: NRG; PAM sequence: AGG
acaggttcatcatagtcagc

SEQ ID NO: 129637 - DNA, 20 bp, Artificial Sequence
  Description of Artificial Sequence: Synthetic oligonucleotide
  Target: LAMA2; (+) strand; PAM type: NRG; PAM sequence: GGG
caggttcatcatagtcagca

SEQ ID NO: 129638 - DNA, 20 bp, Artificial Sequence
  Description of Artificial Sequence: Synthetic oligonucleotide
  Target: LAMA2; (+) strand; PAM type: NRG; PAM sequence: GGG
aggttcatcatagtcagcag

SEQ ID NO: 129639 - DNA, 20 bp, Artificial Sequence
  Description of Artificial Sequence: Synthetic oligonucleotide
  Target: LAMA2; (+) strand; PAM type: NRG; PAM sequence: GGG
ggttcatcatagtcagcagg

SEQ ID NO: 129640 - DNA, 20 bp, Artificial Sequence
  Description of Artificial Sequence: Synthetic oligonucleotide
  Target: LAMA2; (+) strand; PAM type: NRG; PAM sequence: CAG
tcatagtcagcagggggctc

SEQ ID NO: 129641 - DNA, 20 bp, Artificial Sequence
  Description of Artificial Sequence: Synthetic oligonucleotide
  Target: LAMA2; (+) strand; PAM type: NRG; PAM sequence: AGG
catagtcagcagggggctcc

SEQ ID NO: 129642 - DNA, 20 bp, Artificial Sequence
  Description of Artificial Sequence: Synthetic oligonucleotide
  Target: LAMA2; (+) strand; PAM type: NRG; PAM sequence: TAG
aggaatcataattgctgata

SEQ ID NO: 129643 - DNA, 20 bp, Artificial Sequence
  Description of Artificial Sequence: Synthetic oligonucleotide
  Target: LAMA2; (+) strand; PAM type: NRG; PAM sequence: CAG
ttgctgatatagccacctga

SEQ ID NO: 129644 - DNA, 20 bp, Artificial Sequence
  Description of Artificial Sequence: Synthetic oligonucleotide
  Target: LAMA2; (+) strand; PAM type: NRG; PAM sequence: CAG
gatatagccacctgacagat

SEQ ID NO: 129645 - DNA, 20 bp, Artificial Sequence
  Description of Artificial Sequence: Synthetic oligonucleotide
  Target: LAMA2; (+) strand; PAM type: NRG; PAM sequence: CAG
acctgacagatcagtaacct

SEQ ID NO: 129646 - DNA, 20 bp, Artificial Sequence
  Description of Artificial Sequence: Synthetic oligonucleotide
  Target: LAMA2; (+) strand; PAM type: NRG; PAM sequence: TAG
acagatcagtaacctcagtg

SEQ ID NO: 129647 - DNA, 20 bp, Artificial Sequence
  Description of Artificial Sequence: Synthetic oligonucleotide
  Target: LAMA2; (+) strand; PAM type: NRG; PAM sequence: TGG
atcagtaacctcagtgtagc

SEQ ID NO: 129648 - DNA, 20 bp, Artificial Sequence
  Description of Artificial Sequence: Synthetic oligonucleotide
  Target: LAMA2; (+) strand; PAM type: NRG; PAM sequence: TGG
agtaacctcagtgtagctgg

SEQ ID NO: 129649 - DNA, 20 bp, Artificial Sequence
  Description of Artificial Sequence: Synthetic oligonucleotide
  Target: LAMA2; (+) strand; PAM type: NRG; PAM sequence: GAG
tcagtgtagctggtggccat

SEQ ID NO: 129650 - DNA, 20 bp, Artificial Sequence
  Description of Artificial Sequence: Synthetic oligonucleotide
  Target: LAMA2; (+) strand; PAM type: NRG; PAM sequence: AAG
gtagctggtggccatgagaa

SEQ ID NO: 129651 - DNA, 20 bp, Artificial Sequence
  Description of Artificial Sequence: Synthetic oligonucleotide
  Target: LAMA2; (+) strand; PAM type: NRG; PAM sequence: AGG
tagctggtggccatgagaaa

SEQ ID NO: 129652 - DNA, 20 bp, Artificial Sequence
  Description of Artificial Sequence: Synthetic oligonucleotide
  Target: LAMA2; (+) strand; PAM type: NRG; PAM sequence: TAG
tcatctttcatatcaaatat

SEQ ID NO: 129653 - DNA, 20 bp, Artificial Sequence
  Description of Artificial Sequence: Synthetic oligonucleotide
  Target: LAMA2; (+) strand; PAM type: NRG; PAM sequence: AAG
atcaaatattagaacaatgc

SEQ ID NO: 129654 - DNA, 20 bp, Artificial Sequence
  Description of Artificial Sequence: Synthetic oligonucleotide
  Target: LAMA2; (+) strand; PAM type: NRG; PAM sequence: GAG
caaatattagaacaatgcaa

SEQ ID NO: 129655 - DNA, 20 bp, Artificial Sequence
  Description of Artificial Sequence: Synthetic oligonucleotide
  Target: LAMA2; (+) strand; PAM type: NRG; PAM sequence: TGG
agaacaatgcaagagaaata

SEQ ID NO: 129656 - DNA, 20 bp, Artificial Sequence
  Description of Artificial Sequence: Synthetic oligonucleotide
  Target: LAMA2; (+) strand; PAM type: NRG; PAM sequence: TGG
atatcacacacactaacact

SEQ ID NO: 129657 - DNA, 20 bp, Artificial Sequence
  Description of Artificial Sequence: Synthetic oligonucleotide
  Target: LAMA2; (+) strand; PAM type: NRG; PAM sequence: TAG
ctaacacttggtgtgcattt

SEQ ID NO: 129658 - DNA, 20 bp, Artificial Sequence
  Description of Artificial Sequence: Synthetic oligonucleotide
  Target: LAMA2; (+) strand; PAM type: NRG; PAM sequence: TGG
tgcattttagaatatcttgc

SEQ ID NO: 129659 - DNA, 20 bp, Artificial Sequence
  Description of Artificial Sequence: Synthetic oligonucleotide
  Target: LAMA2; (+) strand; PAM type: NRG; PAM sequence: CAG
tagaatatcttgctggttcc

SEQ ID NO: 129660 - DNA, 20 bp, Artificial Sequence
  Description of Artificial Sequence: Synthetic oligonucleotide
  Target: LAMA2; (+) strand; PAM type: NRG; PAM sequence: TAG
caatactgcacaaatacgcg

SEQ ID NO: 129661 - DNA, 20 bp, Artificial Sequence
  Description of Artificial Sequence: Synthetic oligonucleotide
  Target: LAMA2; (+) strand; PAM type: NRG; PAM sequence: CAG
aaatacgcgtagtctgctga

SEQ ID NO: 129662 - DNA, 20 bp, Artificial Sequence
  Description of Artificial Sequence: Synthetic oligonucleotide
  Target: LAMA2; (+) strand; PAM type: NRG; PAM sequence: CAG
gtctgctgacagtaacctgc

SEQ ID NO: 129663 - DNA, 20 bp, Artificial Sequence
  Description of Artificial Sequence: Synthetic oligonucleotide
  Target: LAMA2; (+) strand; PAM type: NRG; PAM sequence: AGG
tctgctgacagtaacctgcc

SEQ ID NO: 129664 - DNA, 20 bp, Artificial Sequence
  Description of Artificial Sequence: Synthetic oligonucleotide
  Target: LAMA2; (+) strand; PAM type: NRG; PAM sequence: TAG
gacagtaacctgccaggttc

SEQ ID NO: 129665 - DNA, 20 bp, Artificial Sequence
  Description of Artificial Sequence: Synthetic oligonucleotide
  Target: LAMA2; (+) strand; PAM type: NRG; PAM sequence: TAG
acttccatattgattactgt

SEQ ID NO: 129666 - DNA, 20 bp, Artificial Sequence
  Description of Artificial Sequence: Synthetic oligonucleotide
  Target: LAMA2; (+) strand; PAM type: NRG; PAM sequence: TAG
attactgttagcaaaatgtg

SEQ ID NO: 129667 - DNA, 20 bp, Artificial Sequence
  Description of Artificial Sequence: Synthetic oligonucleotide
  Target: LAMA2; (+) strand; PAM type: NRG; PAM sequence: AGG
ttactgttagcaaaatgtgt

SEQ ID NO: 129668 - DNA, 20 bp, Artificial Sequence
  Description of Artificial Sequence: Synthetic oligonucleotide
  Target: LAMA2; (+) strand; PAM type: NRG; PAM sequence: TAG
atgtgtaggtgaaatttttg

SEQ ID NO: 129669 - DNA, 20 bp, Artificial Sequence
  Description of Artificial Sequence: Synthetic oligonucleotide
  Target: LAMA2; (+) strand; PAM type: NRG; PAM sequence: AGG
tgtgtaggtgaaatttttgt

SEQ ID NO: 129670 - DNA, 20 bp, Artificial Sequence
  Description of Artificial Sequence: Synthetic oligonucleotide
  Target: LAMA2; (+) strand; PAM type: NRG; PAM sequence: GGG
gtgtaggtgaaatttttgta

SEQ ID NO: 129671 - DNA, 20 bp, Artificial Sequence
  Description of Artificial Sequence: Synthetic oligonucleotide
  Target: LAMA2; (+) strand; PAM type: NRG; PAM sequence: CAG
ggtacgcacgtgaccattca

SEQ ID NO: 129672 - DNA, 20 bp, Artificial Sequence
  Description of Artificial Sequence: Synthetic oligonucleotide
  Target: LAMA2; (+) strand; PAM type: NRG; PAM sequence: AAG
acgcacgtgaccattcacag

SEQ ID NO: 129673 - DNA, 20 bp, Artificial Sequence
  Description of Artificial Sequence: Synthetic oligonucleotide
  Target: LAMA2; (+) strand; PAM type: NRG; PAM sequence: AGG
cgcacgtgaccattcacaga

SEQ ID NO: 129674 - DNA, 20 bp, Artificial Sequence
  Description of Artificial Sequence: Synthetic oligonucleotide
  Target: LAMA2; (+) strand; PAM type: NRG; PAM sequence: AAG
cgtgaccattcacagaaggc

SEQ ID NO: 129675 - DNA, 20 bp, Artificial Sequence
  Description of Artificial Sequence: Synthetic oligonucleotide
  Target: LAMA2; (+) strand; PAM type: NRG; PAM sequence: GAG
tgaccattcacagaaggcaa

SEQ ID NO: 129676 - DNA, 20 bp, Artificial Sequence
  Description of Artificial Sequence: Synthetic oligonucleotide
  Target: LAMA2; (+) strand; PAM type: NRG; PAM sequence: AGG
gaccattcacagaaggcaag

SEQ ID NO: 129677 - DNA, 20 bp, Artificial Sequence
  Description of Artificial Sequence: Synthetic oligonucleotide
  Target: LAMA2; (+) strand; PAM type: NRG; PAM sequence: TGG
agaaggcaagaggttctctt

SEQ ID NO: 129678 - DNA, 20 bp, Artificial Sequence
  Description of Artificial Sequence: Synthetic oligonucleotide
  Target: LAMA2; (+) strand; PAM type: NRG; PAM sequence: TGG
aaatcacttttttgtgtgtg

SEQ ID NO: 129679 - DNA, 20 bp, Artificial Sequence
  Description of Artificial Sequence: Synthetic oligonucleotide
  Target: LAMA2; (+) strand; PAM type: NRG; PAM sequence: TGG
tgtgtgtggaacatttctca

SEQ ID NO: 129680 - DNA, 20 bp, Artificial Sequence
  Description of Artificial Sequence: Synthetic oligonucleotide
  Target: LAMA2; (+) strand; PAM type: NRG; PAM sequence: TGG
gaacatttctcatggaataa

SEQ ID NO: 129681 - DNA, 20 bp, Artificial Sequence
  Description of Artificial Sequence: Synthetic oligonucleotide
  Target: LAMA2; (+) strand; PAM type: NRG; PAM sequence: GGG
aacatttctcatggaataat

SEQ ID NO: 129682 - DNA, 20 bp, Artificial Sequence
  Description of Artificial Sequence: Synthetic oligonucleotide
  Target: LAMA2; (+) strand; PAM type: NRG; PAM sequence: TAG
catggaataatgggtcatat

SEQ ID NO: 129683 - DNA, 20 bp, Artificial Sequence
  Description of Artificial Sequence: Synthetic oligonucleotide
  Target: LAMA2; (+) strand; PAM type: NRG; PAM sequence: AGG
atggaataatgggtcatatt

SEQ ID NO: 129684 - DNA, 20 bp, Artificial Sequence
  Description of Artificial Sequence: Synthetic oligonucleotide
  Target: LAMA2; (+) strand; PAM type: NRG; PAM sequence: AAG
ataatgggtcatattaggtt

SEQ ID NO: 129685 - DNA, 20 bp, Artificial Sequence
  Description of Artificial Sequence: Synthetic oligonucleotide
  Target: LAMA2; (+) strand; PAM type: NRG; PAM sequence: TAG
gggtcatattaggttaagtt

SEQ ID NO: 129686 - DNA, 20 bp, Artificial Sequence
  Description of Artificial Sequence: Synthetic oligonucleotide
  Target: LAMA2; (+) strand; PAM type: NRG; PAM sequence: AGG
ggtcatattaggttaagttt

SEQ ID NO: 129687 - DNA, 20 bp, Artificial Sequence
  Description of Artificial Sequence: Synthetic oligonucleotide
  Target: LAMA2; (+) strand; PAM type: NRG; PAM sequence: GAG
ttaggaaactgatgtttatt

SEQ ID NO: 129688 - DNA, 20 bp, Artificial Sequence
  Description of Artificial Sequence: Synthetic oligonucleotide
  Target: LAMA2; (+) strand; PAM type: NRG; PAM sequence: AAG
agctgtgcacatatctgcta

SEQ ID NO: 129689 - DNA, 20 bp, Artificial Sequence
  Description of Artificial Sequence: Synthetic oligonucleotide
  Target: LAMA2; (+) strand; PAM type: NRG; PAM sequence: AGG
gctgtgcacatatctgctaa

SEQ ID NO: 129690 - DNA, 20 bp, Artificial Sequence
  Description of Artificial Sequence: Synthetic oligonucleotide
  Target: LAMA2; (+) strand; PAM type: NRG; PAM sequence: AAG
tttcacatctataaataaat

SEQ ID NO: 129691 - DNA, 20 bp, Artificial Sequence
  Description of Artificial Sequence: Synthetic oligonucleotide
  Target: LAMA2; (+) strand; PAM type: NRG; PAM sequence: TGG
taaataagcttatttttcca

SEQ ID NO: 129692 - DNA, 20 bp, Artificial Sequence
  Description of Artificial Sequence: Synthetic oligonucleotide
  Target: LAMA2; (+) strand; PAM type: NRG; PAM sequence: CAG
agcttatttttccatggtgt

SEQ ID NO: 129693 - DNA, 20 bp, Artificial Sequence
  Description of Artificial Sequence: Synthetic oligonucleotide
  Target: LAMA2; (+) strand; PAM type: NRG; PAM sequence: GAG
cttatttttccatggtgtca

SEQ ID NO: 129694 - DNA, 20 bp, Artificial Sequence
  Description of Artificial Sequence: Synthetic oligonucleotide
  Target: LAMA2; (+) strand; PAM type: NRG; PAM sequence: GAG
tatttttccatggtgtcaga

SEQ ID NO: 129695 - DNA, 20 bp, Artificial Sequence
  Description of Artificial Sequence: Synthetic oligonucleotide
  Target: LAMA2; (+) strand; PAM type: NRG; PAM sequence: GAG
catggtgtcagagagataat

SEQ ID NO: 129696 - DNA, 20 bp, Artificial Sequence
  Description of Artificial Sequence: Synthetic oligonucleotide
  Target: LAMA2; (+) strand; PAM type: NRG; PAM sequence: CAG
tcatataaaactatttttgc

SEQ ID NO: 129697 - DNA, 20 bp, Artificial Sequence
  Description of Artificial Sequence: Synthetic oligonucleotide
  Target: LAMA2; (+) strand; PAM type: NRG; PAM sequence: AAG
attctaatatttcctccaca

SEQ ID NO: 129698 - DNA, 20 bp, Artificial Sequence
  Description of Artificial Sequence: Synthetic oligonucleotide
  Target: LAMA2; (+) strand; PAM type: NRG; PAM sequence: TAG
atatttcctccacaaagact

SEQ ID NO: 129699 - DNA, 20 bp, Artificial Sequence
  Description of Artificial Sequence: Synthetic oligonucleotide
  Target: LAMA2; (+) strand; PAM type: NRG; PAM sequence: TAG
agtgaactgcatgtccattt

SEQ ID NO: 129700 - DNA, 20 bp, Artificial Sequence
  Description of Artificial Sequence: Synthetic oligonucleotide
  Target: LAMA2; (+) strand; PAM type: NRG; PAM sequence: AAG
aactgcatgtccattttaga

SEQ ID NO: 129701 - DNA, 20 bp, Artificial Sequence
  Description of Artificial Sequence: Synthetic oligonucleotide
  Target: LAMA2; (+) strand; PAM type: NRG; PAM sequence: TAG
tgcatgtccattttagaaag

SEQ ID NO: 129702 - DNA, 20 bp, Artificial Sequence
  Description of Artificial Sequence: Synthetic oligonucleotide
  Target: LAMA2; (+) strand; PAM type: NRG; PAM sequence: AGG
gcatgtccattttagaaagt

SEQ ID NO: 129703 - DNA, 20 bp, Artificial Sequence
  Description of Artificial Sequence: Synthetic oligonucleotide
  Target: LAMA2; (+) strand; PAM type: NRG; PAM sequence: GAG
atgtccattttagaaagtag

SEQ ID NO: 129704 - DNA, 20 bp, Artificial Sequence
  Description of Artificial Sequence: Synthetic oligonucleotide
  Target: LAMA2; (+) strand; PAM type: NRG; PAM sequence: TAG
tccattttagaaagtaggag

SEQ ID NO: 129705 - DNA, 20 bp, Artificial Sequence
  Description of Artificial Sequence: Synthetic oligonucleotide
  Target: LAMA2; (+) strand; PAM type: NRG; PAM sequence: GAG
ttaattttttcttgcttctt

SEQ ID NO: 129706 - DNA, 20 bp, Artificial Sequence
  Description of Artificial Sequence: Synthetic oligonucleotide
  Target: LAMA2; (+) strand; PAM type: NRG; PAM sequence: AAG
actactatcaacaataaaaa

SEQ ID NO: 129707 - DNA, 20 bp, Artificial Sequence
  Description of Artificial Sequence: Synthetic oligonucleotide
  Target: LAMA2; (+) strand; PAM type: NRG; PAM sequence: AAG
gattttaacgtgtatatctt

SEQ ID NO: 129708 - DNA, 20 bp, Artificial Sequence
  Description of Artificial Sequence: Synthetic oligonucleotide
  Target: LAMA2; (+) strand; PAM type: NRG; PAM sequence: TGG
aaacctgaaacgcgaatcat

SEQ ID NO: 129709 - DNA, 20 bp, Artificial Sequence
  Description of Artificial Sequence: Synthetic oligonucleotide
  Target: LAMA2; (+) strand; PAM type: NRG; PAM sequence: GAG
gcgaatcattggacaaatgt

SEQ ID NO: 129710 - DNA, 20 bp, Artificial Sequence
  Description of Artificial Sequence: Synthetic oligonucleotide
  Target: LAMA2; (+) strand; PAM type: NRG; PAM sequence: AAG
atttatacattaattgatgt

SEQ ID NO: 129711 - DNA, 20 bp, Artificial Sequence
  Description of Artificial Sequence: Synthetic oligonucleotide
  Target: LAMA2; (+) strand; PAM type: NRG; PAM sequence: TAG
atacattaattgatgtaaga

SEQ ID NO: 129712 - DNA, 20 bp, Artificial Sequence
  Description of Artificial Sequence: Synthetic oligonucleotide
  Target: LAMA2; (+) strand; PAM type: NRG; PAM sequence: TAG
aattgatgtaagatagtatt

SEQ ID NO: 129713 - DNA, 20 bp, Artificial Sequence
  Description of Artificial Sequence: Synthetic oligonucleotide
  Target: LAMA2; (+) strand; PAM type: NRG; PAM sequence: AAG
gatgtaagatagtatttaga

SEQ ID NO: 129714 - DNA, 20 bp, Artificial Sequence
  Description of Artificial Sequence: Synthetic oligonucleotide
  Target: LAMA2; (+) strand; PAM type: NRG; PAM sequence: CAG
tagaaagtttcaatcctttc

SEQ ID NO: 129715 - DNA, 20 bp, Artificial Sequence
  Description of Artificial Sequence: Synthetic oligonucleotide
  Target: LAMA2; (+) strand; PAM type: NRG; PAM sequence: CGG
cttacctcaaactaaacaaa

SEQ ID NO: 129716 - DNA, 20 bp, Artificial Sequence
  Description of Artificial Sequence: Synthetic oligonucleotide
  Target: LAMA2; (+) strand; PAM type: NRG; PAM sequence: TGG
ctttcccatatttttctact

SEQ ID NO: 129717 - DNA, 20 bp, Artificial Sequence
  Description of Artificial Sequence: Synthetic oligonucleotide
  Target: LAMA2; (+) strand; PAM type: NRG; PAM sequence: AAG
ccatatttttctacttggtg

SEQ ID NO: 129718 - DNA, 20 bp, Artificial Sequence
  Description of Artificial Sequence: Synthetic oligonucleotide
  Target: LAMA2; (+) strand; PAM type: NRG; PAM sequence: AGG
catatttttctacttggtga

SEQ ID NO: 129719 - DNA, 20 bp, Artificial Sequence
  Description of Artificial Sequence: Synthetic oligonucleotide
  Target: LAMA2; (+) strand; PAM type: NRG; PAM sequence: TAG
tgaaggacattctaatcatc

SEQ ID NO: 129720 - DNA, 20 bp, Artificial Sequence
  Description of Artificial Sequence: Synthetic oligonucleotide
  Target: LAMA2; (+) strand; PAM type: NRG; PAM sequence: AAG
ttctaatcatctagatgcct

SEQ ID NO: 129721 - DNA, 20 bp, Artificial Sequence
  Description of Artificial Sequence: Synthetic oligonucleotide
  Target: LAMA2; (+) strand; PAM type: NRG; PAM sequence: CAG
aatcatctagatgcctaagt

SEQ ID NO: 129722 - DNA, 20 bp, Artificial Sequence
  Description of Artificial Sequence: Synthetic oligonucleotide
  Target: LAMA2; (+) strand; PAM type: NRG; PAM sequence: TAG
agatgcctaagtcagaaacc

SEQ ID NO: 129723 - DNA, 20 bp, Artificial Sequence
  Description of Artificial Sequence: Synthetic oligonucleotide
  Target: LAMA2; (+) strand; PAM type: NRG; PAM sequence: AGG
gatgcctaagtcagaaacct

SEQ ID NO: 129724 - DNA, 20 bp, Artificial Sequence
  Description of Artificial Sequence: Synthetic oligonucleotide
  Target: LAMA2; (+) strand; PAM type: NRG; PAM sequence: CAG
ttcattctttctgttcctca

SEQ ID NO: 129725 - DNA, 20 bp, Artificial Sequence
  Description of Artificial Sequence: Synthetic oligonucleotide
  Target: LAMA2; (+) strand; PAM type: NRG; PAM sequence: CGG
ttaattaattgaacgatttt

SEQ ID NO: 129726 - DNA, 20 bp, Artificial Sequence
  Description of Artificial Sequence: Synthetic oligonucleotide
  Target: LAMA2; (+) strand; PAM type: NRG; PAM sequence: CAG
tactgcttctctccctaact

SEQ ID NO: 129727 - DNA, 20 bp, Artificial Sequence
  Description of Artificial Sequence: Synthetic oligonucleotide
  Target: LAMA2; (+) strand; PAM type: NRG; PAM sequence: AAG
tttctcgactatcctatttt

SEQ ID NO: 129728 - DNA, 20 bp, Artificial Sequence
  Description of Artificial Sequence: Synthetic oligonucleotide
  Target: LAMA2; (+) strand; PAM type: NRG; PAM sequence: CAG
cgactatcctattttaagat

SEQ ID NO: 129729 - DNA, 20 bp, Artificial Sequence
  Description of Artificial Sequence: Synthetic oligonucleotide
  Target: LAMA2; (+) strand; PAM type: NRG; PAM sequence: AGG
gactatcctattttaagatc

SEQ ID NO: 129730 - DNA, 20 bp, Artificial Sequence
  Description of Artificial Sequence: Synthetic oligonucleotide
  Target: LAMA2; (+) strand; PAM type: NRG; PAM sequence: TAG
gcaatgatctctctataacc

SEQ ID NO: 129731 - DNA, 20 bp, Artificial Sequence
  Description of Artificial Sequence: Synthetic oligonucleotide
  Target: LAMA2; (+) strand; PAM type: NRG; PAM sequence: AAG
ctctataacctagtaatatc

SEQ ID NO: 129732 - DNA, 20 bp, Artificial Sequence
  Description of Artificial Sequence: Synthetic oligonucleotide
  Target: LAMA2; (+) strand; PAM type: NRG; PAM sequence: AAG
taatatcaagccctaatgaa

SEQ ID NO: 129733 - DNA, 20 bp, Artificial Sequence
  Description of Artificial Sequence: Synthetic oligonucleotide
  Target: LAMA2; (+) strand; PAM type: NRG; PAM sequence: TGG
aagccctaatgaaaagtctt

SEQ ID NO: 129734 - DNA, 20 bp, Artificial Sequence
  Description of Artificial Sequence: Synthetic oligonucleotide
  Target: LAMA2; (+) strand; PAM type: NRG; PAM sequence: CGG
cctaatgaaaagtctttggt

SEQ ID NO: 129735 - DNA, 20 bp, Artificial Sequence
  Description of Artificial Sequence: Synthetic oligonucleotide
  Target: LAMA2; (+) strand; PAM type: NRG; PAM sequence: CAG
tttggtcggcttctgtcacc

SEQ ID NO: 129736 - DNA, 20 bp, Artificial Sequence
  Description of Artificial Sequence: Synthetic oligonucleotide
  Target: LAMA2; (+) strand; PAM type: NRG; PAM sequence: AGG
ttggtcggcttctgtcaccc

SEQ ID NO: 129737 - DNA, 20 bp, Artificial Sequence
  Description of Artificial Sequence: Synthetic oligonucleotide
  Target: LAMA2; (+) strand; PAM type: NRG; PAM sequence: GAG
aggataaacgtgaaactcct

SEQ ID NO: 129738 - DNA, 20 bp, Artificial Sequence
  Description of Artificial Sequence: Synthetic oligonucleotide
  Target: LAMA2; (+) strand; PAM type: NRG; PAM sequence: GAG
gataaacgtgaaactcctga

SEQ ID NO: 129739 - DNA, 20 bp, Artificial Sequence
  Description of Artificial Sequence: Synthetic oligonucleotide
  Target: LAMA2; (+) strand; PAM type: NRG; PAM sequence: TGG
aacgtgaaactcctgagagt

SEQ ID NO: 129740 - DNA, 20 bp, Artificial Sequence
  Description of Artificial Sequence: Synthetic oligonucleotide
  Target: LAMA2; (+) strand; PAM type: NRG; PAM sequence: CAG
gagttggatctacttccttt

SEQ ID NO: 129741 - DNA, 20 bp, Artificial Sequence
  Description of Artificial Sequence: Synthetic oligonucleotide
  Target: LAMA2; (+) strand; PAM type: NRG; PAM sequence: TAG
ctcacccttgcctgcacttc

SEQ ID NO: 129742 - DNA, 20 bp, Artificial Sequence
  Description of Artificial Sequence: Synthetic oligonucleotide
  Target: LAMA2; (+) strand; PAM type: NRG; PAM sequence: GAG
ttcacacatcatttgaacct

SEQ ID NO: 129743 - DNA, 20 bp, Artificial Sequence
  Description of Artificial Sequence: Synthetic oligonucleotide
  Target: LAMA2; (+) strand; PAM type: NRG; PAM sequence: CAG
gagacattaaaaatgccttc

SEQ ID NO: 129744 - DNA, 20 bp, Artificial Sequence
  Description of Artificial Sequence: Synthetic oligonucleotide
  Target: LAMA2; (+) strand; PAM type: NRG; PAM sequence: AGG
agacattaaaaatgccttcc

SEQ ID NO: 129745 - DNA, 20 bp, Artificial Sequence
  Description of Artificial Sequence: Synthetic oligonucleotide
  Target: LAMA2; (+) strand; PAM type: NRG; PAM sequence: GGG
gacattaaaaatgccttcca

SEQ ID NO: 129746 - DNA, 20 bp, Artificial Sequence
  Description of Artificial Sequence: Synthetic oligonucleotide
  Target: LAMA2; (+) strand; PAM type: NRG; PAM sequence: TGG
taaaaatgccttccagggct

SEQ ID NO: 129747 - DNA, 20 bp, Artificial Sequence
  Description of Artificial Sequence: Synthetic oligonucleotide
  Target: LAMA2; (+) strand; PAM type: NRG; PAM sequence: CAG
atgccttccagggcttggtg

SEQ ID NO: 129748 - DNA, 20 bp, Artificial Sequence
  Description of Artificial Sequence: Synthetic oligonucleotide
  Target: LAMA2; (+) strand; PAM type: NRG; PAM sequence: TGG
ccttccagggcttggtgcag

SEQ ID NO: 129749 - DNA, 20 bp, Artificial Sequence
  Description of Artificial Sequence: Synthetic oligonucleotide
  Target: LAMA2; (+) strand; PAM type: NRG; PAM sequence: CAG
gtggcacacacctgtaatcc

SEQ ID NO: 129750 - DNA, 20 bp, Artificial Sequence
  Description of Artificial Sequence: Synthetic oligonucleotide
  Target: LAMA2; (+) strand; PAM type: NRG; PAM sequence: TGG
cacctgtaatcccagcactt

SEQ ID NO: 129751 - DNA, 20 bp, Artificial Sequence
  Description of Artificial Sequence: Synthetic oligonucleotide
  Target: LAMA2; (+) strand; PAM type: NRG; PAM sequence: GGG
acctgtaatcccagcacttt

SEQ ID NO: 129752 - DNA, 20 bp, Artificial Sequence
  Description of Artificial Sequence: Synthetic oligonucleotide
  Target: LAMA2; (+) strand; PAM type: NRG; PAM sequence: GAG
ctgtaatcccagcactttgg

SEQ ID NO: 129753 - DNA, 20 bp, Artificial Sequence
  Description of Artificial Sequence: Synthetic oligonucleotide
  Target: LAMA2; (+) strand; PAM type: NRG; PAM sequence: AGG
tgtaatcccagcactttggg

SEQ ID NO: 129754 - DNA, 20 bp, Artificial Sequence
  Description of Artificial Sequence: Synthetic oligonucleotide
  Target: LAMA2; (+) strand; PAM type: NRG; PAM sequence: AAG
tcccagcactttgggaggcc

SEQ ID NO: 129755 - DNA, 20 bp, Artificial Sequence
  Description of Artificial Sequence: Synthetic oligonucleotide
  Target: LAMA2; (+) strand; PAM type: NRG; PAM sequence: AGG
cccagcactttgggaggcca

SEQ ID NO: 129756 - DNA, 20 bp, Artificial Sequence
  Description of Artificial Sequence: Synthetic oligonucleotide
  Target: LAMA2; (+) strand; PAM type: NRG; PAM sequence: CAG
gcactttgggaggccaaggc

SEQ ID NO: 129757 - DNA, 20 bp, Artificial Sequence
  Description of Artificial Sequence: Synthetic oligonucleotide
  Target: LAMA2; (+) strand; PAM type: NRG; PAM sequence: CAG
ctttgggaggccaaggccag

SEQ ID NO: 129758 - DNA, 20 bp, Artificial Sequence
  Description of Artificial Sequence: Synthetic oligonucleotide
  Target: LAMA2; (+) strand; PAM type: NRG; PAM sequence: GAG
ccaaggccagcagatcactt

SEQ ID NO: 129759 - DNA, 20 bp, Artificial Sequence
  Description of Artificial Sequence: Synthetic oligonucleotide
  Target: LAMA2; (+) strand; PAM type: NRG; PAM sequence: CAG
gccagcagatcacttgagct

SEQ ID NO: 129760 - DNA, 20 bp, Artificial Sequence
  Description of Artificial Sequence: Synthetic oligonucleotide
  Target: LAMA2; (+) strand; PAM type: NRG; PAM sequence: AGG
ccagcagatcacttgagctc

SEQ ID NO: 129761 - DNA, 20 bp, Artificial Sequence
  Description of Artificial Sequence: Synthetic oligonucleotide
  Target: LAMA2; (+) strand; PAM type: NRG; PAM sequence: GAG
agcagatcacttgagctcag

SEQ ID NO: 129762 - DNA, 20 bp, Artificial Sequence
  Description of Artificial Sequence: Synthetic oligonucleotide
  Target: LAMA2; (+) strand; PAM type: NRG; PAM sequence: GAG
tcacttgagctcaggagttc

SEQ ID NO: 129763 - DNA, 20 bp, Artificial Sequence
  Description of Artificial Sequence: Synthetic oligonucleotide
  Target: LAMA2; (+) strand; PAM type: NRG; PAM sequence: CAG
tgagctcaggagttcgagac

SEQ ID NO: 129764 - DNA, 20 bp, Artificial Sequence
  Description of Artificial Sequence: Synthetic oligonucleotide
  Target: LAMA2; (+) strand; PAM type: NRG; PAM sequence: TGG
tcaggagttcgagaccagcc

SEQ ID NO: 129765 - DNA, 20 bp, Artificial Sequence
  Description of Artificial Sequence: Synthetic oligonucleotide
  Target: LAMA2; (+) strand; PAM type: NRG; PAM sequence: GGG
caggagttcgagaccagcct

SEQ ID NO: 129766 - DNA, 20 bp, Artificial Sequence
  Description of Artificial Sequence: Synthetic oligonucleotide
  Target: LAMA2; (+) strand; PAM type: NRG; PAM sequence: TGG
aaaaaaaaaaaaaaaattgc

SEQ ID NO: 129767 - DNA, 20 bp, Artificial Sequence
  Description of Artificial Sequence: Synthetic oligonucleotide
  Target: LAMA2; (+) strand; PAM type: NRG; PAM sequence: GGG
aaaaaaaaaaaaaaattgct

SEQ ID NO: 129768 - DNA, 20 bp, Artificial Sequence
  Description of Artificial Sequence: Synthetic oligonucleotide
  Target: LAMA2; (+) strand; PAM type: NRG; PAM sequence: TGG
aaaaaaaaaattgctgggct

SEQ ID NO: 129769 - DNA, 20 bp, Artificial Sequence
  Description of Artificial Sequence: Synthetic oligonucleotide
  Target: LAMA2; (+) strand; PAM type: NRG; PAM sequence: TGG
aaaaaaattgctgggcttgg

SEQ ID NO: 129770 - DNA, 20 bp, Artificial Sequence
  Description of Artificial Sequence: Synthetic oligonucleotide
  Target: LAMA2; (+) strand; PAM type: NRG; PAM sequence: GAG
aattgctgggcttggtggtt

SEQ ID NO: 129771 - DNA, 20 bp, Artificial Sequence
  Description of Artificial Sequence: Synthetic oligonucleotide
  Target: LAMA2; (+) strand; PAM type: NRG; PAM sequence: CAG
ggtggttgagcctgtcgtcc

SEQ ID NO: 129772 - DNA, 20 bp, Artificial Sequence
  Description of Artificial Sequence: Synthetic oligonucleotide
  Target: LAMA2; (+) strand; PAM type: NRG; PAM sequence: CAG
agcctgtcgtcccagctact

SEQ ID NO: 129773 - DNA, 20 bp, Artificial Sequence
  Description of Artificial Sequence: Synthetic oligonucleotide
  Target: LAMA2; (+) strand; PAM type: NRG; PAM sequence: AGG
gcctgtcgtcccagctactc

SEQ ID NO: 129774 - DNA, 20 bp, Artificial Sequence
  Description of Artificial Sequence: Synthetic oligonucleotide
  Target: LAMA2; (+) strand; PAM type: NRG; PAM sequence: GAG
ctgtcgtcccagctactcag

SEQ ID NO: 129775 - DNA, 20 bp, Artificial Sequence
  Description of Artificial Sequence: Synthetic oligonucleotide
  Target: LAMA2; (+) strand; PAM type: NRG; PAM sequence: AGG
tgtcgtcccagctactcagg

SEQ ID NO: 129776 - DNA, 20 bp, Artificial Sequence
  Description of Artificial Sequence: Synthetic oligonucleotide
  Target: LAMA2; (+) strand; PAM type: NRG; PAM sequence: GAG
tcccagctactcaggaggct

SEQ ID NO: 129777 - DNA, 20 bp, Artificial Sequence
  Description of Artificial Sequence: Synthetic oligonucleotide
  Target: LAMA2; (+) strand; PAM type: NRG; PAM sequence: AGG
cccagctactcaggaggctg

SEQ ID NO: 129778 - DNA, 20 bp, Artificial Sequence
  Description of Artificial Sequence: Synthetic oligonucleotide
  Target: LAMA2; (+) strand; PAM type: NRG; PAM sequence: TGG
agctactcaggaggctgagg

SEQ ID NO: 129779 - DNA, 20 bp, Artificial Sequence
  Description of Artificial Sequence: Synthetic oligonucleotide
  Target: LAMA2; (+) strand; PAM type: NRG; PAM sequence: GGG
gctactcaggaggctgaggt

SEQ ID NO: 129780 - DNA, 20 bp, Artificial Sequence
  Description of Artificial Sequence: Synthetic oligonucleotide
  Target: LAMA2; (+) strand; PAM type: NRG; PAM sequence: GAG
tactcaggaggctgaggtgg

SEQ ID NO: 129781 - DNA, 20 bp, Artificial Sequence
  Description of Artificial Sequence: Synthetic oligonucleotide
  Target: LAMA2; (+) strand; PAM type: NRG; PAM sequence: AGG
actcaggaggctgaggtggg

SEQ ID NO: 129782 - DNA, 20 bp, Artificial Sequence
  Description of Artificial Sequence: Synthetic oligonucleotide
  Target: LAMA2; (+) strand; PAM type: NRG; PAM sequence: GAG
ctgaggtgggaggatccctt

SEQ ID NO: 129783 - DNA, 20 bp, Artificial Sequence
  Description of Artificial Sequence: Synthetic oligonucleotide
  Target: LAMA2; (+) strand; PAM type: NRG; PAM sequence: CAG
gtgggaggatcccttgagtt

SEQ ID NO: 129784 - DNA, 20 bp, Artificial Sequence
  Description of Artificial Sequence: Synthetic oligonucleotide
  Target: LAMA2; (+) strand; PAM type: NRG; PAM sequence: AAG
ggaggatcccttgagttcag

SEQ ID NO: 129785 - DNA, 20 bp, Artificial Sequence
  Description of Artificial Sequence: Synthetic oligonucleotide
  Target: LAMA2; (+) strand; PAM type: NRG; PAM sequence: AAG
tcccttgagttcagaagttc

SEQ ID NO: 129786 - DNA, 20 bp, Artificial Sequence
  Description of Artificial Sequence: Synthetic oligonucleotide
  Target: LAMA2; (+) strand; PAM type: NRG; PAM sequence: AGG
cccttgagttcagaagttca

SEQ ID NO: 129787 - DNA, 20 bp, Artificial Sequence
  Description of Artificial Sequence: Synthetic oligonucleotide
  Target: LAMA2; (+) strand; PAM type: NRG; PAM sequence: CAG
agttcagaagttcaaggctg

SEQ ID NO: 129788 - DNA, 20 bp, Artificial Sequence
  Description of Artificial Sequence: Synthetic oligonucleotide
  Target: LAMA2; (+) strand; PAM type: NRG; PAM sequence: GAG
cagaagttcaaggctgcagt

SEQ ID NO: 129789 - DNA, 20 bp, Artificial Sequence
  Description of Artificial Sequence: Synthetic oligonucleotide
  Target: LAMA2; (+) strand; PAM type: NRG; PAM sequence: CAG
aagttcaaggctgcagtgag

SEQ ID NO: 129790 - DNA, 20 bp, Artificial Sequence
  Description of Artificial Sequence: Synthetic oligonucleotide
  Target: LAMA2; (+) strand; PAM type: NRG; PAM sequence: GAG
gttcaaggctgcagtgagca

SEQ ID NO: 129791 - DNA, 20 bp, Artificial Sequence
  Description of Artificial Sequence: Synthetic oligonucleotide
  Target: LAMA2; (+) strand; PAM type: NRG; PAM sequence: GAG
ggctgcagtgagcagagatt

SEQ ID NO: 129792 - DNA, 20 bp, Artificial Sequence
  Description of Artificial Sequence: Synthetic oligonucleotide
  Target: LAMA2; (+) strand; PAM type: NRG; PAM sequence: CAG
gagattgagccactgcactc

SEQ ID NO: 129793 - DNA, 20 bp, Artificial Sequence
  Description of Artificial Sequence: Synthetic oligonucleotide
  Target: LAMA2; (+) strand; PAM type: NRG; PAM sequence: TAG
tgagccactgcactccagca

SEQ ID NO: 129794 - DNA, 20 bp, Artificial Sequence
  Description of Artificial Sequence: Synthetic oligonucleotide
  Target: LAMA2; (+) strand; PAM type: NRG; PAM sequence: AGG
gagccactgcactccagcat

SEQ ID NO: 129795 - DNA, 20 bp, Artificial Sequence
  Description of Artificial Sequence: Synthetic oligonucleotide
  Target: LAMA2; (+) strand; PAM type: NRG; PAM sequence: CAG
ctgcactccagcataggtga

SEQ ID NO: 129796 - DNA, 20 bp, Artificial Sequence
  Description of Artificial Sequence: Synthetic oligonucleotide
  Target: LAMA2; (+) strand; PAM type: NRG; PAM sequence: GAG
gcactccagcataggtgaca

SEQ ID NO: 129797 - DNA, 20 bp, Artificial Sequence
  Description of Artificial Sequence: Synthetic oligonucleotide
  Target: LAMA2; (+) strand; PAM type: NRG; PAM sequence: CAG
tccagcataggtgacagagc

SEQ ID NO: 129798 - DNA, 20 bp, Artificial Sequence
  Description of Artificial Sequence: Synthetic oligonucleotide
  Target: LAMA2; (+) strand; PAM type: NRG; PAM sequence: GAG
cagcataggtgacagagcca

SEQ ID NO: 129799 - DNA, 20 bp, Artificial Sequence
  Description of Artificial Sequence: Synthetic oligonucleotide
  Target: LAMA2; (+) strand; PAM type: NRG; PAM sequence: AAG
gagccagagcctgtctcaaa

SEQ ID NO: 129800 - DNA, 20 bp, Artificial Sequence
  Description of Artificial Sequence: Synthetic oligonucleotide
  Target: LAMA2; (+) strand; PAM type: NRG; PAM sequence: CAG
ataataataatactgccttc

SEQ ID NO: 129801 - DNA, 20 bp, Artificial Sequence
  Description of Artificial Sequence: Synthetic oligonucleotide
  Target: LAMA2; (+) strand; PAM type: NRG; PAM sequence: TGG
caaaataacatgtctttcct

SEQ ID NO: 129802 - DNA, 20 bp, Artificial Sequence
  Description of Artificial Sequence: Synthetic oligonucleotide
  Target: LAMA2; (+) strand; PAM type: NRG; PAM sequence: CAG
aatactcttcttactgcttt

SEQ ID NO: 129803 - DNA, 20 bp, Artificial Sequence
  Description of Artificial Sequence: Synthetic oligonucleotide
  Target: LAMA2; (+) strand; PAM type: NRG; PAM sequence: CAG
actcttcttactgctttcag

SEQ ID NO: 129804 - DNA, 20 bp, Artificial Sequence
  Description of Artificial Sequence: Synthetic oligonucleotide
  Target: LAMA2; (+) strand; PAM type: NRG; PAM sequence: CAG
ttcagcagacattcaaccca

SEQ ID NO: 129805 - DNA, 20 bp, Artificial Sequence
  Description of Artificial Sequence: Synthetic oligonucleotide
  Target: LAMA2; (+) strand; PAM type: NRG; PAM sequence: AGG
tcagcagacattcaacccac

SEQ ID NO: 129806 - DNA, 20 bp, Artificial Sequence
  Description of Artificial Sequence: Synthetic oligonucleotide
  Target: LAMA2; (+) strand; PAM type: NRG; PAM sequence: CAG
gacattcaacccacaggtcc

SEQ ID NO: 129807 - DNA, 20 bp, Artificial Sequence
  Description of Artificial Sequence: Synthetic oligonucleotide
  Target: LAMA2; (+) strand; PAM type: NRG; PAM sequence: AGG
acattcaacccacaggtccc

SEQ ID NO: 129808 - DNA, 20 bp, Artificial Sequence
  Description of Artificial Sequence: Synthetic oligonucleotide
  Target: LAMA2; (+) strand; PAM type: NRG; PAM sequence: TAG
cattctcatctcttaattgc

SEQ ID NO: 129809 - DNA, 20 bp, Artificial Sequence
  Description of Artificial Sequence: Synthetic oligonucleotide
  Target: LAMA2; (+) strand; PAM type: NRG; PAM sequence: CAG
ctcatctcttaattgctagc

SEQ ID NO: 129810 - DNA, 20 bp, Artificial Sequence
  Description of Artificial Sequence: Synthetic oligonucleotide
  Target: LAMA2; (+) strand; PAM type: NRG; PAM sequence: AGG
tcatctcttaattgctagcc

SEQ ID NO: 129811 - DNA, 20 bp, Artificial Sequence
  Description of Artificial Sequence: Synthetic oligonucleotide
  Target: LAMA2; (+) strand; PAM type: NRG; PAM sequence: TGG
ttaattgctagccaggcctt

SEQ ID NO: 129812 - DNA, 20 bp, Artificial Sequence
  Description of Artificial Sequence: Synthetic oligonucleotide
  Target: LAMA2; (+) strand; PAM type: NRG; PAM sequence: GGG
taattgctagccaggccttt

SEQ ID NO: 129813 - DNA, 20 bp, Artificial Sequence
  Description of Artificial Sequence: Synthetic oligonucleotide
  Target: LAMA2; (+) strand; PAM type: NRG; PAM sequence: AAG
ttgctagccaggcctttggg

SEQ ID NO: 129814 - DNA, 20 bp, Artificial Sequence
  Description of Artificial Sequence: Synthetic oligonucleotide
  Target: LAMA2; (+) strand; PAM type: NRG; PAM sequence: TAG
gcctttgggaagccgttctc

SEQ ID NO: 129815 - DNA, 20 bp, Artificial Sequence
  Description of Artificial Sequence: Synthetic oligonucleotide
  Target: LAMA2; (+) strand; PAM type: NRG; PAM sequence: CAG
gccgttctctagttcctact

SEQ ID NO: 129816 - DNA, 20 bp, Artificial Sequence
  Description of Artificial Sequence: Synthetic oligonucleotide
  Target: LAMA2; (+) strand; PAM type: NRG; PAM sequence: TAG
ttctctagttcctactcagt

SEQ ID NO: 129817 - DNA, 20 bp, Artificial Sequence
  Description of Artificial Sequence: Synthetic oligonucleotide
  Target: LAMA2; (+) strand; PAM type: NRG; PAM sequence: AGG
tctctagttcctactcagtt

SEQ ID NO: 129818 - DNA, 20 bp, Artificial Sequence
  Description of Artificial Sequence: Synthetic oligonucleotide
  Target: LAMA2; (+) strand; PAM type: NRG; PAM sequence: TAG
acccaacctctctgctctca

SEQ ID NO: 129819 - DNA, 20 bp, Artificial Sequence
  Description of Artificial Sequence: Synthetic oligonucleotide
  Target: LAMA2; (+) strand; PAM type: NRG; PAM sequence: TAG
ctctctgctctcatagcaca

SEQ ID NO: 129820 - DNA, 20 bp, Artificial Sequence
  Description of Artificial Sequence: Synthetic oligonucleotide
  Target: LAMA2; (+) strand; PAM type: NRG; PAM sequence: AGG
tctctgctctcatagcacat

SEQ ID NO: 129821 - DNA, 20 bp, Artificial Sequence
  Description of Artificial Sequence: Synthetic oligonucleotide
  Target: LAMA2; (+) strand; PAM type: NRG; PAM sequence: TAG
cataggctgtccctctaaca

SEQ ID NO: 129822 - DNA, 20 bp, Artificial Sequence
  Description of Artificial Sequence: Synthetic oligonucleotide
  Target: LAMA2; (+) strand; PAM type: NRG; PAM sequence: GAG
ctgtccctctaacatagcat

SEQ ID NO: 129823 - DNA, 20 bp, Artificial Sequence
  Description of Artificial Sequence: Synthetic oligonucleotide
  Target: LAMA2; (+) strand; PAM type: NRG; PAM sequence: TGG
gagtcacacgctttccaaac

SEQ ID NO: 129824 - DNA, 20 bp, Artificial Sequence
  Description of Artificial Sequence: Synthetic oligonucleotide
  Target: LAMA2; (+) strand; PAM type: NRG; PAM sequence: GAG
tctttactgcattgctcctt

SEQ ID NO: 129825 - DNA, 20 bp, Artificial Sequence
  Description of Artificial Sequence: Synthetic oligonucleotide
  Target: LAMA2; (+) strand; PAM type: NRG; PAM sequence: AGG
ctttactgcattgctccttg

SEQ ID NO: 129826 - DNA, 20 bp, Artificial Sequence
  Description of Artificial Sequence: Synthetic oligonucleotide
  Target: LAMA2; (+) strand; PAM type: NRG; PAM sequence: TAG
tactgcattgctccttgagg

SEQ ID NO: 129827 - DNA, 20 bp, Artificial Sequence
  Description of Artificial Sequence: Synthetic oligonucleotide
  Target: LAMA2; (+) strand; PAM type: NRG; PAM sequence: AAG
gcattgctccttgaggtagc

SEQ ID NO: 129828 - DNA, 20 bp, Artificial Sequence
  Description of Artificial Sequence: Synthetic oligonucleotide
  Target: LAMA2; (+) strand; PAM type: NRG; PAM sequence: AGG
cattgctccttgaggtagca

SEQ ID NO: 129829 - DNA, 20 bp, Artificial Sequence
  Description of Artificial Sequence: Synthetic oligonucleotide
  Target: LAMA2; (+) strand; PAM type: NRG; PAM sequence: TAG
agcaaggatgtcttctttat

SEQ ID NO: 129830 - DNA, 20 bp, Artificial Sequence
  Description of Artificial Sequence: Synthetic oligonucleotide
  Target: LAMA2; (+) strand; PAM type: NRG; PAM sequence: GAG
tttattagcttttttatact

SEQ ID NO: 129831 - DNA, 20 bp, Artificial Sequence
  Description of Artificial Sequence: Synthetic oligonucleotide
  Target: LAMA2; (+) strand; PAM type: NRG; PAM sequence: CAG
actgagaaaattttaaaata

SEQ ID NO: 129832 - DNA, 20 bp, Artificial Sequence
  Description of Artificial Sequence: Synthetic oligonucleotide
  Target: LAMA2; (+) strand; PAM type: NRG; PAM sequence: AGG
ctgagaaaattttaaaatac

SEQ ID NO: 129833 - DNA, 20 bp, Artificial Sequence
  Description of Artificial Sequence: Synthetic oligonucleotide
  Target: LAMA2; (+) strand; PAM type: NRG; PAM sequence: AAG
aaaattttaaaatacaggaa

SEQ ID NO: 129834 - DNA, 20 bp, Artificial Sequence
  Description of Artificial Sequence: Synthetic oligonucleotide
  Target: LAMA2; (+) strand; PAM type: NRG; PAM sequence: TAG
atacccacattcctaactca

SEQ ID NO: 129835 - DNA, 20 bp, Artificial Sequence
  Description of Artificial Sequence: Synthetic oligonucleotide
  Target: LAMA2; (+) strand; PAM type: NRG; PAM sequence: TAG
gtcatgttttcttttcttac

SEQ ID NO: 129836 - DNA, 20 bp, Artificial Sequence
  Description of Artificial Sequence: Synthetic oligonucleotide
  Target: LAMA2; (+) strand; PAM type: NRG; PAM sequence: GAG
catgttttcttttcttacta

SEQ ID NO: 129837 - DNA, 20 bp, Artificial Sequence
  Description of Artificial Sequence: Synthetic oligonucleotide
  Target: LAMA2; (+) strand; PAM type: NRG; PAM sequence: AAG
ttttcttttcttactagaga

SEQ ID NO: 129838 - DNA, 20 bp, Artificial Sequence
  Description of Artificial Sequence: Synthetic oligonucleotide
  Target: LAMA2; (+) strand; PAM type: NRG; PAM sequence: GAG
tcttactagagaaagaaaat

SEQ ID NO: 129839 - DNA, 20 bp, Artificial Sequence
  Description of Artificial Sequence: Synthetic oligonucleotide
  Target: LAMA2; (+) strand; PAM type: NRG; PAM sequence: TAG
tcctacttttctgcctgtct

SEQ ID NO: 129840 - DNA, 20 bp, Artificial Sequence
  Description of Artificial Sequence: Synthetic oligonucleotide
  Target: LAMA2; (+) strand; PAM type: NRG; PAM sequence: GAG
ctacttttctgcctgtctta

SEQ ID NO: 129841 - DNA, 20 bp, Artificial Sequence
  Description of Artificial Sequence: Synthetic oligonucleotide
  Target: LAMA2; (+) strand; PAM type: NRG; PAM sequence: AGG
tacttttctgcctgtcttag

SEQ ID NO: 129842 - DNA, 20 bp, Artificial Sequence
  Description of Artificial Sequence: Synthetic oligonucleotide
  Target: LAMA2; (+) strand; PAM type: NRG; PAM sequence: CAG
cttagaggcaaacaccaaca

SEQ ID NO: 129843 - DNA, 20 bp, Artificial Sequence
  Description of Artificial Sequence: Synthetic oligonucleotide
  Target: LAMA2; (+) strand; PAM type: NRG; PAM sequence: AGG
ttagaggcaaacaccaacac

SEQ ID NO: 129844 - DNA, 20 bp, Artificial Sequence
  Description of Artificial Sequence: Synthetic oligonucleotide
  Target: LAMA2; (+) strand; PAM type: NRG; PAM sequence: TAG
acatacctactgtgtatcta

SEQ ID NO: 129845 - DNA, 20 bp, Artificial Sequence
  Description of Artificial Sequence: Synthetic oligonucleotide
  Target: LAMA2; (+) strand; PAM type: NRG; PAM sequence: CAG
tactgtgtatctatagccaa

SEQ ID NO: 129846 - DNA, 20 bp, Artificial Sequence
  Description of Artificial Sequence: Synthetic oligonucleotide
  Target: LAMA2; (+) strand; PAM type: NRG; PAM sequence: TGG
caacagatcttatatttatg

SEQ ID NO: 129847 - DNA, 20 bp, Artificial Sequence
  Description of Artificial Sequence: Synthetic oligonucleotide
  Target: LAMA2; (+) strand; PAM type: NRG; PAM sequence: TAG
tgtttgcgtttttccaattt

SEQ ID NO: 129848 - DNA, 20 bp, Artificial Sequence
  Description of Artificial Sequence: Synthetic oligonucleotide
  Target: LAMA2; (+) strand; PAM type: NRG; PAM sequence: TGG
cgtttttccaattttagaaa

SEQ ID NO: 129849 - DNA, 20 bp, Artificial Sequence
  Description of Artificial Sequence: Synthetic oligonucleotide
  Target: LAMA2; (+) strand; PAM type: NRG; PAM sequence: TAG
caaaattatgccaatatgta

SEQ ID NO: 129850 - DNA, 20 bp, Artificial Sequence
  Description of Artificial Sequence: Synthetic oligonucleotide
  Target: LAMA2; (+) strand; PAM type: NRG; PAM sequence: GAG
gatctcaaaaacataacatt

SEQ ID NO: 129851 - DNA, 20 bp, Artificial Sequence
  Description of Artificial Sequence: Synthetic oligonucleotide
  Target: LAMA2; (+) strand; PAM type: NRG; PAM sequence: TAG
acattgagtgaatatgccaa

SEQ ID NO: 129852 - DNA, 20 bp, Artificial Sequence
  Description of Artificial Sequence: Synthetic oligonucleotide
  Target: LAMA2; (+) strand; PAM type: NRG; PAM sequence: AGG
cattgagtgaatatgccaat

SEQ ID NO: 129853 - DNA, 20 bp, Artificial Sequence
  Description of Artificial Sequence: Synthetic oligonucleotide
  Target: LAMA2; (+) strand; PAM type: NRG; PAM sequence: TAG
tgagtgaatatgccaatagg

SEQ ID NO: 129854 - DNA, 20 bp, Artificial Sequence
  Description of Artificial Sequence: Synthetic oligonucleotide
  Target: LAMA2; (+) strand; PAM type: NRG; PAM sequence: AAG
aataggtagaatgtcatgta

SEQ ID NO: 129855 - DNA, 20 bp, Artificial Sequence
  Description of Artificial Sequence: Synthetic oligonucleotide
  Target: LAMA2; (+) strand; PAM type: NRG; PAM sequence: GAG
ttaatttttgtcaattttat

SEQ ID NO: 129856 - DNA, 20 bp, Artificial Sequence
  Description of Artificial Sequence: Synthetic oligonucleotide
  Target: LAMA2; (+) strand; PAM type: NRG; PAM sequence: CAG
ttttatttacctttttttac

SEQ ID NO: 129857 - DNA, 20 bp, Artificial Sequence
  Description of Artificial Sequence: Synthetic oligonucleotide
  Target: LAMA2; (+) strand; PAM type: NRG; PAM sequence: CAG
tttttttaccagtttttttc

SEQ ID NO: 129858 - DNA, 20 bp, Artificial Sequence
  Description of Artificial Sequence: Synthetic oligonucleotide
  Target: LAMA2; (+) strand; PAM type: NRG; PAM sequence: AAG
attttattttattatacttt

SEQ ID NO: 129859 - DNA, 20 bp, Artificial Sequence
  Description of Artificial Sequence: Synthetic oligonucleotide
  Target: LAMA2; (+) strand; PAM type: NRG; PAM sequence: TAG
ttttattatactttaagttt

SEQ ID NO: 129860 - DNA, 20 bp, Artificial Sequence
  Description of Artificial Sequence: Synthetic oligonucleotide
  Target: LAMA2; (+) strand; PAM type: NRG; PAM sequence: AGG
tttattatactttaagtttt

SEQ ID NO: 129861 - DNA, 20 bp, Artificial Sequence
  Description of Artificial Sequence: Synthetic oligonucleotide
  Target: LAMA2; (+) strand; PAM type: NRG; PAM sequence: GGG
ttattatactttaagtttta

SEQ ID NO: 129862 - DNA, 20 bp, Artificial Sequence
  Description of Artificial Sequence: Synthetic oligonucleotide
  Target: LAMA2; (+) strand; PAM type: NRG; PAM sequence: CAG
gggtacatgtgcacaatgtg

SEQ ID NO: 129863 - DNA, 20 bp, Artificial Sequence
  Description of Artificial Sequence: Synthetic oligonucleotide
  Target: LAMA2; (+) strand; PAM type: NRG; PAM sequence: AGG
ggtacatgtgcacaatgtgc

SEQ ID NO: 129864 - DNA, 20 bp, Artificial Sequence
  Description of Artificial Sequence: Synthetic oligonucleotide
  Target: LAMA2; (+) strand; PAM type: NRG; PAM sequence: TAG
catgtgcacaatgtgcaggt

SEQ ID NO: 129865 - DNA, 20 bp, Artificial Sequence
  Description of Artificial Sequence: Synthetic oligonucleotide
  Target: LAMA2; (+) strand; PAM type: NRG; PAM sequence: TGG
atatgtatacatgtgcctgc

SEQ ID NO: 129866 - DNA, 20 bp, Artificial Sequence
  Description of Artificial Sequence: Synthetic oligonucleotide
  Target: LAMA2; (+) strand; PAM type: NRG; PAM sequence: TAG
gcacccattaactcgtcatt

SEQ ID NO: 129867 - DNA, 20 bp, Artificial Sequence
  Description of Artificial Sequence: Synthetic oligonucleotide
  Target: LAMA2; (+) strand; PAM type: NRG; PAM sequence: TAG
attaactcgtcatttagcat

SEQ ID NO: 129868 - DNA, 20 bp, Artificial Sequence
  Description of Artificial Sequence: Synthetic oligonucleotide
  Target: LAMA2; (+) strand; PAM type: NRG; PAM sequence: AGG
ttaactcgtcatttagcatt

SEQ ID NO: 129869 - DNA, 20 bp, Artificial Sequence
  Description of Artificial Sequence: Synthetic oligonucleotide
  Target: LAMA2; (+) strand; PAM type: NRG; PAM sequence: CAG
ccccccaccccaccccacaa

SEQ ID NO: 129870 - DNA, 20 bp, Artificial Sequence
  Description of Artificial Sequence: Synthetic oligonucleotide
  Target: LAMA2; (+) strand; PAM type: NRG; PAM sequence: CAG
ccccaccccacaacagtccc

SEQ ID NO: 129871 - DNA, 20 bp, Artificial Sequence
  Description of Artificial Sequence: Synthetic oligonucleotide
  Target: LAMA2; (+) strand; PAM type: NRG; PAM sequence: GAG
ccaccccacaacagtcccca

SEQ ID NO: 129872 - DNA, 20 bp, Artificial Sequence
  Description of Artificial Sequence: Synthetic oligonucleotide
  Target: LAMA2; (+) strand; PAM type: NRG; PAM sequence: GAG
attgttcaattcccacctat

SEQ ID NO: 129873 - DNA, 20 bp, Artificial Sequence
  Description of Artificial Sequence: Synthetic oligonucleotide
  Target: LAMA2; (+) strand; PAM type: NRG; PAM sequence: GAG
ttcaattcccacctatgagt

SEQ ID NO: 129874 - DNA, 20 bp, Artificial Sequence
  Description of Artificial Sequence: Synthetic oligonucleotide
  Target: LAMA2; (+) strand; PAM type: NRG; PAM sequence: CGG
cacctatgagtgagaacatg

SEQ ID NO: 129875 - DNA, 20 bp, Artificial Sequence
  Description of Artificial Sequence: Synthetic oligonucleotide
  Target: LAMA2; (+) strand; PAM type: NRG; PAM sequence: TGG
gagtgagaacatgcggtgtt

SEQ ID NO: 129876 - DNA, 20 bp, Artificial Sequence
  Description of Artificial Sequence: Synthetic oligonucleotide
  Target: LAMA2; (+) strand; PAM type: NRG; PAM sequence: TAG
ttggttttttgtccttgtga

SEQ ID NO: 129877 - DNA, 20 bp, Artificial Sequence
  Description of Artificial Sequence: Synthetic oligonucleotide
  Target: LAMA2; (+) strand; PAM type: NRG; PAM sequence: GAG
tgtccttgtgatagtttact

SEQ ID NO: 129878 - DNA, 20 bp, Artificial Sequence
  Description of Artificial Sequence: Synthetic oligonucleotide
  Target: LAMA2; (+) strand; PAM type: NRG; PAM sequence: CAG
ttactgagaatgatgatttc

SEQ ID NO: 129879 - DNA, 20 bp, Artificial Sequence
  Description of Artificial Sequence: Synthetic oligonucleotide
  Target: LAMA2; (+) strand; PAM type: NRG; PAM sequence: AAG
gtatcgtccatgtccctaca

SEQ ID NO: 129880 - DNA, 20 bp, Artificial Sequence
  Description of Artificial Sequence: Synthetic oligonucleotide
  Target: LAMA2; (+) strand; PAM type: NRG; PAM sequence: AGG
tatcgtccatgtccctacaa

SEQ ID NO: 129881 - DNA, 20 bp, Artificial Sequence
  Description of Artificial Sequence: Synthetic oligonucleotide
  Target: LAMA2; (+) strand; PAM type: NRG; PAM sequence: CAG
gtccatgtccctacaaagga

SEQ ID NO: 129882 - DNA, 20 bp, Artificial Sequence
  Description of Artificial Sequence: Synthetic oligonucleotide
  Target: LAMA2; (+) strand; PAM type: NRG; PAM sequence: AGG
tccatgtccctacaaaggac

SEQ ID NO: 129883 - DNA, 20 bp, Artificial Sequence
  Description of Artificial Sequence: Synthetic oligonucleotide
  Target: LAMA2; (+) strand; PAM type: NRG; PAM sequence: TGG
aggaactcatcattttttta

SEQ ID NO: 129884 - DNA, 20 bp, Artificial Sequence
  Description of Artificial Sequence: Synthetic oligonucleotide
  Target: LAMA2; (+) strand; PAM type: NRG; PAM sequence: TAG
atcatttttttatggctgca

SEQ ID NO: 129885 - DNA, 20 bp, Artificial Sequence
  Description of Artificial Sequence: Synthetic oligonucleotide
  Target: LAMA2; (+) strand; PAM type: NRG; PAM sequence: TGG
tatggctgcatagtattcca

SEQ ID NO: 129886 - DNA, 20 bp, Artificial Sequence
  Description of Artificial Sequence: Synthetic oligonucleotide
  Target: LAMA2; (+) strand; PAM type: NRG; PAM sequence: CAG
tgtgccacattttcttaatc

SEQ ID NO: 129887 - DNA, 20 bp, Artificial Sequence
  Description of Artificial Sequence: Synthetic oligonucleotide
  Target: LAMA2; (+) strand; PAM type: NRG; PAM sequence: TGG
gtctatcattgttgtacatt

SEQ ID NO: 129888 - DNA, 20 bp, Artificial Sequence
  Description of Artificial Sequence: Synthetic oligonucleotide
  Target: LAMA2; (+) strand; PAM type: NRG; PAM sequence: GGG
tctatcattgttgtacattt

SEQ ID NO: 129889 - DNA, 20 bp, Artificial Sequence
  Description of Artificial Sequence: Synthetic oligonucleotide
  Target: LAMA2; (+) strand; PAM type: NRG; PAM sequence: TGG
tcattgttgtacatttgggt

SEQ ID NO: 129890 - DNA, 20 bp, Artificial Sequence
  Description of Artificial Sequence: Synthetic oligonucleotide
  Target: LAMA2; (+) strand; PAM type: NRG; PAM sequence: AAG
tgtacatttgggttggttcc

SEQ ID NO: 129891 - DNA, 20 bp, Artificial Sequence
  Description of Artificial Sequence: Synthetic oligonucleotide
  Target: LAMA2; (+) strand; PAM type: NRG; PAM sequence: TAG
caagtctttgctattgtgaa

SEQ ID NO: 129892 - DNA, 20 bp, Artificial Sequence
  Description of Artificial Sequence: Synthetic oligonucleotide
  Target: LAMA2; (+) strand; PAM type: NRG; PAM sequence: TAG
tacgtgtgcatgtgtcttta

SEQ ID NO: 129893 - DNA, 20 bp, Artificial Sequence
  Description of Artificial Sequence: Synthetic oligonucleotide
  Target: LAMA2; (+) strand; PAM type: NRG; PAM sequence: CAG
gtgtgcatgtgtctttatag

SEQ ID NO: 129894 - DNA, 20 bp, Artificial Sequence
  Description of Artificial Sequence: Synthetic oligonucleotide
  Target: LAMA2; (+) strand; PAM type: NRG; PAM sequence: TAG
ctttatagcagcatgattta

SEQ ID NO: 129895 - DNA, 20 bp, Artificial Sequence
  Description of Artificial Sequence: Synthetic oligonucleotide
  Target: LAMA2; (+) strand; PAM type: NRG; PAM sequence: TGG
cagcatgatttatagtcctt

SEQ ID NO: 129896 - DNA, 20 bp, Artificial Sequence
  Description of Artificial Sequence: Synthetic oligonucleotide
  Target: LAMA2; (+) strand; PAM type: NRG; PAM sequence: GGG
agcatgatttatagtccttt

SEQ ID NO: 129897 - DNA, 20 bp, Artificial Sequence
  Description of Artificial Sequence: Synthetic oligonucleotide
  Target: LAMA2; (+) strand; PAM type: NRG; PAM sequence: CAG
tagtcctttgggtacatacc

SEQ ID NO: 129898 - DNA, 20 bp, Artificial Sequence
  Description of Artificial Sequence: Synthetic oligonucleotide
  Target: LAMA2; (+) strand; PAM type: NRG; PAM sequence: TGG
tttgggtacatacccagtaa

SEQ ID NO: 129899 - DNA, 20 bp, Artificial Sequence
  Description of Artificial Sequence: Synthetic oligonucleotide
  Target: LAMA2; (+) strand; PAM type: NRG; PAM sequence: GGG
ttgggtacatacccagtaat

SEQ ID NO: 129900 - DNA, 20 bp, Artificial Sequence
  Description of Artificial Sequence: Synthetic oligonucleotide
  Target: LAMA2; (+) strand; PAM type: NRG; PAM sequence: TGG
gtacatacccagtaatggga

SEQ ID NO: 129901 - DNA, 20 bp, Artificial Sequence
  Description of Artificial Sequence: Synthetic oligonucleotide
  Target: LAMA2; (+) strand; PAM type: NRG; PAM sequence: TGG
atacccagtaatgggatggc

SEQ ID NO: 129902 - DNA, 20 bp, Artificial Sequence
  Description of Artificial Sequence: Synthetic oligonucleotide
  Target: LAMA2; (+) strand; PAM type: NRG; PAM sequence: GGG
tacccagtaatgggatggct

SEQ ID NO: 129903 - DNA, 20 bp, Artificial Sequence
  Description of Artificial Sequence: Synthetic oligonucleotide
  Target: LAMA2; (+) strand; PAM type: NRG; PAM sequence: AAG
gtaatgggatggctgggtca

SEQ ID NO: 129904 - DNA, 20 bp, Artificial Sequence
  Description of Artificial Sequence: Synthetic oligonucleotide
  Target: LAMA2; (+) strand; PAM type: NRG; PAM sequence: AGG
taatgggatggctgggtcaa

SEQ ID NO: 129905 - DNA, 20 bp, Artificial Sequence
  Description of Artificial Sequence: Synthetic oligonucleotide
  Target: LAMA2; (+) strand; PAM type: NRG; PAM sequence: GGG
aatgggatggctgggtcaaa

SEQ ID NO: 129906 - DNA, 20 bp, Artificial Sequence
  Description of Artificial Sequence: Synthetic oligonucleotide
  Target: LAMA2; (+) strand; PAM type: NRG; PAM sequence: TAG
gctgggtcaaagggtatttc

SEQ ID NO: 129907 - DNA, 20 bp, Artificial Sequence
  Description of Artificial Sequence: Synthetic oligonucleotide
  Target: LAMA2; (+) strand; PAM type: NRG; PAM sequence: TAG
tcaaagggtatttctagttc

SEQ ID NO: 129908 - DNA, 20 bp, Artificial Sequence
  Description of Artificial Sequence: Synthetic oligonucleotide
  Target: LAMA2; (+) strand; PAM type: NRG; PAM sequence: GAG
atttctagttctagatccct

SEQ ID NO: 129909 - DNA, 20 bp, Artificial Sequence
  Description of Artificial Sequence: Synthetic oligonucleotide
  Target: LAMA2; (+) strand; PAM type: NRG; PAM sequence: AGG
tttctagttctagatccctg

SEQ ID NO: 129910 - DNA, 20 bp, Artificial Sequence
  Description of Artificial Sequence: Synthetic oligonucleotide
  Target: LAMA2; (+) strand; PAM type: NRG; PAM sequence: TGG
cgccacactgacttccacaa

SEQ ID NO: 129911 - DNA, 20 bp, Artificial Sequence
  Description of Artificial Sequence: Synthetic oligonucleotide
  Target: LAMA2; (+) strand; PAM type: NRG; PAM sequence: TAG
gacttccacaatggttgaac

SEQ ID NO: 129912 - DNA, 20 bp, Artificial Sequence
  Description of Artificial Sequence: Synthetic oligonucleotide
  Target: LAMA2; (+) strand; PAM type: NRG; PAM sequence: CAG
acaatggttgaactagttta

SEQ ID NO: 129913 - DNA, 20 bp, Artificial Sequence
  Description of Artificial Sequence: Synthetic oligonucleotide
  Target: LAMA2; (+) strand; PAM type: NRG; PAM sequence: CAG
ctagtttacagtcccaccaa

SEQ ID NO: 129914 - DNA, 20 bp, Artificial Sequence
  Description of Artificial Sequence: Synthetic oligonucleotide
  Target: LAMA2; (+) strand; PAM type: NRG; PAM sequence: AAG
cagtcccaccaacagtgtaa

SEQ ID NO: 129915 - DNA, 20 bp, Artificial Sequence
  Description of Artificial Sequence: Synthetic oligonucleotide
  Target: LAMA2; (+) strand; PAM type: NRG; PAM sequence: CAG
ctatttctccatatcctctc

SEQ ID NO: 129916 - DNA, 20 bp, Artificial Sequence
  Description of Artificial Sequence: Synthetic oligonucleotide
  Target: LAMA2; (+) strand; PAM type: NRG; PAM sequence: TGG
ttaatgattgccattctaac

SEQ ID NO: 129917 - DNA, 20 bp, Artificial Sequence
  Description of Artificial Sequence: Synthetic oligonucleotide
  Target: LAMA2; (+) strand; PAM type: NRG; PAM sequence: GAG
attgccattctaactggtgt

SEQ ID NO: 129918 - DNA, 20 bp, Artificial Sequence
  Description of Artificial Sequence: Synthetic oligonucleotide
  Target: LAMA2; (+) strand; PAM type: NRG; PAM sequence: TGG
ccattctaactggtgtgaga

SEQ ID NO: 129919 - DNA, 20 bp, Artificial Sequence
  Description of Artificial Sequence: Synthetic oligonucleotide
  Target: LAMA2; (+) strand; PAM type: NRG; PAM sequence: TGG
tgtgagatggtatctcattg

SEQ ID NO: 129920 - DNA, 20 bp, Artificial Sequence
  Description of Artificial Sequence: Synthetic oligonucleotide
  Target: LAMA2; (+) strand; PAM type: NRG; PAM sequence: TGG
atggtatctcattgtggttt

SEQ ID NO: 129921 - DNA, 20 bp, Artificial Sequence
  Description of Artificial Sequence: Synthetic oligonucleotide
  Target: LAMA2; (+) strand; PAM type: NRG; PAM sequence: TGG
tttggtttgcatttctctga

SEQ ID NO: 129922 - DNA, 20 bp, Artificial Sequence
  Description of Artificial Sequence: Synthetic oligonucleotide
  Target: LAMA2; (+) strand; PAM type: NRG; PAM sequence: CAG
gtttgcatttctctgatggc

SEQ ID NO: 129923 - DNA, 20 bp, Artificial Sequence
  Description of Artificial Sequence: Synthetic oligonucleotide
  Target: LAMA2; (+) strand; PAM type: NRG; PAM sequence: TGG
atttctctgatggccagtga

SEQ ID NO: 129924 - DNA, 20 bp, Artificial Sequence
  Description of Artificial Sequence: Synthetic oligonucleotide
  Target: LAMA2; (+) strand; PAM type: NRG; PAM sequence: GAG
ctctgatggccagtgatggt

SEQ ID NO: 129925 - DNA, 20 bp, Artificial Sequence
  Description of Artificial Sequence: Synthetic oligonucleotide
  Target: LAMA2; (+) strand; PAM type: NRG; PAM sequence: TGG
gcattttttcatgtgttttt

SEQ ID NO: 129926 - DNA, 20 bp, Artificial Sequence
  Description of Artificial Sequence: Synthetic oligonucleotide
  Target: LAMA2; (+) strand; PAM type: NRG; PAM sequence: GAG
tgtcttctttgatgaataat

SEQ ID NO: 129927 - DNA, 20 bp, Artificial Sequence
  Description of Artificial Sequence: Synthetic oligonucleotide
  Target: LAMA2; (+) strand; PAM type: NRG; PAM sequence: TAG
tgttcccaactctgaatttc

SEQ ID NO: 129928 - DNA, 20 bp, Artificial Sequence
  Description of Artificial Sequence: Synthetic oligonucleotide
  Target: LAMA2; (+) strand; PAM type: NRG; PAM sequence: CAG
ctagtaaattcatgtttttc

SEQ ID NO: 129929 - DNA, 20 bp, Artificial Sequence
  Description of Artificial Sequence: Synthetic oligonucleotide
  Target: LAMA2; (+) strand; PAM type: NRG; PAM sequence: GAG
agtaaattcatgtttttcca

SEQ ID NO: 129930 - DNA, 20 bp, Artificial Sequence
  Description of Artificial Sequence: Synthetic oligonucleotide
  Target: LAMA2; (+) strand; PAM type: NRG; PAM sequence: AAG
catgtttttccagagaatga

SEQ ID NO: 129931 - DNA, 20 bp, Artificial Sequence
  Description of Artificial Sequence: Synthetic oligonucleotide
  Target: LAMA2; (+) strand; PAM type: NRG; PAM sequence: GAG
tgtttttccagagaatgaaa

SEQ ID NO: 129932 - DNA, 20 bp, Artificial Sequence
  Description of Artificial Sequence: Synthetic oligonucleotide
  Target: LAMA2; (+) strand; PAM type: NRG; PAM sequence: TGG
ccagagaatgaaagagtgaa

SEQ ID NO: 129933 - DNA, 20 bp, Artificial Sequence
  Description of Artificial Sequence: Synthetic oligonucleotide
  Target: LAMA2; (+) strand; PAM type: NRG; PAM sequence: GAG
gagtgaatggccactgtctt

SEQ ID NO: 129934 - DNA, 20 bp, Artificial Sequence
  Description of Artificial Sequence: Synthetic oligonucleotide
  Target: LAMA2; (+) strand; PAM type: NRG; PAM sequence: AGG
agtgaatggccactgtcttg

SEQ ID NO: 129935 - DNA, 20 bp, Artificial Sequence
  Description of Artificial Sequence: Synthetic oligonucleotide
  Target: LAMA2; (+) strand; PAM type: NRG; PAM sequence: TGG
tggccactgtcttgaggaaa

SEQ ID NO: 129936 - DNA, 20 bp, Artificial Sequence
  Description of Artificial Sequence: Synthetic oligonucleotide
  Target: LAMA2; (+) strand; PAM type: NRG; PAM sequence: GGG
ggccactgtcttgaggaaat

SEQ ID NO: 129937 - DNA, 20 bp, Artificial Sequence
  Description of Artificial Sequence: Synthetic oligonucleotide
  Target: LAMA2; (+) strand; PAM type: NRG; PAM sequence: GAG
ccactgtcttgaggaaatgg

SEQ ID NO: 129938 - DNA, 20 bp, Artificial Sequence
  Description of Artificial Sequence: Synthetic oligonucleotide
  Target: LAMA2; (+) strand; PAM type: NRG; PAM sequence: TAG
ttgaggaaatgggagtattc

SEQ ID NO: 129939 - DNA, 20 bp, Artificial Sequence
  Description of Artificial Sequence: Synthetic oligonucleotide
  Target: LAMA2; (+) strand; PAM type: NRG; PAM sequence: TAG
atgggagtattctagatgca

SEQ ID NO: 129940 - DNA, 20 bp, Artificial Sequence
  Description of Artificial Sequence: Synthetic oligonucleotide
  Target: LAMA2; (+) strand; PAM type: NRG; PAM sequence: CAG
gagtattctagatgcatagt

SEQ ID NO: 129941 - DNA, 20 bp, Artificial Sequence
  Description of Artificial Sequence: Synthetic oligonucleotide
  Target: LAMA2; (+) strand; PAM type: NRG; PAM sequence: AGG
agtattctagatgcatagtc

SEQ ID NO: 129942 - DNA, 20 bp, Artificial Sequence
  Description of Artificial Sequence: Synthetic oligonucleotide
  Target: LAMA2; (+) strand; PAM type: NRG; PAM sequence: CAG
attctagatgcatagtcagg

SEQ ID NO: 129943 - DNA, 20 bp, Artificial Sequence
  Description of Artificial Sequence: Synthetic oligonucleotide
  Target: LAMA2; (+) strand; PAM type: NRG; PAM sequence: TAG
gcatagtcaggcagtgtgat

SEQ ID NO: 129944 - DNA, 20 bp, Artificial Sequence
  Description of Artificial Sequence: Synthetic oligonucleotide
  Target: LAMA2; (+) strand; PAM type: NRG; PAM sequence: TAG
gtcaggcagtgtgattagta

SEQ ID NO: 129945 - DNA, 20 bp, Artificial Sequence
  Description of Artificial Sequence: Synthetic oligonucleotide
  Target: LAMA2; (+) strand; PAM type: NRG; PAM sequence: AAG
cagtgtgattagtatagtgc

SEQ ID NO: 129946 - DNA, 20 bp, Artificial Sequence
  Description of Artificial Sequence: Synthetic oligonucleotide
  Target: LAMA2; (+) strand; PAM type: NRG; PAM sequence: TGG
tgattagtatagtgcaagaa

SEQ ID NO: 129947 - DNA, 20 bp, Artificial Sequence
  Description of Artificial Sequence: Synthetic oligonucleotide
  Target: LAMA2; (+) strand; PAM type: NRG; PAM sequence: TAG
ttagtatagtgcaagaatgg

SEQ ID NO: 129948 - DNA, 20 bp, Artificial Sequence
  Description of Artificial Sequence: Synthetic oligonucleotide
  Target: LAMA2; (+) strand; PAM type: NRG; PAM sequence: AGG
tagtatagtgcaagaatggt

SEQ ID NO: 129949 - DNA, 20 bp, Artificial Sequence
  Description of Artificial Sequence: Synthetic oligonucleotide
  Target: LAMA2; (+) strand; PAM type: NRG; PAM sequence: AAG
atagtgcaagaatggtagga

SEQ ID NO: 129950 - DNA, 20 bp, Artificial Sequence
  Description of Artificial Sequence: Synthetic oligonucleotide
  Target: LAMA2; (+) strand; PAM type: NRG; PAM sequence: AGG
tagtgcaagaatggtaggaa

SEQ ID NO: 129951 - DNA, 20 bp, Artificial Sequence
  Description of Artificial Sequence: Synthetic oligonucleotide
  Target: LAMA2; (+) strand; PAM type: NRG; PAM sequence: TGG
gcaagaatggtaggaaagga

SEQ ID NO: 129952 - DNA, 20 bp, Artificial Sequence
  Description of Artificial Sequence: Synthetic oligonucleotide
  Target: LAMA2; (+) strand; PAM type: NRG; PAM sequence: GAG
aagaatggtaggaaaggatg

SEQ ID NO: 129953 - DNA, 20 bp, Artificial Sequence
  Description of Artificial Sequence: Synthetic oligonucleotide
  Target: LAMA2; (+) strand; PAM type: NRG; PAM sequence: GAG
gaatggtaggaaaggatgga

SEQ ID NO: 129954 - DNA, 20 bp, Artificial Sequence
  Description of Artificial Sequence: Synthetic oligonucleotide
  Target: LAMA2; (+) strand; PAM type: NRG; PAM sequence: AGG
aatggtaggaaaggatggag

SEQ ID NO: 129955 - DNA, 20 bp, Artificial Sequence
  Description of Artificial Sequence: Synthetic oligonucleotide
  Target: LAMA2; (+) strand; PAM type: NRG; PAM sequence: TGG
ggaaaggatggagaggacaa

SEQ ID NO: 129956 - DNA, 20 bp, Artificial Sequence
  Description of Artificial Sequence: Synthetic oligonucleotide
  Target: LAMA2; (+) strand; PAM type: NRG; PAM sequence: GGG
gaaaggatggagaggacaat

SEQ ID NO: 129957 - DNA, 20 bp, Artificial Sequence
  Description of Artificial Sequence: Synthetic oligonucleotide
  Target: LAMA2; (+) strand; PAM type: NRG; PAM sequence: AAG
tgggaaaacaccttgctaaa

SEQ ID NO: 129958 - DNA, 20 bp, Artificial Sequence
  Description of Artificial Sequence: Synthetic oligonucleotide
  Target: LAMA2; (+) strand; PAM type: NRG; PAM sequence: TGG
aaacaccttgctaaaaagtt

SEQ ID NO: 129959 - DNA, 20 bp, Artificial Sequence
  Description of Artificial Sequence: Synthetic oligonucleotide
  Target: LAMA2; (+) strand; PAM type: NRG; PAM sequence: TAG
aaagtttggattttgtcttc

SEQ ID NO: 129960 - DNA, 20 bp, Artificial Sequence
  Description of Artificial Sequence: Synthetic oligonucleotide
  Target: LAMA2; (+) strand; PAM type: NRG; PAM sequence: TAG
tggattttgtcttctagtga

SEQ ID NO: 129961 - DNA, 20 bp, Artificial Sequence
  Description of Artificial Sequence: Synthetic oligonucleotide
  Target: LAMA2; (+) strand; PAM type: NRG; PAM sequence: TGG
tagtgatagaaatgtactga

SEQ ID NO: 129962 - DNA, 20 bp, Artificial Sequence
  Description of Artificial Sequence: Synthetic oligonucleotide
  Target: LAMA2; (+) strand; PAM type: NRG; PAM sequence: TGG
tgtactgatggtccctgaca

SEQ ID NO: 129963 - DNA, 20 bp, Artificial Sequence
  Description of Artificial Sequence: Synthetic oligonucleotide
  Target: LAMA2; (+) strand; PAM type: NRG; PAM sequence: GGG
gtactgatggtccctgacat

SEQ ID NO: 129964 - DNA, 20 bp, Artificial Sequence
  Description of Artificial Sequence: Synthetic oligonucleotide
  Target: LAMA2; (+) strand; PAM type: NRG; PAM sequence: CAG
atggtccctgacatgggtaa

SEQ ID NO: 129965 - DNA, 20 bp, Artificial Sequence
  Description of Artificial Sequence: Synthetic oligonucleotide
  Target: LAMA2; (+) strand; PAM type: NRG; PAM sequence: TAG
gacatgggtaacagctgctt

SEQ ID NO: 129966 - DNA, 20 bp, Artificial Sequence
  Description of Artificial Sequence: Synthetic oligonucleotide
  Target: LAMA2; (+) strand; PAM type: NRG; PAM sequence: GAG
catgggtaacagctgcttta

SEQ ID NO: 129967 - DNA, 20 bp, Artificial Sequence
  Description of Artificial Sequence: Synthetic oligonucleotide
  Target: LAMA2; (+) strand; PAM type: NRG; PAM sequence: AAG
ctgctttagagctgaatttc

SEQ ID NO: 129968 - DNA, 20 bp, Artificial Sequence
  Description of Artificial Sequence: Synthetic oligonucleotide
  Target: LAMA2; (+) strand; PAM type: NRG; PAM sequence: CAG
tagagctgaatttcaagaat

SEQ ID NO: 129969 - DNA, 20 bp, Artificial Sequence
  Description of Artificial Sequence: Synthetic oligonucleotide
  Target: LAMA2; (+) strand; PAM type: NRG; PAM sequence: TGG
tcagcttgtgaacaatgctt

SEQ ID NO: 129970 - DNA, 20 bp, Artificial Sequence
  Description of Artificial Sequence: Synthetic oligonucleotide
  Target: LAMA2; (+) strand; PAM type: NRG; PAM sequence: GAG
agcttgtgaacaatgctttg

SEQ ID NO: 129971 - DNA, 20 bp, Artificial Sequence
  Description of Artificial Sequence: Synthetic oligonucleotide
  Target: LAMA2; (+) strand; PAM type: NRG; PAM sequence: AAG
tgaacaatgctttggagatt

SEQ ID NO: 129972 - DNA, 20 bp, Artificial Sequence
  Description of Artificial Sequence: Synthetic oligonucleotide
  Target: LAMA2; (+) strand; PAM type: NRG; PAM sequence: CAG
caatgctttggagattaaga

SEQ ID NO: 129973 - DNA, 20 bp, Artificial Sequence
  Description of Artificial Sequence: Synthetic oligonucleotide
  Target: LAMA2; (+) strand; PAM type: NRG; PAM sequence: TAG
tgctttggagattaagacag

SEQ ID NO: 129974 - DNA, 20 bp, Artificial Sequence
  Description of Artificial Sequence: Synthetic oligonucleotide
  Target: LAMA2; (+) strand; PAM type: NRG; PAM sequence: AGG
gctttggagattaagacagt

SEQ ID NO: 129975 - DNA, 20 bp, Artificial Sequence
  Description of Artificial Sequence: Synthetic oligonucleotide
  Target: LAMA2; (+) strand; PAM type: NRG; PAM sequence: AAG
ttggagattaagacagtagg

SEQ ID NO: 129976 - DNA, 20 bp, Artificial Sequence
  Description of Artificial Sequence: Synthetic oligonucleotide
  Target: LAMA2; (+) strand; PAM type: NRG; PAM sequence: AGG
tggagattaagacagtagga

SEQ ID NO: 129977 - DNA, 20 bp, Artificial Sequence
  Description of Artificial Sequence: Synthetic oligonucleotide
  Target: LAMA2; (+) strand; PAM type: NRG; PAM sequence: GAG
gagattaagacagtaggaag

SEQ ID NO: 129978 - DNA, 20 bp, Artificial Sequence
  Description of Artificial Sequence: Synthetic oligonucleotide
  Target: LAMA2; (+) strand; PAM type: NRG; PAM sequence: AAG
attaagacagtaggaaggag

SEQ ID NO: 129979 - DNA, 20 bp, Artificial Sequence
  Description of Artificial Sequence: Synthetic oligonucleotide
  Target: LAMA2; (+) strand; PAM type: NRG; PAM sequence: AAG
agtaggaaggagaagatttg

SEQ ID NO: 129980 - DNA, 20 bp, Artificial Sequence
  Description of Artificial Sequence: Synthetic oligonucleotide
  Target: LAMA2; (+) strand; PAM type: NRG; PAM sequence: CAG
aggaaggagaagatttgaag

SEQ ID NO: 129981 - DNA, 20 bp, Artificial Sequence
  Description of Artificial Sequence: Synthetic oligonucleotide
  Target: LAMA2; (+) strand; PAM type: NRG; PAM sequence: AAG
ggagaagatttgaagcagta

SEQ ID NO: 129982 - DNA, 20 bp, Artificial Sequence
  Description of Artificial Sequence: Synthetic oligonucleotide
  Target: LAMA2; (+) strand; PAM type: NRG; PAM sequence: TAG
tttgaagcagtaaagtgatt

SEQ ID NO: 129983 - DNA, 20 bp, Artificial Sequence
  Description of Artificial Sequence: Synthetic oligonucleotide
  Target: LAMA2; (+) strand; PAM type: NRG; PAM sequence: TGG
gatttagaaaactatttcaa

SEQ ID NO: 129984 - DNA, 20 bp, Artificial Sequence
  Description of Artificial Sequence: Synthetic oligonucleotide
  Target: LAMA2; (+) strand; PAM type: NRG; PAM sequence: CAG
agaaaactatttcaatggac

SEQ ID NO: 129985 - DNA, 20 bp, Artificial Sequence
  Description of Artificial Sequence: Synthetic oligonucleotide
  Target: LAMA2; (+) strand; PAM type: NRG; PAM sequence: AAG
actatttcaatggaccagac

SEQ ID NO: 129986 - DNA, 20 bp, Artificial Sequence
  Description of Artificial Sequence: Synthetic oligonucleotide
  Target: LAMA2; (+) strand; PAM type: NRG; PAM sequence: TGG
tcaatggaccagacaagaaa

SEQ ID NO: 129987 - DNA, 20 bp, Artificial Sequence
  Description of Artificial Sequence: Synthetic oligonucleotide
  Target: LAMA2; (+) strand; PAM type: NRG; PAM sequence: TGG
gaccagacaagaaatggtaa

SEQ ID NO: 129988 - DNA, 20 bp, Artificial Sequence
  Description of Artificial Sequence: Synthetic oligonucleotide
  Target: LAMA2; (+) strand; PAM type: NRG; PAM sequence: GAG
aaatggtaatggcctgaaat

SEQ ID NO: 129989 - DNA, 20 bp, Artificial Sequence
  Description of Artificial Sequence: Synthetic oligonucleotide
  Target: LAMA2; (+) strand; PAM type: NRG; PAM sequence: TGG
tggtaatggcctgaaatgag

SEQ ID NO: 129990 - DNA, 20 bp, Artificial Sequence
  Description of Artificial Sequence: Synthetic oligonucleotide
  Target: LAMA2; (+) strand; PAM type: NRG; PAM sequence: GAG
gtaatggcctgaaatgagtg

SEQ ID NO: 129991 - DNA, 20 bp, Artificial Sequence
  Description of Artificial Sequence: Synthetic oligonucleotide
  Target: LAMA2; (+) strand; PAM type: NRG; PAM sequence: AGG
taatggcctgaaatgagtgg

SEQ ID NO: 129992 - DNA, 20 bp, Artificial Sequence
  Description of Artificial Sequence: Synthetic oligonucleotide
  Target: LAMA2; (+) strand; PAM type: NRG; PAM sequence: GGG
aatggcctgaaatgagtgga

SEQ ID NO: 129993 - DNA, 20 bp, Artificial Sequence
  Description of Artificial Sequence: Synthetic oligonucleotide
  Target: LAMA2; (+) strand; PAM type: NRG; PAM sequence: GAG
tggcctgaaatgagtggagg

SEQ ID NO: 129994 - DNA, 20 bp, Artificial Sequence
  Description of Artificial Sequence: Synthetic oligonucleotide
  Target: LAMA2; (+) strand; PAM type: NRG; PAM sequence: TGG
cctgaaatgagtggagggag

SEQ ID NO: 129995 - DNA, 20 bp, Artificial Sequence
  Description of Artificial Sequence: Synthetic oligonucleotide
  Target: LAMA2; (+) strand; PAM type: NRG; PAM sequence: AAG
gagtggagggagtggaaatg

SEQ ID NO: 129996 - DNA, 20 bp, Artificial Sequence
  Description of Artificial Sequence: Synthetic oligonucleotide
  Target: LAMA2; (+) strand; PAM type: NRG; PAM sequence: TGG
ggagtggaaatgaagtcaca

SEQ ID NO: 129997 - DNA, 20 bp, Artificial Sequence
  Description of Artificial Sequence: Synthetic oligonucleotide
  Target: LAMA2; (+) strand; PAM type: NRG; PAM sequence: CAG
gaaatgaagtcacatggctg

SEQ ID NO: 129998 - DNA, 20 bp, Artificial Sequence
  Description of Artificial Sequence: Synthetic oligonucleotide
  Target: LAMA2; (+) strand; PAM type: NRG; PAM sequence: TGG
tggctgcagttgccatttat

SEQ ID NO: 129999 - DNA, 20 bp, Artificial Sequence
  Description of Artificial Sequence: Synthetic oligonucleotide
  Target: LAMA2; (+) strand; PAM type: NRG; PAM sequence: GAG
gctgcagttgccatttattg

SEQ ID NO: 130000 - DNA, 20 bp, Artificial Sequence
  Description of Artificial Sequence: Synthetic oligonucleotide
  Target: LAMA2; (+) strand; PAM type: NRG; PAM sequence: CAG
ttattggagaaactgaattt

SEQ ID NO: 130001 - DNA, 20 bp, Artificial Sequence
  Description of Artificial Sequence: Synthetic oligonucleotide
  Target: LAMA2; (+) strand; PAM type: NRG; PAM sequence: AGG
tattggagaaactgaatttc

SEQ ID NO: 130002 - DNA, 20 bp, Artificial Sequence
  Description of Artificial Sequence: Synthetic oligonucleotide
  Target: LAMA2; (+) strand; PAM type: NRG; PAM sequence: GGG
attggagaaactgaatttca

SEQ ID NO: 130003 - DNA, 20 bp, Artificial Sequence
  Description of Artificial Sequence: Synthetic oligonucleotide
  Target: LAMA2; (+) strand; PAM type: NRG; PAM sequence: TGG
gaaactgaatttcagggatt

SEQ ID NO: 130004 - DNA, 20 bp, Artificial Sequence
  Description of Artificial Sequence: Synthetic oligonucleotide
  Target: LAMA2; (+) strand; PAM type: NRG; PAM sequence: CAG
tgaatttcagggatttggat

SEQ ID NO: 130005 - DNA, 20 bp, Artificial Sequence
  Description of Artificial Sequence: Synthetic oligonucleotide
  Target: LAMA2; (+) strand; PAM type: NRG; PAM sequence: AGG
gaatttcagggatttggatc

SEQ ID NO: 130006 - DNA, 20 bp, Artificial Sequence
  Description of Artificial Sequence: Synthetic oligonucleotide
  Target: LAMA2; (+) strand; PAM type: NRG; PAM sequence: AAG
tcagggatttggatcaggtc

SEQ ID NO: 130007 - DNA, 20 bp, Artificial Sequence
  Description of Artificial Sequence: Synthetic oligonucleotide
  Target: LAMA2; (+) strand; PAM type: NRG; PAM sequence: AGG
cagggatttggatcaggtca

SEQ ID NO: 130008 - DNA, 20 bp, Artificial Sequence
  Description of Artificial Sequence: Synthetic oligonucleotide
  Target: LAMA2; (+) strand; PAM type: NRG; PAM sequence: TAG
aaatattaatgatatttatt

SEQ ID NO: 130009 - DNA, 20 bp, Artificial Sequence
  Description of Artificial Sequence: Synthetic oligonucleotide
  Target: LAMA2; (+) strand; PAM type: NRG; PAM sequence: CAG
gatatttatttagtgtgcac

SEQ ID NO: 130010 - DNA, 20 bp, Artificial Sequence
  Description of Artificial Sequence: Synthetic oligonucleotide
  Target: LAMA2; (+) strand; PAM type: NRG; PAM sequence: AAG
ttttttccttcgctaaactg

SEQ ID NO: 130011 - DNA, 20 bp, Artificial Sequence
  Description of Artificial Sequence: Synthetic oligonucleotide
  Target: LAMA2; (+) strand; PAM type: NRG; PAM sequence: AAG
ccttcgctaaactgaagatt

SEQ ID NO: 130012 - DNA, 20 bp, Artificial Sequence
  Description of Artificial Sequence: Synthetic oligonucleotide
  Target: LAMA2; (+) strand; PAM type: NRG; PAM sequence: AGG
cttcgctaaactgaagatta

SEQ ID NO: 130013 - DNA, 20 bp, Artificial Sequence
  Description of Artificial Sequence: Synthetic oligonucleotide
  Target: LAMA2; (+) strand; PAM type: NRG; PAM sequence: CAG
aaactgaagattaaggcaat

SEQ ID NO: 130014 - DNA, 20 bp, Artificial Sequence
  Description of Artificial Sequence: Synthetic oligonucleotide
  Target: LAMA2; (+) strand; PAM type: NRG; PAM sequence: TAG
agattaaggcaatcagaacc

SEQ ID NO: 130015 - DNA, 20 bp, Artificial Sequence
  Description of Artificial Sequence: Synthetic oligonucleotide
  Target: LAMA2; (+) strand; PAM type: NRG; PAM sequence: CAG
gaattcaccattgtatcccc

SEQ ID NO: 130016 - DNA, 20 bp, Artificial Sequence
  Description of Artificial Sequence: Synthetic oligonucleotide
  Target: LAMA2; (+) strand; PAM type: NRG; PAM sequence: AAG
ccccagtgctaatacacaaa

SEQ ID NO: 130017 - DNA, 20 bp, Artificial Sequence
  Description of Artificial Sequence: Synthetic oligonucleotide
  Target: LAMA2; (+) strand; PAM type: NRG; PAM sequence: CAG
attctactacctacctttcg

SEQ ID NO: 130018 - DNA, 20 bp, Artificial Sequence
  Description of Artificial Sequence: Synthetic oligonucleotide
  Target: LAMA2; (+) strand; PAM type: NRG; PAM sequence: TGG
actacctacctttcgcagtg

SEQ ID NO: 130019 - DNA, 20 bp, Artificial Sequence
  Description of Artificial Sequence: Synthetic oligonucleotide
  Target: LAMA2; (+) strand; PAM type: NRG; PAM sequence: CAG
ttcaccctttcccttccttt

SEQ ID NO: 130020 - DNA, 20 bp, Artificial Sequence
  Description of Artificial Sequence: Synthetic oligonucleotide
  Target: LAMA2; (+) strand; PAM type: NRG; PAM sequence: TAG
tcttgtttccccatgctcca

SEQ ID NO: 130021 - DNA, 20 bp, Artificial Sequence
  Description of Artificial Sequence: Synthetic oligonucleotide
  Target: LAMA2; (+) strand; PAM type: NRG; PAM sequence: TAG
cccatgctccatagatcatt

SEQ ID NO: 130022 - DNA, 20 bp, Artificial Sequence
  Description of Artificial Sequence: Synthetic oligonucleotide
  Target: LAMA2; (+) strand; PAM type: NRG; PAM sequence: TGG
tttgttttctgcaatgatgc

SEQ ID NO: 130023 - DNA, 20 bp, Artificial Sequence
  Description of Artificial Sequence: Synthetic oligonucleotide
  Target: LAMA2; (+) strand; PAM type: NRG; PAM sequence: CAG
gcaatgatgctggtataatt

SEQ ID NO: 130024 - DNA, 20 bp, Artificial Sequence
  Description of Artificial Sequence: Synthetic oligonucleotide
  Target: LAMA2; (+) strand; PAM type: NRG; PAM sequence: TAG
ctggtataattcagaactac

SEQ ID NO: 130025 - DNA, 20 bp, Artificial Sequence
  Description of Artificial Sequence: Synthetic oligonucleotide
  Target: LAMA2; (+) strand; PAM type: NRG; PAM sequence: TAG
tactagcaaaatctcatctc

SEQ ID NO: 130026 - DNA, 20 bp, Artificial Sequence
  Description of Artificial Sequence: Synthetic oligonucleotide
  Target: LAMA2; (+) strand; PAM type: NRG; PAM sequence: TAG
cccatattcttgctgtgcta

SEQ ID NO: 130027 - DNA, 20 bp, Artificial Sequence
  Description of Artificial Sequence: Synthetic oligonucleotide
  Target: LAMA2; (+) strand; PAM type: NRG; PAM sequence: GAG
tcaatatgtgtaactcttct

SEQ ID NO: 130028 - DNA, 20 bp, Artificial Sequence
  Description of Artificial Sequence: Synthetic oligonucleotide
  Target: LAMA2; (+) strand; PAM type: NRG; PAM sequence: AGG
caatatgtgtaactcttctg

SEQ ID NO: 130029 - DNA, 20 bp, Artificial Sequence
  Description of Artificial Sequence: Synthetic oligonucleotide
  Target: LAMA2; (+) strand; PAM type: NRG; PAM sequence: CAG
tgaggcctcctcattcattg

SEQ ID NO: 130030 - DNA, 20 bp, Artificial Sequence
  Description of Artificial Sequence: Synthetic oligonucleotide
  Target: LAMA2; (+) strand; PAM type: NRG; PAM sequence: AAG
gcaaacttacctctcttctt

SEQ ID NO: 130031 - DNA, 20 bp, Artificial Sequence
  Description of Artificial Sequence: Synthetic oligonucleotide
  Target: LAMA2; (+) strand; PAM type: NRG; PAM sequence: AGG
caaacttacctctcttctta

SEQ ID NO: 130032 - DNA, 20 bp, Artificial Sequence
  Description of Artificial Sequence: Synthetic oligonucleotide
  Target: LAMA2; (+) strand; PAM type: NRG; PAM sequence: GGG
aaacttacctctcttcttaa

SEQ ID NO: 130033 - DNA, 20 bp, Artificial Sequence
  Description of Artificial Sequence: Synthetic oligonucleotide
  Target: LAMA2; (+) strand; PAM type: NRG; PAM sequence: TAG
cccattcgtatgtacttaaa

SEQ ID NO: 130034 - DNA, 20 bp, Artificial Sequence
  Description of Artificial Sequence: Synthetic oligonucleotide
  Target: LAMA2; (+) strand; PAM type: NRG; PAM sequence: AGG
ccattcgtatgtacttaaat

SEQ ID NO: 130035 - DNA, 20 bp, Artificial Sequence
  Description of Artificial Sequence: Synthetic oligonucleotide
  Target: LAMA2; (+) strand; PAM type: NRG; PAM sequence: AAG
ttcgtatgtacttaaatagg

SEQ ID NO: 130036 - DNA, 20 bp, Artificial Sequence
  Description of Artificial Sequence: Synthetic oligonucleotide
  Target: LAMA2; (+) strand; PAM type: NRG; PAM sequence: CAG
tacttaaataggaagatcat

SEQ ID NO: 130037 - DNA, 20 bp, Artificial Sequence
  Description of Artificial Sequence: Synthetic oligonucleotide
  Target: LAMA2; (+) strand; PAM type: NRG; PAM sequence: GAG
cttaaataggaagatcatca

SEQ ID NO: 130038 - DNA, 20 bp, Artificial Sequence
  Description of Artificial Sequence: Synthetic oligonucleotide
  Target: LAMA2; (+) strand; PAM type: NRG; PAM sequence: AAG
ataggaagatcatcagagac

SEQ ID NO: 130039 - DNA, 20 bp, Artificial Sequence
  Description of Artificial Sequence: Synthetic oligonucleotide
  Target: LAMA2; (+) strand; PAM type: NRG; PAM sequence: TAG
tatccacatgtgaactccct

SEQ ID NO: 130040 - DNA, 20 bp, Artificial Sequence
  Description of Artificial Sequence: Synthetic oligonucleotide
  Target: LAMA2; (+) strand; PAM type: NRG; PAM sequence: TGG
atttccaactttcaactttg

SEQ ID NO: 130041 - DNA, 20 bp, Artificial Sequence
  Description of Artificial Sequence: Synthetic oligonucleotide
  Target: LAMA2; (+) strand; PAM type: NRG; PAM sequence: TGG
ttcaactttgtggacacttc

SEQ ID NO: 130042 - DNA, 20 bp, Artificial Sequence
  Description of Artificial Sequence: Synthetic oligonucleotide
  Target: LAMA2; (+) strand; PAM type: NRG; PAM sequence: AAG
tgtggacacttctggaaaaa

SEQ ID NO: 130043 - DNA, 20 bp, Artificial Sequence
  Description of Artificial Sequence: Synthetic oligonucleotide
  Target: LAMA2; (+) strand; PAM type: NRG; PAM sequence: AAG
gacacttctggaaaaaaaga

SEQ ID NO: 130044 - DNA, 20 bp, Artificial Sequence
  Description of Artificial Sequence: Synthetic oligonucleotide
  Target: LAMA2; (+) strand; PAM type: NRG; PAM sequence: CAG
gtcgtgtcttaccaattttg

SEQ ID NO: 130045 - DNA, 20 bp, Artificial Sequence
  Description of Artificial Sequence: Synthetic oligonucleotide
  Target: LAMA2; (+) strand; PAM type: NRG; PAM sequence: AAG
attttgcagaattgaattac

SEQ ID NO: 130046 - DNA, 20 bp, Artificial Sequence
  Description of Artificial Sequence: Synthetic oligonucleotide
  Target: LAMA2; (+) strand; PAM type: NRG; PAM sequence: AAG
aattacaagtttctcatact

SEQ ID NO: 130047 - DNA, 20 bp, Artificial Sequence
  Description of Artificial Sequence: Synthetic oligonucleotide
  Target: LAMA2; (+) strand; PAM type: NRG; PAM sequence: TGG
catactaagacatttttcta

SEQ ID NO: 130048 - DNA, 20 bp, Artificial Sequence
  Description of Artificial Sequence: Synthetic oligonucleotide
  Target: LAMA2; (+) strand; PAM type: NRG; PAM sequence: AAG
actaagacatttttctatgg

SEQ ID NO: 130049 - DNA, 20 bp, Artificial Sequence
  Description of Artificial Sequence: Synthetic oligonucleotide
  Target: LAMA2; (+) strand; PAM type: NRG; PAM sequence: AAG
catttttctatggaagaaac

SEQ ID NO: 130050 - DNA, 20 bp, Artificial Sequence
  Description of Artificial Sequence: Synthetic oligonucleotide
  Target: LAMA2; (+) strand; PAM type: NRG; PAM sequence: AGG
atttttctatggaagaaaca

SEQ ID NO: 130051 - DNA, 20 bp, Artificial Sequence
  Description of Artificial Sequence: Synthetic oligonucleotide
  Target: LAMA2; (+) strand; PAM type: NRG; PAM sequence: TAG
gaagaaacaaggttcttttg

SEQ ID NO: 130052 - DNA, 20 bp, Artificial Sequence
  Description of Artificial Sequence: Synthetic oligonucleotide
  Target: LAMA2; (+) strand; PAM type: NRG; PAM sequence: GAG
agaaacaaggttcttttgta

SEQ ID NO: 130053 - DNA, 20 bp, Artificial Sequence
  Description of Artificial Sequence: Synthetic oligonucleotide
  Target: LAMA2; (+) strand; PAM type: NRG; PAM sequence: GAG
caaggttcttttgtagagat

SEQ ID NO: 130054 - DNA, 20 bp, Artificial Sequence
  Description of Artificial Sequence: Synthetic oligonucleotide
  Target: LAMA2; (+) strand; PAM type: NRG; PAM sequence: TGG
atttttttttttttttgcaa

SEQ ID NO: 130055 - DNA, 20 bp, Artificial Sequence
  Description of Artificial Sequence: Synthetic oligonucleotide
  Target: LAMA2; (+) strand; PAM type: NRG; PAM sequence: GGG
tttttttttttttttgcaat

SEQ ID NO: 130056 - DNA, 20 bp, Artificial Sequence
  Description of Artificial Sequence: Synthetic oligonucleotide
  Target: LAMA2; (+) strand; PAM type: NRG; PAM sequence: AAG
ttttttttttttgcaatggg

SEQ ID NO: 130057 - DNA, 20 bp, Artificial Sequence
  Description of Artificial Sequence: Synthetic oligonucleotide
  Target: LAMA2; (+) strand; PAM type: NRG; PAM sequence: GAG
ttttttttttgcaatgggaa

SEQ ID NO: 130058 - DNA, 20 bp, Artificial Sequence
  Description of Artificial Sequence: Synthetic oligonucleotide
  Target: LAMA2; (+) strand; PAM type: NRG; PAM sequence: GAG
ttttttttgcaatgggaaga

SEQ ID NO: 130059 - DNA, 20 bp, Artificial Sequence
  Description of Artificial Sequence: Synthetic oligonucleotide
  Target: LAMA2; (+) strand; PAM type: NRG; PAM sequence: TAG
tgggaagagagatttctcac

SEQ ID NO: 130060 - DNA, 20 bp, Artificial Sequence
  Description of Artificial Sequence: Synthetic oligonucleotide
  Target: LAMA2; (+) strand; PAM type: NRG; PAM sequence: TGG
agatttctcactagtcttac

SEQ ID NO: 130061 - DNA, 20 bp, Artificial Sequence
  Description of Artificial Sequence: Synthetic oligonucleotide
  Target: LAMA2; (+) strand; PAM type: NRG; PAM sequence: TAG
ctggttttcatctgacttta

SEQ ID NO: 130062 - DNA, 20 bp, Artificial Sequence
  Description of Artificial Sequence: Synthetic oligonucleotide
  Target: LAMA2; (+) strand; PAM type: NRG; PAM sequence: TAG
actttatagtttaaaattga

SEQ ID NO: 130063 - DNA, 20 bp, Artificial Sequence
  Description of Artificial Sequence: Synthetic oligonucleotide
  Target: LAMA2; (+) strand; PAM type: NRG; PAM sequence: TGG
aaaattgatagccattttga

SEQ ID NO: 130064 - DNA, 20 bp, Artificial Sequence
  Description of Artificial Sequence: Synthetic oligonucleotide
  Target: LAMA2; (+) strand; PAM type: NRG; PAM sequence: TGG
cattttgatggcaacacaca

SEQ ID NO: 130065 - DNA, 20 bp, Artificial Sequence
  Description of Artificial Sequence: Synthetic oligonucleotide
  Target: LAMA2; (+) strand; PAM type: NRG; PAM sequence: TAG
tgatggcaacacacatggtt

SEQ ID NO: 130066 - DNA, 20 bp, Artificial Sequence
  Description of Artificial Sequence: Synthetic oligonucleotide
  Target: LAMA2; (+) strand; PAM type: NRG; PAM sequence: CAG
gttaaattttactccgtcct

SEQ ID NO: 130067 - DNA, 20 bp, Artificial Sequence
  Description of Artificial Sequence: Synthetic oligonucleotide
  Target: LAMA2; (+) strand; PAM type: NRG; PAM sequence: GAG
actccgtcctcagttttcct

SEQ ID NO: 130068 - DNA, 20 bp, Artificial Sequence
  Description of Artificial Sequence: Synthetic oligonucleotide
  Target: LAMA2; (+) strand; PAM type: NRG; PAM sequence: AGG
ctccgtcctcagttttcctg

SEQ ID NO: 130069 - DNA, 20 bp, Artificial Sequence
  Description of Artificial Sequence: Synthetic oligonucleotide
  Target: LAMA2; (+) strand; PAM type: NRG; PAM sequence: GGG
tccgtcctcagttttcctga

SEQ ID NO: 130070 - DNA, 20 bp, Artificial Sequence
  Description of Artificial Sequence: Synthetic oligonucleotide
  Target: LAMA2; (+) strand; PAM type: NRG; PAM sequence: GAG
cgtcctcagttttcctgagg

SEQ ID NO: 130071 - DNA, 20 bp, Artificial Sequence
  Description of Artificial Sequence: Synthetic oligonucleotide
  Target: LAMA2; (+) strand; PAM type: NRG; PAM sequence: CAG
cagttttcctgagggagtgt

SEQ ID NO: 130072 - DNA, 20 bp, Artificial Sequence
  Description of Artificial Sequence: Synthetic oligonucleotide
  Target: LAMA2; (+) strand; PAM type: NRG; PAM sequence: TGG
taaattccatgtatccaccc

SEQ ID NO: 130073 - DNA, 20 bp, Artificial Sequence
  Description of Artificial Sequence: Synthetic oligonucleotide
  Target: LAMA2; (+) strand; PAM type: NRG; PAM sequence: GGG
aaattccatgtatccaccct

SEQ ID NO: 130074 - DNA, 20 bp, Artificial Sequence
  Description of Artificial Sequence: Synthetic oligonucleotide
  Target: LAMA2; (+) strand; PAM type: NRG; PAM sequence: TGG
tcacttcactgcgttgaatc

SEQ ID NO: 130075 - DNA, 20 bp, Artificial Sequence
  Description of Artificial Sequence: Synthetic oligonucleotide
  Target: LAMA2; (+) strand; PAM type: NRG; PAM sequence: TAG
ttcactgcgttgaatctgga

SEQ ID NO: 130076 - DNA, 20 bp, Artificial Sequence
  Description of Artificial Sequence: Synthetic oligonucleotide
  Target: LAMA2; (+) strand; PAM type: NRG; PAM sequence: AGG
tcactgcgttgaatctggat

SEQ ID NO: 130077 - DNA, 20 bp, Artificial Sequence
  Description of Artificial Sequence: Synthetic oligonucleotide
  Target: LAMA2; (+) strand; PAM type: NRG; PAM sequence: AAG
ttgaatctggataggaaata

SEQ ID NO: 130078 - DNA, 20 bp, Artificial Sequence
  Description of Artificial Sequence: Synthetic oligonucleotide
  Target: LAMA2; (+) strand; PAM type: NRG; PAM sequence: TAG
atgaatatttcacaatttac

SEQ ID NO: 130079 - DNA, 20 bp, Artificial Sequence
  Description of Artificial Sequence: Synthetic oligonucleotide
  Target: LAMA2; (+) strand; PAM type: NRG; PAM sequence: AGG
tgaatatttcacaatttact

SEQ ID NO: 130080 - DNA, 20 bp, Artificial Sequence
  Description of Artificial Sequence: Synthetic oligonucleotide
  Target: LAMA2; (+) strand; PAM type: NRG; PAM sequence: TGG
cactttcttgctcttccgtg

SEQ ID NO: 130081 - DNA, 20 bp, Artificial Sequence
  Description of Artificial Sequence: Synthetic oligonucleotide
  Target: LAMA2; (+) strand; PAM type: NRG; PAM sequence: TAG
cgtgtggattttctactaat

SEQ ID NO: 130082 - DNA, 20 bp, Artificial Sequence
  Description of Artificial Sequence: Synthetic oligonucleotide
  Target: LAMA2; (+) strand; PAM type: NRG; PAM sequence: TGG
ttttctactaattagttact

SEQ ID NO: 130083 - DNA, 20 bp, Artificial Sequence
  Description of Artificial Sequence: Synthetic oligonucleotide
  Target: LAMA2; (+) strand; PAM type: NRG; PAM sequence: AAG
attagttacttggtatgtct

SEQ ID NO: 130084 - DNA, 20 bp, Artificial Sequence
  Description of Artificial Sequence: Synthetic oligonucleotide
  Target: LAMA2; (+) strand; PAM type: NRG; PAM sequence: AAG
tacgttatttttattataca

SEQ ID NO: 130085 - DNA, 20 bp, Artificial Sequence
  Description of Artificial Sequence: Synthetic oligonucleotide
  Target: LAMA2; (+) strand; PAM type: NRG; PAM sequence: CAG
ctttgatataaatcataata

SEQ ID NO: 130086 - DNA, 20 bp, Artificial Sequence
  Description of Artificial Sequence: Synthetic oligonucleotide
  Target: LAMA2; (+) strand; PAM type: NRG; PAM sequence: AAG
atcataatacagtgtctgat

SEQ ID NO: 130087 - DNA, 20 bp, Artificial Sequence
  Description of Artificial Sequence: Synthetic oligonucleotide
  Target: LAMA2; (+) strand; PAM type: NRG; PAM sequence: CAG
aatacagtgtctgataagta

SEQ ID NO: 130088 - DNA, 20 bp, Artificial Sequence
  Description of Artificial Sequence: Synthetic oligonucleotide
  Target: LAMA2; (+) strand; PAM type: NRG; PAM sequence: TAG
ctttttaaaaactcttttca

SEQ ID NO: 130089 - DNA, 20 bp, Artificial Sequence
  Description of Artificial Sequence: Synthetic oligonucleotide
  Target: LAMA2; (+) strand; PAM type: NRG; PAM sequence: TAG
atagactgtcttattctttt

SEQ ID NO: 130090 - DNA, 20 bp, Artificial Sequence
  Description of Artificial Sequence: Synthetic oligonucleotide
  Target: LAMA2; (+) strand; PAM type: NRG; PAM sequence: TGG
atttatgcccatgatgtgca

SEQ ID NO: 130091 - DNA, 20 bp, Artificial Sequence
  Description of Artificial Sequence: Synthetic oligonucleotide
  Target: LAMA2; (+) strand; PAM type: NRG; PAM sequence: TGG
gatgtgcatggtcctgaatg

SEQ ID NO: 130092 - DNA, 20 bp, Artificial Sequence
  Description of Artificial Sequence: Synthetic oligonucleotide
  Target: LAMA2; (+) strand; PAM type: NRG; PAM sequence: TGG
gcatggtcctgaatgtggaa

SEQ ID NO: 130093 - DNA, 20 bp, Artificial Sequence
  Description of Artificial Sequence: Synthetic oligonucleotide
  Target: LAMA2; (+) strand; PAM type: NRG; PAM sequence: GGG
catggtcctgaatgtggaat

SEQ ID NO: 130094 - DNA, 20 bp, Artificial Sequence
  Description of Artificial Sequence: Synthetic oligonucleotide
  Target: LAMA2; (+) strand; PAM type: NRG; PAM sequence: AAG
atgtggaatgggtctctctg

SEQ ID NO: 130095 - DNA, 20 bp, Artificial Sequence
  Description of Artificial Sequence: Synthetic oligonucleotide
  Target: LAMA2; (+) strand; PAM type: NRG; PAM sequence: AAG
gaatgggtctctctgaagaa

SEQ ID NO: 130096 - DNA, 20 bp, Artificial Sequence
  Description of Artificial Sequence: Synthetic oligonucleotide
  Target: LAMA2; (+) strand; PAM type: NRG; PAM sequence: TGG
tgggtctctctgaagaaaag

SEQ ID NO: 130097 - DNA, 20 bp, Artificial Sequence
  Description of Artificial Sequence: Synthetic oligonucleotide
  Target: LAMA2; (+) strand; PAM type: NRG; PAM sequence: GGG
gggtctctctgaagaaaagt

SEQ ID NO: 130098 - DNA, 20 bp, Artificial Sequence
  Description of Artificial Sequence: Synthetic oligonucleotide
  Target: LAMA2; (+) strand; PAM type: NRG; PAM sequence: CAG
ctctctgaagaaaagtgggt

SEQ ID NO: 130099 - DNA, 20 bp, Artificial Sequence
  Description of Artificial Sequence: Synthetic oligonucleotide
  Target: LAMA2; (+) strand; PAM type: NRG; PAM sequence: TGG
ctgaagaaaagtgggtcaga

SEQ ID NO: 130100 - DNA, 20 bp, Artificial Sequence
  Description of Artificial Sequence: Synthetic oligonucleotide
  Target: LAMA2; (+) strand; PAM type: NRG; PAM sequence: TGG
agatggttgcttgtgcatat

SEQ ID NO: 130101 - DNA, 20 bp, Artificial Sequence
  Description of Artificial Sequence: Synthetic oligonucleotide
  Target: LAMA2; (+) strand; PAM type: NRG; PAM sequence: AAG
ggttgcttgtgcatattgga

SEQ ID NO: 130102 - DNA, 20 bp, Artificial Sequence
  Description of Artificial Sequence: Synthetic oligonucleotide
  Target: LAMA2; (+) strand; PAM type: NRG; PAM sequence: TAG
gcatattggaaagaaactga

SEQ ID NO: 130103 - DNA, 20 bp, Artificial Sequence
  Description of Artificial Sequence: Synthetic oligonucleotide
  Target: LAMA2; (+) strand; PAM type: NRG; PAM sequence: TGG
gaaagaaactgatagcttcc

SEQ ID NO: 130104 - DNA, 20 bp, Artificial Sequence
  Description of Artificial Sequence: Synthetic oligonucleotide
  Target: LAMA2; (+) strand; PAM type: NRG; PAM sequence: AAG
tagcttcctggtctcttttg

SEQ ID NO: 130105 - DNA, 20 bp, Artificial Sequence
  Description of Artificial Sequence: Synthetic oligonucleotide
  Target: LAMA2; (+) strand; PAM type: NRG; PAM sequence: AGG
agcttcctggtctcttttga

SEQ ID NO: 130106 - DNA, 20 bp, Artificial Sequence
  Description of Artificial Sequence: Synthetic oligonucleotide
  Target: LAMA2; (+) strand; PAM type: NRG; PAM sequence: GGG
gcttcctggtctcttttgaa

SEQ ID NO: 130107 - DNA, 20 bp, Artificial Sequence
  Description of Artificial Sequence: Synthetic oligonucleotide
  Target: LAMA2; (+) strand; PAM type: NRG; PAM sequence: CAG
aagggtgctgttgtaaaata

SEQ ID NO: 130108 - DNA, 20 bp, Artificial Sequence
  Description of Artificial Sequence: Synthetic oligonucleotide
  Target: LAMA2; (+) strand; PAM type: NRG; PAM sequence: TAG
tgctgttgtaaaatacagat

SEQ ID NO: 130109 - DNA, 20 bp, Artificial Sequence
  Description of Artificial Sequence: Synthetic oligonucleotide
  Target: LAMA2; (+) strand; PAM type: NRG; PAM sequence: AAG
ttgtaaaatacagattagtc

SEQ ID NO: 130110 - DNA, 20 bp, Artificial Sequence
  Description of Artificial Sequence: Synthetic oligonucleotide
  Target: LAMA2; (+) strand; PAM type: NRG; PAM sequence: AGG
tgtaaaatacagattagtca

SEQ ID NO: 130111 - DNA, 20 bp, Artificial Sequence
  Description of Artificial Sequence: Synthetic oligonucleotide
  Target: LAMA2; (+) strand; PAM type: NRG; PAM sequence: CAG
tacagattagtcaaggttta

SEQ ID NO: 130112 - DNA, 20 bp, Artificial Sequence
  Description of Artificial Sequence: Synthetic oligonucleotide
  Target: LAMA2; (+) strand; PAM type: NRG; PAM sequence: TAG
aaggtttacagtgctgttac

SEQ ID NO: 130113 - DNA, 20 bp, Artificial Sequence
  Description of Artificial Sequence: Synthetic oligonucleotide
  Target: LAMA2; (+) strand; PAM type: NRG; PAM sequence: CAG
gaacacttcaaaccaccatg

SEQ ID NO: 130114 - DNA, 20 bp, Artificial Sequence
  Description of Artificial Sequence: Synthetic oligonucleotide
  Target: LAMA2; (+) strand; PAM type: NRG; PAM sequence: CAG
ccatgcagtttaaaactatt

SEQ ID NO: 130115 - DNA, 20 bp, Artificial Sequence
  Description of Artificial Sequence: Synthetic oligonucleotide
  Target: LAMA2; (+) strand; PAM type: NRG; PAM sequence: TGG
ttaaaactattcagtgctta

SEQ ID NO: 130116 - DNA, 20 bp, Artificial Sequence
  Description of Artificial Sequence: Synthetic oligonucleotide
  Target: LAMA2; (+) strand; PAM type: NRG; PAM sequence: CAG
tcagtgcttatggcaaaatt

SEQ ID NO: 130117 - DNA, 20 bp, Artificial Sequence
  Description of Artificial Sequence: Synthetic oligonucleotide
  Target: LAMA2; (+) strand; PAM type: NRG; PAM sequence: AGG
cagtgcttatggcaaaattc

SEQ ID NO: 130118 - DNA, 20 bp, Artificial Sequence
  Description of Artificial Sequence: Synthetic oligonucleotide
  Target: LAMA2; (+) strand; PAM type: NRG; PAM sequence: TGG
aaattcaggtcttttgatgt

SEQ ID NO: 130119 - DNA, 20 bp, Artificial Sequence
  Description of Artificial Sequence: Synthetic oligonucleotide
  Target: LAMA2; (+) strand; PAM type: NRG; PAM sequence: GGG
aattcaggtcttttgatgtt

SEQ ID NO: 130120 - DNA, 20 bp, Artificial Sequence
  Description of Artificial Sequence: Synthetic oligonucleotide
  Target: LAMA2; (+) strand; PAM type: NRG; PAM sequence: GGG
attcaggtcttttgatgttg

SEQ ID NO: 130121 - DNA, 20 bp, Artificial Sequence
  Description of Artificial Sequence: Synthetic oligonucleotide
  Target: LAMA2; (+) strand; PAM type: NRG; PAM sequence: CAG
caggtcttttgatgttgggg

SEQ ID NO: 130122 - DNA, 20 bp, Artificial Sequence
  Description of Artificial Sequence: Synthetic oligonucleotide
  Target: LAMA2; (+) strand; PAM type: NRG; PAM sequence: AGG
aggtcttttgatgttggggc

SEQ ID NO: 130123 - DNA, 20 bp, Artificial Sequence
  Description of Artificial Sequence: Synthetic oligonucleotide
  Target: LAMA2; (+) strand; PAM type: NRG; PAM sequence: GAG
gtcttttgatgttggggcag

SEQ ID NO: 130124 - DNA, 20 bp, Artificial Sequence
  Description of Artificial Sequence: Synthetic oligonucleotide
  Target: LAMA2; (+) strand; PAM type: NRG; PAM sequence: TAG
ttttgatgttggggcaggag

SEQ ID NO: 130125 - DNA, 20 bp, Artificial Sequence
  Description of Artificial Sequence: Synthetic oligonucleotide
  Target: LAMA2; (+) strand; PAM type: NRG; PAM sequence: TGG
ggcaggagtagacattttat

SEQ ID NO: 130126 - DNA, 20 bp, Artificial Sequence
  Description of Artificial Sequence: Synthetic oligonucleotide
  Target: LAMA2; (+) strand; PAM type: NRG; PAM sequence: AAG
tagacattttattggaatgt

SEQ ID NO: 130127 - DNA, 20 bp, Artificial Sequence
  Description of Artificial Sequence: Synthetic oligonucleotide
  Target: LAMA2; (+) strand; PAM type: NRG; PAM sequence: AGG
agacattttattggaatgta

SEQ ID NO: 130128 - DNA, 20 bp, Artificial Sequence
  Description of Artificial Sequence: Synthetic oligonucleotide
  Target: LAMA2; (+) strand; PAM type: NRG; PAM sequence: TAG
attggaatgtaaggcaaaaa

SEQ ID NO: 130129 - DNA, 20 bp, Artificial Sequence
  Description of Artificial Sequence: Synthetic oligonucleotide
  Target: LAMA2; (+) strand; PAM type: NRG; PAM sequence: GAG
tggaatgtaaggcaaaaata

SEQ ID NO: 130130 - DNA, 20 bp, Artificial Sequence
  Description of Artificial Sequence: Synthetic oligonucleotide
  Target: LAMA2; (+) strand; PAM type: NRG; PAM sequence: TGG
tgaaaacattgaatcatttt

SEQ ID NO: 130131 - DNA, 20 bp, Artificial Sequence
  Description of Artificial Sequence: Synthetic oligonucleotide
  Target: LAMA2; (+) strand; PAM type: NRG; PAM sequence: TGG
aaacattgaatcatttttgg

SEQ ID NO: 130132 - DNA, 20 bp, Artificial Sequence
  Description of Artificial Sequence: Synthetic oligonucleotide
  Target: LAMA2; (+) strand; PAM type: NRG; PAM sequence: GGG
aacattgaatcatttttggt

SEQ ID NO: 130133 - DNA, 20 bp, Artificial Sequence
  Description of Artificial Sequence: Synthetic oligonucleotide
  Target: LAMA2; (+) strand; PAM type: NRG; PAM sequence: GGG
acattgaatcatttttggtg

SEQ ID NO: 130134 - DNA, 20 bp, Artificial Sequence
  Description of Artificial Sequence: Synthetic oligonucleotide
  Target: LAMA2; (+) strand; PAM type: NRG; PAM sequence: GGG
cattgaatcatttttggtgg

SEQ ID NO: 130135 - DNA, 20 bp, Artificial Sequence
  Description of Artificial Sequence: Synthetic oligonucleotide
  Target: LAMA2; (+) strand; PAM type: NRG; PAM sequence: GGG
attgaatcatttttggtggg

SEQ ID NO: 130136 - DNA, 20 bp, Artificial Sequence
  Description of Artificial Sequence: Synthetic oligonucleotide
  Target: LAMA2; (+) strand; PAM type: NRG; PAM sequence: CAG
attttttatacctttaaatc

SEQ ID NO: 130137 - DNA, 20 bp, Artificial Sequence
  Description of Artificial Sequence: Synthetic oligonucleotide
  Target: LAMA2; (+) strand; PAM type: NRG; PAM sequence: AAG
cctttaaatccagaaatgtc

SEQ ID NO: 130138 - DNA, 20 bp, Artificial Sequence
  Description of Artificial Sequence: Synthetic oligonucleotide
  Target: LAMA2; (+) strand; PAM type: NRG; PAM sequence: AAG
atgtcaagaaaatgacacac

SEQ ID NO: 130139 - DNA, 20 bp, Artificial Sequence
  Description of Artificial Sequence: Synthetic oligonucleotide
  Target: LAMA2; (+) strand; PAM type: NRG; PAM sequence: AAG
gacacacaagaacaaaacaa

SEQ ID NO: 130140 - DNA, 20 bp, Artificial Sequence
  Description of Artificial Sequence: Synthetic oligonucleotide
  Target: LAMA2; (+) strand; PAM type: NRG; PAM sequence: CAG
aacaaaacaaaagaaaaatt

SEQ ID NO: 130141 - DNA, 20 bp, Artificial Sequence
  Description of Artificial Sequence: Synthetic oligonucleotide
  Target: LAMA2; (+) strand; PAM type: NRG; PAM sequence: TAG
aacaaaagaaaaattcagtt

SEQ ID NO: 130142 - DNA, 20 bp, Artificial Sequence
  Description of Artificial Sequence: Synthetic oligonucleotide
  Target: LAMA2; (+) strand; PAM type: NRG; PAM sequence: GAG
caaaagaaaaattcagttta

SEQ ID NO: 130143 - DNA, 20 bp, Artificial Sequence
  Description of Artificial Sequence: Synthetic oligonucleotide
  Target: LAMA2; (+) strand; PAM type: NRG; PAM sequence: TGG
aaatttgaacatataaaaaa

SEQ ID NO: 130144 - DNA, 20 bp, Artificial Sequence
  Description of Artificial Sequence: Synthetic oligonucleotide
  Target: LAMA2; (+) strand; PAM type: NRG; PAM sequence: AAG
tttgaacatataaaaaatgg

SEQ ID NO: 130145 - DNA, 20 bp, Artificial Sequence
  Description of Artificial Sequence: Synthetic oligonucleotide
  Target: LAMA2; (+) strand; PAM type: NRG; PAM sequence: TGG
catataaaaaatggaagata

SEQ ID NO: 130146 - DNA, 20 bp, Artificial Sequence
  Description of Artificial Sequence: Synthetic oligonucleotide
  Target: LAMA2; (+) strand; PAM type: NRG; PAM sequence: AAG
aaaaatggaagatatggtat

SEQ ID NO: 130147 - DNA, 20 bp, Artificial Sequence
  Description of Artificial Sequence: Synthetic oligonucleotide
  Target: LAMA2; (+) strand; PAM type: NRG; PAM sequence: AGG
aaaatggaagatatggtata

SEQ ID NO: 130148 - DNA, 20 bp, Artificial Sequence
  Description of Artificial Sequence: Synthetic oligonucleotide
  Target: LAMA2; (+) strand; PAM type: NRG; PAM sequence: AAG
atatggtataaggaaccctc

SEQ ID NO: 130149 - DNA, 20 bp, Artificial Sequence
  Description of Artificial Sequence: Synthetic oligonucleotide
  Target: LAMA2; (+) strand; PAM type: NRG; PAM sequence: TGG
caactgttctcctttcccac

SEQ ID NO: 130150 - DNA, 20 bp, Artificial Sequence
  Description of Artificial Sequence: Synthetic oligonucleotide
  Target: LAMA2; (+) strand; PAM type: NRG; PAM sequence: AAG
tttcccactggaatattttg

SEQ ID NO: 130151 - DNA, 20 bp, Artificial Sequence
  Description of Artificial Sequence: Synthetic oligonucleotide
  Target: LAMA2; (+) strand; PAM type: NRG; PAM sequence: AAG
tctgtaatctgcaaatattt

SEQ ID NO: 130152 - DNA, 20 bp, Artificial Sequence
  Description of Artificial Sequence: Synthetic oligonucleotide
  Target: LAMA2; (+) strand; PAM type: NRG; PAM sequence: AAG
atttaagtatgcatatctaa

SEQ ID NO: 130153 - DNA, 20 bp, Artificial Sequence
  Description of Artificial Sequence: Synthetic oligonucleotide
  Target: LAMA2; (+) strand; PAM type: NRG; PAM sequence: TAG
aagtatgcatatctaaaagt

SEQ ID NO: 130154 - DNA, 20 bp, Artificial Sequence
  Description of Artificial Sequence: Synthetic oligonucleotide
  Target: LAMA2; (+) strand; PAM type: NRG; PAM sequence: CAG
tctttttaaaatcataatct

SEQ ID NO: 130155 - DNA, 20 bp, Artificial Sequence
  Description of Artificial Sequence: Synthetic oligonucleotide
  Target: LAMA2; (+) strand; PAM type: NRG; PAM sequence: AAG
tcatcccatcaaatattgac

SEQ ID NO: 130156 - DNA, 20 bp, Artificial Sequence
  Description of Artificial Sequence: Synthetic oligonucleotide
  Target: LAMA2; (+) strand; PAM type: NRG; PAM sequence: TGG
attattcttttactatatat

SEQ ID NO: 130157 - DNA, 20 bp, Artificial Sequence
  Description of Artificial Sequence: Synthetic oligonucleotide
  Target: LAMA2; (+) strand; PAM type: NRG; PAM sequence: TAG
ttcttttactatatattggc

SEQ ID NO: 130158 - DNA, 20 bp, Artificial Sequence
  Description of Artificial Sequence: Synthetic oligonucleotide
  Target: LAMA2; (+) strand; PAM type: NRG; PAM sequence: AAG
attggctagaattttatgta

SEQ ID NO: 130159 - DNA, 20 bp, Artificial Sequence
  Description of Artificial Sequence: Synthetic oligonucleotide
  Target: LAMA2; (+) strand; PAM type: NRG; PAM sequence: AAG
ctagaattttatgtaaagaa

SEQ ID NO: 130160 - DNA, 20 bp, Artificial Sequence
  Description of Artificial Sequence: Synthetic oligonucleotide
  Target: LAMA2; (+) strand; PAM type: NRG; PAM sequence: CAG
cattgactcttatttaccta

SEQ ID NO: 130161 - DNA, 20 bp, Artificial Sequence
  Description of Artificial Sequence: Synthetic oligonucleotide
  Target: LAMA2; (+) strand; PAM type: NRG; PAM sequence: AGG
attgactcttatttacctac

SEQ ID NO: 130162 - DNA, 20 bp, Artificial Sequence
  Description of Artificial Sequence: Synthetic oligonucleotide
  Target: LAMA2; (+) strand; PAM type: NRG; PAM sequence: TAG
gactcttatttacctacagg

SEQ ID NO: 130163 - DNA, 20 bp, Artificial Sequence
  Description of Artificial Sequence: Synthetic oligonucleotide
  Target: LAMA2; (+) strand; PAM type: NRG; PAM sequence: CAG
acctacaggtagaattcaaa

SEQ ID NO: 130164 - DNA, 20 bp, Artificial Sequence
  Description of Artificial Sequence: Synthetic oligonucleotide
  Target: LAMA2; (+) strand; PAM type: NRG; PAM sequence: AGG
cctacaggtagaattcaaac

SEQ ID NO: 130165 - DNA, 20 bp, Artificial Sequence
  Description of Artificial Sequence: Synthetic oligonucleotide
  Target: LAMA2; (+) strand; PAM type: NRG; PAM sequence: AAG
caggtagaattcaaacagga

SEQ ID NO: 130166 - DNA, 20 bp, Artificial Sequence
  Description of Artificial Sequence: Synthetic oligonucleotide
  Target: LAMA2; (+) strand; PAM type: NRG; PAM sequence: CAG
gtagaattcaaacaggaaag

SEQ ID NO: 130167 - DNA, 20 bp, Artificial Sequence
  Description of Artificial Sequence: Synthetic oligonucleotide
  Target: LAMA2; (+) strand; PAM type: NRG; PAM sequence: CAG
gattctttctttttatttcc

SEQ ID NO: 130168 - DNA, 20 bp, Artificial Sequence
  Description of Artificial Sequence: Synthetic oligonucleotide
  Target: LAMA2; (+) strand; PAM type: NRG; PAM sequence: TAG
tctttttatttcccagtttt

SEQ ID NO: 130169 - DNA, 20 bp, Artificial Sequence
  Description of Artificial Sequence: Synthetic oligonucleotide
  Target: LAMA2; (+) strand; PAM type: NRG; PAM sequence: GAG
tcccagtttttagaaaaaat

SEQ ID NO: 130170 - DNA, 20 bp, Artificial Sequence
  Description of Artificial Sequence: Synthetic oligonucleotide
  Target: LAMA2; (+) strand; PAM type: NRG; PAM sequence: TGG
agtttttagaaaaaatgagt

SEQ ID NO: 130171 - DNA, 20 bp, Artificial Sequence
  Description of Artificial Sequence: Synthetic oligonucleotide
  Target: LAMA2; (+) strand; PAM type: NRG; PAM sequence: TAG
gaaaaaatgagttggtttac

SEQ ID NO: 130172 - DNA, 20 bp, Artificial Sequence
  Description of Artificial Sequence: Synthetic oligonucleotide
  Target: LAMA2; (+) strand; PAM type: NRG; PAM sequence: CAG
tagtatcctttaatgataac

SEQ ID NO: 130173 - DNA, 20 bp, Artificial Sequence
  Description of Artificial Sequence: Synthetic oligonucleotide
  Target: LAMA2; (+) strand; PAM type: NRG; PAM sequence: TAG
tttgtatctctatgaactca

SEQ ID NO: 130174 - DNA, 20 bp, Artificial Sequence
  Description of Artificial Sequence: Synthetic oligonucleotide
  Target: LAMA2; (+) strand; PAM type: NRG; PAM sequence: CAG
tgatatgtttcgattcattg

SEQ ID NO: 130175 - DNA, 20 bp, Artificial Sequence
  Description of Artificial Sequence: Synthetic oligonucleotide
  Target: LAMA2; (+) strand; PAM type: NRG; PAM sequence: TGG
taatcaaattgtctcatctt

SEQ ID NO: 130176 - DNA, 20 bp, Artificial Sequence
  Description of Artificial Sequence: Synthetic oligonucleotide
  Target: LAMA2; (+) strand; PAM type: NRG; PAM sequence: TGG
caaattgtctcatctttggt

SEQ ID NO: 130177 - DNA, 20 bp, Artificial Sequence
  Description of Artificial Sequence: Synthetic oligonucleotide
  Target: LAMA2; (+) strand; PAM type: NRG; PAM sequence: AAG
ttgtctcatctttggttggt

SEQ ID NO: 130178 - DNA, 20 bp, Artificial Sequence
  Description of Artificial Sequence: Synthetic oligonucleotide
  Target: LAMA2; (+) strand; PAM type: NRG; PAM sequence: GAG
gtctcatctttggttggtaa

SEQ ID NO: 130179 - DNA, 20 bp, Artificial Sequence
  Description of Artificial Sequence: Synthetic oligonucleotide
  Target: LAMA2; (+) strand; PAM type: NRG; PAM sequence: TGG
tggtaagagtgtcttcaact

SEQ ID NO: 130180 - DNA, 20 bp, Artificial Sequence
  Description of Artificial Sequence: Synthetic oligonucleotide
  Target: LAMA2; (+) strand; PAM type: NRG; PAM sequence: TAG
gtgtcttcaacttggctttc

SEQ ID NO: 130181 - DNA, 20 bp, Artificial Sequence
  Description of Artificial Sequence: Synthetic oligonucleotide
  Target: LAMA2; (+) strand; PAM type: NRG; PAM sequence: CAG
gctttctagtcctttaaact

SEQ ID NO: 130182 - DNA, 20 bp, Artificial Sequence
  Description of Artificial Sequence: Synthetic oligonucleotide
  Target: LAMA2; (+) strand; PAM type: NRG; PAM sequence: CAG
ttaatgattctcatgctttt

SEQ ID NO: 130183 - DNA, 20 bp, Artificial Sequence
  Description of Artificial Sequence: Synthetic oligonucleotide
  Target: LAMA2; (+) strand; PAM type: NRG; PAM sequence: AAG
ttctcatgcttttcagtgtt

SEQ ID NO: 130184 - DNA, 20 bp, Artificial Sequence
  Description of Artificial Sequence: Synthetic oligonucleotide
  Target: LAMA2; (+) strand; PAM type: NRG; PAM sequence: TGG
tgcttttcagtgttaagatg

SEQ ID NO: 130185 - DNA, 20 bp, Artificial Sequence
  Description of Artificial Sequence: Synthetic oligonucleotide
  Target: LAMA2; (+) strand; PAM type: NRG; PAM sequence: TAG
ttttcagtgttaagatgtgg

SEQ ID NO: 130186 - DNA, 20 bp, Artificial Sequence
  Description of Artificial Sequence: Synthetic oligonucleotide
  Target: LAMA2; (+) strand; PAM type: NRG; PAM sequence: AGG
tttcagtgttaagatgtggt

SEQ ID NO: 130187 - DNA, 20 bp, Artificial Sequence
  Description of Artificial Sequence: Synthetic oligonucleotide
  Target: LAMA2; (+) strand; PAM type: NRG; PAM sequence: TGG
gttttgcatatttcctgtcc

SEQ ID NO: 130188 - DNA, 20 bp, Artificial Sequence
  Description of Artificial Sequence: Synthetic oligonucleotide
  Target: LAMA2; (+) strand; PAM type: NRG; PAM sequence: TAG
catatttcctgtcctggttt

SEQ ID NO: 130189 - DNA, 20 bp, Artificial Sequence
  Description of Artificial Sequence: Synthetic oligonucleotide
  Target: LAMA2; (+) strand; PAM type: NRG; PAM sequence: CAG
tcctgtcctggttttagaaa

SEQ ID NO: 130190 - DNA, 20 bp, Artificial Sequence
  Description of Artificial Sequence: Synthetic oligonucleotide
  Target: LAMA2; (+) strand; PAM type: NRG; PAM sequence: TGG
ttttagaaacagtcatttct

SEQ ID NO: 130191 - DNA, 20 bp, Artificial Sequence
  Description of Artificial Sequence: Synthetic oligonucleotide
  Target: LAMA2; (+) strand; PAM type: NRG; PAM sequence: GAG
ttagaaacagtcatttcttg

SEQ ID NO: 130192 - DNA, 20 bp, Artificial Sequence
  Description of Artificial Sequence: Synthetic oligonucleotide
  Target: LAMA2; (+) strand; PAM type: NRG; PAM sequence: AGG
tagaaacagtcatttcttgg

SEQ ID NO: 130193 - DNA, 20 bp, Artificial Sequence
  Description of Artificial Sequence: Synthetic oligonucleotide
  Target: LAMA2; (+) strand; PAM type: NRG; PAM sequence: GAG
gaaacagtcatttcttggag

SEQ ID NO: 130194 - DNA, 20 bp, Artificial Sequence
  Description of Artificial Sequence: Synthetic oligonucleotide
  Target: LAMA2; (+) strand; PAM type: NRG; PAM sequence: TGG
gtcatttcttggaggagccc

SEQ ID NO: 130195 - DNA, 20 bp, Artificial Sequence
  Description of Artificial Sequence: Synthetic oligonucleotide
  Target: LAMA2; (+) strand; PAM type: NRG; PAM sequence: TAG
ggaggagccctggttcctta

SEQ ID NO: 130196 - DNA, 20 bp, Artificial Sequence
  Description of Artificial Sequence: Synthetic oligonucleotide
  Target: LAMA2; (+) strand; PAM type: NRG; PAM sequence: AAG
cctggttccttatagtgaaa

SEQ ID NO: 130197 - DNA, 20 bp, Artificial Sequence
  Description of Artificial Sequence: Synthetic oligonucleotide
  Target: LAMA2; (+) strand; PAM type: NRG; PAM sequence: AGG
ctggttccttatagtgaaaa

SEQ ID NO: 130198 - DNA, 20 bp, Artificial Sequence
  Description of Artificial Sequence: Synthetic oligonucleotide
  Target: LAMA2; (+) strand; PAM type: NRG; PAM sequence: GGG
tggttccttatagtgaaaaa

SEQ ID NO: 130199 - DNA, 20 bp, Artificial Sequence
  Description of Artificial Sequence: Synthetic oligonucleotide
  Target: LAMA2; (+) strand; PAM type: NRG; PAM sequence: AAG
atagtgaaaaagggtatttc

SEQ ID NO: 130200 - DNA, 20 bp, Artificial Sequence
  Description of Artificial Sequence: Synthetic oligonucleotide
  Target: LAMA2; (+) strand; PAM type: NRG; PAM sequence: CAG
aaaagggtatttcaagacca

SEQ ID NO: 130201 - DNA, 20 bp, Artificial Sequence
  Description of Artificial Sequence: Synthetic oligonucleotide
  Target: LAMA2; (+) strand; PAM type: NRG; PAM sequence: AGG
aaagggtatttcaagaccac

SEQ ID NO: 130202 - DNA, 20 bp, Artificial Sequence
  Description of Artificial Sequence: Synthetic oligonucleotide
  Target: LAMA2; (+) strand; PAM type: NRG; PAM sequence: CGG
ggtatttcaagaccacaggt

SEQ ID NO: 130203 - DNA, 20 bp, Artificial Sequence
  Description of Artificial Sequence: Synthetic oligonucleotide
  Target: LAMA2; (+) strand; PAM type: NRG; PAM sequence: TAG
atttcaagaccacaggtcgg

SEQ ID NO: 130204 - DNA, 20 bp, Artificial Sequence
  Description of Artificial Sequence: Synthetic oligonucleotide
  Target: LAMA2; (+) strand; PAM type: NRG; PAM sequence: AGG
tttcaagaccacaggtcggt

SEQ ID NO: 130205 - DNA, 20 bp, Artificial Sequence
  Description of Artificial Sequence: Synthetic oligonucleotide
  Target: LAMA2; (+) strand; PAM type: NRG; PAM sequence: GGG
ttcaagaccacaggtcggta

SEQ ID NO: 130206 - DNA, 20 bp, Artificial Sequence
  Description of Artificial Sequence: Synthetic oligonucleotide
  Target: LAMA2; (+) strand; PAM type: NRG; PAM sequence: TAG
ggctgttcactgttaatatg

SEQ ID NO: 130207 - DNA, 20 bp, Artificial Sequence
  Description of Artificial Sequence: Synthetic oligonucleotide
  Target: LAMA2; (+) strand; PAM type: NRG; PAM sequence: AGG
gctgttcactgttaatatgt

SEQ ID NO: 130208 - DNA, 20 bp, Artificial Sequence
  Description of Artificial Sequence: Synthetic oligonucleotide
  Target: LAMA2; (+) strand; PAM type: NRG; PAM sequence: TAG
gttaatatgtaggttgtttc

SEQ ID NO: 130209 - DNA, 20 bp, Artificial Sequence
  Description of Artificial Sequence: Synthetic oligonucleotide
  Target: LAMA2; (+) strand; PAM type: NRG; PAM sequence: AGG
ttaatatgtaggttgtttct

SEQ ID NO: 130210 - DNA, 20 bp, Artificial Sequence
  Description of Artificial Sequence: Synthetic oligonucleotide
  Target: LAMA2; (+) strand; PAM type: NRG; PAM sequence: CAG
aggttgtttctaggtctttt

SEQ ID NO: 130211 - DNA, 20 bp, Artificial Sequence
  Description of Artificial Sequence: Synthetic oligonucleotide
  Target: LAMA2; (+) strand; PAM type: NRG; PAM sequence: TGG
ttgtttctaggtcttttcag

SEQ ID NO: 130212 - DNA, 20 bp, Artificial Sequence
  Description of Artificial Sequence: Synthetic oligonucleotide
  Target: LAMA2; (+) strand; PAM type: NRG; PAM sequence: CAG
tctaggtcttttcagtggat

SEQ ID NO: 130213 - DNA, 20 bp, Artificial Sequence
  Description of Artificial Sequence: Synthetic oligonucleotide
  Target: LAMA2; (+) strand; PAM type: NRG; PAM sequence: AGG
ctaggtcttttcagtggatc

SEQ ID NO: 130214 - DNA, 20 bp, Artificial Sequence
  Description of Artificial Sequence: Synthetic oligonucleotide
  Target: LAMA2; (+) strand; PAM type: NRG; PAM sequence: TGG
ggtcttttcagtggatcagg

SEQ ID NO: 130215 - DNA, 20 bp, Artificial Sequence
  Description of Artificial Sequence: Synthetic oligonucleotide
  Target: LAMA2; (+) strand; PAM type: NRG; PAM sequence: GGG
gtcttttcagtggatcaggt

SEQ ID NO: 130216 - DNA, 20 bp, Artificial Sequence
  Description of Artificial Sequence: Synthetic oligonucleotide
  Target: LAMA2; (+) strand; PAM type: NRG; PAM sequence: TAG
tgggaaatatatatttcaaa

SEQ ID NO: 130217 - DNA, 20 bp, Artificial Sequence
  Description of Artificial Sequence: Synthetic oligonucleotide
  Target: LAMA2; (+) strand; PAM type: NRG; PAM sequence: GAG
ggaaatatatatttcaaata

SEQ ID NO: 130218 - DNA, 20 bp, Artificial Sequence
  Description of Artificial Sequence: Synthetic oligonucleotide
  Target: LAMA2; (+) strand; PAM type: NRG; PAM sequence: TAG
caaatagagaaaatacatta

SEQ ID NO: 130219 - DNA, 20 bp, Artificial Sequence
  Description of Artificial Sequence: Synthetic oligonucleotide
  Target: LAMA2; (+) strand; PAM type: NRG; PAM sequence: TAG
tttattctgacatgcccatt

SEQ ID NO: 130220 - DNA, 20 bp, Artificial Sequence
  Description of Artificial Sequence: Synthetic oligonucleotide
  Target: LAMA2; (+) strand; PAM type: NRG; PAM sequence: AGG
ttattctgacatgcccattt

SEQ ID NO: 130221 - DNA, 20 bp, Artificial Sequence
  Description of Artificial Sequence: Synthetic oligonucleotide
  Target: LAMA2; (+) strand; PAM type: NRG; PAM sequence: GAG
acatgcccatttaggaatat

SEQ ID NO: 130222 - DNA, 20 bp, Artificial Sequence
  Description of Artificial Sequence: Synthetic oligonucleotide
  Target: LAMA2; (+) strand; PAM type: NRG; PAM sequence: AGG
catgcccatttaggaatatg

SEQ ID NO: 130223 - DNA, 20 bp, Artificial Sequence
  Description of Artificial Sequence: Synthetic oligonucleotide
  Target: LAMA2; (+) strand; PAM type: NRG; PAM sequence: TAG
atttaggaatatgaggctta

SEQ ID NO: 130224 - DNA, 20 bp, Artificial Sequence
  Description of Artificial Sequence: Synthetic oligonucleotide
  Target: LAMA2; (+) strand; PAM type: NRG; PAM sequence: AAG
tcttttttctcatccactga

SEQ ID NO: 130225 - DNA, 20 bp, Artificial Sequence
  Description of Artificial Sequence: Synthetic oligonucleotide
  Target: LAMA2; (+) strand; PAM type: NRG; PAM sequence: TAG
ataacttatttgctctatca

SEQ ID NO: 130226 - DNA, 20 bp, Artificial Sequence
  Description of Artificial Sequence: Synthetic oligonucleotide
  Target: LAMA2; (+) strand; PAM type: NRG; PAM sequence: TAG
atatcatttcataataataa

SEQ ID NO: 130227 - DNA, 20 bp, Artificial Sequence
  Description of Artificial Sequence: Synthetic oligonucleotide
  Target: LAMA2; (+) strand; PAM type: NRG; PAM sequence: TAG
aaatattatcatatacaaca

SEQ ID NO: 130228 - DNA, 20 bp, Artificial Sequence
  Description of Artificial Sequence: Synthetic oligonucleotide
  Target: LAMA2; (+) strand; PAM type: NRG; PAM sequence: TGG
tattatcatatacaacatag

SEQ ID NO: 130229 - DNA, 20 bp, Artificial Sequence
  Description of Artificial Sequence: Synthetic oligonucleotide
  Target: LAMA2; (+) strand; PAM type: NRG; PAM sequence: AAG
agtggctgaaatgactttga

SEQ ID NO: 130230 - DNA, 20 bp, Artificial Sequence
  Description of Artificial Sequence: Synthetic oligonucleotide
  Target: LAMA2; (+) strand; PAM type: NRG; PAM sequence: TAG
aatgactttgaaagatttct

SEQ ID NO: 130231 - DNA, 20 bp, Artificial Sequence
  Description of Artificial Sequence: Synthetic oligonucleotide
  Target: LAMA2; (+) strand; PAM type: NRG; PAM sequence: AAG
gccacgattttatatttata

SEQ ID NO: 130232 - DNA, 20 bp, Artificial Sequence
  Description of Artificial Sequence: Synthetic oligonucleotide
  Target: LAMA2; (+) strand; PAM type: NRG; PAM sequence: TAG
atatttataaagcatcccac

SEQ ID NO: 130233 - DNA, 20 bp, Artificial Sequence
  Description of Artificial Sequence: Synthetic oligonucleotide
  Target: LAMA2; (+) strand; PAM type: NRG; PAM sequence: AGG
tatttataaagcatcccact

SEQ ID NO: 130234 - DNA, 20 bp, Artificial Sequence
  Description of Artificial Sequence: Synthetic oligonucleotide
  Target: LAMA2; (+) strand; PAM type: NRG; PAM sequence: TGG
cacttgaaaaaattatttta

SEQ ID NO: 130235 - DNA, 20 bp, Artificial Sequence
  Description of Artificial Sequence: Synthetic oligonucleotide
  Target: LAMA2; (+) strand; PAM type: NRG; PAM sequence: AAG
gaaaaaattattttatggtt

SEQ ID NO: 130236 - DNA, 20 bp, Artificial Sequence
  Description of Artificial Sequence: Synthetic oligonucleotide
  Target: LAMA2; (+) strand; PAM type: NRG; PAM sequence: AAG
tcatttgactttttgcctga

SEQ ID NO: 130237 - DNA, 20 bp, Artificial Sequence
  Description of Artificial Sequence: Synthetic oligonucleotide
  Target: LAMA2; (+) strand; PAM type: NRG; PAM sequence: TAG
atgatgtaaaaacttttaca

SEQ ID NO: 130238 - DNA, 20 bp, Artificial Sequence
  Description of Artificial Sequence: Synthetic oligonucleotide
  Target: LAMA2; (+) strand; PAM type: NRG; PAM sequence: AAG
aaaaacttttacatagtttc

SEQ ID NO: 130239 - DNA, 20 bp, Artificial Sequence
  Description of Artificial Sequence: Synthetic oligonucleotide
  Target: LAMA2; (+) strand; PAM type: NRG; PAM sequence: AGG
aaaacttttacatagtttca

SEQ ID NO: 130240 - DNA, 20 bp, Artificial Sequence
  Description of Artificial Sequence: Synthetic oligonucleotide
  Target: LAMA2; (+) strand; PAM type: NRG; PAM sequence: AAG
caaggtcaaatttgcaaaat

SEQ ID NO: 130241 - DNA, 20 bp, Artificial Sequence
  Description of Artificial Sequence: Synthetic oligonucleotide
  Target: LAMA2; (+) strand; PAM type: NRG; PAM sequence: CAG
tttgcaaaataagttatatt

SEQ ID NO: 130242 - DNA, 20 bp, Artificial Sequence
  Description of Artificial Sequence: Synthetic oligonucleotide
  Target: LAMA2; (+) strand; PAM type: NRG; PAM sequence: GAG
tgcaaaataagttatattca

SEQ ID NO: 130243 - DNA, 20 bp, Artificial Sequence
  Description of Artificial Sequence: Synthetic oligonucleotide
  Target: LAMA2; (+) strand; PAM type: NRG; PAM sequence: TAG
aataagttatattcagagac

SEQ ID NO: 130244 - DNA, 20 bp, Artificial Sequence
  Description of Artificial Sequence: Synthetic oligonucleotide
  Target: LAMA2; (+) strand; PAM type: NRG; PAM sequence: TAG
tattcagagactagactctc

SEQ ID NO: 130245 - DNA, 20 bp, Artificial Sequence
  Description of Artificial Sequence: Synthetic oligonucleotide
  Target: LAMA2; (+) strand; PAM type: NRG; PAM sequence: TAG
taatgtgtaaccattttatt

SEQ ID NO: 130246 - DNA, 20 bp, Artificial Sequence
  Description of Artificial Sequence: Synthetic oligonucleotide
  Target: LAMA2; (+) strand; PAM type: NRG; PAM sequence: AGG
aatgtgtaaccattttattt

SEQ ID NO: 130247 - DNA, 20 bp, Artificial Sequence
  Description of Artificial Sequence: Synthetic oligonucleotide
  Target: LAMA2; (+) strand; PAM type: NRG; PAM sequence: GGG
atgtgtaaccattttattta

SEQ ID NO: 130248 - DNA, 20 bp, Artificial Sequence
  Description of Artificial Sequence: Synthetic oligonucleotide
  Target: LAMA2; (+) strand; PAM type: NRG; PAM sequence: TAG
agggttatctttccatttgt

SEQ ID NO: 130249 - DNA, 20 bp, Artificial Sequence
  Description of Artificial Sequence: Synthetic oligonucleotide
  Target: LAMA2; (+) strand; PAM type: NRG; PAM sequence: TAG
agaaatattatatatataaa

SEQ ID NO: 130250 - DNA, 20 bp, Artificial Sequence
  Description of Artificial Sequence: Synthetic oligonucleotide
  Target: LAMA2; (+) strand; PAM type: NRG; PAM sequence: CAG
atataaatagtttgtttaaa

SEQ ID NO: 130251 - DNA, 20 bp, Artificial Sequence
  Description of Artificial Sequence: Synthetic oligonucleotide
  Target: LAMA2; (+) strand; PAM type: NRG; PAM sequence: AAG
tttgtttaaacagtccgctt

SEQ ID NO: 130252 - DNA, 20 bp, Artificial Sequence
  Description of Artificial Sequence: Synthetic oligonucleotide
  Target: LAMA2; (+) strand; PAM type: NRG; PAM sequence: TAG
tccgcttaagaatatttttc

SEQ ID NO: 130253 - DNA, 20 bp, Artificial Sequence
  Description of Artificial Sequence: Synthetic oligonucleotide
  Target: LAMA2; (+) strand; PAM type: NRG; PAM sequence: CAG
gctacaaataatcttgcaat

SEQ ID NO: 130254 - DNA, 20 bp, Artificial Sequence
  Description of Artificial Sequence: Synthetic oligonucleotide
  Target: LAMA2; (+) strand; PAM type: NRG; PAM sequence: TAG
gctttttgtcattgcatctt

SEQ ID NO: 130255 - DNA, 20 bp, Artificial Sequence
  Description of Artificial Sequence: Synthetic oligonucleotide
  Target: LAMA2; (+) strand; PAM type: NRG; PAM sequence: AGG
ctttttgtcattgcatcttt

SEQ ID NO: 130256 - DNA, 20 bp, Artificial Sequence
  Description of Artificial Sequence: Synthetic oligonucleotide
  Target: LAMA2; (+) strand; PAM type: NRG; PAM sequence: TAG
ttgtcattgcatctttagga

SEQ ID NO: 130257 - DNA, 20 bp, Artificial Sequence
  Description of Artificial Sequence: Synthetic oligonucleotide
  Target: LAMA2; (+) strand; PAM type: NRG; PAM sequence: GAG
tttgtttttttttttttttt

SEQ ID NO: 130258 - DNA, 20 bp, Artificial Sequence
  Description of Artificial Sequence: Synthetic oligonucleotide
  Target: LAMA2; (+) strand; PAM type: NRG; PAM sequence: AGG
ttgttttttttttttttttg

SEQ ID NO: 130259 - DNA, 20 bp, Artificial Sequence
  Description of Artificial Sequence: Synthetic oligonucleotide
  Target: LAMA2; (+) strand; PAM type: NRG; PAM sequence: CAG
ttttttttttttttttgagg

SEQ ID NO: 130260 - DNA, 20 bp, Artificial Sequence
  Description of Artificial Sequence: Synthetic oligonucleotide
  Target: LAMA2; (+) strand; PAM type: NRG; PAM sequence: GAG
ttttttttttttttgaggca

SEQ ID NO: 130261 - DNA, 20 bp, Artificial Sequence
  Description of Artificial Sequence: Synthetic oligonucleotide
  Target: LAMA2; (+) strand; PAM type: NRG; PAM sequence: CAG
cagagtctctctctgtcacc

SEQ ID NO: 130262 - DNA, 20 bp, Artificial Sequence
  Description of Artificial Sequence: Synthetic oligonucleotide
  Target: LAMA2; (+) strand; PAM type: NRG; PAM sequence: AGG
agagtctctctctgtcaccc

SEQ ID NO: 130263 - DNA, 20 bp, Artificial Sequence
  Description of Artificial Sequence: Synthetic oligonucleotide
  Target: LAMA2; (+) strand; PAM type: NRG; PAM sequence: TGG
tctctctctgtcacccaggc

SEQ ID NO: 130264 - DNA, 20 bp, Artificial Sequence
  Description of Artificial Sequence: Synthetic oligonucleotide
  Target: LAMA2; (+) strand; PAM type: NRG; PAM sequence: GAG
tctctctgtcacccaggctg

SEQ ID NO: 130265 - DNA, 20 bp, Artificial Sequence
  Description of Artificial Sequence: Synthetic oligonucleotide
  Target: LAMA2; (+) strand; PAM type: NRG; PAM sequence: CAG
ctgtcacccaggctggagtg

SEQ ID NO: 130266 - DNA, 20 bp, Artificial Sequence
  Description of Artificial Sequence: Synthetic oligonucleotide
  Target: LAMA2; (+) strand; PAM type: NRG; PAM sequence: TGG
tcacccaggctggagtgcag

SEQ ID NO: 130267 - DNA, 20 bp, Artificial Sequence
  Description of Artificial Sequence: Synthetic oligonucleotide
  Target: LAMA2; (+) strand; PAM type: NRG; PAM sequence: CAG
cccaggctggagtgcagtgg

SEQ ID NO: 130268 - DNA, 20 bp, Artificial Sequence
  Description of Artificial Sequence: Synthetic oligonucleotide
  Target: LAMA2; (+) strand; PAM type: NRG; PAM sequence: AGG
ccaggctggagtgcagtggc

SEQ ID NO: 130269 - DNA, 20 bp, Artificial Sequence
  Description of Artificial Sequence: Synthetic oligonucleotide
  Target: LAMA2; (+) strand; PAM type: NRG; PAM sequence: CAG
ggagtgcagtggcaggatct

SEQ ID NO: 130270 - DNA, 20 bp, Artificial Sequence
  Description of Artificial Sequence: Synthetic oligonucleotide
  Target: LAMA2; (+) strand; PAM type: NRG; PAM sequence: CAG
cactgtaaactcttgcttcc

SEQ ID NO: 130271 - DNA, 20 bp, Artificial Sequence
  Description of Artificial Sequence: Synthetic oligonucleotide
  Target: LAMA2; (+) strand; PAM type: NRG; PAM sequence: AGG
actgtaaactcttgcttccc

SEQ ID NO: 130272 - DNA, 20 bp, Artificial Sequence
  Description of Artificial Sequence: Synthetic oligonucleotide
  Target: LAMA2; (+) strand; PAM type: NRG; PAM sequence: AAG
aactcttgcttcccaggttc

SEQ ID NO: 130273 - DNA, 20 bp, Artificial Sequence
  Description of Artificial Sequence: Synthetic oligonucleotide
  Target: LAMA2; (+) strand; PAM type: NRG; PAM sequence: GAG
cttgcttcccaggttcaagt

SEQ ID NO: 130274 - DNA, 20 bp, Artificial Sequence
  Description of Artificial Sequence: Synthetic oligonucleotide
  Target: LAMA2; (+) strand; PAM type: NRG; PAM sequence: CAG
ttcaagtgagtcttctgctt

SEQ ID NO: 130275 - DNA, 20 bp, Artificial Sequence
  Description of Artificial Sequence: Synthetic oligonucleotide
  Target: LAMA2; (+) strand; PAM type: NRG; PAM sequence: TAG
gtcttctgcttcagcctccc

SEQ ID NO: 130276 - DNA, 20 bp, Artificial Sequence
  Description of Artificial Sequence: Synthetic oligonucleotide
  Target: LAMA2; (+) strand; PAM type: NRG; PAM sequence: TAG
ttctgcttcagcctccctag

SEQ ID NO: 130277 - DNA, 20 bp, Artificial Sequence
  Description of Artificial Sequence: Synthetic oligonucleotide
  Target: LAMA2; (+) strand; PAM type: NRG; PAM sequence: AAG
cttcagcctccctagtagct

SEQ ID NO: 130278 - DNA, 20 bp, Artificial Sequence
  Description of Artificial Sequence: Synthetic oligonucleotide
  Target: LAMA2; (+) strand; PAM type: NRG; PAM sequence: CAG
ctccctagtagctaagacta

SEQ ID NO: 130279 - DNA, 20 bp, Artificial Sequence
  Description of Artificial Sequence: Synthetic oligonucleotide
  Target: LAMA2; (+) strand; PAM type: NRG; PAM sequence: AGG
tccctagtagctaagactac

SEQ ID NO: 130280 - DNA, 20 bp, Artificial Sequence
  Description of Artificial Sequence: Synthetic oligonucleotide
  Target: LAMA2; (+) strand; PAM type: NRG; PAM sequence: TGG
acaggcgtgtgccccacacc

SEQ ID NO: 130281 - DNA, 20 bp, Artificial Sequence
  Description of Artificial Sequence: Synthetic oligonucleotide
  Target: LAMA2; (+) strand; PAM type: NRG; PAM sequence: TGG
ttttctttttttcgcatttt

SEQ ID NO: 130282 - DNA, 20 bp, Artificial Sequence
  Description of Artificial Sequence: Synthetic oligonucleotide
  Target: LAMA2; (+) strand; PAM type: NRG; PAM sequence: TAG
tctttttttcgcatttttgg

SEQ ID NO: 130283 - DNA, 20 bp, Artificial Sequence
  Description of Artificial Sequence: Synthetic oligonucleotide
  Target: LAMA2; (+) strand; PAM type: NRG; PAM sequence: GAG
tttttttcgcatttttggta

SEQ ID NO: 130284 - DNA, 20 bp, Artificial Sequence
  Description of Artificial Sequence: Synthetic oligonucleotide
  Target: LAMA2; (+) strand; PAM type: NRG; PAM sequence: CGG
tttcgcatttttggtagaga

SEQ ID NO: 130285 - DNA, 20 bp, Artificial Sequence
  Description of Artificial Sequence: Synthetic oligonucleotide
  Target: LAMA2; (+) strand; PAM type: NRG; PAM sequence: GGG
ttcgcatttttggtagagac

SEQ ID NO: 130286 - DNA, 20 bp, Artificial Sequence
  Description of Artificial Sequence: Synthetic oligonucleotide
  Target: LAMA2; (+) strand; PAM type: NRG; PAM sequence: TGG
agagacgggtttcaccattt

SEQ ID NO: 130287 - DNA, 20 bp, Artificial Sequence
  Description of Artificial Sequence: Synthetic oligonucleotide
  Target: LAMA2; (+) strand; PAM type: NRG; PAM sequence: GAG
acgggtttcaccattttggc

SEQ ID NO: 130288 - DNA, 20 bp, Artificial Sequence
  Description of Artificial Sequence: Synthetic oligonucleotide
  Target: LAMA2; (+) strand; PAM type: NRG; PAM sequence: AGG
cgggtttcaccattttggcg

SEQ ID NO: 130289 - DNA, 20 bp, Artificial Sequence
  Description of Artificial Sequence: Synthetic oligonucleotide
  Target: LAMA2; (+) strand; PAM type: NRG; PAM sequence: TGG
tttcaccattttggcgaggc

SEQ ID NO: 130290 - DNA, 20 bp, Artificial Sequence
  Description of Artificial Sequence: Synthetic oligonucleotide
  Target: LAMA2; (+) strand; PAM type: NRG; PAM sequence: AAG
ttttggcgaggctggtctca

SEQ ID NO: 130291 - DNA, 20 bp, Artificial Sequence
  Description of Artificial Sequence: Synthetic oligonucleotide
  Target: LAMA2; (+) strand; PAM type: NRG; PAM sequence: TGG
tggtctcaaagtcctgacct

SEQ ID NO: 130292 - DNA, 20 bp, Artificial Sequence
  Description of Artificial Sequence: Synthetic oligonucleotide
  Target: LAMA2; (+) strand; PAM type: NRG; PAM sequence: GGG
ggtctcaaagtcctgacctt

SEQ ID NO: 130293 - DNA, 20 bp, Artificial Sequence
  Description of Artificial Sequence: Synthetic oligonucleotide
  Target: LAMA2; (+) strand; PAM type: NRG; PAM sequence: CGG
accttgggatccaaccgcct

SEQ ID NO: 130294 - DNA, 20 bp, Artificial Sequence
  Description of Artificial Sequence: Synthetic oligonucleotide
  Target: LAMA2; (+) strand; PAM type: NRG; PAM sequence: TGG
gcctcggcctcccaaactgc

SEQ ID NO: 130295 - DNA, 20 bp, Artificial Sequence
  Description of Artificial Sequence: Synthetic oligonucleotide
  Target: LAMA2; (+) strand; PAM type: NRG; PAM sequence: GGG
cctcggcctcccaaactgct

SEQ ID NO: 130296 - DNA, 20 bp, Artificial Sequence
  Description of Artificial Sequence: Synthetic oligonucleotide
  Target: LAMA2; (+) strand; PAM type: NRG; PAM sequence: CAG
ctcccaaactgctgggatta

SEQ ID NO: 130297 - DNA, 20 bp, Artificial Sequence
  Description of Artificial Sequence: Synthetic oligonucleotide
  Target: LAMA2; (+) strand; PAM type: NRG; PAM sequence: GAG
actgctgggattacagttgt

SEQ ID NO: 130298 - DNA, 20 bp, Artificial Sequence
  Description of Artificial Sequence: Synthetic oligonucleotide
  Target: LAMA2; (+) strand; PAM type: NRG; PAM sequence: CAG
tgtgagctaccgtgccctgc

SEQ ID NO: 130299 - DNA, 20 bp, Artificial Sequence
  Description of Artificial Sequence: Synthetic oligonucleotide
  Target: LAMA2; (+) strand; PAM type: NRG; PAM sequence: AGG
gtgagctaccgtgccctgcc

SEQ ID NO: 130300 - DNA, 20 bp, Artificial Sequence
  Description of Artificial Sequence: Synthetic oligonucleotide
  Target: LAMA2; (+) strand; PAM type: NRG; PAM sequence: TAG
gctaccgtgccctgccagga

SEQ ID NO: 130301 - DNA, 20 bp, Artificial Sequence
  Description of Artificial Sequence: Synthetic oligonucleotide
  Target: LAMA2; (+) strand; PAM type: NRG; PAM sequence: AAG
ctgccaggatagatttctaa

SEQ ID NO: 130302 - DNA, 20 bp, Artificial Sequence
  Description of Artificial Sequence: Synthetic oligonucleotide
  Target: LAMA2; (+) strand; PAM type: NRG; PAM sequence: CAG
tttctaaaagtgtgattact

SEQ ID NO: 130303 - DNA, 20 bp, Artificial Sequence
  Description of Artificial Sequence: Synthetic oligonucleotide
  Target: LAMA2; (+) strand; PAM type: NRG; PAM sequence: AAG
aagtgtgattactcagtcaa

SEQ ID NO: 130304 - DNA, 20 bp, Artificial Sequence
  Description of Artificial Sequence: Synthetic oligonucleotide
  Target: LAMA2; (+) strand; PAM type: NRG; PAM sequence: AGG
agtgtgattactcagtcaaa

SEQ ID NO: 130305 - DNA, 20 bp, Artificial Sequence
  Description of Artificial Sequence: Synthetic oligonucleotide
  Target: LAMA2; (+) strand; PAM type: NRG; PAM sequence: AAG
attactcagtcaaaaggtaa

SEQ ID NO: 130306 - DNA, 20 bp, Artificial Sequence
  Description of Artificial Sequence: Synthetic oligonucleotide
  Target: LAMA2; (+) strand; PAM type: NRG; PAM sequence: TAG
actcagtcaaaaggtaaaag

SEQ ID NO: 130307 - DNA, 20 bp, Artificial Sequence
  Description of Artificial Sequence: Synthetic oligonucleotide
  Target: LAMA2; (+) strand; PAM type: NRG; PAM sequence: TAG
gtaaaagtagataaatttat

SEQ ID NO: 130308 - DNA, 20 bp, Artificial Sequence
  Description of Artificial Sequence: Synthetic oligonucleotide
  Target: LAMA2; (+) strand; PAM type: NRG; PAM sequence: TGG
gatgttgtcaaattcttctt

SEQ ID NO: 130309 - DNA, 20 bp, Artificial Sequence
  Description of Artificial Sequence: Synthetic oligonucleotide
  Target: LAMA2; (+) strand; PAM type: NRG; PAM sequence: GGG
atgttgtcaaattcttcttt

SEQ ID NO: 130310 - DNA, 20 bp, Artificial Sequence
  Description of Artificial Sequence: Synthetic oligonucleotide
  Target: LAMA2; (+) strand; PAM type: NRG; PAM sequence: GAG
gttgtcaaattcttctttgg

SEQ ID NO: 130311 - DNA, 20 bp, Artificial Sequence
  Description of Artificial Sequence: Synthetic oligonucleotide
  Target: LAMA2; (+) strand; PAM type: NRG; PAM sequence: AAG
taatgccattttccaatcct

SEQ ID NO: 130312 - DNA, 20 bp, Artificial Sequence
  Description of Artificial Sequence: Synthetic oligonucleotide
  Target: LAMA2; (+) strand; PAM type: NRG; PAM sequence: CAG
ccattttccaatcctaagat

SEQ ID NO: 130313 - DNA, 20 bp, Artificial Sequence
  Description of Artificial Sequence: Synthetic oligonucleotide
  Target: LAMA2; (+) strand; PAM type: NRG; PAM sequence: GAG
caatcctaagatcagcatgt

SEQ ID NO: 130314 - DNA, 20 bp, Artificial Sequence
  Description of Artificial Sequence: Synthetic oligonucleotide
  Target: LAMA2; (+) strand; PAM type: NRG; PAM sequence: TAG
gagaatgtgttctgtttcca

SEQ ID NO: 130315 - DNA, 20 bp, Artificial Sequence
  Description of Artificial Sequence: Synthetic oligonucleotide
  Target: LAMA2; (+) strand; PAM type: NRG; PAM sequence: AGG
agaatgtgttctgtttccat

SEQ ID NO: 130316 - DNA, 20 bp, Artificial Sequence
  Description of Artificial Sequence: Synthetic oligonucleotide
  Target: LAMA2; (+) strand; PAM type: NRG; PAM sequence: AAG
ttgccaaactttatgttcca

SEQ ID NO: 130317 - DNA, 20 bp, Artificial Sequence
  Description of Artificial Sequence: Synthetic oligonucleotide
  Target: LAMA2; (+) strand; PAM type: NRG; PAM sequence: TGG
ctttatgttccaaagctttg

SEQ ID NO: 130318 - DNA, 20 bp, Artificial Sequence
  Description of Artificial Sequence: Synthetic oligonucleotide
  Target: LAMA2; (+) strand; PAM type: NRG; PAM sequence: GGG
tttatgttccaaagctttgt

SEQ ID NO: 130319 - DNA, 20 bp, Artificial Sequence
  Description of Artificial Sequence: Synthetic oligonucleotide
  Target: LAMA2; (+) strand; PAM type: NRG; PAM sequence: GGG
ttatgttccaaagctttgtg

SEQ ID NO: 130320 - DNA, 20 bp, Artificial Sequence
  Description of Artificial Sequence: Synthetic oligonucleotide
  Target: LAMA2; (+) strand; PAM type: NRG; PAM sequence: TGG
aagctttgtggggatatgtc

SEQ ID NO: 130321 - DNA, 20 bp, Artificial Sequence
  Description of Artificial Sequence: Synthetic oligonucleotide
  Target: LAMA2; (+) strand; PAM type: NRG; PAM sequence: TAG
ctttgtggggatatgtctgg

SEQ ID NO: 130322 - DNA, 20 bp, Artificial Sequence
  Description of Artificial Sequence: Synthetic oligonucleotide
  Target: LAMA2; (+) strand; PAM type: NRG; PAM sequence: TGG
ggatatgtctggtagttgat

SEQ ID NO: 130323 - DNA, 20 bp, Artificial Sequence
  Description of Artificial Sequence: Synthetic oligonucleotide
  Target: LAMA2; (+) strand; PAM type: NRG; PAM sequence: GGG
gatatgtctggtagttgatt

SEQ ID NO: 130324 - DNA, 20 bp, Artificial Sequence
  Description of Artificial Sequence: Synthetic oligonucleotide
  Target: LAMA2; (+) strand; PAM type: NRG; PAM sequence: GGG
atatgtctggtagttgattg

SEQ ID NO: 130325 - DNA, 20 bp, Artificial Sequence
  Description of Artificial Sequence: Synthetic oligonucleotide
  Target: LAMA2; (+) strand; PAM type: NRG; PAM sequence: CAG
tgtctggtagttgattgggg

SEQ ID NO: 130326 - DNA, 20 bp, Artificial Sequence
  Description of Artificial Sequence: Synthetic oligonucleotide
  Target: LAMA2; (+) strand; PAM type: NRG; PAM sequence: GAG
tctggtagttgattggggca

SEQ ID NO: 130327 - DNA, 20 bp, Artificial Sequence
  Description of Artificial Sequence: Synthetic oligonucleotide
  Target: LAMA2; (+) strand; PAM type: NRG; PAM sequence: GAG
ttgattggggcagagaaaat

SEQ ID NO: 130328 - DNA, 20 bp, Artificial Sequence
  Description of Artificial Sequence: Synthetic oligonucleotide
  Target: LAMA2; (+) strand; PAM type: NRG; PAM sequence: TAG
cagagaaaatgagaaaaact

SEQ ID NO: 130329 - DNA, 20 bp, Artificial Sequence
  Description of Artificial Sequence: Synthetic oligonucleotide
  Target: LAMA2; (+) strand; PAM type: NRG; PAM sequence: AAG
aatgagaaaaacttagtatg

SEQ ID NO: 130330 - DNA, 20 bp, Artificial Sequence
  Description of Artificial Sequence: Synthetic oligonucleotide
  Target: LAMA2; (+) strand; PAM type: NRG; PAM sequence: AAG
gaaaaacttagtatgaagaa

SEQ ID NO: 130331 - DNA, 20 bp, Artificial Sequence
  Description of Artificial Sequence: Synthetic oligonucleotide
  Target: LAMA2; (+) strand; PAM type: NRG; PAM sequence: GAG
aaaacttagtatgaagaaaa

SEQ ID NO: 130332 - DNA, 20 bp, Artificial Sequence
  Description of Artificial Sequence: Synthetic oligonucleotide
  Target: LAMA2; (+) strand; PAM type: NRG; PAM sequence: TAG
tagtatgaagaaaagagtct

SEQ ID NO: 130333 - DNA, 20 bp, Artificial Sequence
  Description of Artificial Sequence: Synthetic oligonucleotide
  Target: LAMA2; (+) strand; PAM type: NRG; PAM sequence: AGG
agtatgaagaaaagagtctt

SEQ ID NO: 130334 - DNA, 20 bp, Artificial Sequence
  Description of Artificial Sequence: Synthetic oligonucleotide
  Target: LAMA2; (+) strand; PAM type: NRG; PAM sequence: AAG
agagtcttaggcttgaaatt

SEQ ID NO: 130335 - DNA, 20 bp, Artificial Sequence
  Description of Artificial Sequence: Synthetic oligonucleotide
  Target: LAMA2; (+) strand; PAM type: NRG; PAM sequence: CAG
ttaggcttgaaattaagaca

SEQ ID NO: 130336 - DNA, 20 bp, Artificial Sequence
  Description of Artificial Sequence: Synthetic oligonucleotide
  Target: LAMA2; (+) strand; PAM type: NRG; PAM sequence: AGG
taggcttgaaattaagacac

SEQ ID NO: 130337 - DNA, 20 bp, Artificial Sequence
  Description of Artificial Sequence: Synthetic oligonucleotide
  Target: LAMA2; (+) strand; PAM type: NRG; PAM sequence: TAG
gctgatcacttgtttcacct

SEQ ID NO: 130338 - DNA, 20 bp, Artificial Sequence
  Description of Artificial Sequence: Synthetic oligonucleotide
  Target: LAMA2; (+) strand; PAM type: NRG; PAM sequence: AAG
tcacttgtttcaccttagac

SEQ ID NO: 130339 - DNA, 20 bp, Artificial Sequence
  Description of Artificial Sequence: Synthetic oligonucleotide
  Target: LAMA2; (+) strand; PAM type: NRG; PAM sequence: CAG
ttgtttcaccttagacaagt

SEQ ID NO: 130340 - DNA, 20 bp, Artificial Sequence
  Description of Artificial Sequence: Synthetic oligonucleotide
  Target: LAMA2; (+) strand; PAM type: NRG; PAM sequence: CAG
aacttttttcatctgctcca

SEQ ID NO: 130341 - DNA, 20 bp, Artificial Sequence
  Description of Artificial Sequence: Synthetic oligonucleotide
  Target: LAMA2; (+) strand; PAM type: NRG; PAM sequence: TGG
tcatctgctccacagatctg

SEQ ID NO: 130342 - DNA, 20 bp, Artificial Sequence
  Description of Artificial Sequence: Synthetic oligonucleotide
  Target: LAMA2; (+) strand; PAM type: NRG; PAM sequence: AAG
ctgctccacagatctgtggt

SEQ ID NO: 130343 - DNA, 20 bp, Artificial Sequence
  Description of Artificial Sequence: Synthetic oligonucleotide
  Target: LAMA2; (+) strand; PAM type: NRG; PAM sequence: AGG
tgctccacagatctgtggta

SEQ ID NO: 130344 - DNA, 20 bp, Artificial Sequence
  Description of Artificial Sequence: Synthetic oligonucleotide
  Target: LAMA2; (+) strand; PAM type: NRG; PAM sequence: GAG
atctgtggtaaggattaaat

SEQ ID NO: 130345 - DNA, 20 bp, Artificial Sequence
  Description of Artificial Sequence: Synthetic oligonucleotide
  Target: LAMA2; (+) strand; PAM type: NRG; PAM sequence: CAG
gacatccatgaaacatatga

SEQ ID NO: 130346 - DNA, 20 bp, Artificial Sequence
  Description of Artificial Sequence: Synthetic oligonucleotide
  Target: LAMA2; (+) strand; PAM type: NRG; PAM sequence: TAG
tatgacagaataccttgcca

SEQ ID NO: 130347 - DNA, 20 bp, Artificial Sequence
  Description of Artificial Sequence: Synthetic oligonucleotide
  Target: LAMA2; (+) strand; PAM type: NRG; PAM sequence: TGG
gacagaataccttgccatag

SEQ ID NO: 130348 - DNA, 20 bp, Artificial Sequence
  Description of Artificial Sequence: Synthetic oligonucleotide
  Target: LAMA2; (+) strand; PAM type: NRG; PAM sequence: CAG
accttgccatagtggctact

SEQ ID NO: 130349 - DNA, 20 bp, Artificial Sequence
  Description of Artificial Sequence: Synthetic oligonucleotide
  Target: LAMA2; (+) strand; PAM type: NRG; PAM sequence: AAG
atagtggctactcagcatgt

SEQ ID NO: 130350 - DNA, 20 bp, Artificial Sequence
  Description of Artificial Sequence: Synthetic oligonucleotide
  Target: LAMA2; (+) strand; PAM type: NRG; PAM sequence: GAG
agttttttgtttgtttcttt

SEQ ID NO: 130351 - DNA, 20 bp, Artificial Sequence
  Description of Artificial Sequence: Synthetic oligonucleotide
  Target: LAMA2; (+) strand; PAM type: NRG; PAM sequence: CAG
ttttgtttgtttctttgaga

SEQ ID NO: 130352 - DNA, 20 bp, Artificial Sequence
  Description of Artificial Sequence: Synthetic oligonucleotide
  Target: LAMA2; (+) strand; PAM type: NRG; PAM sequence: GAG
ttgtttgtttctttgagaca

SEQ ID NO: 130353 - DNA, 20 bp, Artificial Sequence
  Description of Artificial Sequence: Synthetic oligonucleotide
  Target: LAMA2; (+) strand; PAM type: NRG; PAM sequence: CAG
acagagtctccctctgtcac

SEQ ID NO: 130354 - DNA, 20 bp, Artificial Sequence
  Description of Artificial Sequence: Synthetic oligonucleotide
  Target: LAMA2; (+) strand; PAM type: NRG; PAM sequence: AGG
cagagtctccctctgtcacc

SEQ ID NO: 130355 - DNA, 20 bp, Artificial Sequence
  Description of Artificial Sequence: Synthetic oligonucleotide
  Target: LAMA2; (+) strand; PAM type: NRG; PAM sequence: TGG
gtctccctctgtcaccaggc

SEQ ID NO: 130356 - DNA, 20 bp, Artificial Sequence
  Description of Artificial Sequence: Synthetic oligonucleotide
  Target: LAMA2; (+) strand; PAM type: NRG; PAM sequence: GAG
ctccctctgtcaccaggctg

SEQ ID NO: 130357 - DNA, 20 bp, Artificial Sequence
  Description of Artificial Sequence: Synthetic oligonucleotide
  Target: LAMA2; (+) strand; PAM type: NRG; PAM sequence: CAG
tctgtcaccaggctggagtg

SEQ ID NO: 130358 - DNA, 20 bp, Artificial Sequence
  Description of Artificial Sequence: Synthetic oligonucleotide
  Target: LAMA2; (+) strand; PAM type: NRG; PAM sequence: TGG
gtcaccaggctggagtgcag

SEQ ID NO: 130359 - DNA, 20 bp, Artificial Sequence
  Description of Artificial Sequence: Synthetic oligonucleotide
  Target: LAMA2; (+) strand; PAM type: NRG; PAM sequence: GAG
ccaggctggagtgcagtggc

SEQ ID NO: 130360 - DNA, 20 bp, Artificial Sequence
  Description of Artificial Sequence: Synthetic oligonucleotide
  Target: LAMA2; (+) strand; PAM type: NRG; PAM sequence: TGG
tcactgcaacctctgcctgc

SEQ ID NO: 130361 - DNA, 20 bp, Artificial Sequence
  Description of Artificial Sequence: Synthetic oligonucleotide
  Target: LAMA2; (+) strand; PAM type: NRG; PAM sequence: AAG
aacctctgcctgctggattc

SEQ ID NO: 130362 - DNA, 20 bp, Artificial Sequence
  Description of Artificial Sequence: Synthetic oligonucleotide
  Target: LAMA2; (+) strand; PAM type: NRG; PAM sequence: TAG
caagtgattctcctcccaaa

SEQ ID NO: 130363 - DNA, 20 bp, Artificial Sequence
  Description of Artificial Sequence: Synthetic oligonucleotide
  Target: LAMA2; (+) strand; PAM type: NRG; PAM sequence: TGG
tgattctcctcccaaatagc

SEQ ID NO: 130364 - DNA, 20 bp, Artificial Sequence
  Description of Artificial Sequence: Synthetic oligonucleotide
  Target: LAMA2; (+) strand; PAM type: NRG; PAM sequence: GGG
gattctcctcccaaatagct

SEQ ID NO: 130365 - DNA, 20 bp, Artificial Sequence
  Description of Artificial Sequence: Synthetic oligonucleotide
  Target: LAMA2; (+) strand; PAM type: NRG; PAM sequence: CAG
ctcccaaatagctgggatta

SEQ ID NO: 130366 - DNA, 20 bp, Artificial Sequence
  Description of Artificial Sequence: Synthetic oligonucleotide
  Target: LAMA2; (+) strand; PAM type: NRG; PAM sequence: AGG
tcccaaatagctgggattac

SEQ ID NO: 130367 - DNA, 20 bp, Artificial Sequence
  Description of Artificial Sequence: Synthetic oligonucleotide
  Target: LAMA2; (+) strand; PAM type: NRG; PAM sequence: CGG
tagctgggattacaggcatc

SEQ ID NO: 130368 - DNA, 20 bp, Artificial Sequence
  Description of Artificial Sequence: Synthetic oligonucleotide
  Target: LAMA2; (+) strand; PAM type: NRG; PAM sequence: CAG
ggattacaggcatccggcac

SEQ ID NO: 130369 - DNA, 20 bp, Artificial Sequence
  Description of Artificial Sequence: Synthetic oligonucleotide
  Target: LAMA2; (+) strand; PAM type: NRG; PAM sequence: AGG
gattacaggcatccggcacc

SEQ ID NO: 130370 - DNA, 20 bp, Artificial Sequence
  Description of Artificial Sequence: Synthetic oligonucleotide
  Target: LAMA2; (+) strand; PAM type: NRG; PAM sequence: CAG
caggcatccggcaccaggcc

SEQ ID NO: 130371 - DNA, 20 bp, Artificial Sequence
  Description of Artificial Sequence: Synthetic oligonucleotide
  Target: LAMA2; (+) strand; PAM type: NRG; PAM sequence: TAG
cagctaattttttgtatttt

SEQ ID NO: 130372 - DNA, 20 bp, Artificial Sequence
  Description of Artificial Sequence: Synthetic oligonucleotide
  Target: LAMA2; (+) strand; PAM type: NRG; PAM sequence: TAG
ctaattttttgtatttttag

SEQ ID NO: 130373 - DNA, 20 bp, Artificial Sequence
  Description of Artificial Sequence: Synthetic oligonucleotide
  Target: LAMA2; (+) strand; PAM type: NRG; PAM sequence: GAG
aattttttgtatttttagta

SEQ ID NO: 130374 - DNA, 20 bp, Artificial Sequence
  Description of Artificial Sequence: Synthetic oligonucleotide
  Target: LAMA2; (+) strand; PAM type: NRG; PAM sequence: CGG
ttttgtatttttagtagaga

SEQ ID NO: 130375 - DNA, 20 bp, Artificial Sequence
  Description of Artificial Sequence: Synthetic oligonucleotide
  Target: LAMA2; (+) strand; PAM type: NRG; PAM sequence: GGG
tttgtatttttagtagagac

SEQ ID NO: 130376 - DNA, 20 bp, Artificial Sequence
  Description of Artificial Sequence: Synthetic oligonucleotide
  Target: LAMA2; (+) strand; PAM type: NRG; PAM sequence: GGG
ttgtatttttagtagagacg

SEQ ID NO: 130377 - DNA, 20 bp, Artificial Sequence
  Description of Artificial Sequence: Synthetic oligonucleotide
  Target: LAMA2; (+) strand; PAM type: NRG; PAM sequence: TGG
gagacggggtttcaccatgt

SEQ ID NO: 130378 - DNA, 20 bp, Artificial Sequence
  Description of Artificial Sequence: Synthetic oligonucleotide
  Target: LAMA2; (+) strand; PAM type: NRG; PAM sequence: CAG
cggggtttcaccatgttggc

SEQ ID NO: 130379 - DNA, 20 bp, Artificial Sequence
  Description of Artificial Sequence: Synthetic oligonucleotide
  Target: LAMA2; (+) strand; PAM type: NRG; PAM sequence: AGG
ggggtttcaccatgttggcc

SEQ ID NO: 130380 - DNA, 20 bp, Artificial Sequence
  Description of Artificial Sequence: Synthetic oligonucleotide
  Target: LAMA2; (+) strand; PAM type: NRG; PAM sequence: TGG
tttcaccatgttggccaggc

SEQ ID NO: 130381 - DNA, 20 bp, Artificial Sequence
  Description of Artificial Sequence: Synthetic oligonucleotide
  Target: LAMA2; (+) strand; PAM type: NRG; PAM sequence: CGG
tggtctcgaactcctgacct

SEQ ID NO: 130382 - DNA, 20 bp, Artificial Sequence
  Description of Artificial Sequence: Synthetic oligonucleotide
  Target: LAMA2; (+) strand; PAM type: NRG; PAM sequence: GGG
ggtctcgaactcctgacctc

SEQ ID NO: 130383 - DNA, 20 bp, Artificial Sequence
  Description of Artificial Sequence: Synthetic oligonucleotide
  Target: LAMA2; (+) strand; PAM type: NRG; PAM sequence: TGG
ctcgggtaatctgctcgtct

SEQ ID NO: 130384 - DNA, 20 bp, Artificial Sequence
  Description of Artificial Sequence: Synthetic oligonucleotide
  Target: LAMA2; (+) strand; PAM type: NRG; PAM sequence: AAG
ctgctcgtcttggcctccca

SEQ ID NO: 130385 - DNA, 20 bp, Artificial Sequence
  Description of Artificial Sequence: Synthetic oligonucleotide
  Target: LAMA2; (+) strand; PAM type: NRG; PAM sequence: TGG
gtcttggcctcccaaagtgc

SEQ ID NO: 130386 - DNA, 20 bp, Artificial Sequence
  Description of Artificial Sequence: Synthetic oligonucleotide
  Target: LAMA2; (+) strand; PAM type: NRG; PAM sequence: GGG
tcttggcctcccaaagtgct

SEQ ID NO: 130387 - DNA, 20 bp, Artificial Sequence
  Description of Artificial Sequence: Synthetic oligonucleotide
  Target: LAMA2; (+) strand; PAM type: NRG; PAM sequence: TAG
ctcccaaagtgctgggatta

SEQ ID NO: 130388 - DNA, 20 bp, Artificial Sequence
  Description of Artificial Sequence: Synthetic oligonucleotide
  Target: LAMA2; (+) strand; PAM type: NRG; PAM sequence: AGG
tcccaaagtgctgggattat

SEQ ID NO: 130389 - DNA, 20 bp, Artificial Sequence
  Description of Artificial Sequence: Synthetic oligonucleotide
  Target: LAMA2; (+) strand; PAM type: NRG; PAM sequence: CGG
taggcatgaaccactgtgcc

SEQ ID NO: 130390 - DNA, 20 bp, Artificial Sequence
  Description of Artificial Sequence: Synthetic oligonucleotide
  Target: LAMA2; (+) strand; PAM type: NRG; PAM sequence: TAG
atgaaccactgtgcccggcc

SEQ ID NO: 130391 - DNA, 20 bp, Artificial Sequence
  Description of Artificial Sequence: Synthetic oligonucleotide
  Target: LAMA2; (+) strand; PAM type: NRG; PAM sequence: TAG
actgtgcccggcctagcatg

SEQ ID NO: 130392 - DNA, 20 bp, Artificial Sequence
  Description of Artificial Sequence: Synthetic oligonucleotide
  Target: LAMA2; (+) strand; PAM type: NRG; PAM sequence: AAG
gcctagcatgtagtttttaa

SEQ ID NO: 130393 - DNA, 20 bp, Artificial Sequence
  Description of Artificial Sequence: Synthetic oligonucleotide
  Target: LAMA2; (+) strand; PAM type: NRG; PAM sequence: AGG
cctagcatgtagtttttaaa

SEQ ID NO: 130394 - DNA, 20 bp, Artificial Sequence
  Description of Artificial Sequence: Synthetic oligonucleotide
  Target: LAMA2; (+) strand; PAM type: NRG; PAM sequence: AAG
catgtagtttttaaaaggca

SEQ ID NO: 130395 - DNA, 20 bp, Artificial Sequence
  Description of Artificial Sequence: Synthetic oligonucleotide
  Target: LAMA2; (+) strand; PAM type: NRG; PAM sequence: AAG
caaagcaattgaaatttgta

SEQ ID NO: 130396 - DNA, 20 bp, Artificial Sequence
  Description of Artificial Sequence: Synthetic oligonucleotide
  Target: LAMA2; (+) strand; PAM type: NRG; PAM sequence: TGG
attgaaatttgtaaagcatt

SEQ ID NO: 130397 - DNA, 20 bp, Artificial Sequence
  Description of Artificial Sequence: Synthetic oligonucleotide
  Target: LAMA2; (+) strand; PAM type: NRG; PAM sequence: AAG
aagcatttggatatctacaa

SEQ ID NO: 130398 - DNA, 20 bp, Artificial Sequence
  Description of Artificial Sequence: Synthetic oligonucleotide
  Target: LAMA2; (+) strand; PAM type: NRG; PAM sequence: GAG
atctacaaaagttatttgac

SEQ ID NO: 130399 - DNA, 20 bp, Artificial Sequence
  Description of Artificial Sequence: Synthetic oligonucleotide
  Target: LAMA2; (+) strand; PAM type: NRG; PAM sequence: AAG
gttatttgacgagaacatac

SEQ ID NO: 130400 - DNA, 20 bp, Artificial Sequence
  Description of Artificial Sequence: Synthetic oligonucleotide
  Target: LAMA2; (+) strand; PAM type: NRG; PAM sequence: AGG
ttatttgacgagaacataca

SEQ ID NO: 130401 - DNA, 20 bp, Artificial Sequence
  Description of Artificial Sequence: Synthetic oligonucleotide
  Target: LAMA2; (+) strand; PAM type: NRG; PAM sequence: GGG
tatttgacgagaacatacaa

SEQ ID NO: 130402 - DNA, 20 bp, Artificial Sequence
  Description of Artificial Sequence: Synthetic oligonucleotide
  Target: LAMA2; (+) strand; PAM type: NRG; PAM sequence: GGG
atttgacgagaacatacaag

SEQ ID NO: 130403 - DNA, 20 bp, Artificial Sequence
  Description of Artificial Sequence: Synthetic oligonucleotide
  Target: LAMA2; (+) strand; PAM type: NRG; PAM sequence: TGG
atacaaggggacatctctta

SEQ ID NO: 130404 - DNA, 20 bp, Artificial Sequence
  Description of Artificial Sequence: Synthetic oligonucleotide
  Target: LAMA2; (+) strand; PAM type: NRG; PAM sequence: TGG
aggggacatctcttatggac

SEQ ID NO: 130405 - DNA, 20 bp, Artificial Sequence
  Description of Artificial Sequence: Synthetic oligonucleotide
  Target: LAMA2; (+) strand; PAM type: NRG; PAM sequence: TAG
ctcttatggactggtaattt

SEQ ID NO: 130406 - DNA, 20 bp, Artificial Sequence
  Description of Artificial Sequence: Synthetic oligonucleotide
  Target: LAMA2; (+) strand; PAM type: NRG; PAM sequence: AGG
tcttatggactggtaatttt

SEQ ID NO: 130407 - DNA, 20 bp, Artificial Sequence
  Description of Artificial Sequence: Synthetic oligonucleotide
  Target: LAMA2; (+) strand; PAM type: NRG; PAM sequence: TGG
cctaatgccaaaccaacaca

SEQ ID NO: 130408 - DNA, 20 bp, Artificial Sequence
  Description of Artificial Sequence: Synthetic oligonucleotide
  Target: LAMA2; (+) strand; PAM type: NRG; PAM sequence: GGG
ctaatgccaaaccaacacat

SEQ ID NO: 130409 - DNA, 20 bp, Artificial Sequence
  Description of Artificial Sequence: Synthetic oligonucleotide
  Target: LAMA2; (+) strand; PAM type: NRG; PAM sequence: GGG
taatgccaaaccaacacatg

SEQ ID NO: 130410 - DNA, 20 bp, Artificial Sequence
  Description of Artificial Sequence: Synthetic oligonucleotide
  Target: LAMA2; (+) strand; PAM type: NRG; PAM sequence: AAG
gccaaaccaacacatggggt

SEQ ID NO: 130411 - DNA, 20 bp, Artificial Sequence
  Description of Artificial Sequence: Synthetic oligonucleotide
  Target: LAMA2; (+) strand; PAM type: NRG; PAM sequence: AAG
ccaacacatggggtaagaat

SEQ ID NO: 130412 - DNA, 20 bp, Artificial Sequence
  Description of Artificial Sequence: Synthetic oligonucleotide
  Target: LAMA2; (+) strand; PAM type: NRG; PAM sequence: TGG
ggggtaagaataagtgatgc

SEQ ID NO: 130413 - DNA, 20 bp, Artificial Sequence
  Description of Artificial Sequence: Synthetic oligonucleotide
  Target: LAMA2; (+) strand; PAM type: NRG; PAM sequence: TAG
ttctctatcaaatgtacttt

SEQ ID NO: 130414 - DNA, 20 bp, Artificial Sequence
  Description of Artificial Sequence: Synthetic oligonucleotide
  Target: LAMA2; (+) strand; PAM type: NRG; PAM sequence: AGG
tctctatcaaatgtactttt

SEQ ID NO: 130415 - DNA, 20 bp, Artificial Sequence
  Description of Artificial Sequence: Synthetic oligonucleotide
  Target: LAMA2; (+) strand; PAM type: NRG; PAM sequence: AAG
taggtaaaaaaaaatatgca

SEQ ID NO: 130416 - DNA, 20 bp, Artificial Sequence
  Description of Artificial Sequence: Synthetic oligonucleotide
  Target: LAMA2; (+) strand; PAM type: NRG; PAM sequence: TGG
caaagtataaaatatttgta

SEQ ID NO: 130417 - DNA, 20 bp, Artificial Sequence
  Description of Artificial Sequence: Synthetic oligonucleotide
  Target: LAMA2; (+) strand; PAM type: NRG; PAM sequence: GGG
aaagtataaaatatttgtat

SEQ ID NO: 130418 - DNA, 20 bp, Artificial Sequence
  Description of Artificial Sequence: Synthetic oligonucleotide
  Target: LAMA2; (+) strand; PAM type: NRG; PAM sequence: AAG
gtatgggcaaatgttttact

SEQ ID NO: 130419 - DNA, 20 bp, Artificial Sequence
  Description of Artificial Sequence: Synthetic oligonucleotide
  Target: LAMA2; (+) strand; PAM type: NRG; PAM sequence: AGG
tatgggcaaatgttttacta

SEQ ID NO: 130420 - DNA, 20 bp, Artificial Sequence
  Description of Artificial Sequence: Synthetic oligonucleotide
  Target: LAMA2; (+) strand; PAM type: NRG; PAM sequence: GGG
atgggcaaatgttttactaa

SEQ ID NO: 130421 - DNA, 20 bp, Artificial Sequence
  Description of Artificial Sequence: Synthetic oligonucleotide
  Target: LAMA2; (+) strand; PAM type: NRG; PAM sequence: TGG
aatgttttactaagggtgtt

SEQ ID NO: 130422 - DNA, 20 bp, Artificial Sequence
  Description of Artificial Sequence: Synthetic oligonucleotide
  Target: LAMA2; (+) strand; PAM type: NRG; PAM sequence: GGG
atgttttactaagggtgttt

SEQ ID NO: 130423 - DNA, 20 bp, Artificial Sequence
  Description of Artificial Sequence: Synthetic oligonucleotide
  Target: LAMA2; (+) strand; PAM type: NRG; PAM sequence: CAG
ttgaacaaaacctgctaaac

SEQ ID NO: 130424 - DNA, 20 bp, Artificial Sequence
  Description of Artificial Sequence: Synthetic oligonucleotide
  Target: LAMA2; (+) strand; PAM type: NRG; PAM sequence: AAG
aaaacctgctaaaccagcat

SEQ ID NO: 130425 - DNA, 20 bp, Artificial Sequence
  Description of Artificial Sequence: Synthetic oligonucleotide
  Target: LAMA2; (+) strand; PAM type: NRG; PAM sequence: AAG
gcataagatgcactgaacta

SEQ ID NO: 130426 - DNA, 20 bp, Artificial Sequence
  Description of Artificial Sequence: Synthetic oligonucleotide
  Target: LAMA2; (+) strand; PAM type: NRG; PAM sequence: CAG
agatgcactgaactaaagtg

SEQ ID NO: 130427 - DNA, 20 bp, Artificial Sequence
  Description of Artificial Sequence: Synthetic oligonucleotide
  Target: LAMA2; (+) strand; PAM type: NRG; PAM sequence: CAG
tgcactgaactaaagtgcag

SEQ ID NO: 130428 - DNA, 20 bp, Artificial Sequence
  Description of Artificial Sequence: Synthetic oligonucleotide
  Target: LAMA2; (+) strand; PAM type: NRG; PAM sequence: GAG
cactgaactaaagtgcagca

SEQ ID NO: 130429 - DNA, 20 bp, Artificial Sequence
  Description of Artificial Sequence: Synthetic oligonucleotide
  Target: LAMA2; (+) strand; PAM type: NRG; PAM sequence: CAG
tgcagcagagatgctactgt

SEQ ID NO: 130430 - DNA, 20 bp, Artificial Sequence
  Description of Artificial Sequence: Synthetic oligonucleotide
  Target: LAMA2; (+) strand; PAM type: NRG; PAM sequence: AAG
gcagagatgctactgtcagc

SEQ ID NO: 130431 - DNA, 20 bp, Artificial Sequence
  Description of Artificial Sequence: Synthetic oligonucleotide
  Target: LAMA2; (+) strand; PAM type: NRG; PAM sequence: GAG
agagatgctactgtcagcaa

SEQ ID NO: 130432 - DNA, 20 bp, Artificial Sequence
  Description of Artificial Sequence: Synthetic oligonucleotide
  Target: LAMA2; (+) strand; PAM type: NRG; PAM sequence: AAG
gatgctactgtcagcaagag

SEQ ID NO: 130433 - DNA, 20 bp, Artificial Sequence
  Description of Artificial Sequence: Synthetic oligonucleotide
  Target: LAMA2; (+) strand; PAM type: NRG; PAM sequence: AGG
atgctactgtcagcaagaga

SEQ ID NO: 130434 - DNA, 20 bp, Artificial Sequence
  Description of Artificial Sequence: Synthetic oligonucleotide
  Target: LAMA2; (+) strand; PAM type: NRG; PAM sequence: AAG
gtcagcaagagaaggattca

SEQ ID NO: 130435 - DNA, 20 bp, Artificial Sequence
  Description of Artificial Sequence: Synthetic oligonucleotide
  Target: LAMA2; (+) strand; PAM type: NRG; PAM sequence: GAG
cagcaagagaaggattcaaa

SEQ ID NO: 130436 - DNA, 20 bp, Artificial Sequence
  Description of Artificial Sequence: Synthetic oligonucleotide
  Target: LAMA2; (+) strand; PAM type: NRG; PAM sequence: GAG
gcaagagaaggattcaaaga

SEQ ID NO: 130437 - DNA, 20 bp, Artificial Sequence
  Description of Artificial Sequence: Synthetic oligonucleotide
  Target: LAMA2; (+) strand; PAM type: NRG; PAM sequence: AGG
caagagaaggattcaaagag

SEQ ID NO: 130438 - DNA, 20 bp, Artificial Sequence
  Description of Artificial Sequence: Synthetic oligonucleotide
  Target: LAMA2; (+) strand; PAM type: NRG; PAM sequence: AAG
gagaaggattcaaagagagg

SEQ ID NO: 130439 - DNA, 20 bp, Artificial Sequence
  Description of Artificial Sequence: Synthetic oligonucleotide
  Target: LAMA2; (+) strand; PAM type: NRG; PAM sequence: GAG
aaagagaggaagcccaatcc

SEQ ID NO: 130440 - DNA, 20 bp, Artificial Sequence
  Description of Artificial Sequence: Synthetic oligonucleotide
  Target: LAMA2; (+) strand; PAM type: NRG; PAM sequence: TGG
agcccaatccgagcattacc

SEQ ID NO: 130441 - DNA, 20 bp, Artificial Sequence
  Description of Artificial Sequence: Synthetic oligonucleotide
  Target: LAMA2; (+) strand; PAM type: NRG; PAM sequence: CAG
gcattacctggacaattaaa

SEQ ID NO: 130442 - DNA, 20 bp, Artificial Sequence
  Description of Artificial Sequence: Synthetic oligonucleotide
  Target: LAMA2; (+) strand; PAM type: NRG; PAM sequence: CAG
tacctggacaattaaacagt

SEQ ID NO: 130443 - DNA, 20 bp, Artificial Sequence
  Description of Artificial Sequence: Synthetic oligonucleotide
  Target: LAMA2; (+) strand; PAM type: NRG; PAM sequence: TGG
acaattaaacagtcagttat

SEQ ID NO: 130444 - DNA, 20 bp, Artificial Sequence
  Description of Artificial Sequence: Synthetic oligonucleotide
  Target: LAMA2; (+) strand; PAM type: NRG; PAM sequence: GGG
caattaaacagtcagttatt

SEQ ID NO: 130445 - DNA, 20 bp, Artificial Sequence
  Description of Artificial Sequence: Synthetic oligonucleotide
  Target: LAMA2; (+) strand; PAM type: NRG; PAM sequence: TAG
attgggattttcacaattct

SEQ ID NO: 130446 - DNA, 20 bp, Artificial Sequence
  Description of Artificial Sequence: Synthetic oligonucleotide
  Target: LAMA2; (+) strand; PAM type: NRG; PAM sequence: TAG
tttttaactttcacaattct

SEQ ID NO: 130447 - DNA, 20 bp, Artificial Sequence
  Description of Artificial Sequence: Synthetic oligonucleotide
  Target: LAMA2; (+) strand; PAM type: NRG; PAM sequence: GAG
ttcttagcttttttaacttt

SEQ ID NO: 130448 - DNA, 20 bp, Artificial Sequence
  Description of Artificial Sequence: Synthetic oligonucleotide
  Target: LAMA2; (+) strand; PAM type: NRG; PAM sequence: TGG
ttgagttttaaaaatcatga

SEQ ID NO: 130449 - DNA, 20 bp, Artificial Sequence
  Description of Artificial Sequence: Synthetic oligonucleotide
  Target: LAMA2; (+) strand; PAM type: NRG; PAM sequence: GAG
gagttttaaaaatcatgatg

SEQ ID NO: 130450 - DNA, 20 bp, Artificial Sequence
  Description of Artificial Sequence: Synthetic oligonucleotide
  Target: LAMA2; (+) strand; PAM type: NRG; PAM sequence: GAG
gttttaaaaatcatgatgga

SEQ ID NO: 130451 - DNA, 20 bp, Artificial Sequence
  Description of Artificial Sequence: Synthetic oligonucleotide
  Target: LAMA2; (+) strand; PAM type: NRG; PAM sequence: TAG
aatcatgatggagagaaatt

SEQ ID NO: 130452 - DNA, 20 bp, Artificial Sequence
  Description of Artificial Sequence: Synthetic oligonucleotide
  Target: LAMA2; (+) strand; PAM type: NRG; PAM sequence: TGG
agttcttaacttttattttc

SEQ ID NO: 130453 - DNA, 20 bp, Artificial Sequence
  Description of Artificial Sequence: Synthetic oligonucleotide
  Target: LAMA2; (+) strand; PAM type: NRG; PAM sequence: GGG
gttcttaacttttattttct

SEQ ID NO: 130454 - DNA, 20 bp, Artificial Sequence
  Description of Artificial Sequence: Synthetic oligonucleotide
  Target: LAMA2; (+) strand; PAM type: NRG; PAM sequence: AAG
tttattttctgggcttgatg

SEQ ID NO: 130455 - DNA, 20 bp, Artificial Sequence
  Description of Artificial Sequence: Synthetic oligonucleotide
  Target: LAMA2; (+) strand; PAM type: NRG; PAM sequence: CAG
tgatgaagattgaatttcat

SEQ ID NO: 130456 - DNA, 20 bp, Artificial Sequence
  Description of Artificial Sequence: Synthetic oligonucleotide
  Target: LAMA2; (+) strand; PAM type: NRG; PAM sequence: GAG
atgaagattgaatttcatca

SEQ ID NO: 130457 - DNA, 20 bp, Artificial Sequence
  Description of Artificial Sequence: Synthetic oligonucleotide
  Target: LAMA2; (+) strand; PAM type: NRG; PAM sequence: GAG
gattgaatttcatcagagat

SEQ ID NO: 130458 - DNA, 20 bp, Artificial Sequence
  Description of Artificial Sequence: Synthetic oligonucleotide
  Target: LAMA2; (+) strand; PAM type: NRG; PAM sequence: AAG
agctaaacaaattaaaactg

SEQ ID NO: 130459 - DNA, 20 bp, Artificial Sequence
  Description of Artificial Sequence: Synthetic oligonucleotide
  Target: LAMA2; (+) strand; PAM type: NRG; PAM sequence: TAG
taaaactgaagcatttaatt

SEQ ID NO: 130460 - DNA, 20 bp, Artificial Sequence
  Description of Artificial Sequence: Synthetic oligonucleotide
  Target: LAMA2; (+) strand; PAM type: NRG; PAM sequence: CAG
ttagaaaactcaaatttctt

SEQ ID NO: 130461 - DNA, 20 bp, Artificial Sequence
  Description of Artificial Sequence: Synthetic oligonucleotide
  Target: LAMA2; (+) strand; PAM type: NRG; PAM sequence: AAG
ctaaaattgttcatttaaac

SEQ ID NO: 130462 - DNA, 20 bp, Artificial Sequence
  Description of Artificial Sequence: Synthetic oligonucleotide
  Target: LAMA2; (+) strand; PAM type: NRG; PAM sequence: TAG
gttcatttaaacaagtttgt

SEQ ID NO: 130463 - DNA, 20 bp, Artificial Sequence
  Description of Artificial Sequence: Synthetic oligonucleotide
  Target: LAMA2; (+) strand; PAM type: NRG; PAM sequence: TAG
ttgttagattctcaaattaa

SEQ ID NO: 130464 - DNA, 20 bp, Artificial Sequence
  Description of Artificial Sequence: Synthetic oligonucleotide
  Target: LAMA2; (+) strand; PAM type: NRG; PAM sequence: AGG
tgttagattctcaaattaat

SEQ ID NO: 130465 - DNA, 20 bp, Artificial Sequence
  Description of Artificial Sequence: Synthetic oligonucleotide
  Target: LAMA2; (+) strand; PAM type: NRG; PAM sequence: TGG
aatatgaaattattctttcc

SEQ ID NO: 130466 - DNA, 20 bp, Artificial Sequence
  Description of Artificial Sequence: Synthetic oligonucleotide
  Target: LAMA2; (+) strand; PAM type: NRG; PAM sequence: AAG
tgaaattattctttcctgga

SEQ ID NO: 130467 - DNA, 20 bp, Artificial Sequence
  Description of Artificial Sequence: Synthetic oligonucleotide
  Target: LAMA2; (+) strand; PAM type: NRG; PAM sequence: TGG
ttctttcctggaaagttaaa

SEQ ID NO: 130468 - DNA, 20 bp, Artificial Sequence
  Description of Artificial Sequence: Synthetic oligonucleotide
  Target: LAMA2; (+) strand; PAM type: NRG; PAM sequence: CAG
tggaaagttaaatggaaaaa

SEQ ID NO: 130469 - DNA, 20 bp, Artificial Sequence
  Description of Artificial Sequence: Synthetic oligonucleotide
  Target: LAMA2; (+) strand; PAM type: NRG; PAM sequence: AGG
ggaaagttaaatggaaaaac

SEQ ID NO: 130470 - DNA, 20 bp, Artificial Sequence
  Description of Artificial Sequence: Synthetic oligonucleotide
  Target: LAMA2; (+) strand; PAM type: NRG; PAM sequence: CAG
agttaaatggaaaaacagga

SEQ ID NO: 130471 - DNA, 20 bp, Artificial Sequence
  Description of Artificial Sequence: Synthetic oligonucleotide
  Target: LAMA2; (+) strand; PAM type: NRG; PAM sequence: AAG
ttttataactaatacatatt

SEQ ID NO: 130472 - DNA, 20 bp, Artificial Sequence
  Description of Artificial Sequence: Synthetic oligonucleotide
  Target: LAMA2; (+) strand; PAM type: NRG; PAM sequence: AAG
taactaatacatattaagtc

SEQ ID NO: 130473 - DNA, 20 bp, Artificial Sequence
  Description of Artificial Sequence: Synthetic oligonucleotide
  Target: LAMA2; (+) strand; PAM type: NRG; PAM sequence: TAG
atacatattaagtcaagaaa

SEQ ID NO: 130474 - DNA, 20 bp, Artificial Sequence
  Description of Artificial Sequence: Synthetic oligonucleotide
  Target: LAMA2; (+) strand; PAM type: NRG; PAM sequence: AAG
tattaagtcaagaaatagta

SEQ ID NO: 130475 - DNA, 20 bp, Artificial Sequence
  Description of Artificial Sequence: Synthetic oligonucleotide
  Target: LAMA2; (+) strand; PAM type: NRG; PAM sequence: AGG
attaagtcaagaaatagtaa

SEQ ID NO: 130476 - DNA, 20 bp, Artificial Sequence
  Description of Artificial Sequence: Synthetic oligonucleotide
  Target: LAMA2; (+) strand; PAM type: NRG; PAM sequence: AAG
gtaaaggattatttgtcttc

SEQ ID NO: 130477 - DNA, 20 bp, Artificial Sequence
  Description of Artificial Sequence: Synthetic oligonucleotide
  Target: LAMA2; (+) strand; PAM type: NRG; PAM sequence: AAG
cttcaagaaaacatcctgta

SEQ ID NO: 130478 - DNA, 20 bp, Artificial Sequence
  Description of Artificial Sequence: Synthetic oligonucleotide
  Target: LAMA2; (+) strand; PAM type: NRG; PAM sequence: TGG
agaaaacatcctgtaaagaa

SEQ ID NO: 130479 - DNA, 20 bp, Artificial Sequence
  Description of Artificial Sequence: Synthetic oligonucleotide
  Target: LAMA2; (+) strand; PAM type: NRG; PAM sequence: TGG
cctgtaaagaatggcaatgt

SEQ ID NO: 130480 - DNA, 20 bp, Artificial Sequence
  Description of Artificial Sequence: Synthetic oligonucleotide
  Target: LAMA2; (+) strand; PAM type: NRG; PAM sequence: TGG
gtaaagaatggcaatgttgg

SEQ ID NO: 130481 - DNA, 20 bp, Artificial Sequence
  Description of Artificial Sequence: Synthetic oligonucleotide
  Target: LAMA2; (+) strand; PAM type: NRG; PAM sequence: TAG
atggcaatgttggtggtata

SEQ ID NO: 130482 - DNA, 20 bp, Artificial Sequence
  Description of Artificial Sequence: Synthetic oligonucleotide
  Target: LAMA2; (+) strand; PAM type: NRG; PAM sequence: AAG
atagatgtaaaatgcttaaa

SEQ ID NO: 130483 - DNA, 20 bp, Artificial Sequence
  Description of Artificial Sequence: Synthetic oligonucleotide
  Target: LAMA2; (+) strand; PAM type: NRG; PAM sequence: TAG
gcttaaaaagaatgattatc

SEQ ID NO: 130484 - DNA, 20 bp, Artificial Sequence
  Description of Artificial Sequence: Synthetic oligonucleotide
  Target: LAMA2; (+) strand; PAM type: NRG; PAM sequence: AAG
taaaaagaatgattatctag

SEQ ID NO: 130485 - DNA, 20 bp, Artificial Sequence
  Description of Artificial Sequence: Synthetic oligonucleotide
  Target: LAMA2; (+) strand; PAM type: NRG; PAM sequence: AAG
tacatgttataattatcttt

SEQ ID NO: 130486 - DNA, 20 bp, Artificial Sequence
  Description of Artificial Sequence: Synthetic oligonucleotide
  Target: LAMA2; (+) strand; PAM type: NRG; PAM sequence: AAG
tctgccttctctaattctgt

SEQ ID NO: 130487 - DNA, 20 bp, Artificial Sequence
  Description of Artificial Sequence: Synthetic oligonucleotide
  Target: LAMA2; (+) strand; PAM type: NRG; PAM sequence: AAG
aatttttaaaatatttttaa

SEQ ID NO: 130488 - DNA, 20 bp, Artificial Sequence
  Description of Artificial Sequence: Synthetic oligonucleotide
  Target: LAMA2; (+) strand; PAM type: NRG; PAM sequence: TAG
ttttaaaatatttttaaaag

SEQ ID NO: 130489 - DNA, 20 bp, Artificial Sequence
  Description of Artificial Sequence: Synthetic oligonucleotide
  Target: LAMA2; (+) strand; PAM type: NRG; PAM sequence: TGG
tttttaaaagtagctgaaaa

SEQ ID NO: 130490 - DNA, 20 bp, Artificial Sequence
  Description of Artificial Sequence: Synthetic oligonucleotide
  Target: LAMA2; (+) strand; PAM type: NRG; PAM sequence: GGG
ttttaaaagtagctgaaaat

SEQ ID NO: 130491 - DNA, 20 bp, Artificial Sequence
  Description of Artificial Sequence: Synthetic oligonucleotide
  Target: LAMA2; (+) strand; PAM type: NRG; PAM sequence: GGG
tttaaaagtagctgaaaatg

SEQ ID NO: 130492 - DNA, 20 bp, Artificial Sequence
  Description of Artificial Sequence: Synthetic oligonucleotide
  Target: LAMA2; (+) strand; PAM type: NRG; PAM sequence: AAG
aaatggggctccatccttca

SEQ ID NO: 130493 - DNA, 20 bp, Artificial Sequence
  Description of Artificial Sequence: Synthetic oligonucleotide
  Target: LAMA2; (+) strand; PAM type: NRG; PAM sequence: TAG
agttctaacaatacaattta

SEQ ID NO: 130494 - DNA, 20 bp, Artificial Sequence
  Description of Artificial Sequence: Synthetic oligonucleotide
  Target: LAMA2; (+) strand; PAM type: NRG; PAM sequence: AAG
taacaatacaatttatagta

SEQ ID NO: 130495 - DNA, 20 bp, Artificial Sequence
  Description of Artificial Sequence: Synthetic oligonucleotide
  Target: LAMA2; (+) strand; PAM type: NRG; PAM sequence: GAG
ttatagtaaagaatatgtat

SEQ ID NO: 130496 - DNA, 20 bp, Artificial Sequence
  Description of Artificial Sequence: Synthetic oligonucleotide
  Target: LAMA2; (+) strand; PAM type: NRG; PAM sequence: TAG
gtatgagaaacatttgttct

SEQ ID NO: 130497 - DNA, 20 bp, Artificial Sequence
  Description of Artificial Sequence: Synthetic oligonucleotide
  Target: LAMA2; (+) strand; PAM type: NRG; PAM sequence: AAG
tgagaaacatttgttcttag

SEQ ID NO: 130498 - DNA, 20 bp, Artificial Sequence
  Description of Artificial Sequence: Synthetic oligonucleotide
  Target: LAMA2; (+) strand; PAM type: NRG; PAM sequence: CAG
aacatttgttcttagaagtt

SEQ ID NO: 130499 - DNA, 20 bp, Artificial Sequence
  Description of Artificial Sequence: Synthetic oligonucleotide
  Target: LAMA2; (+) strand; PAM type: NRG; PAM sequence: AAG
aaaatcaaatatataatatg

SEQ ID NO: 130500 - DNA, 20 bp, Artificial Sequence
  Description of Artificial Sequence: Synthetic oligonucleotide
  Target: LAMA2; (+) strand; PAM type: NRG; PAM sequence: TAG
tcaaatatataatatgaaga

SEQ ID NO: 130501 - DNA, 20 bp, Artificial Sequence
  Description of Artificial Sequence: Synthetic oligonucleotide
  Target: LAMA2; (+) strand; PAM type: NRG; PAM sequence: TAG
aatatgaagatagaataatg

SEQ ID NO: 130502 - DNA, 20 bp, Artificial Sequence
  Description of Artificial Sequence: Synthetic oligonucleotide
  Target: LAMA2; (+) strand; PAM type: NRG; PAM sequence: GAG
tatgaagatagaataatgta

SEQ ID NO: 130503 - DNA, 20 bp, Artificial Sequence
  Description of Artificial Sequence: Synthetic oligonucleotide
  Target: LAMA2; (+) strand; PAM type: NRG; PAM sequence: AAG
gaagatagaataatgtagag

SEQ ID NO: 130504 - DNA, 20 bp, Artificial Sequence
  Description of Artificial Sequence: Synthetic oligonucleotide
  Target: LAMA2; (+) strand; PAM type: NRG; PAM sequence: AAG
agaataatgtagagaagtta

SEQ ID NO: 130505 - DNA, 20 bp, Artificial Sequence
  Description of Artificial Sequence: Synthetic oligonucleotide
  Target: LAMA2; (+) strand; PAM type: NRG; PAM sequence: GAG
aataatgtagagaagttaaa

SEQ ID NO: 130506 - DNA, 20 bp, Artificial Sequence
  Description of Artificial Sequence: Synthetic oligonucleotide
  Target: LAMA2; (+) strand; PAM type: NRG; PAM sequence: AGG
ataatgtagagaagttaaag

SEQ ID NO: 130507 - DNA, 20 bp, Artificial Sequence
  Description of Artificial Sequence: Synthetic oligonucleotide
  Target: LAMA2; (+) strand; PAM type: NRG; PAM sequence: GAG
aatgtagagaagttaaagag

SEQ ID NO: 130508 - DNA, 20 bp, Artificial Sequence
  Description of Artificial Sequence: Synthetic oligonucleotide
  Target: LAMA2; (+) strand; PAM type: NRG; PAM sequence: AAG
tagagaagttaaagaggaga

SEQ ID NO: 130509 - DNA, 20 bp, Artificial Sequence
  Description of Artificial Sequence: Synthetic oligonucleotide
  Target: LAMA2; (+) strand; PAM type: NRG; PAM sequence: AGG
agagaagttaaagaggagaa

SEQ ID NO: 130510 - DNA, 20 bp, Artificial Sequence
  Description of Artificial Sequence: Synthetic oligonucleotide
  Target: LAMA2; (+) strand; PAM type: NRG; PAM sequence: GGG
gagaagttaaagaggagaaa

SEQ ID NO: 130511 - DNA, 20 bp, Artificial Sequence
  Description of Artificial Sequence: Synthetic oligonucleotide
  Target: LAMA2; (+) strand; PAM type: NRG; PAM sequence: GGG
agaagttaaagaggagaaag

SEQ ID NO: 130512 - DNA, 20 bp, Artificial Sequence
  Description of Artificial Sequence: Synthetic oligonucleotide
  Target: LAMA2; (+) strand; PAM type: NRG; PAM sequence: AAG
ggggtgactgattctgaatc

SEQ ID NO: 130513 - DNA, 20 bp, Artificial Sequence
  Description of Artificial Sequence: Synthetic oligonucleotide
  Target: LAMA2; (+) strand; PAM type: NRG; PAM sequence: GAG
tgactgattctgaatcaagt

SEQ ID NO: 130514 - DNA, 20 bp, Artificial Sequence
  Description of Artificial Sequence: Synthetic oligonucleotide
  Target: LAMA2; (+) strand; PAM type: NRG; PAM sequence: TAG
attctgaatcaagtgagttt

SEQ ID NO: 130515 - DNA, 20 bp, Artificial Sequence
  Description of Artificial Sequence: Synthetic oligonucleotide
  Target: LAMA2; (+) strand; PAM type: NRG; PAM sequence: AAG
agtgagttttagcttctttt

SEQ ID NO: 130516 - DNA, 20 bp, Artificial Sequence
  Description of Artificial Sequence: Synthetic oligonucleotide
  Target: LAMA2; (+) strand; PAM type: NRG; PAM sequence: TAG
atgtataaaacatcaattta

SEQ ID NO: 130517 - DNA, 20 bp, Artificial Sequence
  Description of Artificial Sequence: Synthetic oligonucleotide
  Target: LAMA2; (+) strand; PAM type: NRG; PAM sequence: TAG
taaaacatcaatttatagaa

SEQ ID NO: 130518 - DNA, 20 bp, Artificial Sequence
  Description of Artificial Sequence: Synthetic oligonucleotide
  Target: LAMA2; (+) strand; PAM type: NRG; PAM sequence: TAG
tagtatttgaattacctgcc

SEQ ID NO: 130519 - DNA, 20 bp, Artificial Sequence
  Description of Artificial Sequence: Synthetic oligonucleotide
  Target: LAMA2; (+) strand; PAM type: NRG; PAM sequence: AGG
agtatttgaattacctgcct

SEQ ID NO: 130520 - DNA, 20 bp, Artificial Sequence
  Description of Artificial Sequence: Synthetic oligonucleotide
  Target: LAMA2; (+) strand; PAM type: NRG; PAM sequence: AAG
attacctgcctaggctttgc

SEQ ID NO: 130521 - DNA, 20 bp, Artificial Sequence
  Description of Artificial Sequence: Synthetic oligonucleotide
  Target: LAMA2; (+) strand; PAM type: NRG; PAM sequence: TAG
ctgcctaggctttgcaagcc

SEQ ID NO: 130522 - DNA, 20 bp, Artificial Sequence
  Description of Artificial Sequence: Synthetic oligonucleotide
  Target: LAMA2; (+) strand; PAM type: NRG; PAM sequence: TAG
aattcttgatgtacattttc

SEQ ID NO: 130523 - DNA, 20 bp, Artificial Sequence
  Description of Artificial Sequence: Synthetic oligonucleotide
  Target: LAMA2; (+) strand; PAM type: NRG; PAM sequence: TGG
cttgatgtacattttctagc

SEQ ID NO: 130524 - DNA, 20 bp, Artificial Sequence
  Description of Artificial Sequence: Synthetic oligonucleotide
  Target: LAMA2; (+) strand; PAM type: NRG; PAM sequence: GGG
ttgatgtacattttctagct

SEQ ID NO: 130525 - DNA, 20 bp, Artificial Sequence
  Description of Artificial Sequence: Synthetic oligonucleotide
  Target: LAMA2; (+) strand; PAM type: NRG; PAM sequence: GGG
tgatgtacattttctagctg

SEQ ID NO: 130526 - DNA, 20 bp, Artificial Sequence
  Description of Artificial Sequence: Synthetic oligonucleotide
  Target: LAMA2; (+) strand; PAM type: NRG; PAM sequence: GGG
gatgtacattttctagctgg

SEQ ID NO: 130527 - DNA, 20 bp, Artificial Sequence
  Description of Artificial Sequence: Synthetic oligonucleotide
  Target: LAMA2; (+) strand; PAM type: NRG; PAM sequence: TAG
acattttctagctgggggac

SEQ ID NO: 130528 - DNA, 20 bp, Artificial Sequence
  Description of Artificial Sequence: Synthetic oligonucleotide
  Target: LAMA2; (+) strand; PAM type: NRG; PAM sequence: AAG
tttctagctgggggactaga

SEQ ID NO: 130529 - DNA, 20 bp, Artificial Sequence
  Description of Artificial Sequence: Synthetic oligonucleotide
  Target: LAMA2; (+) strand; PAM type: NRG; PAM sequence: AAG
tagctgggggactagaaagc

SEQ ID NO: 130530 - DNA, 20 bp, Artificial Sequence
  Description of Artificial Sequence: Synthetic oligonucleotide
  Target: LAMA2; (+) strand; PAM type: NRG; PAM sequence: CAG
aaagcaagacactttccttt

SEQ ID NO: 130531 - DNA, 20 bp, Artificial Sequence
  Description of Artificial Sequence: Synthetic oligonucleotide
  Target: LAMA2; (+) strand; PAM type: NRG; PAM sequence: TGG
acactttcctttcagtacct

SEQ ID NO: 130532 - DNA, 20 bp, Artificial Sequence
  Description of Artificial Sequence: Synthetic oligonucleotide
  Target: LAMA2; (+) strand; PAM type: NRG; PAM sequence: GGG
cactttcctttcagtacctt

SEQ ID NO: 130533 - DNA, 20 bp, Artificial Sequence
  Description of Artificial Sequence: Synthetic oligonucleotide
  Target: LAMA2; (+) strand; PAM type: NRG; PAM sequence: AAG
ccttgggctccccatctatt

SEQ ID NO: 130534 - DNA, 20 bp, Artificial Sequence
  Description of Artificial Sequence: Synthetic oligonucleotide
  Target: LAMA2; (+) strand; PAM type: NRG; PAM sequence: TGG
tgggctccccatctattaag

SEQ ID NO: 130535 - DNA, 20 bp, Artificial Sequence
  Description of Artificial Sequence: Synthetic oligonucleotide
  Target: LAMA2; (+) strand; PAM type: NRG; PAM sequence: GAG
ggctccccatctattaagtg

SEQ ID NO: 130536 - DNA, 20 bp, Artificial Sequence
  Description of Artificial Sequence: Synthetic oligonucleotide
  Target: LAMA2; (+) strand; PAM type: NRG; PAM sequence: AAG
ctgccttgcaccgctgtcct

SEQ ID NO: 130537 - DNA, 20 bp, Artificial Sequence
  Description of Artificial Sequence: Synthetic oligonucleotide
  Target: LAMA2; (+) strand; PAM type: NRG; PAM sequence: AGG
tgccttgcaccgctgtccta

SEQ ID NO: 130538 - DNA, 20 bp, Artificial Sequence
  Description of Artificial Sequence: Synthetic oligonucleotide
  Target: LAMA2; (+) strand; PAM type: NRG; PAM sequence: GAG
caccgctgtcctaaggattt

SEQ ID NO: 130539 - DNA, 20 bp, Artificial Sequence
  Description of Artificial Sequence: Synthetic oligonucleotide
  Target: LAMA2; (+) strand; PAM type: NRG; PAM sequence: AAG
tgtcctaaggatttgagata

SEQ ID NO: 130540 - DNA, 20 bp, Artificial Sequence
  Description of Artificial Sequence: Synthetic oligonucleotide
  Target: LAMA2; (+) strand; PAM type: NRG; PAM sequence: AAG
gatttgagataaagcataca

SEQ ID NO: 130541 - DNA, 20 bp, Artificial Sequence
  Description of Artificial Sequence: Synthetic oligonucleotide
  Target: LAMA2; (+) strand; PAM type: NRG; PAM sequence: AGG
atttgagataaagcatacaa

SEQ ID NO: 130542 - DNA, 20 bp, Artificial Sequence
  Description of Artificial Sequence: Synthetic oligonucleotide
  Target: LAMA2; (+) strand; PAM type: NRG; PAM sequence: GGG
tttgagataaagcatacaaa

SEQ ID NO: 130543 - DNA, 20 bp, Artificial Sequence
  Description of Artificial Sequence: Synthetic oligonucleotide
  Target: LAMA2; (+) strand; PAM type: NRG; PAM sequence: TGG
gataaagcatacaaagggct

SEQ ID NO: 130544 - DNA, 20 bp, Artificial Sequence
  Description of Artificial Sequence: Synthetic oligonucleotide
  Target: LAMA2; (+) strand; PAM type: NRG; PAM sequence: TAG
catacaaagggcttggcaca

SEQ ID NO: 130545 - DNA, 20 bp, Artificial Sequence
  Description of Artificial Sequence: Synthetic oligonucleotide
  Target: LAMA2; (+) strand; PAM type: NRG; PAM sequence: TAG
acaaagggcttggcacatag

SEQ ID NO: 130546 - DNA, 20 bp, Artificial Sequence
  Description of Artificial Sequence: Synthetic oligonucleotide
  Target: LAMA2; (+) strand; PAM type: NRG; PAM sequence: AGG
caaagggcttggcacatagt

SEQ ID NO: 130547 - DNA, 20 bp, Artificial Sequence
  Description of Artificial Sequence: Synthetic oligonucleotide
  Target: LAMA2; (+) strand; PAM type: NRG; PAM sequence: TGG
acatagtaggtgctcctaaa

SEQ ID NO: 130548 - DNA, 20 bp, Artificial Sequence
  Description of Artificial Sequence: Synthetic oligonucleotide
  Target: LAMA2; (+) strand; PAM type: NRG; PAM sequence: CAG
ggtaactttattcttcacat

SEQ ID NO: 130549 - DNA, 20 bp, Artificial Sequence
  Description of Artificial Sequence: Synthetic oligonucleotide
  Target: LAMA2; (+) strand; PAM type: NRG; PAM sequence: AGG
gtaactttattcttcacatc

SEQ ID NO: 130550 - DNA, 20 bp, Artificial Sequence
  Description of Artificial Sequence: Synthetic oligonucleotide
  Target: LAMA2; (+) strand; PAM type: NRG; PAM sequence: AAG
ggctttgcttatacttataa

SEQ ID NO: 130551 - DNA, 20 bp, Artificial Sequence
  Description of Artificial Sequence: Synthetic oligonucleotide
  Target: LAMA2; (+) strand; PAM type: NRG; PAM sequence: CAG
ttgcttatacttataaaagc

SEQ ID NO: 130552 - DNA, 20 bp, Artificial Sequence
  Description of Artificial Sequence: Synthetic oligonucleotide
  Target: LAMA2; (+) strand; PAM type: NRG; PAM sequence: TAG
acttataaaagccagttttg

SEQ ID NO: 130553 - DNA, 20 bp, Artificial Sequence
  Description of Artificial Sequence: Synthetic oligonucleotide
  Target: LAMA2; (+) strand; PAM type: NRG; PAM sequence: TAG
tttgtagataatttgctgaa

SEQ ID NO: 130554 - DNA, 20 bp, Artificial Sequence
  Description of Artificial Sequence: Synthetic oligonucleotide
  Target: LAMA2; (+) strand; PAM type: NRG; PAM sequence: AAG
ataatttgctgaatagaact

SEQ ID NO: 130555 - DNA, 20 bp, Artificial Sequence
  Description of Artificial Sequence: Synthetic oligonucleotide
  Target: LAMA2; (+) strand; PAM type: NRG; PAM sequence: TAG
ttgctgaatagaactaagaa

SEQ ID NO: 130556 - DNA, 20 bp, Artificial Sequence
  Description of Artificial Sequence: Synthetic oligonucleotide
  Target: LAMA2; (+) strand; PAM type: NRG; PAM sequence: TGG
ctaagaatagttataaatat

SEQ ID NO: 130557 - DNA, 20 bp, Artificial Sequence
  Description of Artificial Sequence: Synthetic oligonucleotide
  Target: LAMA2; (+) strand; PAM type: NRG; PAM sequence: GGG
taagaatagttataaatatt

SEQ ID NO: 130558 - DNA, 20 bp, Artificial Sequence
  Description of Artificial Sequence: Synthetic oligonucleotide
  Target: LAMA2; (+) strand; PAM type: NRG; PAM sequence: TAG
aatagttataaatattgggt

SEQ ID NO: 130559 - DNA, 20 bp, Artificial Sequence
  Description of Artificial Sequence: Synthetic oligonucleotide
  Target: LAMA2; (+) strand; PAM type: NRG; PAM sequence: GAG
aatattgggttagtttattt

SEQ ID NO: 130560 - DNA, 20 bp, Artificial Sequence
  Description of Artificial Sequence: Synthetic oligonucleotide
  Target: LAMA2; (+) strand; PAM type: NRG; PAM sequence: TGG
tatgataacataccataaac

SEQ ID NO: 130561 - DNA, 20 bp, Artificial Sequence
  Description of Artificial Sequence: Synthetic oligonucleotide
  Target: LAMA2; (+) strand; PAM type: NRG; PAM sequence: TGG
ataacataccataaactgga

SEQ ID NO: 130562 - DNA, 20 bp, Artificial Sequence
  Description of Artificial Sequence: Synthetic oligonucleotide
  Target: LAMA2; (+) strand; PAM type: NRG; PAM sequence: AAG
ccataaactggatggattat

SEQ ID NO: 130563 - DNA, 20 bp, Artificial Sequence
  Description of Artificial Sequence: Synthetic oligonucleotide
  Target: LAMA2; (+) strand; PAM type: NRG; PAM sequence: AAG
aactggatggattataagca

SEQ ID NO: 130564 - DNA, 20 bp, Artificial Sequence
  Description of Artificial Sequence: Synthetic oligonucleotide
  Target: LAMA2; (+) strand; PAM type: NRG; PAM sequence: CAG
caaagataatttatttctca

SEQ ID NO: 130565 - DNA, 20 bp, Artificial Sequence
  Description of Artificial Sequence: Synthetic oligonucleotide
  Target: LAMA2; (+) strand; PAM type: NRG; PAM sequence: TGG
ataatttatttctcacagtc

SEQ ID NO: 130566 - DNA, 20 bp, Artificial Sequence
  Description of Artificial Sequence: Synthetic oligonucleotide
  Target: LAMA2; (+) strand; PAM type: NRG; PAM sequence: GAG
aatttatttctcacagtctg

SEQ ID NO: 130567 - DNA, 20 bp, Artificial Sequence
  Description of Artificial Sequence: Synthetic oligonucleotide
  Target: LAMA2; (+) strand; PAM type: NRG; PAM sequence: AGG
atttatttctcacagtctgg

SEQ ID NO: 130568 - DNA, 20 bp, Artificial Sequence
  Description of Artificial Sequence: Synthetic oligonucleotide
  Target: LAMA2; (+) strand; PAM type: NRG; PAM sequence: TGG
atttctcacagtctggaggc

SEQ ID NO: 130569 - DNA, 20 bp, Artificial Sequence
  Description of Artificial Sequence: Synthetic oligonucleotide
  Target: LAMA2; (+) strand; PAM type: NRG; PAM sequence: GGG
tttctcacagtctggaggct

SEQ ID NO: 130570 - DNA, 20 bp, Artificial Sequence
  Description of Artificial Sequence: Synthetic oligonucleotide
  Target: LAMA2; (+) strand; PAM type: NRG; PAM sequence: AAG
ctcacagtctggaggctggg

SEQ ID NO: 130571 - DNA, 20 bp, Artificial Sequence
  Description of Artificial Sequence: Synthetic oligonucleotide
  Target: LAMA2; (+) strand; PAM type: NRG; PAM sequence: AAG
gtctggaggctgggaagtcc

SEQ ID NO: 130572 - DNA, 20 bp, Artificial Sequence
  Description of Artificial Sequence: Synthetic oligonucleotide
  Target: LAMA2; (+) strand; PAM type: NRG; PAM sequence: CAG
ggctgggaagtccaagacca

SEQ ID NO: 130573 - DNA, 20 bp, Artificial Sequence
  Description of Artificial Sequence: Synthetic oligonucleotide
  Target: LAMA2; (+) strand; PAM type: NRG; PAM sequence: CAG
tgggaagtccaagaccacag

SEQ ID NO: 130574 - DNA, 20 bp, Artificial Sequence
  Description of Artificial Sequence: Synthetic oligonucleotide
  Target: LAMA2; (+) strand; PAM type: NRG; PAM sequence: TGG
gaagtccaagaccacagcag

SEQ ID NO: 130575 - DNA, 20 bp, Artificial Sequence
  Description of Artificial Sequence: Synthetic oligonucleotide
  Target: LAMA2; (+) strand; PAM type: NRG; PAM sequence: CAG
gaccacagcagtggcaaatt

SEQ ID NO: 130576 - DNA, 20 bp, Artificial Sequence
  Description of Artificial Sequence: Synthetic oligonucleotide
  Target: LAMA2; (+) strand; PAM type: NRG; PAM sequence: CAG
gcagtggcaaattcagtgtc

SEQ ID NO: 130577 - DNA, 20 bp, Artificial Sequence
  Description of Artificial Sequence: Synthetic oligonucleotide
  Target: LAMA2; (+) strand; PAM type: NRG; PAM sequence: GAG
tggcaaattcagtgtccagt

SEQ ID NO: 130578 - DNA, 20 bp, Artificial Sequence
  Description of Artificial Sequence: Synthetic oligonucleotide
  Target: LAMA2; (+) strand; PAM type: NRG; PAM sequence: TAG
agtacctgctttcctgttta

SEQ ID NO: 130579 - DNA, 20 bp, Artificial Sequence
  Description of Artificial Sequence: Synthetic oligonucleotide
  Target: LAMA2; (+) strand; PAM type: NRG; PAM sequence: CAG
cctgctttcctgtttataga

SEQ ID NO: 130580 - DNA, 20 bp, Artificial Sequence
  Description of Artificial Sequence: Synthetic oligonucleotide
  Target: LAMA2; (+) strand; PAM type: NRG; PAM sequence: TAG
gacagcacgttttttttctg

SEQ ID NO: 130581 - DNA, 20 bp, Artificial Sequence
  Description of Artificial Sequence: Synthetic oligonucleotide
  Target: LAMA2; (+) strand; PAM type: NRG; PAM sequence: AAG
tctgtagcctcgcatgatga

SEQ ID NO: 130582 - DNA, 20 bp, Artificial Sequence
  Description of Artificial Sequence: Synthetic oligonucleotide
  Target: LAMA2; (+) strand; PAM type: NRG; PAM sequence: AGG
ctgtagcctcgcatgatgaa

SEQ ID NO: 130583 - DNA, 20 bp, Artificial Sequence
  Description of Artificial Sequence: Synthetic oligonucleotide
  Target: LAMA2; (+) strand; PAM type: NRG; PAM sequence: GGG
tgtagcctcgcatgatgaaa

SEQ ID NO: 130584 - DNA, 20 bp, Artificial Sequence
  Description of Artificial Sequence: Synthetic oligonucleotide
  Target: LAMA2; (+) strand; PAM type: NRG; PAM sequence: GAG
tagcctcgcatgatgaaagg

SEQ ID NO: 130585 - DNA, 20 bp, Artificial Sequence
  Description of Artificial Sequence: Synthetic oligonucleotide
  Target: LAMA2; (+) strand; PAM type: NRG; PAM sequence: AAG
ctcgcatgatgaaagggagc

SEQ ID NO: 130586 - DNA, 20 bp, Artificial Sequence
  Description of Artificial Sequence: Synthetic oligonucleotide
  Target: LAMA2; (+) strand; PAM type: NRG; PAM sequence: GAG
cgcatgatgaaagggagcaa

SEQ ID NO: 130587 - DNA, 20 bp, Artificial Sequence
  Description of Artificial Sequence: Synthetic oligonucleotide
  Target: LAMA2; (+) strand; PAM type: NRG; PAM sequence: AGG
gcatgatgaaagggagcaag

SEQ ID NO: 130588 - DNA, 20 bp, Artificial Sequence
  Description of Artificial Sequence: Synthetic oligonucleotide
  Target: LAMA2; (+) strand; PAM type: NRG; PAM sequence: GGG
catgatgaaagggagcaaga

SEQ ID NO: 130589 - DNA, 20 bp, Artificial Sequence
  Description of Artificial Sequence: Synthetic oligonucleotide
  Target: LAMA2; (+) strand; PAM type: NRG; PAM sequence: CAG
ggagcaagagggacctcttt

SEQ ID NO: 130590 - DNA, 20 bp, Artificial Sequence
  Description of Artificial Sequence: Synthetic oligonucleotide
  Target: LAMA2; (+) strand; PAM type: NRG; PAM sequence: TGG
gagggacctctttcagacgc

SEQ ID NO: 130591 - DNA, 20 bp, Artificial Sequence
  Description of Artificial Sequence: Synthetic oligonucleotide
  Target: LAMA2; (+) strand; PAM type: NRG; PAM sequence: AAG
agacgctggtcacctcccta

SEQ ID NO: 130592 - DNA, 20 bp, Artificial Sequence
  Description of Artificial Sequence: Synthetic oligonucleotide
  Target: LAMA2; (+) strand; PAM type: NRG; PAM sequence: TGG
acctcctgatatcctcacat

SEQ ID NO: 130593 - DNA, 20 bp, Artificial Sequence
  Description of Artificial Sequence: Synthetic oligonucleotide
  Target: LAMA2; (+) strand; PAM type: NRG; PAM sequence: GAG
ctcctgatatcctcacattg

SEQ ID NO: 130594 - DNA, 20 bp, Artificial Sequence
  Description of Artificial Sequence: Synthetic oligonucleotide
  Target: LAMA2; (+) strand; PAM type: NRG; PAM sequence: TAG
gatatcctcacattggagat

SEQ ID NO: 130595 - DNA, 20 bp, Artificial Sequence
  Description of Artificial Sequence: Synthetic oligonucleotide
  Target: LAMA2; (+) strand; PAM type: NRG; PAM sequence: AGG
atatcctcacattggagatt

SEQ ID NO: 130596 - DNA, 20 bp, Artificial Sequence
  Description of Artificial Sequence: Synthetic oligonucleotide
  Target: LAMA2; (+) strand; PAM type: NRG; PAM sequence: TAG
aggtttcaacatatgaattt

SEQ ID NO: 130597 - DNA, 20 bp, Artificial Sequence
  Description of Artificial Sequence: Synthetic oligonucleotide
  Target: LAMA2; (+) strand; PAM type: NRG; PAM sequence: AGG
ggtttcaacatatgaatttt

SEQ ID NO: 130598 - DNA, 20 bp, Artificial Sequence
  Description of Artificial Sequence: Synthetic oligonucleotide
  Target: LAMA2; (+) strand; PAM type: NRG; PAM sequence: GGG
gtttcaacatatgaatttta

SEQ ID NO: 130599 - DNA, 20 bp, Artificial Sequence
  Description of Artificial Sequence: Synthetic oligonucleotide
  Target: LAMA2; (+) strand; PAM type: NRG; PAM sequence: GGG
tttcaacatatgaattttag

SEQ ID NO: 130600 - DNA, 20 bp, Artificial Sequence
  Description of Artificial Sequence: Synthetic oligonucleotide
  Target: LAMA2; (+) strand; PAM type: NRG; PAM sequence: GGG
ttcaacatatgaattttagg

SEQ ID NO: 130601 - DNA, 20 bp, Artificial Sequence
  Description of Artificial Sequence: Synthetic oligonucleotide
  Target: LAMA2; (+) strand; PAM type: NRG; PAM sequence: TAG
ggacacaaacattcataaca

SEQ ID NO: 130602 - DNA, 20 bp, Artificial Sequence
  Description of Artificial Sequence: Synthetic oligonucleotide
  Target: LAMA2; (+) strand; PAM type: NRG; PAM sequence: CAG
tgaccactattaaaaccaaa

SEQ ID NO: 130603 - DNA, 20 bp, Artificial Sequence
  Description of Artificial Sequence: Synthetic oligonucleotide
  Target: LAMA2; (+) strand; PAM type: NRG; PAM sequence: TAG
taaaaccaaacagaaaactg

SEQ ID NO: 130604 - DNA, 20 bp, Artificial Sequence
  Description of Artificial Sequence: Synthetic oligonucleotide
  Target: LAMA2; (+) strand; PAM type: NRG; PAM sequence: TAG
caaacagaaaactgtagaac

SEQ ID NO: 130605 - DNA, 20 bp, Artificial Sequence
  Description of Artificial Sequence: Synthetic oligonucleotide
  Target: LAMA2; (+) strand; PAM type: NRG; PAM sequence: AAG
agaaaactgtagaactagcc

SEQ ID NO: 130606 - DNA, 20 bp, Artificial Sequence
  Description of Artificial Sequence: Synthetic oligonucleotide
  Target: LAMA2; (+) strand; PAM type: NRG; PAM sequence: AGG
gaaaactgtagaactagcca

SEQ ID NO: 130607 - DNA, 20 bp, Artificial Sequence
  Description of Artificial Sequence: Synthetic oligonucleotide
  Target: LAMA2; (+) strand; PAM type: NRG; PAM sequence: CAG
gaactagccaaggtatctta

SEQ ID NO: 130608 - DNA, 20 bp, Artificial Sequence
  Description of Artificial Sequence: Synthetic oligonucleotide
  Target: LAMA2; (+) strand; PAM type: NRG; PAM sequence: GAG
actagccaaggtatcttaca

SEQ ID NO: 130609 - DNA, 20 bp, Artificial Sequence
  Description of Artificial Sequence: Synthetic oligonucleotide
  Target: LAMA2; (+) strand; PAM type: NRG; PAM sequence: CAG
tatcttacagagatatgttt

SEQ ID NO: 130610 - DNA, 20 bp, Artificial Sequence
  Description of Artificial Sequence: Synthetic oligonucleotide
  Target: LAMA2; (+) strand; PAM type: NRG; PAM sequence: GAG
tcttacagagatatgtttca

SEQ ID NO: 130611 - DNA, 20 bp, Artificial Sequence
  Description of Artificial Sequence: Synthetic oligonucleotide
  Target: LAMA2; (+) strand; PAM type: NRG; PAM sequence: AGG
cttacagagatatgtttcag

SEQ ID NO: 130612 - DNA, 20 bp, Artificial Sequence
  Description of Artificial Sequence: Synthetic oligonucleotide
  Target: LAMA2; (+) strand; PAM type: NRG; PAM sequence: GAG
tacagagatatgtttcagag

SEQ ID NO: 130613 - DNA, 20 bp, Artificial Sequence
  Description of Artificial Sequence: Synthetic oligonucleotide
  Target: LAMA2; (+) strand; PAM type: NRG; PAM sequence: TAG
tgtttcagaggagtgtttat

SEQ ID NO: 130614 - DNA, 20 bp, Artificial Sequence
  Description of Artificial Sequence: Synthetic oligonucleotide
  Target: LAMA2; (+) strand; PAM type: NRG; PAM sequence: TAG
tgttgtatacactatttgtt

SEQ ID NO: 130615 - DNA, 20 bp, Artificial Sequence
  Description of Artificial Sequence: Synthetic oligonucleotide
  Target: LAMA2; (+) strand; PAM type: NRG; PAM sequence: TAG
gtttagctttttctgttttt

SEQ ID NO: 130616 - DNA, 20 bp, Artificial Sequence
  Description of Artificial Sequence: Synthetic oligonucleotide
  Target: LAMA2; (+) strand; PAM type: NRG; PAM sequence: AGG
tttagctttttctgtttttt

SEQ ID NO: 130617 - DNA, 20 bp, Artificial Sequence
  Description of Artificial Sequence: Synthetic oligonucleotide
  Target: LAMA2; (+) strand; PAM type: NRG; PAM sequence: CGG
ttttctgttttttaggtcct

SEQ ID NO: 130618 - DNA, 20 bp, Artificial Sequence
  Description of Artificial Sequence: Synthetic oligonucleotide
  Target: LAMA2; (+) strand; PAM type: NRG; PAM sequence: CAG
gtcctcggcctatgctatta

SEQ ID NO: 130619 - DNA, 20 bp, Artificial Sequence
  Description of Artificial Sequence: Synthetic oligonucleotide
  Target: LAMA2; (+) strand; PAM type: NRG; PAM sequence: AAG
tcggcctatgctattacaga

SEQ ID NO: 130620 - DNA, 20 bp, Artificial Sequence
  Description of Artificial Sequence: Synthetic oligonucleotide
  Target: LAMA2; (+) strand; PAM type: NRG; PAM sequence: TGG
ctctcttttgtatttactat

SEQ ID NO: 130621 - DNA, 20 bp, Artificial Sequence
  Description of Artificial Sequence: Synthetic oligonucleotide
  Target: LAMA2; (+) strand; PAM type: NRG; PAM sequence: GAG
gtatttactattggtttcct

SEQ ID NO: 130622 - DNA, 20 bp, Artificial Sequence
  Description of Artificial Sequence: Synthetic oligonucleotide
  Target: LAMA2; (+) strand; PAM type: NRG; PAM sequence: AGG
tatttactattggtttcctg

SEQ ID NO: 130623 - DNA, 20 bp, Artificial Sequence
  Description of Artificial Sequence: Synthetic oligonucleotide
  Target: LAMA2; (+) strand; PAM type: NRG; PAM sequence: GGG
atttactattggtttcctga

SEQ ID NO: 130624 - DNA, 20 bp, Artificial Sequence
  Description of Artificial Sequence: Synthetic oligonucleotide
  Target: LAMA2; (+) strand; PAM type: NRG; PAM sequence: AAG
tactattggtttcctgaggg

SEQ ID NO: 130625 - DNA, 20 bp, Artificial Sequence
  Description of Artificial Sequence: Synthetic oligonucleotide
  Target: LAMA2; (+) strand; PAM type: NRG; PAM sequence: TGG
ttttaattattgattattta

SEQ ID NO: 130626 - DNA, 20 bp, Artificial Sequence
  Description of Artificial Sequence: Synthetic oligonucleotide
  Target: LAMA2; (+) strand; PAM type: NRG; PAM sequence: TGG
attgattatttatggtttaa

SEQ ID NO: 130627 - DNA, 20 bp, Artificial Sequence
  Description of Artificial Sequence: Synthetic oligonucleotide
  Target: LAMA2; (+) strand; PAM type: NRG; PAM sequence: GGG
ttgattatttatggtttaat

SEQ ID NO: 130628 - DNA, 20 bp, Artificial Sequence
  Description of Artificial Sequence: Synthetic oligonucleotide
  Target: LAMA2; (+) strand; PAM type: NRG; PAM sequence: GGG
tgattatttatggtttaatg

SEQ ID NO: 130629 - DNA, 20 bp, Artificial Sequence
  Description of Artificial Sequence: Synthetic oligonucleotide
  Target: LAMA2; (+) strand; PAM type: NRG; PAM sequence: CAG
aaccattgtattctaactca

SEQ ID NO: 130630 - DNA, 20 bp, Artificial Sequence
  Description of Artificial Sequence: Synthetic oligonucleotide
  Target: LAMA2; (+) strand; PAM type: NRG; PAM sequence: AGG
accattgtattctaactcac

SEQ ID NO: 130631 - DNA, 20 bp, Artificial Sequence
  Description of Artificial Sequence: Synthetic oligonucleotide
  Target: LAMA2; (+) strand; PAM type: NRG; PAM sequence: TAG
aggaataaaacaataacaaa

SEQ ID NO: 130632 - DNA, 20 bp, Artificial Sequence
  Description of Artificial Sequence: Synthetic oligonucleotide
  Target: LAMA2; (+) strand; PAM type: NRG; PAM sequence: AGG
ggaataaaacaataacaaat

SEQ ID NO: 130633 - DNA, 20 bp, Artificial Sequence
  Description of Artificial Sequence: Synthetic oligonucleotide
  Target: LAMA2; (+) strand; PAM type: NRG; PAM sequence: TAG
ttcaaatacgaatatgcatt

SEQ ID NO: 130634 - DNA, 20 bp, Artificial Sequence
  Description of Artificial Sequence: Synthetic oligonucleotide
  Target: LAMA2; (+) strand; PAM type: NRG; PAM sequence: GAG
caaatacgaatatgcattta

SEQ ID NO: 130635 - DNA, 20 bp, Artificial Sequence
  Description of Artificial Sequence: Synthetic oligonucleotide
  Target: LAMA2; (+) strand; PAM type: NRG; PAM sequence: TGG
acgaatatgcatttagagcc

SEQ ID NO: 130636 - DNA, 20 bp, Artificial Sequence
  Description of Artificial Sequence: Synthetic oligonucleotide
  Target: LAMA2; (+) strand; PAM type: NRG; PAM sequence: GAG
tagagcctggcttgctgtct

SEQ ID NO: 130637 - DNA, 20 bp, Artificial Sequence
  Description of Artificial Sequence: Synthetic oligonucleotide
  Target: LAMA2; (+) strand; PAM type: NRG; PAM sequence: AGG
agagcctggcttgctgtctg

SEQ ID NO: 130638 - DNA, 20 bp, Artificial Sequence
  Description of Artificial Sequence: Synthetic oligonucleotide
  Target: LAMA2; (+) strand; PAM type: NRG; PAM sequence: TGG
gcttcaactccctattataa

SEQ ID NO: 130639 - DNA, 20 bp, Artificial Sequence
  Description of Artificial Sequence: Synthetic oligonucleotide
  Target: LAMA2; (+) strand; PAM type: NRG; PAM sequence: TGG
attataatggatgctacaca

SEQ ID NO: 130640 - DNA, 20 bp, Artificial Sequence
  Description of Artificial Sequence: Synthetic oligonucleotide
  Target: LAMA2; (+) strand; PAM type: NRG; PAM sequence: AAG
ataatggatgctacacatgg

SEQ ID NO: 130641 - DNA, 20 bp, Artificial Sequence
  Description of Artificial Sequence: Synthetic oligonucleotide
  Target: LAMA2; (+) strand; PAM type: NRG; PAM sequence: TGG
atgctacacatggaagctct

SEQ ID NO: 130642 - DNA, 20 bp, Artificial Sequence
  Description of Artificial Sequence: Synthetic oligonucleotide
  Target: LAMA2; (+) strand; PAM type: NRG; PAM sequence: GGG
tgctacacatggaagctctt

SEQ ID NO: 130643 - DNA, 20 bp, Artificial Sequence
  Description of Artificial Sequence: Synthetic oligonucleotide
  Target: LAMA2; (+) strand; PAM type: NRG; PAM sequence: TGG
ggaagctcttgggtcaccat

SEQ ID NO: 130644 - DNA, 20 bp, Artificial Sequence
  Description of Artificial Sequence: Synthetic oligonucleotide
  Target: LAMA2; (+) strand; PAM type: NRG; PAM sequence: GAG
aagctcttgggtcaccattg

SEQ ID NO: 130645 - DNA, 20 bp, Artificial Sequence
  Description of Artificial Sequence: Synthetic oligonucleotide
  Target: LAMA2; (+) strand; PAM type: NRG; PAM sequence: AGG
agctcttgggtcaccattgg

SEQ ID NO: 130646 - DNA, 20 bp, Artificial Sequence
  Description of Artificial Sequence: Synthetic oligonucleotide
  Target: LAMA2; (+) strand; PAM type: NRG; PAM sequence: TAG
tgggtcaccattggaggtaa

SEQ ID NO: 130647 - DNA, 20 bp, Artificial Sequence
  Description of Artificial Sequence: Synthetic oligonucleotide
  Target: LAMA2; (+) strand; PAM type: NRG; PAM sequence: TAG
ttggaggtaatagcgcccta

SEQ ID NO: 130648 - DNA, 20 bp, Artificial Sequence
  Description of Artificial Sequence: Synthetic oligonucleotide
  Target: LAMA2; (+) strand; PAM type: NRG; PAM sequence: GAG
ggaggtaatagcgccctata

SEQ ID NO: 130649 - DNA, 20 bp, Artificial Sequence
  Description of Artificial Sequence: Synthetic oligonucleotide
  Target: LAMA2; (+) strand; PAM type: NRG; PAM sequence: TGG
gccctatagagttttgtgtc

SEQ ID NO: 130650 - DNA, 20 bp, Artificial Sequence
  Description of Artificial Sequence: Synthetic oligonucleotide
  Target: LAMA2; (+) strand; PAM type: NRG; PAM sequence: GGG
ccctatagagttttgtgtct

SEQ ID NO: 130651 - DNA, 20 bp, Artificial Sequence
  Description of Artificial Sequence: Synthetic oligonucleotide
  Target: LAMA2; (+) strand; PAM type: NRG; PAM sequence: AAG
tatagagttttgtgtctggg

SEQ ID NO: 130652 - DNA, 20 bp, Artificial Sequence
  Description of Artificial Sequence: Synthetic oligonucleotide
  Target: LAMA2; (+) strand; PAM type: NRG; PAM sequence: AAG
agagttttgtgtctgggaag

SEQ ID NO: 130653 - DNA, 20 bp, Artificial Sequence
  Description of Artificial Sequence: Synthetic oligonucleotide
  Target: LAMA2; (+) strand; PAM type: NRG; PAM sequence: TGG
gttttgtgtctgggaagaag

SEQ ID NO: 130654 - DNA, 20 bp, Artificial Sequence
  Description of Artificial Sequence: Synthetic oligonucleotide
  Target: LAMA2; (+) strand; PAM type: NRG; PAM sequence: TAG
ctgggaagaagtggactttg

SEQ ID NO: 130655 - DNA, 20 bp, Artificial Sequence
  Description of Artificial Sequence: Synthetic oligonucleotide
  Target: LAMA2; (+) strand; PAM type: NRG; PAM sequence: TAG
gaagaagtggactttgtagt

SEQ ID NO: 130656 - DNA, 20 bp, Artificial Sequence
  Description of Artificial Sequence: Synthetic oligonucleotide
  Target: LAMA2; (+) strand; PAM type: NRG; PAM sequence: AGG
aagaagtggactttgtagtt

SEQ ID NO: 130657 - DNA, 20 bp, Artificial Sequence
  Description of Artificial Sequence: Synthetic oligonucleotide
  Target: LAMA2; (+) strand; PAM type: NRG; PAM sequence: CAG
ttaggcgattaaatatttac

SEQ ID NO: 130658 - DNA, 20 bp, Artificial Sequence
  Description of Artificial Sequence: Synthetic oligonucleotide
  Target: LAMA2; (+) strand; PAM type: NRG; PAM sequence: AAG
aatatttaccagcttgcctt

SEQ ID NO: 130659 - DNA, 20 bp, Artificial Sequence
  Description of Artificial Sequence: Synthetic oligonucleotide
  Target: LAMA2; (+) strand; PAM type: NRG; PAM sequence: AAG
ttaccagcttgccttaagcc

SEQ ID NO: 130660 - DNA, 20 bp, Artificial Sequence
  Description of Artificial Sequence: Synthetic oligonucleotide
  Target: LAMA2; (+) strand; PAM type: NRG; PAM sequence: AAG
cttaagccaagtacatgtta

SEQ ID NO: 130661 - DNA, 20 bp, Artificial Sequence
  Description of Artificial Sequence: Synthetic oligonucleotide
  Target: LAMA2; (+) strand; PAM type: NRG; PAM sequence: AGG
ttaagccaagtacatgttaa

SEQ ID NO: 130662 - DNA, 20 bp, Artificial Sequence
  Description of Artificial Sequence: Synthetic oligonucleotide
  Target: LAMA2; (+) strand; PAM type: NRG; PAM sequence: TAG
attattattttgtttttaaa

SEQ ID NO: 130663 - DNA, 20 bp, Artificial Sequence
  Description of Artificial Sequence: Synthetic oligonucleotide
  Target: LAMA2; (+) strand; PAM type: NRG; PAM sequence: AGG
ttattattttgtttttaaat

SEQ ID NO: 130664 - DNA, 20 bp, Artificial Sequence
  Description of Artificial Sequence: Synthetic oligonucleotide
  Target: LAMA2; (+) strand; PAM type: NRG; PAM sequence: TAG
catatttatcttgccttaat

SEQ ID NO: 130665 - DNA, 20 bp, Artificial Sequence
  Description of Artificial Sequence: Synthetic oligonucleotide
  Target: LAMA2; (+) strand; PAM type: NRG; PAM sequence: AGG
atatttatcttgccttaatt

SEQ ID NO: 130666 - DNA, 20 bp, Artificial Sequence
  Description of Artificial Sequence: Synthetic oligonucleotide
  Target: LAMA2; (+) strand; PAM type: NRG; PAM sequence: GGG
tatttatcttgccttaatta

SEQ ID NO: 130667 - DNA, 20 bp, Artificial Sequence
  Description of Artificial Sequence: Synthetic oligonucleotide
  Target: LAMA2; (+) strand; PAM type: NRG; PAM sequence: GAG
tttatcttgccttaattagg

SEQ ID NO: 130668 - DNA, 20 bp, Artificial Sequence
  Description of Artificial Sequence: Synthetic oligonucleotide
  Target: LAMA2; (+) strand; PAM type: NRG; PAM sequence: AAG
ggagtttattgtttattaaa

SEQ ID NO: 130669 - DNA, 20 bp, Artificial Sequence
  Description of Artificial Sequence: Synthetic oligonucleotide
  Target: LAMA2; (+) strand; PAM type: NRG; PAM sequence: TGG
tctgaactactttcattgtg

SEQ ID NO: 130670 - DNA, 20 bp, Artificial Sequence
  Description of Artificial Sequence: Synthetic oligonucleotide
  Target: LAMA2; (+) strand; PAM type: NRG; PAM sequence: GGG
ctgaactactttcattgtgt

SEQ ID NO: 130671 - DNA, 20 bp, Artificial Sequence
  Description of Artificial Sequence: Synthetic oligonucleotide
  Target: LAMA2; (+) strand; PAM type: NRG; PAM sequence: GAG
aactaaaaatgtttttaatt

SEQ ID NO: 130672 - DNA, 20 bp, Artificial Sequence
  Description of Artificial Sequence: Synthetic oligonucleotide
  Target: LAMA2; (+) strand; PAM type: NRG; PAM sequence: AAG
aatgtttttaattgagctgc

SEQ ID NO: 130673 - DNA, 20 bp, Artificial Sequence
  Description of Artificial Sequence: Synthetic oligonucleotide
  Target: LAMA2; (+) strand; PAM type: NRG; PAM sequence: AAG
ttttaattgagctgcaagtg

SEQ ID NO: 130674 - DNA, 20 bp, Artificial Sequence
  Description of Artificial Sequence: Synthetic oligonucleotide
  Target: LAMA2; (+) strand; PAM type: NRG; PAM sequence: CAG
ttgtcaatacataaattata

SEQ ID NO: 130675 - DNA, 20 bp, Artificial Sequence
  Description of Artificial Sequence: Synthetic oligonucleotide
  Target: LAMA2; (+) strand; PAM type: NRG; PAM sequence: AAG
tatatctctatatatgcata

SEQ ID NO: 130676 - DNA, 20 bp, Artificial Sequence
  Description of Artificial Sequence: Synthetic oligonucleotide
  Target: LAMA2; (+) strand; PAM type: NRG; PAM sequence: GAG
tatctctatatatgcataaa

SEQ ID NO: 130677 - DNA, 20 bp, Artificial Sequence
  Description of Artificial Sequence: Synthetic oligonucleotide
  Target: LAMA2; (+) strand; PAM type: NRG; PAM sequence: AGG
atctctatatatgcataaag

SEQ ID NO: 130678 - DNA, 20 bp, Artificial Sequence
  Description of Artificial Sequence: Synthetic oligonucleotide
  Target: LAMA2; (+) strand; PAM type: NRG; PAM sequence: CAG
cataaagaggatattttaat

SEQ ID NO: 130679 - DNA, 20 bp, Artificial Sequence
  Description of Artificial Sequence: Synthetic oligonucleotide
  Target: LAMA2; (+) strand; PAM type: NRG; PAM sequence: AAG
gcacatgtccctgtatttaa

SEQ ID NO: 130680 - DNA, 20 bp, Artificial Sequence
  Description of Artificial Sequence: Synthetic oligonucleotide
  Target: LAMA2; (+) strand; PAM type: NRG; PAM sequence: AAG
tccctgtatttaaaagttaa

SEQ ID NO: 130681 - DNA, 20 bp, Artificial Sequence
  Description of Artificial Sequence: Synthetic oligonucleotide
  Target: LAMA2; (+) strand; PAM type: NRG; PAM sequence: CAG
aagttaaaagaaccgctcta

SEQ ID NO: 130682 - DNA, 20 bp, Artificial Sequence
  Description of Artificial Sequence: Synthetic oligonucleotide
  Target: LAMA2; (+) strand; PAM type: NRG; PAM sequence: GAG
gttaaaagaaccgctctaca

SEQ ID NO: 130683 - DNA, 20 bp, Artificial Sequence
  Description of Artificial Sequence: Synthetic oligonucleotide
  Target: LAMA2; (+) strand; PAM type: NRG; PAM sequence: AAG
aagaaccgctctacagagct

SEQ ID NO: 130684 - DNA, 20 bp, Artificial Sequence
  Description of Artificial Sequence: Synthetic oligonucleotide
  Target: LAMA2; (+) strand; PAM type: NRG; PAM sequence: CAG
gctctacagagctaagaata

SEQ ID NO: 130685 - DNA, 20 bp, Artificial Sequence
  Description of Artificial Sequence: Synthetic oligonucleotide
  Target: LAMA2; (+) strand; PAM type: NRG; PAM sequence: AGG
ctctacagagctaagaatac

SEQ ID NO: 130686 - DNA, 20 bp, Artificial Sequence
  Description of Artificial Sequence: Synthetic oligonucleotide
  Target: LAMA2; (+) strand; PAM type: NRG; PAM sequence: CGG
aattttttaaatgattataa

SEQ ID NO: 130687 - DNA, 20 bp, Artificial Sequence
  Description of Artificial Sequence: Synthetic oligonucleotide
  Target: LAMA2; (+) strand; PAM type: NRG; PAM sequence: GGG
attttttaaatgattataac

SEQ ID NO: 130688 - DNA, 20 bp, Artificial Sequence
  Description of Artificial Sequence: Synthetic oligonucleotide
  Target: LAMA2; (+) strand; PAM type: NRG; PAM sequence: GGG
ttttttaaatgattataacg

SEQ ID NO: 130689 - DNA, 20 bp, Artificial Sequence
  Description of Artificial Sequence: Synthetic oligonucleotide
  Target: LAMA2; (+) strand; PAM type: NRG; PAM sequence: GGG
tttttaaatgattataacgg

SEQ ID NO: 130690 - DNA, 20 bp, Artificial Sequence
  Description of Artificial Sequence: Synthetic oligonucleotide
  Target: LAMA2; (+) strand; PAM type: NRG; PAM sequence: TAG
aaattccactgttgtttctt

SEQ ID NO: 130691 - DNA, 20 bp, Artificial Sequence
  Description of Artificial Sequence: Synthetic oligonucleotide
  Target: LAMA2; (+) strand; PAM type: NRG; PAM sequence: GAG
ttgtttctttagtgtttgat

SEQ ID NO: 130692 - DNA, 20 bp, Artificial Sequence
  Description of Artificial Sequence: Synthetic oligonucleotide
  Target: LAMA2; (+) strand; PAM type: NRG; PAM sequence: AGG
tgtttctttagtgtttgatg

SEQ ID NO: 130693 - DNA, 20 bp, Artificial Sequence
  Description of Artificial Sequence: Synthetic oligonucleotide
  Target: LAMA2; (+) strand; PAM type: NRG; PAM sequence: GGG
gtttctttagtgtttgatga

SEQ ID NO: 130694 - DNA, 20 bp, Artificial Sequence
  Description of Artificial Sequence: Synthetic oligonucleotide
  Target: LAMA2; (+) strand; PAM type: NRG; PAM sequence: CAG
atgagggattgtaatctaat

SEQ ID NO: 130695 - DNA, 20 bp, Artificial Sequence
  Description of Artificial Sequence: Synthetic oligonucleotide
  Target: LAMA2; (+) strand; PAM type: NRG; PAM sequence: CAG
agtttaaacgactataaaca

SEQ ID NO: 130696 - DNA, 20 bp, Artificial Sequence
  Description of Artificial Sequence: Synthetic oligonucleotide
  Target: LAMA2; (+) strand; PAM type: NRG; PAM sequence: AAG
aaacacagcgatgatcattt

SEQ ID NO: 130697 - DNA, 20 bp, Artificial Sequence
  Description of Artificial Sequence: Synthetic oligonucleotide
  Target: LAMA2; (+) strand; PAM type: NRG; PAM sequence: TGG
acagcgatgatcatttaagt

SEQ ID NO: 130698 - DNA, 20 bp, Artificial Sequence
  Description of Artificial Sequence: Synthetic oligonucleotide
  Target: LAMA2; (+) strand; PAM type: NRG; PAM sequence: AAG
aagttggattttgattcgaa

SEQ ID NO: 130699 - DNA, 20 bp, Artificial Sequence
  Description of Artificial Sequence: Synthetic oligonucleotide
  Target: LAMA2; (+) strand; PAM type: NRG; PAM sequence: AAG
tggattttgattcgaaaagt

SEQ ID NO: 130700 - DNA, 20 bp, Artificial Sequence
  Description of Artificial Sequence: Synthetic oligonucleotide
  Target: LAMA2; (+) strand; PAM type: NRG; PAM sequence: TGG
tgattcgaaaagtaagttct

SEQ ID NO: 130701 - DNA, 20 bp, Artificial Sequence
  Description of Artificial Sequence: Synthetic oligonucleotide
  Target: LAMA2; (+) strand; PAM type: NRG; PAM sequence: TAG
aaaagtaagttcttggaatt

SEQ ID NO: 130702 - DNA, 20 bp, Artificial Sequence
  Description of Artificial Sequence: Synthetic oligonucleotide
  Target: LAMA2; (+) strand; PAM type: NRG; PAM sequence: AGG
aaagtaagttcttggaattt

SEQ ID NO: 130703 - DNA, 20 bp, Artificial Sequence
  Description of Artificial Sequence: Synthetic oligonucleotide
  Target: LAMA2; (+) strand; PAM type: NRG; PAM sequence: GGG
aagtaagttcttggaattta

SEQ ID NO: 130704 - DNA, 20 bp, Artificial Sequence
  Description of Artificial Sequence: Synthetic oligonucleotide
  Target: LAMA2; (+) strand; PAM type: NRG; PAM sequence: CAG
attgcacaatctgtcccata

SEQ ID NO: 130705 - DNA, 20 bp, Artificial Sequence
  Description of Artificial Sequence: Synthetic oligonucleotide
  Target: LAMA2; (+) strand; PAM type: NRG; PAM sequence: AGG
ttgcacaatctgtcccatac

SEQ ID NO: 130706 - DNA, 20 bp, Artificial Sequence
  Description of Artificial Sequence: Synthetic oligonucleotide
  Target: LAMA2; (+) strand; PAM type: NRG; PAM sequence: GGG
tgcacaatctgtcccataca

SEQ ID NO: 130707 - DNA, 20 bp, Artificial Sequence
  Description of Artificial Sequence: Synthetic oligonucleotide
  Target: LAMA2; (+) strand; PAM type: NRG; PAM sequence: GGG
gcacaatctgtcccatacag

SEQ ID NO: 130708 - DNA, 20 bp, Artificial Sequence
  Description of Artificial Sequence: Synthetic oligonucleotide
  Target: LAMA2; (+) strand; PAM type: NRG; PAM sequence: GAG
ttttactaatttttttccgt

SEQ ID NO: 130709 - DNA, 20 bp, Artificial Sequence
  Description of Artificial Sequence: Synthetic oligonucleotide
  Target: LAMA2; (+) strand; PAM type: NRG; PAM sequence: TAG
ctaatttttttccgtgagaa

SEQ ID NO: 130710 - DNA, 20 bp, Artificial Sequence
  Description of Artificial Sequence: Synthetic oligonucleotide
  Target: LAMA2; (+) strand; PAM type: NRG; PAM sequence: TGG
ccgtgagaatagaatcctgc

SEQ ID NO: 130711 - DNA, 20 bp, Artificial Sequence
  Description of Artificial Sequence: Synthetic oligonucleotide
  Target: LAMA2; (+) strand; PAM type: NRG; PAM sequence: GGG
cgtgagaatagaatcctgct

SEQ ID NO: 130712 - DNA, 20 bp, Artificial Sequence
  Description of Artificial Sequence: Synthetic oligonucleotide
  Target: LAMA2; (+) strand; PAM type: NRG; PAM sequence: AAG
gagaatagaatcctgctggg

SEQ ID NO: 130713 - DNA, 20 bp, Artificial Sequence
  Description of Artificial Sequence: Synthetic oligonucleotide
  Target: LAMA2; (+) strand; PAM type: NRG; PAM sequence: TAG
ggaagcttattttattctct

SEQ ID NO: 130714 - DNA, 20 bp, Artificial Sequence
  Description of Artificial Sequence: Synthetic oligonucleotide
  Target: LAMA2; (+) strand; PAM type: NRG; PAM sequence: CGG
tcctcctttttttccccctc

SEQ ID NO: 130715 - DNA, 20 bp, Artificial Sequence
  Description of Artificial Sequence: Synthetic oligonucleotide
  Target: LAMA2; (+) strand; PAM type: NRG; PAM sequence: GAG
ctcctttttttccccctccg

SEQ ID NO: 130716 - DNA, 20 bp, Artificial Sequence
  Description of Artificial Sequence: Synthetic oligonucleotide
  Target: LAMA2; (+) strand; PAM type: NRG; PAM sequence: TGG
cccctccggagaacgatgac

SEQ ID NO: 130717 - DNA, 20 bp, Artificial Sequence
  Description of Artificial Sequence: Synthetic oligonucleotide
  Target: LAMA2; (+) strand; PAM type: NRG; PAM sequence: TAG
aacgatgactggtttacaaa

SEQ ID NO: 130718 - DNA, 20 bp, Artificial Sequence
  Description of Artificial Sequence: Synthetic oligonucleotide
  Target: LAMA2; (+) strand; PAM type: NRG; PAM sequence: CAG
gcaatttatatcaactgaca

SEQ ID NO: 130719 - DNA, 20 bp, Artificial Sequence
  Description of Artificial Sequence: Synthetic oligonucleotide
  Target: LAMA2; (+) strand; PAM type: NRG; PAM sequence: CAG
tttccttatactgttgatct

SEQ ID NO: 130720 - DNA, 20 bp, Artificial Sequence
  Description of Artificial Sequence: Synthetic oligonucleotide
  Target: LAMA2; (+) strand; PAM type: NRG; PAM sequence: CAG
ttgatctcagaactgttctg

SEQ ID NO: 130721 - DNA, 20 bp, Artificial Sequence
  Description of Artificial Sequence: Synthetic oligonucleotide
  Target: LAMA2; (+) strand; PAM type: NRG; PAM sequence: AAG
agaactgttctgcagtcctg

SEQ ID NO: 130722 - DNA, 20 bp, Artificial Sequence
  Description of Artificial Sequence: Synthetic oligonucleotide
  Target: LAMA2; (+) strand; PAM type: NRG; PAM sequence: TGG
gaaacactattgccattttt

SEQ ID NO: 130723 - DNA, 20 bp, Artificial Sequence
  Description of Artificial Sequence: Synthetic oligonucleotide
  Target: LAMA2; (+) strand; PAM type: NRG; PAM sequence: CAG
actattgccattttttggta

SEQ ID NO: 130724 - DNA, 20 bp, Artificial Sequence
  Description of Artificial Sequence: Synthetic oligonucleotide
  Target: LAMA2; (+) strand; PAM type: NRG; PAM sequence: CAG
ttgccattttttggtacagc

SEQ ID NO: 130725 - DNA, 20 bp, Artificial Sequence
  Description of Artificial Sequence: Synthetic oligonucleotide
  Target: LAMA2; (+) strand; PAM type: NRG; PAM sequence: TGG
agtgctctaaaaaatgtaaa

SEQ ID NO: 130726 - DNA, 20 bp, Artificial Sequence
  Description of Artificial Sequence: Synthetic oligonucleotide
  Target: LAMA2; (+) strand; PAM type: NRG; PAM sequence: AAG
taaaaaatgtaaatggatga

SEQ ID NO: 130727 - DNA, 20 bp, Artificial Sequence
  Description of Artificial Sequence: Synthetic oligonucleotide
  Target: LAMA2; (+) strand; PAM type: NRG; PAM sequence: TGG
gaaagcgattcaatctatta

SEQ ID NO: 130728 - DNA, 20 bp, Artificial Sequence
  Description of Artificial Sequence: Synthetic oligonucleotide
  Target: LAMA2; (+) strand; PAM type: NRG; PAM sequence: AAG
agcgattcaatctattatgg

SEQ ID NO: 130729 - DNA, 20 bp, Artificial Sequence
  Description of Artificial Sequence: Synthetic oligonucleotide
  Target: LAMA2; (+) strand; PAM type: NRG; PAM sequence: CAG
gattcaatctattatggaag

SEQ ID NO: 130730 - DNA, 20 bp, Artificial Sequence
  Description of Artificial Sequence: Synthetic oligonucleotide
  Target: LAMA2; (+) strand; PAM type: NRG; PAM sequence: GAG
tttgctttacaaatttttcc

SEQ ID NO: 130731 - DNA, 20 bp, Artificial Sequence
  Description of Artificial Sequence: Synthetic oligonucleotide
  Target: LAMA2; (+) strand; PAM type: NRG; PAM sequence: CAG
aaatttttccgagtaaaatg

SEQ ID NO: 130732 - DNA, 20 bp, Artificial Sequence
  Description of Artificial Sequence: Synthetic oligonucleotide
  Target: LAMA2; (+) strand; PAM type: NRG; PAM sequence: CAG
ttttccgagtaaaatgcagt

SEQ ID NO: 130733 - DNA, 20 bp, Artificial Sequence
  Description of Artificial Sequence: Synthetic oligonucleotide
  Target: LAMA2; (+) strand; PAM type: NRG; PAM sequence: AGG
tttccgagtaaaatgcagtc

SEQ ID NO: 130734 - DNA, 20 bp, Artificial Sequence
  Description of Artificial Sequence: Synthetic oligonucleotide
  Target: LAMA2; (+) strand; PAM type: NRG; PAM sequence: TAG
cattgcataaaaacttgttt

SEQ ID NO: 130735 - DNA, 20 bp, Artificial Sequence
  Description of Artificial Sequence: Synthetic oligonucleotide
  Target: LAMA2; (+) strand; PAM type: NRG; PAM sequence: AAG
gaattctttacactaaatta

SEQ ID NO: 130736 - DNA, 20 bp, Artificial Sequence
  Description of Artificial Sequence: Synthetic oligonucleotide
  Target: LAMA2; (+) strand; PAM type: NRG; PAM sequence: AAG
acactaaattaaagatgata

SEQ ID NO: 130737 - DNA, 20 bp, Artificial Sequence
  Description of Artificial Sequence: Synthetic oligonucleotide
  Target: LAMA2; (+) strand; PAM type: NRG; PAM sequence: CAG
aatctgcttttcatactaaa

SEQ ID NO: 130738 - DNA, 20 bp, Artificial Sequence
  Description of Artificial Sequence: Synthetic oligonucleotide
  Target: LAMA2; (+) strand; PAM type: NRG; PAM sequence: AAG
gcttttcatactaaacagtg

SEQ ID NO: 130739 - DNA, 20 bp, Artificial Sequence
  Description of Artificial Sequence: Synthetic oligonucleotide
  Target: LAMA2; (+) strand; PAM type: NRG; PAM sequence: AAG
atactaaacagtgaagtgaa

SEQ ID NO: 130740 - DNA, 20 bp, Artificial Sequence
  Description of Artificial Sequence: Synthetic oligonucleotide
  Target: LAMA2; (+) strand; PAM type: NRG; PAM sequence: AAG
aagtgaaaagcattatttta

SEQ ID NO: 130741 - DNA, 20 bp, Artificial Sequence
  Description of Artificial Sequence: Synthetic oligonucleotide
  Target: LAMA2; (+) strand; PAM type: NRG; PAM sequence: TAG
aagaaatatttctgttttgt

SEQ ID NO: 130742 - DNA, 20 bp, Artificial Sequence
  Description of Artificial Sequence: Synthetic oligonucleotide
  Target: LAMA2; (+) strand; PAM type: NRG; PAM sequence: TAG
tagtgtacgaaattctgtaa

SEQ ID NO: 130743 - DNA, 20 bp, Artificial Sequence
  Description of Artificial Sequence: Synthetic oligonucleotide
  Target: LAMA2; (+) strand; PAM type: NRG; PAM sequence: TGG
tgtacgaaattctgtaatag

SEQ ID NO: 130744 - DNA, 20 bp, Artificial Sequence
  Description of Artificial Sequence: Synthetic oligonucleotide
  Target: LAMA2; (+) strand; PAM type: NRG; PAM sequence: TAG
gtaatagtggctaacttctt

SEQ ID NO: 130745 - DNA, 20 bp, Artificial Sequence
  Description of Artificial Sequence: Synthetic oligonucleotide
  Target: LAMA2; (+) strand; PAM type: NRG; PAM sequence: AGG
taatagtggctaacttcttt

SEQ ID NO: 130746 - DNA, 20 bp, Artificial Sequence
  Description of Artificial Sequence: Synthetic oligonucleotide
  Target: LAMA2; (+) strand; PAM type: NRG; PAM sequence: TAG
aacttctttaggaacctttt

SEQ ID NO: 130747 - DNA, 20 bp, Artificial Sequence
  Description of Artificial Sequence: Synthetic oligonucleotide
  Target: LAMA2; (+) strand; PAM type: NRG; PAM sequence: AGG
acttctttaggaaccttttt

SEQ ID NO: 130748 - DNA, 20 bp, Artificial Sequence
  Description of Artificial Sequence: Synthetic oligonucleotide
  Target: LAMA2; (+) strand; PAM type: NRG; PAM sequence: TAG
attgactatgaaatctattc

SEQ ID NO: 130749 - DNA, 20 bp, Artificial Sequence
  Description of Artificial Sequence: Synthetic oligonucleotide
  Target: LAMA2; (+) strand; PAM type: NRG; PAM sequence: AGG
ttgactatgaaatctattct

SEQ ID NO: 130750 - DNA, 20 bp, Artificial Sequence
  Description of Artificial Sequence: Synthetic oligonucleotide
  Target: LAMA2; (+) strand; PAM type: NRG; PAM sequence: GAG
attctaggacaaaataaaat

SEQ ID NO: 130751 - DNA, 20 bp, Artificial Sequence
  Description of Artificial Sequence: Synthetic oligonucleotide
  Target: LAMA2; (+) strand; PAM type: NRG; PAM sequence: TAG
aggacaaaataaaatgagaa

SEQ ID NO: 130752 - DNA, 20 bp, Artificial Sequence
  Description of Artificial Sequence: Synthetic oligonucleotide
  Target: LAMA2; (+) strand; PAM type: NRG; PAM sequence: TAG
gtctaattaaatgatatatc

SEQ ID NO: 130753 - DNA, 20 bp, Artificial Sequence
  Description of Artificial Sequence: Synthetic oligonucleotide
  Target: LAMA2; (+) strand; PAM type: NRG; PAM sequence: AGG
tctaattaaatgatatatct

SEQ ID NO: 130754 - DNA, 20 bp, Artificial Sequence
  Description of Artificial Sequence: Synthetic oligonucleotide
  Target: LAMA2; (+) strand; PAM type: NRG; PAM sequence: AAG
tctaggcaaactaaccattc

SEQ ID NO: 130755 - DNA, 20 bp, Artificial Sequence
  Description of Artificial Sequence: Synthetic oligonucleotide
  Target: LAMA2; (+) strand; PAM type: NRG; PAM sequence: CAG
ctgtacatgtgtttaatttc

SEQ ID NO: 130756 - DNA, 20 bp, Artificial Sequence
  Description of Artificial Sequence: Synthetic oligonucleotide
  Target: LAMA2; (+) strand; PAM type: NRG; PAM sequence: GAG
acatgtgtttaatttccagt

SEQ ID NO: 130757 - DNA, 20 bp, Artificial Sequence
  Description of Artificial Sequence: Synthetic oligonucleotide
  Target: LAMA2; (+) strand; PAM type: NRG; PAM sequence: AAG
cagtgagctcaaaatacttc

SEQ ID NO: 130758 - DNA, 20 bp, Artificial Sequence
  Description of Artificial Sequence: Synthetic oligonucleotide
  Target: LAMA2; (+) strand; PAM type: NRG; PAM sequence: GAG
tacttcaagtgatctcattt

SEQ ID NO: 130759 - DNA, 20 bp, Artificial Sequence
  Description of Artificial Sequence: Synthetic oligonucleotide
  Target: LAMA2; (+) strand; PAM type: NRG; PAM sequence: TAG
gatctcatttgagtattaac

SEQ ID NO: 130760 - DNA, 20 bp, Artificial Sequence
  Description of Artificial Sequence: Synthetic oligonucleotide
  Target: LAMA2; (+) strand; PAM type: NRG; PAM sequence: AGG
atctcatttgagtattaact

SEQ ID NO: 130761 - DNA, 20 bp, Artificial Sequence
  Description of Artificial Sequence: Synthetic oligonucleotide
  Target: LAMA2; (+) strand; PAM type: NRG; PAM sequence: GGG
tctcatttgagtattaacta

SEQ ID NO: 130762 - DNA, 20 bp, Artificial Sequence
  Description of Artificial Sequence: Synthetic oligonucleotide
  Target: LAMA2; (+) strand; PAM type: NRG; PAM sequence: CAG
taactagggaaatacattca

SEQ ID NO: 130763 - DNA, 20 bp, Artificial Sequence
  Description of Artificial Sequence: Synthetic oligonucleotide
  Target: LAMA2; (+) strand; PAM type: NRG; PAM sequence: CAG
agggaaatacattcacagtc

SEQ ID NO: 130764 - DNA, 20 bp, Artificial Sequence
  Description of Artificial Sequence: Synthetic oligonucleotide
  Target: LAMA2; (+) strand; PAM type: NRG; PAM sequence: TAG
gtctacattattttaaatca

SEQ ID NO: 130765 - DNA, 20 bp, Artificial Sequence
  Description of Artificial Sequence: Synthetic oligonucleotide
  Target: LAMA2; (+) strand; PAM type: NRG; PAM sequence: TAG
cattattttaaatcatagca

SEQ ID NO: 130766 - DNA, 20 bp, Artificial Sequence
  Description of Artificial Sequence: Synthetic oligonucleotide
  Target: LAMA2; (+) strand; PAM type: NRG; PAM sequence: CAG
tttccactgtgctttatgac

SEQ ID NO: 130767 - DNA, 20 bp, Artificial Sequence
  Description of Artificial Sequence: Synthetic oligonucleotide
  Target: LAMA2; (+) strand; PAM type: NRG; PAM sequence: AAG
ccagaacacatttatttgca

SEQ ID NO: 130768 - DNA, 20 bp, Artificial Sequence
  Description of Artificial Sequence: Synthetic oligonucleotide
  Target: LAMA2; (+) strand; PAM type: NRG; PAM sequence: TAG
ttttcacttaccttatattg

SEQ ID NO: 130769 - DNA, 20 bp, Artificial Sequence
  Description of Artificial Sequence: Synthetic oligonucleotide
  Target: LAMA2; (+) strand; PAM type: NRG; PAM sequence: TAG
ttaccttatattgtagtatg

SEQ ID NO: 130770 - DNA, 20 bp, Artificial Sequence
  Description of Artificial Sequence: Synthetic oligonucleotide
  Target: LAMA2; (+) strand; PAM type: NRG; PAM sequence: TAG
ttatattgtagtatgtagta

SEQ ID NO: 130771 - DNA, 20 bp, Artificial Sequence
  Description of Artificial Sequence: Synthetic oligonucleotide
  Target: LAMA2; (+) strand; PAM type: NRG; PAM sequence: AGG
tatattgtagtatgtagtat

SEQ ID NO: 130772 - DNA, 20 bp, Artificial Sequence
  Description of Artificial Sequence: Synthetic oligonucleotide
  Target: LAMA2; (+) strand; PAM type: NRG; PAM sequence: CGG
gtagtataggacaattgata

SEQ ID NO: 130773 - DNA, 20 bp, Artificial Sequence
  Description of Artificial Sequence: Synthetic oligonucleotide
  Target: LAMA2; (+) strand; PAM type: NRG; PAM sequence: CAG
cggtcaactgtttaaaacgt

SEQ ID NO: 130774 - DNA, 20 bp, Artificial Sequence
  Description of Artificial Sequence: Synthetic oligonucleotide
  Target: LAMA2; (+) strand; PAM type: NRG; PAM sequence: TAG
taaaacgtcagatgcaatga

SEQ ID NO: 130775 - DNA, 20 bp, Artificial Sequence
  Description of Artificial Sequence: Synthetic oligonucleotide
  Target: LAMA2; (+) strand; PAM type: NRG; PAM sequence: GAG
aaacgtcagatgcaatgata

SEQ ID NO: 130776 - DNA, 20 bp, Artificial Sequence
  Description of Artificial Sequence: Synthetic oligonucleotide
  Target: LAMA2; (+) strand; PAM type: NRG; PAM sequence: TAG
cagatgcaatgatagagcct

SEQ ID NO: 130777 - DNA, 20 bp, Artificial Sequence
  Description of Artificial Sequence: Synthetic oligonucleotide
  Target: LAMA2; (+) strand; PAM type: NRG; PAM sequence: TAG
tgatagagccttagcattta

SEQ ID NO: 130778 - DNA, 20 bp, Artificial Sequence
  Description of Artificial Sequence: Synthetic oligonucleotide
  Target: LAMA2; (+) strand; PAM type: NRG; PAM sequence: TAG
agccttagcatttatagatg

SEQ ID NO: 130779 - DNA, 20 bp, Artificial Sequence
  Description of Artificial Sequence: Synthetic oligonucleotide
  Target: LAMA2; (+) strand; PAM type: NRG; PAM sequence: CAG
atttatagatgtagcattca

SEQ ID NO: 130780 - DNA, 20 bp, Artificial Sequence
  Description of Artificial Sequence: Synthetic oligonucleotide
  Target: LAMA2; (+) strand; PAM type: NRG; PAM sequence: CAG
attcacagttgcaactcttt

SEQ ID NO: 130781 - DNA, 20 bp, Artificial Sequence
  Description of Artificial Sequence: Synthetic oligonucleotide
  Target: LAMA2; (+) strand; PAM type: NRG; PAM sequence: CAG
agttgcaactctttcagttt

SEQ ID NO: 130782 - DNA, 20 bp, Artificial Sequence
  Description of Artificial Sequence: Synthetic oligonucleotide
  Target: LAMA2; (+) strand; PAM type: NRG; PAM sequence: GAG
tttcagtttcagacatttgt

SEQ ID NO: 130783 - DNA, 20 bp, Artificial Sequence
  Description of Artificial Sequence: Synthetic oligonucleotide
  Target: LAMA2; (+) strand; PAM type: NRG; PAM sequence: AGG
ttcagtttcagacatttgtg

SEQ ID NO: 130784 - DNA, 20 bp, Artificial Sequence
  Description of Artificial Sequence: Synthetic oligonucleotide
  Target: LAMA2; (+) strand; PAM type: NRG; PAM sequence: TAG
gacatttgtgaggaatctca

SEQ ID NO: 130785 - DNA, 20 bp, Artificial Sequence
  Description of Artificial Sequence: Synthetic oligonucleotide
  Target: LAMA2; (+) strand; PAM type: NRG; PAM sequence: AGG
acatttgtgaggaatctcat

SEQ ID NO: 130786 - DNA, 20 bp, Artificial Sequence
  Description of Artificial Sequence: Synthetic oligonucleotide
  Target: LAMA2; (+) strand; PAM type: NRG; PAM sequence: TGG
aatctcataggtgtgtaata

SEQ ID NO: 130787 - DNA, 20 bp, Artificial Sequence
  Description of Artificial Sequence: Synthetic oligonucleotide
  Target: LAMA2; (+) strand; PAM type: NRG; PAM sequence: GAG
taatatggtttgaaatttgt

SEQ ID NO: 130788 - DNA, 20 bp, Artificial Sequence
  Description of Artificial Sequence: Synthetic oligonucleotide
  Target: LAMA2; (+) strand; PAM type: NRG; PAM sequence: AGG
aatatggtttgaaatttgtg

SEQ ID NO: 130789 - DNA, 20 bp, Artificial Sequence
  Description of Artificial Sequence: Synthetic oligonucleotide
  Target: LAMA2; (+) strand; PAM type: NRG; PAM sequence: CAG
tggtttgaaatttgtgagga

SEQ ID NO: 130790 - DNA, 20 bp, Artificial Sequence
  Description of Artificial Sequence: Synthetic oligonucleotide
  Target: LAMA2; (+) strand; PAM type: NRG; PAM sequence: TAG
agcaattcgtgctctgactc

SEQ ID NO: 130791 - DNA, 20 bp, Artificial Sequence
  Description of Artificial Sequence: Synthetic oligonucleotide
  Target: LAMA2; (+) strand; PAM type: NRG; PAM sequence: TGG
cgtgctctgactctagtcat

SEQ ID NO: 130792 - DNA, 20 bp, Artificial Sequence
  Description of Artificial Sequence: Synthetic oligonucleotide
  Target: LAMA2; (+) strand; PAM type: NRG; PAM sequence: CGG
gctctgactctagtcattgg

SEQ ID NO: 130793 - DNA, 20 bp, Artificial Sequence
  Description of Artificial Sequence: Synthetic oligonucleotide
  Target: LAMA2; (+) strand; PAM type: NRG; PAM sequence: CAG
tgactctagtcattggcggc

SEQ ID NO: 130794 - DNA, 20 bp, Artificial Sequence
  Description of Artificial Sequence: Synthetic oligonucleotide
  Target: LAMA2; (+) strand; PAM type: NRG; PAM sequence: GAG
tctagtcattggcggccagt

SEQ ID NO: 130795 - DNA, 20 bp, Artificial Sequence
  Description of Artificial Sequence: Synthetic oligonucleotide
  Target: LAMA2; (+) strand; PAM type: NRG; PAM sequence: AAG
gtcattggcggccagtgagc

SEQ ID NO: 130796 - DNA, 20 bp, Artificial Sequence
  Description of Artificial Sequence: Synthetic oligonucleotide
  Target: LAMA2; (+) strand; PAM type: NRG; PAM sequence: CAG
agcaagcgcaactgatcacc

SEQ ID NO: 130797 - DNA, 20 bp, Artificial Sequence
  Description of Artificial Sequence: Synthetic oligonucleotide
  Target: LAMA2; (+) strand; PAM type: NRG; PAM sequence: TGG
ccagtatcaacttcacaatg

SEQ ID NO: 130798 - DNA, 20 bp, Artificial Sequence
  Description of Artificial Sequence: Synthetic oligonucleotide
  Target: LAMA2; (+) strand; PAM type: NRG; PAM sequence: CGG
acaatgtggtttccactaat

SEQ ID NO: 130799 - DNA, 20 bp, Artificial Sequence
  Description of Artificial Sequence: Synthetic oligonucleotide
  Target: LAMA2; (+) strand; PAM type: NRG; PAM sequence: TAG
ataataaaaaccttatttca

SEQ ID NO: 130800 - DNA, 20 bp, Artificial Sequence
  Description of Artificial Sequence: Synthetic oligonucleotide
  Target: LAMA2; (+) strand; PAM type: NRG; PAM sequence: CAG
ataaaaaccttatttcatag

SEQ ID NO: 130801 - DNA, 20 bp, Artificial Sequence
  Description of Artificial Sequence: Synthetic oligonucleotide
  Target: LAMA2; (+) strand; PAM type: NRG; PAM sequence: AGG
taaaaaccttatttcatagc

SEQ ID NO: 130802 - DNA, 20 bp, Artificial Sequence
  Description of Artificial Sequence: Synthetic oligonucleotide
  Target: LAMA2; (+) strand; PAM type: NRG; PAM sequence: GAG
aaaaccttatttcatagcag

SEQ ID NO: 130803 - DNA, 20 bp, Artificial Sequence
  Description of Artificial Sequence: Synthetic oligonucleotide
  Target: LAMA2; (+) strand; PAM type: NRG; PAM sequence: CGG
accttatttcatagcaggag

SEQ ID NO: 130804 - DNA, 20 bp, Artificial Sequence
  Description of Artificial Sequence: Synthetic oligonucleotide
  Target: LAMA2; (+) strand; PAM type: NRG; PAM sequence: GGG
ccttatttcatagcaggagc

SEQ ID NO: 130805 - DNA, 20 bp, Artificial Sequence
  Description of Artificial Sequence: Synthetic oligonucleotide
  Target: LAMA2; (+) strand; PAM type: NRG; PAM sequence: AAG
agcaggagcgggtacccaaa

SEQ ID NO: 130806 - DNA, 20 bp, Artificial Sequence
  Description of Artificial Sequence: Synthetic oligonucleotide
  Target: LAMA2; (+) strand; PAM type: NRG; PAM sequence: TAG
aggagcgggtacccaaaaag

SEQ ID NO: 130807 - DNA, 20 bp, Artificial Sequence
  Description of Artificial Sequence: Synthetic oligonucleotide
  Target: LAMA2; (+) strand; PAM type: NRG; PAM sequence: TGG
gtacccaaaaagtagttaaa

SEQ ID NO: 130808 - DNA, 20 bp, Artificial Sequence
  Description of Artificial Sequence: Synthetic oligonucleotide
  Target: LAMA2; (+) strand; PAM type: NRG; PAM sequence: CAG
gttaaatggctaatccttta

SEQ ID NO: 130809 - DNA, 20 bp, Artificial Sequence
  Description of Artificial Sequence: Synthetic oligonucleotide
  Target: LAMA2; (+) strand; PAM type: NRG; PAM sequence: TGG
ctttacagtttttatgtttt

SEQ ID NO: 130810 - DNA, 20 bp, Artificial Sequence
  Description of Artificial Sequence: Synthetic oligonucleotide
  Target: LAMA2; (+) strand; PAM type: NRG; PAM sequence: AAG
ttttggaaatttgtgatctc

SEQ ID NO: 130811 - DNA, 20 bp, Artificial Sequence
  Description of Artificial Sequence: Synthetic oligonucleotide
  Target: LAMA2; (+) strand; PAM type: NRG; PAM sequence: AAG
tgatctcaagactatccctc

SEQ ID NO: 130812 - DNA, 20 bp, Artificial Sequence
  Description of Artificial Sequence: Synthetic oligonucleotide
  Target: LAMA2; (+) strand; PAM type: NRG; PAM sequence: AAG
gactatccctcaagaatgtc

SEQ ID NO: 130813 - DNA, 20 bp, Artificial Sequence
  Description of Artificial Sequence: Synthetic oligonucleotide
  Target: LAMA2; (+) strand; PAM type: NRG; PAM sequence: AGG
actatccctcaagaatgtca

SEQ ID NO: 130814 - DNA, 20 bp, Artificial Sequence
  Description of Artificial Sequence: Synthetic oligonucleotide
  Target: LAMA2; (+) strand; PAM type: NRG; PAM sequence: AAG
agaatgtcaaggttttgctg

SEQ ID NO: 130815 - DNA, 20 bp, Artificial Sequence
  Description of Artificial Sequence: Synthetic oligonucleotide
  Target: LAMA2; (+) strand; PAM type: NRG; PAM sequence: AAG
tcaaggttttgctgaagtta

SEQ ID NO: 130816 - DNA, 20 bp, Artificial Sequence
  Description of Artificial Sequence: Synthetic oligonucleotide
  Target: LAMA2; (+) strand; PAM type: NRG; PAM sequence: TGG
taaagacatttgttattctg

SEQ ID NO: 130817 - DNA, 20 bp, Artificial Sequence
  Description of Artificial Sequence: Synthetic oligonucleotide
  Target: LAMA2; (+) strand; PAM type: NRG; PAM sequence: CAG
gacatttgttattctgtggt

SEQ ID NO: 130818 - DNA, 20 bp, Artificial Sequence
  Description of Artificial Sequence: Synthetic oligonucleotide
  Target: LAMA2; (+) strand; PAM type: NRG; PAM sequence: CAG
attctgtggtcagattattt

SEQ ID NO: 130819 - DNA, 20 bp, Artificial Sequence
  Description of Artificial Sequence: Synthetic oligonucleotide
  Target: LAMA2; (+) strand; PAM type: NRG; PAM sequence: TAG
ctgtggtcagattatttcag

SEQ ID NO: 130820 - DNA, 20 bp, Artificial Sequence
  Description of Artificial Sequence: Synthetic oligonucleotide
  Target: LAMA2; (+) strand; PAM type: NRG; PAM sequence: GAG
gtcagattatttcagtagtt

SEQ ID NO: 130821 - DNA, 20 bp, Artificial Sequence
  Description of Artificial Sequence: Synthetic oligonucleotide
  Target: LAMA2; (+) strand; PAM type: NRG; PAM sequence: TAG
ttatttcagtagttgagatg

SEQ ID NO: 130822 - DNA, 20 bp, Artificial Sequence
  Description of Artificial Sequence: Synthetic oligonucleotide
  Target: LAMA2; (+) strand; PAM type: NRG; PAM sequence: AAG
ttgagatgtagtctcacatt

SEQ ID NO: 130823 - DNA, 20 bp, Artificial Sequence
  Description of Artificial Sequence: Synthetic oligonucleotide
  Target: LAMA2; (+) strand; PAM type: NRG; PAM sequence: AGG
tgagatgtagtctcacatta

SEQ ID NO: 130824 - DNA, 20 bp, Artificial Sequence
  Description of Artificial Sequence: Synthetic oligonucleotide
  Target: LAMA2; (+) strand; PAM type: NRG; PAM sequence: GGG
gagatgtagtctcacattaa

SEQ ID NO: 130825 - DNA, 20 bp, Artificial Sequence
  Description of Artificial Sequence: Synthetic oligonucleotide
  Target: LAMA2; (+) strand; PAM type: NRG; PAM sequence: GAG
gatgtagtctcacattaagg

SEQ ID NO: 130826 - DNA, 20 bp, Artificial Sequence
  Description of Artificial Sequence: Synthetic oligonucleotide
  Target: LAMA2; (+) strand; PAM type: NRG; PAM sequence: TAG
taagggagaaatctgcaaac

SEQ ID NO: 130827 - DNA, 20 bp, Artificial Sequence
  Description of Artificial Sequence: Synthetic oligonucleotide
  Target: LAMA2; (+) strand; PAM type: NRG; PAM sequence: TGG
agaaatctgcaaactagaaa

SEQ ID NO: 130828 - DNA, 20 bp, Artificial Sequence
  Description of Artificial Sequence: Synthetic oligonucleotide
  Target: LAMA2; (+) strand; PAM type: NRG; PAM sequence: TGG
aactagaaatggtttgcaaa

SEQ ID NO: 130829 - DNA, 20 bp, Artificial Sequence
  Description of Artificial Sequence: Synthetic oligonucleotide
  Target: LAMA2; (+) strand; PAM type: NRG; PAM sequence: AAG
agaaatggtttgcaaatggc

SEQ ID NO: 130830 - DNA, 20 bp, Artificial Sequence
  Description of Artificial Sequence: Synthetic oligonucleotide
  Target: LAMA2; (+) strand; PAM type: NRG; PAM sequence: AGG
gaaatggtttgcaaatggca

SEQ ID NO: 130831 - DNA, 20 bp, Artificial Sequence
  Description of Artificial Sequence: Synthetic oligonucleotide
  Target: LAMA2; (+) strand; PAM type: NRG; PAM sequence: AAG
ggtttgcaaatggcaaggca

SEQ ID NO: 130832 - DNA, 20 bp, Artificial Sequence
  Description of Artificial Sequence: Synthetic oligonucleotide
  Target: LAMA2; (+) strand; PAM type: NRG; PAM sequence: TGG
catgtgataaaaatctcttt

SEQ ID NO: 130833 - DNA, 20 bp, Artificial Sequence
  Description of Artificial Sequence: Synthetic oligonucleotide
  Target: LAMA2; (+) strand; PAM type: NRG; PAM sequence: GGG
atgtgataaaaatctctttt

SEQ ID NO: 130834 - DNA, 20 bp, Artificial Sequence
  Description of Artificial Sequence: Synthetic oligonucleotide
  Target: LAMA2; (+) strand; PAM type: NRG; PAM sequence: CAG
taaaaatctcttttgggttt

SEQ ID NO: 130835 - DNA, 20 bp, Artificial Sequence
  Description of Artificial Sequence: Synthetic oligonucleotide
  Target: LAMA2; (+) strand; PAM type: NRG; PAM sequence: AGG
aaaaatctcttttgggtttc

SEQ ID NO: 130836 - DNA, 20 bp, Artificial Sequence
  Description of Artificial Sequence: Synthetic oligonucleotide
  Target: LAMA2; (+) strand; PAM type: NRG; PAM sequence: AAG
cttttgggtttcaggatgac

SEQ ID NO: 130837 - DNA, 20 bp, Artificial Sequence
  Description of Artificial Sequence: Synthetic oligonucleotide
  Target: LAMA2; (+) strand; PAM type: NRG; PAM sequence: AGG
ttttgggtttcaggatgaca

SEQ ID NO: 130838 - DNA, 20 bp, Artificial Sequence
  Description of Artificial Sequence: Synthetic oligonucleotide
  Target: LAMA2; (+) strand; PAM type: NRG; PAM sequence: CAG
ggtttcaggatgacaaggta

SEQ ID NO: 130839 - DNA, 20 bp, Artificial Sequence
  Description of Artificial Sequence: Synthetic oligonucleotide
  Target: LAMA2; (+) strand; PAM type: NRG; PAM sequence: AGG
gtttcaggatgacaaggtac

SEQ ID NO: 130840 - DNA, 20 bp, Artificial Sequence
  Description of Artificial Sequence: Synthetic oligonucleotide
  Target: LAMA2; (+) strand; PAM type: NRG; PAM sequence: GGG
tttcaggatgacaaggtaca

SEQ ID NO: 130841 - DNA, 20 bp, Artificial Sequence
  Description of Artificial Sequence: Synthetic oligonucleotide
  Target: LAMA2; (+) strand; PAM type: NRG; PAM sequence: CAG
ggatgacaaggtacagggcc

SEQ ID NO: 130842 - DNA, 20 bp, Artificial Sequence
  Description of Artificial Sequence: Synthetic oligonucleotide
  Target: LAMA2; (+) strand; PAM type: NRG; PAM sequence: AGG
gatgacaaggtacagggccc

SEQ ID NO: 130843 - DNA, 20 bp, Artificial Sequence
  Description of Artificial Sequence: Synthetic oligonucleotide
  Target: LAMA2; (+) strand; PAM type: NRG; PAM sequence: GGG
atgacaaggtacagggccca

SEQ ID NO: 130844 - DNA, 20 bp, Artificial Sequence
  Description of Artificial Sequence: Synthetic oligonucleotide
  Target: LAMA2; (+) strand; PAM type: NRG; PAM sequence: TGG
aaggtacagggcccagggac

SEQ ID NO: 130845 - DNA, 20 bp, Artificial Sequence
  Description of Artificial Sequence: Synthetic oligonucleotide
  Target: LAMA2; (+) strand; PAM type: NRG; PAM sequence: AAG
ggcccagggactggcattta

SEQ ID NO: 130846 - DNA, 20 bp, Artificial Sequence
  Description of Artificial Sequence: Synthetic oligonucleotide
  Target: LAMA2; (+) strand; PAM type: NRG; PAM sequence: GAG
cccagggactggcatttaaa

SEQ ID NO: 130847 - DNA, 20 bp, Artificial Sequence
  Description of Artificial Sequence: Synthetic oligonucleotide
  Target: LAMA2; (+) strand; PAM type: NRG; PAM sequence: AAG
cacacttaaattcaacaaaa

SEQ ID NO: 130848 - DNA, 20 bp, Artificial Sequence
  Description of Artificial Sequence: Synthetic oligonucleotide
  Target: LAMA2; (+) strand; PAM type: NRG; PAM sequence: TAG
atccaattaccttaattgtg

SEQ ID NO: 130849 - DNA, 20 bp, Artificial Sequence
  Description of Artificial Sequence: Synthetic oligonucleotide
  Target: LAMA2; (+) strand; PAM type: NRG; PAM sequence: TGG
caattaccttaattgtgtag

SEQ ID NO: 130850 - DNA, 20 bp, Artificial Sequence
  Description of Artificial Sequence: Synthetic oligonucleotide
  Target: LAMA2; (+) strand; PAM type: NRG; PAM sequence: GGG
aattaccttaattgtgtagt

SEQ ID NO: 130851 - DNA, 20 bp, Artificial Sequence
  Description of Artificial Sequence: Synthetic oligonucleotide
  Target: LAMA2; (+) strand; PAM type: NRG; PAM sequence: GGG
attaccttaattgtgtagtg

SEQ ID NO: 130852 - DNA, 20 bp, Artificial Sequence
  Description of Artificial Sequence: Synthetic oligonucleotide
  Target: LAMA2; (+) strand; PAM type: NRG; PAM sequence: AAG
attgtgtagtggggaaaatg

SEQ ID NO: 130853 - DNA, 20 bp, Artificial Sequence
  Description of Artificial Sequence: Synthetic oligonucleotide
  Target: LAMA2; (+) strand; PAM type: NRG; PAM sequence: GAG
tgtgtagtggggaaaatgaa

SEQ ID NO: 130854 - DNA, 20 bp, Artificial Sequence
  Description of Artificial Sequence: Synthetic oligonucleotide
  Target: LAMA2; (+) strand; PAM type: NRG; PAM sequence: TGG
aaaatgaagagttgaatttc

SEQ ID NO: 130855 - DNA, 20 bp, Artificial Sequence
  Description of Artificial Sequence: Synthetic oligonucleotide
  Target: LAMA2; (+) strand; PAM type: NRG; PAM sequence: TAG
tgaagagttgaatttctggt

SEQ ID NO: 130856 - DNA, 20 bp, Artificial Sequence
  Description of Artificial Sequence: Synthetic oligonucleotide
  Target: LAMA2; (+) strand; PAM type: NRG; PAM sequence: TAG
gagttgaatttctggttagc

SEQ ID NO: 130857 - DNA, 20 bp, Artificial Sequence
  Description of Artificial Sequence: Synthetic oligonucleotide
  Target: LAMA2; (+) strand; PAM type: NRG; PAM sequence: TAG
gaatttctggttagctagac

SEQ ID NO: 130858 - DNA, 20 bp, Artificial Sequence
  Description of Artificial Sequence: Synthetic oligonucleotide
  Target: LAMA2; (+) strand; PAM type: NRG; PAM sequence: AGG
aatttctggttagctagact

SEQ ID NO: 130859 - DNA, 20 bp, Artificial Sequence
  Description of Artificial Sequence: Synthetic oligonucleotide
  Target: LAMA2; (+) strand; PAM type: NRG; PAM sequence: GGG
atttctggttagctagacta

SEQ ID NO: 130860 - DNA, 20 bp, Artificial Sequence
  Description of Artificial Sequence: Synthetic oligonucleotide
  Target: LAMA2; (+) strand; PAM type: NRG; PAM sequence: TAG
tctggttagctagactaggg

SEQ ID NO: 130861 - DNA, 20 bp, Artificial Sequence
  Description of Artificial Sequence: Synthetic oligonucleotide
  Target: LAMA2; (+) strand; PAM type: NRG; PAM sequence: AGG
ctggttagctagactagggt

SEQ ID NO: 130862 - DNA, 20 bp, Artificial Sequence
  Description of Artificial Sequence: Synthetic oligonucleotide
  Target: LAMA2; (+) strand; PAM type: NRG; PAM sequence: AAG
gttagctagactagggtagg

SEQ ID NO: 130863 - DNA, 20 bp, Artificial Sequence
  Description of Artificial Sequence: Synthetic oligonucleotide
  Target: LAMA2; (+) strand; PAM type: NRG; PAM sequence: CAG
agactagggtaggaagacac

SEQ ID NO: 130864 - DNA, 20 bp, Artificial Sequence
  Description of Artificial Sequence: Synthetic oligonucleotide
  Target: LAMA2; (+) strand; PAM type: NRG; PAM sequence: TGG
gacatttcaattttcccgct

SEQ ID NO: 130865 - DNA, 20 bp, Artificial Sequence
  Description of Artificial Sequence: Synthetic oligonucleotide
  Target: LAMA2; (+) strand; PAM type: NRG; PAM sequence: TAG
tgacattgatgattttgttg

SEQ ID NO: 130866 - DNA, 20 bp, Artificial Sequence
  Description of Artificial Sequence: Synthetic oligonucleotide
  Target: LAMA2; (+) strand; PAM type: NRG; PAM sequence: AGG
gacattgatgattttgttgt

SEQ ID NO: 130867 - DNA, 20 bp, Artificial Sequence
  Description of Artificial Sequence: Synthetic oligonucleotide
  Target: LAMA2; (+) strand; PAM type: NRG; PAM sequence: AAG
tccttgaatctactgatatg

SEQ ID NO: 130868 - DNA, 20 bp, Artificial Sequence
  Description of Artificial Sequence: Synthetic oligonucleotide
  Target: LAMA2; (+) strand; PAM type: NRG; PAM sequence: GAG
cttgaatctactgatatgaa

SEQ ID NO: 130869 - DNA, 20 bp, Artificial Sequence
  Description of Artificial Sequence: Synthetic oligonucleotide
  Target: LAMA2; (+) strand; PAM type: NRG; PAM sequence: AAG
aatctactgatatgaagaga

SEQ ID NO: 130870 - DNA, 20 bp, Artificial Sequence
  Description of Artificial Sequence: Synthetic oligonucleotide
  Target: LAMA2; (+) strand; PAM type: NRG; PAM sequence: AAG
tgaagagaaagctataacta

SEQ ID NO: 130871 - DNA, 20 bp, Artificial Sequence
  Description of Artificial Sequence: Synthetic oligonucleotide
  Target: LAMA2; (+) strand; PAM type: NRG; PAM sequence: AAG
agaaagctataactaaagtt

SEQ ID NO: 130872 - DNA, 20 bp, Artificial Sequence
  Description of Artificial Sequence: Synthetic oligonucleotide
  Target: LAMA2; (+) strand; PAM type: NRG; PAM sequence: AAG
ctaaagttaagacaatgtta

SEQ ID NO: 130873 - DNA, 20 bp, Artificial Sequence
  Description of Artificial Sequence: Synthetic oligonucleotide
  Target: LAMA2; (+) strand; PAM type: NRG; PAM sequence: AAG
agttaagacaatgttaaagt

SEQ ID NO: 130874 - DNA, 20 bp, Artificial Sequence
  Description of Artificial Sequence: Synthetic oligonucleotide
  Target: LAMA2; (+) strand; PAM type: NRG; PAM sequence: AGG
gttaagacaatgttaaagta

SEQ ID NO: 130875 - DNA, 20 bp, Artificial Sequence
  Description of Artificial Sequence: Synthetic oligonucleotide
  Target: LAMA2; (+) strand; PAM type: NRG; PAM sequence: CAG
ttaaagtaaggtccaattct

SEQ ID NO: 130876 - DNA, 20 bp, Artificial Sequence
  Description of Artificial Sequence: Synthetic oligonucleotide
  Target: LAMA2; (+) strand; PAM type: NRG; PAM sequence: CAG
gtccaattctcagttatcta

SEQ ID NO: 130877 - DNA, 20 bp, Artificial Sequence
  Description of Artificial Sequence: Synthetic oligonucleotide
  Target: LAMA2; (+) strand; PAM type: NRG; PAM sequence: AGG
tccaattctcagttatctac

SEQ ID NO: 130878 - DNA, 20 bp, Artificial Sequence
  Description of Artificial Sequence: Synthetic oligonucleotide
  Target: LAMA2; (+) strand; PAM type: NRG; PAM sequence: GGG
ccaattctcagttatctaca

SEQ ID NO: 130879 - DNA, 20 bp, Artificial Sequence
  Description of Artificial Sequence: Synthetic oligonucleotide
  Target: LAMA2; (+) strand; PAM type: NRG; PAM sequence: AAG
ttatctacagggctatccaa

SEQ ID NO: 130880 - DNA, 20 bp, Artificial Sequence
  Description of Artificial Sequence: Synthetic oligonucleotide
  Target: LAMA2; (+) strand; PAM type: NRG; PAM sequence: TGG
agggctatccaaaagaaaaa

SEQ ID NO: 130881 - DNA, 20 bp, Artificial Sequence
  Description of Artificial Sequence: Synthetic oligonucleotide
  Target: LAMA2; (+) strand; PAM type: NRG; PAM sequence: TAG
aatggaaatttcatttaaaa

SEQ ID NO: 130882 - DNA, 20 bp, Artificial Sequence
  Description of Artificial Sequence: Synthetic oligonucleotide
  Target: LAMA2; (+) strand; PAM type: NRG; PAM sequence: AAG
ttaaaatagctgcatctttt

SEQ ID NO: 130883 - DNA, 20 bp, Artificial Sequence
  Description of Artificial Sequence: Synthetic oligonucleotide
  Target: LAMA2; (+) strand; PAM type: NRG; PAM sequence: TAG
aaatagctgcatcttttaag

SEQ ID NO: 130884 - DNA, 20 bp, Artificial Sequence
  Description of Artificial Sequence: Synthetic oligonucleotide
  Target: LAMA2; (+) strand; PAM type: NRG; PAM sequence: AGG
aatagctgcatcttttaagt

SEQ ID NO: 130885 - DNA, 20 bp, Artificial Sequence
  Description of Artificial Sequence: Synthetic oligonucleotide
  Target: LAMA2; (+) strand; PAM type: NRG; PAM sequence: TGG
tcttttaagtaggaatattt

SEQ ID NO: 130886 - DNA, 20 bp, Artificial Sequence
  Description of Artificial Sequence: Synthetic oligonucleotide
  Target: LAMA2; (+) strand; PAM type: NRG; PAM sequence: GGG
cttttaagtaggaatatttt

SEQ ID NO: 130887 - DNA, 20 bp, Artificial Sequence
  Description of Artificial Sequence: Synthetic oligonucleotide
  Target: LAMA2; (+) strand; PAM type: NRG; PAM sequence: CAG
tattttgggctattatatgc

SEQ ID NO: 130888 - DNA, 20 bp, Artificial Sequence
  Description of Artificial Sequence: Synthetic oligonucleotide
  Target: LAMA2; (+) strand; PAM type: NRG; PAM sequence: TGG
ttatatgccagactcatcac

SEQ ID NO: 130889 - DNA, 20 bp, Artificial Sequence
  Description of Artificial Sequence: Synthetic oligonucleotide
  Target: LAMA2; (+) strand; PAM type: NRG; PAM sequence: GAG
taatttctcctcccatcaat

SEQ ID NO: 130890 - DNA, 20 bp, Artificial Sequence
  Description of Artificial Sequence: Synthetic oligonucleotide
  Target: LAMA2; (+) strand; PAM type: NRG; PAM sequence: GAG
atttctcctcccatcaatga

SEQ ID NO: 130891 - DNA, 20 bp, Artificial Sequence
  Description of Artificial Sequence: Synthetic oligonucleotide
  Target: LAMA2; (+) strand; PAM type: NRG; PAM sequence: GAG
catcaatgagagctctccct

SEQ ID NO: 130892 - DNA, 20 bp, Artificial Sequence
  Description of Artificial Sequence: Synthetic oligonucleotide
  Target: LAMA2; (+) strand; PAM type: NRG; PAM sequence: GAG
ctctccctgagacacattgt

SEQ ID NO: 130893 - DNA, 20 bp, Artificial Sequence
  Description of Artificial Sequence: Synthetic oligonucleotide
  Target: LAMA2; (+) strand; PAM type: NRG; PAM sequence: GAG
acacattgtgagatctttct

SEQ ID NO: 130894 - DNA, 20 bp, Artificial Sequence
  Description of Artificial Sequence: Synthetic oligonucleotide
  Target: LAMA2; (+) strand; PAM type: NRG; PAM sequence: AGG
cacattgtgagatctttctg

SEQ ID NO: 130895 - DNA, 20 bp, Artificial Sequence
  Description of Artificial Sequence: Synthetic oligonucleotide
  Target: LAMA2; (+) strand; PAM type: NRG; PAM sequence: CAG
aggatgaaatcacttaaccc

SEQ ID NO: 130896 - DNA, 20 bp, Artificial Sequence
  Description of Artificial Sequence: Synthetic oligonucleotide
  Target: LAMA2; (+) strand; PAM type: NRG; PAM sequence: CAG
gcaacgccactgattatttt

SEQ ID NO: 130897 - DNA, 20 bp, Artificial Sequence
  Description of Artificial Sequence: Synthetic oligonucleotide
  Target: LAMA2; (+) strand; PAM type: NRG; PAM sequence: AAG
caaaaaacattctgactaaa

SEQ ID NO: 130898 - DNA, 20 bp, Artificial Sequence
  Description of Artificial Sequence: Synthetic oligonucleotide
  Target: LAMA2; (+) strand; PAM type: NRG; PAM sequence: AAG
attctgactaaaaagctcaa

SEQ ID NO: 130899 - DNA, 20 bp, Artificial Sequence
  Description of Artificial Sequence: Synthetic oligonucleotide
  Target: LAMA2; (+) strand; PAM type: NRG; PAM sequence: AAG
aagctcaaaagaaaataatt

SEQ ID NO: 130900 - DNA, 20 bp, Artificial Sequence
  Description of Artificial Sequence: Synthetic oligonucleotide
  Target: LAMA2; (+) strand; PAM type: NRG; PAM sequence: AAG
agcattctcttttccatatg

SEQ ID NO: 130901 - DNA, 20 bp, Artificial Sequence
  Description of Artificial Sequence: Synthetic oligonucleotide
  Target: LAMA2; (+) strand; PAM type: NRG; PAM sequence: CAG
catatgaagatattactgac

SEQ ID NO: 130902 - DNA, 20 bp, Artificial Sequence
  Description of Artificial Sequence: Synthetic oligonucleotide
  Target: LAMA2; (+) strand; PAM type: NRG; PAM sequence: CAG
atgaagatattactgaccag

SEQ ID NO: 130903 - DNA, 20 bp, Artificial Sequence
  Description of Artificial Sequence: Synthetic oligonucleotide
  Target: LAMA2; (+) strand; PAM type: NRG; PAM sequence: AAG
agatattactgaccagcaga

SEQ ID NO: 130904 - DNA, 20 bp, Artificial Sequence
  Description of Artificial Sequence: Synthetic oligonucleotide
  Target: LAMA2; (+) strand; PAM type: NRG; PAM sequence: TGG
tattactgaccagcagaaag

SEQ ID NO: 130905 - DNA, 20 bp, Artificial Sequence
  Description of Artificial Sequence: Synthetic oligonucleotide
  Target: LAMA2; (+) strand; PAM type: NRG; PAM sequence: TAG
aaatgtatacataatgttta

SEQ ID NO: 130906 - DNA, 20 bp, Artificial Sequence
  Description of Artificial Sequence: Synthetic oligonucleotide
  Target: LAMA2; (+) strand; PAM type: NRG; PAM sequence: GAG
atagatactgacttaacaat

SEQ ID NO: 130907 - DNA, 20 bp, Artificial Sequence
  Description of Artificial Sequence: Synthetic oligonucleotide
  Target: LAMA2; (+) strand; PAM type: NRG; PAM sequence: CAG
ctgacttaacaatgagtgaa

SEQ ID NO: 130908 - DNA, 20 bp, Artificial Sequence
  Description of Artificial Sequence: Synthetic oligonucleotide
  Target: LAMA2; (+) strand; PAM type: NRG; PAM sequence: CAG
cagttgcgtctcacaaattt

SEQ ID NO: 130909 - DNA, 20 bp, Artificial Sequence
  Description of Artificial Sequence: Synthetic oligonucleotide
  Target: LAMA2; (+) strand; PAM type: NRG; PAM sequence: CAG
ttgcgtctcacaaatttcag

SEQ ID NO: 130910 - DNA, 20 bp, Artificial Sequence
  Description of Artificial Sequence: Synthetic oligonucleotide
  Target: LAMA2; (+) strand; PAM type: NRG; PAM sequence: CAG
tttcagcagcgttgtcttga

SEQ ID NO: 130911 - DNA, 20 bp, Artificial Sequence
  Description of Artificial Sequence: Synthetic oligonucleotide
  Target: LAMA2; (+) strand; PAM type: NRG; PAM sequence: TGG
cagcagcgttgtcttgacag

SEQ ID NO: 130912 - DNA, 20 bp, Artificial Sequence
  Description of Artificial Sequence: Synthetic oligonucleotide
  Target: LAMA2; (+) strand; PAM type: NRG; PAM sequence: TGG
gttgtcttgacagtggatca

SEQ ID NO: 130913 - DNA, 20 bp, Artificial Sequence
  Description of Artificial Sequence: Synthetic oligonucleotide
  Target: LAMA2; (+) strand; PAM type: NRG; PAM sequence: TAG
tcatggtgcttctgtgttgc

SEQ ID NO: 130914 - DNA, 20 bp, Artificial Sequence
  Description of Artificial Sequence: Synthetic oligonucleotide
  Target: LAMA2; (+) strand; PAM type: NRG; PAM sequence: AGG
catggtgcttctgtgttgct

SEQ ID NO: 130915 - DNA, 20 bp, Artificial Sequence
  Description of Artificial Sequence: Synthetic oligonucleotide
  Target: LAMA2; (+) strand; PAM type: NRG; PAM sequence: GAG
tctgtgttgctaggcaaccc

SEQ ID NO: 130916 - DNA, 20 bp, Artificial Sequence
  Description of Artificial Sequence: Synthetic oligonucleotide
  Target: LAMA2; (+) strand; PAM type: NRG; PAM sequence: AGG
ctgtgttgctaggcaacccg

SEQ ID NO: 130917 - DNA, 20 bp, Artificial Sequence
  Description of Artificial Sequence: Synthetic oligonucleotide
  Target: LAMA2; (+) strand; PAM type: NRG; PAM sequence: GGG
tgtgttgctaggcaacccga

SEQ ID NO: 130918 - DNA, 20 bp, Artificial Sequence
  Description of Artificial Sequence: Synthetic oligonucleotide
  Target: LAMA2; (+) strand; PAM type: NRG; PAM sequence: GGG
gtgttgctaggcaacccgag

SEQ ID NO: 130919 - DNA, 20 bp, Artificial Sequence
  Description of Artificial Sequence: Synthetic oligonucleotide
  Target: LAMA2; (+) strand; PAM type: NRG; PAM sequence: TGG
tgctaggcaacccgagggga

SEQ ID NO: 130920 - DNA, 20 bp, Artificial Sequence
  Description of Artificial Sequence: Synthetic oligonucleotide
  Target: LAMA2; (+) strand; PAM type: NRG; PAM sequence: TAG
tcaaatttacttatgtatgt

SEQ ID NO: 130921 - DNA, 20 bp, Artificial Sequence
  Description of Artificial Sequence: Synthetic oligonucleotide
  Target: LAMA2; (+) strand; PAM type: NRG; PAM sequence: TAG
tacttatgtatgttagattt

SEQ ID NO: 130922 - DNA, 20 bp, Artificial Sequence
  Description of Artificial Sequence: Synthetic oligonucleotide
  Target: LAMA2; (+) strand; PAM type: NRG; PAM sequence: GAG
gattttagacatattatatt

SEQ ID NO: 130923 - DNA, 20 bp, Artificial Sequence
  Description of Artificial Sequence: Synthetic oligonucleotide
  Target: LAMA2; (+) strand; PAM type: NRG; PAM sequence: GAG
ttttagacatattatattga

SEQ ID NO: 130924 - DNA, 20 bp, Artificial Sequence
  Description of Artificial Sequence: Synthetic oligonucleotide
  Target: LAMA2; (+) strand; PAM type: NRG; PAM sequence: CAG
gtgtattacacatgtcatta

SEQ ID NO: 130925 - DNA, 20 bp, Artificial Sequence
  Description of Artificial Sequence: Synthetic oligonucleotide
  Target: LAMA2; (+) strand; PAM type: NRG; PAM sequence: AGG
tgtattacacatgtcattac

SEQ ID NO: 130926 - DNA, 20 bp, Artificial Sequence
  Description of Artificial Sequence: Synthetic oligonucleotide
  Target: LAMA2; (+) strand; PAM type: NRG; PAM sequence: TAG
ttacacatgtcattacaggc

SEQ ID NO: 130927 - DNA, 20 bp, Artificial Sequence
  Description of Artificial Sequence: Synthetic oligonucleotide
  Target: LAMA2; (+) strand; PAM type: NRG; PAM sequence: GAG
ttctattctgtcttttatgt

SEQ ID NO: 130928 - DNA, 20 bp, Artificial Sequence
  Description of Artificial Sequence: Synthetic oligonucleotide
  Target: LAMA2; (+) strand; PAM type: NRG; PAM sequence: CAG
tgtcttttatgtgagtttct

SEQ ID NO: 130929 - DNA, 20 bp, Artificial Sequence
  Description of Artificial Sequence: Synthetic oligonucleotide
  Target: LAMA2; (+) strand; PAM type: NRG; PAM sequence: AAG
gtttctcagtatatacatga

SEQ ID NO: 130930 - DNA, 20 bp, Artificial Sequence
  Description of Artificial Sequence: Synthetic oligonucleotide
  Target: LAMA2; (+) strand; PAM type: NRG; PAM sequence: TAG
tctatttttgaaaattaaca

SEQ ID NO: 130931 - DNA, 20 bp, Artificial Sequence
  Description of Artificial Sequence: Synthetic oligonucleotide
  Target: LAMA2; (+) strand; PAM type: NRG; PAM sequence: TGG
agtcctaatatgcattttta

SEQ ID NO: 130932 - DNA, 20 bp, Artificial Sequence
  Description of Artificial Sequence: Synthetic oligonucleotide
  Target: LAMA2; (+) strand; PAM type: NRG; PAM sequence: CAG
atatgcatttttatggttga

SEQ ID NO: 130933 - DNA, 20 bp, Artificial Sequence
  Description of Artificial Sequence: Synthetic oligonucleotide
  Target: LAMA2; (+) strand; PAM type: NRG; PAM sequence: TGG
atttttatggttgacagtcg

SEQ ID NO: 130934 - DNA, 20 bp, Artificial Sequence
  Description of Artificial Sequence: Synthetic oligonucleotide
  Target: LAMA2; (+) strand; PAM type: NRG; PAM sequence: GAG
ggttgacagtcgtggtatat

SEQ ID NO: 130935 - DNA, 20 bp, Artificial Sequence
  Description of Artificial Sequence: Synthetic oligonucleotide
  Target: LAMA2; (+) strand; PAM type: NRG; PAM sequence: GAG
ttgacagtcgtggtatatga

SEQ ID NO: 130936 - DNA, 20 bp, Artificial Sequence
  Description of Artificial Sequence: Synthetic oligonucleotide
  Target: LAMA2; (+) strand; PAM type: NRG; PAM sequence: TAG
ggtatatgagagaaaatatg

SEQ ID NO: 130937 - DNA, 20 bp, Artificial Sequence
  Description of Artificial Sequence: Synthetic oligonucleotide
  Target: LAMA2; (+) strand; PAM type: NRG; PAM sequence: AAG
tatgtagcctttgatgtaaa

SEQ ID NO: 130938 - DNA, 20 bp, Artificial Sequence
  Description of Artificial Sequence: Synthetic oligonucleotide
  Target: LAMA2; (+) strand; PAM type: NRG; PAM sequence: CAG
caatatatgcttgtgtgtgt

SEQ ID NO: 130939 - DNA, 20 bp, Artificial Sequence
  Description of Artificial Sequence: Synthetic oligonucleotide
  Target: LAMA2; (+) strand; PAM type: NRG; PAM sequence: CAG
atatgcttgtgtgtgtcagt

SEQ ID NO: 130940 - DNA, 20 bp, Artificial Sequence
  Description of Artificial Sequence: Synthetic oligonucleotide
  Target: LAMA2; (+) strand; PAM type: NRG; PAM sequence: GAG
atgcttgtgtgtgtcagtca

SEQ ID NO: 130941 - DNA, 20 bp, Artificial Sequence
  Description of Artificial Sequence: Synthetic oligonucleotide
  Target: LAMA2; (+) strand; PAM type: NRG; PAM sequence: AGG
tgcttgtgtgtgtcagtcag

SEQ ID NO: 130942 - DNA, 20 bp, Artificial Sequence
  Description of Artificial Sequence: Synthetic oligonucleotide
  Target: LAMA2; (+) strand; PAM type: NRG; PAM sequence: GGG
gcttgtgtgtgtcagtcaga

SEQ ID NO: 130943 - DNA, 20 bp, Artificial Sequence
  Description of Artificial Sequence: Synthetic oligonucleotide
  Target: LAMA2; (+) strand; PAM type: NRG; PAM sequence: GGG
cttgtgtgtgtcagtcagag

SEQ ID NO: 130944 - DNA, 20 bp, Artificial Sequence
  Description of Artificial Sequence: Synthetic oligonucleotide
  Target: LAMA2; (+) strand; PAM type: NRG; PAM sequence: GGG
ttgtgtgtgtcagtcagagg

SEQ ID NO: 130945 - DNA, 20 bp, Artificial Sequence
  Description of Artificial Sequence: Synthetic oligonucleotide
  Target: LAMA2; (+) strand; PAM type: NRG; PAM sequence: GAG
gtgtgtgtcagtcagagggg

SEQ ID NO: 130946 - DNA, 20 bp, Artificial Sequence
  Description of Artificial Sequence: Synthetic oligonucleotide
  Target: LAMA2; (+) strand; PAM type: NRG; PAM sequence: AGG
tgtgtgtcagtcagaggggg

SEQ ID NO: 130947 - DNA, 20 bp, Artificial Sequence
  Description of Artificial Sequence: Synthetic oligonucleotide
  Target: LAMA2; (+) strand; PAM type: NRG; PAM sequence: TGG
gtgtcagtcagagggggagg

SEQ ID NO: 130948 - DNA, 20 bp, Artificial Sequence
  Description of Artificial Sequence: Synthetic oligonucleotide
  Target: LAMA2; (+) strand; PAM type: NRG; PAM sequence: GAG
gtcagtcagagggggaggtg

SEQ ID NO: 130949 - DNA, 20 bp, Artificial Sequence
  Description of Artificial Sequence: Synthetic oligonucleotide
  Target: LAMA2; (+) strand; PAM type: NRG; PAM sequence: GAG
cagtcagagggggaggtgga

SEQ ID NO: 130950 - DNA, 20 bp, Artificial Sequence
  Description of Artificial Sequence: Synthetic oligonucleotide
  Target: LAMA2; (+) strand; PAM type: NRG; PAM sequence: GAG
gtcagagggggaggtggaga

SEQ ID NO: 130951 - DNA, 20 bp, Artificial Sequence
  Description of Artificial Sequence: Synthetic oligonucleotide
  Target: LAMA2; (+) strand; PAM type: NRG; PAM sequence: AGG
tcagagggggaggtggagag

SEQ ID NO: 130952 - DNA, 20 bp, Artificial Sequence
  Description of Artificial Sequence: Synthetic oligonucleotide
  Target: LAMA2; (+) strand; PAM type: NRG; PAM sequence: CAG
gagggggaggtggagagagg

SEQ ID NO: 130953 - DNA, 20 bp, Artificial Sequence
  Description of Artificial Sequence: Synthetic oligonucleotide
  Target: LAMA2; (+) strand; PAM type: NRG; PAM sequence: AAG
agaggcagtgtttctgaaac

SEQ ID NO: 130954 - DNA, 20 bp, Artificial Sequence
  Description of Artificial Sequence: Synthetic oligonucleotide
  Target: LAMA2; (+) strand; PAM type: NRG; PAM sequence: GAG
aggcagtgtttctgaaacaa

SEQ ID NO: 130955 - DNA, 20 bp, Artificial Sequence
  Description of Artificial Sequence: Synthetic oligonucleotide
  Target: LAMA2; (+) strand; PAM type: NRG; PAM sequence: AAG
ctgaaacaagagatctatga

SEQ ID NO: 130956 - DNA, 20 bp, Artificial Sequence
  Description of Artificial Sequence: Synthetic oligonucleotide
  Target: LAMA2; (+) strand; PAM type: NRG; PAM sequence: AAG
aaacaagagatctatgaaag

SEQ ID NO: 130957 - DNA, 20 bp, Artificial Sequence
  Description of Artificial Sequence: Synthetic oligonucleotide
  Target: LAMA2; (+) strand; PAM type: NRG; PAM sequence: AGG
aacaagagatctatgaaaga

SEQ ID NO: 130958 - DNA, 20 bp, Artificial Sequence
  Description of Artificial Sequence: Synthetic oligonucleotide
  Target: LAMA2; (+) strand; PAM type: NRG; PAM sequence: GGG
acaagagatctatgaaagaa

SEQ ID NO: 130959 - DNA, 20 bp, Artificial Sequence
  Description of Artificial Sequence: Synthetic oligonucleotide
  Target: LAMA2; (+) strand; PAM type: NRG; PAM sequence: CAG
agatctatgaaagaagggaa

SEQ ID NO: 130960 - DNA, 20 bp, Artificial Sequence
  Description of Artificial Sequence: Synthetic oligonucleotide
  Target: LAMA2; (+) strand; PAM type: NRG; PAM sequence: TAG
gaaagaagggaacagtctgt

SEQ ID NO: 130961 - DNA, 20 bp, Artificial Sequence
  Description of Artificial Sequence: Synthetic oligonucleotide
  Target: LAMA2; (+) strand; PAM type: NRG; PAM sequence: TGG
aacagtctgttagttccacc

SEQ ID NO: 130962 - DNA, 20 bp, Artificial Sequence
  Description of Artificial Sequence: Synthetic oligonucleotide
  Target: LAMA2; (+) strand; PAM type: NRG; PAM sequence: CAG
attactataattaatatatg

SEQ ID NO: 130963 - DNA, 20 bp, Artificial Sequence
  Description of Artificial Sequence: Synthetic oligonucleotide
  Target: LAMA2; (+) strand; PAM type: NRG; PAM sequence: AAG
actataattaatatatgcag

SEQ ID NO: 130964 - DNA, 20 bp, Artificial Sequence
  Description of Artificial Sequence: Synthetic oligonucleotide
  Target: LAMA2; (+) strand; PAM type: NRG; PAM sequence: TAG
atatgcagaagaaaaattaa

SEQ ID NO: 130965 - DNA, 20 bp, Artificial Sequence
  Description of Artificial Sequence: Synthetic oligonucleotide
  Target: LAMA2; (+) strand; PAM type: NRG; PAM sequence: AGG
tatgcagaagaaaaattaat

SEQ ID NO: 130966 - DNA, 20 bp, Artificial Sequence
  Description of Artificial Sequence: Synthetic oligonucleotide
  Target: LAMA2; (+) strand; PAM type: NRG; PAM sequence: GGG
atgcagaagaaaaattaata

SEQ ID NO: 130967 - DNA, 20 bp, Artificial Sequence
  Description of Artificial Sequence: Synthetic oligonucleotide
  Target: LAMA2; (+) strand; PAM type: NRG; PAM sequence: CAG
attaatagggttcttaaatc

SEQ ID NO: 130968 - DNA, 20 bp, Artificial Sequence
  Description of Artificial Sequence: Synthetic oligonucleotide
  Target: LAMA2; (+) strand; PAM type: NRG; PAM sequence: AGG
ttaatagggttcttaaatcc

SEQ ID NO: 130969 - DNA, 20 bp, Artificial Sequence
  Description of Artificial Sequence: Synthetic oligonucleotide
  Target: LAMA2; (+) strand; PAM type: NRG; PAM sequence: GGG
taatagggttcttaaatcca

SEQ ID NO: 130970 - DNA, 20 bp, Artificial Sequence
  Description of Artificial Sequence: Synthetic oligonucleotide
  Target: LAMA2; (+) strand; PAM type: NRG; PAM sequence: GAG
atagggttcttaaatccagg

SEQ ID NO: 130971 - DNA, 20 bp, Artificial Sequence
  Description of Artificial Sequence: Synthetic oligonucleotide
  Target: LAMA2; (+) strand; PAM type: NRG; PAM sequence: TGG
gatattaaatgtcaaaaatg

SEQ ID NO: 130972 - DNA, 20 bp, Artificial Sequence
  Description of Artificial Sequence: Synthetic oligonucleotide
  Target: LAMA2; (+) strand; PAM type: NRG; PAM sequence: AAG
aaatgtggatatttgaatta

SEQ ID NO: 130973 - DNA, 20 bp, Artificial Sequence
  Description of Artificial Sequence: Synthetic oligonucleotide
  Target: LAMA2; (+) strand; PAM type: NRG; PAM sequence: AAG
aacaatacattataatgtta

SEQ ID NO: 130974 - DNA, 20 bp, Artificial Sequence
  Description of Artificial Sequence: Synthetic oligonucleotide
  Target: LAMA2; (+) strand; PAM type: NRG; PAM sequence: TGG
acattataatgttaaagaac

SEQ ID NO: 130975 - DNA, 20 bp, Artificial Sequence
  Description of Artificial Sequence: Synthetic oligonucleotide
  Target: LAMA2; (+) strand; PAM type: NRG; PAM sequence: TAG
ttataatgttaaagaactgg

SEQ ID NO: 130976 - DNA, 20 bp, Artificial Sequence
  Description of Artificial Sequence: Synthetic oligonucleotide
  Target: LAMA2; (+) strand; PAM type: NRG; PAM sequence: AAG
actggtagcatattaatttc

SEQ ID NO: 130977 - DNA, 20 bp, Artificial Sequence
  Description of Artificial Sequence: Synthetic oligonucleotide
  Target: LAMA2; (+) strand; PAM type: NRG; PAM sequence: GAG
gtagcatattaatttcaagt

SEQ ID NO: 130978 - DNA, 20 bp, Artificial Sequence
  Description of Artificial Sequence: Synthetic oligonucleotide
  Target: LAMA2; (+) strand; PAM type: NRG; PAM sequence: GAG
agcatattaatttcaagtga

SEQ ID NO: 130979 - DNA, 20 bp, Artificial Sequence
  Description of Artificial Sequence: Synthetic oligonucleotide
  Target: LAMA2; (+) strand; PAM type: NRG; PAM sequence: CAG
agttttaaacttgataactg

SEQ ID NO: 130980 - DNA, 20 bp, Artificial Sequence
  Description of Artificial Sequence: Synthetic oligonucleotide
  Target: LAMA2; (+) strand; PAM type: NRG; PAM sequence: TGG
tttaaacttgataactgcag

SEQ ID NO: 130981 - DNA, 20 bp, Artificial Sequence
  Description of Artificial Sequence: Synthetic oligonucleotide
  Target: LAMA2; (+) strand; PAM type: NRG; PAM sequence: AAG
ggttttgtgaatccaatttt

SEQ ID NO: 130982 - DNA, 20 bp, Artificial Sequence
  Description of Artificial Sequence: Synthetic oligonucleotide
  Target: LAMA2; (+) strand; PAM type: NRG; PAM sequence: GAG
ttttgtgaatccaattttaa

SEQ ID NO: 130983 - DNA, 20 bp, Artificial Sequence
  Description of Artificial Sequence: Synthetic oligonucleotide
  Target: LAMA2; (+) strand; PAM type: NRG; PAM sequence: CAG
gttgtgtcaatgccatgaat

SEQ ID NO: 130984 - DNA, 20 bp, Artificial Sequence
  Description of Artificial Sequence: Synthetic oligonucleotide
  Target: LAMA2; (+) strand; PAM type: NRG; PAM sequence: GAG
tgtgtcaatgccatgaatca

SEQ ID NO: 130985 - DNA, 20 bp, Artificial Sequence
  Description of Artificial Sequence: Synthetic oligonucleotide
  Target: LAMA2; (+) strand; PAM type: NRG; PAM sequence: TAG
caatgccatgaatcagagaa

SEQ ID NO: 130986 - DNA, 20 bp, Artificial Sequence
  Description of Artificial Sequence: Synthetic oligonucleotide
  Target: LAMA2; (+) strand; PAM type: NRG; PAM sequence: AAG
agaatagatatttataacaa

SEQ ID NO: 130987 - DNA, 20 bp, Artificial Sequence
  Description of Artificial Sequence: Synthetic oligonucleotide
  Target: LAMA2; (+) strand; PAM type: NRG; PAM sequence: TAG
ctgtatgaaatgatgcataa

SEQ ID NO: 130988 - DNA, 20 bp, Artificial Sequence
  Description of Artificial Sequence: Synthetic oligonucleotide
  Target: LAMA2; (+) strand; PAM type: NRG; PAM sequence: TGG
atgaaatgatgcataataga

SEQ ID NO: 130989 - DNA, 20 bp, Artificial Sequence
  Description of Artificial Sequence: Synthetic oligonucleotide
  Target: LAMA2; (+) strand; PAM type: NRG; PAM sequence: TGG
tgatgcataatagatggtga

SEQ ID NO: 130990 - DNA, 20 bp, Artificial Sequence
  Description of Artificial Sequence: Synthetic oligonucleotide
  Target: LAMA2; (+) strand; PAM type: NRG; PAM sequence: AAG
ataatagatggtgatggctg

SEQ ID NO: 130991 - DNA, 20 bp, Artificial Sequence
  Description of Artificial Sequence: Synthetic oligonucleotide
  Target: LAMA2; (+) strand; PAM type: NRG; PAM sequence: TGG
ctgaagctgctgaaaattga

SEQ ID NO: 130992 - DNA, 20 bp, Artificial Sequence
  Description of Artificial Sequence: Synthetic oligonucleotide
  Target: LAMA2; (+) strand; PAM type: NRG; PAM sequence: AAG
aaattgatggtctaaatcaa

SEQ ID NO: 130993 - DNA, 20 bp, Artificial Sequence
  Description of Artificial Sequence: Synthetic oligonucleotide
  Target: LAMA2; (+) strand; PAM type: NRG; PAM sequence: AGG
aattgatggtctaaatcaaa

SEQ ID NO: 130994 - DNA, 20 bp, Artificial Sequence
  Description of Artificial Sequence: Synthetic oligonucleotide
  Target: LAMA2; (+) strand; PAM type: NRG; PAM sequence: TGG
gatggtctaaatcaaaagga

SEQ ID NO: 130995 - DNA, 20 bp, Artificial Sequence
  Description of Artificial Sequence: Synthetic oligonucleotide
  Target: LAMA2; (+) strand; PAM type: NRG; PAM sequence: TAG
tctaaatcaaaaggatggat

SEQ ID NO: 130996 - DNA, 20 bp, Artificial Sequence
  Description of Artificial Sequence: Synthetic oligonucleotide
  Target: LAMA2; (+) strand; PAM type: NRG; PAM sequence: AGG
ctaaatcaaaaggatggatt

SEQ ID NO: 130997 - DNA, 20 bp, Artificial Sequence
  Description of Artificial Sequence: Synthetic oligonucleotide
  Target: LAMA2; (+) strand; PAM type: NRG; PAM sequence: CGG
ggatggattaggaatctttg

SEQ ID NO: 130998 - DNA, 20 bp, Artificial Sequence
  Description of Artificial Sequence: Synthetic oligonucleotide
  Target: LAMA2; (+) strand; PAM type: NRG; PAM sequence: CAG
gaatctttgcggaattatta

SEQ ID NO: 130999 - DNA, 20 bp, Artificial Sequence
  Description of Artificial Sequence: Synthetic oligonucleotide
  Target: LAMA2; (+) strand; PAM type: NRG; PAM sequence: TAG
gcggaattattacagacctg

SEQ ID NO: 131000 - DNA, 20 bp, Artificial Sequence
  Description of Artificial Sequence: Synthetic oligonucleotide
  Target: LAMA2; (+) strand; PAM type: NRG; PAM sequence: GAG
ttacagacctgtagttttgt

SEQ ID NO: 131001 - DNA, 20 bp, Artificial Sequence
  Description of Artificial Sequence: Synthetic oligonucleotide
  Target: LAMA2; (+) strand; PAM type: NRG; PAM sequence: AAG
gacctgtagttttgtgagaa

SEQ ID NO: 131002 - DNA, 20 bp, Artificial Sequence
  Description of Artificial Sequence: Synthetic oligonucleotide
  Target: LAMA2; (+) strand; PAM type: NRG; PAM sequence: CAG
ctgtagttttgtgagaaaag

SEQ ID NO: 131003 - DNA, 20 bp, Artificial Sequence
  Description of Artificial Sequence: Synthetic oligonucleotide
  Target: LAMA2; (+) strand; PAM type: NRG; PAM sequence: GAG
gtagttttgtgagaaaagca

SEQ ID NO: 131004 - DNA, 20 bp, Artificial Sequence
  Description of Artificial Sequence: Synthetic oligonucleotide
  Target: LAMA2; (+) strand; PAM type: NRG; PAM sequence: AAG
tgagaaaagcagagaatgtc

SEQ ID NO: 131005 - DNA, 20 bp, Artificial Sequence
  Description of Artificial Sequence: Synthetic oligonucleotide
  Target: LAMA2; (+) strand; PAM type: NRG; PAM sequence: AGG
gagaaaagcagagaatgtca

SEQ ID NO: 131006 - DNA, 20 bp, Artificial Sequence
  Description of Artificial Sequence: Synthetic oligonucleotide
  Target: LAMA2; (+) strand; PAM type: NRG; PAM sequence: AAG
atgtcaaggtcttttacttc

SEQ ID NO: 131007 - DNA, 20 bp, Artificial Sequence
  Description of Artificial Sequence: Synthetic oligonucleotide
  Target: LAMA2; (+) strand; PAM type: NRG; PAM sequence: AGG
tgtcaaggtcttttacttca

SEQ ID NO: 131008 - DNA, 20 bp, Artificial Sequence
  Description of Artificial Sequence: Synthetic oligonucleotide
  Target: LAMA2; (+) strand; PAM type: NRG; PAM sequence: GAG
tcaaggtcttttacttcaag

SEQ ID NO: 131009 - DNA, 20 bp, Artificial Sequence
  Description of Artificial Sequence: Synthetic oligonucleotide
  Target: LAMA2; (+) strand; PAM type: NRG; PAM sequence: AGG
caaggtcttttacttcaagg

SEQ ID NO: 131010 - DNA, 20 bp, Artificial Sequence
  Description of Artificial Sequence: Synthetic oligonucleotide
  Target: LAMA2; (+) strand; PAM type: NRG; PAM sequence: AAG
tttacttcaaggaggatttg

SEQ ID NO: 131011 - DNA, 20 bp, Artificial Sequence
  Description of Artificial Sequence: Synthetic oligonucleotide
  Target: LAMA2; (+) strand; PAM type: NRG; PAM sequence: TGG
caaggaggatttgaagtatt

SEQ ID NO: 131012 - DNA, 20 bp, Artificial Sequence
  Description of Artificial Sequence: Synthetic oligonucleotide
  Target: LAMA2; (+) strand; PAM type: NRG; PAM sequence: GGG
aaggaggatttgaagtattt

SEQ ID NO: 131013 - DNA, 20 bp, Artificial Sequence
  Description of Artificial Sequence: Synthetic oligonucleotide
  Target: LAMA2; (+) strand; PAM type: NRG; PAM sequence: GGG
aggaggatttgaagtatttg

SEQ ID NO: 131014 - DNA, 20 bp, Artificial Sequence
  Description of Artificial Sequence: Synthetic oligonucleotide
  Target: LAMA2; (+) strand; PAM type: NRG; PAM sequence: GGG
ggaggatttgaagtatttgg

SEQ ID NO: 131015 - DNA, 20 bp, Artificial Sequence
  Description of Artificial Sequence: Synthetic oligonucleotide
  Target: LAMA2; (+) strand; PAM type: NRG; PAM sequence: TAG
gggggtatacattattgcat

SEQ ID NO: 131016 - DNA, 20 bp, Artificial Sequence
  Description of Artificial Sequence: Synthetic oligonucleotide
  Target: LAMA2; (+) strand; PAM type: NRG; PAM sequence: TAG
tatacattattgcattagct

SEQ ID NO: 131017 - DNA, 20 bp, Artificial Sequence
  Description of Artificial Sequence: Synthetic oligonucleotide
  Target: LAMA2; (+) strand; PAM type: NRG; PAM sequence: CAG
cattattgcattagcttagt

SEQ ID NO: 131018 - DNA, 20 bp, Artificial Sequence
  Description of Artificial Sequence: Synthetic oligonucleotide
  Target: LAMA2; (+) strand; PAM type: NRG; PAM sequence: CAG
gcattagcttagtcagttta

SEQ ID NO: 131019 - DNA, 20 bp, Artificial Sequence
  Description of Artificial Sequence: Synthetic oligonucleotide
  Target: LAMA2; (+) strand; PAM type: NRG; PAM sequence: TAG
tagcttagtcagtttacagc

SEQ ID NO: 131020 - DNA, 20 bp, Artificial Sequence
  Description of Artificial Sequence: Synthetic oligonucleotide
  Target: LAMA2; (+) strand; PAM type: NRG; PAM sequence: TAG
ttagtcagtttacagctagc

SEQ ID NO: 131021 - DNA, 20 bp, Artificial Sequence
  Description of Artificial Sequence: Synthetic oligonucleotide
  Target: LAMA2; (+) strand; PAM type: NRG; PAM sequence: CAG
tcagtttacagctagctaga

SEQ ID NO: 131022 - DNA, 20 bp, Artificial Sequence
  Description of Artificial Sequence: Synthetic oligonucleotide
  Target: LAMA2; (+) strand; PAM type: NRG; PAM sequence: AAG
ctagacagtgcaaacttgtg

SEQ ID NO: 131023 - DNA, 20 bp, Artificial Sequence
  Description of Artificial Sequence: Synthetic oligonucleotide
  Target: LAMA2; (+) strand; PAM type: NRG; PAM sequence: AGG
tagacagtgcaaacttgtga

SEQ ID NO: 131024 - DNA, 20 bp, Artificial Sequence
  Description of Artificial Sequence: Synthetic oligonucleotide
  Target: LAMA2; (+) strand; PAM type: NRG; PAM sequence: GAG
gacagtgcaaacttgtgaag

SEQ ID NO: 131025 - DNA, 20 bp, Artificial Sequence
  Description of Artificial Sequence: Synthetic oligonucleotide
  Target: LAMA2; (+) strand; PAM type: NRG; PAM sequence: AGG
acagtgcaaacttgtgaagg

SEQ ID NO: 131026 - DNA, 20 bp, Artificial Sequence
  Description of Artificial Sequence: Synthetic oligonucleotide
  Target: LAMA2; (+) strand; PAM type: NRG; PAM sequence: CAG
cttgtgaaggaggatgtttt

SEQ ID NO: 131027 - DNA, 20 bp, Artificial Sequence
  Description of Artificial Sequence: Synthetic oligonucleotide
  Target: LAMA2; (+) strand; PAM type: NRG; PAM sequence: TAG
atgttttcagtatatcacac

SEQ ID NO: 131028 - DNA, 20 bp, Artificial Sequence
  Description of Artificial Sequence: Synthetic oligonucleotide
  Target: LAMA2; (+) strand; PAM type: NRG; PAM sequence: AGG
tgttttcagtatatcacact

SEQ ID NO: 131029 - DNA, 20 bp, Artificial Sequence
  Description of Artificial Sequence: Synthetic oligonucleotide
  Target: LAMA2; (+) strand; PAM type: NRG; PAM sequence: TGG
agtatatcacactaggatca

SEQ ID NO: 131030 - DNA, 20 bp, Artificial Sequence
  Description of Artificial Sequence: Synthetic oligonucleotide
  Target: LAMA2; (+) strand; PAM type: NRG; PAM sequence: CAG
tcacactaggatcatggcac

SEQ ID NO: 131031 - DNA, 20 bp, Artificial Sequence
  Description of Artificial Sequence: Synthetic oligonucleotide
  Target: LAMA2; (+) strand; PAM type: NRG; PAM sequence: AAG
ggatcatggcaccagtcctg

SEQ ID NO: 131032 - DNA, 20 bp, Artificial Sequence
  Description of Artificial Sequence: Synthetic oligonucleotide
  Target: LAMA2; (+) strand; PAM type: NRG; PAM sequence: TAG
tggcaccagtcctgaagaaa

SEQ ID NO: 131033 - DNA, 20 bp, Artificial Sequence
  Description of Artificial Sequence: Synthetic oligonucleotide
  Target: LAMA2; (+) strand; PAM type: NRG; PAM sequence: AGG
ggcaccagtcctgaagaaat

SEQ ID NO: 131034 - DNA, 20 bp, Artificial Sequence
  Description of Artificial Sequence: Synthetic oligonucleotide
  Target: LAMA2; (+) strand; PAM type: NRG; PAM sequence: GGG
gcaccagtcctgaagaaata

SEQ ID NO: 131035 - DNA, 20 bp, Artificial Sequence
  Description of Artificial Sequence: Synthetic oligonucleotide
  Target: LAMA2; (+) strand; PAM type: NRG; PAM sequence: GGG
caccagtcctgaagaaatag

SEQ ID NO: 131036 - DNA, 20 bp, Artificial Sequence
  Description of Artificial Sequence: Synthetic oligonucleotide
  Target: LAMA2; (+) strand; PAM type: NRG; PAM sequence: GGG
accagtcctgaagaaatagg

SEQ ID NO: 131037 - DNA, 20 bp, Artificial Sequence
  Description of Artificial Sequence: Synthetic oligonucleotide
  Target: LAMA2; (+) strand; PAM type: NRG; PAM sequence: TGG
accatatacacacctatgtg

SEQ ID NO: 131038 - DNA, 20 bp, Artificial Sequence
  Description of Artificial Sequence: Synthetic oligonucleotide
  Target: LAMA2; (+) strand; PAM type: NRG; PAM sequence: GGG
ccatatacacacctatgtgt

SEQ ID NO: 131039 - DNA, 20 bp, Artificial Sequence
  Description of Artificial Sequence: Synthetic oligonucleotide
  Target: LAMA2; (+) strand; PAM type: NRG; PAM sequence: TGG
cctatgtgtgggaatgctaa

SEQ ID NO: 131040 - DNA, 20 bp, Artificial Sequence
  Description of Artificial Sequence: Synthetic oligonucleotide
  Target: LAMA2; (+) strand; PAM type: NRG; PAM sequence: GGG
ctatgtgtgggaatgctaat

SEQ ID NO: 131041 - DNA, 20 bp, Artificial Sequence
  Description of Artificial Sequence: Synthetic oligonucleotide
  Target: LAMA2; (+) strand; PAM type: NRG; PAM sequence: TAG
gtgtgggaatgctaatggga

SEQ ID NO: 131042 - DNA, 20 bp, Artificial Sequence
  Description of Artificial Sequence: Synthetic oligonucleotide
  Target: LAMA2; (+) strand; PAM type: NRG; PAM sequence: CAG
taatgggatagaatctgata

SEQ ID NO: 131043 - DNA, 20 bp, Artificial Sequence
  Description of Artificial Sequence: Synthetic oligonucleotide
  Target: LAMA2; (+) strand; PAM type: NRG; PAM sequence: TAG
gggatagaatctgatacagt

SEQ ID NO: 131044 - DNA, 20 bp, Artificial Sequence
  Description of Artificial Sequence: Synthetic oligonucleotide
  Target: LAMA2; (+) strand; PAM type: NRG; PAM sequence: AGG
ggatagaatctgatacagtt

SEQ ID NO: 131045 - DNA, 20 bp, Artificial Sequence
  Description of Artificial Sequence: Synthetic oligonucleotide
  Target: LAMA2; (+) strand; PAM type: NRG; PAM sequence: GGG
gatagaatctgatacagtta

SEQ ID NO: 131046 - DNA, 20 bp, Artificial Sequence
  Description of Artificial Sequence: Synthetic oligonucleotide
  Target: LAMA2; (+) strand; PAM type: NRG; PAM sequence: GAG
gttagggtctgaaacactac

SEQ ID NO: 131047 - DNA, 20 bp, Artificial Sequence
  Description of Artificial Sequence: Synthetic oligonucleotide
  Target: LAMA2; (+) strand; PAM type: NRG; PAM sequence: TGG
tgaaacactacgagttctta

SEQ ID NO: 131048 - DNA, 20 bp, Artificial Sequence
  Description of Artificial Sequence: Synthetic oligonucleotide
  Target: LAMA2; (+) strand; PAM type: NRG; PAM sequence: TAG
tggtactttgattcaatatt

SEQ ID NO: 131049 - DNA, 20 bp, Artificial Sequence
  Description of Artificial Sequence: Synthetic oligonucleotide
  Target: LAMA2; (+) strand; PAM type: NRG; PAM sequence: GAG
ctttgattcaatatttagtt

SEQ ID NO: 131050 - DNA, 20 bp, Artificial Sequence
  Description of Artificial Sequence: Synthetic oligonucleotide
  Target: LAMA2; (+) strand; PAM type: NRG; PAM sequence: TAG
cttatttgtattatcctcat

SEQ ID NO: 131051 - DNA, 20 bp, Artificial Sequence
  Description of Artificial Sequence: Synthetic oligonucleotide
  Target: LAMA2; (+) strand; PAM type: NRG; PAM sequence: TAG
ctcattagattgaacctgta

SEQ ID NO: 131052 - DNA, 20 bp, Artificial Sequence
  Description of Artificial Sequence: Synthetic oligonucleotide
  Target: LAMA2; (+) strand; PAM type: NRG; PAM sequence: AGG
tcattagattgaacctgtat

SEQ ID NO: 131053 - DNA, 20 bp, Artificial Sequence
  Description of Artificial Sequence: Synthetic oligonucleotide
  Target: LAMA2; (+) strand; PAM type: NRG; PAM sequence: AAG
taggtttatctttgaaacta

SEQ ID NO: 131054 - DNA, 20 bp, Artificial Sequence
  Description of Artificial Sequence: Synthetic oligonucleotide
  Target: LAMA2; (+) strand; PAM type: NRG; PAM sequence: AAG
ctaaagattaaattgaattt

SEQ ID NO: 131055 - DNA, 20 bp, Artificial Sequence
  Description of Artificial Sequence: Synthetic oligonucleotide
  Target: LAMA2; (+) strand; PAM type: NRG; PAM sequence: AAG
gttctactgtattttttatc

SEQ ID NO: 131056 - DNA, 20 bp, Artificial Sequence
  Description of Artificial Sequence: Synthetic oligonucleotide
  Target: LAMA2; (+) strand; PAM type: NRG; PAM sequence: TAG
tatcaagattatttttaaaa

SEQ ID NO: 131057 - DNA, 20 bp, Artificial Sequence
  Description of Artificial Sequence: Synthetic oligonucleotide
  Target: LAMA2; (+) strand; PAM type: NRG; PAM sequence: CAG
ttttaaaatagcttgtatca

SEQ ID NO: 131058 - DNA, 20 bp, Artificial Sequence
  Description of Artificial Sequence: Synthetic oligonucleotide
  Target: LAMA2; (+) strand; PAM type: NRG; PAM sequence: AGG
tttaaaatagcttgtatcac

SEQ ID NO: 131059 - DNA, 20 bp, Artificial Sequence
  Description of Artificial Sequence: Synthetic oligonucleotide
  Target: LAMA2; (+) strand; PAM type: NRG; PAM sequence: GAG
gcttgtatcacaggaatcct

SEQ ID NO: 131060 - DNA, 20 bp, Artificial Sequence
  Description of Artificial Sequence: Synthetic oligonucleotide
  Target: LAMA2; (+) strand; PAM type: NRG; PAM sequence: TAG
taatactatcctctactgta

SEQ ID NO: 131061 - DNA, 20 bp, Artificial Sequence
  Description of Artificial Sequence: Synthetic oligonucleotide
  Target: LAMA2; (+) strand; PAM type: NRG; PAM sequence: TAG
tcctctactgtatagaaatt

SEQ ID NO: 131062 - DNA, 20 bp, Artificial Sequence
  Description of Artificial Sequence: Synthetic oligonucleotide
  Target: LAMA2; (+) strand; PAM type: NRG; PAM sequence: AAG
gaaatttagtaataatgaaa

SEQ ID NO: 131063 - DNA, 20 bp, Artificial Sequence
  Description of Artificial Sequence: Synthetic oligonucleotide
  Target: LAMA2; (+) strand; PAM type: NRG; PAM sequence: TGG
ataatgaaaaagtatactcc

SEQ ID NO: 131064 - DNA, 20 bp, Artificial Sequence
  Description of Artificial Sequence: Synthetic oligonucleotide
  Target: LAMA2; (+) strand; PAM type: NRG; PAM sequence: TGG
aaaaagtatactcctggatt

SEQ ID NO: 131065 - DNA, 20 bp, Artificial Sequence
  Description of Artificial Sequence: Synthetic oligonucleotide
  Target: LAMA2; (+) strand; PAM type: NRG; PAM sequence: TGG
tactcctggatttggttttc

SEQ ID NO: 131066 - DNA, 20 bp, Artificial Sequence
  Description of Artificial Sequence: Synthetic oligonucleotide
  Target: LAMA2; (+) strand; PAM type: NRG; PAM sequence: GGG
actcctggatttggttttct

SEQ ID NO: 131067 - DNA, 20 bp, Artificial Sequence
  Description of Artificial Sequence: Synthetic oligonucleotide
  Target: LAMA2; (+) strand; PAM type: NRG; PAM sequence: CAG
cctggatttggttttctggg

SEQ ID NO: 131068 - DNA, 20 bp, Artificial Sequence
  Description of Artificial Sequence: Synthetic oligonucleotide
  Target: LAMA2; (+) strand; PAM type: NRG; PAM sequence: GAG
tggatttggttttctgggca

SEQ ID NO: 131069 - DNA, 20 bp, Artificial Sequence
  Description of Artificial Sequence: Synthetic oligonucleotide
  Target: LAMA2; (+) strand; PAM type: NRG; PAM sequence: AAG
cagagaaaattaaaaacttt

SEQ ID NO: 131070 - DNA, 20 bp, Artificial Sequence
  Description of Artificial Sequence: Synthetic oligonucleotide
  Target: LAMA2; (+) strand; PAM type: NRG; PAM sequence: CAG
agaaaattaaaaactttaag

SEQ ID NO: 131071 - DNA, 20 bp, Artificial Sequence
  Description of Artificial Sequence: Synthetic oligonucleotide
  Target: LAMA2; (+) strand; PAM type: NRG; PAM sequence: AGG
gaaaattaaaaactttaagc

SEQ ID NO: 131072 - DNA, 20 bp, Artificial Sequence
  Description of Artificial Sequence: Synthetic oligonucleotide
  Target: LAMA2; (+) strand; PAM type: NRG; PAM sequence: TAG
aactttaagcaggtatcatg

SEQ ID NO: 131073 - DNA, 20 bp, Artificial Sequence
  Description of Artificial Sequence: Synthetic oligonucleotide
  Target: LAMA2; (+) strand; PAM type: NRG; PAM sequence: CAG
atgtagaataacatactcaa

SEQ ID NO: 131074 - DNA, 20 bp, Artificial Sequence
  Description of Artificial Sequence: Synthetic oligonucleotide
  Target: LAMA2; (+) strand; PAM type: NRG; PAM sequence: TGG
actcaacagatattattttg

SEQ ID NO: 131075 - DNA, 20 bp, Artificial Sequence
  Description of Artificial Sequence: Synthetic oligonucleotide
  Target: LAMA2; (+) strand; PAM type: NRG; PAM sequence: GGG
ctcaacagatattattttgt

SEQ ID NO: 131076 - DNA, 20 bp, Artificial Sequence
  Description of Artificial Sequence: Synthetic oligonucleotide
  Target: LAMA2; (+) strand; PAM type: NRG; PAM sequence: TAG
tttgtgggtgacaattttta

SEQ ID NO: 131077 - DNA, 20 bp, Artificial Sequence
  Description of Artificial Sequence: Synthetic oligonucleotide
  Target: LAMA2; (+) strand; PAM type: NRG; PAM sequence: CAG
tttttatagacattatatgt

SEQ ID NO: 131078 - DNA, 20 bp, Artificial Sequence
  Description of Artificial Sequence: Synthetic oligonucleotide
  Target: LAMA2; (+) strand; PAM type: NRG; PAM sequence: TAG
acattatatgtcagatgaaa

SEQ ID NO: 131079 - DNA, 20 bp, Artificial Sequence
  Description of Artificial Sequence: Synthetic oligonucleotide
  Target: LAMA2; (+) strand; PAM type: NRG; PAM sequence: CGG
acataacaccctatatacct

SEQ ID NO: 131080 - DNA, 20 bp, Artificial Sequence
  Description of Artificial Sequence: Synthetic oligonucleotide
  Target: LAMA2; (+) strand; PAM type: NRG; PAM sequence: AAG
cctatatacctcggtgaata

SEQ ID NO: 131081 - DNA, 20 bp, Artificial Sequence
  Description of Artificial Sequence: Synthetic oligonucleotide
  Target: LAMA2; (+) strand; PAM type: NRG; PAM sequence: AAG
atatacctcggtgaataaag

SEQ ID NO: 131082 - DNA, 20 bp, Artificial Sequence
  Description of Artificial Sequence: Synthetic oligonucleotide
  Target: LAMA2; (+) strand; PAM type: NRG; PAM sequence: AAG
gtgaataaagaagatttcta

SEQ ID NO: 131083 - DNA, 20 bp, Artificial Sequence
  Description of Artificial Sequence: Synthetic oligonucleotide
  Target: LAMA2; (+) strand; PAM type: NRG; PAM sequence: AGG
tgaataaagaagatttctaa

SEQ ID NO: 131084 - DNA, 20 bp, Artificial Sequence
  Description of Artificial Sequence: Synthetic oligonucleotide
  Target: LAMA2; (+) strand; PAM type: NRG; PAM sequence: GAG
aaagaagatttctaaaggat

SEQ ID NO: 131085 - DNA, 20 bp, Artificial Sequence
  Description of Artificial Sequence: Synthetic oligonucleotide
  Target: LAMA2; (+) strand; PAM type: NRG; PAM sequence: AAG
gatttctaaaggatgagttt

SEQ ID NO: 131086 - DNA, 20 bp, Artificial Sequence
  Description of Artificial Sequence: Synthetic oligonucleotide
  Target: LAMA2; (+) strand; PAM type: NRG; PAM sequence: GAG
tttctaaaggatgagtttaa

SEQ ID NO: 131087 - DNA, 20 bp, Artificial Sequence
  Description of Artificial Sequence: Synthetic oligonucleotide
  Target: LAMA2; (+) strand; PAM type: NRG; PAM sequence: AGG
ttctaaaggatgagtttaag

SEQ ID NO: 131088 - DNA, 20 bp, Artificial Sequence
  Description of Artificial Sequence: Synthetic oligonucleotide
  Target: LAMA2; (+) strand; PAM type: NRG; PAM sequence: AAG
tgagtttaagaggtattgat

SEQ ID NO: 131089 - DNA, 20 bp, Artificial Sequence
  Description of Artificial Sequence: Synthetic oligonucleotide
  Target: LAMA2; (+) strand; PAM type: NRG; PAM sequence: AGG
gagtttaagaggtattgata

SEQ ID NO: 131090 - DNA, 20 bp, Artificial Sequence
  Description of Artificial Sequence: Synthetic oligonucleotide
  Target: LAMA2; (+) strand; PAM type: NRG; PAM sequence: CAG
taagaggtattgataaggac

SEQ ID NO: 131091 - DNA, 20 bp, Artificial Sequence
  Description of Artificial Sequence: Synthetic oligonucleotide
  Target: LAMA2; (+) strand; PAM type: NRG; PAM sequence: TAG
attgataaggaccagatatt

SEQ ID NO: 131092 - DNA, 20 bp, Artificial Sequence
  Description of Artificial Sequence: Synthetic oligonucleotide
  Target: LAMA2; (+) strand; PAM type: NRG; PAM sequence: AAG
taaggaccagatatttagta

SEQ ID NO: 131093 - DNA, 20 bp, Artificial Sequence
  Description of Artificial Sequence: Synthetic oligonucleotide
  Target: LAMA2; (+) strand; PAM type: NRG; PAM sequence: TAG
aaagaaatcccatgattccc

SEQ ID NO: 131094 - DNA, 20 bp, Artificial Sequence
  Description of Artificial Sequence: Synthetic oligonucleotide
  Target: LAMA2; (+) strand; PAM type: NRG; PAM sequence: CAG
tccctagatttgtgactctt

SEQ ID NO: 131095 - DNA, 20 bp, Artificial Sequence
  Description of Artificial Sequence: Synthetic oligonucleotide
  Target: LAMA2; (+) strand; PAM type: NRG; PAM sequence: TAG
tcttcagtgacacatttaat

SEQ ID NO: 131096 - DNA, 20 bp, Artificial Sequence
  Description of Artificial Sequence: Synthetic oligonucleotide
  Target: LAMA2; (+) strand; PAM type: NRG; PAM sequence: CAG
agttaatgctttgtgaatcc

SEQ ID NO: 131097 - DNA, 20 bp, Artificial Sequence
  Description of Artificial Sequence: Synthetic oligonucleotide
  Target: LAMA2; (+) strand; PAM type: NRG; PAM sequence: TAG
gatataccatatttttgtca

SEQ ID NO: 131098 - DNA, 20 bp, Artificial Sequence
  Description of Artificial Sequence: Synthetic oligonucleotide
  Target: LAMA2; (+) strand; PAM type: NRG; PAM sequence: TAG
atttaattctgattctccta

SEQ ID NO: 131099 - DNA, 20 bp, Artificial Sequence
  Description of Artificial Sequence: Synthetic oligonucleotide
  Target: LAMA2; (+) strand; PAM type: NRG; PAM sequence: CGG
ctttcatgctactttgaatt

SEQ ID NO: 131100 - DNA, 20 bp, Artificial Sequence
  Description of Artificial Sequence: Synthetic oligonucleotide
  Target: LAMA2; (+) strand; PAM type: NRG; PAM sequence: CAG
aaaactgaatttaaatatca

SEQ ID NO: 131101 - DNA, 20 bp, Artificial Sequence
  Description of Artificial Sequence: Synthetic oligonucleotide
  Target: LAMA2; (+) strand; PAM type: NRG; PAM sequence: TAG
tattttatcaacttttattt

SEQ ID NO: 131102 - DNA, 20 bp, Artificial Sequence
  Description of Artificial Sequence: Synthetic oligonucleotide
  Target: LAMA2; (+) strand; PAM type: NRG; PAM sequence: CAG
atcaacttttattttagaat

SEQ ID NO: 131103 - DNA, 20 bp, Artificial Sequence
  Description of Artificial Sequence: Synthetic oligonucleotide
  Target: LAMA2; (+) strand; PAM type: NRG; PAM sequence: AGG
tcaacttttattttagaatc

SEQ ID NO: 131104 - DNA, 20 bp, Artificial Sequence
  Description of Artificial Sequence: Synthetic oligonucleotide
  Target: LAMA2; (+) strand; PAM type: NRG; PAM sequence: GGG
caacttttattttagaatca

SEQ ID NO: 131105 - DNA, 20 bp, Artificial Sequence
  Description of Artificial Sequence: Synthetic oligonucleotide
  Target: LAMA2; (+) strand; PAM type: NRG; PAM sequence: GAG
acttttattttagaatcagg

SEQ ID NO: 131106 - DNA, 20 bp, Artificial Sequence
  Description of Artificial Sequence: Synthetic oligonucleotide
  Target: LAMA2; (+) strand; PAM type: NRG; PAM sequence: CAG
agaatcagggagtacatgtg

SEQ ID NO: 131107 - DNA, 20 bp, Artificial Sequence
  Description of Artificial Sequence: Synthetic oligonucleotide
  Target: LAMA2; (+) strand; PAM type: NRG; PAM sequence: AGG
gaatcagggagtacatgtgc

SEQ ID NO: 131108 - DNA, 20 bp, Artificial Sequence
  Description of Artificial Sequence: Synthetic oligonucleotide
  Target: LAMA2; (+) strand; PAM type: NRG; PAM sequence: AAG
tgtgcaggtatatatcacac

SEQ ID NO: 131109 - DNA, 20 bp, Artificial Sequence
  Description of Artificial Sequence: Synthetic oligonucleotide
  Target: LAMA2; (+) strand; PAM type: NRG; PAM sequence: GAG
aagatatattgtgtgatgct

SEQ ID NO: 131110 - DNA, 20 bp, Artificial Sequence
  Description of Artificial Sequence: Synthetic oligonucleotide
  Target: LAMA2; (+) strand; PAM type: NRG; PAM sequence: AGG
agatatattgtgtgatgctg

SEQ ID NO: 131111 - DNA, 20 bp, Artificial Sequence
  Description of Artificial Sequence: Synthetic oligonucleotide
  Target: LAMA2; (+) strand; PAM type: NRG; PAM sequence: TGG
tattgtgtgatgctgaggtt

SEQ ID NO: 131112 - DNA, 20 bp, Artificial Sequence
  Description of Artificial Sequence: Synthetic oligonucleotide
  Target: LAMA2; (+) strand; PAM type: NRG; PAM sequence: GAG
ttgtgtgatgctgaggtttg

SEQ ID NO: 131113 - DNA, 20 bp, Artificial Sequence
  Description of Artificial Sequence: Synthetic oligonucleotide
  Target: LAMA2; (+) strand; PAM type: NRG; PAM sequence: CAG
gtacaaatgaatctgtcatt

SEQ ID NO: 131114 - DNA, 20 bp, Artificial Sequence
  Description of Artificial Sequence: Synthetic oligonucleotide
  Target: LAMA2; (+) strand; PAM type: NRG; PAM sequence: AGG
tacaaatgaatctgtcattc

SEQ ID NO: 131115 - DNA, 20 bp, Artificial Sequence
  Description of Artificial Sequence: Synthetic oligonucleotide
  Target: LAMA2; (+) strand; PAM type: NRG; PAM sequence: TAG
aaatgaatctgtcattcagg

SEQ ID NO: 131116 - DNA, 20 bp, Artificial Sequence
  Description of Artificial Sequence: Synthetic oligonucleotide
  Target: LAMA2; (+) strand; PAM type: NRG; PAM sequence: TGG
tgaatctgtcattcaggtag

SEQ ID NO: 131117 - DNA, 20 bp, Artificial Sequence
  Description of Artificial Sequence: Synthetic oligonucleotide
  Target: LAMA2; (+) strand; PAM type: NRG; PAM sequence: GGG
gaatctgtcattcaggtagt

SEQ ID NO: 131118 - DNA, 20 bp, Artificial Sequence
  Description of Artificial Sequence: Synthetic oligonucleotide
  Target: LAMA2; (+) strand; PAM type: NRG; PAM sequence: TAG
tgtcattcaggtagtgggta

SEQ ID NO: 131119 - DNA, 20 bp, Artificial Sequence
  Description of Artificial Sequence: Synthetic oligonucleotide
  Target: LAMA2; (+) strand; PAM type: NRG; PAM sequence: TAG
gtagtgggtatagtacctga

SEQ ID NO: 131120 - DNA, 20 bp, Artificial Sequence
  Description of Artificial Sequence: Synthetic oligonucleotide
  Target: LAMA2; (+) strand; PAM type: NRG; PAM sequence: AGG
tagtgggtatagtacctgat

SEQ ID NO: 131121 - DNA, 20 bp, Artificial Sequence
  Description of Artificial Sequence: Synthetic oligonucleotide
  Target: LAMA2; (+) strand; PAM type: NRG; PAM sequence: CAG
tgggtatagtacctgatagg

SEQ ID NO: 131122 - DNA, 20 bp, Artificial Sequence
  Description of Artificial Sequence: Synthetic oligonucleotide
  Target: LAMA2; (+) strand; PAM type: NRG; PAM sequence: GAG
ctgataggcagttttgtttt

SEQ ID NO: 131123 - DNA, 20 bp, Artificial Sequence
  Description of Artificial Sequence: Synthetic oligonucleotide
  Target: LAMA2; (+) strand; PAM type: NRG; PAM sequence: AAG
ggcagttttgttttgagaca

SEQ ID NO: 131124 - DNA, 20 bp, Artificial Sequence
  Description of Artificial Sequence: Synthetic oligonucleotide
  Target: LAMA2; (+) strand; PAM type: NRG; PAM sequence: CAG
caaagtctcactctgtaacc

SEQ ID NO: 131125 - DNA, 20 bp, Artificial Sequence
  Description of Artificial Sequence: Synthetic oligonucleotide
  Target: LAMA2; (+) strand; PAM type: NRG; PAM sequence: AGG
aaagtctcactctgtaaccc

SEQ ID NO: 131126 - DNA, 20 bp, Artificial Sequence
  Description of Artificial Sequence: Synthetic oligonucleotide
  Target: LAMA2; (+) strand; PAM type: NRG; PAM sequence: TGG
tctcactctgtaacccaggc

SEQ ID NO: 131127 - DNA, 20 bp, Artificial Sequence
  Description of Artificial Sequence: Synthetic oligonucleotide
  Target: LAMA2; (+) strand; PAM type: NRG; PAM sequence: GAG
tcactctgtaacccaggctg

SEQ ID NO: 131128 - DNA, 20 bp, Artificial Sequence
  Description of Artificial Sequence: Synthetic oligonucleotide
  Target: LAMA2; (+) strand; PAM type: NRG; PAM sequence: CAG
ctgtaacccaggctggagtg

SEQ ID NO: 131129 - DNA, 20 bp, Artificial Sequence
  Description of Artificial Sequence: Synthetic oligonucleotide
  Target: LAMA2; (+) strand; PAM type: NRG; PAM sequence: TGG
taacccaggctggagtgcag

SEQ ID NO: 131130 - DNA, 20 bp, Artificial Sequence
  Description of Artificial Sequence: Synthetic oligonucleotide
  Target: LAMA2; (+) strand; PAM type: NRG; PAM sequence: CGG
ggagtgcagtggcacgatct

SEQ ID NO: 131131 - DNA, 20 bp, Artificial Sequence
  Description of Artificial Sequence: Synthetic oligonucleotide
  Target: LAMA2; (+) strand; PAM type: NRG; PAM sequence: TGG
tcactgcaacctccacctcc

SEQ ID NO: 131132 - DNA, 20 bp, Artificial Sequence
  Description of Artificial Sequence: Synthetic oligonucleotide
  Target: LAMA2; (+) strand; PAM type: NRG; PAM sequence: GGG
cactgcaacctccacctcct

SEQ ID NO: 131133 - DNA, 20 bp, Artificial Sequence
  Description of Artificial Sequence: Synthetic oligonucleotide
  Target: LAMA2; (+) strand; PAM type: NRG; PAM sequence: AAG
aacctccacctcctgggttc

SEQ ID NO: 131134 - DNA, 20 bp, Artificial Sequence
  Description of Artificial Sequence: Synthetic oligonucleotide
  Target: LAMA2; (+) strand; PAM type: NRG; PAM sequence: CAG
ttcaagcacttctcctgctt

SEQ ID NO: 131135 - DNA, 20 bp, Artificial Sequence
  Description of Artificial Sequence: Synthetic oligonucleotide
  Target: LAMA2; (+) strand; PAM type: NRG; PAM sequence: TAG
ttctcctgcttcagcctcca

SEQ ID NO: 131136 - DNA, 20 bp, Artificial Sequence
  Description of Artificial Sequence: Synthetic oligonucleotide
  Target: LAMA2; (+) strand; PAM type: NRG; PAM sequence: TAG
tcctgcttcagcctccatag

SEQ ID NO: 131137 - DNA, 20 bp, Artificial Sequence
  Description of Artificial Sequence: Synthetic oligonucleotide
  Target: LAMA2; (+) strand; PAM type: NRG; PAM sequence: TGG
gcttcagcctccatagtagc

SEQ ID NO: 131138 - DNA, 20 bp, Artificial Sequence
  Description of Artificial Sequence: Synthetic oligonucleotide
  Target: LAMA2; (+) strand; PAM type: NRG; PAM sequence: GGG
cttcagcctccatagtagct

SEQ ID NO: 131139 - DNA, 20 bp, Artificial Sequence
  Description of Artificial Sequence: Synthetic oligonucleotide
  Target: LAMA2; (+) strand; PAM type: NRG; PAM sequence: CAG
ctccatagtagctgggatta

SEQ ID NO: 131140 - DNA, 20 bp, Artificial Sequence
  Description of Artificial Sequence: Synthetic oligonucleotide
  Target: LAMA2; (+) strand; PAM type: NRG; PAM sequence: AGG
tccatagtagctgggattac

SEQ ID NO: 131141 - DNA, 20 bp, Artificial Sequence
  Description of Artificial Sequence: Synthetic oligonucleotide
  Target: LAMA2; (+) strand; PAM type: NRG; PAM sequence: TGG
caggtgcctgccaccacgcc

SEQ ID NO: 131142 - DNA, 20 bp, Artificial Sequence
  Description of Artificial Sequence: Synthetic oligonucleotide
  Target: LAMA2; (+) strand; PAM type: NRG; PAM sequence: TAG
ggataacttttttgtatttt

SEQ ID NO: 131143 - DNA, 20 bp, Artificial Sequence
  Description of Artificial Sequence: Synthetic oligonucleotide
  Target: LAMA2; (+) strand; PAM type: NRG; PAM sequence: TAG
taacttttttgtatttttag

SEQ ID NO: 131144 - DNA, 20 bp, Artificial Sequence
  Description of Artificial Sequence: Synthetic oligonucleotide
  Target: LAMA2; (+) strand; PAM type: NRG; PAM sequence: GAG
acttttttgtatttttagta

SEQ ID NO: 131145 - DNA, 20 bp, Artificial Sequence
  Description of Artificial Sequence: Synthetic oligonucleotide
  Target: LAMA2; (+) strand; PAM type: NRG; PAM sequence: CAG
ttttgtatttttagtagaga

SEQ ID NO: 131146 - DNA, 20 bp, Artificial Sequence
  Description of Artificial Sequence: Synthetic oligonucleotide
  Target: LAMA2; (+) strand; PAM type: NRG; PAM sequence: AGG
tttgtatttttagtagagac

SEQ ID NO: 131147 - DNA, 20 bp, Artificial Sequence
  Description of Artificial Sequence: Synthetic oligonucleotide
  Target: LAMA2; (+) strand; PAM type: NRG; PAM sequence: GGG
ttgtatttttagtagagaca

SEQ ID NO: 131148 - DNA, 20 bp, Artificial Sequence
  Description of Artificial Sequence: Synthetic oligonucleotide
  Target: LAMA2; (+) strand; PAM type: NRG; PAM sequence: TGG
gagacagggtttcgccgtgt

SEQ ID NO: 131149 - DNA, 20 bp, Artificial Sequence
  Description of Artificial Sequence: Synthetic oligonucleotide
  Target: LAMA2; (+) strand; PAM type: NRG; PAM sequence: CGG
cagggtttcgccgtgttggc

SEQ ID NO: 131150 - DNA, 20 bp, Artificial Sequence
  Description of Artificial Sequence: Synthetic oligonucleotide
  Target: LAMA2; (+) strand; PAM type: NRG; PAM sequence: GGG
agggtttcgccgtgttggcc

SEQ ID NO: 131151 - DNA, 20 bp, Artificial Sequence
  Description of Artificial Sequence: Synthetic oligonucleotide
  Target: LAMA2; (+) strand; PAM type: NRG; PAM sequence: TGG
tttcgccgtgttggccgggc

SEQ ID NO: 131152 - DNA, 20 bp, Artificial Sequence
  Description of Artificial Sequence: Synthetic oligonucleotide
  Target: LAMA2; (+) strand; PAM type: NRG; PAM sequence: CAG
tggtcttgaactcctgacct

SEQ ID NO: 131153 - DNA, 20 bp, Artificial Sequence
  Description of Artificial Sequence: Synthetic oligonucleotide
  Target: LAMA2; (+) strand; PAM type: NRG; PAM sequence: AGG
ggtcttgaactcctgacctc

SEQ ID NO: 131154 - DNA, 20 bp, Artificial Sequence
  Description of Artificial Sequence: Synthetic oligonucleotide
  Target: LAMA2; (+) strand; PAM type: NRG; PAM sequence: TGG
ctcaggtgatccgcctgcct

SEQ ID NO: 131155 - DNA, 20 bp, Artificial Sequence
  Description of Artificial Sequence: Synthetic oligonucleotide
  Target: LAMA2; (+) strand; PAM type: NRG; PAM sequence: AAG
ccgcctgccttggccttcca

SEQ ID NO: 131156 - DNA, 20 bp, Artificial Sequence
  Description of Artificial Sequence: Synthetic oligonucleotide
  Target: LAMA2; (+) strand; PAM type: NRG; PAM sequence: TGG
gccttggccttccaaagtgc

SEQ ID NO: 131157 - DNA, 20 bp, Artificial Sequence
  Description of Artificial Sequence: Synthetic oligonucleotide
  Target: LAMA2; (+) strand; PAM type: NRG; PAM sequence: GGG
ccttggccttccaaagtgct

SEQ ID NO: 131158 - DNA, 20 bp, Artificial Sequence
  Description of Artificial Sequence: Synthetic oligonucleotide
  Target: LAMA2; (+) strand; PAM type: NRG; PAM sequence: CAG
cttccaaagtgctgggatta

SEQ ID NO: 131159 - DNA, 20 bp, Artificial Sequence
  Description of Artificial Sequence: Synthetic oligonucleotide
  Target: LAMA2; (+) strand; PAM type: NRG; PAM sequence: AGG
ttccaaagtgctgggattac

SEQ ID NO: 131160 - DNA, 20 bp, Artificial Sequence
  Description of Artificial Sequence: Synthetic oligonucleotide
  Target: LAMA2; (+) strand; PAM type: NRG; PAM sequence: TGG
caggcatgaaccaccgcacc

SEQ ID NO: 131161 - DNA, 20 bp, Artificial Sequence
  Description of Artificial Sequence: Synthetic oligonucleotide
  Target: LAMA2; (+) strand; PAM type: NRG; PAM sequence: CAG
tgaaccaccgcacctggccc

SEQ ID NO: 131162 - DNA, 20 bp, Artificial Sequence
  Description of Artificial Sequence: Synthetic oligonucleotide
  Target: LAMA2; (+) strand; PAM type: NRG; PAM sequence: TAG
accaccgcacctggccccag

SEQ ID NO: 131163 - DNA, 20 bp, Artificial Sequence
  Description of Artificial Sequence: Synthetic oligonucleotide
  Target: LAMA2; (+) strand; PAM type: NRG; PAM sequence: AGG
ccaccgcacctggccccagt

SEQ ID NO: 131164 - DNA, 20 bp, Artificial Sequence
  Description of Artificial Sequence: Synthetic oligonucleotide
  Target: LAMA2; (+) strand; PAM type: NRG; PAM sequence: TGG
ccgcacctggccccagtagg

SEQ ID NO: 131165 - DNA, 20 bp, Artificial Sequence
  Description of Artificial Sequence: Synthetic oligonucleotide
  Target: LAMA2; (+) strand; PAM type: NRG; PAM sequence: CAG
ctcccctctgttgtattgcc

SEQ ID NO: 131166 - DNA, 20 bp, Artificial Sequence
  Description of Artificial Sequence: Synthetic oligonucleotide
  Target: LAMA2; (+) strand; PAM type: NRG; PAM sequence: CAG
tatatttttcttctttaaat

SEQ ID NO: 131167 - DNA, 20 bp, Artificial Sequence
  Description of Artificial Sequence: Synthetic oligonucleotide
  Target: LAMA2; (+) strand; PAM type: NRG; PAM sequence: CAG
gttgttaaaatcaatttttg

SEQ ID NO: 131168 - DNA, 20 bp, Artificial Sequence
  Description of Artificial Sequence: Synthetic oligonucleotide
  Target: LAMA2; (+) strand; PAM type: NRG; PAM sequence: GAG
tgttaaaatcaatttttgca

SEQ ID NO: 131169 - DNA, 20 bp, Artificial Sequence
  Description of Artificial Sequence: Synthetic oligonucleotide
  Target: LAMA2; (+) strand; PAM type: NRG; PAM sequence: TAG
aaatcaatttttgcagagat

SEQ ID NO: 131170 - DNA, 20 bp, Artificial Sequence
  Description of Artificial Sequence: Synthetic oligonucleotide
  Target: LAMA2; (+) strand; PAM type: NRG; PAM sequence: TGG
tgcagagattagaatgtatt

SEQ ID NO: 131171 - DNA, 20 bp, Artificial Sequence
  Description of Artificial Sequence: Synthetic oligonucleotide
  Target: LAMA2; (+) strand; PAM type: NRG; PAM sequence: AAG
tggcctaatttctcattctt

SEQ ID NO: 131172 - DNA, 20 bp, Artificial Sequence
  Description of Artificial Sequence: Synthetic oligonucleotide
  Target: LAMA2; (+) strand; PAM type: NRG; PAM sequence: AAG
attcttaagtaaaacaaaat

SEQ ID NO: 131173 - DNA, 20 bp, Artificial Sequence
  Description of Artificial Sequence: Synthetic oligonucleotide
  Target: LAMA2; (+) strand; PAM type: NRG; PAM sequence: AGG
ttcttaagtaaaacaaaata

SEQ ID NO: 131174 - DNA, 20 bp, Artificial Sequence
  Description of Artificial Sequence: Synthetic oligonucleotide
  Target: LAMA2; (+) strand; PAM type: NRG; PAM sequence: TAG
caaaataaggacataattta

SEQ ID NO: 131175 - DNA, 20 bp, Artificial Sequence
  Description of Artificial Sequence: Synthetic oligonucleotide
  Target: LAMA2; (+) strand; PAM type: NRG; PAM sequence: TGG
cttgacatatactgattttt

SEQ ID NO: 131176 - DNA, 20 bp, Artificial Sequence
  Description of Artificial Sequence: Synthetic oligonucleotide
  Target: LAMA2; (+) strand; PAM type: NRG; PAM sequence: TAG
catatactgattttttggta

SEQ ID NO: 131177 - DNA, 20 bp, Artificial Sequence
  Description of Artificial Sequence: Synthetic oligonucleotide
  Target: LAMA2; (+) strand; PAM type: NRG; PAM sequence: AAG
tttggtatagatcactaaat

SEQ ID NO: 131178 - DNA, 20 bp, Artificial Sequence
  Description of Artificial Sequence: Synthetic oligonucleotide
  Target: LAMA2; (+) strand; PAM type: NRG; PAM sequence: TAG
aagtactgaacttttttctt

SEQ ID NO: 131179 - DNA, 20 bp, Artificial Sequence
  Description of Artificial Sequence: Synthetic oligonucleotide
  Target: LAMA2; (+) strand; PAM type: NRG; PAM sequence: AGG
agtactgaacttttttcttt

SEQ ID NO: 131180 - DNA, 20 bp, Artificial Sequence
  Description of Artificial Sequence: Synthetic oligonucleotide
  Target: LAMA2; (+) strand; PAM type: NRG; PAM sequence: TAG
acttttttctttaggacgtt

SEQ ID NO: 131181 - DNA, 20 bp, Artificial Sequence
  Description of Artificial Sequence: Synthetic oligonucleotide
  Target: LAMA2; (+) strand; PAM type: NRG; PAM sequence: GAG
ttttttctttaggacgttta

SEQ ID NO: 131182 - DNA, 20 bp, Artificial Sequence
  Description of Artificial Sequence: Synthetic oligonucleotide
  Target: LAMA2; (+) strand; PAM type: NRG; PAM sequence: CAG
aggacgtttagagtttttga

SEQ ID NO: 131183 - DNA, 20 bp, Artificial Sequence
  Description of Artificial Sequence: Synthetic oligonucleotide
  Target: LAMA2; (+) strand; PAM type: NRG; PAM sequence: AGG
ggacgtttagagtttttgac

SEQ ID NO: 131184 - DNA, 20 bp, Artificial Sequence
  Description of Artificial Sequence: Synthetic oligonucleotide
  Target: LAMA2; (+) strand; PAM type: NRG; PAM sequence: TAG
tagagtttttgacaggtata

SEQ ID NO: 131185 - DNA, 20 bp, Artificial Sequence
  Description of Artificial Sequence: Synthetic oligonucleotide
  Target: LAMA2; (+) strand; PAM type: NRG; PAM sequence: AAG
tttttgacaggtatatagtc

SEQ ID NO: 131186 - DNA, 20 bp, Artificial Sequence
  Description of Artificial Sequence: Synthetic oligonucleotide
  Target: LAMA2; (+) strand; PAM type: NRG; PAM sequence: TAG
atgaattcattctttattga

SEQ ID NO: 131187 - DNA, 20 bp, Artificial Sequence
  Description of Artificial Sequence: Synthetic oligonucleotide
  Target: LAMA2; (+) strand; PAM type: NRG; PAM sequence: AAG
atcaacatgacaaaacatac

SEQ ID NO: 131188 - DNA, 20 bp, Artificial Sequence
  Description of Artificial Sequence: Synthetic oligonucleotide
  Target: LAMA2; (+) strand; PAM type: NRG; PAM sequence: AGG
tcaacatgacaaaacataca

SEQ ID NO: 131189 - DNA, 20 bp, Artificial Sequence
  Description of Artificial Sequence: Synthetic oligonucleotide
  Target: LAMA2; (+) strand; PAM type: NRG; PAM sequence: TGG
atacaaggcctttgtcctaa

SEQ ID NO: 131190 - DNA, 20 bp, Artificial Sequence
  Description of Artificial Sequence: Synthetic oligonucleotide
  Target: LAMA2; (+) strand; PAM type: NRG; PAM sequence: CAG
tggatcttataaatctaatg

SEQ ID NO: 131191 - DNA, 20 bp, Artificial Sequence
  Description of Artificial Sequence: Synthetic oligonucleotide
  Target: LAMA2; (+) strand; PAM type: NRG; PAM sequence: AGG
ggatcttataaatctaatgc

SEQ ID NO: 131192 - DNA, 20 bp, Artificial Sequence
  Description of Artificial Sequence: Synthetic oligonucleotide
  Target: LAMA2; (+) strand; PAM type: NRG; PAM sequence: GAG
atcttataaatctaatgcag

SEQ ID NO: 131193 - DNA, 20 bp, Artificial Sequence
  Description of Artificial Sequence: Synthetic oligonucleotide
  Target: LAMA2; (+) strand; PAM type: NRG; PAM sequence: AGG
tcttataaatctaatgcagg

SEQ ID NO: 131194 - DNA, 20 bp, Artificial Sequence
  Description of Artificial Sequence: Synthetic oligonucleotide
  Target: LAMA2; (+) strand; PAM type: NRG; PAM sequence: CAG
tataaatctaatgcaggagg

SEQ ID NO: 131195 - DNA, 20 bp, Artificial Sequence
  Description of Artificial Sequence: Synthetic oligonucleotide
  Target: LAMA2; (+) strand; PAM type: NRG; PAM sequence: CAG
aatctaatgcaggaggcaga

SEQ ID NO: 131196 - DNA, 20 bp, Artificial Sequence
  Description of Artificial Sequence: Synthetic oligonucleotide
  Target: LAMA2; (+) strand; PAM type: NRG; PAM sequence: CGG
aaacaatataattgtatatg

SEQ ID NO: 131197 - DNA, 20 bp, Artificial Sequence
  Description of Artificial Sequence: Synthetic oligonucleotide
  Target: LAMA2; (+) strand; PAM type: NRG; PAM sequence: AAG
aatataattgtatatgcggt

SEQ ID NO: 131198 - DNA, 20 bp, Artificial Sequence
  Description of Artificial Sequence: Synthetic oligonucleotide
  Target: LAMA2; (+) strand; PAM type: NRG; PAM sequence: AAG
tatatgcggtaagtgctatg

SEQ ID NO: 131199 - DNA, 20 bp, Artificial Sequence
  Description of Artificial Sequence: Synthetic oligonucleotide
  Target: LAMA2; (+) strand; PAM type: NRG; PAM sequence: AGG
atatgcggtaagtgctatga

SEQ ID NO: 131200 - DNA, 20 bp, Artificial Sequence
  Description of Artificial Sequence: Synthetic oligonucleotide
  Target: LAMA2; (+) strand; PAM type: NRG; PAM sequence: AAG
gtgctatgaaggaattaaac

SEQ ID NO: 131201 - DNA, 20 bp, Artificial Sequence
  Description of Artificial Sequence: Synthetic oligonucleotide
  Target: LAMA2; (+) strand; PAM type: NRG; PAM sequence: AGG
tgctatgaaggaattaaaca

SEQ ID NO: 131202 - DNA, 20 bp, Artificial Sequence
  Description of Artificial Sequence: Synthetic oligonucleotide
  Target: LAMA2; (+) strand; PAM type: NRG; PAM sequence: CAG
aattaaacaaggtgacacaa

SEQ ID NO: 131203 - DNA, 20 bp, Artificial Sequence
  Description of Artificial Sequence: Synthetic oligonucleotide
  Target: LAMA2; (+) strand; PAM type: NRG; PAM sequence: AAG
aaacaaggtgacacaacaga

SEQ ID NO: 131204 - DNA, 20 bp, Artificial Sequence
  Description of Artificial Sequence: Synthetic oligonucleotide
  Target: LAMA2; (+) strand; PAM type: NRG; PAM sequence: TAG
caaggtgacacaacagaaag

SEQ ID NO: 131205 - DNA, 20 bp, Artificial Sequence
  Description of Artificial Sequence: Synthetic oligonucleotide
  Target: LAMA2; (+) strand; PAM type: NRG; PAM sequence: CGG
acaacagaaagtagttgtgt

SEQ ID NO: 131206 - DNA, 20 bp, Artificial Sequence
  Description of Artificial Sequence: Synthetic oligonucleotide
  Target: LAMA2; (+) strand; PAM type: NRG; PAM sequence: GGG
caacagaaagtagttgtgtc

SEQ ID NO: 131207 - DNA, 20 bp, Artificial Sequence
  Description of Artificial Sequence: Synthetic oligonucleotide
  Target: LAMA2; (+) strand; PAM type: NRG; PAM sequence: TAG
gtagttgtgtcgggcaattt

SEQ ID NO: 131208 - DNA, 20 bp, Artificial Sequence
  Description of Artificial Sequence: Synthetic oligonucleotide
  Target: LAMA2; (+) strand; PAM type: NRG; PAM sequence: TGG
tcgggcaattttagataaaa

SEQ ID NO: 131209 - DNA, 20 bp, Artificial Sequence
  Description of Artificial Sequence: Synthetic oligonucleotide
  Target: LAMA2; (+) strand; PAM type: NRG; PAM sequence: GAG
gcaattttagataaaatggc

SEQ ID NO: 131210 - DNA, 20 bp, Artificial Sequence
  Description of Artificial Sequence: Synthetic oligonucleotide
  Target: LAMA2; (+) strand; PAM type: NRG; PAM sequence: TGG
tggcgagtgaatgctgtgca

SEQ ID NO: 131211 - DNA, 20 bp, Artificial Sequence
  Description of Artificial Sequence: Synthetic oligonucleotide
  Target: LAMA2; (+) strand; PAM type: NRG; PAM sequence: GAG
gcgagtgaatgctgtgcatg

SEQ ID NO: 131212 - DNA, 20 bp, Artificial Sequence
  Description of Artificial Sequence: Synthetic oligonucleotide
  Target: LAMA2; (+) strand; PAM type: NRG; PAM sequence: AGG
cgagtgaatgctgtgcatgg

SEQ ID NO: 131213 - DNA, 20 bp, Artificial Sequence
  Description of Artificial Sequence: Synthetic oligonucleotide
  Target: LAMA2; (+) strand; PAM type: NRG; PAM sequence: CAG
gcatggaggtgacatcttgc

SEQ ID NO: 131214 - DNA, 20 bp, Artificial Sequence
  Description of Artificial Sequence: Synthetic oligonucleotide
  Target: LAMA2; (+) strand; PAM type: NRG; PAM sequence: GAG
atggaggtgacatcttgcca

SEQ ID NO: 131215 - DNA, 20 bp, Artificial Sequence
  Description of Artificial Sequence: Synthetic oligonucleotide
  Target: LAMA2; (+) strand; PAM type: NRG; PAM sequence: CAG
aggtgacatcttgccagaga

SEQ ID NO: 131216 - DNA, 20 bp, Artificial Sequence
  Description of Artificial Sequence: Synthetic oligonucleotide
  Target: LAMA2; (+) strand; PAM type: NRG; PAM sequence: AGG
ggtgacatcttgccagagac

SEQ ID NO: 131217 - DNA, 20 bp, Artificial Sequence
  Description of Artificial Sequence: Synthetic oligonucleotide
  Target: LAMA2; (+) strand; PAM type: NRG; PAM sequence: GAG
tgacatcttgccagagacag

SEQ ID NO: 131218 - DNA, 20 bp, Artificial Sequence
  Description of Artificial Sequence: Synthetic oligonucleotide
  Target: LAMA2; (+) strand; PAM type: NRG; PAM sequence: GAG
cttgccagagacaggagaat

SEQ ID NO: 131219 - DNA, 20 bp, Artificial Sequence
  Description of Artificial Sequence: Synthetic oligonucleotide
  Target: LAMA2; (+) strand; PAM type: NRG; PAM sequence: AAG
ccagagacaggagaatgaga

SEQ ID NO: 131220 - DNA, 20 bp, Artificial Sequence
  Description of Artificial Sequence: Synthetic oligonucleotide
  Target: LAMA2; (+) strand; PAM type: NRG; PAM sequence: GAG
agagacaggagaatgagaaa

SEQ ID NO: 131221 - DNA, 20 bp, Artificial Sequence
  Description of Artificial Sequence: Synthetic oligonucleotide
  Target: LAMA2; (+) strand; PAM type: NRG; PAM sequence: TGG
caggagaatgagaaagagtt

SEQ ID NO: 131222 - DNA, 20 bp, Artificial Sequence
  Description of Artificial Sequence: Synthetic oligonucleotide
  Target: LAMA2; (+) strand; PAM type: NRG; PAM sequence: AAG
gagaaagagtttggcatgtg

SEQ ID NO: 131223 - DNA, 20 bp, Artificial Sequence
  Description of Artificial Sequence: Synthetic oligonucleotide
  Target: LAMA2; (+) strand; PAM type: NRG; PAM sequence: CGG
agagtttggcatgtgaagat

SEQ ID NO: 131224 - DNA, 20 bp, Artificial Sequence
  Description of Artificial Sequence: Synthetic oligonucleotide
  Target: LAMA2; (+) strand; PAM type: NRG; PAM sequence: GGG
gagtttggcatgtgaagatc

SEQ ID NO: 131225 - DNA, 20 bp, Artificial Sequence
  Description of Artificial Sequence: Synthetic oligonucleotide
  Target: LAMA2; (+) strand; PAM type: NRG; PAM sequence: GGG
agtttggcatgtgaagatcg

SEQ ID NO: 131226 - DNA, 20 bp, Artificial Sequence
  Description of Artificial Sequence: Synthetic oligonucleotide
  Target: LAMA2; (+) strand; PAM type: NRG; PAM sequence: GAG
catgtgaagatcggggaaat

SEQ ID NO: 131227 - DNA, 20 bp, Artificial Sequence
  Description of Artificial Sequence: Synthetic oligonucleotide
  Target: LAMA2; (+) strand; PAM type: NRG; PAM sequence: TGG
agatcggggaaatgagcaca

SEQ ID NO: 131228 - DNA, 20 bp, Artificial Sequence
  Description of Artificial Sequence: Synthetic oligonucleotide
  Target: LAMA2; (+) strand; PAM type: NRG; PAM sequence: GGG
gatcggggaaatgagcacat

SEQ ID NO: 131229 - DNA, 20 bp, Artificial Sequence
  Description of Artificial Sequence: Synthetic oligonucleotide
  Target: LAMA2; (+) strand; PAM type: NRG; PAM sequence: GGG
atcggggaaatgagcacatg

SEQ ID NO: 131230 - DNA, 20 bp, Artificial Sequence
  Description of Artificial Sequence: Synthetic oligonucleotide
  Target: LAMA2; (+) strand; PAM type: NRG; PAM sequence: CAG
ggggaaatgagcacatgggg

SEQ ID NO: 131231 - DNA, 20 bp, Artificial Sequence
  Description of Artificial Sequence: Synthetic oligonucleotide
  Target: LAMA2; (+) strand; PAM type: NRG; PAM sequence: GAG
ggaaatgagcacatggggca

SEQ ID NO: 131232 - DNA, 20 bp, Artificial Sequence
  Description of Artificial Sequence: Synthetic oligonucleotide
  Target: LAMA2; (+) strand; PAM type: NRG; PAM sequence: AGG
gaaatgagcacatggggcag

SEQ ID NO: 131233 - DNA, 20 bp, Artificial Sequence
  Description of Artificial Sequence: Synthetic oligonucleotide
  Target: LAMA2; (+) strand; PAM type: NRG; PAM sequence: GGG
aaatgagcacatggggcaga

SEQ ID NO: 131234 - DNA, 20 bp, Artificial Sequence
  Description of Artificial Sequence: Synthetic oligonucleotide
  Target: LAMA2; (+) strand; PAM type: NRG; PAM sequence: GAG
atgagcacatggggcagagg

SEQ ID NO: 131235 - DNA, 20 bp, Artificial Sequence
  Description of Artificial Sequence: Synthetic oligonucleotide
  Target: LAMA2; (+) strand; PAM type: NRG; PAM sequence: AGG
tgagcacatggggcagaggg

SEQ ID NO: 131236 - DNA, 20 bp, Artificial Sequence
  Description of Artificial Sequence: Synthetic oligonucleotide
  Target: LAMA2; (+) strand; PAM type: NRG; PAM sequence: GGG
gagcacatggggcagaggga

SEQ ID NO: 131237 - DNA, 20 bp, Artificial Sequence
  Description of Artificial Sequence: Synthetic oligonucleotide
  Target: LAMA2; (+) strand; PAM type: NRG; PAM sequence: AAG
cagagggagggaaatgtgaa

SEQ ID NO: 131238 - DNA, 20 bp, Artificial Sequence
  Description of Artificial Sequence: Synthetic oligonucleotide
  Target: LAMA2; (+) strand; PAM type: NRG; PAM sequence: AGG
agagggagggaaatgtgaaa

SEQ ID NO: 131239 - DNA, 20 bp, Artificial Sequence
  Description of Artificial Sequence: Synthetic oligonucleotide
  Target: LAMA2; (+) strand; PAM type: NRG; PAM sequence: TGG
ggaaatgtgaaaaggcatga

SEQ ID NO: 131240 - DNA, 20 bp, Artificial Sequence
  Description of Artificial Sequence: Synthetic oligonucleotide
  Target: LAMA2; (+) strand; PAM type: NRG; PAM sequence: TGG
aatgtgaaaaggcatgatgg

SEQ ID NO: 131241 - DNA, 20 bp, Artificial Sequence
  Description of Artificial Sequence: Synthetic oligonucleotide
  Target: LAMA2; (+) strand; PAM type: NRG; PAM sequence: GGG
atgtgaaaaggcatgatggt

SEQ ID NO: 131242 - DNA, 20 bp, Artificial Sequence
  Description of Artificial Sequence: Synthetic oligonucleotide
  Target: LAMA2; (+) strand; PAM type: NRG; PAM sequence: GGG
tgtgaaaaggcatgatggtg

SEQ ID NO: 131243 - DNA, 20 bp, Artificial Sequence
  Description of Artificial Sequence: Synthetic oligonucleotide
  Target: LAMA2; (+) strand; PAM type: NRG; PAM sequence: GAG
tgaaaaggcatgatggtggg

SEQ ID NO: 131244 - DNA, 20 bp, Artificial Sequence
  Description of Artificial Sequence: Synthetic oligonucleotide
  Target: LAMA2; (+) strand; PAM type: NRG; PAM sequence: GAG
catgatggtggggagtgttt

SEQ ID NO: 131245 - DNA, 20 bp, Artificial Sequence
  Description of Artificial Sequence: Synthetic oligonucleotide
  Target: LAMA2; (+) strand; PAM type: NRG; PAM sequence: AGG
atgatggtggggagtgtttg

SEQ ID NO: 131246 - DNA, 20 bp, Artificial Sequence
  Description of Artificial Sequence: Synthetic oligonucleotide
  Target: LAMA2; (+) strand; PAM type: NRG; PAM sequence: GGG
tgatggtggggagtgtttga

SEQ ID NO: 131247 - DNA, 20 bp, Artificial Sequence
  Description of Artificial Sequence: Synthetic oligonucleotide
  Target: LAMA2; (+) strand; PAM type: NRG; PAM sequence: GGG
gatggtggggagtgtttgag

SEQ ID NO: 131248 - DNA, 20 bp, Artificial Sequence
  Description of Artificial Sequence: Synthetic oligonucleotide
  Target: LAMA2; (+) strand; PAM type: NRG; PAM sequence: GAG
gtggggagtgtttgaggggt

SEQ ID NO: 131249 - DNA, 20 bp, Artificial Sequence
  Description of Artificial Sequence: Synthetic oligonucleotide
  Target: LAMA2; (+) strand; PAM type: NRG; PAM sequence: GAG
ggggagtgtttgaggggtga

SEQ ID NO: 131250 - DNA, 20 bp, Artificial Sequence
  Description of Artificial Sequence: Synthetic oligonucleotide
  Target: LAMA2; (+) strand; PAM type: NRG; PAM sequence: CAG
ggggtgagagaaactatcat

SEQ ID NO: 131251 - DNA, 20 bp, Artificial Sequence
  Description of Artificial Sequence: Synthetic oligonucleotide
  Target: LAMA2; (+) strand; PAM type: NRG; PAM sequence: GAG
ggtgagagaaactatcatca

SEQ ID NO: 131252 - DNA, 20 bp, Artificial Sequence
  Description of Artificial Sequence: Synthetic oligonucleotide
  Target: LAMA2; (+) strand; PAM type: NRG; PAM sequence: CAG
agaaactatcatcagagtaa

SEQ ID NO: 131253 - DNA, 20 bp, Artificial Sequence
  Description of Artificial Sequence: Synthetic oligonucleotide
  Target: LAMA2; (+) strand; PAM type: NRG; PAM sequence: AGG
gaaactatcatcagagtaac

SEQ ID NO: 131254 - DNA, 20 bp, Artificial Sequence
  Description of Artificial Sequence: Synthetic oligonucleotide
  Target: LAMA2; (+) strand; PAM type: NRG; PAM sequence: CAG
tcagagtaacaggcaaccta

SEQ ID NO: 131255 - DNA, 20 bp, Artificial Sequence
  Description of Artificial Sequence: Synthetic oligonucleotide
  Target: LAMA2; (+) strand; PAM type: NRG; PAM sequence: TGG
gtaacaggcaacctacagaa

SEQ ID NO: 131256 - DNA, 20 bp, Artificial Sequence
  Description of Artificial Sequence: Synthetic oligonucleotide
  Target: LAMA2; (+) strand; PAM type: NRG; PAM sequence: GGG
taacaggcaacctacagaat

SEQ ID NO: 131257 - DNA, 20 bp, Artificial Sequence
  Description of Artificial Sequence: Synthetic oligonucleotide
  Target: LAMA2; (+) strand; PAM type: NRG; PAM sequence: GAG
acaggcaacctacagaatgg

SEQ ID NO: 131258 - DNA, 20 bp, Artificial Sequence
  Description of Artificial Sequence: Synthetic oligonucleotide
  Target: LAMA2; (+) strand; PAM type: NRG; PAM sequence: AAG
tgcaatctatccatctgaca

SEQ ID NO: 131259 - DNA, 20 bp, Artificial Sequence
  Description of Artificial Sequence: Synthetic oligonucleotide
  Target: LAMA2; (+) strand; PAM type: NRG; PAM sequence: AGG
gcaatctatccatctgacaa

SEQ ID NO: 131260 - DNA, 20 bp, Artificial Sequence
  Description of Artificial Sequence: Synthetic oligonucleotide
  Target: LAMA2; (+) strand; PAM type: NRG; PAM sequence: GGG
caatctatccatctgacaaa

SEQ ID NO: 131261 - DNA, 20 bp, Artificial Sequence
  Description of Artificial Sequence: Synthetic oligonucleotide
  Target: LAMA2; (+) strand; PAM type: NRG; PAM sequence: CAG
tctgacaaagggctaatacc

SEQ ID NO: 131262 - DNA, 20 bp, Artificial Sequence
  Description of Artificial Sequence: Synthetic oligonucleotide
  Target: LAMA2; (+) strand; PAM type: NRG; PAM sequence: AAG
ggctaatacccagaatctac

SEQ ID NO: 131263 - DNA, 20 bp, Artificial Sequence
  Description of Artificial Sequence: Synthetic oligonucleotide
  Target: LAMA2; (+) strand; PAM type: NRG; PAM sequence: AGG
gctaatacccagaatctaca

SEQ ID NO: 131264 - DNA, 20 bp, Artificial Sequence
  Description of Artificial Sequence: Synthetic oligonucleotide
  Target: LAMA2; (+) strand; PAM type: NRG; PAM sequence: AAG
aggaacataaacaaattcac

SEQ ID NO: 131265 - DNA, 20 bp, Artificial Sequence
  Description of Artificial Sequence: Synthetic oligonucleotide
  Target: LAMA2; (+) strand; PAM type: NRG; PAM sequence: AAG
ataaacaaattcacaagaaa

SEQ ID NO: 131266 - DNA, 20 bp, Artificial Sequence
  Description of Artificial Sequence: Synthetic oligonucleotide
  Target: LAMA2; (+) strand; PAM type: NRG; PAM sequence: AAG
gaaaaagcaaccccatcgaa

SEQ ID NO: 131267 - DNA, 20 bp, Artificial Sequence
  Description of Artificial Sequence: Synthetic oligonucleotide
  Target: LAMA2; (+) strand; PAM type: NRG; PAM sequence: TGG
aaagcaaccccatcgaaaag

SEQ ID NO: 131268 - DNA, 20 bp, Artificial Sequence
  Description of Artificial Sequence: Synthetic oligonucleotide
  Target: LAMA2; (+) strand; PAM type: NRG; PAM sequence: GGG
aagcaaccccatcgaaaagt

SEQ ID NO: 131269 - DNA, 20 bp, Artificial Sequence
  Description of Artificial Sequence: Synthetic oligonucleotide
  Target: LAMA2; (+) strand; PAM type: NRG; PAM sequence: AAG
accccatcgaaaagtgggca

SEQ ID NO: 131270 - DNA, 20 bp, Artificial Sequence
  Description of Artificial Sequence: Synthetic oligonucleotide
  Target: LAMA2; (+) strand; PAM type: NRG; PAM sequence: AGG
ccccatcgaaaagtgggcaa

SEQ ID NO: 131271 - DNA, 20 bp, Artificial Sequence
  Description of Artificial Sequence: Synthetic oligonucleotide
  Target: LAMA2; (+) strand; PAM type: NRG; PAM sequence: CAG
aagtgggcaaaggatatgaa

SEQ ID NO: 131272 - DNA, 20 bp, Artificial Sequence
  Description of Artificial Sequence: Synthetic oligonucleotide
  Target: LAMA2; (+) strand; PAM type: NRG; PAM sequence: AAG
tatgaacagacacttctcaa

SEQ ID NO: 131273 - DNA, 20 bp, Artificial Sequence
  Description of Artificial Sequence: Synthetic oligonucleotide
  Target: LAMA2; (+) strand; PAM type: NRG; PAM sequence: AAG
gaacagacacttctcaaaag

SEQ ID NO: 131274 - DNA, 20 bp, Artificial Sequence
  Description of Artificial Sequence: Synthetic oligonucleotide
  Target: LAMA2; (+) strand; PAM type: NRG; PAM sequence: TGG
ctcaaaagaagacatttatg

SEQ ID NO: 131275 - DNA, 20 bp, Artificial Sequence
  Description of Artificial Sequence: Synthetic oligonucleotide
  Target: LAMA2; (+) strand; PAM type: NRG; PAM sequence: AAG
gccaacaaacatatgaaaaa

SEQ ID NO: 131276 - DNA, 20 bp, Artificial Sequence
  Description of Artificial Sequence: Synthetic oligonucleotide
  Target: LAMA2; (+) strand; PAM type: NRG; PAM sequence: TGG
gaaaaaaagctcaccatcac

SEQ ID NO: 131277 - DNA, 20 bp, Artificial Sequence
  Description of Artificial Sequence: Synthetic oligonucleotide
  Target: LAMA2; (+) strand; PAM type: NRG; PAM sequence: TAG
agctcaccatcactggtaat

SEQ ID NO: 131278 - DNA, 20 bp, Artificial Sequence
  Description of Artificial Sequence: Synthetic oligonucleotide
  Target: LAMA2; (+) strand; PAM type: NRG; PAM sequence: GAG
ctcaccatcactggtaatta

SEQ ID NO: 131279 - DNA, 20 bp, Artificial Sequence
  Description of Artificial Sequence: Synthetic oligonucleotide
  Target: LAMA2; (+) strand; PAM type: NRG; PAM sequence: GAG
atgcaaatcaaaacgacaat

SEQ ID NO: 131280 - DNA, 20 bp, Artificial Sequence
  Description of Artificial Sequence: Synthetic oligonucleotide
  Target: LAMA2; (+) strand; PAM type: NRG; PAM sequence: CAG
aatgagataccaactcatgc

SEQ ID NO: 131281 - DNA, 20 bp, Artificial Sequence
  Description of Artificial Sequence: Synthetic oligonucleotide
  Target: LAMA2; (+) strand; PAM type: NRG; PAM sequence: TAG
agataccaactcatgccagt

SEQ ID NO: 131282 - DNA, 20 bp, Artificial Sequence
  Description of Artificial Sequence: Synthetic oligonucleotide
  Target: LAMA2; (+) strand; PAM type: NRG; PAM sequence: TGG
ccaactcatgccagttagaa

SEQ ID NO: 131283 - DNA, 20 bp, Artificial Sequence
  Description of Artificial Sequence: Synthetic oligonucleotide
  Target: LAMA2; (+) strand; PAM type: NRG; PAM sequence: CAG
aatggcgatcattaaaatgt

SEQ ID NO: 131284 - DNA, 20 bp, Artificial Sequence
  Description of Artificial Sequence: Synthetic oligonucleotide
  Target: LAMA2; (+) strand; PAM type: NRG; PAM sequence: AGG
atggcgatcattaaaatgtc

SEQ ID NO: 131285 - DNA, 20 bp, Artificial Sequence
  Description of Artificial Sequence: Synthetic oligonucleotide
  Target: LAMA2; (+) strand; PAM type: NRG; PAM sequence: CAG
attaaaatgtcaggaaacaa

SEQ ID NO: 131286 - DNA, 20 bp, Artificial Sequence
  Description of Artificial Sequence: Synthetic oligonucleotide
  Target: LAMA2; (+) strand; PAM type: NRG; PAM sequence: TGG
tgtcaggaaacaacagatgc

SEQ ID NO: 131287 - DNA, 20 bp, Artificial Sequence
  Description of Artificial Sequence: Synthetic oligonucleotide
  Target: LAMA2; (+) strand; PAM type: NRG; PAM sequence: GAG
tcaggaaacaacagatgctg

SEQ ID NO: 131288 - DNA, 20 bp, Artificial Sequence
  Description of Artificial Sequence: Synthetic oligonucleotide
  Target: LAMA2; (+) strand; PAM type: NRG; PAM sequence: GAG
aggaaacaacagatgctgga

SEQ ID NO: 131289 - DNA, 20 bp, Artificial Sequence
  Description of Artificial Sequence: Synthetic oligonucleotide
  Target: LAMA2; (+) strand; PAM type: NRG; PAM sequence: AGG
ggaaacaacagatgctggag

SEQ ID NO: 131290 - DNA, 20 bp, Artificial Sequence
  Description of Artificial Sequence: Synthetic oligonucleotide
  Target: LAMA2; (+) strand; PAM type: NRG; PAM sequence: TGG
aacagatgctggagaggatg

SEQ ID NO: 131291 - DNA, 20 bp, Artificial Sequence
  Description of Artificial Sequence: Synthetic oligonucleotide
  Target: LAMA2; (+) strand; PAM type: NRG; PAM sequence: GAG
cagatgctggagaggatgtg

SEQ ID NO: 131292 - DNA, 20 bp, Artificial Sequence
  Description of Artificial Sequence: Synthetic oligonucleotide
  Target: LAMA2; (+) strand; PAM type: NRG; PAM sequence: TAG
ctggagaggatgtggagaaa

SEQ ID NO: 131293 - DNA, 20 bp, Artificial Sequence
  Description of Artificial Sequence: Synthetic oligonucleotide
  Target: LAMA2; (+) strand; PAM type: NRG; PAM sequence: AGG
tggagaggatgtggagaaat

SEQ ID NO: 131294 - DNA, 20 bp, Artificial Sequence
  Description of Artificial Sequence: Synthetic oligonucleotide
  Target: LAMA2; (+) strand; PAM type: NRG; PAM sequence: TAG
taggaatgcttttacactgt

SEQ ID NO: 131295 - DNA, 20 bp, Artificial Sequence
  Description of Artificial Sequence: Synthetic oligonucleotide
  Target: LAMA2; (+) strand; PAM type: NRG; PAM sequence: TAG
ctgttagtgtgaatgtaaat

SEQ ID NO: 131296 - DNA, 20 bp, Artificial Sequence
  Description of Artificial Sequence: Synthetic oligonucleotide
  Target: LAMA2; (+) strand; PAM type: NRG; PAM sequence: CAG
agtgtgaatgtaaattagtt

SEQ ID NO: 131297 - DNA, 20 bp, Artificial Sequence
  Description of Artificial Sequence: Synthetic oligonucleotide
  Target: LAMA2; (+) strand; PAM type: NRG; PAM sequence: TGG
gtaaattagttcagacattc

SEQ ID NO: 131298 - DNA, 20 bp, Artificial Sequence
  Description of Artificial Sequence: Synthetic oligonucleotide
  Target: LAMA2; (+) strand; PAM type: NRG; PAM sequence: AAG
aattagttcagacattctgg

SEQ ID NO: 131299 - DNA, 20 bp, Artificial Sequence
  Description of Artificial Sequence: Synthetic oligonucleotide
  Target: LAMA2; (+) strand; PAM type: NRG; PAM sequence: CAG
agttcagacattctggaaga

SEQ ID NO: 131300 - DNA, 20 bp, Artificial Sequence
  Description of Artificial Sequence: Synthetic oligonucleotide
  Target: LAMA2; (+) strand; PAM type: NRG; PAM sequence: TGG
agacattctggaagacagtg

SEQ ID NO: 131301 - DNA, 20 bp, Artificial Sequence
  Description of Artificial Sequence: Synthetic oligonucleotide
  Target: LAMA2; (+) strand; PAM type: NRG; PAM sequence: AAG
agacagtgtggtgattcctc

SEQ ID NO: 131302 - DNA, 20 bp, Artificial Sequence
  Description of Artificial Sequence: Synthetic oligonucleotide
  Target: LAMA2; (+) strand; PAM type: NRG; PAM sequence: AGG
gacagtgtggtgattcctca

SEQ ID NO: 131303 - DNA, 20 bp, Artificial Sequence
  Description of Artificial Sequence: Synthetic oligonucleotide
  Target: LAMA2; (+) strand; PAM type: NRG; PAM sequence: TAG
gtggtgattcctcaaggatc

SEQ ID NO: 131304 - DNA, 20 bp, Artificial Sequence
  Description of Artificial Sequence: Synthetic oligonucleotide
  Target: LAMA2; (+) strand; PAM type: NRG; PAM sequence: CGG
attcctcaaggatctagaac

SEQ ID NO: 131305 - DNA, 20 bp, Artificial Sequence
  Description of Artificial Sequence: Synthetic oligonucleotide
  Target: LAMA2; (+) strand; PAM type: NRG; PAM sequence: CAG
accggaaataccatttgacc

SEQ ID NO: 131306 - DNA, 20 bp, Artificial Sequence
  Description of Artificial Sequence: Synthetic oligonucleotide
  Target: LAMA2; (+) strand; PAM type: NRG; PAM sequence: TGG
tgacccagccatcccattac

SEQ ID NO: 131307 - DNA, 20 bp, Artificial Sequence
  Description of Artificial Sequence: Synthetic oligonucleotide
  Target: LAMA2; (+) strand; PAM type: NRG; PAM sequence: GGG
gacccagccatcccattact

SEQ ID NO: 131308 - DNA, 20 bp, Artificial Sequence
  Description of Artificial Sequence: Synthetic oligonucleotide
  Target: LAMA2; (+) strand; PAM type: NRG; PAM sequence: AAG
cattactgggtatttatcca

SEQ ID NO: 131309 - DNA, 20 bp, Artificial Sequence
  Description of Artificial Sequence: Synthetic oligonucleotide
  Target: LAMA2; (+) strand; PAM type: NRG; PAM sequence: AGG
attactgggtatttatccaa

SEQ ID NO: 131310 - DNA, 20 bp, Artificial Sequence
  Description of Artificial Sequence: Synthetic oligonucleotide
  Target: LAMA2; (+) strand; PAM type: NRG; PAM sequence: AAG
ttataaatcattctactata

SEQ ID NO: 131311 - DNA, 20 bp, Artificial Sequence
  Description of Artificial Sequence: Synthetic oligonucleotide
  Target: LAMA2; (+) strand; PAM type: NRG; PAM sequence: CAG
atgcacacgtatgtttactg

SEQ ID NO: 131312 - DNA, 20 bp, Artificial Sequence
  Description of Artificial Sequence: Synthetic oligonucleotide
  Target: LAMA2; (+) strand; PAM type: NRG; PAM sequence: TAG
tactgcagcactattcacaa

SEQ ID NO: 131313 - DNA, 20 bp, Artificial Sequence
  Description of Artificial Sequence: Synthetic oligonucleotide
  Target: LAMA2; (+) strand; PAM type: NRG; PAM sequence: AAG
cagcactattcacaatagca

SEQ ID NO: 131314 - DNA, 20 bp, Artificial Sequence
  Description of Artificial Sequence: Synthetic oligonucleotide
  Target: LAMA2; (+) strand; PAM type: NRG; PAM sequence: TGG
tattcacaatagcaaagact

SEQ ID NO: 131315 - DNA, 20 bp, Artificial Sequence
  Description of Artificial Sequence: Synthetic oligonucleotide
  Target: LAMA2; (+) strand; PAM type: NRG; PAM sequence: TAG
acccaaatgcctatcaatga

SEQ ID NO: 131316 - DNA, 20 bp, Artificial Sequence
  Description of Artificial Sequence: Synthetic oligonucleotide
  Target: LAMA2; (+) strand; PAM type: NRG; PAM sequence: TGG
aatgcctatcaatgatagac

SEQ ID NO: 131317 - DNA, 20 bp, Artificial Sequence
  Description of Artificial Sequence: Synthetic oligonucleotide
  Target: LAMA2; (+) strand; PAM type: NRG; PAM sequence: AAG
tatcaatgatagactggata

SEQ ID NO: 131318 - DNA, 20 bp, Artificial Sequence
  Description of Artificial Sequence: Synthetic oligonucleotide
  Target: LAMA2; (+) strand; PAM type: NRG; PAM sequence: TGG
tagactggataaagaaaatg

SEQ ID NO: 131319 - DNA, 20 bp, Artificial Sequence
  Description of Artificial Sequence: Synthetic oligonucleotide
  Target: LAMA2; (+) strand; PAM type: NRG; PAM sequence: TGG
aatgtggcacatatacacca

SEQ ID NO: 131320 - DNA, 20 bp, Artificial Sequence
  Description of Artificial Sequence: Synthetic oligonucleotide
  Target: LAMA2; (+) strand; PAM type: NRG; PAM sequence: TAG
acatatacaccatggaacac

SEQ ID NO: 131321 - DNA, 20 bp, Artificial Sequence
  Description of Artificial Sequence: Synthetic oligonucleotide
  Target: LAMA2; (+) strand; PAM type: NRG; PAM sequence: AGG
catatacaccatggaacact

SEQ ID NO: 131322 - DNA, 20 bp, Artificial Sequence
  Description of Artificial Sequence: Synthetic oligonucleotide
  Target: LAMA2; (+) strand; PAM type: NRG; PAM sequence: CAG
atacaccatggaacactagg

SEQ ID NO: 131323 - DNA, 20 bp, Artificial Sequence
  Description of Artificial Sequence: Synthetic oligonucleotide
  Target: LAMA2; (+) strand; PAM type: NRG; PAM sequence: AAG
aacactaggcagccgtgaaa

SEQ ID NO: 131324 - DNA, 20 bp, Artificial Sequence
  Description of Artificial Sequence: Synthetic oligonucleotide
  Target: LAMA2; (+) strand; PAM type: NRG; PAM sequence: AGG
acactaggcagccgtgaaaa

SEQ ID NO: 131325 - DNA, 20 bp, Artificial Sequence
  Description of Artificial Sequence: Synthetic oligonucleotide
  Target: LAMA2; (+) strand; PAM type: NRG; PAM sequence: GAG
aggcagccgtgaaaaaggat

SEQ ID NO: 131326 - DNA, 20 bp, Artificial Sequence
  Description of Artificial Sequence: Synthetic oligonucleotide
  Target: LAMA2; (+) strand; PAM type: NRG; PAM sequence: CAG
ggatgagttcatgtcctttg

SEQ ID NO: 131327 - DNA, 20 bp, Artificial Sequence
  Description of Artificial Sequence: Synthetic oligonucleotide
  Target: LAMA2; (+) strand; PAM type: NRG; PAM sequence: AGG
gatgagttcatgtcctttgc

SEQ ID NO: 131328 - DNA, 20 bp, Artificial Sequence
  Description of Artificial Sequence: Synthetic oligonucleotide
  Target: LAMA2; (+) strand; PAM type: NRG; PAM sequence: GGG
atgagttcatgtcctttgca

SEQ ID NO: 131329 - DNA, 20 bp, Artificial Sequence
  Description of Artificial Sequence: Synthetic oligonucleotide
  Target: LAMA2; (+) strand; PAM type: NRG; PAM sequence: TGG
tcatgtcctttgcagggaca

SEQ ID NO: 131330 - DNA, 20 bp, Artificial Sequence
  Description of Artificial Sequence: Synthetic oligonucleotide
  Target: LAMA2; (+) strand; PAM type: NRG; PAM sequence: AAG
cctttgcagggacatggatg

SEQ ID NO: 131331 - DNA, 20 bp, Artificial Sequence
  Description of Artificial Sequence: Synthetic oligonucleotide
  Target: LAMA2; (+) strand; PAM type: NRG; PAM sequence: TGG
tgcagggacatggatgaagc

SEQ ID NO: 131332 - DNA, 20 bp, Artificial Sequence
  Description of Artificial Sequence: Synthetic oligonucleotide
  Target: LAMA2; (+) strand; PAM type: NRG; PAM sequence: CAG
aagctggaaaccatcattct

SEQ ID NO: 131333 - DNA, 20 bp, Artificial Sequence
  Description of Artificial Sequence: Synthetic oligonucleotide
  Target: LAMA2; (+) strand; PAM type: NRG; PAM sequence: CAG
catcattctcagcaaactaa

SEQ ID NO: 131334 - DNA, 20 bp, Artificial Sequence
  Description of Artificial Sequence: Synthetic oligonucleotide
  Target: LAMA2; (+) strand; PAM type: NRG; PAM sequence: GAG
tcattctcagcaaactaaca

SEQ ID NO: 131335 - DNA, 20 bp, Artificial Sequence
  Description of Artificial Sequence: Synthetic oligonucleotide
  Target: LAMA2; (+) strand; PAM type: NRG; PAM sequence: AGG
cattctcagcaaactaacag

SEQ ID NO: 131336 - DNA, 20 bp, Artificial Sequence
  Description of Artificial Sequence: Synthetic oligonucleotide
  Target: LAMA2; (+) strand; PAM type: NRG; PAM sequence: CAG
tcagcaaactaacagaggaa

SEQ ID NO: 131337 - DNA, 20 bp, Artificial Sequence
  Description of Artificial Sequence: Synthetic oligonucleotide
  Target: LAMA2; (+) strand; PAM type: NRG; PAM sequence: AAG
cactgcatgttctcactcat

SEQ ID NO: 131338 - DNA, 20 bp, Artificial Sequence
  Description of Artificial Sequence: Synthetic oligonucleotide
  Target: LAMA2; (+) strand; PAM type: NRG; PAM sequence: TGG
tgcatgttctcactcataag

SEQ ID NO: 131339 - DNA, 20 bp, Artificial Sequence
  Description of Artificial Sequence: Synthetic oligonucleotide
  Target: LAMA2; (+) strand; PAM type: NRG; PAM sequence: GGG
gcatgttctcactcataagt

SEQ ID NO: 131340 - DNA, 20 bp, Artificial Sequence
  Description of Artificial Sequence: Synthetic oligonucleotide
  Target: LAMA2; (+) strand; PAM type: NRG; PAM sequence: CAG
actcataagtgggtgttgaa

SEQ ID NO: 131341 - DNA, 20 bp, Artificial Sequence
  Description of Artificial Sequence: Synthetic oligonucleotide
  Target: LAMA2; (+) strand; PAM type: NRG; PAM sequence: GAG
ataagtgggtgttgaacagt

SEQ ID NO: 131342 - DNA, 20 bp, Artificial Sequence
  Description of Artificial Sequence: Synthetic oligonucleotide
  Target: LAMA2; (+) strand; PAM type: NRG; PAM sequence: TGG
tgttgaacagtgagaacata

SEQ ID NO: 131343 - DNA, 20 bp, Artificial Sequence
  Description of Artificial Sequence: Synthetic oligonucleotide
  Target: LAMA2; (+) strand; PAM type: NRG; PAM sequence: CGG
gaacagtgagaacatatgga

SEQ ID NO: 131344 - DNA, 20 bp, Artificial Sequence
  Description of Artificial Sequence: Synthetic oligonucleotide
  Target: LAMA2; (+) strand; PAM type: NRG; PAM sequence: CAG
tgagaacatatggacggaca

SEQ ID NO: 131345 - DNA, 20 bp, Artificial Sequence
  Description of Artificial Sequence: Synthetic oligonucleotide
  Target: LAMA2; (+) strand; PAM type: NRG; PAM sequence: AGG
gagaacatatggacggacac

SEQ ID NO: 131346 - DNA, 20 bp, Artificial Sequence
  Description of Artificial Sequence: Synthetic oligonucleotide
  Target: LAMA2; (+) strand; PAM type: NRG; PAM sequence: GGG
agaacatatggacggacaca

SEQ ID NO: 131347 - DNA, 20 bp, Artificial Sequence
  Description of Artificial Sequence: Synthetic oligonucleotide
  Target: LAMA2; (+) strand; PAM type: NRG; PAM sequence: GAG
aacatatggacggacacagg

SEQ ID NO: 131348 - DNA, 20 bp, Artificial Sequence
  Description of Artificial Sequence: Synthetic oligonucleotide
  Target: LAMA2; (+) strand; PAM type: NRG; PAM sequence: AGG
acatatggacggacacaggg

SEQ ID NO: 131349 - DNA, 20 bp, Artificial Sequence
  Description of Artificial Sequence: Synthetic oligonucleotide
  Target: LAMA2; (+) strand; PAM type: NRG; PAM sequence: GAG
atatggacggacacagggag

SEQ ID NO: 131350 - DNA, 20 bp, Artificial Sequence
  Description of Artificial Sequence: Synthetic oligonucleotide
  Target: LAMA2; (+) strand; PAM type: NRG; PAM sequence: TGG
gggaggagaacatcacacac

SEQ ID NO: 131351 - DNA, 20 bp, Artificial Sequence
  Description of Artificial Sequence: Synthetic oligonucleotide
  Target: LAMA2; (+) strand; PAM type: NRG; PAM sequence: GGG
ggaggagaacatcacacact

SEQ ID NO: 131352 - DNA, 20 bp, Artificial Sequence
  Description of Artificial Sequence: Synthetic oligonucleotide
  Target: LAMA2; (+) strand; PAM type: NRG; PAM sequence: GGG
gaggagaacatcacacactg

SEQ ID NO: 131353 - DNA, 20 bp, Artificial Sequence
  Description of Artificial Sequence: Synthetic oligonucleotide
  Target: LAMA2; (+) strand; PAM type: NRG; PAM sequence: TGG
catcacacactggggcctgt

SEQ ID NO: 131354 - DNA, 20 bp, Artificial Sequence
  Description of Artificial Sequence: Synthetic oligonucleotide
  Target: LAMA2; (+) strand; PAM type: NRG; PAM sequence: GGG
atcacacactggggcctgtt

SEQ ID NO: 131355 - DNA, 20 bp, Artificial Sequence
  Description of Artificial Sequence: Synthetic oligonucleotide
  Target: LAMA2; (+) strand; PAM type: NRG; PAM sequence: GGG
tcacacactggggcctgttg

SEQ ID NO: 131356 - DNA, 20 bp, Artificial Sequence
  Description of Artificial Sequence: Synthetic oligonucleotide
  Target: LAMA2; (+) strand; PAM type: NRG; PAM sequence: GGG
cacacactggggcctgttgg

SEQ ID NO: 131357 - DNA, 20 bp, Artificial Sequence
  Description of Artificial Sequence: Synthetic oligonucleotide
  Target: LAMA2; (+) strand; PAM type: NRG; PAM sequence: GAG
cacactggggcctgttgggg

SEQ ID NO: 131358 - DNA, 20 bp, Artificial Sequence
  Description of Artificial Sequence: Synthetic oligonucleotide
  Target: LAMA2; (+) strand; PAM type: NRG; PAM sequence: AGG
acactggggcctgttggggg

SEQ ID NO: 131359 - DNA, 20 bp, Artificial Sequence
  Description of Artificial Sequence: Synthetic oligonucleotide
  Target: LAMA2; (+) strand; PAM type: NRG; PAM sequence: GGG
cactggggcctgttggggga

SEQ ID NO: 131360 - DNA, 20 bp, Artificial Sequence
  Description of Artificial Sequence: Synthetic oligonucleotide
  Target: LAMA2; (+) strand; PAM type: NRG; PAM sequence: GGG
actggggcctgttgggggag

SEQ ID NO: 131361 - DNA, 20 bp, Artificial Sequence
  Description of Artificial Sequence: Synthetic oligonucleotide
  Target: LAMA2; (+) strand; PAM type: NRG; PAM sequence: TGG
ggggcctgttgggggagggg

SEQ ID NO: 131362 - DNA, 20 bp, Artificial Sequence
  Description of Artificial Sequence: Synthetic oligonucleotide
  Target: LAMA2; (+) strand; PAM type: NRG; PAM sequence: GGG
gggcctgttgggggaggggt

SEQ ID NO: 131363 - DNA, 20 bp, Artificial Sequence
  Description of Artificial Sequence: Synthetic oligonucleotide
  Target: LAMA2; (+) strand; PAM type: NRG; PAM sequence: GAG
gcctgttgggggaggggtgg

SEQ ID NO: 131364 - DNA, 20 bp, Artificial Sequence
  Description of Artificial Sequence: Synthetic oligonucleotide
  Target: LAMA2; (+) strand; PAM type: NRG; PAM sequence: AGG
cctgttgggggaggggtggg

SEQ ID NO: 131365 - DNA, 20 bp, Artificial Sequence
  Description of Artificial Sequence: Synthetic oligonucleotide
  Target: LAMA2; (+) strand; PAM type: NRG; PAM sequence: AAG
ttgggggaggggtgggaggc

SEQ ID NO: 131366 - DNA, 20 bp, Artificial Sequence
  Description of Artificial Sequence: Synthetic oligonucleotide
  Target: LAMA2; (+) strand; PAM type: NRG; PAM sequence: AGG
tgggggaggggtgggaggca

SEQ ID NO: 131367 - DNA, 20 bp, Artificial Sequence
  Description of Artificial Sequence: Synthetic oligonucleotide
  Target: LAMA2; (+) strand; PAM type: NRG; PAM sequence: GGG
gggggaggggtgggaggcaa

SEQ ID NO: 131368 - DNA, 20 bp, Artificial Sequence
  Description of Artificial Sequence: Synthetic oligonucleotide
  Target: LAMA2; (+) strand; PAM type: NRG; PAM sequence: GGG
ggggaggggtgggaggcaag

SEQ ID NO: 131369 - DNA, 20 bp, Artificial Sequence
  Description of Artificial Sequence: Synthetic oligonucleotide
  Target: LAMA2; (+) strand; PAM type: NRG; PAM sequence: GAG
ggaggggtgggaggcaaggg

SEQ ID NO: 131370 - DNA, 20 bp, Artificial Sequence
  Description of Artificial Sequence: Synthetic oligonucleotide
  Target: LAMA2; (+) strand; PAM type: NRG; PAM sequence: AGG
gaggggtgggaggcaagggg

SEQ ID NO: 131371 - DNA, 20 bp, Artificial Sequence
  Description of Artificial Sequence: Synthetic oligonucleotide
  Target: LAMA2; (+) strand; PAM type: NRG; PAM sequence: GGG
aggggtgggaggcaagggga

SEQ ID NO: 131372 - DNA, 20 bp, Artificial Sequence
  Description of Artificial Sequence: Synthetic oligonucleotide
  Target: LAMA2; (+) strand; PAM type: NRG; PAM sequence: TAG
gtgggaggcaaggggaggga

SEQ ID NO: 131373 - DNA, 20 bp, Artificial Sequence
  Description of Artificial Sequence: Synthetic oligonucleotide
  Target: LAMA2; (+) strand; PAM type: NRG; PAM sequence: TAG
ggcaaggggagggatagcat

SEQ ID NO: 131374 - DNA, 20 bp, Artificial Sequence
  Description of Artificial Sequence: Synthetic oligonucleotide
  Target: LAMA2; (+) strand; PAM type: NRG; PAM sequence: AGG
gcaaggggagggatagcatt

SEQ ID NO: 131375 - DNA, 20 bp, Artificial Sequence
  Description of Artificial Sequence: Synthetic oligonucleotide
  Target: LAMA2; (+) strand; PAM type: NRG; PAM sequence: GAG
aaggggagggatagcattag

SEQ ID NO: 131376 - DNA, 20 bp, Artificial Sequence
  Description of Artificial Sequence: Synthetic oligonucleotide
  Target: LAMA2; (+) strand; PAM type: NRG; PAM sequence: TAG
attaggagaaatacctaatg

SEQ ID NO: 131377 - DNA, 20 bp, Artificial Sequence
  Description of Artificial Sequence: Synthetic oligonucleotide
  Target: LAMA2; (+) strand; PAM type: NRG; PAM sequence: TGG
gaaatacctaatgtagatga

SEQ ID NO: 131378 - DNA, 20 bp, Artificial Sequence
  Description of Artificial Sequence: Synthetic oligonucleotide
  Target: LAMA2; (+) strand; PAM type: NRG; PAM sequence: GGG
aaatacctaatgtagatgat

SEQ ID NO: 131379 - DNA, 20 bp, Artificial Sequence
  Description of Artificial Sequence: Synthetic oligonucleotide
  Target: LAMA2; (+) strand; PAM type: NRG; PAM sequence: TGG
taatgtagatgatgggttga

SEQ ID NO: 131380 - DNA, 20 bp, Artificial Sequence
  Description of Artificial Sequence: Synthetic oligonucleotide
  Target: LAMA2; (+) strand; PAM type: NRG; PAM sequence: CAG
agatgatgggttgatggctg

SEQ ID NO: 131381 - DNA, 20 bp, Artificial Sequence
  Description of Artificial Sequence: Synthetic oligonucleotide
  Target: LAMA2; (+) strand; PAM type: NRG; PAM sequence: TGG
atggctgcagcaaaccacca

SEQ ID NO: 131382 - DNA, 20 bp, Artificial Sequence
  Description of Artificial Sequence: Synthetic oligonucleotide
  Target: LAMA2; (+) strand; PAM type: NRG; PAM sequence: CAG
cacattttgcacatgtatcc

SEQ ID NO: 131383 - DNA, 20 bp, Artificial Sequence
  Description of Artificial Sequence: Synthetic oligonucleotide
  Target: LAMA2; (+) strand; PAM type: NRG; PAM sequence: AAG
cacatgtatcccagaactta

SEQ ID NO: 131384 - DNA, 20 bp, Artificial Sequence
  Description of Artificial Sequence: Synthetic oligonucleotide
  Target: LAMA2; (+) strand; PAM type: NRG; PAM sequence: TAG
atgtatcccagaacttaaag

SEQ ID NO: 131385 - DNA, 20 bp, Artificial Sequence
  Description of Artificial Sequence: Synthetic oligonucleotide
  Target: LAMA2; (+) strand; PAM type: NRG; PAM sequence: AAG
atcccagaacttaaagtaga

SEQ ID NO: 131386 - DNA, 20 bp, Artificial Sequence
  Description of Artificial Sequence: Synthetic oligonucleotide
  Target: LAMA2; (+) strand; PAM type: NRG; PAM sequence: AAG
cagaacttaaagtagaaaga

SEQ ID NO: 131387 - DNA, 20 bp, Artificial Sequence
  Description of Artificial Sequence: Synthetic oligonucleotide
  Target: LAMA2; (+) strand; PAM type: NRG; PAM sequence: AAG
acttaaagtagaaagaaaga

SEQ ID NO: 131388 - DNA, 20 bp, Artificial Sequence
  Description of Artificial Sequence: Synthetic oligonucleotide
  Target: LAMA2; (+) strand; PAM type: NRG; PAM sequence: GAG
ttaaagtagaaagaaagaaa

SEQ ID NO: 131389 - DNA, 20 bp, Artificial Sequence
  Description of Artificial Sequence: Synthetic oligonucleotide
  Target: LAMA2; (+) strand; PAM type: NRG; PAM sequence: AAG
gtagaaagaaagaaagagaa

SEQ ID NO: 131390 - DNA, 20 bp, Artificial Sequence
  Description of Artificial Sequence: Synthetic oligonucleotide
  Target: LAMA2; (+) strand; PAM type: NRG; PAM sequence: AAG
gaaagaaagaaagagaaaag

SEQ ID NO: 131391 - DNA, 20 bp, Artificial Sequence
  Description of Artificial Sequence: Synthetic oligonucleotide
  Target: LAMA2; (+) strand; PAM type: NRG; PAM sequence: AAG
gaaagaaagagaaaagaaga

SEQ ID NO: 131392 - DNA, 20 bp, Artificial Sequence
  Description of Artificial Sequence: Synthetic oligonucleotide
  Target: LAMA2; (+) strand; PAM type: NRG; PAM sequence: AAG
gaaagagaaaagaagaaaga

SEQ ID NO: 131393 - DNA, 20 bp, Artificial Sequence
  Description of Artificial Sequence: Synthetic oligonucleotide
  Target: LAMA2; (+) strand; PAM type: NRG; PAM sequence: AAG
aaagaagaaagaaagaaaca

SEQ ID NO: 131394 - DNA, 20 bp, Artificial Sequence
  Description of Artificial Sequence: Synthetic oligonucleotide
  Target: LAMA2; (+) strand; PAM type: NRG; PAM sequence: GAG
agaagaaagaaagaaacaaa

SEQ ID NO: 131395 - DNA, 20 bp, Artificial Sequence
  Description of Artificial Sequence: Synthetic oligonucleotide
  Target: LAMA2; (+) strand; PAM type: NRG; PAM sequence: GAG
aagaaagaaagaaacaaaga

SEQ ID NO: 131396 - DNA, 20 bp, Artificial Sequence
  Description of Artificial Sequence: Synthetic oligonucleotide
  Target: LAMA2; (+) strand; PAM type: NRG; PAM sequence: GAG
gaaagaaagaaacaaagaga

SEQ ID NO: 131397 - DNA, 20 bp, Artificial Sequence
  Description of Artificial Sequence: Synthetic oligonucleotide
  Target: LAMA2; (+) strand; PAM type: NRG; PAM sequence: GAG
aagaaagaaacaaagagaga

SEQ ID NO: 131398 - DNA, 20 bp, Artificial Sequence
  Description of Artificial Sequence: Synthetic oligonucleotide
  Target: LAMA2; (+) strand; PAM type: NRG; PAM sequence: GAG
gaaagaaacaaagagagaga

SEQ ID NO: 131399 - DNA, 20 bp, Artificial Sequence
  Description of Artificial Sequence: Synthetic oligonucleotide
  Target: LAMA2; (+) strand; PAM type: NRG; PAM sequence: AAG
gaaacaaagagagagagaga

SEQ ID NO: 131400 - DNA, 20 bp, Artificial Sequence
  Description of Artificial Sequence: Synthetic oligonucleotide
  Target: LAMA2; (+) strand; PAM type: NRG; PAM sequence: AAG
caaagagagagagagaaaga

SEQ ID NO: 131401 - DNA, 20 bp, Artificial Sequence
  Description of Artificial Sequence: Synthetic oligonucleotide
  Target: LAMA2; (+) strand; PAM type: NRG; PAM sequence: GAG
aagagagagagagaaagaaa

SEQ ID NO: 131402 - DNA, 20 bp, Artificial Sequence
  Description of Artificial Sequence: Synthetic oligonucleotide
  Target: LAMA2; (+) strand; PAM type: NRG; PAM sequence: AAG
gagagagagaaagaaagaga

SEQ ID NO: 131403 - DNA, 20 bp, Artificial Sequence
  Description of Artificial Sequence: Synthetic oligonucleotide
  Target: LAMA2; (+) strand; PAM type: NRG; PAM sequence: AAG
gagagaaagaaagagaaaga

SEQ ID NO: 131404 - DNA, 20 bp, Artificial Sequence
  Description of Artificial Sequence: Synthetic oligonucleotide
  Target: LAMA2; (+) strand; PAM type: NRG; PAM sequence: AAG
gaaagaaagagaaagaaaga

SEQ ID NO: 131405 - DNA, 20 bp, Artificial Sequence
  Description of Artificial Sequence: Synthetic oligonucleotide
  Target: LAMA2; (+) strand; PAM type: NRG; PAM sequence: AAG
gaaagagaaagaaagaaaga

SEQ ID NO: 131406 - DNA, 20 bp, Artificial Sequence
  Description of Artificial Sequence: Synthetic oligonucleotide
  Target: LAMA2; (+) strand; PAM type: NRG; PAM sequence: AAG
aagaaagaaagaaagaacga

SEQ ID NO: 131407 - DNA, 20 bp, Artificial Sequence
  Description of Artificial Sequence: Synthetic oligonucleotide
  Target: LAMA2; (+) strand; PAM type: NRG; PAM sequence: AAG
aagaaagaaagaacgaaaga

SEQ ID NO: 131408 - DNA, 20 bp, Artificial Sequence
  Description of Artificial Sequence: Synthetic oligonucleotide
  Target: LAMA2; (+) strand; PAM type: NRG; PAM sequence: AAG
aagaaagaacgaaagaaaga

SEQ ID NO: 131409 - DNA, 20 bp, Artificial Sequence
  Description of Artificial Sequence: Synthetic oligonucleotide
  Target: LAMA2; (+) strand; PAM type: NRG; PAM sequence: GAG
gaaagaacgaaagaaagaaa

SEQ ID NO: 131410 - DNA, 20 bp, Artificial Sequence
  Description of Artificial Sequence: Synthetic oligonucleotide
  Target: LAMA2; (+) strand; PAM type: NRG; PAM sequence: GAG
aagaacgaaagaaagaaaga

SEQ ID NO: 131411 - DNA, 20 bp, Artificial Sequence
  Description of Artificial Sequence: Synthetic oligonucleotide
  Target: LAMA2; (+) strand; PAM type: NRG; PAM sequence: GAG
gaacgaaagaaagaaagaga

SEQ ID NO: 131412 - DNA, 20 bp, Artificial Sequence
  Description of Artificial Sequence: Synthetic oligonucleotide
  Target: LAMA2; (+) strand; PAM type: NRG; PAM sequence: GAG
acgaaagaaagaaagagaga

SEQ ID NO: 131413 - DNA, 20 bp, Artificial Sequence
  Description of Artificial Sequence: Synthetic oligonucleotide
  Target: LAMA2; (+) strand; PAM type: NRG; PAM sequence: GAG
gaaagaaagaaagagagaga

SEQ ID NO: 131414 - DNA, 20 bp, Artificial Sequence
  Description of Artificial Sequence: Synthetic oligonucleotide
  Target: LAMA2; (+) strand; PAM type: NRG; PAM sequence: AAG
gaaagaaagagagagagaga

SEQ ID NO: 131415 - DNA, 20 bp, Artificial Sequence
  Description of Artificial Sequence: Synthetic oligonucleotide
  Target: LAMA2; (+) strand; PAM type: NRG; PAM sequence: AGG
aaagaaagagagagagagaa

SEQ ID NO: 131416 - DNA, 20 bp, Artificial Sequence
  Description of Artificial Sequence: Synthetic oligonucleotide
  Target: LAMA2; (+) strand; PAM type: NRG; PAM sequence: AAG
gaaagagagagagagaaagg

SEQ ID NO: 131417 - DNA, 20 bp, Artificial Sequence
  Description of Artificial Sequence: Synthetic oligonucleotide
  Target: LAMA2; (+) strand; PAM type: NRG; PAM sequence: GAG
aagagagagagagaaaggaa

SEQ ID NO: 131418 - DNA, 20 bp, Artificial Sequence
  Description of Artificial Sequence: Synthetic oligonucleotide
  Target: LAMA2; (+) strand; PAM type: NRG; PAM sequence: GAG
gagagagagagaaaggaaga

SEQ ID NO: 131419 - DNA, 20 bp, Artificial Sequence
  Description of Artificial Sequence: Synthetic oligonucleotide
  Target: LAMA2; (+) strand; PAM type: NRG; PAM sequence: AGG
agagagagagaaaggaagag

SEQ ID NO: 131420 - DNA, 20 bp, Artificial Sequence
  Description of Artificial Sequence: Synthetic oligonucleotide
  Target: LAMA2; (+) strand; PAM type: NRG; PAM sequence: GGG
gagagagagaaaggaagaga

SEQ ID NO: 131421 - DNA, 20 bp, Artificial Sequence
  Description of Artificial Sequence: Synthetic oligonucleotide
  Target: LAMA2; (+) strand; PAM type: NRG; PAM sequence: GAG
gagagagaaaggaagagagg

SEQ ID NO: 131422 - DNA, 20 bp, Artificial Sequence
  Description of Artificial Sequence: Synthetic oligonucleotide
  Target: LAMA2; (+) strand; PAM type: NRG; PAM sequence: AGG
agagagaaaggaagagaggg

SEQ ID NO: 131423 - DNA, 20 bp, Artificial Sequence
  Description of Artificial Sequence: Synthetic oligonucleotide
  Target: LAMA2; (+) strand; PAM type: NRG; PAM sequence: GGG
gagagaaaggaagagaggga

SEQ ID NO: 131424 - DNA, 20 bp, Artificial Sequence
  Description of Artificial Sequence: Synthetic oligonucleotide
  Target: LAMA2; (+) strand; PAM type: NRG; PAM sequence: GAG
gagaaaggaagagagggagg

SEQ ID NO: 131425 - DNA, 20 bp, Artificial Sequence
  Description of Artificial Sequence: Synthetic oligonucleotide
  Target: LAMA2; (+) strand; PAM type: NRG; PAM sequence: AGG
agaaaggaagagagggaggg

SEQ ID NO: 131426 - DNA, 20 bp, Artificial Sequence
  Description of Artificial Sequence: Synthetic oligonucleotide
  Target: LAMA2; (+) strand; PAM type: NRG; PAM sequence: GGG
gaaaggaagagagggaggga

SEQ ID NO: 131427 - DNA, 20 bp, Artificial Sequence
  Description of Artificial Sequence: Synthetic oligonucleotide
  Target: LAMA2; (+) strand; PAM type: NRG; PAM sequence: GAG
aaggaagagagggagggagg

SEQ ID NO: 131428 - DNA, 20 bp, Artificial Sequence
  Description of Artificial Sequence: Synthetic oligonucleotide
  Target: LAMA2; (+) strand; PAM type: NRG; PAM sequence: AGG
aggaagagagggagggaggg

SEQ ID NO: 131429 - DNA, 20 bp, Artificial Sequence
  Description of Artificial Sequence: Synthetic oligonucleotide
  Target: LAMA2; (+) strand; PAM type: NRG; PAM sequence: GGG
ggaagagagggagggaggga

SEQ ID NO: 131430 - DNA, 20 bp, Artificial Sequence
  Description of Artificial Sequence: Synthetic oligonucleotide
  Target: LAMA2; (+) strand; PAM type: NRG; PAM sequence: GGG
gaagagagggagggagggag

SEQ ID NO: 131431 - DNA, 20 bp, Artificial Sequence
  Description of Artificial Sequence: Synthetic oligonucleotide
  Target: LAMA2; (+) strand; PAM type: NRG; PAM sequence: TGG
agagggagggagggagggga

SEQ ID NO: 131432 - DNA, 20 bp, Artificial Sequence
  Description of Artificial Sequence: Synthetic oligonucleotide
  Target: LAMA2; (+) strand; PAM type: NRG; PAM sequence: TAG
gaggggatggccaatgtgac

SEQ ID NO: 131433 - DNA, 20 bp, Artificial Sequence
  Description of Artificial Sequence: Synthetic oligonucleotide
  Target: LAMA2; (+) strand; PAM type: NRG; PAM sequence: GAG
ggggatggccaatgtgacta

SEQ ID NO: 131434 - DNA, 20 bp, Artificial Sequence
  Description of Artificial Sequence: Synthetic oligonucleotide
  Target: LAMA2; (+) strand; PAM type: NRG; PAM sequence: AAG
tggccaatgtgactagagtg

SEQ ID NO: 131435 - DNA, 20 bp, Artificial Sequence
  Description of Artificial Sequence: Synthetic oligonucleotide
  Target: LAMA2; (+) strand; PAM type: NRG; PAM sequence: AAG
caatgtgactagagtgaagt

SEQ ID NO: 131436 - DNA, 20 bp, Artificial Sequence
  Description of Artificial Sequence: Synthetic oligonucleotide
  Target: LAMA2; (+) strand; PAM type: NRG; PAM sequence: GAG
atgtgactagagtgaagtaa

SEQ ID NO: 131437 - DNA, 20 bp, Artificial Sequence
  Description of Artificial Sequence: Synthetic oligonucleotide
  Target: LAMA2; (+) strand; PAM type: NRG; PAM sequence: GAG
gtgactagagtgaagtaaga

SEQ ID NO: 131438 - DNA, 20 bp, Artificial Sequence
  Description of Artificial Sequence: Synthetic oligonucleotide
  Target: LAMA2; (+) strand; PAM type: NRG; PAM sequence: AGG
tgactagagtgaagtaagag

SEQ ID NO: 131439 - DNA, 20 bp, Artificial Sequence
  Description of Artificial Sequence: Synthetic oligonucleotide
  Target: LAMA2; (+) strand; PAM type: NRG; PAM sequence: GGG
gactagagtgaagtaagaga

SEQ ID NO: 131440 - DNA, 20 bp, Artificial Sequence
  Description of Artificial Sequence: Synthetic oligonucleotide
  Target: LAMA2; (+) strand; PAM type: NRG; PAM sequence: GGG
actagagtgaagtaagagag

SEQ ID NO: 131441 - DNA, 20 bp, Artificial Sequence
  Description of Artificial Sequence: Synthetic oligonucleotide
  Target: LAMA2; (+) strand; PAM type: NRG; PAM sequence: AAG
agagtgaagtaagagagggg

SEQ ID NO: 131442 - DNA, 20 bp, Artificial Sequence
  Description of Artificial Sequence: Synthetic oligonucleotide
  Target: LAMA2; (+) strand; PAM type: NRG; PAM sequence: TAG
gaagtaagagaggggaagaa

SEQ ID NO: 131443 - DNA, 20 bp, Artificial Sequence
  Description of Artificial Sequence: Synthetic oligonucleotide
  Target: LAMA2; (+) strand; PAM type: NRG; PAM sequence: TAG
agagaggggaagaatagtat

SEQ ID NO: 131444 - DNA, 20 bp, Artificial Sequence
  Description of Artificial Sequence: Synthetic oligonucleotide
  Target: LAMA2; (+) strand; PAM type: NRG; PAM sequence: AAG
gggaagaatagtattagtca

SEQ ID NO: 131445 - DNA, 20 bp, Artificial Sequence
  Description of Artificial Sequence: Synthetic oligonucleotide
  Target: LAMA2; (+) strand; PAM type: NRG; PAM sequence: AAG
attagtcaaagttgaaattg

SEQ ID NO: 131446 - DNA, 20 bp, Artificial Sequence
  Description of Artificial Sequence: Synthetic oligonucleotide
  Target: LAMA2; (+) strand; PAM type: NRG; PAM sequence: TGG
ttgaaattgaagacacaaac

SEQ ID NO: 131447 - DNA, 20 bp, Artificial Sequence
  Description of Artificial Sequence: Synthetic oligonucleotide
  Target: LAMA2; (+) strand; PAM type: NRG; PAM sequence: AAG
aagacacaaactggctattc

SEQ ID NO: 131448 - DNA, 20 bp, Artificial Sequence
  Description of Artificial Sequence: Synthetic oligonucleotide
  Target: LAMA2; (+) strand; PAM type: NRG; PAM sequence: TGG
aagactttatgcctgtgatg

SEQ ID NO: 131449 - DNA, 20 bp, Artificial Sequence
  Description of Artificial Sequence: Synthetic oligonucleotide
  Target: LAMA2; (+) strand; PAM type: NRG; PAM sequence: CAG
ctttatgcctgtgatgtggc

SEQ ID NO: 131450 - DNA, 20 bp, Artificial Sequence
  Description of Artificial Sequence: Synthetic oligonucleotide
  Target: LAMA2; (+) strand; PAM type: NRG; PAM sequence: AGG
tttatgcctgtgatgtggcc

SEQ ID NO: 131451 - DNA, 20 bp, Artificial Sequence
  Description of Artificial Sequence: Synthetic oligonucleotide
  Target: LAMA2; (+) strand; PAM type: NRG; PAM sequence: TGG
gcctgtgatgtggccaggca

SEQ ID NO: 131452 - DNA, 20 bp, Artificial Sequence
  Description of Artificial Sequence: Synthetic oligonucleotide
  Target: LAMA2; (+) strand; PAM type: NRG; PAM sequence: TGG
tgtgatgtggccaggcatgg

SEQ ID NO: 131453 - DNA, 20 bp, Artificial Sequence
  Description of Artificial Sequence: Synthetic oligonucleotide
  Target: LAMA2; (+) strand; PAM type: NRG; PAM sequence: CAG
gtggctcacacctgtaattc

SEQ ID NO: 131454 - DNA, 20 bp, Artificial Sequence
  Description of Artificial Sequence: Synthetic oligonucleotide
  Target: LAMA2; (+) strand; PAM type: NRG; PAM sequence: CGG
acctgtaattccagcacttt

SEQ ID NO: 131455 - DNA, 20 bp, Artificial Sequence
  Description of Artificial Sequence: Synthetic oligonucleotide
  Target: LAMA2; (+) strand; PAM type: NRG; PAM sequence: GAG
ctgtaattccagcactttcg

SEQ ID NO: 131456 - DNA, 20 bp, Artificial Sequence
  Description of Artificial Sequence: Synthetic oligonucleotide
  Target: LAMA2; (+) strand; PAM type: NRG; PAM sequence: AGG
tgtaattccagcactttcgg

SEQ ID NO: 131457 - DNA, 20 bp, Artificial Sequence
  Description of Artificial Sequence: Synthetic oligonucleotide
  Target: LAMA2; (+) strand; PAM type: NRG; PAM sequence: GAG
ttccagcactttcggaggct

SEQ ID NO: 131458 - DNA, 20 bp, Artificial Sequence
  Description of Artificial Sequence: Synthetic oligonucleotide
  Target: LAMA2; (+) strand; PAM type: NRG; PAM sequence: AGG
tccagcactttcggaggctg

SEQ ID NO: 131459 - DNA, 20 bp, Artificial Sequence
  Description of Artificial Sequence: Synthetic oligonucleotide
  Target: LAMA2; (+) strand; PAM type: NRG; PAM sequence: CAG
agcactttcggaggctgagg

SEQ ID NO: 131460 - DNA, 20 bp, Artificial Sequence
  Description of Artificial Sequence: Synthetic oligonucleotide
  Target: LAMA2; (+) strand; PAM type: NRG; PAM sequence: AGG
gcactttcggaggctgaggc

SEQ ID NO: 131461 - DNA, 20 bp, Artificial Sequence
  Description of Artificial Sequence: Synthetic oligonucleotide
  Target: LAMA2; (+) strand; PAM type: NRG; PAM sequence: TGG
ctttcggaggctgaggcagg

SEQ ID NO: 131462 - DNA, 20 bp, Artificial Sequence
  Description of Artificial Sequence: Synthetic oligonucleotide
  Target: LAMA2; (+) strand; PAM type: NRG; PAM sequence: GAG
ctgaggcaggtggatcactt

SEQ ID NO: 131463 - DNA, 20 bp, Artificial Sequence
  Description of Artificial Sequence: Synthetic oligonucleotide
  Target: LAMA2; (+) strand; PAM type: NRG; PAM sequence: AGG
tgaggcaggtggatcacttg

SEQ ID NO: 131464 - DNA, 20 bp, Artificial Sequence
  Description of Artificial Sequence: Synthetic oligonucleotide
  Target: LAMA2; (+) strand; PAM type: NRG; PAM sequence: CAG
gcaggtggatcacttgaggt

SEQ ID NO: 131465 - DNA, 20 bp, Artificial Sequence
  Description of Artificial Sequence: Synthetic oligonucleotide
  Target: LAMA2; (+) strand; PAM type: NRG; PAM sequence: AGG
caggtggatcacttgaggtc

SEQ ID NO: 131466 - DNA, 20 bp, Artificial Sequence
  Description of Artificial Sequence: Synthetic oligonucleotide
  Target: LAMA2; (+) strand; PAM type: NRG; PAM sequence: GGG
aggtggatcacttgaggtca

SEQ ID NO: 131467 - DNA, 20 bp, Artificial Sequence
  Description of Artificial Sequence: Synthetic oligonucleotide
  Target: LAMA2; (+) strand; PAM type: NRG; PAM sequence: GGG
ggtggatcacttgaggtcag

SEQ ID NO: 131468 - DNA, 20 bp, Artificial Sequence
  Description of Artificial Sequence: Synthetic oligonucleotide
  Target: LAMA2; (+) strand; PAM type: NRG; PAM sequence: CAG
tcacttgaggtcaggggttc

SEQ ID NO: 131469 - DNA, 20 bp, Artificial Sequence
  Description of Artificial Sequence: Synthetic oligonucleotide
  Target: LAMA2; (+) strand; PAM type: NRG; PAM sequence: CAG
tgaggtcaggggttccagac

SEQ ID NO: 131470 - DNA, 20 bp, Artificial Sequence
  Description of Artificial Sequence: Synthetic oligonucleotide
  Target: LAMA2; (+) strand; PAM type: NRG; PAM sequence: TGG
tcaggggttccagaccagcc

SEQ ID NO: 131471 - DNA, 20 bp, Artificial Sequence
  Description of Artificial Sequence: Synthetic oligonucleotide
  Target: LAMA2; (+) strand; PAM type: NRG; PAM sequence: TGG
ccagaccagcctggcaaaca

SEQ ID NO: 131472 - DNA, 20 bp, Artificial Sequence
  Description of Artificial Sequence: Synthetic oligonucleotide
  Target: LAMA2; (+) strand; PAM type: NRG; PAM sequence: TGG
tctaccaaaaatgcaaaaat

SEQ ID NO: 131473 - DNA, 20 bp, Artificial Sequence
  Description of Artificial Sequence: Synthetic oligonucleotide
  Target: LAMA2; (+) strand; PAM type: NRG; PAM sequence: CAG
ccaaaaatgcaaaaattggc

SEQ ID NO: 131474 - DNA, 20 bp, Artificial Sequence
  Description of Artificial Sequence: Synthetic oligonucleotide
  Target: LAMA2; (+) strand; PAM type: NRG; PAM sequence: AGG
caaaaatgcaaaaattggcc

SEQ ID NO: 131475 - DNA, 20 bp, Artificial Sequence
  Description of Artificial Sequence: Synthetic oligonucleotide
  Target: LAMA2; (+) strand; PAM type: NRG; PAM sequence: TGG
atgcaaaaattggccaggca

SEQ ID NO: 131476 - DNA, 20 bp, Artificial Sequence
  Description of Artificial Sequence: Synthetic oligonucleotide
  Target: LAMA2; (+) strand; PAM type: NRG; PAM sequence: TGG
caaaaattggccaggcatgg

SEQ ID NO: 131477 - DNA, 20 bp, Artificial Sequence
  Description of Artificial Sequence: Synthetic oligonucleotide
  Target: LAMA2; (+) strand; PAM type: NRG; PAM sequence: CAG
gtggcacatgcctatactcc

SEQ ID NO: 131478 - DNA, 20 bp, Artificial Sequence
  Description of Artificial Sequence: Synthetic oligonucleotide
  Target: LAMA2; (+) strand; PAM type: NRG; PAM sequence: CGG
tgcctatactcccagctact

SEQ ID NO: 131479 - DNA, 20 bp, Artificial Sequence
  Description of Artificial Sequence: Synthetic oligonucleotide
  Target: LAMA2; (+) strand; PAM type: NRG; PAM sequence: GGG
gcctatactcccagctactc

SEQ ID NO: 131480 - DNA, 20 bp, Artificial Sequence
  Description of Artificial Sequence: Synthetic oligonucleotide
  Target: LAMA2; (+) strand; PAM type: NRG; PAM sequence: GAG
ctatactcccagctactcgg

SEQ ID NO: 131481 - DNA, 20 bp, Artificial Sequence
  Description of Artificial Sequence: Synthetic oligonucleotide
  Target: LAMA2; (+) strand; PAM type: NRG; PAM sequence: AGG
tatactcccagctactcggg

SEQ ID NO: 131482 - DNA, 20 bp, Artificial Sequence
  Description of Artificial Sequence: Synthetic oligonucleotide
  Target: LAMA2; (+) strand; PAM type: NRG; PAM sequence: GAG
tcccagctactcgggaggct

SEQ ID NO: 131483 - DNA, 20 bp, Artificial Sequence
  Description of Artificial Sequence: Synthetic oligonucleotide
  Target: LAMA2; (+) strand; PAM type: NRG; PAM sequence: AGG
cccagctactcgggaggctg

SEQ ID NO: 131484 - DNA, 20 bp, Artificial Sequence
  Description of Artificial Sequence: Synthetic oligonucleotide
  Target: LAMA2; (+) strand; PAM type: NRG; PAM sequence: TAG
agctactcgggaggctgagg

SEQ ID NO: 131485 - DNA, 20 bp, Artificial Sequence
  Description of Artificial Sequence: Synthetic oligonucleotide
  Target: LAMA2; (+) strand; PAM type: NRG; PAM sequence: AGG
gctactcgggaggctgaggt

SEQ ID NO: 131486 - DNA, 20 bp, Artificial Sequence
  Description of Artificial Sequence: Synthetic oligonucleotide
  Target: LAMA2; (+) strand; PAM type: NRG; PAM sequence: GAG
tactcgggaggctgaggtag

SEQ ID NO: 131487 - DNA, 20 bp, Artificial Sequence
  Description of Artificial Sequence: Synthetic oligonucleotide
  Target: LAMA2; (+) strand; PAM type: NRG; PAM sequence: TGG
gtaggagaatcacttgaacc

SEQ ID NO: 131488 - DNA, 20 bp, Artificial Sequence
  Description of Artificial Sequence: Synthetic oligonucleotide
  Target: LAMA2; (+) strand; PAM type: NRG; PAM sequence: AAG
ggagaatcacttgaacctgg

SEQ ID NO: 131489 - DNA, 20 bp, Artificial Sequence
  Description of Artificial Sequence: Synthetic oligonucleotide
  Target: LAMA2; (+) strand; PAM type: NRG; PAM sequence: AGG
gagaatcacttgaacctgga

SEQ ID NO: 131490 - DNA, 20 bp, Artificial Sequence
  Description of Artificial Sequence: Synthetic oligonucleotide
  Target: LAMA2; (+) strand; PAM type: NRG; PAM sequence: CAG
aatcacttgaacctggaagg

SEQ ID NO: 131491 - DNA, 20 bp, Artificial Sequence
  Description of Artificial Sequence: Synthetic oligonucleotide
  Target: LAMA2; (+) strand; PAM type: NRG; PAM sequence: GAG
tcacttgaacctggaaggca

SEQ ID NO: 131492 - DNA, 20 bp, Artificial Sequence
  Description of Artificial Sequence: Synthetic oligonucleotide
  Target: LAMA2; (+) strand; PAM type: NRG; PAM sequence: AGG
cacttgaacctggaaggcag

SEQ ID NO: 131493 - DNA, 20 bp, Artificial Sequence
  Description of Artificial Sequence: Synthetic oligonucleotide
  Target: LAMA2; (+) strand; PAM type: NRG; PAM sequence: CAG
aacctggaaggcagaggctg

SEQ ID NO: 131494 - DNA, 20 bp, Artificial Sequence
  Description of Artificial Sequence: Synthetic oligonucleotide
  Target: LAMA2; (+) strand; PAM type: NRG; PAM sequence: GAG
tggaaggcagaggctgcagt

SEQ ID NO: 131495 - DNA, 20 bp, Artificial Sequence
  Description of Artificial Sequence: Synthetic oligonucleotide
  Target: LAMA2; (+) strand; PAM type: NRG; PAM sequence: AAG
ggcagaggctgcagtgagcc

SEQ ID NO: 131496 - DNA, 20 bp, Artificial Sequence
  Description of Artificial Sequence: Synthetic oligonucleotide
  Target: LAMA2; (+) strand; PAM type: NRG; PAM sequence: CAG
aagattgcaccattgcactc

SEQ ID NO: 131497 - DNA, 20 bp, Artificial Sequence
  Description of Artificial Sequence: Synthetic oligonucleotide
  Target: LAMA2; (+) strand; PAM type: NRG; PAM sequence: TGG
tgcaccattgcactccagcc

SEQ ID NO: 131498 - DNA, 20 bp, Artificial Sequence
  Description of Artificial Sequence: Synthetic oligonucleotide
  Target: LAMA2; (+) strand; PAM type: NRG; PAM sequence: CAG
ttgcactccagcctggccaa

SEQ ID NO: 131499 - DNA, 20 bp, Artificial Sequence
  Description of Artificial Sequence: Synthetic oligonucleotide
  Target: LAMA2; (+) strand; PAM type: NRG; PAM sequence: GAG
gcactccagcctggccaaca

SEQ ID NO: 131500 - DNA, 20 bp, Artificial Sequence
  Description of Artificial Sequence: Synthetic oligonucleotide
  Target: LAMA2; (+) strand; PAM type: NRG; PAM sequence: GAG
tccagcctggccaacagagc

SEQ ID NO: 131501 - DNA, 20 bp, Artificial Sequence
  Description of Artificial Sequence: Synthetic oligonucleotide
  Target: LAMA2; (+) strand; PAM type: NRG; PAM sequence: AAG
agagcgagactctgtctcaa

SEQ ID NO: 131502 - DNA, 20 bp, Artificial Sequence
  Description of Artificial Sequence: Synthetic oligonucleotide
  Target: LAMA2; (+) strand; PAM type: NRG; PAM sequence: AAG
tctgtctcaaaagaaaaaaa

SEQ ID NO: 131503 - DNA, 20 bp, Artificial Sequence
  Description of Artificial Sequence: Synthetic oligonucleotide
  Target: LAMA2; (+) strand; PAM type: NRG; PAM sequence: GAG
aaaaagtttatacctgtaat

SEQ ID NO: 131504 - DNA, 20 bp, Artificial Sequence
  Description of Artificial Sequence: Synthetic oligonucleotide
  Target: LAMA2; (+) strand; PAM type: NRG; PAM sequence: GAG
gtttatacctgtaatgagat

SEQ ID NO: 131505 - DNA, 20 bp, Artificial Sequence
  Description of Artificial Sequence: Synthetic oligonucleotide
  Target: LAMA2; (+) strand; PAM type: NRG; PAM sequence: AAG
tatacctgtaatgagatgag

SEQ ID NO: 131506 - DNA, 20 bp, Artificial Sequence
  Description of Artificial Sequence: Synthetic oligonucleotide
  Target: LAMA2; (+) strand; PAM type: NRG; PAM sequence: CAG
ctgtaatgagatgagaagtt

SEQ ID NO: 131507 - DNA, 20 bp, Artificial Sequence
  Description of Artificial Sequence: Synthetic oligonucleotide
  Target: LAMA2; (+) strand; PAM type: NRG; PAM sequence: CAG
gatgagaagttcagattttc

SEQ ID NO: 131508 - DNA, 20 bp, Artificial Sequence
  Description of Artificial Sequence: Synthetic oligonucleotide
  Target: LAMA2; (+) strand; PAM type: NRG; PAM sequence: AAG
cagtgtgtgttgtataaatg

SEQ ID NO: 131509 - DNA, 20 bp, Artificial Sequence
  Description of Artificial Sequence: Synthetic oligonucleotide
  Target: LAMA2; (+) strand; PAM type: NRG; PAM sequence: AGG
agtgtgtgttgtataaatga

SEQ ID NO: 131510 - DNA, 20 bp, Artificial Sequence
  Description of Artificial Sequence: Synthetic oligonucleotide
  Target: LAMA2; (+) strand; PAM type: NRG; PAM sequence: CAG
aatgaaggacccaattttct

SEQ ID NO: 131511 - DNA, 20 bp, Artificial Sequence
  Description of Artificial Sequence: Synthetic oligonucleotide
  Target: LAMA2; (+) strand; PAM type: NRG; PAM sequence: CAG
aaggacccaattttctcaga

SEQ ID NO: 131512 - DNA, 20 bp, Artificial Sequence
  Description of Artificial Sequence: Synthetic oligonucleotide
  Target: LAMA2; (+) strand; PAM type: NRG; PAM sequence: AAG
gacccaattttctcagacag

SEQ ID NO: 131513 - DNA, 20 bp, Artificial Sequence
  Description of Artificial Sequence: Synthetic oligonucleotide
  Target: LAMA2; (+) strand; PAM type: NRG; PAM sequence: AAG
ttttctcagacagaagataa

SEQ ID NO: 131514 - DNA, 20 bp, Artificial Sequence
  Description of Artificial Sequence: Synthetic oligonucleotide
  Target: LAMA2; (+) strand; PAM type: NRG; PAM sequence: AGG
tttctcagacagaagataaa

SEQ ID NO: 131515 - DNA, 20 bp, Artificial Sequence
  Description of Artificial Sequence: Synthetic oligonucleotide
  Target: LAMA2; (+) strand; PAM type: NRG; PAM sequence: GAG
tctcagacagaagataaaag

SEQ ID NO: 131516 - DNA, 20 bp, Artificial Sequence
  Description of Artificial Sequence: Synthetic oligonucleotide
  Target: LAMA2; (+) strand; PAM type: NRG; PAM sequence: GAG
gacagaagataaaaggagtt

SEQ ID NO: 131517 - DNA, 20 bp, Artificial Sequence
  Description of Artificial Sequence: Synthetic oligonucleotide
  Target: LAMA2; (+) strand; PAM type: NRG; PAM sequence: AGG
acagaagataaaaggagttg

SEQ ID NO: 131518 - DNA, 20 bp, Artificial Sequence
  Description of Artificial Sequence: Synthetic oligonucleotide
  Target: LAMA2; (+) strand; PAM type: NRG; PAM sequence: GAG
aaggagttgaggttcgtaac

SEQ ID NO: 131519 - DNA, 20 bp, Artificial Sequence
  Description of Artificial Sequence: Synthetic oligonucleotide
  Target: LAMA2; (+) strand; PAM type: NRG; PAM sequence: AGG
aggagttgaggttcgtaacg

SEQ ID NO: 131520 - DNA, 20 bp, Artificial Sequence
  Description of Artificial Sequence: Synthetic oligonucleotide
  Target: LAMA2; (+) strand; PAM type: NRG; PAM sequence: AAG
gttcgtaacgaggtgatttt

SEQ ID NO: 131521 - DNA, 20 bp, Artificial Sequence
  Description of Artificial Sequence: Synthetic oligonucleotide
  Target: LAMA2; (+) strand; PAM type: NRG; PAM sequence: AGG
ttcgtaacgaggtgatttta

SEQ ID NO: 131522 - DNA, 20 bp, Artificial Sequence
  Description of Artificial Sequence: Synthetic oligonucleotide
  Target: LAMA2; (+) strand; PAM type: NRG; PAM sequence: TGG
taacgaggtgattttaagga

SEQ ID NO: 131523 - DNA, 20 bp, Artificial Sequence
  Description of Artificial Sequence: Synthetic oligonucleotide
  Target: LAMA2; (+) strand; PAM type: NRG; PAM sequence: TAG
gtgattttaaggatggatca

SEQ ID NO: 131524 - DNA, 20 bp, Artificial Sequence
  Description of Artificial Sequence: Synthetic oligonucleotide
  Target: LAMA2; (+) strand; PAM type: NRG; PAM sequence: AAG
ggatggatcatagaatcatc

SEQ ID NO: 131525 - DNA, 20 bp, Artificial Sequence
  Description of Artificial Sequence: Synthetic oligonucleotide
  Target: LAMA2; (+) strand; PAM type: NRG; PAM sequence: CAG
ggatcatagaatcatcaagc

SEQ ID NO: 131526 - DNA, 20 bp, Artificial Sequence
  Description of Artificial Sequence: Synthetic oligonucleotide
  Target: LAMA2; (+) strand; PAM type: NRG; PAM sequence: AGG
gatcatagaatcatcaagcc

SEQ ID NO: 131527 - DNA, 20 bp, Artificial Sequence
  Description of Artificial Sequence: Synthetic oligonucleotide
  Target: LAMA2; (+) strand; PAM type: NRG; PAM sequence: AAG
catagaatcatcaagccagg

SEQ ID NO: 131528 - DNA, 20 bp, Artificial Sequence
  Description of Artificial Sequence: Synthetic oligonucleotide
  Target: LAMA2; (+) strand; PAM type: NRG; PAM sequence: AGG
atagaatcatcaagccagga

SEQ ID NO: 131529 - DNA, 20 bp, Artificial Sequence
  Description of Artificial Sequence: Synthetic oligonucleotide
  Target: LAMA2; (+) strand; PAM type: NRG; PAM sequence: GAG
agaatcatcaagccaggaag

SEQ ID NO: 131530 - DNA, 20 bp, Artificial Sequence
  Description of Artificial Sequence: Synthetic oligonucleotide
  Target: LAMA2; (+) strand; PAM type: NRG; PAM sequence: GAG
aatcatcaagccaggaagga

SEQ ID NO: 131531 - DNA, 20 bp, Artificial Sequence
  Description of Artificial Sequence: Synthetic oligonucleotide
  Target: LAMA2; (+) strand; PAM type: NRG; PAM sequence: GAG
tcatcaagccaggaaggaga

SEQ ID NO: 131532 - DNA, 20 bp, Artificial Sequence
  Description of Artificial Sequence: Synthetic oligonucleotide
  Target: LAMA2; (+) strand; PAM type: NRG; PAM sequence: AAG
aggaaggagagagtgaaatc

SEQ ID NO: 131533 - DNA, 20 bp, Artificial Sequence
  Description of Artificial Sequence: Synthetic oligonucleotide
  Target: LAMA2; (+) strand; PAM type: NRG; PAM sequence: AGG
ggaaggagagagtgaaatca

SEQ ID NO: 131534 - DNA, 20 bp, Artificial Sequence
  Description of Artificial Sequence: Synthetic oligonucleotide
  Target: LAMA2; (+) strand; PAM type: NRG; PAM sequence: GAG
aaggagagagtgaaatcaag

SEQ ID NO: 131535 - DNA, 20 bp, Artificial Sequence
  Description of Artificial Sequence: Synthetic oligonucleotide
  Target: LAMA2; (+) strand; PAM type: NRG; PAM sequence: AAG
gagagagtgaaatcaaggag

SEQ ID NO: 131536 - DNA, 20 bp, Artificial Sequence
  Description of Artificial Sequence: Synthetic oligonucleotide
  Target: LAMA2; (+) strand; PAM type: NRG; PAM sequence: AGG
agagagtgaaatcaaggaga

SEQ ID NO: 131537 - DNA, 20 bp, Artificial Sequence
  Description of Artificial Sequence: Synthetic oligonucleotide
  Target: LAMA2; (+) strand; PAM type: NRG; PAM sequence: TGG
tgaaatcaaggagaaggtga

SEQ ID NO: 131538 - DNA, 20 bp, Artificial Sequence
  Description of Artificial Sequence: Synthetic oligonucleotide
  Target: LAMA2; (+) strand; PAM type: NRG; PAM sequence: TAG
atcaaggagaaggtgatgga

SEQ ID NO: 131539 - DNA, 20 bp, Artificial Sequence
  Description of Artificial Sequence: Synthetic oligonucleotide
  Target: LAMA2; (+) strand; PAM type: NRG; PAM sequence: AGG
tcaaggagaaggtgatggat

SEQ ID NO: 131540 - DNA, 20 bp, Artificial Sequence
  Description of Artificial Sequence: Synthetic oligonucleotide
  Target: LAMA2; (+) strand; PAM type: NRG; PAM sequence: GAG
aaggagaaggtgatggatag

SEQ ID NO: 131541 - DNA, 20 bp, Artificial Sequence
  Description of Artificial Sequence: Synthetic oligonucleotide
  Target: LAMA2; (+) strand; PAM type: NRG; PAM sequence: AAG
agaaggtgatggataggaga

SEQ ID NO: 131542 - DNA, 20 bp, Artificial Sequence
  Description of Artificial Sequence: Synthetic oligonucleotide
  Target: LAMA2; (+) strand; PAM type: NRG; PAM sequence: AGG
gaaggtgatggataggagaa

SEQ ID NO: 131543 - DNA, 20 bp, Artificial Sequence
  Description of Artificial Sequence: Synthetic oligonucleotide
  Target: LAMA2; (+) strand; PAM type: NRG; PAM sequence: GAG
tggataggagaaaggaccct

SEQ ID NO: 131544 - DNA, 20 bp, Artificial Sequence
  Description of Artificial Sequence: Synthetic oligonucleotide
  Target: LAMA2; (+) strand; PAM type: NRG; PAM sequence: CAG
aggaccctgagttattataa

SEQ ID NO: 131545 - DNA, 20 bp, Artificial Sequence
  Description of Artificial Sequence: Synthetic oligonucleotide
  Target: LAMA2; (+) strand; PAM type: NRG; PAM sequence: GAG
gaccctgagttattataaca

SEQ ID NO: 131546 - DNA, 20 bp, Artificial Sequence
  Description of Artificial Sequence: Synthetic oligonucleotide
  Target: LAMA2; (+) strand; PAM type: NRG; PAM sequence: AAG
gagttattataacagagtcc

SEQ ID NO: 131547 - DNA, 20 bp, Artificial Sequence
  Description of Artificial Sequence: Synthetic oligonucleotide
  Target: LAMA2; (+) strand; PAM type: NRG; PAM sequence: GAG
gttattataacagagtccaa

SEQ ID NO: 131548 - DNA, 20 bp, Artificial Sequence
  Description of Artificial Sequence: Synthetic oligonucleotide
  Target: LAMA2; (+) strand; PAM type: NRG; PAM sequence: CAG
ttataacagagtccaagagt

SEQ ID NO: 131549 - DNA, 20 bp, Artificial Sequence
  Description of Artificial Sequence: Synthetic oligonucleotide
  Target: LAMA2; (+) strand; PAM type: NRG; PAM sequence: GAG
ataacagagtccaagagtca

SEQ ID NO: 131550 - DNA, 20 bp, Artificial Sequence
  Description of Artificial Sequence: Synthetic oligonucleotide
  Target: LAMA2; (+) strand; PAM type: NRG; PAM sequence: GAG
aacagagtccaagagtcaga

SEQ ID NO: 131551 - DNA, 20 bp, Artificial Sequence
  Description of Artificial Sequence: Synthetic oligonucleotide
  Target: LAMA2; (+) strand; PAM type: NRG; PAM sequence: CAG
ccaagagtcagagagctgca

SEQ ID NO: 131552 - DNA, 20 bp, Artificial Sequence
  Description of Artificial Sequence: Synthetic oligonucleotide
  Target: LAMA2; (+) strand; PAM type: NRG; PAM sequence: TGG
gagtcagagagctgcacaga

SEQ ID NO: 131553 - DNA, 20 bp, Artificial Sequence
  Description of Artificial Sequence: Synthetic oligonucleotide
  Target: LAMA2; (+) strand; PAM type: NRG; PAM sequence: GGG
agtcagagagctgcacagat

SEQ ID NO: 131554 - DNA, 20 bp, Artificial Sequence
  Description of Artificial Sequence: Synthetic oligonucleotide
  Target: LAMA2; (+) strand; PAM type: NRG; PAM sequence: GGG
gtcagagagctgcacagatg

SEQ ID NO: 131555 - DNA, 20 bp, Artificial Sequence
  Description of Artificial Sequence: Synthetic oligonucleotide
  Target: LAMA2; (+) strand; PAM type: NRG; PAM sequence: TGG
agagagctgcacagatgggg

SEQ ID NO: 131556 - DNA, 20 bp, Artificial Sequence
  Description of Artificial Sequence: Synthetic oligonucleotide
  Target: LAMA2; (+) strand; PAM type: NRG; PAM sequence: GGG
gagagctgcacagatggggt

SEQ ID NO: 131557 - DNA, 20 bp, Artificial Sequence
  Description of Artificial Sequence: Synthetic oligonucleotide
  Target: LAMA2; (+) strand; PAM type: NRG; PAM sequence: CAG
acagatggggtgggatatgc

SEQ ID NO: 131558 - DNA, 20 bp, Artificial Sequence
  Description of Artificial Sequence: Synthetic oligonucleotide
  Target: LAMA2; (+) strand; PAM type: NRG; PAM sequence: AGG
cagatggggtgggatatgcc

SEQ ID NO: 131559 - DNA, 20 bp, Artificial Sequence
  Description of Artificial Sequence: Synthetic oligonucleotide
  Target: LAMA2; (+) strand; PAM type: NRG; PAM sequence: AAG
ggggtgggatatgccaggtc

SEQ ID NO: 131560 - DNA, 20 bp, Artificial Sequence
  Description of Artificial Sequence: Synthetic oligonucleotide
  Target: LAMA2; (+) strand; PAM type: NRG; PAM sequence: AGG
gggtgggatatgccaggtca

SEQ ID NO: 131561 - DNA, 20 bp, Artificial Sequence
  Description of Artificial Sequence: Synthetic oligonucleotide
  Target: LAMA2; (+) strand; PAM type: NRG; PAM sequence: AAG
gggatatgccaggtcaagga

SEQ ID NO: 131562 - DNA, 20 bp, Artificial Sequence
  Description of Artificial Sequence: Synthetic oligonucleotide
  Target: LAMA2; (+) strand; PAM type: NRG; PAM sequence: AGG
ggatatgccaggtcaaggaa

SEQ ID NO: 131563 - DNA, 20 bp, Artificial Sequence
  Description of Artificial Sequence: Synthetic oligonucleotide
  Target: LAMA2; (+) strand; PAM type: NRG; PAM sequence: GGG
gatatgccaggtcaaggaaa

SEQ ID NO: 131564 - DNA, 20 bp, Artificial Sequence
  Description of Artificial Sequence: Synthetic oligonucleotide
  Target: LAMA2; (+) strand; PAM type: NRG; PAM sequence: TGG
ccaggtcaaggaaagggcca

SEQ ID NO: 131565 - DNA, 20 bp, Artificial Sequence
  Description of Artificial Sequence: Synthetic oligonucleotide
  Target: LAMA2; (+) strand; PAM type: NRG; PAM sequence: GGG
caggtcaaggaaagggccat

SEQ ID NO: 131566 - DNA, 20 bp, Artificial Sequence
  Description of Artificial Sequence: Synthetic oligonucleotide
  Target: LAMA2; (+) strand; PAM type: NRG; PAM sequence: GAG
ggtcaaggaaagggccatgg

SEQ ID NO: 131567 - DNA, 20 bp, Artificial Sequence
  Description of Artificial Sequence: Synthetic oligonucleotide
  Target: LAMA2; (+) strand; PAM type: NRG; PAM sequence: TGG
caaggaaagggccatgggag

SEQ ID NO: 131568 - DNA, 20 bp, Artificial Sequence
  Description of Artificial Sequence: Synthetic oligonucleotide
  Target: LAMA2; (+) strand; PAM type: NRG; PAM sequence: GGG
aaggaaagggccatgggagt

SEQ ID NO: 131569 - DNA, 20 bp, Artificial Sequence
  Description of Artificial Sequence: Synthetic oligonucleotide
  Target: LAMA2; (+) strand; PAM type: NRG; PAM sequence: CGG
atgggagtgggtgcctgatg

SEQ ID NO: 131570 - DNA, 20 bp, Artificial Sequence
  Description of Artificial Sequence: Synthetic oligonucleotide
  Target: LAMA2; (+) strand; PAM type: NRG; PAM sequence: GAG
gggagtgggtgcctgatgcg

SEQ ID NO: 131571 - DNA, 20 bp, Artificial Sequence
  Description of Artificial Sequence: Synthetic oligonucleotide
  Target: LAMA2; (+) strand; PAM type: NRG; PAM sequence: GAG
gagtgggtgcctgatgcgga

SEQ ID NO: 131572 - DNA, 20 bp, Artificial Sequence
  Description of Artificial Sequence: Synthetic oligonucleotide
  Target: LAMA2; (+) strand; PAM type: NRG; PAM sequence: AGG
agtgggtgcctgatgcggag

SEQ ID NO: 131573 - DNA, 20 bp, Artificial Sequence
  Description of Artificial Sequence: Synthetic oligonucleotide
  Target: LAMA2; (+) strand; PAM type: NRG; PAM sequence: GAG
tgggtgcctgatgcggagag

SEQ ID NO: 131574 - DNA, 20 bp, Artificial Sequence
  Description of Artificial Sequence: Synthetic oligonucleotide
  Target: LAMA2; (+) strand; PAM type: NRG; PAM sequence: AGG
gggtgcctgatgcggagagg

SEQ ID NO: 131575 - DNA, 20 bp, Artificial Sequence
  Description of Artificial Sequence: Synthetic oligonucleotide
  Target: LAMA2; (+) strand; PAM type: NRG; PAM sequence: AAG
cctgatgcggagaggaggaa

SEQ ID NO: 131576 - DNA, 20 bp, Artificial Sequence
  Description of Artificial Sequence: Synthetic oligonucleotide
  Target: LAMA2; (+) strand; PAM type: NRG; PAM sequence: GAG
tgatgcggagaggaggaaaa

SEQ ID NO: 131577 - DNA, 20 bp, Artificial Sequence
  Description of Artificial Sequence: Synthetic oligonucleotide
  Target: LAMA2; (+) strand; PAM type: NRG; PAM sequence: AGG
gatgcggagaggaggaaaag

SEQ ID NO: 131578 - DNA, 20 bp, Artificial Sequence
  Description of Artificial Sequence: Synthetic oligonucleotide
  Target: LAMA2; (+) strand; PAM type: NRG; PAM sequence: CAG
cggagaggaggaaaagaggt

SEQ ID NO: 131579 - DNA, 20 bp, Artificial Sequence
  Description of Artificial Sequence: Synthetic oligonucleotide
  Target: LAMA2; (+) strand; PAM type: NRG; PAM sequence: GAG
gaggaggaaaagaggtcagc

SEQ ID NO: 131580 - DNA, 20 bp, Artificial Sequence
  Description of Artificial Sequence: Synthetic oligonucleotide
  Target: LAMA2; (+) strand; PAM type: NRG; PAM sequence: AGG
aggaggaaaagaggtcagcg

SEQ ID NO: 131581 - DNA, 20 bp, Artificial Sequence
  Description of Artificial Sequence: Synthetic oligonucleotide
  Target: LAMA2; (+) strand; PAM type: NRG; PAM sequence: GAG
gaggaaaagaggtcagcgag

SEQ ID NO: 131582 - DNA, 20 bp, Artificial Sequence
  Description of Artificial Sequence: Synthetic oligonucleotide
  Target: LAMA2; (+) strand; PAM type: NRG; PAM sequence: AGG
aggaaaagaggtcagcgagg

SEQ ID NO: 131583 - DNA, 20 bp, Artificial Sequence
  Description of Artificial Sequence: Synthetic oligonucleotide
  Target: LAMA2; (+) strand; PAM type: NRG; PAM sequence: AAG
aagaggtcagcgaggaggta

SEQ ID NO: 131584 - DNA, 20 bp, Artificial Sequence
  Description of Artificial Sequence: Synthetic oligonucleotide
  Target: LAMA2; (+) strand; PAM type: NRG; PAM sequence: GAG
gaggtcagcgaggaggtaaa

SEQ ID NO: 131585 - DNA, 20 bp, Artificial Sequence
  Description of Artificial Sequence: Synthetic oligonucleotide
  Target: LAMA2; (+) strand; PAM type: NRG; PAM sequence: TGG
cagcgaggaggtaaagagcc

SEQ ID NO: 131586 - DNA, 20 bp, Artificial Sequence
  Description of Artificial Sequence: Synthetic oligonucleotide
  Target: LAMA2; (+) strand; PAM type: NRG; PAM sequence: GGG
agcgaggaggtaaagagcct

SEQ ID NO: 131587 - DNA, 20 bp, Artificial Sequence
  Description of Artificial Sequence: Synthetic oligonucleotide
  Target: LAMA2; (+) strand; PAM type: NRG; PAM sequence: CAG
ggaggtaaagagcctgggca

SEQ ID NO: 131588 - DNA, 20 bp, Artificial Sequence
  Description of Artificial Sequence: Synthetic oligonucleotide
  Target: LAMA2; (+) strand; PAM type: NRG; PAM sequence: TGG
gagcctgggcacagtcatgt

SEQ ID NO: 131589 - DNA, 20 bp, Artificial Sequence
  Description of Artificial Sequence: Synthetic oligonucleotide
  Target: LAMA2; (+) strand; PAM type: NRG; PAM sequence: TAG
cctgggcacagtcatgttgg

SEQ ID NO: 131590 - DNA, 20 bp, Artificial Sequence
  Description of Artificial Sequence: Synthetic oligonucleotide
  Target: LAMA2; (+) strand; PAM type: NRG; PAM sequence: CAG
agtcatgttggtagatttta

SEQ ID NO: 131591 - DNA, 20 bp, Artificial Sequence
  Description of Artificial Sequence: Synthetic oligonucleotide
  Target: LAMA2; (+) strand; PAM type: NRG; PAM sequence: AAG
ggtagattttacagttacat

SEQ ID NO: 131592 - DNA, 20 bp, Artificial Sequence
  Description of Artificial Sequence: Synthetic oligonucleotide
  Target: LAMA2; (+) strand; PAM type: NRG; PAM sequence: AGG
gtagattttacagttacata

SEQ ID NO: 131593 - DNA, 20 bp, Artificial Sequence
  Description of Artificial Sequence: Synthetic oligonucleotide
  Target: LAMA2; (+) strand; PAM type: NRG; PAM sequence: GAG
agattttacagttacataag

SEQ ID NO: 131594 - DNA, 20 bp, Artificial Sequence
  Description of Artificial Sequence: Synthetic oligonucleotide
  Target: LAMA2; (+) strand; PAM type: NRG; PAM sequence: GAG
attttacagttacataagga

SEQ ID NO: 131595 - DNA, 20 bp, Artificial Sequence
  Description of Artificial Sequence: Synthetic oligonucleotide
  Target: LAMA2; (+) strand; PAM type: NRG; PAM sequence: AGG
ttttacagttacataaggag

SEQ ID NO: 131596 - DNA, 20 bp, Artificial Sequence
  Description of Artificial Sequence: Synthetic oligonucleotide
  Target: LAMA2; (+) strand; PAM type: NRG; PAM sequence: TAG
tacagttacataaggagagg

SEQ ID NO: 131597 - DNA, 20 bp, Artificial Sequence
  Description of Artificial Sequence: Synthetic oligonucleotide
  Target: LAMA2; (+) strand; PAM type: NRG; PAM sequence: AGG
acagttacataaggagaggt

SEQ ID NO: 131598 - DNA, 20 bp, Artificial Sequence
  Description of Artificial Sequence: Synthetic oligonucleotide
  Target: LAMA2; (+) strand; PAM type: NRG; PAM sequence: AAG
gttacataaggagaggtagg

SEQ ID NO: 131599 - DNA, 20 bp, Artificial Sequence
  Description of Artificial Sequence: Synthetic oligonucleotide
  Target: LAMA2; (+) strand; PAM type: NRG; PAM sequence: AGG
ttacataaggagaggtagga

SEQ ID NO: 131600 - DNA, 20 bp, Artificial Sequence
  Description of Artificial Sequence: Synthetic oligonucleotide
  Target: LAMA2; (+) strand; PAM type: NRG; PAM sequence: AAG
cataaggagaggtaggaagg

SEQ ID NO: 131601 - DNA, 20 bp, Artificial Sequence
  Description of Artificial Sequence: Synthetic oligonucleotide
  Target: LAMA2; (+) strand; PAM type: NRG; PAM sequence: TGG
aggagaggtaggaaggaaga

SEQ ID NO: 131602 - DNA, 20 bp, Artificial Sequence
  Description of Artificial Sequence: Synthetic oligonucleotide
  Target: LAMA2; (+) strand; PAM type: NRG; PAM sequence: CAG
taggaaggaagatggcgaac

SEQ ID NO: 131603 - DNA, 20 bp, Artificial Sequence
  Description of Artificial Sequence: Synthetic oligonucleotide
  Target: LAMA2; (+) strand; PAM type: NRG; PAM sequence: AAG
aaggaagatggcgaaccaga

SEQ ID NO: 131604 - DNA, 20 bp, Artificial Sequence
  Description of Artificial Sequence: Synthetic oligonucleotide
  Target: LAMA2; (+) strand; PAM type: NRG; PAM sequence: AAG
aagatggcgaaccagaaagt

SEQ ID NO: 131605 - DNA, 20 bp, Artificial Sequence
  Description of Artificial Sequence: Synthetic oligonucleotide
  Target: LAMA2; (+) strand; PAM type: NRG; PAM sequence: TGG
agaaagtaagtcattaataa

SEQ ID NO: 131606 - DNA, 20 bp, Artificial Sequence
  Description of Artificial Sequence: Synthetic oligonucleotide
  Target: LAMA2; (+) strand; PAM type: NRG; PAM sequence: TGG
agtaagtcattaataatggc

SEQ ID NO: 131607 - DNA, 20 bp, Artificial Sequence
  Description of Artificial Sequence: Synthetic oligonucleotide
  Target: LAMA2; (+) strand; PAM type: NRG; PAM sequence: AAG
aagtcattaataatggctgg

SEQ ID NO: 131608 - DNA, 20 bp, Artificial Sequence
  Description of Artificial Sequence: Synthetic oligonucleotide
  Target: LAMA2; (+) strand; PAM type: NRG; PAM sequence: AGG
agtcattaataatggctgga

SEQ ID NO: 131609 - DNA, 20 bp, Artificial Sequence
  Description of Artificial Sequence: Synthetic oligonucleotide
  Target: LAMA2; (+) strand; PAM type: NRG; PAM sequence: TGG
cattaataatggctggaagg

SEQ ID NO: 131610 - DNA, 20 bp, Artificial Sequence
  Description of Artificial Sequence: Synthetic oligonucleotide
  Target: LAMA2; (+) strand; PAM type: NRG; PAM sequence: GAG
tggctggaaggtggttttat

SEQ ID NO: 131611 - DNA, 20 bp, Artificial Sequence
  Description of Artificial Sequence: Synthetic oligonucleotide
  Target: LAMA2; (+) strand; PAM type: NRG; PAM sequence: AGG
ggctggaaggtggttttatg

SEQ ID NO: 131612 - DNA, 20 bp, Artificial Sequence
  Description of Artificial Sequence: Synthetic oligonucleotide
  Target: LAMA2; (+) strand; PAM type: NRG; PAM sequence: GGG
gctggaaggtggttttatga

SEQ ID NO: 131613 - DNA, 20 bp, Artificial Sequence
  Description of Artificial Sequence: Synthetic oligonucleotide
  Target: LAMA2; (+) strand; PAM type: NRG; PAM sequence: TGG
aggtggttttatgagggatg

SEQ ID NO: 131614 - DNA, 20 bp, Artificial Sequence
  Description of Artificial Sequence: Synthetic oligonucleotide
  Target: LAMA2; (+) strand; PAM type: NRG; PAM sequence: CAG
ttatgagggatgtggatttt

SEQ ID NO: 131615 - DNA, 20 bp, Artificial Sequence
  Description of Artificial Sequence: Synthetic oligonucleotide
  Target: LAMA2; (+) strand; PAM type: NRG; PAM sequence: GAG
atgagggatgtggattttca

SEQ ID NO: 131616 - DNA, 20 bp, Artificial Sequence
  Description of Artificial Sequence: Synthetic oligonucleotide
  Target: LAMA2; (+) strand; PAM type: NRG; PAM sequence: GAG
gagggatgtggattttcaga

SEQ ID NO: 131617 - DNA, 20 bp, Artificial Sequence
  Description of Artificial Sequence: Synthetic oligonucleotide
  Target: LAMA2; (+) strand; PAM type: NRG; PAM sequence: AAG
gatgtggattttcagagaga

SEQ ID NO: 131618 - DNA, 20 bp, Artificial Sequence
  Description of Artificial Sequence: Synthetic oligonucleotide
  Target: LAMA2; (+) strand; PAM type: NRG; PAM sequence: GAG
tgtggattttcagagagaaa

SEQ ID NO: 131619 - DNA, 20 bp, Artificial Sequence
  Description of Artificial Sequence: Synthetic oligonucleotide
  Target: LAMA2; (+) strand; PAM type: NRG; PAM sequence: AAG
agagaaagagaaaactgatt

SEQ ID NO: 131620 - DNA, 20 bp, Artificial Sequence
  Description of Artificial Sequence: Synthetic oligonucleotide
  Target: LAMA2; (+) strand; PAM type: NRG; PAM sequence: AAG
gaaagagaaaactgattaag

SEQ ID NO: 131621 - DNA, 20 bp, Artificial Sequence
  Description of Artificial Sequence: Synthetic oligonucleotide
  Target: LAMA2; (+) strand; PAM type: NRG; PAM sequence: TAG
agagaaaactgattaagaag

SEQ ID NO: 131622 - DNA, 20 bp, Artificial Sequence
  Description of Artificial Sequence: Synthetic oligonucleotide
  Target: LAMA2; (+) strand; PAM type: NRG; PAM sequence: AAG
ctgattaagaagtagcatca

SEQ ID NO: 131623 - DNA, 20 bp, Artificial Sequence
  Description of Artificial Sequence: Synthetic oligonucleotide
  Target: LAMA2; (+) strand; PAM type: NRG; PAM sequence: GAG
gattaagaagtagcatcaaa

SEQ ID NO: 131624 - DNA, 20 bp, Artificial Sequence
  Description of Artificial Sequence: Synthetic oligonucleotide
  Target: LAMA2; (+) strand; PAM type: NRG; PAM sequence: AGG
attaagaagtagcatcaaag

SEQ ID NO: 131625 - DNA, 20 bp, Artificial Sequence
  Description of Artificial Sequence: Synthetic oligonucleotide
  Target: LAMA2; (+) strand; PAM type: NRG; PAM sequence: GAG
taagaagtagcatcaaagag

SEQ ID NO: 131626 - DNA, 20 bp, Artificial Sequence
  Description of Artificial Sequence: Synthetic oligonucleotide
  Target: LAMA2; (+) strand; PAM type: NRG; PAM sequence: AAG
agtagcatcaaagaggagca

SEQ ID NO: 131627 - DNA, 20 bp, Artificial Sequence
  Description of Artificial Sequence: Synthetic oligonucleotide
  Target: LAMA2; (+) strand; PAM type: NRG; PAM sequence: TAG
gttgatgcacaacctatctc

SEQ ID NO: 131628 - DNA, 20 bp, Artificial Sequence
  Description of Artificial Sequence: Synthetic oligonucleotide
  Target: LAMA2; (+) strand; PAM type: NRG; PAM sequence: AAG
caacctatctctagatcttg

SEQ ID NO: 131629 - DNA, 20 bp, Artificial Sequence
  Description of Artificial Sequence: Synthetic oligonucleotide
  Target: LAMA2; (+) strand; PAM type: NRG; PAM sequence: AGG
aacctatctctagatcttga

SEQ ID NO: 131630 - DNA, 20 bp, Artificial Sequence
  Description of Artificial Sequence: Synthetic oligonucleotide
  Target: LAMA2; (+) strand; PAM type: NRG; PAM sequence: TAG
tctagatcttgaaggtctta

SEQ ID NO: 131631 - DNA, 20 bp, Artificial Sequence
  Description of Artificial Sequence: Synthetic oligonucleotide
  Target: LAMA2; (+) strand; PAM type: NRG; PAM sequence: AAG
tcttatagaatattgtttct

SEQ ID NO: 131632 - DNA, 20 bp, Artificial Sequence
  Description of Artificial Sequence: Synthetic oligonucleotide
  Target: LAMA2; (+) strand; PAM type: NRG; PAM sequence: CAG
atagaatattgtttctaagt

SEQ ID NO: 131633 - DNA, 20 bp, Artificial Sequence
  Description of Artificial Sequence: Synthetic oligonucleotide
  Target: LAMA2; (+) strand; PAM type: NRG; PAM sequence: AAG
gaatattgtttctaagtcag

SEQ ID NO: 131634 - DNA, 20 bp, Artificial Sequence
  Description of Artificial Sequence: Synthetic oligonucleotide
  Target: LAMA2; (+) strand; PAM type: NRG; PAM sequence: CAG
ctaagtcagaagtatgatga

SEQ ID NO: 131635 - DNA, 20 bp, Artificial Sequence
  Description of Artificial Sequence: Synthetic oligonucleotide
  Target: LAMA2; (+) strand; PAM type: NRG; PAM sequence: AGG
taagtcagaagtatgatgac

SEQ ID NO: 131636 - DNA, 20 bp, Artificial Sequence
  Description of Artificial Sequence: Synthetic oligonucleotide
  Target: LAMA2; (+) strand; PAM type: NRG; PAM sequence: GGG
aagtcagaagtatgatgaca

SEQ ID NO: 131637 - DNA, 20 bp, Artificial Sequence
  Description of Artificial Sequence: Synthetic oligonucleotide
  Target: LAMA2; (+) strand; PAM type: NRG; PAM sequence: GGG
agtcagaagtatgatgacag

SEQ ID NO: 131638 - DNA, 20 bp, Artificial Sequence
  Description of Artificial Sequence: Synthetic oligonucleotide
  Target: LAMA2; (+) strand; PAM type: NRG; PAM sequence: GGG
gtcagaagtatgatgacagg

SEQ ID NO: 131639 - DNA, 20 bp, Artificial Sequence
  Description of Artificial Sequence: Synthetic oligonucleotide
  Target: LAMA2; (+) strand; PAM type: NRG; PAM sequence: GAG
cagaagtatgatgacagggg

SEQ ID NO: 131640 - DNA, 20 bp, Artificial Sequence
  Description of Artificial Sequence: Synthetic oligonucleotide
  Target: LAMA2; (+) strand; PAM type: NRG; PAM sequence: AGG
agaagtatgatgacaggggg

SEQ ID NO: 131641 - DNA, 20 bp, Artificial Sequence
  Description of Artificial Sequence: Synthetic oligonucleotide
  Target: LAMA2; (+) strand; PAM type: NRG; PAM sequence: GAG
aagtatgatgacagggggag

SEQ ID NO: 131642 - DNA, 20 bp, Artificial Sequence
  Description of Artificial Sequence: Synthetic oligonucleotide
  Target: LAMA2; (+) strand; PAM type: NRG; PAM sequence: AAG
tgatgacagggggaggagcc

SEQ ID NO: 131643 - DNA, 20 bp, Artificial Sequence
  Description of Artificial Sequence: Synthetic oligonucleotide
  Target: LAMA2; (+) strand; PAM type: NRG; PAM sequence: TGG
gacagggggaggagccaaga

SEQ ID NO: 131644 - DNA, 20 bp, Artificial Sequence
  Description of Artificial Sequence: Synthetic oligonucleotide
  Target: LAMA2; (+) strand; PAM type: NRG; PAM sequence: TAG
gaggagccaagatggccgaa

SEQ ID NO: 131645 - DNA, 20 bp, Artificial Sequence
  Description of Artificial Sequence: Synthetic oligonucleotide
  Target: LAMA2; (+) strand; PAM type: NRG; PAM sequence: AGG
aggagccaagatggccgaat

SEQ ID NO: 131646 - DNA, 20 bp, Artificial Sequence
  Description of Artificial Sequence: Synthetic oligonucleotide
  Target: LAMA2; (+) strand; PAM type: NRG; PAM sequence: CAG
ccaagatggccgaataggaa

SEQ ID NO: 131647 - DNA, 20 bp, Artificial Sequence
  Description of Artificial Sequence: Synthetic oligonucleotide
  Target: LAMA2; (+) strand; PAM type: NRG; PAM sequence: CAG
ataggaacagctccgctcta

SEQ ID NO: 131648 - DNA, 20 bp, Artificial Sequence
  Description of Artificial Sequence: Synthetic oligonucleotide
  Target: LAMA2; (+) strand; PAM type: NRG; PAM sequence: CAG
cagctccgctctacagctcc

SEQ ID NO: 131649 - DNA, 20 bp, Artificial Sequence
  Description of Artificial Sequence: Synthetic oligonucleotide
  Target: LAMA2; (+) strand; PAM type: NRG; PAM sequence: GAG
cgctctacagctcccagtgt

SEQ ID NO: 131650 - DNA, 20 bp, Artificial Sequence
  Description of Artificial Sequence: Synthetic oligonucleotide
  Target: LAMA2; (+) strand; PAM type: NRG; PAM sequence: CAG
agctcccagtgtgagcgacg

SEQ ID NO: 131651 - DNA, 20 bp, Artificial Sequence
  Description of Artificial Sequence: Synthetic oligonucleotide
  Target: LAMA2; (+) strand; PAM type: NRG; PAM sequence: AAG
tcccagtgtgagcgacgcag

SEQ ID NO: 131652 - DNA, 20 bp, Artificial Sequence
  Description of Artificial Sequence: Synthetic oligonucleotide
  Target: LAMA2; (+) strand; PAM type: NRG; PAM sequence: CGG
agtgtgagcgacgcagaaga

SEQ ID NO: 131653 - DNA, 20 bp, Artificial Sequence
  Description of Artificial Sequence: Synthetic oligonucleotide
  Target: LAMA2; (+) strand; PAM type: NRG; PAM sequence: GAG
tgatttctgcatttccatct

SEQ ID NO: 131654 - DNA, 20 bp, Artificial Sequence
  Description of Artificial Sequence: Synthetic oligonucleotide
  Target: LAMA2; (+) strand; PAM type: NRG; PAM sequence: AGG
gatttctgcatttccatctg

SEQ ID NO: 131655 - DNA, 20 bp, Artificial Sequence
  Description of Artificial Sequence: Synthetic oligonucleotide
  Target: LAMA2; (+) strand; PAM type: NRG; PAM sequence: CGG
tgcatttccatctgaggtac

SEQ ID NO: 131656 - DNA, 20 bp, Artificial Sequence
  Description of Artificial Sequence: Synthetic oligonucleotide
  Target: LAMA2; (+) strand; PAM type: NRG; PAM sequence: GGG
gcatttccatctgaggtacc

SEQ ID NO: 131657 - DNA, 20 bp, Artificial Sequence
  Description of Artificial Sequence: Synthetic oligonucleotide
  Target: LAMA2; (+) strand; PAM type: NRG; PAM sequence: TAG
aggtaccgggttcatctcac

SEQ ID NO: 131658 - DNA, 20 bp, Artificial Sequence
  Description of Artificial Sequence: Synthetic oligonucleotide
  Target: LAMA2; (+) strand; PAM type: NRG; PAM sequence: AGG
ggtaccgggttcatctcact

SEQ ID NO: 131659 - DNA, 20 bp, Artificial Sequence
  Description of Artificial Sequence: Synthetic oligonucleotide
  Target: LAMA2; (+) strand; PAM type: NRG; PAM sequence: GGG
gtaccgggttcatctcacta

SEQ ID NO: 131660 - DNA, 20 bp, Artificial Sequence
  Description of Artificial Sequence: Synthetic oligonucleotide
  Target: LAMA2; (+) strand; PAM type: NRG; PAM sequence: GAG
accgggttcatctcactagg

SEQ ID NO: 131661 - DNA, 20 bp, Artificial Sequence
  Description of Artificial Sequence: Synthetic oligonucleotide
  Target: LAMA2; (+) strand; PAM type: NRG; PAM sequence: CAG
ttcatctcactagggagtgc

SEQ ID NO: 131662 - DNA, 20 bp, Artificial Sequence
  Description of Artificial Sequence: Synthetic oligonucleotide
  Target: LAMA2; (+) strand; PAM type: NRG; PAM sequence: CAG
tctcactagggagtgccaga

SEQ ID NO: 131663 - DNA, 20 bp, Artificial Sequence
  Description of Artificial Sequence: Synthetic oligonucleotide
  Target: LAMA2; (+) strand; PAM type: NRG; PAM sequence: TGG
cactagggagtgccagacag

SEQ ID NO: 131664 - DNA, 20 bp, Artificial Sequence
  Description of Artificial Sequence: Synthetic oligonucleotide
  Target: LAMA2; (+) strand; PAM type: NRG; PAM sequence: GGG
actagggagtgccagacagt

SEQ ID NO: 131665 - DNA, 20 bp, Artificial Sequence
  Description of Artificial Sequence: Synthetic oligonucleotide
  Target: LAMA2; (+) strand; PAM type: NRG; PAM sequence: CAG
ggagtgccagacagtgggcg

SEQ ID NO: 131666 - DNA, 20 bp, Artificial Sequence
  Description of Artificial Sequence: Synthetic oligonucleotide
  Target: LAMA2; (+) strand; PAM type: NRG; PAM sequence: AGG
gagtgccagacagtgggcgc

SEQ ID NO: 131667 - DNA, 20 bp, Artificial Sequence
  Description of Artificial Sequence: Synthetic oligonucleotide
  Target: LAMA2; (+) strand; PAM type: NRG; PAM sequence: CAG
gccagacagtgggcgcaggc

SEQ ID NO: 131668 - DNA, 20 bp, Artificial Sequence
  Description of Artificial Sequence: Synthetic oligonucleotide
  Target: LAMA2; (+) strand; PAM type: NRG; PAM sequence: GAG
tgtgtgtgcgcaccgtgcgc

SEQ ID NO: 131669 - DNA, 20 bp, Artificial Sequence
  Description of Artificial Sequence: Synthetic oligonucleotide
  Target: LAMA2; (+) strand; PAM type: NRG; PAM sequence: AAG
tgcgcaccgtgcgcgagccg

SEQ ID NO: 131670 - DNA, 20 bp, Artificial Sequence
  Description of Artificial Sequence: Synthetic oligonucleotide
  Target: LAMA2; (+) strand; PAM type: NRG; PAM sequence: CAG
gcaccgtgcgcgagccgaag

SEQ ID NO: 131671 - DNA, 20 bp, Artificial Sequence
  Description of Artificial Sequence: Synthetic oligonucleotide
  Target: LAMA2; (+) strand; PAM type: NRG; PAM sequence: AGG
caccgtgcgcgagccgaagc

SEQ ID NO: 131672 - DNA, 20 bp, Artificial Sequence
  Description of Artificial Sequence: Synthetic oligonucleotide
  Target: LAMA2; (+) strand; PAM type: NRG; PAM sequence: GGG
accgtgcgcgagccgaagca

SEQ ID NO: 131673 - DNA, 20 bp, Artificial Sequence
  Description of Artificial Sequence: Synthetic oligonucleotide
  Target: LAMA2; (+) strand; PAM type: NRG; PAM sequence: GAG
tgcgcgagccgaagcagggc

SEQ ID NO: 131674 - DNA, 20 bp, Artificial Sequence
  Description of Artificial Sequence: Synthetic oligonucleotide
  Target: LAMA2; (+) strand; PAM type: NRG; PAM sequence: AGG
gcgcgagccgaagcagggcg

SEQ ID NO: 131675 - DNA, 20 bp, Artificial Sequence
  Description of Artificial Sequence: Synthetic oligonucleotide
  Target: LAMA2; (+) strand; PAM type: NRG; PAM sequence: TGG
gggcgaggcattgcctcacc

SEQ ID NO: 131676 - DNA, 20 bp, Artificial Sequence
  Description of Artificial Sequence: Synthetic oligonucleotide
  Target: LAMA2; (+) strand; PAM type: NRG; PAM sequence: GGG
ggcgaggcattgcctcacct

SEQ ID NO: 131677 - DNA, 20 bp, Artificial Sequence
  Description of Artificial Sequence: Synthetic oligonucleotide
  Target: LAMA2; (+) strand; PAM type: NRG; PAM sequence: AAG
gaggcattgcctcacctggg

SEQ ID NO: 131678 - DNA, 20 bp, Artificial Sequence
  Description of Artificial Sequence: Synthetic oligonucleotide
  Target: LAMA2; (+) strand; PAM type: NRG; PAM sequence: AAG
ttgcctcacctgggaagcgc

SEQ ID NO: 131679 - DNA, 20 bp, Artificial Sequence
  Description of Artificial Sequence: Synthetic oligonucleotide
  Target: LAMA2; (+) strand; PAM type: NRG; PAM sequence: AGG
tgcctcacctgggaagcgca

SEQ ID NO: 131680 - DNA, 20 bp, Artificial Sequence
  Description of Artificial Sequence: Synthetic oligonucleotide
  Target: LAMA2; (+) strand; PAM type: NRG; PAM sequence: GGG
gcctcacctgggaagcgcaa

SEQ ID NO: 131681 - DNA, 20 bp, Artificial Sequence
  Description of Artificial Sequence: Synthetic oligonucleotide
  Target: LAMA2; (+) strand; PAM type: NRG; PAM sequence: GGG
cctcacctgggaagcgcaag

SEQ ID NO: 131682 - DNA, 20 bp, Artificial Sequence
  Description of Artificial Sequence: Synthetic oligonucleotide
  Target: LAMA2; (+) strand; PAM type: NRG; PAM sequence: CAG
acctgggaagcgcaaggggt

SEQ ID NO: 131683 - DNA, 20 bp, Artificial Sequence
  Description of Artificial Sequence: Synthetic oligonucleotide
  Target: LAMA2; (+) strand; PAM type: NRG; PAM sequence: AGG
cctgggaagcgcaaggggtc

SEQ ID NO: 131684 - DNA, 20 bp, Artificial Sequence
  Description of Artificial Sequence: Synthetic oligonucleotide
  Target: LAMA2; (+) strand; PAM type: NRG; PAM sequence: GGG
ctgggaagcgcaaggggtca

SEQ ID NO: 131685 - DNA, 20 bp, Artificial Sequence
  Description of Artificial Sequence: Synthetic oligonucleotide
  Target: LAMA2; (+) strand; PAM type: NRG; PAM sequence: GAG
gggaagcgcaaggggtcagg

SEQ ID NO: 131686 - DNA, 20 bp, Artificial Sequence
  Description of Artificial Sequence: Synthetic oligonucleotide
  Target: LAMA2; (+) strand; PAM type: NRG; PAM sequence: GAG
ggtcagggagttccctttcc

SEQ ID NO: 131687 - DNA, 20 bp, Artificial Sequence
  Description of Artificial Sequence: Synthetic oligonucleotide
  Target: LAMA2; (+) strand; PAM type: NRG; PAM sequence: AAG
ggagttccctttccgagtca

SEQ ID NO: 131688 - DNA, 20 bp, Artificial Sequence
  Description of Artificial Sequence: Synthetic oligonucleotide
  Target: LAMA2; (+) strand; PAM type: NRG; PAM sequence: AAG
ttccctttccgagtcaaaga

SEQ ID NO: 131689 - DNA, 20 bp, Artificial Sequence
  Description of Artificial Sequence: Synthetic oligonucleotide
  Target: LAMA2; (+) strand; PAM type: NRG; PAM sequence: AGG
tccctttccgagtcaaagaa

SEQ ID NO: 131690 - DNA, 20 bp, Artificial Sequence
  Description of Artificial Sequence: Synthetic oligonucleotide
  Target: LAMA2; (+) strand; PAM type: NRG; PAM sequence: GGG
ccctttccgagtcaaagaaa

SEQ ID NO: 131691 - DNA, 20 bp, Artificial Sequence
  Description of Artificial Sequence: Synthetic oligonucleotide
  Target: LAMA2; (+) strand; PAM type: NRG; PAM sequence: GGG
cctttccgagtcaaagaaag

SEQ ID NO: 131692 - DNA, 20 bp, Artificial Sequence
  Description of Artificial Sequence: Synthetic oligonucleotide
  Target: LAMA2; (+) strand; PAM type: NRG; PAM sequence: CGG
cgagtcaaagaaaggggtga

SEQ ID NO: 131693 - DNA, 20 bp, Artificial Sequence
  Description of Artificial Sequence: Synthetic oligonucleotide
  Target: LAMA2; (+) strand; PAM type: NRG; PAM sequence: TGG
aaaggggtgacggacgcacc

SEQ ID NO: 131694 - DNA, 20 bp, Artificial Sequence
  Description of Artificial Sequence: Synthetic oligonucleotide
  Target: LAMA2; (+) strand; PAM type: NRG; PAM sequence: CGG
gacggacgcacctggaaaat

SEQ ID NO: 131695 - DNA, 20 bp, Artificial Sequence
  Description of Artificial Sequence: Synthetic oligonucleotide
  Target: LAMA2; (+) strand; PAM type: NRG; PAM sequence: GGG
acggacgcacctggaaaatc

SEQ ID NO: 131696 - DNA, 20 bp, Artificial Sequence
  Description of Artificial Sequence: Synthetic oligonucleotide
  Target: LAMA2; (+) strand; PAM type: NRG; PAM sequence: CAG
cacccgaatattgcgctttt

SEQ ID NO: 131697 - DNA, 20 bp, Artificial Sequence
  Description of Artificial Sequence: Synthetic oligonucleotide
  Target: LAMA2; (+) strand; PAM type: NRG; PAM sequence: CGG
gaatattgcgcttttcagac

SEQ ID NO: 131698 - DNA, 20 bp, Artificial Sequence
  Description of Artificial Sequence: Synthetic oligonucleotide
  Target: LAMA2; (+) strand; PAM type: NRG; PAM sequence: AAG
tgcgcttttcagaccggctt

SEQ ID NO: 131699 - DNA, 20 bp, Artificial Sequence
  Description of Artificial Sequence: Synthetic oligonucleotide
  Target: LAMA2; (+) strand; PAM type: NRG; PAM sequence: CGG
tttcagaccggcttaagaaa

SEQ ID NO: 131700 - DNA, 20 bp, Artificial Sequence
  Description of Artificial Sequence: Synthetic oligonucleotide
  Target: LAMA2; (+) strand; PAM type: NRG; PAM sequence: GAG
cttaagaaacggcgcaccac

SEQ ID NO: 131701 - DNA, 20 bp, Artificial Sequence
  Description of Artificial Sequence: Synthetic oligonucleotide
  Target: LAMA2; (+) strand; PAM type: NRG; PAM sequence: TGG
acgagactatatcccacacc

SEQ ID NO: 131702 - DNA, 20 bp, Artificial Sequence
  Description of Artificial Sequence: Synthetic oligonucleotide
  Target: LAMA2; (+) strand; PAM type: NRG; PAM sequence: CGG
actatatcccacacctggct

SEQ ID NO: 131703 - DNA, 20 bp, Artificial Sequence
  Description of Artificial Sequence: Synthetic oligonucleotide
  Target: LAMA2; (+) strand; PAM type: NRG; PAM sequence: GAG
tatatcccacacctggctcg

SEQ ID NO: 131704 - DNA, 20 bp, Artificial Sequence
  Description of Artificial Sequence: Synthetic oligonucleotide
  Target: LAMA2; (+) strand; PAM type: NRG; PAM sequence: AGG
atatcccacacctggctcgg

SEQ ID NO: 131705 - DNA, 20 bp, Artificial Sequence
  Description of Artificial Sequence: Synthetic oligonucleotide
  Target: LAMA2; (+) strand; PAM type: NRG; PAM sequence: GGG
tatcccacacctggctcgga

SEQ ID NO: 131706 - DNA, 20 bp, Artificial Sequence
  Description of Artificial Sequence: Synthetic oligonucleotide
  Target: LAMA2; (+) strand; PAM type: NRG; PAM sequence: CGG
ctcggagggtcctacgccca

SEQ ID NO: 131707 - DNA, 20 bp, Artificial Sequence
  Description of Artificial Sequence: Synthetic oligonucleotide
  Target: LAMA2; (+) strand; PAM type: NRG; PAM sequence: TAG
cacggaatctcgctgattgc

SEQ ID NO: 131708 - DNA, 20 bp, Artificial Sequence
  Description of Artificial Sequence: Synthetic oligonucleotide
  Target: LAMA2; (+) strand; PAM type: NRG; PAM sequence: CAG
aatctcgctgattgctagca

SEQ ID NO: 131709 - DNA, 20 bp, Artificial Sequence
  Description of Artificial Sequence: Synthetic oligonucleotide
  Target: LAMA2; (+) strand; PAM type: NRG; PAM sequence: CAG
ctcgctgattgctagcacag

SEQ ID NO: 131710 - DNA, 20 bp, Artificial Sequence
  Description of Artificial Sequence: Synthetic oligonucleotide
  Target: LAMA2; (+) strand; PAM type: NRG; PAM sequence: GAG
gattgctagcacagcagtct

SEQ ID NO: 131711 - DNA, 20 bp, Artificial Sequence
  Description of Artificial Sequence: Synthetic oligonucleotide
  Target: LAMA2; (+) strand; PAM type: NRG; PAM sequence: AAG
gcagtctgagatcaaactgc

SEQ ID NO: 131712 - DNA, 20 bp, Artificial Sequence
  Description of Artificial Sequence: Synthetic oligonucleotide
  Target: LAMA2; (+) strand; PAM type: NRG; PAM sequence: AGG
cagtctgagatcaaactgca

SEQ ID NO: 131713 - DNA, 20 bp, Artificial Sequence
  Description of Artificial Sequence: Synthetic oligonucleotide
  Target: LAMA2; (+) strand; PAM type: NRG; PAM sequence: CGG
tctgagatcaaactgcaagg

SEQ ID NO: 131714 - DNA, 20 bp, Artificial Sequence
  Description of Artificial Sequence: Synthetic oligonucleotide
  Target: LAMA2; (+) strand; PAM type: NRG; PAM sequence: GAG
tcaaactgcaaggcggcaac

SEQ ID NO: 131715 - DNA, 20 bp, Artificial Sequence
  Description of Artificial Sequence: Synthetic oligonucleotide
  Target: LAMA2; (+) strand; PAM type: NRG; PAM sequence: AGG
caaactgcaaggcggcaacg

SEQ ID NO: 131716 - DNA, 20 bp, Artificial Sequence
  Description of Artificial Sequence: Synthetic oligonucleotide
  Target: LAMA2; (+) strand; PAM type: NRG; PAM sequence: TGG
ctgcaaggcggcaacgaggc

SEQ ID NO: 131717 - DNA, 20 bp, Artificial Sequence
  Description of Artificial Sequence: Synthetic oligonucleotide
  Target: LAMA2; (+) strand; PAM type: NRG; PAM sequence: GGG
tgcaaggcggcaacgaggct

SEQ ID NO: 131718 - DNA, 20 bp, Artificial Sequence
  Description of Artificial Sequence: Synthetic oligonucleotide
  Target: LAMA2; (+) strand; PAM type: NRG; PAM sequence: GGG
gcaaggcggcaacgaggctg

SEQ ID NO: 131719 - DNA, 20 bp, Artificial Sequence
  Description of Artificial Sequence: Synthetic oligonucleotide
  Target: LAMA2; (+) strand; PAM type: NRG; PAM sequence: GGG
caaggcggcaacgaggctgg

SEQ ID NO: 131720 - DNA, 20 bp, Artificial Sequence
  Description of Artificial Sequence: Synthetic oligonucleotide
  Target: LAMA2; (+) strand; PAM type: NRG; PAM sequence: GAG
aggcggcaacgaggctgggg

SEQ ID NO: 131721 - DNA, 20 bp, Artificial Sequence
  Description of Artificial Sequence: Synthetic oligonucleotide
  Target: LAMA2; (+) strand; PAM type: NRG; PAM sequence: AGG
ggcggcaacgaggctggggg

SEQ ID NO: 131722 - DNA, 20 bp, Artificial Sequence
  Description of Artificial Sequence: Synthetic oligonucleotide
  Target: LAMA2; (+) strand; PAM type: NRG; PAM sequence: GGG
gcggcaacgaggctggggga

SEQ ID NO: 131723 - DNA, 20 bp, Artificial Sequence
  Description of Artificial Sequence: Synthetic oligonucleotide
  Target: LAMA2; (+) strand; PAM type: NRG; PAM sequence: GGG
cggcaacgaggctgggggag

SEQ ID NO: 131724 - DNA, 20 bp, Artificial Sequence
  Description of Artificial Sequence: Synthetic oligonucleotide
  Target: LAMA2; (+) strand; PAM type: NRG; PAM sequence: CAG
gaggggcgcccgccattgcc

SEQ ID NO: 131725 - DNA, 20 bp, Artificial Sequence
  Description of Artificial Sequence: Synthetic oligonucleotide
  Target: LAMA2; (+) strand; PAM type: NRG; PAM sequence: AGG
aggggcgcccgccattgccc

SEQ ID NO: 131726 - DNA, 20 bp, Artificial Sequence
  Description of Artificial Sequence: Synthetic oligonucleotide
  Target: LAMA2; (+) strand; PAM type: NRG; PAM sequence: TAG
cgccattgcccaggcttgct

SEQ ID NO: 131727 - DNA, 20 bp, Artificial Sequence
  Description of Artificial Sequence: Synthetic oligonucleotide
  Target: LAMA2; (+) strand; PAM type: NRG; PAM sequence: AGG
gccattgcccaggcttgctt

SEQ ID NO: 131728 - DNA, 20 bp, Artificial Sequence
  Description of Artificial Sequence: Synthetic oligonucleotide
  Target: LAMA2; (+) strand; PAM type: NRG; PAM sequence: AAG
caggcttgcttaggtaaaca

SEQ ID NO: 131729 - DNA, 20 bp, Artificial Sequence
  Description of Artificial Sequence: Synthetic oligonucleotide
  Target: LAMA2; (+) strand; PAM type: NRG; PAM sequence: CAG
gcttgcttaggtaaacaaag

SEQ ID NO: 131730 - DNA, 20 bp, Artificial Sequence
  Description of Artificial Sequence: Synthetic oligonucleotide
  Target: LAMA2; (+) strand; PAM type: NRG; PAM sequence: CGG
gcttaggtaaacaaagcagc

SEQ ID NO: 131731 - DNA, 20 bp, Artificial Sequence
  Description of Artificial Sequence: Synthetic oligonucleotide
  Target: LAMA2; (+) strand; PAM type: NRG; PAM sequence: GGG
cttaggtaaacaaagcagcc

SEQ ID NO: 131732 - DNA, 20 bp, Artificial Sequence
  Description of Artificial Sequence: Synthetic oligonucleotide
  Target: LAMA2; (+) strand; PAM type: NRG; PAM sequence: AAG
aggtaaacaaagcagccggg

SEQ ID NO: 131733 - DNA, 20 bp, Artificial Sequence
  Description of Artificial Sequence: Synthetic oligonucleotide
  Target: LAMA2; (+) strand; PAM type: NRG; PAM sequence: TGG
agcagccgggaagctcgaac

SEQ ID NO: 131734 - DNA, 20 bp, Artificial Sequence
  Description of Artificial Sequence: Synthetic oligonucleotide
  Target: LAMA2; (+) strand; PAM type: NRG; PAM sequence: GGG
gcagccgggaagctcgaact

SEQ ID NO: 131735 - DNA, 20 bp, Artificial Sequence
  Description of Artificial Sequence: Synthetic oligonucleotide
  Target: LAMA2; (+) strand; PAM type: NRG; PAM sequence: TGG
gccgggaagctcgaactggg

SEQ ID NO: 131736 - DNA, 20 bp, Artificial Sequence
  Description of Artificial Sequence: Synthetic oligonucleotide
  Target: LAMA2; (+) strand; PAM type: NRG; PAM sequence: GAG
cgggaagctcgaactgggtg

SEQ ID NO: 131737 - DNA, 20 bp, Artificial Sequence
  Description of Artificial Sequence: Synthetic oligonucleotide
  Target: LAMA2; (+) strand; PAM type: NRG; PAM sequence: CAG
gaactgggtggagcccacca

SEQ ID NO: 131738 - DNA, 20 bp, Artificial Sequence
  Description of Artificial Sequence: Synthetic oligonucleotide
  Target: LAMA2; (+) strand; PAM type: NRG; PAM sequence: AAG
ggtggagcccaccacagctc

SEQ ID NO: 131739 - DNA, 20 bp, Artificial Sequence
  Description of Artificial Sequence: Synthetic oligonucleotide
  Target: LAMA2; (+) strand; PAM type: NRG; PAM sequence: AGG
gtggagcccaccacagctca

SEQ ID NO: 131740 - DNA, 20 bp, Artificial Sequence
  Description of Artificial Sequence: Synthetic oligonucleotide
  Target: LAMA2; (+) strand; PAM type: NRG; PAM sequence: GAG
ggagcccaccacagctcaag

SEQ ID NO: 131741 - DNA, 20 bp, Artificial Sequence
  Description of Artificial Sequence: Synthetic oligonucleotide
  Target: LAMA2; (+) strand; PAM type: NRG; PAM sequence: AGG
gagcccaccacagctcaagg

SEQ ID NO: 131742 - DNA, 20 bp, Artificial Sequence
  Description of Artificial Sequence: Synthetic oligonucleotide
  Target: LAMA2; (+) strand; PAM type: NRG; PAM sequence: TAG
aggaggcctgcctgcctctg

SEQ ID NO: 131743 - DNA, 20 bp, Artificial Sequence
  Description of Artificial Sequence: Synthetic oligonucleotide
  Target: LAMA2; (+) strand; PAM type: NRG; PAM sequence: AGG
ggaggcctgcctgcctctgt

SEQ ID NO: 131744 - DNA, 20 bp, Artificial Sequence
  Description of Artificial Sequence: Synthetic oligonucleotide
  Target: LAMA2; (+) strand; PAM type: NRG; PAM sequence: TGG
gcctctgtaggctccacctc

SEQ ID NO: 131745 - DNA, 20 bp, Artificial Sequence
  Description of Artificial Sequence: Synthetic oligonucleotide
  Target: LAMA2; (+) strand; PAM type: NRG; PAM sequence: GGG
cctctgtaggctccacctct

SEQ ID NO: 131746 - DNA, 20 bp, Artificial Sequence
  Description of Artificial Sequence: Synthetic oligonucleotide
  Target: LAMA2; (+) strand; PAM type: NRG; PAM sequence: GGG
ctctgtaggctccacctctg

SEQ ID NO: 131747 - DNA, 20 bp, Artificial Sequence
  Description of Artificial Sequence: Synthetic oligonucleotide
  Target: LAMA2; (+) strand; PAM type: NRG; PAM sequence: GGG
tctgtaggctccacctctgg

SEQ ID NO: 131748 - DNA, 20 bp, Artificial Sequence
  Description of Artificial Sequence: Synthetic oligonucleotide
  Target: LAMA2; (+) strand; PAM type: NRG; PAM sequence: CAG
gtaggctccacctctggggg

SEQ ID NO: 131749 - DNA, 20 bp, Artificial Sequence
  Description of Artificial Sequence: Synthetic oligonucleotide
  Target: LAMA2; (+) strand; PAM type: NRG; PAM sequence: AGG
taggctccacctctgggggc

SEQ ID NO: 131750 - DNA, 20 bp, Artificial Sequence
  Description of Artificial Sequence: Synthetic oligonucleotide
  Target: LAMA2; (+) strand; PAM type: NRG; PAM sequence: GGG
aggctccacctctgggggca

SEQ ID NO: 131751 - DNA, 20 bp, Artificial Sequence
  Description of Artificial Sequence: Synthetic oligonucleotide
  Target: LAMA2; (+) strand; PAM type: NRG; PAM sequence: CAG
ccacctctgggggcagggca

SEQ ID NO: 131752 - DNA, 20 bp, Artificial Sequence
  Description of Artificial Sequence: Synthetic oligonucleotide
  Target: LAMA2; (+) strand; PAM type: NRG; PAM sequence: AAG
gcagggcacagacaaacaaa

SEQ ID NO: 131753 - DNA, 20 bp, Artificial Sequence
  Description of Artificial Sequence: Synthetic oligonucleotide
  Target: LAMA2; (+) strand; PAM type: NRG; PAM sequence: CAG
ggcacagacaaacaaaaaga

SEQ ID NO: 131754 - DNA, 20 bp, Artificial Sequence
  Description of Artificial Sequence: Synthetic oligonucleotide
  Target: LAMA2; (+) strand; PAM type: NRG; PAM sequence: CAG
acagacaaacaaaaagacag

SEQ ID NO: 131755 - DNA, 20 bp, Artificial Sequence
  Description of Artificial Sequence: Synthetic oligonucleotide
  Target: LAMA2; (+) strand; PAM type: NRG; PAM sequence: CAG
aaagacagcagtaacctctg

SEQ ID NO: 131756 - DNA, 20 bp, Artificial Sequence
  Description of Artificial Sequence: Synthetic oligonucleotide
  Target: LAMA2; (+) strand; PAM type: NRG; PAM sequence: AAG
gcagtaacctctgcagactt

SEQ ID NO: 131757 - DNA, 20 bp, Artificial Sequence
  Description of Artificial Sequence: Synthetic oligonucleotide
  Target: LAMA2; (+) strand; PAM type: NRG; PAM sequence: CAG
acttaagtgtccctgtctga

SEQ ID NO: 131758 - DNA, 20 bp, Artificial Sequence
  Description of Artificial Sequence: Synthetic oligonucleotide
  Target: LAMA2; (+) strand; PAM type: NRG; PAM sequence: AAG
gtccctgtctgacagctttg

SEQ ID NO: 131759 - DNA, 20 bp, Artificial Sequence
  Description of Artificial Sequence: Synthetic oligonucleotide
  Target: LAMA2; (+) strand; PAM type: NRG; PAM sequence: GAG
ccctgtctgacagctttgaa

SEQ ID NO: 131760 - DNA, 20 bp, Artificial Sequence
  Description of Artificial Sequence: Synthetic oligonucleotide
  Target: LAMA2; (+) strand; PAM type: NRG; PAM sequence: GAG
ctgtctgacagctttgaaga

SEQ ID NO: 131761 - DNA, 20 bp, Artificial Sequence
  Description of Artificial Sequence: Synthetic oligonucleotide
  Target: LAMA2; (+) strand; PAM type: NRG; PAM sequence: CAG
tctgacagctttgaagagag

SEQ ID NO: 131762 - DNA, 20 bp, Artificial Sequence
  Description of Artificial Sequence: Synthetic oligonucleotide
  Target: LAMA2; (+) strand; PAM type: NRG; PAM sequence: TGG
gacagctttgaagagagcag

SEQ ID NO: 131763 - DNA, 20 bp, Artificial Sequence
  Description of Artificial Sequence: Synthetic oligonucleotide
  Target: LAMA2; (+) strand; PAM type: NRG; PAM sequence: CAG
gaagagagcagtggttctcc

SEQ ID NO: 131764 - DNA, 20 bp, Artificial Sequence
  Description of Artificial Sequence: Synthetic oligonucleotide
  Target: LAMA2; (+) strand; PAM type: NRG; PAM sequence: CAG
gcagtggttctcccagtacg

SEQ ID NO: 131765 - DNA, 20 bp, Artificial Sequence
  Description of Artificial Sequence: Synthetic oligonucleotide
  Target: LAMA2; (+) strand; PAM type: NRG; PAM sequence: TGG
tggttctcccagtacgcagc

SEQ ID NO: 131766 - DNA, 20 bp, Artificial Sequence
  Description of Artificial Sequence: Synthetic oligonucleotide
  Target: LAMA2; (+) strand; PAM type: NRG; PAM sequence: GAG
gttctcccagtacgcagctg

SEQ ID NO: 131767 - DNA, 20 bp, Artificial Sequence
  Description of Artificial Sequence: Synthetic oligonucleotide
  Target: LAMA2; (+) strand; PAM type: NRG; PAM sequence: GAG
cagtacgcagctggagatct

SEQ ID NO: 131768 - DNA, 20 bp, Artificial Sequence
  Description of Artificial Sequence: Synthetic oligonucleotide
  Target: LAMA2; (+) strand; PAM type: NRG; PAM sequence: TGG
cgcagctggagatctgagaa

SEQ ID NO: 131769 - DNA, 20 bp, Artificial Sequence
  Description of Artificial Sequence: Synthetic oligonucleotide
  Target: LAMA2; (+) strand; PAM type: NRG; PAM sequence: GGG
gcagctggagatctgagaat

SEQ ID NO: 131770 - DNA, 20 bp, Artificial Sequence
  Description of Artificial Sequence: Synthetic oligonucleotide
  Target: LAMA2; (+) strand; PAM type: NRG; PAM sequence: CAG
gctggagatctgagaatggg

SEQ ID NO: 131771 - DNA, 20 bp, Artificial Sequence
  Description of Artificial Sequence: Synthetic oligonucleotide
  Target: LAMA2; (+) strand; PAM type: NRG; PAM sequence: AAG
aatgggcagactgcctcctc

SEQ ID NO: 131772 - DNA, 20 bp, Artificial Sequence
  Description of Artificial Sequence: Synthetic oligonucleotide
  Target: LAMA2; (+) strand; PAM type: NRG; PAM sequence: TGG
gggcagactgcctcctcaag

SEQ ID NO: 131773 - DNA, 20 bp, Artificial Sequence
  Description of Artificial Sequence: Synthetic oligonucleotide
  Target: LAMA2; (+) strand; PAM type: NRG; PAM sequence: GGG
ggcagactgcctcctcaagt

SEQ ID NO: 131774 - DNA, 20 bp, Artificial Sequence
  Description of Artificial Sequence: Synthetic oligonucleotide
  Target: LAMA2; (+) strand; PAM type: NRG; PAM sequence: GAG
gtccctgactcctgaccccc

SEQ ID NO: 131775 - DNA, 20 bp, Artificial Sequence
  Description of Artificial Sequence: Synthetic oligonucleotide
  Target: LAMA2; (+) strand; PAM type: NRG; PAM sequence: CAG
cctgactcctgacccccgag

SEQ ID NO: 131776 - DNA, 20 bp, Artificial Sequence
  Description of Artificial Sequence: Synthetic oligonucleotide
  Target: LAMA2; (+) strand; PAM type: NRG; PAM sequence: TGG
tgacccccgagcagcctaac

SEQ ID NO: 131777 - DNA, 20 bp, Artificial Sequence
  Description of Artificial Sequence: Synthetic oligonucleotide
  Target: LAMA2; (+) strand; PAM type: NRG; PAM sequence: GGG
gacccccgagcagcctaact

SEQ ID NO: 131778 - DNA, 20 bp, Artificial Sequence
  Description of Artificial Sequence: Synthetic oligonucleotide
  Target: LAMA2; (+) strand; PAM type: NRG; PAM sequence: GAG
cccccgagcagcctaactgg

SEQ ID NO: 131779 - DNA, 20 bp, Artificial Sequence
  Description of Artificial Sequence: Synthetic oligonucleotide
  Target: LAMA2; (+) strand; PAM type: NRG; PAM sequence: AGG
ccccgagcagcctaactggg

SEQ ID NO: 131780 - DNA, 20 bp, Artificial Sequence
  Description of Artificial Sequence: Synthetic oligonucleotide
  Target: LAMA2; (+) strand; PAM type: NRG; PAM sequence: CAG
cctaactgggaggcaccccc

SEQ ID NO: 131781 - DNA, 20 bp, Artificial Sequence
  Description of Artificial Sequence: Synthetic oligonucleotide
  Target: LAMA2; (+) strand; PAM type: NRG; PAM sequence: CAG
aactgggaggcaccccccag

SEQ ID NO: 131782 - DNA, 20 bp, Artificial Sequence
  Description of Artificial Sequence: Synthetic oligonucleotide
  Target: LAMA2; (+) strand; PAM type: NRG; PAM sequence: AGG
actgggaggcaccccccagc

SEQ ID NO: 131783 - DNA, 20 bp, Artificial Sequence
  Description of Artificial Sequence: Synthetic oligonucleotide
  Target: LAMA2; (+) strand; PAM type: NRG; PAM sequence: GGG
ctgggaggcaccccccagca

SEQ ID NO: 131784 - DNA, 20 bp, Artificial Sequence
  Description of Artificial Sequence: Synthetic oligonucleotide
  Target: LAMA2; (+) strand; PAM type: NRG; PAM sequence: GGG
tgggaggcaccccccagcag

SEQ ID NO: 131785 - DNA, 20 bp, Artificial Sequence
  Description of Artificial Sequence: Synthetic oligonucleotide
  Target: LAMA2; (+) strand; PAM type: NRG; PAM sequence: CGG
gggcacactgacacctcaca

SEQ ID NO: 131786 - DNA, 20 bp, Artificial Sequence
  Description of Artificial Sequence: Synthetic oligonucleotide
  Target: LAMA2; (+) strand; PAM type: NRG; PAM sequence: CAG
cacactgacacctcacacgg

SEQ ID NO: 131787 - DNA, 20 bp, Artificial Sequence
  Description of Artificial Sequence: Synthetic oligonucleotide
  Target: LAMA2; (+) strand; PAM type: NRG; PAM sequence: AGG
acactgacacctcacacggc

SEQ ID NO: 131788 - DNA, 20 bp, Artificial Sequence
  Description of Artificial Sequence: Synthetic oligonucleotide
  Target: LAMA2; (+) strand; PAM type: NRG; PAM sequence: GGG
cactgacacctcacacggca

SEQ ID NO: 131789 - DNA, 20 bp, Artificial Sequence
  Description of Artificial Sequence: Synthetic oligonucleotide
  Target: LAMA2; (+) strand; PAM type: NRG; PAM sequence: CAG
cacacggcagggtattccaa

SEQ ID NO: 131790 - DNA, 20 bp, Artificial Sequence
  Description of Artificial Sequence: Synthetic oligonucleotide
  Target: LAMA2; (+) strand; PAM type: NRG; PAM sequence: CAG
agggtattccaacagacctg

SEQ ID NO: 131791 - DNA, 20 bp, Artificial Sequence
  Description of Artificial Sequence: Synthetic oligonucleotide
  Target: LAMA2; (+) strand; PAM type: NRG; PAM sequence: GAG
attccaacagacctgcagct

SEQ ID NO: 131792 - DNA, 20 bp, Artificial Sequence
  Description of Artificial Sequence: Synthetic oligonucleotide
  Target: LAMA2; (+) strand; PAM type: NRG; PAM sequence: AGG
ttccaacagacctgcagctg

SEQ ID NO: 131793 - DNA, 20 bp, Artificial Sequence
  Description of Artificial Sequence: Synthetic oligonucleotide
  Target: LAMA2; (+) strand; PAM type: NRG; PAM sequence: GGG
tccaacagacctgcagctga

SEQ ID NO: 131794 - DNA, 20 bp, Artificial Sequence
  Description of Artificial Sequence: Synthetic oligonucleotide
  Target: LAMA2; (+) strand; PAM type: NRG; PAM sequence: TAG
cagctgagggtcctgtctgt

SEQ ID NO: 131795 - DNA, 20 bp, Artificial Sequence
  Description of Artificial Sequence: Synthetic oligonucleotide
  Target: LAMA2; (+) strand; PAM type: NRG; PAM sequence: AAG
ctgagggtcctgtctgttag

SEQ ID NO: 131796 - DNA, 20 bp, Artificial Sequence
  Description of Artificial Sequence: Synthetic oligonucleotide
  Target: LAMA2; (+) strand; PAM type: NRG; PAM sequence: AGG
tgagggtcctgtctgttaga

SEQ ID NO: 131797 - DNA, 20 bp, Artificial Sequence
  Description of Artificial Sequence: Synthetic oligonucleotide
  Target: LAMA2; (+) strand; PAM type: NRG; PAM sequence: CAG
ttagaaggaaaactaacaac

SEQ ID NO: 131798 - DNA, 20 bp, Artificial Sequence
  Description of Artificial Sequence: Synthetic oligonucleotide
  Target: LAMA2; (+) strand; PAM type: NRG; PAM sequence: AAG
aaggaaaactaacaaccaga

SEQ ID NO: 131799 - DNA, 20 bp, Artificial Sequence
  Description of Artificial Sequence: Synthetic oligonucleotide
  Target: LAMA2; (+) strand; PAM type: NRG; PAM sequence: AGG
aggaaaactaacaaccagaa

SEQ ID NO: 131800 - DNA, 20 bp, Artificial Sequence
  Description of Artificial Sequence: Synthetic oligonucleotide
  Target: LAMA2; (+) strand; PAM type: NRG; PAM sequence: AAG
tctgtacatcaccatcatca

SEQ ID NO: 131801 - DNA, 20 bp, Artificial Sequence
  Description of Artificial Sequence: Synthetic oligonucleotide
  Target: LAMA2; (+) strand; PAM type: NRG; PAM sequence: AAG
tcaccatcatcaaagaccaa

SEQ ID NO: 131802 - DNA, 20 bp, Artificial Sequence
  Description of Artificial Sequence: Synthetic oligonucleotide
  Target: LAMA2; (+) strand; PAM type: NRG; PAM sequence: TAG
ccatcatcaaagaccaaaag

SEQ ID NO: 131803 - DNA, 20 bp, Artificial Sequence
  Description of Artificial Sequence: Synthetic oligonucleotide
  Target: LAMA2; (+) strand; PAM type: NRG; PAM sequence: AAG
caaaagtagataaaaccaca

SEQ ID NO: 131804 - DNA, 20 bp, Artificial Sequence
  Description of Artificial Sequence: Synthetic oligonucleotide
  Target: LAMA2; (+) strand; PAM type: NRG; PAM sequence: TGG
agtagataaaaccacaaaga

SEQ ID NO: 131805 - DNA, 20 bp, Artificial Sequence
  Description of Artificial Sequence: Synthetic oligonucleotide
  Target: LAMA2; (+) strand; PAM type: NRG; PAM sequence: GGG
gtagataaaaccacaaagat

SEQ ID NO: 131806 - DNA, 20 bp, Artificial Sequence
  Description of Artificial Sequence: Synthetic oligonucleotide
  Target: LAMA2; (+) strand; PAM type: NRG; PAM sequence: GGG
tagataaaaccacaaagatg

SEQ ID NO: 131807 - DNA, 20 bp, Artificial Sequence
  Description of Artificial Sequence: Synthetic oligonucleotide
  Target: LAMA2; (+) strand; PAM type: NRG; PAM sequence: CAG
ccacaaagatggggaaaaaa

SEQ ID NO: 131808 - DNA, 20 bp, Artificial Sequence
  Description of Artificial Sequence: Synthetic oligonucleotide
  Target: LAMA2; (+) strand; PAM type: NRG; PAM sequence: CAG
aagatggggaaaaaacagaa

SEQ ID NO: 131809 - DNA, 20 bp, Artificial Sequence
  Description of Artificial Sequence: Synthetic oligonucleotide
  Target: LAMA2; (+) strand; PAM type: NRG; PAM sequence: TGG
aaaaaacagaacagaaaaac

SEQ ID NO: 131810 - DNA, 20 bp, Artificial Sequence
  Description of Artificial Sequence: Synthetic oligonucleotide
  Target: LAMA2; (+) strand; PAM type: NRG; PAM sequence: CAG
aaactggaaactctaaaacg

SEQ ID NO: 131811 - DNA, 20 bp, Artificial Sequence
  Description of Artificial Sequence: Synthetic oligonucleotide
  Target: LAMA2; (+) strand; PAM type: NRG; PAM sequence: GAG
actggaaactctaaaacgca

SEQ ID NO: 131812 - DNA, 20 bp, Artificial Sequence
  Description of Artificial Sequence: Synthetic oligonucleotide
  Target: LAMA2; (+) strand; PAM type: NRG; PAM sequence: AAG
agagcgcctctcctcctcca

SEQ ID NO: 131813 - DNA, 20 bp, Artificial Sequence
  Description of Artificial Sequence: Synthetic oligonucleotide
  Target: LAMA2; (+) strand; PAM type: NRG; PAM sequence: AGG
gagcgcctctcctcctccaa

SEQ ID NO: 131814 - DNA, 20 bp, Artificial Sequence
  Description of Artificial Sequence: Synthetic oligonucleotide
  Target: LAMA2; (+) strand; PAM type: NRG; PAM sequence: CAG
tctcctcctccaaaggaacg

SEQ ID NO: 131815 - DNA, 20 bp, Artificial Sequence
  Description of Artificial Sequence: Synthetic oligonucleotide
  Target: LAMA2; (+) strand; PAM type: NRG; PAM sequence: CAG
aaaggaacgcagttcctcac

SEQ ID NO: 131816 - DNA, 20 bp, Artificial Sequence
  Description of Artificial Sequence: Synthetic oligonucleotide
  Target: LAMA2; (+) strand; PAM type: NRG; PAM sequence: CAG
acgcagttcctcaccagcaa

SEQ ID NO: 131817 - DNA, 20 bp, Artificial Sequence
  Description of Artificial Sequence: Synthetic oligonucleotide
  Target: LAMA2; (+) strand; PAM type: NRG; PAM sequence: AAG
tcctcaccagcaacagaaca

SEQ ID NO: 131818 - DNA, 20 bp, Artificial Sequence
  Description of Artificial Sequence: Synthetic oligonucleotide
  Target: LAMA2; (+) strand; PAM type: NRG; PAM sequence: TGG
caccagcaacagaacaaagc

SEQ ID NO: 131819 - DNA, 20 bp, Artificial Sequence
  Description of Artificial Sequence: Synthetic oligonucleotide
  Target: LAMA2; (+) strand; PAM type: NRG; PAM sequence: TGG
agcaacagaacaaagctgga

SEQ ID NO: 131820 - DNA, 20 bp, Artificial Sequence
  Description of Artificial Sequence: Synthetic oligonucleotide
  Target: LAMA2; (+) strand; PAM type: NRG; PAM sequence: GAG
caacagaacaaagctggatg

SEQ ID NO: 131821 - DNA, 20 bp, Artificial Sequence
  Description of Artificial Sequence: Synthetic oligonucleotide
  Target: LAMA2; (+) strand; PAM type: NRG; PAM sequence: GAG
ggatggagaatgattttgac

SEQ ID NO: 131822 - DNA, 20 bp, Artificial Sequence
  Description of Artificial Sequence: Synthetic oligonucleotide
  Target: LAMA2; (+) strand; PAM type: NRG; PAM sequence: GAG
gagaatgattttgacgagct

SEQ ID NO: 131823 - DNA, 20 bp, Artificial Sequence
  Description of Artificial Sequence: Synthetic oligonucleotide
  Target: LAMA2; (+) strand; PAM type: NRG; PAM sequence: GAG
gaatgattttgacgagctga

SEQ ID NO: 131824 - DNA, 20 bp, Artificial Sequence
  Description of Artificial Sequence: Synthetic oligonucleotide
  Target: LAMA2; (+) strand; PAM type: NRG; PAM sequence: AAG
tgattttgacgagctgagag

SEQ ID NO: 131825 - DNA, 20 bp, Artificial Sequence
  Description of Artificial Sequence: Synthetic oligonucleotide
  Target: LAMA2; (+) strand; PAM type: NRG; PAM sequence: AAG
ttttgacgagctgagagaag

SEQ ID NO: 131826 - DNA, 20 bp, Artificial Sequence
  Description of Artificial Sequence: Synthetic oligonucleotide
  Target: LAMA2; (+) strand; PAM type: NRG; PAM sequence: AGG
tttgacgagctgagagaaga

SEQ ID NO: 131827 - DNA, 20 bp, Artificial Sequence
  Description of Artificial Sequence: Synthetic oligonucleotide
  Target: LAMA2; (+) strand; PAM type: NRG; PAM sequence: CAG
gagctgagagaagaaggctt

SEQ ID NO: 131828 - DNA, 20 bp, Artificial Sequence
  Description of Artificial Sequence: Synthetic oligonucleotide
  Target: LAMA2; (+) strand; PAM type: NRG; PAM sequence: GAG
tcagacgatcaaattactct

SEQ ID NO: 131829 - DNA, 20 bp, Artificial Sequence
  Description of Artificial Sequence: Synthetic oligonucleotide
  Target: LAMA2; (+) strand; PAM type: NRG; PAM sequence: CGG
gatcaaattactctgagcta

SEQ ID NO: 131830 - DNA, 20 bp, Artificial Sequence
  Description of Artificial Sequence: Synthetic oligonucleotide
  Target: LAMA2; (+) strand; PAM type: NRG; PAM sequence: GGG
atcaaattactctgagctac

SEQ ID NO: 131831 - DNA, 20 bp, Artificial Sequence
  Description of Artificial Sequence: Synthetic oligonucleotide
  Target: LAMA2; (+) strand; PAM type: NRG; PAM sequence: GAG
caaattactctgagctacgg

SEQ ID NO: 131832 - DNA, 20 bp, Artificial Sequence
  Description of Artificial Sequence: Synthetic oligonucleotide
  Target: LAMA2; (+) strand; PAM type: NRG; PAM sequence: AGG
aaattactctgagctacggg

SEQ ID NO: 131833 - DNA, 20 bp, Artificial Sequence
  Description of Artificial Sequence: Synthetic oligonucleotide
  Target: LAMA2; (+) strand; PAM type: NRG; PAM sequence: AAG
acgggaggacattcaaacca

SEQ ID NO: 131834 - DNA, 20 bp, Artificial Sequence
  Description of Artificial Sequence: Synthetic oligonucleotide
  Target: LAMA2; (+) strand; PAM type: NRG; PAM sequence: AGG
cgggaggacattcaaaccaa

SEQ ID NO: 131835 - DNA, 20 bp, Artificial Sequence
  Description of Artificial Sequence: Synthetic oligonucleotide
  Target: LAMA2; (+) strand; PAM type: NRG; PAM sequence: AAG
ggacattcaaaccaaaggca

SEQ ID NO: 131836 - DNA, 20 bp, Artificial Sequence
  Description of Artificial Sequence: Synthetic oligonucleotide
  Target: LAMA2; (+) strand; PAM type: NRG; PAM sequence: AAG
cattcaaaccaaaggcaaag

SEQ ID NO: 131837 - DNA, 20 bp, Artificial Sequence
  Description of Artificial Sequence: Synthetic oligonucleotide
  Target: LAMA2; (+) strand; PAM type: NRG; PAM sequence: TAG
tgaaaactttgaaaaaaatt

SEQ ID NO: 131838 - DNA, 20 bp, Artificial Sequence
  Description of Artificial Sequence: Synthetic oligonucleotide
  Target: LAMA2; (+) strand; PAM type: NRG; PAM sequence: AAG
aaactttgaaaaaaatttag

SEQ ID NO: 131839 - DNA, 20 bp, Artificial Sequence
  Description of Artificial Sequence: Synthetic oligonucleotide
  Target: LAMA2; (+) strand; PAM type: NRG; PAM sequence: TAG
aatttagaagaatgtataac

SEQ ID NO: 131840 - DNA, 20 bp, Artificial Sequence
  Description of Artificial Sequence: Synthetic oligonucleotide
  Target: LAMA2; (+) strand; PAM type: NRG; PAM sequence: CAG
tataactagaataaccaata

SEQ ID NO: 131841 - DNA, 20 bp, Artificial Sequence
  Description of Artificial Sequence: Synthetic oligonucleotide
  Target: LAMA2; (+) strand; PAM type: NRG; PAM sequence: GAG
taactagaataaccaataca

SEQ ID NO: 131842 - DNA, 20 bp, Artificial Sequence
  Description of Artificial Sequence: Synthetic oligonucleotide
  Target: LAMA2; (+) strand; PAM type: NRG; PAM sequence: AAG
ctagaataaccaatacagag

SEQ ID NO: 131843 - DNA, 20 bp, Artificial Sequence
  Description of Artificial Sequence: Synthetic oligonucleotide
  Target: LAMA2; (+) strand; PAM type: NRG; PAM sequence: AAG
ccaatacagagaagtgctta

SEQ ID NO: 131844 - DNA, 20 bp, Artificial Sequence
  Description of Artificial Sequence: Synthetic oligonucleotide
  Target: LAMA2; (+) strand; PAM type: NRG; PAM sequence: AGG
caatacagagaagtgcttaa

SEQ ID NO: 131845 - DNA, 20 bp, Artificial Sequence
  Description of Artificial Sequence: Synthetic oligonucleotide
  Target: LAMA2; (+) strand; PAM type: NRG; PAM sequence: GAG
atacagagaagtgcttaaag

SEQ ID NO: 131846 - DNA, 20 bp, Artificial Sequence
  Description of Artificial Sequence: Synthetic oligonucleotide
  Target: LAMA2; (+) strand; PAM type: NRG; PAM sequence: TGG
gaagtgcttaaaggagctga

SEQ ID NO: 131847 - DNA, 20 bp, Artificial Sequence
  Description of Artificial Sequence: Synthetic oligonucleotide
  Target: LAMA2; (+) strand; PAM type: NRG; PAM sequence: GAG
agtgcttaaaggagctgatg

SEQ ID NO: 131848 - DNA, 20 bp, Artificial Sequence
  Description of Artificial Sequence: Synthetic oligonucleotide
  Target: LAMA2; (+) strand; PAM type: NRG; PAM sequence: AAG
agctgatggagctgaaaacc

SEQ ID NO: 131849 - DNA, 20 bp, Artificial Sequence
  Description of Artificial Sequence: Synthetic oligonucleotide
  Target: LAMA2; (+) strand; PAM type: NRG; PAM sequence: AGG
gctgatggagctgaaaacca

SEQ ID NO: 131850 - DNA, 20 bp, Artificial Sequence
  Description of Artificial Sequence: Synthetic oligonucleotide
  Target: LAMA2; (+) strand; PAM type: NRG; PAM sequence: GAG
ggagctgaaaaccaaggctc

SEQ ID NO: 131851 - DNA, 20 bp, Artificial Sequence
  Description of Artificial Sequence: Synthetic oligonucleotide
  Target: LAMA2; (+) strand; PAM type: NRG; PAM sequence: AAG
caaggctcgagaactacgtg

SEQ ID NO: 131852 - DNA, 20 bp, Artificial Sequence
  Description of Artificial Sequence: Synthetic oligonucleotide
  Target: LAMA2; (+) strand; PAM type: NRG; PAM sequence: CAG
cgagaactacgtgaagaatg

SEQ ID NO: 131853 - DNA, 20 bp, Artificial Sequence
  Description of Artificial Sequence: Synthetic oligonucleotide
  Target: LAMA2; (+) strand; PAM type: NRG; PAM sequence: AAG
gaactacgtgaagaatgcag

SEQ ID NO: 131854 - DNA, 20 bp, Artificial Sequence
  Description of Artificial Sequence: Synthetic oligonucleotide
  Target: LAMA2; (+) strand; PAM type: NRG; PAM sequence: CAG
cgtgaagaatgcagaagcct

SEQ ID NO: 131855 - DNA, 20 bp, Artificial Sequence
  Description of Artificial Sequence: Synthetic oligonucleotide
  Target: LAMA2; (+) strand; PAM type: NRG; PAM sequence: AGG
gtgaagaatgcagaagcctc

SEQ ID NO: 131856 - DNA, 20 bp, Artificial Sequence
  Description of Artificial Sequence: Synthetic oligonucleotide
  Target: LAMA2; (+) strand; PAM type: NRG; PAM sequence: GAG
gaagaatgcagaagcctcag

SEQ ID NO: 131857 - DNA, 20 bp, Artificial Sequence
  Description of Artificial Sequence: Synthetic oligonucleotide
  Target: LAMA2; (+) strand; PAM type: NRG; PAM sequence: TGG
caggagccgatgcgatcaac

SEQ ID NO: 131858 - DNA, 20 bp, Artificial Sequence
  Description of Artificial Sequence: Synthetic oligonucleotide
  Target: LAMA2; (+) strand; PAM type: NRG; PAM sequence: AAG
gagccgatgcgatcaactgg

SEQ ID NO: 131859 - DNA, 20 bp, Artificial Sequence
  Description of Artificial Sequence: Synthetic oligonucleotide
  Target: LAMA2; (+) strand; PAM type: NRG; PAM sequence: AAG
cgatgcgatcaactggaaga

SEQ ID NO: 131860 - DNA, 20 bp, Artificial Sequence
  Description of Artificial Sequence: Synthetic oligonucleotide
  Target: LAMA2; (+) strand; PAM type: NRG; PAM sequence: AGG
gatgcgatcaactggaagaa

SEQ ID NO: 131861 - DNA, 20 bp, Artificial Sequence
  Description of Artificial Sequence: Synthetic oligonucleotide
  Target: LAMA2; (+) strand; PAM type: NRG; PAM sequence: GGG
atgcgatcaactggaagaaa

SEQ ID NO: 131862 - DNA, 20 bp, Artificial Sequence
  Description of Artificial Sequence: Synthetic oligonucleotide
  Target: LAMA2; (+) strand; PAM type: NRG; PAM sequence: CAG
tcaactggaagaaagggtat

SEQ ID NO: 131863 - DNA, 20 bp, Artificial Sequence
  Description of Artificial Sequence: Synthetic oligonucleotide
  Target: LAMA2; (+) strand; PAM type: NRG; PAM sequence: TGG
ggaagaaagggtatcagcaa

SEQ ID NO: 131864 - DNA, 20 bp, Artificial Sequence
  Description of Artificial Sequence: Synthetic oligonucleotide
  Target: LAMA2; (+) strand; PAM type: NRG; PAM sequence: AAG
agaaagggtatcagcaatgg

SEQ ID NO: 131865 - DNA, 20 bp, Artificial Sequence
  Description of Artificial Sequence: Synthetic oligonucleotide
  Target: LAMA2; (+) strand; PAM type: NRG; PAM sequence: AAG
aagatgaaatgaatgaaatg

SEQ ID NO: 131866 - DNA, 20 bp, Artificial Sequence
  Description of Artificial Sequence: Synthetic oligonucleotide
  Target: LAMA2; (+) strand; PAM type: NRG; PAM sequence: GAG
tgaaatgaatgaaatgaagc

SEQ ID NO: 131867 - DNA, 20 bp, Artificial Sequence
  Description of Artificial Sequence: Synthetic oligonucleotide
  Target: LAMA2; (+) strand; PAM type: NRG; PAM sequence: AAG
aatgaatgaaatgaagcgag

SEQ ID NO: 131868 - DNA, 20 bp, Artificial Sequence
  Description of Artificial Sequence: Synthetic oligonucleotide
  Target: LAMA2; (+) strand; PAM type: NRG; PAM sequence: AGG
atgaatgaaatgaagcgaga

SEQ ID NO: 131869 - DNA, 20 bp, Artificial Sequence
  Description of Artificial Sequence: Synthetic oligonucleotide
  Target: LAMA2; (+) strand; PAM type: NRG; PAM sequence: GGG
tgaatgaaatgaagcgagaa

SEQ ID NO: 131870 - DNA, 20 bp, Artificial Sequence
  Description of Artificial Sequence: Synthetic oligonucleotide
  Target: LAMA2; (+) strand; PAM type: NRG; PAM sequence: AAG
atgaaatgaagcgagaaggg

SEQ ID NO: 131871 - DNA, 20 bp, Artificial Sequence
  Description of Artificial Sequence: Synthetic oligonucleotide
  Target: LAMA2; (+) strand; PAM type: NRG; PAM sequence: TAG
atgaagcgagaagggaagtt

SEQ ID NO: 131872 - DNA, 20 bp, Artificial Sequence
  Description of Artificial Sequence: Synthetic oligonucleotide
  Target: LAMA2; (+) strand; PAM type: NRG; PAM sequence: GAG
gaagcgagaagggaagttta

SEQ ID NO: 131873 - DNA, 20 bp, Artificial Sequence
  Description of Artificial Sequence: Synthetic oligonucleotide
  Target: LAMA2; (+) strand; PAM type: NRG; PAM sequence: AAG
gaagggaagtttagagaaaa

SEQ ID NO: 131874 - DNA, 20 bp, Artificial Sequence
  Description of Artificial Sequence: Synthetic oligonucleotide
  Target: LAMA2; (+) strand; PAM type: NRG; PAM sequence: AAG
tttagagaaaaaagaataaa

SEQ ID NO: 131875 - DNA, 20 bp, Artificial Sequence
  Description of Artificial Sequence: Synthetic oligonucleotide
  Target: LAMA2; (+) strand; PAM type: NRG; PAM sequence: GAG
aaaaaagaataaaaagaaat

SEQ ID NO: 131876 - DNA, 20 bp, Artificial Sequence
  Description of Artificial Sequence: Synthetic oligonucleotide
  Target: LAMA2; (+) strand; PAM type: NRG; PAM sequence: AAG
agaataaaaagaaatgagca

SEQ ID NO: 131877 - DNA, 20 bp, Artificial Sequence
  Description of Artificial Sequence: Synthetic oligonucleotide
  Target: LAMA2; (+) strand; PAM type: NRG; PAM sequence: AAG
aagaaatgagcaaagcctcc

SEQ ID NO: 131878 - DNA, 20 bp, Artificial Sequence
  Description of Artificial Sequence: Synthetic oligonucleotide
  Target: LAMA2; (+) strand; PAM type: NRG; PAM sequence: TGG
agcaaagcctccaagaaata

SEQ ID NO: 131879 - DNA, 20 bp, Artificial Sequence
  Description of Artificial Sequence: Synthetic oligonucleotide
  Target: LAMA2; (+) strand; PAM type: NRG; PAM sequence: GGG
gcaaagcctccaagaaatat

SEQ ID NO: 131880 - DNA, 20 bp, Artificial Sequence
  Description of Artificial Sequence: Synthetic oligonucleotide
  Target: LAMA2; (+) strand; PAM type: NRG; PAM sequence: AAG
gaaatatgggactatgtgaa

SEQ ID NO: 131881 - DNA, 20 bp, Artificial Sequence
  Description of Artificial Sequence: Synthetic oligonucleotide
  Target: LAMA2; (+) strand; PAM type: NRG; PAM sequence: TGG
agaccaaatctacgtctgat

SEQ ID NO: 131882 - DNA, 20 bp, Artificial Sequence
  Description of Artificial Sequence: Synthetic oligonucleotide
  Target: LAMA2; (+) strand; PAM type: NRG; PAM sequence: AAG
cgtctgattggtgtacctga

SEQ ID NO: 131883 - DNA, 20 bp, Artificial Sequence
  Description of Artificial Sequence: Synthetic oligonucleotide
  Target: LAMA2; (+) strand; PAM type: NRG; PAM sequence: TGG
tggtgtacctgaaagtgatg

SEQ ID NO: 131884 - DNA, 20 bp, Artificial Sequence
  Description of Artificial Sequence: Synthetic oligonucleotide
  Target: LAMA2; (+) strand; PAM type: NRG; PAM sequence: GAG
gtgtacctgaaagtgatgtg

SEQ ID NO: 131885 - DNA, 20 bp, Artificial Sequence
  Description of Artificial Sequence: Synthetic oligonucleotide
  Target: LAMA2; (+) strand; PAM type: NRG; PAM sequence: AAG
gtgatgtggagaatgaaacc

SEQ ID NO: 131886 - DNA, 20 bp, Artificial Sequence
  Description of Artificial Sequence: Synthetic oligonucleotide
  Target: LAMA2; (+) strand; PAM type: NRG; PAM sequence: TGG
tgtggagaatgaaaccaagt

SEQ ID NO: 131887 - DNA, 20 bp, Artificial Sequence
  Description of Artificial Sequence: Synthetic oligonucleotide
  Target: LAMA2; (+) strand; PAM type: NRG; PAM sequence: CAG
ccaagttggaaaacactctg

SEQ ID NO: 131888 - DNA, 20 bp, Artificial Sequence
  Description of Artificial Sequence: Synthetic oligonucleotide
  Target: LAMA2; (+) strand; PAM type: NRG; PAM sequence: AGG
caagttggaaaacactctgc

SEQ ID NO: 131889 - DNA, 20 bp, Artificial Sequence
  Description of Artificial Sequence: Synthetic oligonucleotide
  Target: LAMA2; (+) strand; PAM type: NRG; PAM sequence: CAG
acactctgcaggatattatc

SEQ ID NO: 131890 - DNA, 20 bp, Artificial Sequence
  Description of Artificial Sequence: Synthetic oligonucleotide
  Target: LAMA2; (+) strand; PAM type: NRG; PAM sequence: AGG
cactctgcaggatattatcc

SEQ ID NO: 131891 - DNA, 20 bp, Artificial Sequence
  Description of Artificial Sequence: Synthetic oligonucleotide
  Target: LAMA2; (+) strand; PAM type: NRG; PAM sequence: GAG
ctctgcaggatattatccag

SEQ ID NO: 131892 - DNA, 20 bp, Artificial Sequence
  Description of Artificial Sequence: Synthetic oligonucleotide
  Target: LAMA2; (+) strand; PAM type: NRG; PAM sequence: TAG
ccaggagaacttccccaatc

SEQ ID NO: 131893 - DNA, 20 bp, Artificial Sequence
  Description of Artificial Sequence: Synthetic oligonucleotide
  Target: LAMA2; (+) strand; PAM type: NRG; PAM sequence: AAG
gagaacttccccaatctagc

SEQ ID NO: 131894 - DNA, 20 bp, Artificial Sequence
  Description of Artificial Sequence: Synthetic oligonucleotide
  Target: LAMA2; (+) strand; PAM type: NRG; PAM sequence: AGG
agaacttccccaatctagca

SEQ ID NO: 131895 - DNA, 20 bp, Artificial Sequence
  Description of Artificial Sequence: Synthetic oligonucleotide
  Target: LAMA2; (+) strand; PAM type: NRG; PAM sequence: CAG
acttccccaatctagcaagg

SEQ ID NO: 131896 - DNA, 20 bp, Artificial Sequence
  Description of Artificial Sequence: Synthetic oligonucleotide
  Target: LAMA2; (+) strand; PAM type: NRG; PAM sequence: AGG
cttccccaatctagcaaggc

SEQ ID NO: 131897 - DNA, 20 bp, Artificial Sequence
  Description of Artificial Sequence: Synthetic oligonucleotide
  Target: LAMA2; (+) strand; PAM type: NRG; PAM sequence: CAG
tagcaaggcaggccaacgtt

SEQ ID NO: 131898 - DNA, 20 bp, Artificial Sequence
  Description of Artificial Sequence: Synthetic oligonucleotide
  Target: LAMA2; (+) strand; PAM type: NRG; PAM sequence: CAG
ggcaggccaacgttcagatt

SEQ ID NO: 131899 - DNA, 20 bp, Artificial Sequence
  Description of Artificial Sequence: Synthetic oligonucleotide
  Target: LAMA2; (+) strand; PAM type: NRG; PAM sequence: AGG
gcaggccaacgttcagattc

SEQ ID NO: 131900 - DNA, 20 bp, Artificial Sequence
  Description of Artificial Sequence: Synthetic oligonucleotide
  Target: LAMA2; (+) strand; PAM type: NRG; PAM sequence: CAG
acgttcagattcaggaaata

SEQ ID NO: 131901 - DNA, 20 bp, Artificial Sequence
  Description of Artificial Sequence: Synthetic oligonucleotide
  Target: LAMA2; (+) strand; PAM type: NRG; PAM sequence: GAG
gttcagattcaggaaataca

SEQ ID NO: 131902 - DNA, 20 bp, Artificial Sequence
  Description of Artificial Sequence: Synthetic oligonucleotide
  Target: LAMA2; (+) strand; PAM type: NRG; PAM sequence: AAG
gaaatacagagaacgccaca

SEQ ID NO: 131903 - DNA, 20 bp, Artificial Sequence
  Description of Artificial Sequence: Synthetic oligonucleotide
  Target: LAMA2; (+) strand; PAM type: NRG; PAM sequence: GAG
acgccacaaagatactcctc

SEQ ID NO: 131904 - DNA, 20 bp, Artificial Sequence
  Description of Artificial Sequence: Synthetic oligonucleotide
  Target: LAMA2; (+) strand; PAM type: NRG; PAM sequence: AAG
ccacaaagatactcctcgag

SEQ ID NO: 131905 - DNA, 20 bp, Artificial Sequence
  Description of Artificial Sequence: Synthetic oligonucleotide
  Target: LAMA2; (+) strand; PAM type: NRG; PAM sequence: GAG
acaaagatactcctcgagaa

SEQ ID NO: 131906 - DNA, 20 bp, Artificial Sequence
  Description of Artificial Sequence: Synthetic oligonucleotide
  Target: LAMA2; (+) strand; PAM type: NRG; PAM sequence: AAG
tcctcgagaagagcaactcc

SEQ ID NO: 131907 - DNA, 20 bp, Artificial Sequence
  Description of Artificial Sequence: Synthetic oligonucleotide
  Target: LAMA2; (+) strand; PAM type: NRG; PAM sequence: CAG
actccaagacacataattgt

SEQ ID NO: 131908 - DNA, 20 bp, Artificial Sequence
  Description of Artificial Sequence: Synthetic oligonucleotide
  Target: LAMA2; (+) strand; PAM type: NRG; PAM sequence: AAG
cataattgtcagattcacca

SEQ ID NO: 131909 - DNA, 20 bp, Artificial Sequence
  Description of Artificial Sequence: Synthetic oligonucleotide
  Target: LAMA2; (+) strand; PAM type: NRG; PAM sequence: AAG
gattcaccaaagttgaaatg

SEQ ID NO: 131910 - DNA, 20 bp, Artificial Sequence
  Description of Artificial Sequence: Synthetic oligonucleotide
  Target: LAMA2; (+) strand; PAM type: NRG; PAM sequence: AGG
attcaccaaagttgaaatga

SEQ ID NO: 131911 - DNA, 20 bp, Artificial Sequence
  Description of Artificial Sequence: Synthetic oligonucleotide
  Target: LAMA2; (+) strand; PAM type: NRG; PAM sequence: AAG
gaaatgaaggaaaaaatgtt

SEQ ID NO: 131912 - DNA, 20 bp, Artificial Sequence
  Description of Artificial Sequence: Synthetic oligonucleotide
  Target: LAMA2; (+) strand; PAM type: NRG; PAM sequence: AGG
aaatgaaggaaaaaatgtta

SEQ ID NO: 131913 - DNA, 20 bp, Artificial Sequence
  Description of Artificial Sequence: Synthetic oligonucleotide
  Target: LAMA2; (+) strand; PAM type: NRG; PAM sequence: GGG
aatgaaggaaaaaatgttaa

SEQ ID NO: 131914 - DNA, 20 bp, Artificial Sequence
  Description of Artificial Sequence: Synthetic oligonucleotide
  Target: LAMA2; (+) strand; PAM type: NRG; PAM sequence: CAG
gaaggaaaaaatgttaaggg

SEQ ID NO: 131915 - DNA, 20 bp, Artificial Sequence
  Description of Artificial Sequence: Synthetic oligonucleotide
  Target: LAMA2; (+) strand; PAM type: NRG; PAM sequence: CAG
gaaaaaatgttaagggcagc

SEQ ID NO: 131916 - DNA, 20 bp, Artificial Sequence
  Description of Artificial Sequence: Synthetic oligonucleotide
  Target: LAMA2; (+) strand; PAM type: NRG; PAM sequence: GAG
aaaaatgttaagggcagcca

SEQ ID NO: 131917 - DNA, 20 bp, Artificial Sequence
  Description of Artificial Sequence: Synthetic oligonucleotide
  Target: LAMA2; (+) strand; PAM type: NRG; PAM sequence: GAG
aaatgttaagggcagccaga

SEQ ID NO: 131918 - DNA, 20 bp, Artificial Sequence
  Description of Artificial Sequence: Synthetic oligonucleotide
  Target: LAMA2; (+) strand; PAM type: NRG; PAM sequence: AAG
gttaagggcagccagagaga

SEQ ID NO: 131919 - DNA, 20 bp, Artificial Sequence
  Description of Artificial Sequence: Synthetic oligonucleotide
  Target: LAMA2; (+) strand; PAM type: NRG; PAM sequence: AGG
ttaagggcagccagagagaa

SEQ ID NO: 131920 - DNA, 20 bp, Artificial Sequence
  Description of Artificial Sequence: Synthetic oligonucleotide
  Target: LAMA2; (+) strand; PAM type: NRG; PAM sequence: CGG
gggcagccagagagaaaggt

SEQ ID NO: 131921 - DNA, 20 bp, Artificial Sequence
  Description of Artificial Sequence: Synthetic oligonucleotide
  Target: LAMA2; (+) strand; PAM type: NRG; PAM sequence: GGG
ggcagccagagagaaaggtc

SEQ ID NO: 131922 - DNA, 20 bp, Artificial Sequence
  Description of Artificial Sequence: Synthetic oligonucleotide
  Target: LAMA2; (+) strand; PAM type: NRG; PAM sequence: AAG
gaaaggtcgggttaccctca

SEQ ID NO: 131923 - DNA, 20 bp, Artificial Sequence
  Description of Artificial Sequence: Synthetic oligonucleotide
  Target: LAMA2; (+) strand; PAM type: NRG; PAM sequence: AGG
aaaggtcgggttaccctcaa

SEQ ID NO: 131924 - DNA, 20 bp, Artificial Sequence
  Description of Artificial Sequence: Synthetic oligonucleotide
  Target: LAMA2; (+) strand; PAM type: NRG; PAM sequence: AAG
gtcgggttaccctcaaagga

SEQ ID NO: 131925 - DNA, 20 bp, Artificial Sequence
  Description of Artificial Sequence: Synthetic oligonucleotide
  Target: LAMA2; (+) strand; PAM type: NRG; PAM sequence: CAG
accctcaaaggaaagcccat

SEQ ID NO: 131926 - DNA, 20 bp, Artificial Sequence
  Description of Artificial Sequence: Synthetic oligonucleotide
  Target: LAMA2; (+) strand; PAM type: NRG; PAM sequence: CAG
aggaaagcccatcagactaa

SEQ ID NO: 131927 - DNA, 20 bp, Artificial Sequence
  Description of Artificial Sequence: Synthetic oligonucleotide
  Target: LAMA2; (+) strand; PAM type: NRG; PAM sequence: CGG
aaagcccatcagactaacag

SEQ ID NO: 131928 - DNA, 20 bp, Artificial Sequence
  Description of Artificial Sequence: Synthetic oligonucleotide
  Target: LAMA2; (+) strand; PAM type: NRG; PAM sequence: CGG
cagactaacagcggatctct

SEQ ID NO: 131929 - DNA, 20 bp, Artificial Sequence
  Description of Artificial Sequence: Synthetic oligonucleotide
  Target: LAMA2; (+) strand; PAM type: NRG; PAM sequence: CAG
actaacagcggatctctcgg

SEQ ID NO: 131930 - DNA, 20 bp, Artificial Sequence
  Description of Artificial Sequence: Synthetic oligonucleotide
  Target: LAMA2; (+) strand; PAM type: NRG; PAM sequence: AAG
tctctcggcagaaaccctac

SEQ ID NO: 131931 - DNA, 20 bp, Artificial Sequence
  Description of Artificial Sequence: Synthetic oligonucleotide
  Target: LAMA2; (+) strand; PAM type: NRG; PAM sequence: CAG
tcggcagaaaccctacaagc

SEQ ID NO: 131932 - DNA, 20 bp, Artificial Sequence
  Description of Artificial Sequence: Synthetic oligonucleotide
  Target: LAMA2; (+) strand; PAM type: NRG; PAM sequence: AAG
gcagaaaccctacaagccag

SEQ ID NO: 131933 - DNA, 20 bp, Artificial Sequence
  Description of Artificial Sequence: Synthetic oligonucleotide
  Target: LAMA2; (+) strand; PAM type: NRG; PAM sequence: GAG
agaaaccctacaagccagaa

SEQ ID NO: 131934 - DNA, 20 bp, Artificial Sequence
  Description of Artificial Sequence: Synthetic oligonucleotide
  Target: LAMA2; (+) strand; PAM type: NRG; PAM sequence: GAG
aaaccctacaagccagaaga

SEQ ID NO: 131935 - DNA, 20 bp, Artificial Sequence
  Description of Artificial Sequence: Synthetic oligonucleotide
  Target: LAMA2; (+) strand; PAM type: NRG; PAM sequence: TGG
ccctacaagccagaagagag

SEQ ID NO: 131936 - DNA, 20 bp, Artificial Sequence
  Description of Artificial Sequence: Synthetic oligonucleotide
  Target: LAMA2; (+) strand; PAM type: NRG; PAM sequence: GGG
cctacaagccagaagagagt

SEQ ID NO: 131937 - DNA, 20 bp, Artificial Sequence
  Description of Artificial Sequence: Synthetic oligonucleotide
  Target: LAMA2; (+) strand; PAM type: NRG; PAM sequence: GGG
ctacaagccagaagagagtg

SEQ ID NO: 131938 - DNA, 20 bp, Artificial Sequence
  Description of Artificial Sequence: Synthetic oligonucleotide
  Target: LAMA2; (+) strand; PAM type: NRG; PAM sequence: GGG
tacaagccagaagagagtgg

SEQ ID NO: 131939 - DNA, 20 bp, Artificial Sequence
  Description of Artificial Sequence: Synthetic oligonucleotide
  Target: LAMA2; (+) strand; PAM type: NRG; PAM sequence: AAG
gccaatattcaacattctta

SEQ ID NO: 131940 - DNA, 20 bp, Artificial Sequence
  Description of Artificial Sequence: Synthetic oligonucleotide
  Target: LAMA2; (+) strand; PAM type: NRG; PAM sequence: AAG
tattcaacattcttaaagaa

SEQ ID NO: 131941 - DNA, 20 bp, Artificial Sequence
  Description of Artificial Sequence: Synthetic oligonucleotide
  Target: LAMA2; (+) strand; PAM type: NRG; PAM sequence: CAG
aaagaaaagaattttcaacc

SEQ ID NO: 131942 - DNA, 20 bp, Artificial Sequence
  Description of Artificial Sequence: Synthetic oligonucleotide
  Target: LAMA2; (+) strand; PAM type: NRG; PAM sequence: CAG
tcaacccagaatttcatatc

SEQ ID NO: 131943 - DNA, 20 bp, Artificial Sequence
  Description of Artificial Sequence: Synthetic oligonucleotide
  Target: LAMA2; (+) strand; PAM type: NRG; PAM sequence: AAG
atttcatatccagccaaact

SEQ ID NO: 131944 - DNA, 20 bp, Artificial Sequence
  Description of Artificial Sequence: Synthetic oligonucleotide
  Target: LAMA2; (+) strand; PAM type: NRG; PAM sequence: AAG
ccagccaaactaagcttcat

SEQ ID NO: 131945 - DNA, 20 bp, Artificial Sequence
  Description of Artificial Sequence: Synthetic oligonucleotide
  Target: LAMA2; (+) strand; PAM type: NRG; PAM sequence: AAG
caaactaagcttcataagtg

SEQ ID NO: 131946 - DNA, 20 bp, Artificial Sequence
  Description of Artificial Sequence: Synthetic oligonucleotide
  Target: LAMA2; (+) strand; PAM type: NRG; PAM sequence: AGG
aaactaagcttcataagtga

SEQ ID NO: 131947 - DNA, 20 bp, Artificial Sequence
  Description of Artificial Sequence: Synthetic oligonucleotide
  Target: LAMA2; (+) strand; PAM type: NRG; PAM sequence: GAG
actaagcttcataagtgaag

SEQ ID NO: 131948 - DNA, 20 bp, Artificial Sequence
  Description of Artificial Sequence: Synthetic oligonucleotide
  Target: LAMA2; (+) strand; PAM type: NRG; PAM sequence: TAG
aggagaaataaaatacttta

SEQ ID NO: 131949 - DNA, 20 bp, Artificial Sequence
  Description of Artificial Sequence: Synthetic oligonucleotide
  Target: LAMA2; (+) strand; PAM type: NRG; PAM sequence: AAG
aaataaaatactttatagac

SEQ ID NO: 131950 - DNA, 20 bp, Artificial Sequence
  Description of Artificial Sequence: Synthetic oligonucleotide
  Target: LAMA2; (+) strand; PAM type: NRG; PAM sequence: GAG
tttatagacaagcaaatgtt

SEQ ID NO: 131951 - DNA, 20 bp, Artificial Sequence
  Description of Artificial Sequence: Synthetic oligonucleotide
  Target: LAMA2; (+) strand; PAM type: NRG; PAM sequence: GAG
tatagacaagcaaatgttga

SEQ ID NO: 131952 - DNA, 20 bp, Artificial Sequence
  Description of Artificial Sequence: Synthetic oligonucleotide
  Target: LAMA2; (+) strand; PAM type: NRG; PAM sequence: CAG
ttgagagattttgtcaccac

SEQ ID NO: 131953 - DNA, 20 bp, Artificial Sequence
  Description of Artificial Sequence: Synthetic oligonucleotide
  Target: LAMA2; (+) strand; PAM type: NRG; PAM sequence: AGG
tgagagattttgtcaccacc

SEQ ID NO: 131954 - DNA, 20 bp, Artificial Sequence
  Description of Artificial Sequence: Synthetic oligonucleotide
  Target: LAMA2; (+) strand; PAM type: NRG; PAM sequence: AAG
caccaccaggcctgccctaa

SEQ ID NO: 131955 - DNA, 20 bp, Artificial Sequence
  Description of Artificial Sequence: Synthetic oligonucleotide
  Target: LAMA2; (+) strand; PAM type: NRG; PAM sequence: GAG
ccaccaggcctgccctaaaa

SEQ ID NO: 131956 - DNA, 20 bp, Artificial Sequence
  Description of Artificial Sequence: Synthetic oligonucleotide
  Target: LAMA2; (+) strand; PAM type: NRG; PAM sequence: AAG
ctgccctaaaagagctcctg

SEQ ID NO: 131957 - DNA, 20 bp, Artificial Sequence
  Description of Artificial Sequence: Synthetic oligonucleotide
  Target: LAMA2; (+) strand; PAM type: NRG; PAM sequence: AGG
tgccctaaaagagctcctga

SEQ ID NO: 131958 - DNA, 20 bp, Artificial Sequence
  Description of Artificial Sequence: Synthetic oligonucleotide
  Target: LAMA2; (+) strand; PAM type: NRG; PAM sequence: AAG
cctaaaagagctcctgaagg

SEQ ID NO: 131959 - DNA, 20 bp, Artificial Sequence
  Description of Artificial Sequence: Synthetic oligonucleotide
  Target: LAMA2; (+) strand; PAM type: NRG; PAM sequence: TGG
cctgaaggaagcgctaaaca

SEQ ID NO: 131960 - DNA, 20 bp, Artificial Sequence
  Description of Artificial Sequence: Synthetic oligonucleotide
  Target: LAMA2; (+) strand; PAM type: NRG; PAM sequence: AAG
aaggaagcgctaaacatgga

SEQ ID NO: 131961 - DNA, 20 bp, Artificial Sequence
  Description of Artificial Sequence: Synthetic oligonucleotide
  Target: LAMA2; (+) strand; PAM type: NRG; PAM sequence: AGG
aggaagcgctaaacatggaa

SEQ ID NO: 131962 - DNA, 20 bp, Artificial Sequence
  Description of Artificial Sequence: Synthetic oligonucleotide
  Target: LAMA2; (+) strand; PAM type: NRG; PAM sequence: CGG
taaacatggaaaggaacaac

SEQ ID NO: 131963 - DNA, 20 bp, Artificial Sequence
  Description of Artificial Sequence: Synthetic oligonucleotide
  Target: LAMA2; (+) strand; PAM type: NRG; PAM sequence: CAG
tggaaaggaacaaccggtac

SEQ ID NO: 131964 - DNA, 20 bp, Artificial Sequence
  Description of Artificial Sequence: Synthetic oligonucleotide
  Target: LAMA2; (+) strand; PAM type: NRG; PAM sequence: AAG
caaaatcatgccaaaatgta

SEQ ID NO: 131965 - DNA, 20 bp, Artificial Sequence
  Description of Artificial Sequence: Synthetic oligonucleotide
  Target: LAMA2; (+) strand; PAM type: NRG; PAM sequence: GAG
gccaaaatgtaaagaccatc

SEQ ID NO: 131966 - DNA, 20 bp, Artificial Sequence
  Description of Artificial Sequence: Synthetic oligonucleotide
  Target: LAMA2; (+) strand; PAM type: NRG; PAM sequence: TAG
aatgtaaagaccatcgagac

SEQ ID NO: 131967 - DNA, 20 bp, Artificial Sequence
  Description of Artificial Sequence: Synthetic oligonucleotide
  Target: LAMA2; (+) strand; PAM type: NRG; PAM sequence: AGG
atgtaaagaccatcgagact

SEQ ID NO: 131968 - DNA, 20 bp, Artificial Sequence
  Description of Artificial Sequence: Synthetic oligonucleotide
  Target: LAMA2; (+) strand; PAM type: NRG; PAM sequence: AAG
taaagaccatcgagactagg

SEQ ID NO: 131969 - DNA, 20 bp, Artificial Sequence
  Description of Artificial Sequence: Synthetic oligonucleotide
  Target: LAMA2; (+) strand; PAM type: NRG; PAM sequence: GAG
aagaaactgcatcaactaat

SEQ ID NO: 131970 - DNA, 20 bp, Artificial Sequence
  Description of Artificial Sequence: Synthetic oligonucleotide
  Target: LAMA2; (+) strand; PAM type: NRG; PAM sequence: CAG
caactaatgagcaaaatcac

SEQ ID NO: 131971 - DNA, 20 bp, Artificial Sequence
  Description of Artificial Sequence: Synthetic oligonucleotide
  Target: LAMA2; (+) strand; PAM type: NRG; PAM sequence: CAG
accagctaacatcatcatga

SEQ ID NO: 131972 - DNA, 20 bp, Artificial Sequence
  Description of Artificial Sequence: Synthetic oligonucleotide
  Target: LAMA2; (+) strand; PAM type: NRG; PAM sequence: AGG
ccagctaacatcatcatgac

SEQ ID NO: 131973 - DNA, 20 bp, Artificial Sequence
  Description of Artificial Sequence: Synthetic oligonucleotide
  Target: LAMA2; (+) strand; PAM type: NRG; PAM sequence: TGG
atattaactttaaatataaa

SEQ ID NO: 131974 - DNA, 20 bp, Artificial Sequence
  Description of Artificial Sequence: Synthetic oligonucleotide
  Target: LAMA2; (+) strand; PAM type: NRG; PAM sequence: AAG
ggactaaattctgcaattaa

SEQ ID NO: 131975 - DNA, 20 bp, Artificial Sequence
  Description of Artificial Sequence: Synthetic oligonucleotide
  Target: LAMA2; (+) strand; PAM type: NRG; PAM sequence: TGG
tgcaattaaaagacacaaac

SEQ ID NO: 131976 - DNA, 20 bp, Artificial Sequence
  Description of Artificial Sequence: Synthetic oligonucleotide
  Target: LAMA2; (+) strand; PAM type: NRG; PAM sequence: AAG
attaaaagacacaaactggc

SEQ ID NO: 131977 - DNA, 20 bp, Artificial Sequence
  Description of Artificial Sequence: Synthetic oligonucleotide
  Target: LAMA2; (+) strand; PAM type: NRG; PAM sequence: TGG
aaagacacaaactggcaagt

SEQ ID NO: 131978 - DNA, 20 bp, Artificial Sequence
  Description of Artificial Sequence: Synthetic oligonucleotide
  Target: LAMA2; (+) strand; PAM type: NRG; PAM sequence: AAG
acaaactggcaagttggata

SEQ ID NO: 131979 - DNA, 20 bp, Artificial Sequence
  Description of Artificial Sequence: Synthetic oligonucleotide
  Target: LAMA2; (+) strand; PAM type: NRG; PAM sequence: GAG
aaactggcaagttggataaa

SEQ ID NO: 131980 - DNA, 20 bp, Artificial Sequence
  Description of Artificial Sequence: Synthetic oligonucleotide
  Target: LAMA2; (+) strand; PAM type: NRG; PAM sequence: AAG
ggcaagttggataaagagtc

SEQ ID NO: 131981 - DNA, 20 bp, Artificial Sequence
  Description of Artificial Sequence: Synthetic oligonucleotide
  Target: LAMA2; (+) strand; PAM type: NRG; PAM sequence: CAG
gataaagagtcaagacccat

SEQ ID NO: 131982 - DNA, 20 bp, Artificial Sequence
  Description of Artificial Sequence: Synthetic oligonucleotide
  Target: LAMA2; (+) strand; PAM type: NRG; PAM sequence: CAG
acccatcagtgtgctgtatt

SEQ ID NO: 131983 - DNA, 20 bp, Artificial Sequence
  Description of Artificial Sequence: Synthetic oligonucleotide
  Target: LAMA2; (+) strand; PAM type: NRG; PAM sequence: AGG
cccatcagtgtgctgtattc

SEQ ID NO: 131984 - DNA, 20 bp, Artificial Sequence
  Description of Artificial Sequence: Synthetic oligonucleotide
  Target: LAMA2; (+) strand; PAM type: NRG; PAM sequence: CAG
caggaaacccatctcacgtg

SEQ ID NO: 131985 - DNA, 20 bp, Artificial Sequence
  Description of Artificial Sequence: Synthetic oligonucleotide
  Target: LAMA2; (+) strand; PAM type: NRG; PAM sequence: GAG
ggaaacccatctcacgtgca

SEQ ID NO: 131986 - DNA, 20 bp, Artificial Sequence
  Description of Artificial Sequence: Synthetic oligonucleotide
  Target: LAMA2; (+) strand; PAM type: NRG; PAM sequence: TAG
ctcacgtgcagagacacaca

SEQ ID NO: 131987 - DNA, 20 bp, Artificial Sequence
  Description of Artificial Sequence: Synthetic oligonucleotide
  Target: LAMA2; (+) strand; PAM type: NRG; PAM sequence: AGG
tcacgtgcagagacacacat

SEQ ID NO: 131988 - DNA, 20 bp, Artificial Sequence
  Description of Artificial Sequence: Synthetic oligonucleotide
  Target: LAMA2; (+) strand; PAM type: NRG; PAM sequence: AAG
cacacataggctcaaaataa

SEQ ID NO: 131989 - DNA, 20 bp, Artificial Sequence
  Description of Artificial Sequence: Synthetic oligonucleotide
  Target: LAMA2; (+) strand; PAM type: NRG; PAM sequence: AGG
acacataggctcaaaataaa

SEQ ID NO: 131990 - DNA, 20 bp, Artificial Sequence
  Description of Artificial Sequence: Synthetic oligonucleotide
  Target: LAMA2; (+) strand; PAM type: NRG; PAM sequence: TGG
ataggctcaaaataaaagga

SEQ ID NO: 131991 - DNA, 20 bp, Artificial Sequence
  Description of Artificial Sequence: Synthetic oligonucleotide
  Target: LAMA2; (+) strand; PAM type: NRG; PAM sequence: GAG
aggctcaaaataaaaggatg

SEQ ID NO: 131992 - DNA, 20 bp, Artificial Sequence
  Description of Artificial Sequence: Synthetic oligonucleotide
  Target: LAMA2; (+) strand; PAM type: NRG; PAM sequence: AGG
ggctcaaaataaaaggatgg

SEQ ID NO: 131993 - DNA, 20 bp, Artificial Sequence
  Description of Artificial Sequence: Synthetic oligonucleotide
  Target: LAMA2; (+) strand; PAM type: NRG; PAM sequence: AAG
tcaaaataaaaggatggagg

SEQ ID NO: 131994 - DNA, 20 bp, Artificial Sequence
  Description of Artificial Sequence: Synthetic oligonucleotide
  Target: LAMA2; (+) strand; PAM type: NRG; PAM sequence: AAG
aggatggaggaagatctacc

SEQ ID NO: 131995 - DNA, 20 bp, Artificial Sequence
  Description of Artificial Sequence: Synthetic oligonucleotide
  Target: LAMA2; (+) strand; PAM type: NRG; PAM sequence: TGG
aggaagatctaccaagccaa

SEQ ID NO: 131996 - DNA, 20 bp, Artificial Sequence
  Description of Artificial Sequence: Synthetic oligonucleotide
  Target: LAMA2; (+) strand; PAM type: NRG; PAM sequence: AAG
aagccaatggaaaacaaaaa

SEQ ID NO: 131997 - DNA, 20 bp, Artificial Sequence
  Description of Artificial Sequence: Synthetic oligonucleotide
  Target: LAMA2; (+) strand; PAM type: NRG; PAM sequence: AGG
agccaatggaaaacaaaaaa

SEQ ID NO: 131998 - DNA, 20 bp, Artificial Sequence
  Description of Artificial Sequence: Synthetic oligonucleotide
  Target: LAMA2; (+) strand; PAM type: NRG; PAM sequence: CAG
caatggaaaacaaaaaaagg

SEQ ID NO: 131999 - DNA, 20 bp, Artificial Sequence
  Description of Artificial Sequence: Synthetic oligonucleotide
  Target: LAMA2; (+) strand; PAM type: NRG; PAM sequence: AGG
aatggaaaacaaaaaaaggc

SEQ ID NO: 132000 - DNA, 20 bp, Artificial Sequence
  Description of Artificial Sequence: Synthetic oligonucleotide
  Target: LAMA2; (+) strand; PAM type: NRG; PAM sequence: GGG
atggaaaacaaaaaaaggca

SEQ ID NO: 132001 - DNA, 20 bp, Artificial Sequence
  Description of Artificial Sequence: Synthetic oligonucleotide
  Target: LAMA2; (+) strand; PAM type: NRG; PAM sequence: GGG
tggaaaacaaaaaaaggcag

SEQ ID NO: 132002 - DNA, 20 bp, Artificial Sequence
  Description of Artificial Sequence: Synthetic oligonucleotide
  Target: LAMA2; (+) strand; PAM type: NRG; PAM sequence: TAG
aaaggcaggggttgcaatcc

SEQ ID NO: 132003 - DNA, 20 bp, Artificial Sequence
  Description of Artificial Sequence: Synthetic oligonucleotide
  Target: LAMA2; (+) strand; PAM type: NRG; PAM sequence: CAG
aatcctagtctctgacaaaa

SEQ ID NO: 132004 - DNA, 20 bp, Artificial Sequence
  Description of Artificial Sequence: Synthetic oligonucleotide
  Target: LAMA2; (+) strand; PAM type: NRG; PAM sequence: AAG
aaacagactttaaaccaaca

SEQ ID NO: 132005 - DNA, 20 bp, Artificial Sequence
  Description of Artificial Sequence: Synthetic oligonucleotide
  Target: LAMA2; (+) strand; PAM type: NRG; PAM sequence: AAG
tttaaaccaacaaagatcaa

SEQ ID NO: 132006 - DNA, 20 bp, Artificial Sequence
  Description of Artificial Sequence: Synthetic oligonucleotide
  Target: LAMA2; (+) strand; PAM type: NRG; PAM sequence: GAG
taaaccaacaaagatcaaaa

SEQ ID NO: 132007 - DNA, 20 bp, Artificial Sequence
  Description of Artificial Sequence: Synthetic oligonucleotide
  Target: LAMA2; (+) strand; PAM type: NRG; PAM sequence: AAG
aacaaagatcaaaagagaca

SEQ ID NO: 132008 - DNA, 20 bp, Artificial Sequence
  Description of Artificial Sequence: Synthetic oligonucleotide
  Target: LAMA2; (+) strand; PAM type: NRG; PAM sequence: AAG
aaagatcaaaagagacaaag

SEQ ID NO: 132009 - DNA, 20 bp, Artificial Sequence
  Description of Artificial Sequence: Synthetic oligonucleotide
  Target: LAMA2; (+) strand; PAM type: NRG; PAM sequence: AGG
aagatcaaaagagacaaaga

SEQ ID NO: 132010 - DNA, 20 bp, Artificial Sequence
  Description of Artificial Sequence: Synthetic oligonucleotide
  Target: LAMA2; (+) strand; PAM type: NRG; PAM sequence: TGG
caaagaaggccattacataa

SEQ ID NO: 132011 - DNA, 20 bp, Artificial Sequence
  Description of Artificial Sequence: Synthetic oligonucleotide
  Target: LAMA2; (+) strand; PAM type: NRG; PAM sequence: AAG
aaggccattacataatggta

SEQ ID NO: 132012 - DNA, 20 bp, Artificial Sequence
  Description of Artificial Sequence: Synthetic oligonucleotide
  Target: LAMA2; (+) strand; PAM type: NRG; PAM sequence: AGG
aggccattacataatggtaa

SEQ ID NO: 132013 - DNA, 20 bp, Artificial Sequence
  Description of Artificial Sequence: Synthetic oligonucleotide
  Target: LAMA2; (+) strand; PAM type: NRG; PAM sequence: GGG
ggccattacataatggtaaa

SEQ ID NO: 132014 - DNA, 20 bp, Artificial Sequence
  Description of Artificial Sequence: Synthetic oligonucleotide
  Target: LAMA2; (+) strand; PAM type: NRG; PAM sequence: AAG
ggtaaagggatcaattcaac

SEQ ID NO: 132015 - DNA, 20 bp, Artificial Sequence
  Description of Artificial Sequence: Synthetic oligonucleotide
  Target: LAMA2; (+) strand; PAM type: NRG; PAM sequence: GAG
taaagggatcaattcaacaa

SEQ ID NO: 132016 - DNA, 20 bp, Artificial Sequence
  Description of Artificial Sequence: Synthetic oligonucleotide
  Target: LAMA2; (+) strand; PAM type: NRG; PAM sequence: AGG
aaagggatcaattcaacaag

SEQ ID NO: 132017 - DNA, 20 bp, Artificial Sequence
  Description of Artificial Sequence: Synthetic oligonucleotide
  Target: LAMA2; (+) strand; PAM type: NRG; PAM sequence: GAG
agggatcaattcaacaagag

SEQ ID NO: 132018 - DNA, 20 bp, Artificial Sequence
  Description of Artificial Sequence: Synthetic oligonucleotide
  Target: LAMA2; (+) strand; PAM type: NRG; PAM sequence: CAG
aaatatttatgcacccaata

SEQ ID NO: 132019 - DNA, 20 bp, Artificial Sequence
  Description of Artificial Sequence: Synthetic oligonucleotide
  Target: LAMA2; (+) strand; PAM type: NRG; PAM sequence: AGG
aatatttatgcacccaatac

SEQ ID NO: 132020 - DNA, 20 bp, Artificial Sequence
  Description of Artificial Sequence: Synthetic oligonucleotide
  Target: LAMA2; (+) strand; PAM type: NRG; PAM sequence: GAG
tatttatgcacccaatacag

SEQ ID NO: 132021 - DNA, 20 bp, Artificial Sequence
  Description of Artificial Sequence: Synthetic oligonucleotide
  Target: LAMA2; (+) strand; PAM type: NRG; PAM sequence: CAG
gcacccaatacaggagcacc

SEQ ID NO: 132022 - DNA, 20 bp, Artificial Sequence
  Description of Artificial Sequence: Synthetic oligonucleotide
  Target: LAMA2; (+) strand; PAM type: NRG; PAM sequence: AAG
caggagcacccagattcata

SEQ ID NO: 132023 - DNA, 20 bp, Artificial Sequence
  Description of Artificial Sequence: Synthetic oligonucleotide
  Target: LAMA2; (+) strand; PAM type: NRG; PAM sequence: AAG
agcacccagattcataaagc

SEQ ID NO: 132024 - DNA, 20 bp, Artificial Sequence
  Description of Artificial Sequence: Synthetic oligonucleotide
  Target: LAMA2; (+) strand; PAM type: NRG; PAM sequence: CAG
agattcataaagcaagtcct

SEQ ID NO: 132025 - DNA, 20 bp, Artificial Sequence
  Description of Artificial Sequence: Synthetic oligonucleotide
  Target: LAMA2; (+) strand; PAM type: NRG; PAM sequence: AAG
caagtcctcagtgacctaca

SEQ ID NO: 132026 - DNA, 20 bp, Artificial Sequence
  Description of Artificial Sequence: Synthetic oligonucleotide
  Target: LAMA2; (+) strand; PAM type: NRG; PAM sequence: GAG
agtcctcagtgacctacaaa

SEQ ID NO: 132027 - DNA, 20 bp, Artificial Sequence
  Description of Artificial Sequence: Synthetic oligonucleotide
  Target: LAMA2; (+) strand; PAM type: NRG; PAM sequence: TAG
cagtgacctacaaagagact

SEQ ID NO: 132028 - DNA, 20 bp, Artificial Sequence
  Description of Artificial Sequence: Synthetic oligonucleotide
  Target: LAMA2; (+) strand; PAM type: NRG; PAM sequence: TGG
agactcccacacattaataa

SEQ ID NO: 132029 - DNA, 20 bp, Artificial Sequence
  Description of Artificial Sequence: Synthetic oligonucleotide
  Target: LAMA2; (+) strand; PAM type: NRG; PAM sequence: GGG
gactcccacacattaataat

SEQ ID NO: 132030 - DNA, 20 bp, Artificial Sequence
  Description of Artificial Sequence: Synthetic oligonucleotide
  Target: LAMA2; (+) strand; PAM type: NRG; PAM sequence: GAG
ctcccacacattaataatgg

SEQ ID NO: 132031 - DNA, 20 bp, Artificial Sequence
  Description of Artificial Sequence: Synthetic oligonucleotide
  Target: LAMA2; (+) strand; PAM type: NRG; PAM sequence: TAG
taacaccccactgtcaacat

SEQ ID NO: 132032 - DNA, 20 bp, Artificial Sequence
  Description of Artificial Sequence: Synthetic oligonucleotide
  Target: LAMA2; (+) strand; PAM type: NRG; PAM sequence: CAG
accccactgtcaacattaga

SEQ ID NO: 132033 - DNA, 20 bp, Artificial Sequence
  Description of Artificial Sequence: Synthetic oligonucleotide
  Target: LAMA2; (+) strand; PAM type: NRG; PAM sequence: GAG
tcaacattagacagatcaac

SEQ ID NO: 132034 - DNA, 20 bp, Artificial Sequence
  Description of Artificial Sequence: Synthetic oligonucleotide
  Target: LAMA2; (+) strand; PAM type: NRG; PAM sequence: CAG
cattagacagatcaacgaga

SEQ ID NO: 132035 - DNA, 20 bp, Artificial Sequence
  Description of Artificial Sequence: Synthetic oligonucleotide
  Target: LAMA2; (+) strand; PAM type: NRG; PAM sequence: AAG
agacagatcaacgagacaga

SEQ ID NO: 132036 - DNA, 20 bp, Artificial Sequence
  Description of Artificial Sequence: Synthetic oligonucleotide
  Target: LAMA2; (+) strand; PAM type: NRG; PAM sequence: AAG
caacgagacagaaagtcaac

SEQ ID NO: 132037 - DNA, 20 bp, Artificial Sequence
  Description of Artificial Sequence: Synthetic oligonucleotide
  Target: LAMA2; (+) strand; PAM type: NRG; PAM sequence: AGG
aacgagacagaaagtcaaca

SEQ ID NO: 132038 - DNA, 20 bp, Artificial Sequence
  Description of Artificial Sequence: Synthetic oligonucleotide
  Target: LAMA2; (+) strand; PAM type: NRG; PAM sequence: CAG
agaaagtcaacaaggatacc

SEQ ID NO: 132039 - DNA, 20 bp, Artificial Sequence
  Description of Artificial Sequence: Synthetic oligonucleotide
  Target: LAMA2; (+) strand; PAM type: NRG; PAM sequence: AGG
gaaagtcaacaaggataccc

SEQ ID NO: 132040 - DNA, 20 bp, Artificial Sequence
  Description of Artificial Sequence: Synthetic oligonucleotide
  Target: LAMA2; (+) strand; PAM type: NRG; PAM sequence: CAG
ggatacccaggaattgaact

SEQ ID NO: 132041 - DNA, 20 bp, Artificial Sequence
  Description of Artificial Sequence: Synthetic oligonucleotide
  Target: LAMA2; (+) strand; PAM type: NRG; PAM sequence: AAG
attgaactcagctctgcacc

SEQ ID NO: 132042 - DNA, 20 bp, Artificial Sequence
  Description of Artificial Sequence: Synthetic oligonucleotide
  Target: LAMA2; (+) strand; PAM type: NRG; PAM sequence: CAG
gaactcagctctgcaccaag

SEQ ID NO: 132043 - DNA, 20 bp, Artificial Sequence
  Description of Artificial Sequence: Synthetic oligonucleotide
  Target: LAMA2; (+) strand; PAM type: NRG; PAM sequence: TAG
tctgcaccaagcagacctaa

SEQ ID NO: 132044 - DNA, 20 bp, Artificial Sequence
  Description of Artificial Sequence: Synthetic oligonucleotide
  Target: LAMA2; (+) strand; PAM type: NRG; PAM sequence: CAG
gcagacctaatagacatcta

SEQ ID NO: 132045 - DNA, 20 bp, Artificial Sequence
  Description of Artificial Sequence: Synthetic oligonucleotide
  Target: LAMA2; (+) strand; PAM type: NRG; PAM sequence: CAG
aactctccaccccaaatcaa

SEQ ID NO: 132046 - DNA, 20 bp, Artificial Sequence
  Description of Artificial Sequence: Synthetic oligonucleotide
  Target: LAMA2; (+) strand; PAM type: NRG; PAM sequence: CAG
aacagaatatacattttttt

SEQ ID NO: 132047 - DNA, 20 bp, Artificial Sequence
  Description of Artificial Sequence: Synthetic oligonucleotide
  Target: LAMA2; (+) strand; PAM type: NRG; PAM sequence: TAG
ctattccaaaattgaccaca

SEQ ID NO: 132048 - DNA, 20 bp, Artificial Sequence
  Description of Artificial Sequence: Synthetic oligonucleotide
  Target: LAMA2; (+) strand; PAM type: NRG; PAM sequence: TGG
tccaaaattgaccacatagt

SEQ ID NO: 132049 - DNA, 20 bp, Artificial Sequence
  Description of Artificial Sequence: Synthetic oligonucleotide
  Target: LAMA2; (+) strand; PAM type: NRG; PAM sequence: AAG
aaaattgaccacatagttgg

SEQ ID NO: 132050 - DNA, 20 bp, Artificial Sequence
  Description of Artificial Sequence: Synthetic oligonucleotide
  Target: LAMA2; (+) strand; PAM type: NRG; PAM sequence: AAG
tgaccacatagttggaagta

SEQ ID NO: 132051 - DNA, 20 bp, Artificial Sequence
  Description of Artificial Sequence: Synthetic oligonucleotide
  Target: LAMA2; (+) strand; PAM type: NRG; PAM sequence: CAG
gttggaagtaaagctctcct

SEQ ID NO: 132052 - DNA, 20 bp, Artificial Sequence
  Description of Artificial Sequence: Synthetic oligonucleotide
  Target: LAMA2; (+) strand; PAM type: NRG; PAM sequence: AAG
gctctcctcagcaaatgtaa

SEQ ID NO: 132053 - DNA, 20 bp, Artificial Sequence
  Description of Artificial Sequence: Synthetic oligonucleotide
  Target: LAMA2; (+) strand; PAM type: NRG; PAM sequence: CAG
cctcagcaaatgtaaaagaa

SEQ ID NO: 132054 - DNA, 20 bp, Artificial Sequence
  Description of Artificial Sequence: Synthetic oligonucleotide
  Target: LAMA2; (+) strand; PAM type: NRG; PAM sequence: CAG
aattataacaaactatctct

SEQ ID NO: 132055 - DNA, 20 bp, Artificial Sequence
  Description of Artificial Sequence: Synthetic oligonucleotide
  Target: LAMA2; (+) strand; PAM type: NRG; PAM sequence: CAG
acaaactatctctcagacca

SEQ ID NO: 132056 - DNA, 20 bp, Artificial Sequence
  Description of Artificial Sequence: Synthetic oligonucleotide
  Target: LAMA2; (+) strand; PAM type: NRG; PAM sequence: TAG
agaccacagtgcaatcaaac

SEQ ID NO: 132057 - DNA, 20 bp, Artificial Sequence
  Description of Artificial Sequence: Synthetic oligonucleotide
  Target: LAMA2; (+) strand; PAM type: NRG; PAM sequence: CAG
agtgcaatcaaactagaact

SEQ ID NO: 132058 - DNA, 20 bp, Artificial Sequence
  Description of Artificial Sequence: Synthetic oligonucleotide
  Target: LAMA2; (+) strand; PAM type: NRG; PAM sequence: AGG
gtgcaatcaaactagaactc

SEQ ID NO: 132059 - DNA, 20 bp, Artificial Sequence
  Description of Artificial Sequence: Synthetic oligonucleotide
  Target: LAMA2; (+) strand; PAM type: NRG; PAM sequence: AAG
tcaaactagaactcaggatt

SEQ ID NO: 132060 - DNA, 20 bp, Artificial Sequence
  Description of Artificial Sequence: Synthetic oligonucleotide
  Target: LAMA2; (+) strand; PAM type: NRG; PAM sequence: AAG
aggattaagaatctcactca

SEQ ID NO: 132061 - DNA, 20 bp, Artificial Sequence
  Description of Artificial Sequence: Synthetic oligonucleotide
  Target: LAMA2; (+) strand; PAM type: NRG; PAM sequence: TGG
ctcaaagccgctcaactaca

SEQ ID NO: 132062 - DNA, 20 bp, Artificial Sequence
  Description of Artificial Sequence: Synthetic oligonucleotide
  Target: LAMA2; (+) strand; PAM type: NRG; PAM sequence: TGG
acctgctcctgaatgactac

SEQ ID NO: 132063 - DNA, 20 bp, Artificial Sequence
  Description of Artificial Sequence: Synthetic oligonucleotide
  Target: LAMA2; (+) strand; PAM type: NRG; PAM sequence: GGG
cctgctcctgaatgactact

SEQ ID NO: 132064 - DNA, 20 bp, Artificial Sequence
  Description of Artificial Sequence: Synthetic oligonucleotide
  Target: LAMA2; (+) strand; PAM type: NRG; PAM sequence: AAG
actgggtacataacgaaatg

SEQ ID NO: 132065 - DNA, 20 bp, Artificial Sequence
  Description of Artificial Sequence: Synthetic oligonucleotide
  Target: LAMA2; (+) strand; PAM type: NRG; PAM sequence: AGG
ctgggtacataacgaaatga

SEQ ID NO: 132066 - DNA, 20 bp, Artificial Sequence
  Description of Artificial Sequence: Synthetic oligonucleotide
  Target: LAMA2; (+) strand; PAM type: NRG; PAM sequence: CAG
ggtacataacgaaatgaagg

SEQ ID NO: 132067 - DNA, 20 bp, Artificial Sequence
  Description of Artificial Sequence: Synthetic oligonucleotide
  Target: LAMA2; (+) strand; PAM type: NRG; PAM sequence: AAG
acgaaatgaaggcagaaata

SEQ ID NO: 132068 - DNA, 20 bp, Artificial Sequence
  Description of Artificial Sequence: Synthetic oligonucleotide
  Target: LAMA2; (+) strand; PAM type: NRG; PAM sequence: GAG
agatgttctttgaaaccaac

SEQ ID NO: 132069 - DNA, 20 bp, Artificial Sequence
  Description of Artificial Sequence: Synthetic oligonucleotide
  Target: LAMA2; (+) strand; PAM type: NRG; PAM sequence: AAG
ctttgaaaccaacgagaaca

SEQ ID NO: 132070 - DNA, 20 bp, Artificial Sequence
  Description of Artificial Sequence: Synthetic oligonucleotide
  Target: LAMA2; (+) strand; PAM type: NRG; PAM sequence: CAG
agaacaaagacaccacatac

SEQ ID NO: 132071 - DNA, 20 bp, Artificial Sequence
  Description of Artificial Sequence: Synthetic oligonucleotide
  Target: LAMA2; (+) strand; PAM type: NRG; PAM sequence: TGG
acaccacataccagaatctc

SEQ ID NO: 132072 - DNA, 20 bp, Artificial Sequence
  Description of Artificial Sequence: Synthetic oligonucleotide
  Target: LAMA2; (+) strand; PAM type: NRG; PAM sequence: GGG
caccacataccagaatctct

SEQ ID NO: 132073 - DNA, 20 bp, Artificial Sequence
  Description of Artificial Sequence: Synthetic oligonucleotide
  Target: LAMA2; (+) strand; PAM type: NRG; PAM sequence: AAG
gaatctctgggacgcattca

SEQ ID NO: 132074 - DNA, 20 bp, Artificial Sequence
  Description of Artificial Sequence: Synthetic oligonucleotide
  Target: LAMA2; (+) strand; PAM type: NRG; PAM sequence: CAG
tctctgggacgcattcaaag

SEQ ID NO: 132075 - DNA, 20 bp, Artificial Sequence
  Description of Artificial Sequence: Synthetic oligonucleotide
  Target: LAMA2; (+) strand; PAM type: NRG; PAM sequence: TAG
gacgcattcaaagcagtgtg

SEQ ID NO: 132076 - DNA, 20 bp, Artificial Sequence
  Description of Artificial Sequence: Synthetic oligonucleotide
  Target: LAMA2; (+) strand; PAM type: NRG; PAM sequence: GAG
cgcattcaaagcagtgtgta

SEQ ID NO: 132077 - DNA, 20 bp, Artificial Sequence
  Description of Artificial Sequence: Synthetic oligonucleotide
  Target: LAMA2; (+) strand; PAM type: NRG; PAM sequence: AGG
gcattcaaagcagtgtgtag

SEQ ID NO: 132078 - DNA, 20 bp, Artificial Sequence
  Description of Artificial Sequence: Synthetic oligonucleotide
  Target: LAMA2; (+) strand; PAM type: NRG; PAM sequence: GGG
cattcaaagcagtgtgtaga

SEQ ID NO: 132079 - DNA, 20 bp, Artificial Sequence
  Description of Artificial Sequence: Synthetic oligonucleotide
  Target: LAMA2; (+) strand; PAM type: NRG; PAM sequence: TAG
agtgtgtagagggaaattta

SEQ ID NO: 132080 - DNA, 20 bp, Artificial Sequence
  Description of Artificial Sequence: Synthetic oligonucleotide
  Target: LAMA2; (+) strand; PAM type: NRG; PAM sequence: AAG
ttatagcactaaatgcctac

SEQ ID NO: 132081 - DNA, 20 bp, Artificial Sequence
  Description of Artificial Sequence: Synthetic oligonucleotide
  Target: LAMA2; (+) strand; PAM type: NRG; PAM sequence: GAG
atagcactaaatgcctacaa

SEQ ID NO: 132082 - DNA, 20 bp, Artificial Sequence
  Description of Artificial Sequence: Synthetic oligonucleotide
  Target: LAMA2; (+) strand; PAM type: NRG; PAM sequence: AAG
cactaaatgcctacaagaga

SEQ ID NO: 132083 - DNA, 20 bp, Artificial Sequence
  Description of Artificial Sequence: Synthetic oligonucleotide
  Target: LAMA2; (+) strand; PAM type: NRG; PAM sequence: CAG
taaatgcctacaagagaaag

SEQ ID NO: 132084 - DNA, 20 bp, Artificial Sequence
  Description of Artificial Sequence: Synthetic oligonucleotide
  Target: LAMA2; (+) strand; PAM type: NRG; PAM sequence: AGG
aaatgcctacaagagaaagc

SEQ ID NO: 132085 - DNA, 20 bp, Artificial Sequence
  Description of Artificial Sequence: Synthetic oligonucleotide
  Target: LAMA2; (+) strand; PAM type: NRG; PAM sequence: AAG
gcctacaagagaaagcagga

SEQ ID NO: 132086 - DNA, 20 bp, Artificial Sequence
  Description of Artificial Sequence: Synthetic oligonucleotide
  Target: LAMA2; (+) strand; PAM type: NRG; PAM sequence: AAG
caccctaacatcacaattaa

SEQ ID NO: 132087 - DNA, 20 bp, Artificial Sequence
  Description of Artificial Sequence: Synthetic oligonucleotide
  Target: LAMA2; (+) strand; PAM type: NRG; PAM sequence: TAG
aacatcacaattaaaagaac

SEQ ID NO: 132088 - DNA, 20 bp, Artificial Sequence
  Description of Artificial Sequence: Synthetic oligonucleotide
  Target: LAMA2; (+) strand; PAM type: NRG; PAM sequence: AAG
cacaattaaaagaactagaa

SEQ ID NO: 132089 - DNA, 20 bp, Artificial Sequence
  Description of Artificial Sequence: Synthetic oligonucleotide
  Target: LAMA2; (+) strand; PAM type: NRG; PAM sequence: AAG
attaaaagaactagaaaagc

SEQ ID NO: 132090 - DNA, 20 bp, Artificial Sequence
  Description of Artificial Sequence: Synthetic oligonucleotide
  Target: LAMA2; (+) strand; PAM type: NRG; PAM sequence: GAG
taaaagaactagaaaagcaa

SEQ ID NO: 132091 - DNA, 20 bp, Artificial Sequence
  Description of Artificial Sequence: Synthetic oligonucleotide
  Target: LAMA2; (+) strand; PAM type: NRG; PAM sequence: AAG
gcaagagcaaacacattcaa

SEQ ID NO: 132092 - DNA, 20 bp, Artificial Sequence
  Description of Artificial Sequence: Synthetic oligonucleotide
  Target: LAMA2; (+) strand; PAM type: NRG; PAM sequence: TAG
gagcaaacacattcaaaagc

SEQ ID NO: 132093 - DNA, 20 bp, Artificial Sequence
  Description of Artificial Sequence: Synthetic oligonucleotide
  Target: LAMA2; (+) strand; PAM type: NRG; PAM sequence: CAG
caaacacattcaaaagctag

SEQ ID NO: 132094 - DNA, 20 bp, Artificial Sequence
  Description of Artificial Sequence: Synthetic oligonucleotide
  Target: LAMA2; (+) strand; PAM type: NRG; PAM sequence: AAG
acacattcaaaagctagcag

SEQ ID NO: 132095 - DNA, 20 bp, Artificial Sequence
  Description of Artificial Sequence: Synthetic oligonucleotide
  Target: LAMA2; (+) strand; PAM type: NRG; PAM sequence: AGG
cacattcaaaagctagcaga

SEQ ID NO: 132096 - DNA, 20 bp, Artificial Sequence
  Description of Artificial Sequence: Synthetic oligonucleotide
  Target: LAMA2; (+) strand; PAM type: NRG; PAM sequence: AAG
ttcaaaagctagcagaaggc

SEQ ID NO: 132097 - DNA, 20 bp, Artificial Sequence
  Description of Artificial Sequence: Synthetic oligonucleotide
  Target: LAMA2; (+) strand; PAM type: NRG; PAM sequence: CAG
aggcaagaaataactaaaat

SEQ ID NO: 132098 - DNA, 20 bp, Artificial Sequence
  Description of Artificial Sequence: Synthetic oligonucleotide
  Target: LAMA2; (+) strand; PAM type: NRG; PAM sequence: GAG
gcaagaaataactaaaatca

SEQ ID NO: 132099 - DNA, 20 bp, Artificial Sequence
  Description of Artificial Sequence: Synthetic oligonucleotide
  Target: LAMA2; (+) strand; PAM type: NRG; PAM sequence: CAG
agaaataactaaaatcagag

SEQ ID NO: 132100 - DNA, 20 bp, Artificial Sequence
  Description of Artificial Sequence: Synthetic oligonucleotide
  Target: LAMA2; (+) strand; PAM type: NRG; PAM sequence: AAG
ctaaaatcagagcagaactg

SEQ ID NO: 132101 - DNA, 20 bp, Artificial Sequence
  Description of Artificial Sequence: Synthetic oligonucleotide
  Target: LAMA2; (+) strand; PAM type: NRG; PAM sequence: AGG
taaaatcagagcagaactga

SEQ ID NO: 132102 - DNA, 20 bp, Artificial Sequence
  Description of Artificial Sequence: Synthetic oligonucleotide
  Target: LAMA2; (+) strand; PAM type: NRG; PAM sequence: TAG
cagagcagaactgaaggaaa

SEQ ID NO: 132103 - DNA, 20 bp, Artificial Sequence
  Description of Artificial Sequence: Synthetic oligonucleotide
  Target: LAMA2; (+) strand; PAM type: NRG; PAM sequence: GAG
gagcagaactgaaggaaata

SEQ ID NO: 132104 - DNA, 20 bp, Artificial Sequence
  Description of Artificial Sequence: Synthetic oligonucleotide
  Target: LAMA2; (+) strand; PAM type: NRG; PAM sequence: CAG
cttcaaaaaatcaatgaatc

SEQ ID NO: 132105 - DNA, 20 bp, Artificial Sequence
  Description of Artificial Sequence: Synthetic oligonucleotide
  Target: LAMA2; (+) strand; PAM type: NRG; PAM sequence: AGG
ttcaaaaaatcaatgaatcc

SEQ ID NO: 132106 - DNA, 20 bp, Artificial Sequence
  Description of Artificial Sequence: Synthetic oligonucleotide
  Target: LAMA2; (+) strand; PAM type: NRG; PAM sequence: GAG
caaaaaatcaatgaatccag

SEQ ID NO: 132107 - DNA, 20 bp, Artificial Sequence
  Description of Artificial Sequence: Synthetic oligonucleotide
  Target: LAMA2; (+) strand; PAM type: NRG; PAM sequence: TGG
aaatcaatgaatccaggagc

SEQ ID NO: 132108 - DNA, 20 bp, Artificial Sequence
  Description of Artificial Sequence: Synthetic oligonucleotide
  Target: LAMA2; (+) strand; PAM type: NRG; PAM sequence: AAG
tccaggagctggttttttga

SEQ ID NO: 132109 - DNA, 20 bp, Artificial Sequence
  Description of Artificial Sequence: Synthetic oligonucleotide
  Target: LAMA2; (+) strand; PAM type: NRG; PAM sequence: AGG
ccaggagctggttttttgaa

SEQ ID NO: 132110 - DNA, 20 bp, Artificial Sequence
  Description of Artificial Sequence: Synthetic oligonucleotide
  Target: LAMA2; (+) strand; PAM type: NRG; PAM sequence: TAG
gaaaggatcaacaaaattga

SEQ ID NO: 132111 - DNA, 20 bp, Artificial Sequence
  Description of Artificial Sequence: Synthetic oligonucleotide
  Target: LAMA2; (+) strand; PAM type: NRG; PAM sequence: TAG
caacaaaattgatagaccgc

SEQ ID NO: 132112 - DNA, 20 bp, Artificial Sequence
  Description of Artificial Sequence: Synthetic oligonucleotide
  Target: LAMA2; (+) strand; PAM type: NRG; PAM sequence: AAG
aaaattgatagaccgctagc

SEQ ID NO: 132113 - DNA, 20 bp, Artificial Sequence
  Description of Artificial Sequence: Synthetic oligonucleotide
  Target: LAMA2; (+) strand; PAM type: NRG; PAM sequence: AAG
gaccgctagcaagactaata

SEQ ID NO: 132114 - DNA, 20 bp, Artificial Sequence
  Description of Artificial Sequence: Synthetic oligonucleotide
  Target: LAMA2; (+) strand; PAM type: NRG; PAM sequence: AAG
gcaagactaataaagaaaaa

SEQ ID NO: 132115 - DNA, 20 bp, Artificial Sequence
  Description of Artificial Sequence: Synthetic oligonucleotide
  Target: LAMA2; (+) strand; PAM type: NRG; PAM sequence: GAG
aagactaataaagaaaaaaa

SEQ ID NO: 132116 - DNA, 20 bp, Artificial Sequence
  Description of Artificial Sequence: Synthetic oligonucleotide
  Target: LAMA2; (+) strand; PAM type: NRG; PAM sequence: GAG
gactaataaagaaaaaaaga

SEQ ID NO: 132117 - DNA, 20 bp, Artificial Sequence
  Description of Artificial Sequence: Synthetic oligonucleotide
  Target: LAMA2; (+) strand; PAM type: NRG; PAM sequence: AAG
taataaagaaaaaaagagag

SEQ ID NO: 132118 - DNA, 20 bp, Artificial Sequence
  Description of Artificial Sequence: Synthetic oligonucleotide
  Target: LAMA2; (+) strand; PAM type: NRG; PAM sequence: TAG
aaaaagagagaagaatcaaa

SEQ ID NO: 132119 - DNA, 20 bp, Artificial Sequence
  Description of Artificial Sequence: Synthetic oligonucleotide
  Target: LAMA2; (+) strand; PAM type: NRG; PAM sequence: AAG
agacacaataaaaaatgata

SEQ ID NO: 132120 - DNA, 20 bp, Artificial Sequence
  Description of Artificial Sequence: Synthetic oligonucleotide
  Target: LAMA2; (+) strand; PAM type: NRG; PAM sequence: AGG
gacacaataaaaaatgataa

SEQ ID NO: 132121 - DNA, 20 bp, Artificial Sequence
  Description of Artificial Sequence: Synthetic oligonucleotide
  Target: LAMA2; (+) strand; PAM type: NRG; PAM sequence: GGG
acacaataaaaaatgataaa

SEQ ID NO: 132122 - DNA, 20 bp, Artificial Sequence
  Description of Artificial Sequence: Synthetic oligonucleotide
  Target: LAMA2; (+) strand; PAM type: NRG; PAM sequence: GGG
cacaataaaaaatgataaag

SEQ ID NO: 132123 - DNA, 20 bp, Artificial Sequence
  Description of Artificial Sequence: Synthetic oligonucleotide
  Target: LAMA2; (+) strand; PAM type: NRG; PAM sequence: CAG
ggatatcaccaccgatccca

SEQ ID NO: 132124 - DNA, 20 bp, Artificial Sequence
  Description of Artificial Sequence: Synthetic oligonucleotide
  Target: LAMA2; (+) strand; PAM type: NRG; PAM sequence: CAG
acagaaatacaaactaccat

SEQ ID NO: 132125 - DNA, 20 bp, Artificial Sequence
  Description of Artificial Sequence: Synthetic oligonucleotide
  Target: LAMA2; (+) strand; PAM type: NRG; PAM sequence: GAG
agaaatacaaactaccatca

SEQ ID NO: 132126 - DNA, 20 bp, Artificial Sequence
  Description of Artificial Sequence: Synthetic oligonucleotide
  Target: LAMA2; (+) strand; PAM type: NRG; PAM sequence: TAG
acacctctacgcaaataaac

SEQ ID NO: 132127 - DNA, 20 bp, Artificial Sequence
  Description of Artificial Sequence: Synthetic oligonucleotide
  Target: LAMA2; (+) strand; PAM type: NRG; PAM sequence: TAG
cgcaaataaactagaaaatc

SEQ ID NO: 132128 - DNA, 20 bp, Artificial Sequence
  Description of Artificial Sequence: Synthetic oligonucleotide
  Target: LAMA2; (+) strand; PAM type: NRG; PAM sequence: AAG
aaataaactagaaaatctag

SEQ ID NO: 132129 - DNA, 20 bp, Artificial Sequence
  Description of Artificial Sequence: Synthetic oligonucleotide
  Target: LAMA2; (+) strand; PAM type: NRG; PAM sequence: TGG
actagaaaatctagaagaaa

SEQ ID NO: 132130 - DNA, 20 bp, Artificial Sequence
  Description of Artificial Sequence: Synthetic oligonucleotide
  Target: LAMA2; (+) strand; PAM type: NRG; PAM sequence: AAG
ctcgacacatacactctccc

SEQ ID NO: 132131 - DNA, 20 bp, Artificial Sequence
  Description of Artificial Sequence: Synthetic oligonucleotide
  Target: LAMA2; (+) strand; PAM type: NRG; PAM sequence: CAG
acactctcccaagactaaac

SEQ ID NO: 132132 - DNA, 20 bp, Artificial Sequence
  Description of Artificial Sequence: Synthetic oligonucleotide
  Target: LAMA2; (+) strand; PAM type: NRG; PAM sequence: AGG
cactctcccaagactaaacc

SEQ ID NO: 132133 - DNA, 20 bp, Artificial Sequence
  Description of Artificial Sequence: Synthetic oligonucleotide
  Target: LAMA2; (+) strand; PAM type: NRG; PAM sequence: AAG
tctcccaagactaaaccagg

SEQ ID NO: 132134 - DNA, 20 bp, Artificial Sequence
  Description of Artificial Sequence: Synthetic oligonucleotide
  Target: LAMA2; (+) strand; PAM type: NRG; PAM sequence: AAG
cccaagactaaaccaggaag

SEQ ID NO: 132135 - DNA, 20 bp, Artificial Sequence
  Description of Artificial Sequence: Synthetic oligonucleotide
  Target: LAMA2; (+) strand; PAM type: NRG; PAM sequence: CAG
atctctgaatcgaccaataa

SEQ ID NO: 132136 - DNA, 20 bp, Artificial Sequence
  Description of Artificial Sequence: Synthetic oligonucleotide
  Target: LAMA2; (+) strand; PAM type: NRG; PAM sequence: AGG
tctctgaatcgaccaataac

SEQ ID NO: 132137 - DNA, 20 bp, Artificial Sequence
  Description of Artificial Sequence: Synthetic oligonucleotide
  Target: LAMA2; (+) strand; PAM type: NRG; PAM sequence: TGG
aataacaggctctgaaattg

SEQ ID NO: 132138 - DNA, 20 bp, Artificial Sequence
  Description of Artificial Sequence: Synthetic oligonucleotide
  Target: LAMA2; (+) strand; PAM type: NRG; PAM sequence: TAG
gaaattgtggcaataatcaa

SEQ ID NO: 132139 - DNA, 20 bp, Artificial Sequence
  Description of Artificial Sequence: Synthetic oligonucleotide
  Target: LAMA2; (+) strand; PAM type: NRG; PAM sequence: AAG
tcaatagtttaccaaccaaa

SEQ ID NO: 132140 - DNA, 20 bp, Artificial Sequence
  Description of Artificial Sequence: Synthetic oligonucleotide
  Target: LAMA2; (+) strand; PAM type: NRG; PAM sequence: GAG
aatagtttaccaaccaaaaa

SEQ ID NO: 132141 - DNA, 20 bp, Artificial Sequence
  Description of Artificial Sequence: Synthetic oligonucleotide
  Target: LAMA2; (+) strand; PAM type: NRG; PAM sequence: CAG
tttaccaaccaaaaagagtc

SEQ ID NO: 132142 - DNA, 20 bp, Artificial Sequence
  Description of Artificial Sequence: Synthetic oligonucleotide
  Target: LAMA2; (+) strand; PAM type: NRG; PAM sequence: AGG
ttaccaaccaaaaagagtcc

SEQ ID NO: 132143 - DNA, 20 bp, Artificial Sequence
  Description of Artificial Sequence: Synthetic oligonucleotide
  Target: LAMA2; (+) strand; PAM type: NRG; PAM sequence: CAG
aaccaaaaagagtccaggac

SEQ ID NO: 132144 - DNA, 20 bp, Artificial Sequence
  Description of Artificial Sequence: Synthetic oligonucleotide
  Target: LAMA2; (+) strand; PAM type: NRG; PAM sequence: TGG
aaaaagagtccaggaccaga

SEQ ID NO: 132145 - DNA, 20 bp, Artificial Sequence
  Description of Artificial Sequence: Synthetic oligonucleotide
  Target: LAMA2; (+) strand; PAM type: NRG; PAM sequence: CAG
tccaggaccagatggattca

SEQ ID NO: 132146 - DNA, 20 bp, Artificial Sequence
  Description of Artificial Sequence: Synthetic oligonucleotide
  Target: LAMA2; (+) strand; PAM type: NRG; PAM sequence: CAG
gattcacagccgaattctac

SEQ ID NO: 132147 - DNA, 20 bp, Artificial Sequence
  Description of Artificial Sequence: Synthetic oligonucleotide
  Target: LAMA2; (+) strand; PAM type: NRG; PAM sequence: GAG
ttcacagccgaattctacca

SEQ ID NO: 132148 - DNA, 20 bp, Artificial Sequence
  Description of Artificial Sequence: Synthetic oligonucleotide
  Target: LAMA2; (+) strand; PAM type: NRG; PAM sequence: AGG
tcacagccgaattctaccag

SEQ ID NO: 132149 - DNA, 20 bp, Artificial Sequence
  Description of Artificial Sequence: Synthetic oligonucleotide
  Target: LAMA2; (+) strand; PAM type: NRG; PAM sequence: AAG
ccgaattctaccagaggtac

SEQ ID NO: 132150 - DNA, 20 bp, Artificial Sequence
  Description of Artificial Sequence: Synthetic oligonucleotide
  Target: LAMA2; (+) strand; PAM type: NRG; PAM sequence: AGG
cgaattctaccagaggtaca

SEQ ID NO: 132151 - DNA, 20 bp, Artificial Sequence
  Description of Artificial Sequence: Synthetic oligonucleotide
  Target: LAMA2; (+) strand; PAM type: NRG; PAM sequence: GAG
aattctaccagaggtacaag

SEQ ID NO: 132152 - DNA, 20 bp, Artificial Sequence
  Description of Artificial Sequence: Synthetic oligonucleotide
  Target: LAMA2; (+) strand; PAM type: NRG; PAM sequence: AGG
attctaccagaggtacaagg

SEQ ID NO: 132153 - DNA, 20 bp, Artificial Sequence
  Description of Artificial Sequence: Synthetic oligonucleotide
  Target: LAMA2; (+) strand; PAM type: NRG; PAM sequence: TGG
ccagaggtacaaggaggaac

SEQ ID NO: 132154 - DNA, 20 bp, Artificial Sequence
  Description of Artificial Sequence: Synthetic oligonucleotide
  Target: LAMA2; (+) strand; PAM type: NRG; PAM sequence: TAG
tctgaaactattccaatcaa

SEQ ID NO: 132155 - DNA, 20 bp, Artificial Sequence
  Description of Artificial Sequence: Synthetic oligonucleotide
  Target: LAMA2; (+) strand; PAM type: NRG; PAM sequence: AAG
actattccaatcaatagaaa

SEQ ID NO: 132156 - DNA, 20 bp, Artificial Sequence
  Description of Artificial Sequence: Synthetic oligonucleotide
  Target: LAMA2; (+) strand; PAM type: NRG; PAM sequence: GAG
tattccaatcaatagaaaaa

SEQ ID NO: 132157 - DNA, 20 bp, Artificial Sequence
  Description of Artificial Sequence: Synthetic oligonucleotide
  Target: LAMA2; (+) strand; PAM type: NRG; PAM sequence: AGG
attccaatcaatagaaaaag

SEQ ID NO: 132158 - DNA, 20 bp, Artificial Sequence
  Description of Artificial Sequence: Synthetic oligonucleotide
  Target: LAMA2; (+) strand; PAM type: NRG; PAM sequence: GGG
ttccaatcaatagaaaaaga

SEQ ID NO: 132159 - DNA, 20 bp, Artificial Sequence
  Description of Artificial Sequence: Synthetic oligonucleotide
  Target: LAMA2; (+) strand; PAM type: NRG; PAM sequence: GAG
tcctccctaactcattttat

SEQ ID NO: 132160 - DNA, 20 bp, Artificial Sequence
  Description of Artificial Sequence: Synthetic oligonucleotide
  Target: LAMA2; (+) strand; PAM type: NRG; PAM sequence: AGG
cctccctaactcattttatg

SEQ ID NO: 132161 - DNA, 20 bp, Artificial Sequence
  Description of Artificial Sequence: Synthetic oligonucleotide
  Target: LAMA2; (+) strand; PAM type: NRG; PAM sequence: CAG
cctaactcattttatgaggc

SEQ ID NO: 132162 - DNA, 20 bp, Artificial Sequence
  Description of Artificial Sequence: Synthetic oligonucleotide
  Target: LAMA2; (+) strand; PAM type: NRG; PAM sequence: AAG
ccagcatcattctgatacca

SEQ ID NO: 132163 - DNA, 20 bp, Artificial Sequence
  Description of Artificial Sequence: Synthetic oligonucleotide
  Target: LAMA2; (+) strand; PAM type: NRG; PAM sequence: CGG
catcattctgataccaaagc

SEQ ID NO: 132164 - DNA, 20 bp, Artificial Sequence
  Description of Artificial Sequence: Synthetic oligonucleotide
  Target: LAMA2; (+) strand; PAM type: NRG; PAM sequence: GGG
atcattctgataccaaagcc

SEQ ID NO: 132165 - DNA, 20 bp, Artificial Sequence
  Description of Artificial Sequence: Synthetic oligonucleotide
  Target: LAMA2; (+) strand; PAM type: NRG; PAM sequence: CAG
attctgataccaaagccggg

SEQ ID NO: 132166 - DNA, 20 bp, Artificial Sequence
  Description of Artificial Sequence: Synthetic oligonucleotide
  Target: LAMA2; (+) strand; PAM type: NRG; PAM sequence: GAG
tctgataccaaagccgggca

SEQ ID NO: 132167 - DNA, 20 bp, Artificial Sequence
  Description of Artificial Sequence: Synthetic oligonucleotide
  Target: LAMA2; (+) strand; PAM type: NRG; PAM sequence: AAG
gggcagagacacaaccaaaa

SEQ ID NO: 132168 - DNA, 20 bp, Artificial Sequence
  Description of Artificial Sequence: Synthetic oligonucleotide
  Target: LAMA2; (+) strand; PAM type: NRG; PAM sequence: GAG
gcagagacacaaccaaaaaa

SEQ ID NO: 132169 - DNA, 20 bp, Artificial Sequence
  Description of Artificial Sequence: Synthetic oligonucleotide
  Target: LAMA2; (+) strand; PAM type: NRG; PAM sequence: TAG
acaaccaaaaaagagaattt

SEQ ID NO: 132170 - DNA, 20 bp, Artificial Sequence
  Description of Artificial Sequence: Synthetic oligonucleotide
  Target: LAMA2; (+) strand; PAM type: NRG; PAM sequence: TGG
aaaaatcctcaataaaatac

SEQ ID NO: 132171 - DNA, 20 bp, Artificial Sequence
  Description of Artificial Sequence: Synthetic oligonucleotide
  Target: LAMA2; (+) strand; PAM type: NRG; PAM sequence: CAG
aaatactggcaaaccgaatc

SEQ ID NO: 132172 - DNA, 20 bp, Artificial Sequence
  Description of Artificial Sequence: Synthetic oligonucleotide
  Target: LAMA2; (+) strand; PAM type: NRG; PAM sequence: CAG
tactggcaaaccgaatccag

SEQ ID NO: 132173 - DNA, 20 bp, Artificial Sequence
  Description of Artificial Sequence: Synthetic oligonucleotide
  Target: LAMA2; (+) strand; PAM type: NRG; PAM sequence: AAG
gaatccagcagcacatcaaa

SEQ ID NO: 132174 - DNA, 20 bp, Artificial Sequence
  Description of Artificial Sequence: Synthetic oligonucleotide
  Target: LAMA2; (+) strand; PAM type: NRG; PAM sequence: AAG
aaagcttatccaccatgatc

SEQ ID NO: 132175 - DNA, 20 bp, Artificial Sequence
  Description of Artificial Sequence: Synthetic oligonucleotide
  Target: LAMA2; (+) strand; PAM type: NRG; PAM sequence: TGG
gcttatccaccatgatcaag

SEQ ID NO: 132176 - DNA, 20 bp, Artificial Sequence
  Description of Artificial Sequence: Synthetic oligonucleotide
  Target: LAMA2; (+) strand; PAM type: NRG; PAM sequence: GGG
cttatccaccatgatcaagt

SEQ ID NO: 132177 - DNA, 20 bp, Artificial Sequence
  Description of Artificial Sequence: Synthetic oligonucleotide
  Target: LAMA2; (+) strand; PAM type: NRG; PAM sequence: TGG
gatcaagtgggcttcatccc

SEQ ID NO: 132178 - DNA, 20 bp, Artificial Sequence
  Description of Artificial Sequence: Synthetic oligonucleotide
  Target: LAMA2; (+) strand; PAM type: NRG; PAM sequence: GGG
atcaagtgggcttcatccct

SEQ ID NO: 132179 - DNA, 20 bp, Artificial Sequence
  Description of Artificial Sequence: Synthetic oligonucleotide
  Target: LAMA2; (+) strand; PAM type: NRG; PAM sequence: AAG
gggcttcatccctgggatgc

SEQ ID NO: 132180 - DNA, 20 bp, Artificial Sequence
  Description of Artificial Sequence: Synthetic oligonucleotide
  Target: LAMA2; (+) strand; PAM type: NRG; PAM sequence: AGG
ggcttcatccctgggatgca

SEQ ID NO: 132181 - DNA, 20 bp, Artificial Sequence
  Description of Artificial Sequence: Synthetic oligonucleotide
  Target: LAMA2; (+) strand; PAM type: NRG; PAM sequence: TGG
tcatccctgggatgcaaggc

SEQ ID NO: 132182 - DNA, 20 bp, Artificial Sequence
  Description of Artificial Sequence: Synthetic oligonucleotide
  Target: LAMA2; (+) strand; PAM type: NRG; PAM sequence: CAG
gcaaatcaataaatgtaatc

SEQ ID NO: 132183 - DNA, 20 bp, Artificial Sequence
  Description of Artificial Sequence: Synthetic oligonucleotide
  Target: LAMA2; (+) strand; PAM type: NRG; PAM sequence: CAG
aatgtaatccagcatataaa

SEQ ID NO: 132184 - DNA, 20 bp, Artificial Sequence
  Description of Artificial Sequence: Synthetic oligonucleotide
  Target: LAMA2; (+) strand; PAM type: NRG; PAM sequence: GAG
tgtaatccagcatataaaca

SEQ ID NO: 132185 - DNA, 20 bp, Artificial Sequence
  Description of Artificial Sequence: Synthetic oligonucleotide
  Target: LAMA2; (+) strand; PAM type: NRG; PAM sequence: AAG
ccagcatataaacagagcca

SEQ ID NO: 132186 - DNA, 20 bp, Artificial Sequence
  Description of Artificial Sequence: Synthetic oligonucleotide
  Target: LAMA2; (+) strand; PAM type: NRG; PAM sequence: TAG
aaaccacatgattatctcaa

SEQ ID NO: 132187 - DNA, 20 bp, Artificial Sequence
  Description of Artificial Sequence: Synthetic oligonucleotide
  Target: LAMA2; (+) strand; PAM type: NRG; PAM sequence: CAG
catgattatctcaatagatg

SEQ ID NO: 132188 - DNA, 20 bp, Artificial Sequence
  Description of Artificial Sequence: Synthetic oligonucleotide
  Target: LAMA2; (+) strand; PAM type: NRG; PAM sequence: AAG
tatctcaatagatgcagaaa

SEQ ID NO: 132189 - DNA, 20 bp, Artificial Sequence
  Description of Artificial Sequence: Synthetic oligonucleotide
  Target: LAMA2; (+) strand; PAM type: NRG; PAM sequence: TAG
gctaaaaactctcaataaat

SEQ ID NO: 132190 - DNA, 20 bp, Artificial Sequence
  Description of Artificial Sequence: Synthetic oligonucleotide
  Target: LAMA2; (+) strand; PAM type: NRG; PAM sequence: AGG
ctaaaaactctcaataaatt

SEQ ID NO: 132191 - DNA, 20 bp, Artificial Sequence
  Description of Artificial Sequence: Synthetic oligonucleotide
  Target: LAMA2; (+) strand; PAM type: NRG; PAM sequence: TGG
ctcaataaattaggtattga

SEQ ID NO: 132192 - DNA, 20 bp, Artificial Sequence
  Description of Artificial Sequence: Synthetic oligonucleotide
  Target: LAMA2; (+) strand; PAM type: NRG; PAM sequence: GGG
tcaataaattaggtattgat

SEQ ID NO: 132193 - DNA, 20 bp, Artificial Sequence
  Description of Artificial Sequence: Synthetic oligonucleotide
  Target: LAMA2; (+) strand; PAM type: NRG; PAM sequence: AAG
gggatgtatttcaaaataat

SEQ ID NO: 132194 - DNA, 20 bp, Artificial Sequence
  Description of Artificial Sequence: Synthetic oligonucleotide
  Target: LAMA2; (+) strand; PAM type: NRG; PAM sequence: GAG
gatgtatttcaaaataataa

SEQ ID NO: 132195 - DNA, 20 bp, Artificial Sequence
  Description of Artificial Sequence: Synthetic oligonucleotide
  Target: LAMA2; (+) strand; PAM type: NRG; PAM sequence: CAG
agctatctatgacaaaccca

SEQ ID NO: 132196 - DNA, 20 bp, Artificial Sequence
  Description of Artificial Sequence: Synthetic oligonucleotide
  Target: LAMA2; (+) strand; PAM type: NRG; PAM sequence: TGG
acagccaatatcatactgaa

SEQ ID NO: 132197 - DNA, 20 bp, Artificial Sequence
  Description of Artificial Sequence: Synthetic oligonucleotide
  Target: LAMA2; (+) strand; PAM type: NRG; PAM sequence: GGG
cagccaatatcatactgaat

SEQ ID NO: 132198 - DNA, 20 bp, Artificial Sequence
  Description of Artificial Sequence: Synthetic oligonucleotide
  Target: LAMA2; (+) strand; PAM type: NRG; PAM sequence: TGG
catactgaatgggcaaaaac

SEQ ID NO: 132199 - DNA, 20 bp, Artificial Sequence
  Description of Artificial Sequence: Synthetic oligonucleotide
  Target: LAMA2; (+) strand; PAM type: NRG; PAM sequence: AAG
actgaatgggcaaaaactgg

SEQ ID NO: 132200 - DNA, 20 bp, Artificial Sequence
  Description of Artificial Sequence: Synthetic oligonucleotide
  Target: LAMA2; (+) strand; PAM type: NRG; PAM sequence: TGG
gaagcattccctttgaaaac

SEQ ID NO: 132201 - DNA, 20 bp, Artificial Sequence
  Description of Artificial Sequence: Synthetic oligonucleotide
  Target: LAMA2; (+) strand; PAM type: NRG; PAM sequence: AAG
ttccctttgaaaactggcac

SEQ ID NO: 132202 - DNA, 20 bp, Artificial Sequence
  Description of Artificial Sequence: Synthetic oligonucleotide
  Target: LAMA2; (+) strand; PAM type: NRG; PAM sequence: CAG
ctttgaaaactggcacaaga

SEQ ID NO: 132203 - DNA, 20 bp, Artificial Sequence
  Description of Artificial Sequence: Synthetic oligonucleotide
  Target: LAMA2; (+) strand; PAM type: NRG; PAM sequence: AGG
tttgaaaactggcacaagac

SEQ ID NO: 132204 - DNA, 20 bp, Artificial Sequence
  Description of Artificial Sequence: Synthetic oligonucleotide
  Target: LAMA2; (+) strand; PAM type: NRG; PAM sequence: GGG
ttgaaaactggcacaagaca

SEQ ID NO: 132205 - DNA, 20 bp, Artificial Sequence
  Description of Artificial Sequence: Synthetic oligonucleotide
  Target: LAMA2; (+) strand; PAM type: NRG; PAM sequence: TAG
ctcaccgctcctattcaaca

SEQ ID NO: 132206 - DNA, 20 bp, Artificial Sequence
  Description of Artificial Sequence: Synthetic oligonucleotide
  Target: LAMA2; (+) strand; PAM type: NRG; PAM sequence: TGG
gctcctattcaacatagtgt

SEQ ID NO: 132207 - DNA, 20 bp, Artificial Sequence
  Description of Artificial Sequence: Synthetic oligonucleotide
  Target: LAMA2; (+) strand; PAM type: NRG; PAM sequence: AAG
cctattcaacatagtgttgg

SEQ ID NO: 132208 - DNA, 20 bp, Artificial Sequence
  Description of Artificial Sequence: Synthetic oligonucleotide
  Target: LAMA2; (+) strand; PAM type: NRG; PAM sequence: TGG
caacatagtgttggaagttc

SEQ ID NO: 132209 - DNA, 20 bp, Artificial Sequence
  Description of Artificial Sequence: Synthetic oligonucleotide
  Target: LAMA2; (+) strand; PAM type: NRG; PAM sequence: CAG
atagtgttggaagttctggc

SEQ ID NO: 132210 - DNA, 20 bp, Artificial Sequence
  Description of Artificial Sequence: Synthetic oligonucleotide
  Target: LAMA2; (+) strand; PAM type: NRG; PAM sequence: AGG
tagtgttggaagttctggcc

SEQ ID NO: 132211 - DNA, 20 bp, Artificial Sequence
  Description of Artificial Sequence: Synthetic oligonucleotide
  Target: LAMA2; (+) strand; PAM type: NRG; PAM sequence: GGG
agtgttggaagttctggcca

SEQ ID NO: 132212 - DNA, 20 bp, Artificial Sequence
  Description of Artificial Sequence: Synthetic oligonucleotide
  Target: LAMA2; (+) strand; PAM type: NRG; PAM sequence: CAG
gaagttctggccagggcaat

SEQ ID NO: 132213 - DNA, 20 bp, Artificial Sequence
  Description of Artificial Sequence: Synthetic oligonucleotide
  Target: LAMA2; (+) strand; PAM type: NRG; PAM sequence: AGG
aagttctggccagggcaatc

SEQ ID NO: 132214 - DNA, 20 bp, Artificial Sequence
  Description of Artificial Sequence: Synthetic oligonucleotide
  Target: LAMA2; (+) strand; PAM type: NRG; PAM sequence: CAG
ttctggccagggcaatcagg

SEQ ID NO: 132215 - DNA, 20 bp, Artificial Sequence
  Description of Artificial Sequence: Synthetic oligonucleotide
  Target: LAMA2; (+) strand; PAM type: NRG; PAM sequence: AGG
tctggccagggcaatcaggc

SEQ ID NO: 132216 - DNA, 20 bp, Artificial Sequence
  Description of Artificial Sequence: Synthetic oligonucleotide
  Target: LAMA2; (+) strand; PAM type: NRG; PAM sequence: GAG
tggccagggcaatcaggcag

SEQ ID NO: 132217 - DNA, 20 bp, Artificial Sequence
  Description of Artificial Sequence: Synthetic oligonucleotide
  Target: LAMA2; (+) strand; PAM type: NRG; PAM sequence: AAG
ccagggcaatcaggcaggag

SEQ ID NO: 132218 - DNA, 20 bp, Artificial Sequence
  Description of Artificial Sequence: Synthetic oligonucleotide
  Target: LAMA2; (+) strand; PAM type: NRG; PAM sequence: AGG
cagggcaatcaggcaggaga

SEQ ID NO: 132219 - DNA, 20 bp, Artificial Sequence
  Description of Artificial Sequence: Synthetic oligonucleotide
  Target: LAMA2; (+) strand; PAM type: NRG; PAM sequence: AAG
tcaggcaggagaaggaaata

SEQ ID NO: 132220 - DNA, 20 bp, Artificial Sequence
  Description of Artificial Sequence: Synthetic oligonucleotide
  Target: LAMA2; (+) strand; PAM type: NRG; PAM sequence: AGG
caggcaggagaaggaaataa

SEQ ID NO: 132221 - DNA, 20 bp, Artificial Sequence
  Description of Artificial Sequence: Synthetic oligonucleotide
  Target: LAMA2; (+) strand; PAM type: NRG; PAM sequence: GGG
aggcaggagaaggaaataaa

SEQ ID NO: 132222 - DNA, 20 bp, Artificial Sequence
  Description of Artificial Sequence: Synthetic oligonucleotide
  Target: LAMA2; (+) strand; PAM type: NRG; PAM sequence: TAG
ggaaataaagggtattcaat

SEQ ID NO: 132223 - DNA, 20 bp, Artificial Sequence
  Description of Artificial Sequence: Synthetic oligonucleotide
  Target: LAMA2; (+) strand; PAM type: NRG; PAM sequence: AGG
gaaataaagggtattcaatt

SEQ ID NO: 132224 - DNA, 20 bp, Artificial Sequence
  Description of Artificial Sequence: Synthetic oligonucleotide
  Target: LAMA2; (+) strand; PAM type: NRG; PAM sequence: AAG
aaagggtattcaattaggaa

SEQ ID NO: 132225 - DNA, 20 bp, Artificial Sequence
  Description of Artificial Sequence: Synthetic oligonucleotide
  Target: LAMA2; (+) strand; PAM type: NRG; PAM sequence: GAG
agggtattcaattaggaaaa

SEQ ID NO: 132226 - DNA, 20 bp, Artificial Sequence
  Description of Artificial Sequence: Synthetic oligonucleotide
  Target: LAMA2; (+) strand; PAM type: NRG; PAM sequence: AGG
gggtattcaattaggaaaag

SEQ ID NO: 132227 - DNA, 20 bp, Artificial Sequence
  Description of Artificial Sequence: Synthetic oligonucleotide
  Target: LAMA2; (+) strand; PAM type: NRG; PAM sequence: AAG
tattcaattaggaaaagagg

SEQ ID NO: 132228 - DNA, 20 bp, Artificial Sequence
  Description of Artificial Sequence: Synthetic oligonucleotide
  Target: LAMA2; (+) strand; PAM type: NRG; PAM sequence: CAG
agtcaaattgtccctgtttg

SEQ ID NO: 132229 - DNA, 20 bp, Artificial Sequence
  Description of Artificial Sequence: Synthetic oligonucleotide
  Target: LAMA2; (+) strand; PAM type: NRG; PAM sequence: TAG
agacgacatgattgtttatc

SEQ ID NO: 132230 - DNA, 20 bp, Artificial Sequence
  Description of Artificial Sequence: Synthetic oligonucleotide
  Target: LAMA2; (+) strand; PAM type: NRG; PAM sequence: CAG
tctagaaaaccccatcgtct

SEQ ID NO: 132231 - DNA, 20 bp, Artificial Sequence
  Description of Artificial Sequence: Synthetic oligonucleotide
  Target: LAMA2; (+) strand; PAM type: NRG; PAM sequence: AAG
tctcagcccaaaatctcctt

SEQ ID NO: 132232 - DNA, 20 bp, Artificial Sequence
  Description of Artificial Sequence: Synthetic oligonucleotide
  Target: LAMA2; (+) strand; PAM type: NRG; PAM sequence: AAG
caaaatctccttaagctgat

SEQ ID NO: 132233 - DNA, 20 bp, Artificial Sequence
  Description of Artificial Sequence: Synthetic oligonucleotide
  Target: LAMA2; (+) strand; PAM type: NRG; PAM sequence: CAG
cttaagctgataagcaactt

SEQ ID NO: 132234 - DNA, 20 bp, Artificial Sequence
  Description of Artificial Sequence: Synthetic oligonucleotide
  Target: LAMA2; (+) strand; PAM type: NRG; PAM sequence: AAG
gctgataagcaacttcagca

SEQ ID NO: 132235 - DNA, 20 bp, Artificial Sequence
  Description of Artificial Sequence: Synthetic oligonucleotide
  Target: LAMA2; (+) strand; PAM type: NRG; PAM sequence: CAG
aagcaacttcagcaaagtct

SEQ ID NO: 132236 - DNA, 20 bp, Artificial Sequence
  Description of Artificial Sequence: Synthetic oligonucleotide
  Target: LAMA2; (+) strand; PAM type: NRG; PAM sequence: AGG
agcaacttcagcaaagtctc

SEQ ID NO: 132237 - DNA, 20 bp, Artificial Sequence
  Description of Artificial Sequence: Synthetic oligonucleotide
  Target: LAMA2; (+) strand; PAM type: NRG; PAM sequence: CAG
acattcttatacaccaacaa

SEQ ID NO: 132238 - DNA, 20 bp, Artificial Sequence
  Description of Artificial Sequence: Synthetic oligonucleotide
  Target: LAMA2; (+) strand; PAM type: NRG; PAM sequence: CAG
atacaccaacaacagacaaa

SEQ ID NO: 132239 - DNA, 20 bp, Artificial Sequence
  Description of Artificial Sequence: Synthetic oligonucleotide
  Target: LAMA2; (+) strand; PAM type: NRG; PAM sequence: GAG
acaccaacaacagacaaaca

SEQ ID NO: 132240 - DNA, 20 bp, Artificial Sequence
  Description of Artificial Sequence: Synthetic oligonucleotide
  Target: LAMA2; (+) strand; PAM type: NRG; PAM sequence: GAG
accaacaacagacaaacaga

SEQ ID NO: 132241 - DNA, 20 bp, Artificial Sequence
  Description of Artificial Sequence: Synthetic oligonucleotide
  Target: LAMA2; (+) strand; PAM type: NRG; PAM sequence: TGG
acaaacagagagccaaatca

SEQ ID NO: 132242 - DNA, 20 bp, Artificial Sequence
  Description of Artificial Sequence: Synthetic oligonucleotide
  Target: LAMA2; (+) strand; PAM type: NRG; PAM sequence: GGG
caaacagagagccaaatcat

SEQ ID NO: 132243 - DNA, 20 bp, Artificial Sequence
  Description of Artificial Sequence: Synthetic oligonucleotide
  Target: LAMA2; (+) strand; PAM type: NRG; PAM sequence: AAG
tcccattcacaattgcttca

SEQ ID NO: 132244 - DNA, 20 bp, Artificial Sequence
  Description of Artificial Sequence: Synthetic oligonucleotide
  Target: LAMA2; (+) strand; PAM type: NRG; PAM sequence: GAG
ccattcacaattgcttcaaa

SEQ ID NO: 132245 - DNA, 20 bp, Artificial Sequence
  Description of Artificial Sequence: Synthetic oligonucleotide
  Target: LAMA2; (+) strand; PAM type: NRG; PAM sequence: TAG
ttcaaagagaataaaatacc

SEQ ID NO: 132246 - DNA, 20 bp, Artificial Sequence
  Description of Artificial Sequence: Synthetic oligonucleotide
  Target: LAMA2; (+) strand; PAM type: NRG; PAM sequence: AGG
tcaaagagaataaaatacct

SEQ ID NO: 132247 - DNA, 20 bp, Artificial Sequence
  Description of Artificial Sequence: Synthetic oligonucleotide
  Target: LAMA2; (+) strand; PAM type: NRG; PAM sequence: AAG
tacctaggaatccaacttac

SEQ ID NO: 132248 - DNA, 20 bp, Artificial Sequence
  Description of Artificial Sequence: Synthetic oligonucleotide
  Target: LAMA2; (+) strand; PAM type: NRG; PAM sequence: AGG
acctaggaatccaacttaca

SEQ ID NO: 132249 - DNA, 20 bp, Artificial Sequence
  Description of Artificial Sequence: Synthetic oligonucleotide
  Target: LAMA2; (+) strand; PAM type: NRG; PAM sequence: GGG
cctaggaatccaacttacaa

SEQ ID NO: 132250 - DNA, 20 bp, Artificial Sequence
  Description of Artificial Sequence: Synthetic oligonucleotide
  Target: LAMA2; (+) strand; PAM type: NRG; PAM sequence: AAG
tccaacttacaagggatgtg

SEQ ID NO: 132251 - DNA, 20 bp, Artificial Sequence
  Description of Artificial Sequence: Synthetic oligonucleotide
  Target: LAMA2; (+) strand; PAM type: NRG; PAM sequence: AGG
ccaacttacaagggatgtga

SEQ ID NO: 132252 - DNA, 20 bp, Artificial Sequence
  Description of Artificial Sequence: Synthetic oligonucleotide
  Target: LAMA2; (+) strand; PAM type: NRG; PAM sequence: AAG
gggatgtgaaggacctcttc

SEQ ID NO: 132253 - DNA, 20 bp, Artificial Sequence
  Description of Artificial Sequence: Synthetic oligonucleotide
  Target: LAMA2; (+) strand; PAM type: NRG; PAM sequence: AGG
ggatgtgaaggacctcttca

SEQ ID NO: 132254 - DNA, 20 bp, Artificial Sequence
  Description of Artificial Sequence: Synthetic oligonucleotide
  Target: LAMA2; (+) strand; PAM type: NRG; PAM sequence: GAG
atgtgaaggacctcttcaag

SEQ ID NO: 132255 - DNA, 20 bp, Artificial Sequence
  Description of Artificial Sequence: Synthetic oligonucleotide
  Target: LAMA2; (+) strand; PAM type: NRG; PAM sequence: AAG
agaactacaaaccactgctc

SEQ ID NO: 132256 - DNA, 20 bp, Artificial Sequence
  Description of Artificial Sequence: Synthetic oligonucleotide
  Target: LAMA2; (+) strand; PAM type: NRG; PAM sequence: AGG
gaactacaaaccactgctca

SEQ ID NO: 132257 - DNA, 20 bp, Artificial Sequence
  Description of Artificial Sequence: Synthetic oligonucleotide
  Target: LAMA2; (+) strand; PAM type: NRG; PAM sequence: AAG
accactgctcaaggaaataa

SEQ ID NO: 132258 - DNA, 20 bp, Artificial Sequence
  Description of Artificial Sequence: Synthetic oligonucleotide
  Target: LAMA2; (+) strand; PAM type: NRG; PAM sequence: GAG
cactgctcaaggaaataaaa

SEQ ID NO: 132259 - DNA, 20 bp, Artificial Sequence
  Description of Artificial Sequence: Synthetic oligonucleotide
  Target: LAMA2; (+) strand; PAM type: NRG; PAM sequence: AGG
actgctcaaggaaataaaag

SEQ ID NO: 132260 - DNA, 20 bp, Artificial Sequence
  Description of Artificial Sequence: Synthetic oligonucleotide
  Target: LAMA2; (+) strand; PAM type: NRG; PAM sequence: GAG
tgctcaaggaaataaaagag

SEQ ID NO: 132261 - DNA, 20 bp, Artificial Sequence
  Description of Artificial Sequence: Synthetic oligonucleotide
  Target: LAMA2; (+) strand; PAM type: NRG; PAM sequence: TGG
taaaagaggagacaaataaa

SEQ ID NO: 132262 - DNA, 20 bp, Artificial Sequence
  Description of Artificial Sequence: Synthetic oligonucleotide
  Target: LAMA2; (+) strand; PAM type: NRG; PAM sequence: AAG
aagaggagacaaataaatgg

SEQ ID NO: 132263 - DNA, 20 bp, Artificial Sequence
  Description of Artificial Sequence: Synthetic oligonucleotide
  Target: LAMA2; (+) strand; PAM type: NRG; PAM sequence: TGG
ggaagaacattccatgctca

SEQ ID NO: 132264 - DNA, 20 bp, Artificial Sequence
  Description of Artificial Sequence: Synthetic oligonucleotide
  Target: LAMA2; (+) strand; PAM type: NRG; PAM sequence: GGG
gaagaacattccatgctcat

SEQ ID NO: 132265 - DNA, 20 bp, Artificial Sequence
  Description of Artificial Sequence: Synthetic oligonucleotide
  Target: LAMA2; (+) strand; PAM type: NRG; PAM sequence: TAG
gaacattccatgctcatggg

SEQ ID NO: 132266 - DNA, 20 bp, Artificial Sequence
  Description of Artificial Sequence: Synthetic oligonucleotide
  Target: LAMA2; (+) strand; PAM type: NRG; PAM sequence: AGG
aacattccatgctcatgggt

SEQ ID NO: 132267 - DNA, 20 bp, Artificial Sequence
  Description of Artificial Sequence: Synthetic oligonucleotide
  Target: LAMA2; (+) strand; PAM type: NRG; PAM sequence: AAG
attccatgctcatgggtagg

SEQ ID NO: 132268 - DNA, 20 bp, Artificial Sequence
  Description of Artificial Sequence: Synthetic oligonucleotide
  Target: LAMA2; (+) strand; PAM type: NRG; PAM sequence: TGG
aagaatcaatatcgtgaaaa

SEQ ID NO: 132269 - DNA, 20 bp, Artificial Sequence
  Description of Artificial Sequence: Synthetic oligonucleotide
  Target: LAMA2; (+) strand; PAM type: NRG; PAM sequence: AAG
tgaaaatggccatactgccc

SEQ ID NO: 132270 - DNA, 20 bp, Artificial Sequence
  Description of Artificial Sequence: Synthetic oligonucleotide
  Target: LAMA2; (+) strand; PAM type: NRG; PAM sequence: AGG
gaaaatggccatactgccca

SEQ ID NO: 132271 - DNA, 20 bp, Artificial Sequence
  Description of Artificial Sequence: Synthetic oligonucleotide
  Target: LAMA2; (+) strand; PAM type: NRG; PAM sequence: CAG
atactgcccaaggtaattta

SEQ ID NO: 132272 - DNA, 20 bp, Artificial Sequence
  Description of Artificial Sequence: Synthetic oligonucleotide
  Target: LAMA2; (+) strand; PAM type: NRG; PAM sequence: AAG
gattcaatgccatccccatc

SEQ ID NO: 132273 - DNA, 20 bp, Artificial Sequence
  Description of Artificial Sequence: Synthetic oligonucleotide
  Target: LAMA2; (+) strand; PAM type: NRG; PAM sequence: CAG
gctaccaatgactttcttca

SEQ ID NO: 132274 - DNA, 20 bp, Artificial Sequence
  Description of Artificial Sequence: Synthetic oligonucleotide
  Target: LAMA2; (+) strand; PAM type: NRG; PAM sequence: TGG
aatgactttcttcacagaat

SEQ ID NO: 132275 - DNA, 20 bp, Artificial Sequence
  Description of Artificial Sequence: Synthetic oligonucleotide
  Target: LAMA2; (+) strand; PAM type: NRG; PAM sequence: AAG
aattggaaaaaactacttta

SEQ ID NO: 132276 - DNA, 20 bp, Artificial Sequence
  Description of Artificial Sequence: Synthetic oligonucleotide
  Target: LAMA2; (+) strand; PAM type: NRG; PAM sequence: TGG
aaactactttaaagttcata

SEQ ID NO: 132277 - DNA, 20 bp, Artificial Sequence
  Description of Artificial Sequence: Synthetic oligonucleotide
  Target: LAMA2; (+) strand; PAM type: NRG; PAM sequence: AAG
aagttcatatggaaccaaaa

SEQ ID NO: 132278 - DNA, 20 bp, Artificial Sequence
  Description of Artificial Sequence: Synthetic oligonucleotide
  Target: LAMA2; (+) strand; PAM type: NRG; PAM sequence: GAG
gttcatatggaaccaaaaaa

SEQ ID NO: 132279 - DNA, 20 bp, Artificial Sequence
  Description of Artificial Sequence: Synthetic oligonucleotide
  Target: LAMA2; (+) strand; PAM type: NRG; PAM sequence: AAG
aaaaaagagcctgcattgcc

SEQ ID NO: 132280 - DNA, 20 bp, Artificial Sequence
  Description of Artificial Sequence: Synthetic oligonucleotide
  Target: LAMA2; (+) strand; PAM type: NRG; PAM sequence: AAG
tgcattgccaagtcaatcct

SEQ ID NO: 132281 - DNA, 20 bp, Artificial Sequence
  Description of Artificial Sequence: Synthetic oligonucleotide
  Target: LAMA2; (+) strand; PAM type: NRG; PAM sequence: AAG
ccaagtcaatcctaagccaa

SEQ ID NO: 132282 - DNA, 20 bp, Artificial Sequence
  Description of Artificial Sequence: Synthetic oligonucleotide
  Target: LAMA2; (+) strand; PAM type: NRG; PAM sequence: AAG
aatcctaagccaaaagaaca

SEQ ID NO: 132283 - DNA, 20 bp, Artificial Sequence
  Description of Artificial Sequence: Synthetic oligonucleotide
  Target: LAMA2; (+) strand; PAM type: NRG; PAM sequence: TGG
ctaagccaaaagaacaaagc

SEQ ID NO: 132284 - DNA, 20 bp, Artificial Sequence
  Description of Artificial Sequence: Synthetic oligonucleotide
  Target: LAMA2; (+) strand; PAM type: NRG; PAM sequence: GAG
aagccaaaagaacaaagctg

SEQ ID NO: 132285 - DNA, 20 bp, Artificial Sequence
  Description of Artificial Sequence: Synthetic oligonucleotide
  Target: LAMA2; (+) strand; PAM type: NRG; PAM sequence: AGG
agccaaaagaacaaagctgg

SEQ ID NO: 132286 - DNA, 20 bp, Artificial Sequence
  Description of Artificial Sequence: Synthetic oligonucleotide
  Target: LAMA2; (+) strand; PAM type: NRG; PAM sequence: AAG
ctgacttcaaactatactac

SEQ ID NO: 132287 - DNA, 20 bp, Artificial Sequence
  Description of Artificial Sequence: Synthetic oligonucleotide
  Target: LAMA2; (+) strand; PAM type: NRG; PAM sequence: AGG
tgacttcaaactatactaca

SEQ ID NO: 132288 - DNA, 20 bp, Artificial Sequence
  Description of Artificial Sequence: Synthetic oligonucleotide
  Target: LAMA2; (+) strand; PAM type: NRG; PAM sequence: CAG
caaactatactacaaggcta

SEQ ID NO: 132289 - DNA, 20 bp, Artificial Sequence
  Description of Artificial Sequence: Synthetic oligonucleotide
  Target: LAMA2; (+) strand; PAM type: NRG; PAM sequence: CAG
caaggctacagtaaccaaaa

SEQ ID NO: 132290 - DNA, 20 bp, Artificial Sequence
  Description of Artificial Sequence: Synthetic oligonucleotide
  Target: LAMA2; (+) strand; PAM type: NRG; PAM sequence: TGG
ctacagtaaccaaaacagca

SEQ ID NO: 132291 - DNA, 20 bp, Artificial Sequence
  Description of Artificial Sequence: Synthetic oligonucleotide
  Target: LAMA2; (+) strand; PAM type: NRG; PAM sequence: TGG
taaccaaaacagcatggtac

SEQ ID NO: 132292 - DNA, 20 bp, Artificial Sequence
  Description of Artificial Sequence: Synthetic oligonucleotide
  Target: LAMA2; (+) strand; PAM type: NRG; PAM sequence: CAG
gcatggtactggtacaaaaa

SEQ ID NO: 132293 - DNA, 20 bp, Artificial Sequence
  Description of Artificial Sequence: Synthetic oligonucleotide
  Target: LAMA2; (+) strand; PAM type: NRG; PAM sequence: GAG
atggtactggtacaaaaaca

SEQ ID NO: 132294 - DNA, 20 bp, Artificial Sequence
  Description of Artificial Sequence: Synthetic oligonucleotide
  Target: LAMA2; (+) strand; PAM type: NRG; PAM sequence: TAG
ctggtacaaaaacagagata

SEQ ID NO: 132295 - DNA, 20 bp, Artificial Sequence
  Description of Artificial Sequence: Synthetic oligonucleotide
  Target: LAMA2; (+) strand; PAM type: NRG; PAM sequence: TGG
aaaacagagatatagatcaa

SEQ ID NO: 132296 - DNA, 20 bp, Artificial Sequence
  Description of Artificial Sequence: Synthetic oligonucleotide
  Target: LAMA2; (+) strand; PAM type: NRG; PAM sequence: CAG
agagatatagatcaatggaa

SEQ ID NO: 132297 - DNA, 20 bp, Artificial Sequence
  Description of Artificial Sequence: Synthetic oligonucleotide
  Target: LAMA2; (+) strand; PAM type: NRG; PAM sequence: CAG
tatagatcaatggaacagaa

SEQ ID NO: 132298 - DNA, 20 bp, Artificial Sequence
  Description of Artificial Sequence: Synthetic oligonucleotide
  Target: LAMA2; (+) strand; PAM type: NRG; PAM sequence: GAG
tagatcaatggaacagaaca

SEQ ID NO: 132299 - DNA, 20 bp, Artificial Sequence
  Description of Artificial Sequence: Synthetic oligonucleotide
  Target: LAMA2; (+) strand; PAM type: NRG; PAM sequence: CAG
atggaacagaacagagccct

SEQ ID NO: 132300 - DNA, 20 bp, Artificial Sequence
  Description of Artificial Sequence: Synthetic oligonucleotide
  Target: LAMA2; (+) strand; PAM type: NRG; PAM sequence: GAG
atctgatctttgacaaacct

SEQ ID NO: 132301 - DNA, 20 bp, Artificial Sequence
  Description of Artificial Sequence: Synthetic oligonucleotide
  Target: LAMA2; (+) strand; PAM type: NRG; PAM sequence: AAG
ttgacaaacctgagaaaaac

SEQ ID NO: 132302 - DNA, 20 bp, Artificial Sequence
  Description of Artificial Sequence: Synthetic oligonucleotide
  Target: LAMA2; (+) strand; PAM type: NRG; PAM sequence: TGG
aacctgagaaaaacaagcaa

SEQ ID NO: 132303 - DNA, 20 bp, Artificial Sequence
  Description of Artificial Sequence: Synthetic oligonucleotide
  Target: LAMA2; (+) strand; PAM type: NRG; PAM sequence: GGG
acctgagaaaaacaagcaat

SEQ ID NO: 132304 - DNA, 20 bp, Artificial Sequence
  Description of Artificial Sequence: Synthetic oligonucleotide
  Target: LAMA2; (+) strand; PAM type: NRG; PAM sequence: GGG
cctgagaaaaacaagcaatg

SEQ ID NO: 132305 - DNA, 20 bp, Artificial Sequence
  Description of Artificial Sequence: Synthetic oligonucleotide
  Target: LAMA2; (+) strand; PAM type: NRG; PAM sequence: AAG
agaaaaacaagcaatgggga

SEQ ID NO: 132306 - DNA, 20 bp, Artificial Sequence
  Description of Artificial Sequence: Synthetic oligonucleotide
  Target: LAMA2; (+) strand; PAM type: NRG; PAM sequence: AGG
gaaaaacaagcaatggggaa

SEQ ID NO: 132307 - DNA, 20 bp, Artificial Sequence
  Description of Artificial Sequence: Synthetic oligonucleotide
  Target: LAMA2; (+) strand; PAM type: NRG; PAM sequence: TGG
aggattccctatttaataaa

SEQ ID NO: 132308 - DNA, 20 bp, Artificial Sequence
  Description of Artificial Sequence: Synthetic oligonucleotide
  Target: LAMA2; (+) strand; PAM type: NRG; PAM sequence: TGG
ccctatttaataaatggtgc

SEQ ID NO: 132309 - DNA, 20 bp, Artificial Sequence
  Description of Artificial Sequence: Synthetic oligonucleotide
  Target: LAMA2; (+) strand; PAM type: NRG; PAM sequence: GGG
cctatttaataaatggtgct

SEQ ID NO: 132310 - DNA, 20 bp, Artificial Sequence
  Description of Artificial Sequence: Synthetic oligonucleotide
  Target: LAMA2; (+) strand; PAM type: NRG; PAM sequence: TGG
ataaatggtgctgggaaaac

SEQ ID NO: 132311 - DNA, 20 bp, Artificial Sequence
  Description of Artificial Sequence: Synthetic oligonucleotide
  Target: LAMA2; (+) strand; PAM type: NRG; PAM sequence: TAG
atggtgctgggaaaactggc

SEQ ID NO: 132312 - DNA, 20 bp, Artificial Sequence
  Description of Artificial Sequence: Synthetic oligonucleotide
  Target: LAMA2; (+) strand; PAM type: NRG; PAM sequence: TAG
gaaaactggctagccatatg

SEQ ID NO: 132313 - DNA, 20 bp, Artificial Sequence
  Description of Artificial Sequence: Synthetic oligonucleotide
  Target: LAMA2; (+) strand; PAM type: NRG; PAM sequence: AAG
actggctagccatatgtaga

SEQ ID NO: 132314 - DNA, 20 bp, Artificial Sequence
  Description of Artificial Sequence: Synthetic oligonucleotide
  Target: LAMA2; (+) strand; PAM type: NRG; PAM sequence: TGG
catatgtagaaagctgaaac

SEQ ID NO: 132315 - DNA, 20 bp, Artificial Sequence
  Description of Artificial Sequence: Synthetic oligonucleotide
  Target: LAMA2; (+) strand; PAM type: NRG; PAM sequence: AAG
ccttatacaaaaatcaattc

SEQ ID NO: 132316 - DNA, 20 bp, Artificial Sequence
  Description of Artificial Sequence: Synthetic oligonucleotide
  Target: LAMA2; (+) strand; PAM type: NRG; PAM sequence: TGG
atacaaaaatcaattcaaga

SEQ ID NO: 132317 - DNA, 20 bp, Artificial Sequence
  Description of Artificial Sequence: Synthetic oligonucleotide
  Target: LAMA2; (+) strand; PAM type: NRG; PAM sequence: AAG
aatcaattcaagatggatta

SEQ ID NO: 132318 - DNA, 20 bp, Artificial Sequence
  Description of Artificial Sequence: Synthetic oligonucleotide
  Target: LAMA2; (+) strand; PAM type: NRG; PAM sequence: TAG
acctaaaaccataaaaaccc

SEQ ID NO: 132319 - DNA, 20 bp, Artificial Sequence
  Description of Artificial Sequence: Synthetic oligonucleotide
  Target: LAMA2; (+) strand; PAM type: NRG; PAM sequence: AAG
taaaaccataaaaaccctag

SEQ ID NO: 132320 - DNA, 20 bp, Artificial Sequence
  Description of Artificial Sequence: Synthetic oligonucleotide
  Target: LAMA2; (+) strand; PAM type: NRG; PAM sequence: TAG
aaaaaccctagaagaaaacc

SEQ ID NO: 132321 - DNA, 20 bp, Artificial Sequence
  Description of Artificial Sequence: Synthetic oligonucleotide
  Target: LAMA2; (+) strand; PAM type: NRG; PAM sequence: AGG
aaaaccctagaagaaaacct

SEQ ID NO: 132322 - DNA, 20 bp, Artificial Sequence
  Description of Artificial Sequence: Synthetic oligonucleotide
  Target: LAMA2; (+) strand; PAM type: NRG; PAM sequence: CAG
aaaacctaggcattaccatt

SEQ ID NO: 132323 - DNA, 20 bp, Artificial Sequence
  Description of Artificial Sequence: Synthetic oligonucleotide
  Target: LAMA2; (+) strand; PAM type: NRG; PAM sequence: AGG
aaacctaggcattaccattc

SEQ ID NO: 132324 - DNA, 20 bp, Artificial Sequence
  Description of Artificial Sequence: Synthetic oligonucleotide
  Target: LAMA2; (+) strand; PAM type: NRG; PAM sequence: TAG
aggcattaccattcaggaca

SEQ ID NO: 132325 - DNA, 20 bp, Artificial Sequence
  Description of Artificial Sequence: Synthetic oligonucleotide
  Target: LAMA2; (+) strand; PAM type: NRG; PAM sequence: AGG
ggcattaccattcaggacat

SEQ ID NO: 132326 - DNA, 20 bp, Artificial Sequence
  Description of Artificial Sequence: Synthetic oligonucleotide
  Target: LAMA2; (+) strand; PAM type: NRG; PAM sequence: TGG
taccattcaggacataggcg

SEQ ID NO: 132327 - DNA, 20 bp, Artificial Sequence
  Description of Artificial Sequence: Synthetic oligonucleotide
  Target: LAMA2; (+) strand; PAM type: NRG; PAM sequence: GGG
accattcaggacataggcgt

SEQ ID NO: 132328 - DNA, 20 bp, Artificial Sequence
  Description of Artificial Sequence: Synthetic oligonucleotide
  Target: LAMA2; (+) strand; PAM type: NRG; PAM sequence: AAG
ttcaggacataggcgtgggc

SEQ ID NO: 132329 - DNA, 20 bp, Artificial Sequence
  Description of Artificial Sequence: Synthetic oligonucleotide
  Target: LAMA2; (+) strand; PAM type: NRG; PAM sequence: AGG
tcaggacataggcgtgggca

SEQ ID NO: 132330 - DNA, 20 bp, Artificial Sequence
  Description of Artificial Sequence: Synthetic oligonucleotide
  Target: LAMA2; (+) strand; PAM type: NRG; PAM sequence: AAG
cttcatgtccaaaacaccaa

SEQ ID NO: 132331 - DNA, 20 bp, Artificial Sequence
  Description of Artificial Sequence: Synthetic oligonucleotide
  Target: LAMA2; (+) strand; PAM type: NRG; PAM sequence: TGG
gtccaaaacaccaaaagcaa

SEQ ID NO: 132332 - DNA, 20 bp, Artificial Sequence
  Description of Artificial Sequence: Synthetic oligonucleotide
  Target: LAMA2; (+) strand; PAM type: NRG; PAM sequence: AAG
accaaaagcaatggcaacaa

SEQ ID NO: 132333 - DNA, 20 bp, Artificial Sequence
  Description of Artificial Sequence: Synthetic oligonucleotide
  Target: LAMA2; (+) strand; PAM type: NRG; PAM sequence: TGG
caaaagacaaaattgacaaa

SEQ ID NO: 132334 - DNA, 20 bp, Artificial Sequence
  Description of Artificial Sequence: Synthetic oligonucleotide
  Target: LAMA2; (+) strand; PAM type: NRG; PAM sequence: GGG
aaaagacaaaattgacaaat

SEQ ID NO: 132335 - DNA, 20 bp, Artificial Sequence
  Description of Artificial Sequence: Synthetic oligonucleotide
  Target: LAMA2; (+) strand; PAM type: NRG; PAM sequence: AAG
aatgggatctaattaaacta

SEQ ID NO: 132336 - DNA, 20 bp, Artificial Sequence
  Description of Artificial Sequence: Synthetic oligonucleotide
  Target: LAMA2; (+) strand; PAM type: NRG; PAM sequence: GAG
tgggatctaattaaactaaa

SEQ ID NO: 132337 - DNA, 20 bp, Artificial Sequence
  Description of Artificial Sequence: Synthetic oligonucleotide
  Target: LAMA2; (+) strand; PAM type: NRG; PAM sequence: CAG
taaactaaagagcttctgca

SEQ ID NO: 132338 - DNA, 20 bp, Artificial Sequence
  Description of Artificial Sequence: Synthetic oligonucleotide
  Target: LAMA2; (+) strand; PAM type: NRG; PAM sequence: AAG
aaagagcttctgcacagcaa

SEQ ID NO: 132339 - DNA, 20 bp, Artificial Sequence
  Description of Artificial Sequence: Synthetic oligonucleotide
  Target: LAMA2; (+) strand; PAM type: NRG; PAM sequence: CAG
acagcaaaagaaactaccat

SEQ ID NO: 132340 - DNA, 20 bp, Artificial Sequence
  Description of Artificial Sequence: Synthetic oligonucleotide
  Target: LAMA2; (+) strand; PAM type: NRG; PAM sequence: GAG
agcaaaagaaactaccatca

SEQ ID NO: 132341 - DNA, 20 bp, Artificial Sequence
  Description of Artificial Sequence: Synthetic oligonucleotide
  Target: LAMA2; (+) strand; PAM type: NRG; PAM sequence: CAG
gaaactaccatcagagtgaa

SEQ ID NO: 132342 - DNA, 20 bp, Artificial Sequence
  Description of Artificial Sequence: Synthetic oligonucleotide
  Target: LAMA2; (+) strand; PAM type: NRG; PAM sequence: AGG
aaactaccatcagagtgaac

SEQ ID NO: 132343 - DNA, 20 bp, Artificial Sequence
  Description of Artificial Sequence: Synthetic oligonucleotide
  Target: LAMA2; (+) strand; PAM type: NRG; PAM sequence: TGG
tgaacaggcaacctacaaca

SEQ ID NO: 132344 - DNA, 20 bp, Artificial Sequence
  Description of Artificial Sequence: Synthetic oligonucleotide
  Target: LAMA2; (+) strand; PAM type: NRG; PAM sequence: GGG
gaacaggcaacctacaacat

SEQ ID NO: 132345 - DNA, 20 bp, Artificial Sequence
  Description of Artificial Sequence: Synthetic oligonucleotide
  Target: LAMA2; (+) strand; PAM type: NRG; PAM sequence: GAG
acaggcaacctacaacatgg

SEQ ID NO: 132346 - DNA, 20 bp, Artificial Sequence
  Description of Artificial Sequence: Synthetic oligonucleotide
  Target: LAMA2; (+) strand; PAM type: NRG; PAM sequence: AAG
tgcaacctactcatctgaca

SEQ ID NO: 132347 - DNA, 20 bp, Artificial Sequence
  Description of Artificial Sequence: Synthetic oligonucleotide
  Target: LAMA2; (+) strand; PAM type: NRG; PAM sequence: AGG
gcaacctactcatctgacaa

SEQ ID NO: 132348 - DNA, 20 bp, Artificial Sequence
  Description of Artificial Sequence: Synthetic oligonucleotide
  Target: LAMA2; (+) strand; PAM type: NRG; PAM sequence: GGG
caacctactcatctgacaaa

SEQ ID NO: 132349 - DNA, 20 bp, Artificial Sequence
  Description of Artificial Sequence: Synthetic oligonucleotide
  Target: LAMA2; (+) strand; PAM type: NRG; PAM sequence: CAG
tctgacaaagggctaatatc

SEQ ID NO: 132350 - DNA, 20 bp, Artificial Sequence
  Description of Artificial Sequence: Synthetic oligonucleotide
  Target: LAMA2; (+) strand; PAM type: NRG; PAM sequence: AAG
atgaactcaaacaaatttac

SEQ ID NO: 132351 - DNA, 20 bp, Artificial Sequence
  Description of Artificial Sequence: Synthetic oligonucleotide
  Target: LAMA2; (+) strand; PAM type: NRG; PAM sequence: AAG
aaacaaacaaccccatcaaa

SEQ ID NO: 132352 - DNA, 20 bp, Artificial Sequence
  Description of Artificial Sequence: Synthetic oligonucleotide
  Target: LAMA2; (+) strand; PAM type: NRG; PAM sequence: TGG
caaacaaccccatcaaaaag

SEQ ID NO: 132353 - DNA, 20 bp, Artificial Sequence
  Description of Artificial Sequence: Synthetic oligonucleotide
  Target: LAMA2; (+) strand; PAM type: NRG; PAM sequence: GGG
aaacaaccccatcaaaaagt

SEQ ID NO: 132354 - DNA, 20 bp, Artificial Sequence
  Description of Artificial Sequence: Synthetic oligonucleotide
  Target: LAMA2; (+) strand; PAM type: NRG; PAM sequence: AAG
accccatcaaaaagtgggcg

SEQ ID NO: 132355 - DNA, 20 bp, Artificial Sequence
  Description of Artificial Sequence: Synthetic oligonucleotide
  Target: LAMA2; (+) strand; PAM type: NRG; PAM sequence: AGG
ccccatcaaaaagtgggcga

SEQ ID NO: 132356 - DNA, 20 bp, Artificial Sequence
  Description of Artificial Sequence: Synthetic oligonucleotide
  Target: LAMA2; (+) strand; PAM type: NRG; PAM sequence: CAG
aagtgggcgaaggacatgaa

SEQ ID NO: 132357 - DNA, 20 bp, Artificial Sequence
  Description of Artificial Sequence: Synthetic oligonucleotide
  Target: LAMA2; (+) strand; PAM type: NRG; PAM sequence: AAG
catgaacagacacttctcaa

SEQ ID NO: 132358 - DNA, 20 bp, Artificial Sequence
  Description of Artificial Sequence: Synthetic oligonucleotide
  Target: LAMA2; (+) strand; PAM type: NRG; PAM sequence: AAG
gaacagacacttctcaaaag

SEQ ID NO: 132359 - DNA, 20 bp, Artificial Sequence
  Description of Artificial Sequence: Synthetic oligonucleotide
  Target: LAMA2; (+) strand; PAM type: NRG; PAM sequence: CAG
ctcaaaagaagacatttatg

SEQ ID NO: 132360 - DNA, 20 bp, Artificial Sequence
  Description of Artificial Sequence: Synthetic oligonucleotide
  Target: LAMA2; (+) strand; PAM type: NRG; PAM sequence: AAG
atgcagccaaaaaacacatg

SEQ ID NO: 132361 - DNA, 20 bp, Artificial Sequence
  Description of Artificial Sequence: Synthetic oligonucleotide
  Target: LAMA2; (+) strand; PAM type: NRG; PAM sequence: TGG
gaagaaatgctcatcatcac

SEQ ID NO: 132362 - DNA, 20 bp, Artificial Sequence
  Description of Artificial Sequence: Synthetic oligonucleotide
  Target: LAMA2; (+) strand; PAM type: NRG; PAM sequence: CAG
tgctcatcatcactggccat

SEQ ID NO: 132363 - DNA, 20 bp, Artificial Sequence
  Description of Artificial Sequence: Synthetic oligonucleotide
  Target: LAMA2; (+) strand; PAM type: NRG; PAM sequence: GAG
ctcatcatcactggccatca

SEQ ID NO: 132364 - DNA, 20 bp, Artificial Sequence
  Description of Artificial Sequence: Synthetic oligonucleotide
  Target: LAMA2; (+) strand; PAM type: NRG; PAM sequence: GAG
atgcaaatcaaaaccactat

SEQ ID NO: 132365 - DNA, 20 bp, Artificial Sequence
  Description of Artificial Sequence: Synthetic oligonucleotide
  Target: LAMA2; (+) strand; PAM type: NRG; PAM sequence: CAG
tatgagatatcatctcacac

SEQ ID NO: 132366 - DNA, 20 bp, Artificial Sequence
  Description of Artificial Sequence: Synthetic oligonucleotide
  Target: LAMA2; (+) strand; PAM type: NRG; PAM sequence: TAG
agatatcatctcacaccagt

SEQ ID NO: 132367 - DNA, 20 bp, Artificial Sequence
  Description of Artificial Sequence: Synthetic oligonucleotide
  Target: LAMA2; (+) strand; PAM type: NRG; PAM sequence: TGG
tcatctcacaccagttagaa

SEQ ID NO: 132368 - DNA, 20 bp, Artificial Sequence
  Description of Artificial Sequence: Synthetic oligonucleotide
  Target: LAMA2; (+) strand; PAM type: NRG; PAM sequence: AAG
ttagaatggcaatcattaaa

SEQ ID NO: 132369 - DNA, 20 bp, Artificial Sequence
  Description of Artificial Sequence: Synthetic oligonucleotide
  Target: LAMA2; (+) strand; PAM type: NRG; PAM sequence: CAG
aatggcaatcattaaaaagt

SEQ ID NO: 132370 - DNA, 20 bp, Artificial Sequence
  Description of Artificial Sequence: Synthetic oligonucleotide
  Target: LAMA2; (+) strand; PAM type: NRG; PAM sequence: AGG
atggcaatcattaaaaagtc

SEQ ID NO: 132371 - DNA, 20 bp, Artificial Sequence
  Description of Artificial Sequence: Synthetic oligonucleotide
  Target: LAMA2; (+) strand; PAM type: NRG; PAM sequence: CAG
attaaaaagtcaggaaacaa

SEQ ID NO: 132372 - DNA, 20 bp, Artificial Sequence
  Description of Artificial Sequence: Synthetic oligonucleotide
  Target: LAMA2; (+) strand; PAM type: NRG; PAM sequence: AGG
ttaaaaagtcaggaaacaac

SEQ ID NO: 132373 - DNA, 20 bp, Artificial Sequence
  Description of Artificial Sequence: Synthetic oligonucleotide
  Target: LAMA2; (+) strand; PAM type: NRG; PAM sequence: TGG
agtcaggaaacaacaggtgc

SEQ ID NO: 132374 - DNA, 20 bp, Artificial Sequence
  Description of Artificial Sequence: Synthetic oligonucleotide
  Target: LAMA2; (+) strand; PAM type: NRG; PAM sequence: GAG
tcaggaaacaacaggtgctg

SEQ ID NO: 132375 - DNA, 20 bp, Artificial Sequence
  Description of Artificial Sequence: Synthetic oligonucleotide
  Target: LAMA2; (+) strand; PAM type: NRG; PAM sequence: GAG
aggaaacaacaggtgctgga

SEQ ID NO: 132376 - DNA, 20 bp, Artificial Sequence
  Description of Artificial Sequence: Synthetic oligonucleotide
  Target: LAMA2; (+) strand; PAM type: NRG; PAM sequence: AGG
ggaaacaacaggtgctggag

SEQ ID NO: 132377 - DNA, 20 bp, Artificial Sequence
  Description of Artificial Sequence: Synthetic oligonucleotide
  Target: LAMA2; (+) strand; PAM type: NRG; PAM sequence: TGG
aacaggtgctggagaggatg

SEQ ID NO: 132378 - DNA, 20 bp, Artificial Sequence
  Description of Artificial Sequence: Synthetic oligonucleotide
  Target: LAMA2; (+) strand; PAM type: NRG; PAM sequence: GAG
caggtgctggagaggatgtg

SEQ ID NO: 132379 - DNA, 20 bp, Artificial Sequence
  Description of Artificial Sequence: Synthetic oligonucleotide
  Target: LAMA2; (+) strand; PAM type: NRG; PAM sequence: TAG
ctggagaggatgtggagaaa

SEQ ID NO: 132380 - DNA, 20 bp, Artificial Sequence
  Description of Artificial Sequence: Synthetic oligonucleotide
  Target: LAMA2; (+) strand; PAM type: NRG; PAM sequence: AGG
tggagaggatgtggagaaat

SEQ ID NO: 132381 - DNA, 20 bp, Artificial Sequence
  Description of Artificial Sequence: Synthetic oligonucleotide
  Target: LAMA2; (+) strand; PAM type: NRG; PAM sequence: TGG
taggaacacttttacactgt

SEQ ID NO: 132382 - DNA, 20 bp, Artificial Sequence
  Description of Artificial Sequence: Synthetic oligonucleotide
  Target: LAMA2; (+) strand; PAM type: NRG; PAM sequence: TGG
gaacacttttacactgttgg

SEQ ID NO: 132383 - DNA, 20 bp, Artificial Sequence
  Description of Artificial Sequence: Synthetic oligonucleotide
  Target: LAMA2; (+) strand; PAM type: NRG; PAM sequence: GGG
aacacttttacactgttggt

SEQ ID NO: 132384 - DNA, 20 bp, Artificial Sequence
  Description of Artificial Sequence: Synthetic oligonucleotide
  Target: LAMA2; (+) strand; PAM type: NRG; PAM sequence: TAG
ctgttggtgggactgtaaac

SEQ ID NO: 132385 - DNA, 20 bp, Artificial Sequence
  Description of Artificial Sequence: Synthetic oligonucleotide
  Target: LAMA2; (+) strand; PAM type: NRG; PAM sequence: TGG
gtaaactagttcaaccattg

SEQ ID NO: 132386 - DNA, 20 bp, Artificial Sequence
  Description of Artificial Sequence: Synthetic oligonucleotide
  Target: LAMA2; (+) strand; PAM type: NRG; PAM sequence: AAG
aactagttcaaccattgtgg

SEQ ID NO: 132387 - DNA, 20 bp, Artificial Sequence
  Description of Artificial Sequence: Synthetic oligonucleotide
  Target: LAMA2; (+) strand; PAM type: NRG; PAM sequence: CAG
agttcaaccattgtggaagt

SEQ ID NO: 132388 - DNA, 20 bp, Artificial Sequence
  Description of Artificial Sequence: Synthetic oligonucleotide
  Target: LAMA2; (+) strand; PAM type: NRG; PAM sequence: TGG
aaccattgtggaagtcagtg

SEQ ID NO: 132389 - DNA, 20 bp, Artificial Sequence
  Description of Artificial Sequence: Synthetic oligonucleotide
  Target: LAMA2; (+) strand; PAM type: NRG; PAM sequence: CAG
aagtcagtgtggcgattcct

SEQ ID NO: 132390 - DNA, 20 bp, Artificial Sequence
  Description of Artificial Sequence: Synthetic oligonucleotide
  Target: LAMA2; (+) strand; PAM type: NRG; PAM sequence: AGG
agtcagtgtggcgattcctc

SEQ ID NO: 132391 - DNA, 20 bp, Artificial Sequence
  Description of Artificial Sequence: Synthetic oligonucleotide
  Target: LAMA2; (+) strand; PAM type: NRG; PAM sequence: GGG
gtcagtgtggcgattcctca

SEQ ID NO: 132392 - DNA, 20 bp, Artificial Sequence
  Description of Artificial Sequence: Synthetic oligonucleotide
  Target: LAMA2; (+) strand; PAM type: NRG; PAM sequence: TAG
gtggcgattcctcagggatc

SEQ ID NO: 132393 - DNA, 20 bp, Artificial Sequence
  Description of Artificial Sequence: Synthetic oligonucleotide
  Target: LAMA2; (+) strand; PAM type: NRG; PAM sequence: TAG
attcctcagggatctagaac

SEQ ID NO: 132394 - DNA, 20 bp, Artificial Sequence
  Description of Artificial Sequence: Synthetic oligonucleotide
  Target: LAMA2; (+) strand; PAM type: NRG; PAM sequence: CAG
actagaaataccatttgacc

SEQ ID NO: 132395 - DNA, 20 bp, Artificial Sequence
  Description of Artificial Sequence: Synthetic oligonucleotide
  Target: LAMA2; (+) strand; PAM type: NRG; PAM sequence: TGG
tgacccagccatcccattac

SEQ ID NO: 132396 - DNA, 20 bp, Artificial Sequence
  Description of Artificial Sequence: Synthetic oligonucleotide
  Target: LAMA2; (+) strand; PAM type: NRG; PAM sequence: GGG
gacccagccatcccattact

SEQ ID NO: 132397 - DNA, 20 bp, Artificial Sequence
  Description of Artificial Sequence: Synthetic oligonucleotide
  Target: LAMA2; (+) strand; PAM type: NRG; PAM sequence: GAG
tactgggtatatacccaaat

SEQ ID NO: 132398 - DNA, 20 bp, Artificial Sequence
  Description of Artificial Sequence: Synthetic oligonucleotide
  Target: LAMA2; (+) strand; PAM type: NRG; PAM sequence: AAG
gtataaatcatgctgctata

SEQ ID NO: 132399 - DNA, 20 bp, Artificial Sequence
  Description of Artificial Sequence: Synthetic oligonucleotide
  Target: LAMA2; (+) strand; PAM type: NRG; PAM sequence: CGG
atgcacacgtatgtttattg

SEQ ID NO: 132400 - DNA, 20 bp, Artificial Sequence
  Description of Artificial Sequence: Synthetic oligonucleotide
  Target: LAMA2; (+) strand; PAM type: NRG; PAM sequence: TAG
tattgcggcactattcacaa

SEQ ID NO: 132401 - DNA, 20 bp, Artificial Sequence
  Description of Artificial Sequence: Synthetic oligonucleotide
  Target: LAMA2; (+) strand; PAM type: NRG; PAM sequence: AAG
cggcactattcacaatagca

SEQ ID NO: 132402 - DNA, 20 bp, Artificial Sequence
  Description of Artificial Sequence: Synthetic oligonucleotide
  Target: LAMA2; (+) strand; PAM type: NRG; PAM sequence: TGG
tattcacaatagcaaagact

SEQ ID NO: 132403 - DNA, 20 bp, Artificial Sequence
  Description of Artificial Sequence: Synthetic oligonucleotide
  Target: LAMA2; (+) strand; PAM type: NRG; PAM sequence: TAG
acccaaatgtccaacaatga

SEQ ID NO: 132404 - DNA, 20 bp, Artificial Sequence
  Description of Artificial Sequence: Synthetic oligonucleotide
  Target: LAMA2; (+) strand; PAM type: NRG; PAM sequence: TGG
aatgtccaacaatgatagac

SEQ ID NO: 132405 - DNA, 20 bp, Artificial Sequence
  Description of Artificial Sequence: Synthetic oligonucleotide
  Target: LAMA2; (+) strand; PAM type: NRG; PAM sequence: AAG
caacaatgatagactggatt

SEQ ID NO: 132406 - DNA, 20 bp, Artificial Sequence
  Description of Artificial Sequence: Synthetic oligonucleotide
  Target: LAMA2; (+) strand; PAM type: NRG; PAM sequence: TGG
tagactggattaagaaaatg

SEQ ID NO: 132407 - DNA, 20 bp, Artificial Sequence
  Description of Artificial Sequence: Synthetic oligonucleotide
  Target: LAMA2; (+) strand; PAM type: NRG; PAM sequence: TGG
aatgtggcacatatacacca

SEQ ID NO: 132408 - DNA, 20 bp, Artificial Sequence
  Description of Artificial Sequence: Synthetic oligonucleotide
  Target: LAMA2; (+) strand; PAM type: NRG; PAM sequence: CAG
atacaccatggaatactatg

SEQ ID NO: 132409 - DNA, 20 bp, Artificial Sequence
  Description of Artificial Sequence: Synthetic oligonucleotide
  Target: LAMA2; (+) strand; PAM type: NRG; PAM sequence: GAG
atgcagccataaaaaatgat

SEQ ID NO: 132410 - DNA, 20 bp, Artificial Sequence
  Description of Artificial Sequence: Synthetic oligonucleotide
  Target: LAMA2; (+) strand; PAM type: NRG; PAM sequence: TAG
tgatgagttcatatcctttg

SEQ ID NO: 132411 - DNA, 20 bp, Artificial Sequence
  Description of Artificial Sequence: Synthetic oligonucleotide
  Target: LAMA2; (+) strand; PAM type: NRG; PAM sequence: AGG
gatgagttcatatcctttgt

SEQ ID NO: 132412 - DNA, 20 bp, Artificial Sequence
  Description of Artificial Sequence: Synthetic oligonucleotide
  Target: LAMA2; (+) strand; PAM type: NRG; PAM sequence: GGG
atgagttcatatcctttgta

SEQ ID NO: 132413 - DNA, 20 bp, Artificial Sequence
  Description of Artificial Sequence: Synthetic oligonucleotide
  Target: LAMA2; (+) strand; PAM type: NRG; PAM sequence: TGG
tcatatcctttgtagggaca

SEQ ID NO: 132414 - DNA, 20 bp, Artificial Sequence
  Description of Artificial Sequence: Synthetic oligonucleotide
  Target: LAMA2; (+) strand; PAM type: NRG; PAM sequence: TGG
tgtagggacatggatgaaat

SEQ ID NO: 132415 - DNA, 20 bp, Artificial Sequence
  Description of Artificial Sequence: Synthetic oligonucleotide
  Target: LAMA2; (+) strand; PAM type: NRG; PAM sequence: CAG
aaattggaaaccatcattct

SEQ ID NO: 132416 - DNA, 20 bp, Artificial Sequence
  Description of Artificial Sequence: Synthetic oligonucleotide
  Target: LAMA2; (+) strand; PAM type: NRG; PAM sequence: AAG
cattctcagtaaactatcgc

SEQ ID NO: 132417 - DNA, 20 bp, Artificial Sequence
  Description of Artificial Sequence: Synthetic oligonucleotide
  Target: LAMA2; (+) strand; PAM type: NRG; PAM sequence: TAG
acaccgcatattctcactca

SEQ ID NO: 132418 - DNA, 20 bp, Artificial Sequence
  Description of Artificial Sequence: Synthetic oligonucleotide
  Target: LAMA2; (+) strand; PAM type: NRG; PAM sequence: AGG
caccgcatattctcactcat

SEQ ID NO: 132419 - DNA, 20 bp, Artificial Sequence
  Description of Artificial Sequence: Synthetic oligonucleotide
  Target: LAMA2; (+) strand; PAM type: NRG; PAM sequence: TGG
cgcatattctcactcatagg

SEQ ID NO: 132420 - DNA, 20 bp, Artificial Sequence
  Description of Artificial Sequence: Synthetic oligonucleotide
  Target: LAMA2; (+) strand; PAM type: NRG; PAM sequence: GGG
gcatattctcactcataggt

SEQ ID NO: 132421 - DNA, 20 bp, Artificial Sequence
  Description of Artificial Sequence: Synthetic oligonucleotide
  Target: LAMA2; (+) strand; PAM type: NRG; PAM sequence: GAG
ataggtgggaattgaacaat

SEQ ID NO: 132422 - DNA, 20 bp, Artificial Sequence
  Description of Artificial Sequence: Synthetic oligonucleotide
  Target: LAMA2; (+) strand; PAM type: NRG; PAM sequence: TGG
aattgaacaatgagatcaca

SEQ ID NO: 132423 - DNA, 20 bp, Artificial Sequence
  Description of Artificial Sequence: Synthetic oligonucleotide
  Target: LAMA2; (+) strand; PAM type: NRG; PAM sequence: CAG
acaatgagatcacatggaca

SEQ ID NO: 132424 - DNA, 20 bp, Artificial Sequence
  Description of Artificial Sequence: Synthetic oligonucleotide
  Target: LAMA2; (+) strand; PAM type: NRG; PAM sequence: AGG
caatgagatcacatggacac

SEQ ID NO: 132425 - DNA, 20 bp, Artificial Sequence
  Description of Artificial Sequence: Synthetic oligonucleotide
  Target: LAMA2; (+) strand; PAM type: NRG; PAM sequence: AAG
tgagatcacatggacacagg

SEQ ID NO: 132426 - DNA, 20 bp, Artificial Sequence
  Description of Artificial Sequence: Synthetic oligonucleotide
  Target: LAMA2; (+) strand; PAM type: NRG; PAM sequence: AGG
gagatcacatggacacagga

SEQ ID NO: 132427 - DNA, 20 bp, Artificial Sequence
  Description of Artificial Sequence: Synthetic oligonucleotide
  Target: LAMA2; (+) strand; PAM type: NRG; PAM sequence: GGG
agatcacatggacacaggaa

SEQ ID NO: 132428 - DNA, 20 bp, Artificial Sequence
  Description of Artificial Sequence: Synthetic oligonucleotide
  Target: LAMA2; (+) strand; PAM type: NRG; PAM sequence: GGG
gatcacatggacacaggaag

SEQ ID NO: 132429 - DNA, 20 bp, Artificial Sequence
  Description of Artificial Sequence: Synthetic oligonucleotide
  Target: LAMA2; (+) strand; PAM type: NRG; PAM sequence: TGG
ggaaggggaatatcacactc

SEQ ID NO: 132430 - DNA, 20 bp, Artificial Sequence
  Description of Artificial Sequence: Synthetic oligonucleotide
  Target: LAMA2; (+) strand; PAM type: NRG; PAM sequence: GGG
gaaggggaatatcacactct

SEQ ID NO: 132431 - DNA, 20 bp, Artificial Sequence
  Description of Artificial Sequence: Synthetic oligonucleotide
  Target: LAMA2; (+) strand; PAM type: NRG; PAM sequence: GGG
aaggggaatatcacactctg

SEQ ID NO: 132432 - DNA, 20 bp, Artificial Sequence
  Description of Artificial Sequence: Synthetic oligonucleotide
  Target: LAMA2; (+) strand; PAM type: NRG; PAM sequence: TGG
atatcacactctggggactg

SEQ ID NO: 132433 - DNA, 20 bp, Artificial Sequence
  Description of Artificial Sequence: Synthetic oligonucleotide
  Target: LAMA2; (+) strand; PAM type: NRG; PAM sequence: TGG
tcacactctggggactgtgg

SEQ ID NO: 132434 - DNA, 20 bp, Artificial Sequence
  Description of Artificial Sequence: Synthetic oligonucleotide
  Target: LAMA2; (+) strand; PAM type: NRG; PAM sequence: GGG
cacactctggggactgtggt

SEQ ID NO: 132435 - DNA, 20 bp, Artificial Sequence
  Description of Artificial Sequence: Synthetic oligonucleotide
  Target: LAMA2; (+) strand; PAM type: NRG; PAM sequence: GGG
acactctggggactgtggtg

SEQ ID NO: 132436 - DNA, 20 bp, Artificial Sequence
  Description of Artificial Sequence: Synthetic oligonucleotide
  Target: LAMA2; (+) strand; PAM type: NRG; PAM sequence: CGG
tctggggactgtggtggggt

SEQ ID NO: 132437 - DNA, 20 bp, Artificial Sequence
  Description of Artificial Sequence: Synthetic oligonucleotide
  Target: LAMA2; (+) strand; PAM type: NRG; PAM sequence: GGG
ctggggactgtggtggggtc

SEQ ID NO: 132438 - DNA, 20 bp, Artificial Sequence
  Description of Artificial Sequence: Synthetic oligonucleotide
  Target: LAMA2; (+) strand; PAM type: NRG; PAM sequence: GGG
tggggactgtggtggggtcg

SEQ ID NO: 132439 - DNA, 20 bp, Artificial Sequence
  Description of Artificial Sequence: Synthetic oligonucleotide
  Target: LAMA2; (+) strand; PAM type: NRG; PAM sequence: GGG
ggggactgtggtggggtcgg

SEQ ID NO: 132440 - DNA, 20 bp, Artificial Sequence
  Description of Artificial Sequence: Synthetic oligonucleotide
  Target: LAMA2; (+) strand; PAM type: NRG; PAM sequence: GAG
ggactgtggtggggtcgggg

SEQ ID NO: 132441 - DNA, 20 bp, Artificial Sequence
  Description of Artificial Sequence: Synthetic oligonucleotide
  Target: LAMA2; (+) strand; PAM type: NRG; PAM sequence: AGG
gactgtggtggggtcggggg

SEQ ID NO: 132442 - DNA, 20 bp, Artificial Sequence
  Description of Artificial Sequence: Synthetic oligonucleotide
  Target: LAMA2; (+) strand; PAM type: NRG; PAM sequence: GGG
actgtggtggggtcggggga

SEQ ID NO: 132443 - DNA, 20 bp, Artificial Sequence
  Description of Artificial Sequence: Synthetic oligonucleotide
  Target: LAMA2; (+) strand; PAM type: NRG; PAM sequence: GGG
ctgtggtggggtcgggggag

SEQ ID NO: 132444 - DNA, 20 bp, Artificial Sequence
  Description of Artificial Sequence: Synthetic oligonucleotide
  Target: LAMA2; (+) strand; PAM type: NRG; PAM sequence: GGG
tgtggtggggtcgggggagg

SEQ ID NO: 132445 - DNA, 20 bp, Artificial Sequence
  Description of Artificial Sequence: Synthetic oligonucleotide
  Target: LAMA2; (+) strand; PAM type: NRG; PAM sequence: GGG
gtggtggggtcgggggaggg

SEQ ID NO: 132446 - DNA, 20 bp, Artificial Sequence
  Description of Artificial Sequence: Synthetic oligonucleotide
  Target: LAMA2; (+) strand; PAM type: NRG; PAM sequence: GAG
ggtggggtcgggggaggggg

SEQ ID NO: 132447 - DNA, 20 bp, Artificial Sequence
  Description of Artificial Sequence: Synthetic oligonucleotide
  Target: LAMA2; (+) strand; PAM type: NRG; PAM sequence: AGG
gtggggtcgggggagggggg

SEQ ID NO: 132448 - DNA, 20 bp, Artificial Sequence
  Description of Artificial Sequence: Synthetic oligonucleotide
  Target: LAMA2; (+) strand; PAM type: NRG; PAM sequence: GGG
tggggtcgggggagggggga

SEQ ID NO: 132449 - DNA, 20 bp, Artificial Sequence
  Description of Artificial Sequence: Synthetic oligonucleotide
  Target: LAMA2; (+) strand; PAM type: NRG; PAM sequence: TAG
gtcgggggaggggggaggga

SEQ ID NO: 132450 - DNA, 20 bp, Artificial Sequence
  Description of Artificial Sequence: Synthetic oligonucleotide
  Target: LAMA2; (+) strand; PAM type: NRG; PAM sequence: TGG
ggaggggggagggatagcat

SEQ ID NO: 132451 - DNA, 20 bp, Artificial Sequence
  Description of Artificial Sequence: Synthetic oligonucleotide
  Target: LAMA2; (+) strand; PAM type: NRG; PAM sequence: GGG
gaggggggagggatagcatt

SEQ ID NO: 132452 - DNA, 20 bp, Artificial Sequence
  Description of Artificial Sequence: Synthetic oligonucleotide
  Target: LAMA2; (+) strand; PAM type: NRG; PAM sequence: GAG
ggggggagggatagcattgg

SEQ ID NO: 132453 - DNA, 20 bp, Artificial Sequence
  Description of Artificial Sequence: Synthetic oligonucleotide
  Target: LAMA2; (+) strand; PAM type: NRG; PAM sequence: TAG
ttgggagatatacctaatgc

SEQ ID NO: 132454 - DNA, 20 bp, Artificial Sequence
  Description of Artificial Sequence: Synthetic oligonucleotide
  Target: LAMA2; (+) strand; PAM type: NRG; PAM sequence: TAG
cctaatgctagatgacacat

SEQ ID NO: 132455 - DNA, 20 bp, Artificial Sequence
  Description of Artificial Sequence: Synthetic oligonucleotide
  Target: LAMA2; (+) strand; PAM type: NRG; PAM sequence: TGG
aatgctagatgacacattag

SEQ ID NO: 132456 - DNA, 20 bp, Artificial Sequence
  Description of Artificial Sequence: Synthetic oligonucleotide
  Target: LAMA2; (+) strand; PAM type: NRG; PAM sequence: GGG
atgctagatgacacattagt

SEQ ID NO: 132457 - DNA, 20 bp, Artificial Sequence
  Description of Artificial Sequence: Synthetic oligonucleotide
  Target: LAMA2; (+) strand; PAM type: NRG; PAM sequence: CAG
agatgacacattagtgggtg

SEQ ID NO: 132458 - DNA, 20 bp, Artificial Sequence
  Description of Artificial Sequence: Synthetic oligonucleotide
  Target: LAMA2; (+) strand; PAM type: NRG; PAM sequence: CAG
cattagtgggtgcagcgcac

SEQ ID NO: 132459 - DNA, 20 bp, Artificial Sequence
  Description of Artificial Sequence: Synthetic oligonucleotide
  Target: LAMA2; (+) strand; PAM type: NRG; PAM sequence: TGG
gtgggtgcagcgcaccagca

SEQ ID NO: 132460 - DNA, 20 bp, Artificial Sequence
  Description of Artificial Sequence: Synthetic oligonucleotide
  Target: LAMA2; (+) strand; PAM type: NRG; PAM sequence: TAG
tgcacatgtaccctaaaact

SEQ ID NO: 132461 - DNA, 20 bp, Artificial Sequence
  Description of Artificial Sequence: Synthetic oligonucleotide
  Target: LAMA2; (+) strand; PAM type: NRG; PAM sequence: GAG
cacatgtaccctaaaactta

SEQ ID NO: 132462 - DNA, 20 bp, Artificial Sequence
  Description of Artificial Sequence: Synthetic oligonucleotide
  Target: LAMA2; (+) strand; PAM type: NRG; PAM sequence: AAG
aaaaaaaaaaaaaaaaaaaa

SEQ ID NO: 132463 - DNA, 20 bp, Artificial Sequence
  Description of Artificial Sequence: Synthetic oligonucleotide
  Target: LAMA2; (+) strand; PAM type: NRG; PAM sequence: AAG
aaaaaaaaaaaaaaaaaaag

SEQ ID NO: 132464 - DNA, 20 bp, Artificial Sequence
  Description of Artificial Sequence: Synthetic oligonucleotide
  Target: LAMA2; (+) strand; PAM type: NRG; PAM sequence: TGG
aaaagaagtatgatgacaaa

SEQ ID NO: 132465 - DNA, 20 bp, Artificial Sequence
  Description of Artificial Sequence: Synthetic oligonucleotide
  Target: LAMA2; (+) strand; PAM type: NRG; PAM sequence: TGG
cttgcacctatatgtacttc

SEQ ID NO: 132466 - DNA, 20 bp, Artificial Sequence
  Description of Artificial Sequence: Synthetic oligonucleotide
  Target: LAMA2; (+) strand; PAM type: NRG; PAM sequence: GGG
ttgcacctatatgtacttct

SEQ ID NO: 132467 - DNA, 20 bp, Artificial Sequence
  Description of Artificial Sequence: Synthetic oligonucleotide
  Target: LAMA2; (+) strand; PAM type: NRG; PAM sequence: TAG
atatgtacttctgggaaatt

SEQ ID NO: 132468 - DNA, 20 bp, Artificial Sequence
  Description of Artificial Sequence: Synthetic oligonucleotide
  Target: LAMA2; (+) strand; PAM type: NRG; PAM sequence: CAG
gtacttctgggaaatttagc

SEQ ID NO: 132469 - DNA, 20 bp, Artificial Sequence
  Description of Artificial Sequence: Synthetic oligonucleotide
  Target: LAMA2; (+) strand; PAM type: NRG; PAM sequence: CAG
cagcatgtatttccacaata

SEQ ID NO: 132470 - DNA, 20 bp, Artificial Sequence
  Description of Artificial Sequence: Synthetic oligonucleotide
  Target: LAMA2; (+) strand; PAM type: NRG; PAM sequence: AGG
agcatgtatttccacaatac

SEQ ID NO: 132471 - DNA, 20 bp, Artificial Sequence
  Description of Artificial Sequence: Synthetic oligonucleotide
  Target: LAMA2; (+) strand; PAM type: NRG; PAM sequence: GGG
gcatgtatttccacaataca

SEQ ID NO: 132472 - DNA, 20 bp, Artificial Sequence
  Description of Artificial Sequence: Synthetic oligonucleotide
  Target: LAMA2; (+) strand; PAM type: NRG; PAM sequence: TAG
gtatttccacaatacaggga

SEQ ID NO: 132473 - DNA, 20 bp, Artificial Sequence
  Description of Artificial Sequence: Synthetic oligonucleotide
  Target: LAMA2; (+) strand; PAM type: NRG; PAM sequence: TGG
cagggatagtttttgttctg

SEQ ID NO: 132474 - DNA, 20 bp, Artificial Sequence
  Description of Artificial Sequence: Synthetic oligonucleotide
  Target: LAMA2; (+) strand; PAM type: NRG; PAM sequence: CAG
tgtggactgctaaatgatca

SEQ ID NO: 132475 - DNA, 20 bp, Artificial Sequence
  Description of Artificial Sequence: Synthetic oligonucleotide
  Target: LAMA2; (+) strand; PAM type: NRG; PAM sequence: CAG
agcctaatgtattgccttct

SEQ ID NO: 132476 - DNA, 20 bp, Artificial Sequence
  Description of Artificial Sequence: Synthetic oligonucleotide
  Target: LAMA2; (+) strand; PAM type: NRG; PAM sequence: CAG
aaacacacgttgacttaaat

SEQ ID NO: 132477 - DNA, 20 bp, Artificial Sequence
  Description of Artificial Sequence: Synthetic oligonucleotide
  Target: LAMA2; (+) strand; PAM type: NRG; PAM sequence: TGG
acacgttgacttaaatcagt

SEQ ID NO: 132478 - DNA, 20 bp, Artificial Sequence
  Description of Artificial Sequence: Synthetic oligonucleotide
  Target: LAMA2; (+) strand; PAM type: NRG; PAM sequence: GGG
cacgttgacttaaatcagtt

SEQ ID NO: 132479 - DNA, 20 bp, Artificial Sequence
  Description of Artificial Sequence: Synthetic oligonucleotide
  Target: LAMA2; (+) strand; PAM type: NRG; PAM sequence: TAG
tcaattccttactttgactt

SEQ ID NO: 132480 - DNA, 20 bp, Artificial Sequence
  Description of Artificial Sequence: Synthetic oligonucleotide
  Target: LAMA2; (+) strand; PAM type: NRG; PAM sequence: AAG
ttgactttagtttgcaaatt

SEQ ID NO: 132481 - DNA, 20 bp, Artificial Sequence
  Description of Artificial Sequence: Synthetic oligonucleotide
  Target: LAMA2; (+) strand; PAM type: NRG; PAM sequence: TAG
tttagtttgcaaattaagaa

SEQ ID NO: 132482 - DNA, 20 bp, Artificial Sequence
  Description of Artificial Sequence: Synthetic oligonucleotide
  Target: LAMA2; (+) strand; PAM type: NRG; PAM sequence: CAG
tagtgtacttttcttatttt

SEQ ID NO: 132483 - DNA, 20 bp, Artificial Sequence
  Description of Artificial Sequence: Synthetic oligonucleotide
  Target: LAMA2; (+) strand; PAM type: NRG; PAM sequence: AGG
agtgtacttttcttattttc

SEQ ID NO: 132484 - DNA, 20 bp, Artificial Sequence
  Description of Artificial Sequence: Synthetic oligonucleotide
  Target: LAMA2; (+) strand; PAM type: NRG; PAM sequence: CAG
tgctatacactattatgtta

SEQ ID NO: 132485 - DNA, 20 bp, Artificial Sequence
  Description of Artificial Sequence: Synthetic oligonucleotide
  Target: LAMA2; (+) strand; PAM type: NRG; PAM sequence: CAG
cttcataatattctattaac

SEQ ID NO: 132486 - DNA, 20 bp, Artificial Sequence
  Description of Artificial Sequence: Synthetic oligonucleotide
  Target: LAMA2; (+) strand; PAM type: NRG; PAM sequence: CAG
ctttttcataaaacactttt

SEQ ID NO: 132487 - DNA, 20 bp, Artificial Sequence
  Description of Artificial Sequence: Synthetic oligonucleotide
  Target: LAMA2; (+) strand; PAM type: NRG; PAM sequence: AGG
tttttcataaaacacttttc

SEQ ID NO: 132488 - DNA, 20 bp, Artificial Sequence
  Description of Artificial Sequence: Synthetic oligonucleotide
  Target: LAMA2; (+) strand; PAM type: NRG; PAM sequence: TAG
cacttttcaggatatatata

SEQ ID NO: 132489 - DNA, 20 bp, Artificial Sequence
  Description of Artificial Sequence: Synthetic oligonucleotide
  Target: LAMA2; (+) strand; PAM type: NRG; PAM sequence: TAG
tttcaggatatatatatagt

SEQ ID NO: 132490 - DNA, 20 bp, Artificial Sequence
  Description of Artificial Sequence: Synthetic oligonucleotide
  Target: LAMA2; (+) strand; PAM type: NRG; PAM sequence: AGG
ttcaggatatatatatagtt

SEQ ID NO: 132491 - DNA, 20 bp, Artificial Sequence
  Description of Artificial Sequence: Synthetic oligonucleotide
  Target: LAMA2; (+) strand; PAM type: NRG; PAM sequence: GGG
tcaggatatatatatagtta

SEQ ID NO: 132492 - DNA, 20 bp, Artificial Sequence
  Description of Artificial Sequence: Synthetic oligonucleotide
  Target: LAMA2; (+) strand; PAM type: NRG; PAM sequence: AAG
tttatgcaatccgaattttc

SEQ ID NO: 132493 - DNA, 20 bp, Artificial Sequence
  Description of Artificial Sequence: Synthetic oligonucleotide
  Target: LAMA2; (+) strand; PAM type: NRG; PAM sequence: TGG
aattttcaagtaaaacctca

SEQ ID NO: 132494 - DNA, 20 bp, Artificial Sequence
  Description of Artificial Sequence: Synthetic oligonucleotide
  Target: LAMA2; (+) strand; PAM type: NRG; PAM sequence: CAG
gtaaaacctcatggaattat

SEQ ID NO: 132495 - DNA, 20 bp, Artificial Sequence
  Description of Artificial Sequence: Synthetic oligonucleotide
  Target: LAMA2; (+) strand; PAM type: NRG; PAM sequence: GAG
acttttataacacatctgct

SEQ ID NO: 132496 - DNA, 20 bp, Artificial Sequence
  Description of Artificial Sequence: Synthetic oligonucleotide
  Target: LAMA2; (+) strand; PAM type: NRG; PAM sequence: CAG
taacacatctgctgagtttt

SEQ ID NO: 132497 - DNA, 20 bp, Artificial Sequence
  Description of Artificial Sequence: Synthetic oligonucleotide
  Target: LAMA2; (+) strand; PAM type: NRG; PAM sequence: TGG
gagttttcagacattcattc

SEQ ID NO: 132498 - DNA, 20 bp, Artificial Sequence
  Description of Artificial Sequence: Synthetic oligonucleotide
  Target: LAMA2; (+) strand; PAM type: NRG; PAM sequence: AAG
tttcagacattcattctgga

SEQ ID NO: 132499 - DNA, 20 bp, Artificial Sequence
  Description of Artificial Sequence: Synthetic oligonucleotide
  Target: LAMA2; (+) strand; PAM type: NRG; PAM sequence: TGG
tctggaaagaaaaaacatgc

SEQ ID NO: 132500 - DNA, 20 bp, Artificial Sequence
  Description of Artificial Sequence: Synthetic oligonucleotide
  Target: LAMA2; (+) strand; PAM type: NRG; PAM sequence: AAG
gaaagaaaaaacatgctgga

SEQ ID NO: 132501 - DNA, 20 bp, Artificial Sequence
  Description of Artificial Sequence: Synthetic oligonucleotide
  Target: LAMA2; (+) strand; PAM type: NRG; PAM sequence: AAG
tgtgttttattttaaataaa

SEQ ID NO: 132502 - DNA, 20 bp, Artificial Sequence
  Description of Artificial Sequence: Synthetic oligonucleotide
  Target: LAMA2; (+) strand; PAM type: NRG; PAM sequence: TAG
attttaaataaaaagtccta

SEQ ID NO: 132503 - DNA, 20 bp, Artificial Sequence
  Description of Artificial Sequence: Synthetic oligonucleotide
  Target: LAMA2; (+) strand; PAM type: NRG; PAM sequence: AGG
ttttaaataaaaagtcctat

SEQ ID NO: 132504 - DNA, 20 bp, Artificial Sequence
  Description of Artificial Sequence: Synthetic oligonucleotide
  Target: LAMA2; (+) strand; PAM type: NRG; PAM sequence: AAG
ttttttttctgaaaaacatt

SEQ ID NO: 132505 - DNA, 20 bp, Artificial Sequence
  Description of Artificial Sequence: Synthetic oligonucleotide
  Target: LAMA2; (+) strand; PAM type: NRG; PAM sequence: AGG
tttttttctgaaaaacatta

SEQ ID NO: 132506 - DNA, 20 bp, Artificial Sequence
  Description of Artificial Sequence: Synthetic oligonucleotide
  Target: LAMA2; (+) strand; PAM type: NRG; PAM sequence: AAG
acattaaggtttctttccca

SEQ ID NO: 132507 - DNA, 20 bp, Artificial Sequence
  Description of Artificial Sequence: Synthetic oligonucleotide
  Target: LAMA2; (+) strand; PAM type: NRG; PAM sequence: TAG
gtttctttcccaaagcttat

SEQ ID NO: 132508 - DNA, 20 bp, Artificial Sequence
  Description of Artificial Sequence: Synthetic oligonucleotide
  Target: LAMA2; (+) strand; PAM type: NRG; PAM sequence: CAG
aaagcttattagttaattgt

SEQ ID NO: 132509 - DNA, 20 bp, Artificial Sequence
  Description of Artificial Sequence: Synthetic oligonucleotide
  Target: LAMA2; (+) strand; PAM type: NRG; PAM sequence: AAG
ttaattgtcagtttttatgt

SEQ ID NO: 132510 - DNA, 20 bp, Artificial Sequence
  Description of Artificial Sequence: Synthetic oligonucleotide
  Target: LAMA2; (+) strand; PAM type: NRG; PAM sequence: GAG
cagtttttatgtaagcccat

SEQ ID NO: 132511 - DNA, 20 bp, Artificial Sequence
  Description of Artificial Sequence: Synthetic oligonucleotide
  Target: LAMA2; (+) strand; PAM type: NRG; PAM sequence: AGG
agtttttatgtaagcccatg

SEQ ID NO: 132512 - DNA, 20 bp, Artificial Sequence
  Description of Artificial Sequence: Synthetic oligonucleotide
  Target: LAMA2; (+) strand; PAM type: NRG; PAM sequence: TAG
tttatgtaagcccatgaggt

SEQ ID NO: 132513 - DNA, 20 bp, Artificial Sequence
  Description of Artificial Sequence: Synthetic oligonucleotide
  Target: LAMA2; (+) strand; PAM type: NRG; PAM sequence: AAG
ccatgaggttagacctatat

SEQ ID NO: 132514 - DNA, 20 bp, Artificial Sequence
  Description of Artificial Sequence: Synthetic oligonucleotide
  Target: LAMA2; (+) strand; PAM type: NRG; PAM sequence: AGG
catgaggttagacctatata

SEQ ID NO: 132515 - DNA, 20 bp, Artificial Sequence
  Description of Artificial Sequence: Synthetic oligonucleotide
  Target: LAMA2; (+) strand; PAM type: NRG; PAM sequence: CAG
gaggttagacctatataagg

SEQ ID NO: 132516 - DNA, 20 bp, Artificial Sequence
  Description of Artificial Sequence: Synthetic oligonucleotide
  Target: LAMA2; (+) strand; PAM type: NRG; PAM sequence: TAG
ttttcttccttcttctttat

SEQ ID NO: 132517 - DNA, 20 bp, Artificial Sequence
  Description of Artificial Sequence: Synthetic oligonucleotide
  Target: LAMA2; (+) strand; PAM type: NRG; PAM sequence: TAG
aatatgcatatctcttttta

SEQ ID NO: 132518 - DNA, 20 bp, Artificial Sequence
  Description of Artificial Sequence: Synthetic oligonucleotide
  Target: LAMA2; (+) strand; PAM type: NRG; PAM sequence: AGG
atatgcatatctctttttat

SEQ ID NO: 132519 - DNA, 20 bp, Artificial Sequence
  Description of Artificial Sequence: Synthetic oligonucleotide
  Target: LAMA2; (+) strand; PAM type: NRG; PAM sequence: GAG
atgcatatctctttttatag

SEQ ID NO: 132520 - DNA, 20 bp, Artificial Sequence
  Description of Artificial Sequence: Synthetic oligonucleotide
  Target: LAMA2; (+) strand; PAM type: NRG; PAM sequence: AAG
atatctctttttataggaga

SEQ ID NO: 132521 - DNA, 20 bp, Artificial Sequence
  Description of Artificial Sequence: Synthetic oligonucleotide
  Target: LAMA2; (+) strand; PAM type: NRG; PAM sequence: AGG
tatctctttttataggagaa

SEQ ID NO: 132522 - DNA, 20 bp, Artificial Sequence
  Description of Artificial Sequence: Synthetic oligonucleotide
  Target: LAMA2; (+) strand; PAM type: NRG; PAM sequence: TGG
tctttttataggagaaagga

SEQ ID NO: 132523 - DNA, 20 bp, Artificial Sequence
  Description of Artificial Sequence: Synthetic oligonucleotide
  Target: LAMA2; (+) strand; PAM type: NRG; PAM sequence: CAG
gaaaggatggataatgattg

SEQ ID NO: 132524 - DNA, 20 bp, Artificial Sequence
  Description of Artificial Sequence: Synthetic oligonucleotide
  Target: LAMA2; (+) strand; PAM type: NRG; PAM sequence: TAG
accactctaatatctcaccc

SEQ ID NO: 132525 - DNA, 20 bp, Artificial Sequence
  Description of Artificial Sequence: Synthetic oligonucleotide
  Target: LAMA2; (+) strand; PAM type: NRG; PAM sequence: CAG
tgatttactaacattctcat

SEQ ID NO: 132526 - DNA, 20 bp, Artificial Sequence
  Description of Artificial Sequence: Synthetic oligonucleotide
  Target: LAMA2; (+) strand; PAM type: NRG; PAM sequence: AGG
gatttactaacattctcatc

SEQ ID NO: 132527 - DNA, 20 bp, Artificial Sequence
  Description of Artificial Sequence: Synthetic oligonucleotide
  Target: LAMA2; (+) strand; PAM type: NRG; PAM sequence: AAG
tttattataaaataatatca

SEQ ID NO: 132528 - DNA, 20 bp, Artificial Sequence
  Description of Artificial Sequence: Synthetic oligonucleotide
  Target: LAMA2; (+) strand; PAM type: NRG; PAM sequence: TGG
cttgtattttaccaaattca

SEQ ID NO: 132529 - DNA, 20 bp, Artificial Sequence
  Description of Artificial Sequence: Synthetic oligonucleotide
  Target: LAMA2; (+) strand; PAM type: NRG; PAM sequence: GGG
ttgtattttaccaaattcat

SEQ ID NO: 132530 - DNA, 20 bp, Artificial Sequence
  Description of Artificial Sequence: Synthetic oligonucleotide
  Target: LAMA2; (+) strand; PAM type: NRG; PAM sequence: TAG
ttttaccaaattcatgggta

SEQ ID NO: 132531 - DNA, 20 bp, Artificial Sequence
  Description of Artificial Sequence: Synthetic oligonucleotide
  Target: LAMA2; (+) strand; PAM type: NRG; PAM sequence: AAG
tttgatttctcattactttc

SEQ ID NO: 132532 - DNA, 20 bp, Artificial Sequence
  Description of Artificial Sequence: Synthetic oligonucleotide
  Target: LAMA2; (+) strand; PAM type: NRG; PAM sequence: CAG
gtaaaattttaatcaaattt

SEQ ID NO: 132533 - DNA, 20 bp, Artificial Sequence
  Description of Artificial Sequence: Synthetic oligonucleotide
  Target: LAMA2; (+) strand; PAM type: NRG; PAM sequence: GAG
aaaattaataaattgatgtt

SEQ ID NO: 132534 - DNA, 20 bp, Artificial Sequence
  Description of Artificial Sequence: Synthetic oligonucleotide
  Target: LAMA2; (+) strand; PAM type: NRG; PAM sequence: AGG
aaattaataaattgatgttg

SEQ ID NO: 132535 - DNA, 20 bp, Artificial Sequence
  Description of Artificial Sequence: Synthetic oligonucleotide
  Target: LAMA2; (+) strand; PAM type: NRG; PAM sequence: GGG
aattaataaattgatgttga

SEQ ID NO: 132536 - DNA, 20 bp, Artificial Sequence
  Description of Artificial Sequence: Synthetic oligonucleotide
  Target: LAMA2; (+) strand; PAM type: NRG; PAM sequence: AAG
tcacattattttatactgaa

SEQ ID NO: 132537 - DNA, 20 bp, Artificial Sequence
  Description of Artificial Sequence: Synthetic oligonucleotide
  Target: LAMA2; (+) strand; PAM type: NRG; PAM sequence: AAG
aaagttgttcaattattcta

SEQ ID NO: 132538 - DNA, 20 bp, Artificial Sequence
  Description of Artificial Sequence: Synthetic oligonucleotide
  Target: LAMA2; (+) strand; PAM type: NRG; PAM sequence: AAG
aagttctatatattaatcca

SEQ ID NO: 132539 - DNA, 20 bp, Artificial Sequence
  Description of Artificial Sequence: Synthetic oligonucleotide
  Target: LAMA2; (+) strand; PAM type: NRG; PAM sequence: TGG
aatccaaagccgtctctact

SEQ ID NO: 132540 - DNA, 20 bp, Artificial Sequence
  Description of Artificial Sequence: Synthetic oligonucleotide
  Target: LAMA2; (+) strand; PAM type: NRG; PAM sequence: GGG
atccaaagccgtctctactt

SEQ ID NO: 132541 - DNA, 20 bp, Artificial Sequence
  Description of Artificial Sequence: Synthetic oligonucleotide
  Target: LAMA2; (+) strand; PAM type: NRG; PAM sequence: GGG
tccaaagccgtctctacttg

SEQ ID NO: 132542 - DNA, 20 bp, Artificial Sequence
  Description of Artificial Sequence: Synthetic oligonucleotide
  Target: LAMA2; (+) strand; PAM type: NRG; PAM sequence: GGG
ccaaagccgtctctacttgg

SEQ ID NO: 132543 - DNA, 20 bp, Artificial Sequence
  Description of Artificial Sequence: Synthetic oligonucleotide
  Target: LAMA2; (+) strand; PAM type: NRG; PAM sequence: TGG
tatgtgtgtgtataattttt

SEQ ID NO: 132544 - DNA, 20 bp, Artificial Sequence
  Description of Artificial Sequence: Synthetic oligonucleotide
  Target: LAMA2; (+) strand; PAM type: NRG; PAM sequence: GAG
ttttggatctatctatctat

SEQ ID NO: 132545 - DNA, 20 bp, Artificial Sequence
  Description of Artificial Sequence: Synthetic oligonucleotide
  Target: LAMA2; (+) strand; PAM type: NRG; PAM sequence: AGG
tttggatctatctatctatg

SEQ ID NO: 132546 - DNA, 20 bp, Artificial Sequence
  Description of Artificial Sequence: Synthetic oligonucleotide
  Target: LAMA2; (+) strand; PAM type: NRG; PAM sequence: AAG
gaggatgactgccttattac

SEQ ID NO: 132547 - DNA, 20 bp, Artificial Sequence
  Description of Artificial Sequence: Synthetic oligonucleotide
  Target: LAMA2; (+) strand; PAM type: NRG; PAM sequence: CAG
gactgccttattacaagttt

SEQ ID NO: 132548 - DNA, 20 bp, Artificial Sequence
  Description of Artificial Sequence: Synthetic oligonucleotide
  Target: LAMA2; (+) strand; PAM type: NRG; PAM sequence: TGG
ttcagtacaatttatatata

SEQ ID NO: 132549 - DNA, 20 bp, Artificial Sequence
  Description of Artificial Sequence: Synthetic oligonucleotide
  Target: LAMA2; (+) strand; PAM type: NRG; PAM sequence: TGG
atatctacatatatattttt

SEQ ID NO: 132550 - DNA, 20 bp, Artificial Sequence
  Description of Artificial Sequence: Synthetic oligonucleotide
  Target: LAMA2; (+) strand; PAM type: NRG; PAM sequence: TGG
tttttatatatataaacgct

SEQ ID NO: 132551 - DNA, 20 bp, Artificial Sequence
  Description of Artificial Sequence: Synthetic oligonucleotide
  Target: LAMA2; (+) strand; PAM type: NRG; PAM sequence: CAG
acctatctacctataaactt

SEQ ID NO: 132552 - DNA, 20 bp, Artificial Sequence
  Description of Artificial Sequence: Synthetic oligonucleotide
  Target: LAMA2; (+) strand; PAM type: NRG; PAM sequence: TGG
aaacttcagcattttttgtt

SEQ ID NO: 132553 - DNA, 20 bp, Artificial Sequence
  Description of Artificial Sequence: Synthetic oligonucleotide
  Target: LAMA2; (+) strand; PAM type: NRG; PAM sequence: GGG
aacttcagcattttttgttt

SEQ ID NO: 132554 - DNA, 20 bp, Artificial Sequence
  Description of Artificial Sequence: Synthetic oligonucleotide
  Target: LAMA2; (+) strand; PAM type: NRG; PAM sequence: AAG
tttgggtaattaatattttg

SEQ ID NO: 132555 - DNA, 20 bp, Artificial Sequence
  Description of Artificial Sequence: Synthetic oligonucleotide
  Target: LAMA2; (+) strand; PAM type: NRG; PAM sequence: TGG
ctcttgttttccttcttgtt

SEQ ID NO: 132556 - DNA, 20 bp, Artificial Sequence
  Description of Artificial Sequence: Synthetic oligonucleotide
  Target: LAMA2; (+) strand; PAM type: NRG; PAM sequence: GAG
ttgtttggaatgatctgttt

SEQ ID NO: 132557 - DNA, 20 bp, Artificial Sequence
  Description of Artificial Sequence: Synthetic oligonucleotide
  Target: LAMA2; (+) strand; PAM type: NRG; PAM sequence: AAG
tgagactgtgtttttaacaa

SEQ ID NO: 132558 - DNA, 20 bp, Artificial Sequence
  Description of Artificial Sequence: Synthetic oligonucleotide
  Target: LAMA2; (+) strand; PAM type: NRG; PAM sequence: AAG
tttttaacaaaagtatatgt

SEQ ID NO: 132559 - DNA, 20 bp, Artificial Sequence
  Description of Artificial Sequence: Synthetic oligonucleotide
  Target: LAMA2; (+) strand; PAM type: NRG; PAM sequence: AAG
atttttcgctaaacaacaac

SEQ ID NO: 132560 - DNA, 20 bp, Artificial Sequence
  Description of Artificial Sequence: Synthetic oligonucleotide
  Target: LAMA2; (+) strand; PAM type: NRG; PAM sequence: AAG
ttcgctaaacaacaacaaga

SEQ ID NO: 132561 - DNA, 20 bp, Artificial Sequence
  Description of Artificial Sequence: Synthetic oligonucleotide
  Target: LAMA2; (+) strand; PAM type: NRG; PAM sequence: AAG
aaagaccccctaattttgaa

SEQ ID NO: 132562 - DNA, 20 bp, Artificial Sequence
  Description of Artificial Sequence: Synthetic oligonucleotide
  Target: LAMA2; (+) strand; PAM type: NRG; PAM sequence: TGG
tgtccatcaatatcactgtt

SEQ ID NO: 132563 - DNA, 20 bp, Artificial Sequence
  Description of Artificial Sequence: Synthetic oligonucleotide
  Target: LAMA2; (+) strand; PAM type: NRG; PAM sequence: CAG
ccatcaatatcactgtttgg

SEQ ID NO: 132564 - DNA, 20 bp, Artificial Sequence
  Description of Artificial Sequence: Synthetic oligonucleotide
  Target: LAMA2; (+) strand; PAM type: NRG; PAM sequence: AAG
ctgtttggcagtttatcata

SEQ ID NO: 132565 - DNA, 20 bp, Artificial Sequence
  Description of Artificial Sequence: Synthetic oligonucleotide
  Target: LAMA2; (+) strand; PAM type: NRG; PAM sequence: CAG
gtttatcataaagattcaat

SEQ ID NO: 132566 - DNA, 20 bp, Artificial Sequence
  Description of Artificial Sequence: Synthetic oligonucleotide
  Target: LAMA2; (+) strand; PAM type: NRG; PAM sequence: CAG
ataaagattcaatcagtata

SEQ ID NO: 132567 - DNA, 20 bp, Artificial Sequence
  Description of Artificial Sequence: Synthetic oligonucleotide
  Target: LAMA2; (+) strand; PAM type: NRG; PAM sequence: TAG
tataattgaataaataatgt

SEQ ID NO: 132568 - DNA, 20 bp, Artificial Sequence
  Description of Artificial Sequence: Synthetic oligonucleotide
  Target: LAMA2; (+) strand; PAM type: NRG; PAM sequence: AAG
aattgaataaataatgttag

SEQ ID NO: 132569 - DNA, 20 bp, Artificial Sequence
  Description of Artificial Sequence: Synthetic oligonucleotide
  Target: LAMA2; (+) strand; PAM type: NRG; PAM sequence: CAG
aatgttagaagcaaatatca

SEQ ID NO: 132570 - DNA, 20 bp, Artificial Sequence
  Description of Artificial Sequence: Synthetic oligonucleotide
  Target: LAMA2; (+) strand; PAM type: NRG; PAM sequence: AGG
atgttagaagcaaatatcac

SEQ ID NO: 132571 - DNA, 20 bp, Artificial Sequence
  Description of Artificial Sequence: Synthetic oligonucleotide
  Target: LAMA2; (+) strand; PAM type: NRG; PAM sequence: TAG
tagaagcaaatatcacaggc

SEQ ID NO: 132572 - DNA, 20 bp, Artificial Sequence
  Description of Artificial Sequence: Synthetic oligonucleotide
  Target: LAMA2; (+) strand; PAM type: NRG; PAM sequence: AGG
agaagcaaatatcacaggct

SEQ ID NO: 132573 - DNA, 20 bp, Artificial Sequence
  Description of Artificial Sequence: Synthetic oligonucleotide
  Target: LAMA2; (+) strand; PAM type: NRG; PAM sequence: CAG
caaatatcacaggctaggat

SEQ ID NO: 132574 - DNA, 20 bp, Artificial Sequence
  Description of Artificial Sequence: Synthetic oligonucleotide
  Target: LAMA2; (+) strand; PAM type: NRG; PAM sequence: AAG
tcacaggctaggatcagctt

SEQ ID NO: 132575 - DNA, 20 bp, Artificial Sequence
  Description of Artificial Sequence: Synthetic oligonucleotide
  Target: LAMA2; (+) strand; PAM type: NRG; PAM sequence: GAG
ttaagaaatctccaaaatgt

SEQ ID NO: 132576 - DNA, 20 bp, Artificial Sequence
  Description of Artificial Sequence: Synthetic oligonucleotide
  Target: LAMA2; (+) strand; PAM type: NRG; PAM sequence: GAG
aaatgtgagcctacataatt

SEQ ID NO: 132577 - DNA, 20 bp, Artificial Sequence
  Description of Artificial Sequence: Synthetic oligonucleotide
  Target: LAMA2; (+) strand; PAM type: NRG; PAM sequence: AAG
gagcctacataattgagacc

SEQ ID NO: 132578 - DNA, 20 bp, Artificial Sequence
  Description of Artificial Sequence: Synthetic oligonucleotide
  Target: LAMA2; (+) strand; PAM type: NRG; PAM sequence: TGG
agaccaagtgacatttcatt

SEQ ID NO: 132579 - DNA, 20 bp, Artificial Sequence
  Description of Artificial Sequence: Synthetic oligonucleotide
  Target: LAMA2; (+) strand; PAM type: NRG; PAM sequence: TGG
taacatatactatgtaaaaa

SEQ ID NO: 132580 - DNA, 20 bp, Artificial Sequence
  Description of Artificial Sequence: Synthetic oligonucleotide
  Target: LAMA2; (+) strand; PAM type: NRG; PAM sequence: CAG
taaaaatggtattatatttt

SEQ ID NO: 132581 - DNA, 20 bp, Artificial Sequence
  Description of Artificial Sequence: Synthetic oligonucleotide
  Target: LAMA2; (+) strand; PAM type: NRG; PAM sequence: TGG
ttatattttcagtgttttaa

SEQ ID NO: 132582 - DNA, 20 bp, Artificial Sequence
  Description of Artificial Sequence: Synthetic oligonucleotide
  Target: LAMA2; (+) strand; PAM type: NRG; PAM sequence: TAG
aattttaacatgctttctga

SEQ ID NO: 132583 - DNA, 20 bp, Artificial Sequence
  Description of Artificial Sequence: Synthetic oligonucleotide
  Target: LAMA2; (+) strand; PAM type: NRG; PAM sequence: TAG
tatcttttaacttgtgccaa

SEQ ID NO: 132584 - DNA, 20 bp, Artificial Sequence
  Description of Artificial Sequence: Synthetic oligonucleotide
  Target: LAMA2; (+) strand; PAM type: NRG; PAM sequence: TAG
cttgtgccaatagattgttt

SEQ ID NO: 132585 - DNA, 20 bp, Artificial Sequence
  Description of Artificial Sequence: Synthetic oligonucleotide
  Target: LAMA2; (+) strand; PAM type: NRG; PAM sequence: AAG
tgccaatagattgttttagc

SEQ ID NO: 132586 - DNA, 20 bp, Artificial Sequence
  Description of Artificial Sequence: Synthetic oligonucleotide
  Target: LAMA2; (+) strand; PAM type: NRG; PAM sequence: GAG
agattgttttagcaagaaat

SEQ ID NO: 132587 - DNA, 20 bp, Artificial Sequence
  Description of Artificial Sequence: Synthetic oligonucleotide
  Target: LAMA2; (+) strand; PAM type: NRG; PAM sequence: TAG
aaacattcttgccttgatct

SEQ ID NO: 132588 - DNA, 20 bp, Artificial Sequence
  Description of Artificial Sequence: Synthetic oligonucleotide
  Target: LAMA2; (+) strand; PAM type: NRG; PAM sequence: GAG
acattcttgccttgatctta

SEQ ID NO: 132589 - DNA, 20 bp, Artificial Sequence
  Description of Artificial Sequence: Synthetic oligonucleotide
  Target: LAMA2; (+) strand; PAM type: NRG; PAM sequence: AGG
cattcttgccttgatcttag

SEQ ID NO: 132590 - DNA, 20 bp, Artificial Sequence
  Description of Artificial Sequence: Synthetic oligonucleotide
  Target: LAMA2; (+) strand; PAM type: NRG; PAM sequence: TGG
cttgccttgatcttagaggc

SEQ ID NO: 132591 - DNA, 20 bp, Artificial Sequence
  Description of Artificial Sequence: Synthetic oligonucleotide
  Target: LAMA2; (+) strand; PAM type: NRG; PAM sequence: GAG
tgccttgatcttagaggctg

SEQ ID NO: 132592 - DNA, 20 bp, Artificial Sequence
  Description of Artificial Sequence: Synthetic oligonucleotide
  Target: LAMA2; (+) strand; PAM type: NRG; PAM sequence: TAG
tgatcttagaggctggagaa

SEQ ID NO: 132593 - DNA, 20 bp, Artificial Sequence
  Description of Artificial Sequence: Synthetic oligonucleotide
  Target: LAMA2; (+) strand; PAM type: NRG; PAM sequence: AGG
gatcttagaggctggagaat

SEQ ID NO: 132594 - DNA, 20 bp, Artificial Sequence
  Description of Artificial Sequence: Synthetic oligonucleotide
  Target: LAMA2; (+) strand; PAM type: NRG; PAM sequence: CAG
cttagaggctggagaatagg

SEQ ID NO: 132595 - DNA, 20 bp, Artificial Sequence
  Description of Artificial Sequence: Synthetic oligonucleotide
  Target: LAMA2; (+) strand; PAM type: NRG; PAM sequence: CAG
catctcttccgttctttcct

SEQ ID NO: 132596 - DNA, 20 bp, Artificial Sequence
  Description of Artificial Sequence: Synthetic oligonucleotide
  Target: LAMA2; (+) strand; PAM type: NRG; PAM sequence: TAG
ttccgttctttcctcagcct

SEQ ID NO: 132597 - DNA, 20 bp, Artificial Sequence
  Description of Artificial Sequence: Synthetic oligonucleotide
  Target: LAMA2; (+) strand; PAM type: NRG; PAM sequence: AAG
ttctttcctcagccttagtg

SEQ ID NO: 132598 - DNA, 20 bp, Artificial Sequence
  Description of Artificial Sequence: Synthetic oligonucleotide
  Target: LAMA2; (+) strand; PAM type: NRG; PAM sequence: AGG
tctttcctcagccttagtga

SEQ ID NO: 132599 - DNA, 20 bp, Artificial Sequence
  Description of Artificial Sequence: Synthetic oligonucleotide
  Target: LAMA2; (+) strand; PAM type: NRG; PAM sequence: GGG
ctttcctcagccttagtgaa

SEQ ID NO: 132600 - DNA, 20 bp, Artificial Sequence
  Description of Artificial Sequence: Synthetic oligonucleotide
  Target: LAMA2; (+) strand; PAM type: NRG; PAM sequence: GAG
cacccatttatccacaccat

SEQ ID NO: 132601 - DNA, 20 bp, Artificial Sequence
  Description of Artificial Sequence: Synthetic oligonucleotide
  Target: LAMA2; (+) strand; PAM type: NRG; PAM sequence: TGG
ccacaccatgagccatactg

SEQ ID NO: 132602 - DNA, 20 bp, Artificial Sequence
  Description of Artificial Sequence: Synthetic oligonucleotide
  Target: LAMA2; (+) strand; PAM type: NRG; PAM sequence: CAG
catactgtggatcatccact

SEQ ID NO: 132603 - DNA, 20 bp, Artificial Sequence
  Description of Artificial Sequence: Synthetic oligonucleotide
  Target: LAMA2; (+) strand; PAM type: NRG; PAM sequence: CAG
cactcagccaccaactcctg

SEQ ID NO: 132604 - DNA, 20 bp, Artificial Sequence
  Description of Artificial Sequence: Synthetic oligonucleotide
  Target: LAMA2; (+) strand; PAM type: NRG; PAM sequence: AGG
actcagccaccaactcctgc

SEQ ID NO: 132605 - DNA, 20 bp, Artificial Sequence
  Description of Artificial Sequence: Synthetic oligonucleotide
  Target: LAMA2; (+) strand; PAM type: NRG; PAM sequence: CAG
gctgcctctttccaatttta

SEQ ID NO: 132606 - DNA, 20 bp, Artificial Sequence
  Description of Artificial Sequence: Synthetic oligonucleotide
  Target: LAMA2; (+) strand; PAM type: NRG; PAM sequence: CAG
ttacagccactgccttcatt

SEQ ID NO: 132607 - DNA, 20 bp, Artificial Sequence
  Description of Artificial Sequence: Synthetic oligonucleotide
  Target: LAMA2; (+) strand; PAM type: NRG; PAM sequence: CAG
tgatttctgaactgcctctg

SEQ ID NO: 132608 - DNA, 20 bp, Artificial Sequence
  Description of Artificial Sequence: Synthetic oligonucleotide
  Target: LAMA2; (+) strand; PAM type: NRG; PAM sequence: TAG
ttctgaactgcctctgcagt

SEQ ID NO: 132609 - DNA, 20 bp, Artificial Sequence
  Description of Artificial Sequence: Synthetic oligonucleotide
  Target: LAMA2; (+) strand; PAM type: NRG; PAM sequence: TAG
attcctgcttaatactctcc

SEQ ID NO: 132610 - DNA, 20 bp, Artificial Sequence
  Description of Artificial Sequence: Synthetic oligonucleotide
  Target: LAMA2; (+) strand; PAM type: NRG; PAM sequence: AGG
ttcctgcttaatactctcct

SEQ ID NO: 132611 - DNA, 20 bp, Artificial Sequence
  Description of Artificial Sequence: Synthetic oligonucleotide
  Target: LAMA2; (+) strand; PAM type: NRG; PAM sequence: GGG
tcctgcttaatactctccta

SEQ ID NO: 132612 - DNA, 20 bp, Artificial Sequence
  Description of Artificial Sequence: Synthetic oligonucleotide
  Target: LAMA2; (+) strand; PAM type: NRG; PAM sequence: CAG
ctagggctctccatcgtgtc

SEQ ID NO: 132613 - DNA, 20 bp, Artificial Sequence
  Description of Artificial Sequence: Synthetic oligonucleotide
  Target: LAMA2; (+) strand; PAM type: NRG; PAM sequence: CAG
atcgtactgaaacttgtaat

SEQ ID NO: 132614 - DNA, 20 bp, Artificial Sequence
  Description of Artificial Sequence: Synthetic oligonucleotide
  Target: LAMA2; (+) strand; PAM type: NRG; PAM sequence: AGG
tcgtactgaaacttgtaatc

SEQ ID NO: 132615 - DNA, 20 bp, Artificial Sequence
  Description of Artificial Sequence: Synthetic oligonucleotide
  Target: LAMA2; (+) strand; PAM type: NRG; PAM sequence: AAG
tactgaaacttgtaatcagg

SEQ ID NO: 132616 - DNA, 20 bp, Artificial Sequence
  Description of Artificial Sequence: Synthetic oligonucleotide
  Target: LAMA2; (+) strand; PAM type: NRG; PAM sequence: CAG
gaagacatcccctttgtaat

SEQ ID NO: 132617 - DNA, 20 bp, Artificial Sequence
  Description of Artificial Sequence: Synthetic oligonucleotide
  Target: LAMA2; (+) strand; PAM type: NRG; PAM sequence: CAG
tgtaatcagatctccatcac

SEQ ID NO: 132618 - DNA, 20 bp, Artificial Sequence
  Description of Artificial Sequence: Synthetic oligonucleotide
  Target: LAMA2; (+) strand; PAM type: NRG; PAM sequence: TGG
tctccatcaccagtccaact

SEQ ID NO: 132619 - DNA, 20 bp, Artificial Sequence
  Description of Artificial Sequence: Synthetic oligonucleotide
  Target: LAMA2; (+) strand; PAM type: NRG; PAM sequence: TGG
attttatgctcctgtcatgc

SEQ ID NO: 132620 - DNA, 20 bp, Artificial Sequence
  Description of Artificial Sequence: Synthetic oligonucleotide
  Target: LAMA2; (+) strand; PAM type: NRG; PAM sequence: CAG
tcctgtcatgctggactctg

SEQ ID NO: 132621 - DNA, 20 bp, Artificial Sequence
  Description of Artificial Sequence: Synthetic oligonucleotide
  Target: LAMA2; (+) strand; PAM type: NRG; PAM sequence: TGG
atgctggactctgcagttgc

SEQ ID NO: 132622 - DNA, 20 bp, Artificial Sequence
  Description of Artificial Sequence: Synthetic oligonucleotide
  Target: LAMA2; (+) strand; PAM type: NRG; PAM sequence: GGG
tgctggactctgcagttgct

SEQ ID NO: 132623 - DNA, 20 bp, Artificial Sequence
  Description of Artificial Sequence: Synthetic oligonucleotide
  Target: LAMA2; (+) strand; PAM type: NRG; PAM sequence: CAG
tggactctgcagttgctggg

SEQ ID NO: 132624 - DNA, 20 bp, Artificial Sequence
  Description of Artificial Sequence: Synthetic oligonucleotide
  Target: LAMA2; (+) strand; PAM type: NRG; PAM sequence: CAG
tgtacccgcatgctttcctg

SEQ ID NO: 132625 - DNA, 20 bp, Artificial Sequence
  Description of Artificial Sequence: Synthetic oligonucleotide
  Target: LAMA2; (+) strand; PAM type: NRG; PAM sequence: AGG
gtacccgcatgctttcctgc

SEQ ID NO: 132626 - DNA, 20 bp, Artificial Sequence
  Description of Artificial Sequence: Synthetic oligonucleotide
  Target: LAMA2; (+) strand; PAM type: NRG; PAM sequence: TGG
taaacctcaccatatttgca

SEQ ID NO: 132627 - DNA, 20 bp, Artificial Sequence
  Description of Artificial Sequence: Synthetic oligonucleotide
  Target: LAMA2; (+) strand; PAM type: NRG; PAM sequence: GGG
aaacctcaccatatttgcat

SEQ ID NO: 132628 - DNA, 20 bp, Artificial Sequence
  Description of Artificial Sequence: Synthetic oligonucleotide
  Target: LAMA2; (+) strand; PAM type: NRG; PAM sequence: AAG
gtaacatgtcctcacctttt

SEQ ID NO: 132629 - DNA, 20 bp, Artificial Sequence
  Description of Artificial Sequence: Synthetic oligonucleotide
  Target: LAMA2; (+) strand; PAM type: NRG; PAM sequence: AAG
caccttttaagaatttcctg

SEQ ID NO: 132630 - DNA, 20 bp, Artificial Sequence
  Description of Artificial Sequence: Synthetic oligonucleotide
  Target: LAMA2; (+) strand; PAM type: NRG; PAM sequence: AAG
accacccctttgtgctcaca

SEQ ID NO: 132631 - DNA, 20 bp, Artificial Sequence
  Description of Artificial Sequence: Synthetic oligonucleotide
  Target: LAMA2; (+) strand; PAM type: NRG; PAM sequence: AGG
ccacccctttgtgctcacaa

SEQ ID NO: 132632 - DNA, 20 bp, Artificial Sequence
  Description of Artificial Sequence: Synthetic oligonucleotide
  Target: LAMA2; (+) strand; PAM type: NRG; PAM sequence: TAG
tgtgctcacaaaggtctttg

SEQ ID NO: 132633 - DNA, 20 bp, Artificial Sequence
  Description of Artificial Sequence: Synthetic oligonucleotide
  Target: LAMA2; (+) strand; PAM type: NRG; PAM sequence: CAG
tagttacattatttatcata

SEQ ID NO: 132634 - DNA, 20 bp, Artificial Sequence
  Description of Artificial Sequence: Synthetic oligonucleotide
  Target: LAMA2; (+) strand; PAM type: NRG; PAM sequence: AAG
tcatacagtgtttccactga

SEQ ID NO: 132635 - DNA, 20 bp, Artificial Sequence
  Description of Artificial Sequence: Synthetic oligonucleotide
  Target: LAMA2; (+) strand; PAM type: NRG; PAM sequence: AAG
agtgtttccactgaaagttt

SEQ ID NO: 132636 - DNA, 20 bp, Artificial Sequence
  Description of Artificial Sequence: Synthetic oligonucleotide
  Target: LAMA2; (+) strand; PAM type: NRG; PAM sequence: TGG
taagtgcctgttccccatcg

SEQ ID NO: 132637 - DNA, 20 bp, Artificial Sequence
  Description of Artificial Sequence: Synthetic oligonucleotide
  Target: LAMA2; (+) strand; PAM type: NRG; PAM sequence: GAG
tgttccccatcgtggctcct

SEQ ID NO: 132638 - DNA, 20 bp, Artificial Sequence
  Description of Artificial Sequence: Synthetic oligonucleotide
  Target: LAMA2; (+) strand; PAM type: NRG; PAM sequence: TAG
tccccatcgtggctcctgag

SEQ ID NO: 132639 - DNA, 20 bp, Artificial Sequence
  Description of Artificial Sequence: Synthetic oligonucleotide
  Target: LAMA2; (+) strand; PAM type: NRG; PAM sequence: CAG
gtggctcctgagtagctatg

SEQ ID NO: 132640 - DNA, 20 bp, Artificial Sequence
  Description of Artificial Sequence: Synthetic oligonucleotide
  Target: LAMA2; (+) strand; PAM type: NRG; PAM sequence: GAG
ggctcctgagtagctatgca

SEQ ID NO: 132641 - DNA, 20 bp, Artificial Sequence
  Description of Artificial Sequence: Synthetic oligonucleotide
  Target: LAMA2; (+) strand; PAM type: NRG; PAM sequence: AGG
gctcctgagtagctatgcag

SEQ ID NO: 132642 - DNA, 20 bp, Artificial Sequence
  Description of Artificial Sequence: Synthetic oligonucleotide
  Target: LAMA2; (+) strand; PAM type: NRG; PAM sequence: GGG
ctcctgagtagctatgcaga

SEQ ID NO: 132643 - DNA, 20 bp, Artificial Sequence
  Description of Artificial Sequence: Synthetic oligonucleotide
  Target: LAMA2; (+) strand; PAM type: NRG; PAM sequence: TAG
gagtagctatgcagagggcg

SEQ ID NO: 132644 - DNA, 20 bp, Artificial Sequence
  Description of Artificial Sequence: Synthetic oligonucleotide
  Target: LAMA2; (+) strand; PAM type: NRG; PAM sequence: AGG
agtagctatgcagagggcgt

SEQ ID NO: 132645 - DNA, 20 bp, Artificial Sequence
  Description of Artificial Sequence: Synthetic oligonucleotide
  Target: LAMA2; (+) strand; PAM type: NRG; PAM sequence: GGG
gtagctatgcagagggcgta

SEQ ID NO: 132646 - DNA, 20 bp, Artificial Sequence
  Description of Artificial Sequence: Synthetic oligonucleotide
  Target: LAMA2; (+) strand; PAM type: NRG; PAM sequence: GGG
tagctatgcagagggcgtag

SEQ ID NO: 132647 - DNA, 20 bp, Artificial Sequence
  Description of Artificial Sequence: Synthetic oligonucleotide
  Target: LAMA2; (+) strand; PAM type: NRG; PAM sequence: AAG
ctatgcagagggcgtagggg

SEQ ID NO: 132648 - DNA, 20 bp, Artificial Sequence
  Description of Artificial Sequence: Synthetic oligonucleotide
  Target: LAMA2; (+) strand; PAM type: NRG; PAM sequence: TGG
agggcgtaggggaagcaatc

SEQ ID NO: 132649 - DNA, 20 bp, Artificial Sequence
  Description of Artificial Sequence: Synthetic oligonucleotide
  Target: LAMA2; (+) strand; PAM type: NRG; PAM sequence: TGG
gggaagcaatctggtgaaac

SEQ ID NO: 132650 - DNA, 20 bp, Artificial Sequence
  Description of Artificial Sequence: Synthetic oligonucleotide
  Target: LAMA2; (+) strand; PAM type: NRG; PAM sequence: GGG
ggaagcaatctggtgaaact

SEQ ID NO: 132651 - DNA, 20 bp, Artificial Sequence
  Description of Artificial Sequence: Synthetic oligonucleotide
  Target: LAMA2; (+) strand; PAM type: NRG; PAM sequence: AAG
caatctggtgaaactgggcc

SEQ ID NO: 132652 - DNA, 20 bp, Artificial Sequence
  Description of Artificial Sequence: Synthetic oligonucleotide
  Target: LAMA2; (+) strand; PAM type: NRG; PAM sequence: AGG
aatctggtgaaactgggcca

SEQ ID NO: 132653 - DNA, 20 bp, Artificial Sequence
  Description of Artificial Sequence: Synthetic oligonucleotide
  Target: LAMA2; (+) strand; PAM type: NRG; PAM sequence: GAG
tctggtgaaactgggccaag

SEQ ID NO: 132654 - DNA, 20 bp, Artificial Sequence
  Description of Artificial Sequence: Synthetic oligonucleotide
  Target: LAMA2; (+) strand; PAM type: NRG; PAM sequence: AAG
ggccaaggagacttgtctct

SEQ ID NO: 132655 - DNA, 20 bp, Artificial Sequence
  Description of Artificial Sequence: Synthetic oligonucleotide
  Target: LAMA2; (+) strand; PAM type: NRG; PAM sequence: TGG
gacttgtctctaagctacat

SEQ ID NO: 132656 - DNA, 20 bp, Artificial Sequence
  Description of Artificial Sequence: Synthetic oligonucleotide
  Target: LAMA2; (+) strand; PAM type: NRG; PAM sequence: CAG
ttgtctctaagctacattgg

SEQ ID NO: 132657 - DNA, 20 bp, Artificial Sequence
  Description of Artificial Sequence: Synthetic oligonucleotide
  Target: LAMA2; (+) strand; PAM type: NRG; PAM sequence: GAG
gtctctaagctacattggca

SEQ ID NO: 132658 - DNA, 20 bp, Artificial Sequence
  Description of Artificial Sequence: Synthetic oligonucleotide
  Target: LAMA2; (+) strand; PAM type: NRG; PAM sequence: TAG
tggcagagcaatgttttact

SEQ ID NO: 132659 - DNA, 20 bp, Artificial Sequence
  Description of Artificial Sequence: Synthetic oligonucleotide
  Target: LAMA2; (+) strand; PAM type: NRG; PAM sequence: AAG
tacttagattatatctattt

SEQ ID NO: 132660 - DNA, 20 bp, Artificial Sequence
  Description of Artificial Sequence: Synthetic oligonucleotide
  Target: LAMA2; (+) strand; PAM type: NRG; PAM sequence: TGG
tagattatatctatttaaga

SEQ ID NO: 132661 - DNA, 20 bp, Artificial Sequence
  Description of Artificial Sequence: Synthetic oligonucleotide
  Target: LAMA2; (+) strand; PAM type: NRG; PAM sequence: TAG
atatctatttaagatggatt

SEQ ID NO: 132662 - DNA, 20 bp, Artificial Sequence
  Description of Artificial Sequence: Synthetic oligonucleotide
  Target: LAMA2; (+) strand; PAM type: NRG; PAM sequence: AGG
tatctatttaagatggattt

SEQ ID NO: 132663 - DNA, 20 bp, Artificial Sequence
  Description of Artificial Sequence: Synthetic oligonucleotide
  Target: LAMA2; (+) strand; PAM type: NRG; PAM sequence: GGG
atctatttaagatggattta

SEQ ID NO: 132664 - DNA, 20 bp, Artificial Sequence
  Description of Artificial Sequence: Synthetic oligonucleotide
  Target: LAMA2; (+) strand; PAM type: NRG; PAM sequence: GAG
ctatttaagatggatttagg

SEQ ID NO: 132665 - DNA, 20 bp, Artificial Sequence
  Description of Artificial Sequence: Synthetic oligonucleotide
  Target: LAMA2; (+) strand; PAM type: NRG; PAM sequence: AGG
tatttaagatggatttaggg

SEQ ID NO: 132666 - DNA, 20 bp, Artificial Sequence
  Description of Artificial Sequence: Synthetic oligonucleotide
  Target: LAMA2; (+) strand; PAM type: NRG; PAM sequence: CAG
aagatggatttagggaggct

SEQ ID NO: 132667 - DNA, 20 bp, Artificial Sequence
  Description of Artificial Sequence: Synthetic oligonucleotide
  Target: LAMA2; (+) strand; PAM type: NRG; PAM sequence: AGG
agatggatttagggaggctc

SEQ ID NO: 132668 - DNA, 20 bp, Artificial Sequence
  Description of Artificial Sequence: Synthetic oligonucleotide
  Target: LAMA2; (+) strand; PAM type: NRG; PAM sequence: GGG
gatggatttagggaggctca

SEQ ID NO: 132669 - DNA, 20 bp, Artificial Sequence
  Description of Artificial Sequence: Synthetic oligonucleotide
  Target: LAMA2; (+) strand; PAM type: NRG; PAM sequence: GAG
tggatttagggaggctcagg

SEQ ID NO: 132670 - DNA, 20 bp, Artificial Sequence
  Description of Artificial Sequence: Synthetic oligonucleotide
  Target: LAMA2; (+) strand; PAM type: NRG; PAM sequence: TGG
gggaggctcagggagattat

SEQ ID NO: 132671 - DNA, 20 bp, Artificial Sequence
  Description of Artificial Sequence: Synthetic oligonucleotide
  Target: LAMA2; (+) strand; PAM type: NRG; PAM sequence: GAG
gaggctcagggagattattg

SEQ ID NO: 132672 - DNA, 20 bp, Artificial Sequence
  Description of Artificial Sequence: Synthetic oligonucleotide
  Target: LAMA2; (+) strand; PAM type: NRG; PAM sequence: GAG
ggctcagggagattattgga

SEQ ID NO: 132673 - DNA, 20 bp, Artificial Sequence
  Description of Artificial Sequence: Synthetic oligonucleotide
  Target: LAMA2; (+) strand; PAM type: NRG; PAM sequence: GAG
ctcagggagattattggaga

SEQ ID NO: 132674 - DNA, 20 bp, Artificial Sequence
  Description of Artificial Sequence: Synthetic oligonucleotide
  Target: LAMA2; (+) strand; PAM type: NRG; PAM sequence: AGG
tcagggagattattggagag

SEQ ID NO: 132675 - DNA, 20 bp, Artificial Sequence
  Description of Artificial Sequence: Synthetic oligonucleotide
  Target: LAMA2; (+) strand; PAM type: NRG; PAM sequence: GGG
cagggagattattggagaga

SEQ ID NO: 132676 - DNA, 20 bp, Artificial Sequence
  Description of Artificial Sequence: Synthetic oligonucleotide
  Target: LAMA2; (+) strand; PAM type: NRG; PAM sequence: GGG
agggagattattggagagag

SEQ ID NO: 132677 - DNA, 20 bp, Artificial Sequence
  Description of Artificial Sequence: Synthetic oligonucleotide
  Target: LAMA2; (+) strand; PAM type: NRG; PAM sequence: GAG
attggagagaggggaaatat

SEQ ID NO: 132678 - DNA, 20 bp, Artificial Sequence
  Description of Artificial Sequence: Synthetic oligonucleotide
  Target: LAMA2; (+) strand; PAM type: NRG; PAM sequence: GAG
tggagagaggggaaatatga

SEQ ID NO: 132679 - DNA, 20 bp, Artificial Sequence
  Description of Artificial Sequence: Synthetic oligonucleotide
  Target: LAMA2; (+) strand; PAM type: NRG; PAM sequence: AAG
ggggaaatatgagagaccct

SEQ ID NO: 132680 - DNA, 20 bp, Artificial Sequence
  Description of Artificial Sequence: Synthetic oligonucleotide
  Target: LAMA2; (+) strand; PAM type: NRG; PAM sequence: TGG
gagagaccctaagcacctct

SEQ ID NO: 132681 - DNA, 20 bp, Artificial Sequence
  Description of Artificial Sequence: Synthetic oligonucleotide
  Target: LAMA2; (+) strand; PAM type: NRG; PAM sequence: CAG
agaccctaagcacctcttgg

SEQ ID NO: 132682 - DNA, 20 bp, Artificial Sequence
  Description of Artificial Sequence: Synthetic oligonucleotide
  Target: LAMA2; (+) strand; PAM type: NRG; PAM sequence: TGG
ctgctgtgtttcctctactg

SEQ ID NO: 132683 - DNA, 20 bp, Artificial Sequence
  Description of Artificial Sequence: Synthetic oligonucleotide
  Target: LAMA2; (+) strand; PAM type: NRG; PAM sequence: GAG
gctgtgtttcctctactgtg

SEQ ID NO: 132684 - DNA, 20 bp, Artificial Sequence
  Description of Artificial Sequence: Synthetic oligonucleotide
  Target: LAMA2; (+) strand; PAM type: NRG; PAM sequence: GAG
tgtttcctctactgtggagt

SEQ ID NO: 132685 - DNA, 20 bp, Artificial Sequence
  Description of Artificial Sequence: Synthetic oligonucleotide
  Target: LAMA2; (+) strand; PAM type: NRG; PAM sequence: TGG
tctactgtggagtgagctcc

SEQ ID NO: 132686 - DNA, 20 bp, Artificial Sequence
  Description of Artificial Sequence: Synthetic oligonucleotide
  Target: LAMA2; (+) strand; PAM type: NRG; PAM sequence: CAG
tggagtgagctcctggaaaa

SEQ ID NO: 132687 - DNA, 20 bp, Artificial Sequence
  Description of Artificial Sequence: Synthetic oligonucleotide
  Target: LAMA2; (+) strand; PAM type: NRG; PAM sequence: AGG
ggagtgagctcctggaaaac

SEQ ID NO: 132688 - DNA, 20 bp, Artificial Sequence
  Description of Artificial Sequence: Synthetic oligonucleotide
  Target: LAMA2; (+) strand; PAM type: NRG; PAM sequence: GGG
gagtgagctcctggaaaaca

SEQ ID NO: 132689 - DNA, 20 bp, Artificial Sequence
  Description of Artificial Sequence: Synthetic oligonucleotide
  Target: LAMA2; (+) strand; PAM type: NRG; PAM sequence: GAG
ctgtcatctgtgtgtttcct

SEQ ID NO: 132690 - DNA, 20 bp, Artificial Sequence
  Description of Artificial Sequence: Synthetic oligonucleotide
  Target: LAMA2; (+) strand; PAM type: NRG; PAM sequence: TAG
tgtgtttcctgagcaccaca

SEQ ID NO: 132691 - DNA, 20 bp, Artificial Sequence
  Description of Artificial Sequence: Synthetic oligonucleotide
  Target: LAMA2; (+) strand; PAM type: NRG; PAM sequence: CAG
gagcaccacatagtgtgtgc

SEQ ID NO: 132692 - DNA, 20 bp, Artificial Sequence
  Description of Artificial Sequence: Synthetic oligonucleotide
  Target: LAMA2; (+) strand; PAM type: NRG; PAM sequence: TAG
accacatagtgtgtgccaga

SEQ ID NO: 132693 - DNA, 20 bp, Artificial Sequence
  Description of Artificial Sequence: Synthetic oligonucleotide
  Target: LAMA2; (+) strand; PAM type: NRG; PAM sequence: TAG
tagattgtatgcctgctaca

SEQ ID NO: 132694 - DNA, 20 bp, Artificial Sequence
  Description of Artificial Sequence: Synthetic oligonucleotide
  Target: LAMA2; (+) strand; PAM type: NRG; PAM sequence: TAG
attgtatgcctgctacatag

SEQ ID NO: 132695 - DNA, 20 bp, Artificial Sequence
  Description of Artificial Sequence: Synthetic oligonucleotide
  Target: LAMA2; (+) strand; PAM type: NRG; PAM sequence: AGG
ttgtatgcctgctacatagt

SEQ ID NO: 132696 - DNA, 20 bp, Artificial Sequence
  Description of Artificial Sequence: Synthetic oligonucleotide
  Target: LAMA2; (+) strand; PAM type: NRG; PAM sequence: AAG
atagtaggctcttaataaat

SEQ ID NO: 132697 - DNA, 20 bp, Artificial Sequence
  Description of Artificial Sequence: Synthetic oligonucleotide
  Target: LAMA2; (+) strand; PAM type: NRG; PAM sequence: AAG
gtaggctcttaataaataag

SEQ ID NO: 132698 - DNA, 20 bp, Artificial Sequence
  Description of Artificial Sequence: Synthetic oligonucleotide
  Target: LAMA2; (+) strand; PAM type: NRG; PAM sequence: GAG
taataaataagaagtgaatt

SEQ ID NO: 132699 - DNA, 20 bp, Artificial Sequence
  Description of Artificial Sequence: Synthetic oligonucleotide
  Target: LAMA2; (+) strand; PAM type: NRG; PAM sequence: AGG
aataaataagaagtgaattg

SEQ ID NO: 132700 - DNA, 20 bp, Artificial Sequence
  Description of Artificial Sequence: Synthetic oligonucleotide
  Target: LAMA2; (+) strand; PAM type: NRG; PAM sequence: TAG
aagaagtgaattgaggattc

SEQ ID NO: 132701 - DNA, 20 bp, Artificial Sequence
  Description of Artificial Sequence: Synthetic oligonucleotide
  Target: LAMA2; (+) strand; PAM type: NRG; PAM sequence: TGG
ttcaaaatgtaaatcctctg

SEQ ID NO: 132702 - DNA, 20 bp, Artificial Sequence
  Description of Artificial Sequence: Synthetic oligonucleotide
  Target: LAMA2; (+) strand; PAM type: NRG; PAM sequence: AAG
gtaaatcctctgtggcactg

SEQ ID NO: 132703 - DNA, 20 bp, Artificial Sequence
  Description of Artificial Sequence: Synthetic oligonucleotide
  Target: LAMA2; (+) strand; PAM type: NRG; PAM sequence: CAG
gccaaataaaatgtctcctc

SEQ ID NO: 132704 - DNA, 20 bp, Artificial Sequence
  Description of Artificial Sequence: Synthetic oligonucleotide
  Target: LAMA2; (+) strand; PAM type: NRG; PAM sequence: AGG
ccaaataaaatgtctcctcc

SEQ ID NO: 132705 - DNA, 20 bp, Artificial Sequence
  Description of Artificial Sequence: Synthetic oligonucleotide
  Target: LAMA2; (+) strand; PAM type: NRG; PAM sequence: GAG
atgtctcctccaggtgattt

SEQ ID NO: 132706 - DNA, 20 bp, Artificial Sequence
  Description of Artificial Sequence: Synthetic oligonucleotide
  Target: LAMA2; (+) strand; PAM type: NRG; PAM sequence: AGG
tgtctcctccaggtgatttg

SEQ ID NO: 132707 - DNA, 20 bp, Artificial Sequence
  Description of Artificial Sequence: Synthetic oligonucleotide
  Target: LAMA2; (+) strand; PAM type: NRG; PAM sequence: AAG
ctcctccaggtgatttgagg

SEQ ID NO: 132708 - DNA, 20 bp, Artificial Sequence
  Description of Artificial Sequence: Synthetic oligonucleotide
  Target: LAMA2; (+) strand; PAM type: NRG; PAM sequence: TGG
ggtgatttgaggaagacatg

SEQ ID NO: 132709 - DNA, 20 bp, Artificial Sequence
  Description of Artificial Sequence: Synthetic oligonucleotide
  Target: LAMA2; (+) strand; PAM type: NRG; PAM sequence: GGG
gtgatttgaggaagacatgt

SEQ ID NO: 132710 - DNA, 20 bp, Artificial Sequence
  Description of Artificial Sequence: Synthetic oligonucleotide
  Target: LAMA2; (+) strand; PAM type: NRG; PAM sequence: AAG
gaagacatgtgggctcaaat

SEQ ID NO: 132711 - DNA, 20 bp, Artificial Sequence
  Description of Artificial Sequence: Synthetic oligonucleotide
  Target: LAMA2; (+) strand; PAM type: NRG; PAM sequence: GAG
tgtacatgtaaatattgcat

SEQ ID NO: 132712 - DNA, 20 bp, Artificial Sequence
  Description of Artificial Sequence: Synthetic oligonucleotide
  Target: LAMA2; (+) strand; PAM type: NRG; PAM sequence: TAG
gtaaatattgcatgagtaac

SEQ ID NO: 132713 - DNA, 20 bp, Artificial Sequence
  Description of Artificial Sequence: Synthetic oligonucleotide
  Target: LAMA2; (+) strand; PAM type: NRG; PAM sequence: TGG
tcttacattttcttcactaa

SEQ ID NO: 132714 - DNA, 20 bp, Artificial Sequence
  Description of Artificial Sequence: Synthetic oligonucleotide
  Target: LAMA2; (+) strand; PAM type: NRG; PAM sequence: GGG
cttacattttcttcactaat

SEQ ID NO: 132715 - DNA, 20 bp, Artificial Sequence
  Description of Artificial Sequence: Synthetic oligonucleotide
  Target: LAMA2; (+) strand; PAM type: NRG; PAM sequence: GGG
ttacattttcttcactaatg

SEQ ID NO: 132716 - DNA, 20 bp, Artificial Sequence
  Description of Artificial Sequence: Synthetic oligonucleotide
  Target: LAMA2; (+) strand; PAM type: NRG; PAM sequence: AAG
cactaatggggatttattct

SEQ ID NO: 132717 - DNA, 20 bp, Artificial Sequence
  Description of Artificial Sequence: Synthetic oligonucleotide
  Target: LAMA2; (+) strand; PAM type: NRG; PAM sequence: AGG
actaatggggatttattcta

SEQ ID NO: 132718 - DNA, 20 bp, Artificial Sequence
  Description of Artificial Sequence: Synthetic oligonucleotide
  Target: LAMA2; (+) strand; PAM type: NRG; PAM sequence: CAG
ttctaaggaacttttttgtt

SEQ ID NO: 132719 - DNA, 20 bp, Artificial Sequence
  Description of Artificial Sequence: Synthetic oligonucleotide
  Target: LAMA2; (+) strand; PAM type: NRG; PAM sequence: AAG
ttgttcagtattttctgatg

SEQ ID NO: 132720 - DNA, 20 bp, Artificial Sequence
  Description of Artificial Sequence: Synthetic oligonucleotide
  Target: LAMA2; (+) strand; PAM type: NRG; PAM sequence: AGG
tgttcagtattttctgatga

SEQ ID NO: 132721 - DNA, 20 bp, Artificial Sequence
  Description of Artificial Sequence: Synthetic oligonucleotide
  Target: LAMA2; (+) strand; PAM type: NRG; PAM sequence: TAG
agtattttctgatgaaggaa

SEQ ID NO: 132722 - DNA, 20 bp, Artificial Sequence
  Description of Artificial Sequence: Synthetic oligonucleotide
  Target: LAMA2; (+) strand; PAM type: NRG; PAM sequence: CAG
ttttctgatgaaggaatagt

SEQ ID NO: 132723 - DNA, 20 bp, Artificial Sequence
  Description of Artificial Sequence: Synthetic oligonucleotide
  Target: LAMA2; (+) strand; PAM type: NRG; PAM sequence: TAG
aaatccttcttactccattt

SEQ ID NO: 132724 - DNA, 20 bp, Artificial Sequence
  Description of Artificial Sequence: Synthetic oligonucleotide
  Target: LAMA2; (+) strand; PAM type: NRG; PAM sequence: AGG
aatccttcttactccatttt

SEQ ID NO: 132725 - DNA, 20 bp, Artificial Sequence
  Description of Artificial Sequence: Synthetic oligonucleotide
  Target: LAMA2; (+) strand; PAM type: NRG; PAM sequence: AAG
taggctgccatttttttcct

SEQ ID NO: 132726 - DNA, 20 bp, Artificial Sequence
  Description of Artificial Sequence: Synthetic oligonucleotide
  Target: LAMA2; (+) strand; PAM type: NRG; PAM sequence: GAG
ggctgccatttttttcctaa

SEQ ID NO: 132727 - DNA, 20 bp, Artificial Sequence
  Description of Artificial Sequence: Synthetic oligonucleotide
  Target: LAMA2; (+) strand; PAM type: NRG; PAM sequence: GAG
cctaagagctgttatacatt

SEQ ID NO: 132728 - DNA, 20 bp, Artificial Sequence
  Description of Artificial Sequence: Synthetic oligonucleotide
  Target: LAMA2; (+) strand; PAM type: NRG; PAM sequence: CAG
taaattgcctttctgaaata

SEQ ID NO: 132729 - DNA, 20 bp, Artificial Sequence
  Description of Artificial Sequence: Synthetic oligonucleotide
  Target: LAMA2; (+) strand; PAM type: NRG; PAM sequence: AGG
aaattgcctttctgaaatac

SEQ ID NO: 132730 - DNA, 20 bp, Artificial Sequence
  Description of Artificial Sequence: Synthetic oligonucleotide
  Target: LAMA2; (+) strand; PAM type: NRG; PAM sequence: CAG
acaggaacacactgtattgt

SEQ ID NO: 132731 - DNA, 20 bp, Artificial Sequence
  Description of Artificial Sequence: Synthetic oligonucleotide
  Target: LAMA2; (+) strand; PAM type: NRG; PAM sequence: TGG
acactgtattgtcagtaaaa

SEQ ID NO: 132732 - DNA, 20 bp, Artificial Sequence
  Description of Artificial Sequence: Synthetic oligonucleotide
  Target: LAMA2; (+) strand; PAM type: NRG; PAM sequence: TAG
gtaaaatggtctgtgttgat

SEQ ID NO: 132733 - DNA, 20 bp, Artificial Sequence
  Description of Artificial Sequence: Synthetic oligonucleotide
  Target: LAMA2; (+) strand; PAM type: NRG; PAM sequence: TGG
tgtgttgattagtttgtctt

SEQ ID NO: 132734 - DNA, 20 bp, Artificial Sequence
  Description of Artificial Sequence: Synthetic oligonucleotide
  Target: LAMA2; (+) strand; PAM type: NRG; PAM sequence: GGG
gtgttgattagtttgtcttt

SEQ ID NO: 132735 - DNA, 20 bp, Artificial Sequence
  Description of Artificial Sequence: Synthetic oligonucleotide
  Target: LAMA2; (+) strand; PAM type: NRG; PAM sequence: GGG
tgttgattagtttgtctttg

SEQ ID NO: 132736 - DNA, 20 bp, Artificial Sequence
  Description of Artificial Sequence: Synthetic oligonucleotide
  Target: LAMA2; (+) strand; PAM type: NRG; PAM sequence: CAG
ttggggtgtacttgattcat

SEQ ID NO: 132737 - DNA, 20 bp, Artificial Sequence
  Description of Artificial Sequence: Synthetic oligonucleotide
  Target: LAMA2; (+) strand; PAM type: NRG; PAM sequence: TGG
gtacttgattcatcagatga

SEQ ID NO: 132738 - DNA, 20 bp, Artificial Sequence
  Description of Artificial Sequence: Synthetic oligonucleotide
  Target: LAMA2; (+) strand; PAM type: NRG; PAM sequence: GAG
acttgattcatcagatgatg

SEQ ID NO: 132739 - DNA, 20 bp, Artificial Sequence
  Description of Artificial Sequence: Synthetic oligonucleotide
  Target: LAMA2; (+) strand; PAM type: NRG; PAM sequence: TGG
tcagatgatggagatcctgc

SEQ ID NO: 132740 - DNA, 20 bp, Artificial Sequence
  Description of Artificial Sequence: Synthetic oligonucleotide
  Target: LAMA2; (+) strand; PAM type: NRG; PAM sequence: TGG
gcgtttcatgcaacctgcta

SEQ ID NO: 132741 - DNA, 20 bp, Artificial Sequence
  Description of Artificial Sequence: Synthetic oligonucleotide
  Target: LAMA2; (+) strand; PAM type: NRG; PAM sequence: TGG
atgcaacctgctatggtatg

SEQ ID NO: 132742 - DNA, 20 bp, Artificial Sequence
  Description of Artificial Sequence: Synthetic oligonucleotide
  Target: LAMA2; (+) strand; PAM type: NRG; PAM sequence: GGG
tgcaacctgctatggtatgt

SEQ ID NO: 132743 - DNA, 20 bp, Artificial Sequence
  Description of Artificial Sequence: Synthetic oligonucleotide
  Target: LAMA2; (+) strand; PAM type: NRG; PAM sequence: TGG
ctatggtatgtgggctttat

SEQ ID NO: 132744 - DNA, 20 bp, Artificial Sequence
  Description of Artificial Sequence: Synthetic oligonucleotide
  Target: LAMA2; (+) strand; PAM type: NRG; PAM sequence: CAG
tgtgggctttattggcttcc

SEQ ID NO: 132745 - DNA, 20 bp, Artificial Sequence
  Description of Artificial Sequence: Synthetic oligonucleotide
  Target: LAMA2; (+) strand; PAM type: NRG; PAM sequence: CAG
gggctttattggcttcccag

SEQ ID NO: 132746 - DNA, 20 bp, Artificial Sequence
  Description of Artificial Sequence: Synthetic oligonucleotide
  Target: LAMA2; (+) strand; PAM type: NRG; PAM sequence: CAG
gcgacactgacacaaattgt

SEQ ID NO: 132747 - DNA, 20 bp, Artificial Sequence
  Description of Artificial Sequence: Synthetic oligonucleotide
  Target: LAMA2; (+) strand; PAM type: NRG; PAM sequence: TGG
acacaaattgtcagatttta

SEQ ID NO: 132748 - DNA, 20 bp, Artificial Sequence
  Description of Artificial Sequence: Synthetic oligonucleotide
  Target: LAMA2; (+) strand; PAM type: NRG; PAM sequence: GGG
cacaaattgtcagattttat

SEQ ID NO: 132749 - DNA, 20 bp, Artificial Sequence
  Description of Artificial Sequence: Synthetic oligonucleotide
  Target: LAMA2; (+) strand; PAM type: NRG; PAM sequence: CAG
aaattgtcagattttatggg

SEQ ID NO: 132750 - DNA, 20 bp, Artificial Sequence
  Description of Artificial Sequence: Synthetic oligonucleotide
  Target: LAMA2; (+) strand; PAM type: NRG; PAM sequence: GAG
acctaatgaaatacatcctt

SEQ ID NO: 132751 - DNA, 20 bp, Artificial Sequence
  Description of Artificial Sequence: Synthetic oligonucleotide
  Target: LAMA2; (+) strand; PAM type: NRG; PAM sequence: AAG
taatgaaatacatccttgag

SEQ ID NO: 132752 - DNA, 20 bp, Artificial Sequence
  Description of Artificial Sequence: Synthetic oligonucleotide
  Target: LAMA2; (+) strand; PAM type: NRG; PAM sequence: TAG
agaagcttccttcaccattt

SEQ ID NO: 132753 - DNA, 20 bp, Artificial Sequence
  Description of Artificial Sequence: Synthetic oligonucleotide
  Target: LAMA2; (+) strand; PAM type: NRG; PAM sequence: TAG
agcttccttcaccattttag

SEQ ID NO: 132754 - DNA, 20 bp, Artificial Sequence
  Description of Artificial Sequence: Synthetic oligonucleotide
  Target: LAMA2; (+) strand; PAM type: NRG; PAM sequence: AAG
ttagtagctgtacaatttga

SEQ ID NO: 132755 - DNA, 20 bp, Artificial Sequence
  Description of Artificial Sequence: Synthetic oligonucleotide
  Target: LAMA2; (+) strand; PAM type: NRG; PAM sequence: AAG
ctgtacaatttgaaagaaaa

SEQ ID NO: 132756 - DNA, 20 bp, Artificial Sequence
  Description of Artificial Sequence: Synthetic oligonucleotide
  Target: LAMA2; (+) strand; PAM type: NRG; PAM sequence: CAG
aaaagtcaatgtacaccaca

SEQ ID NO: 132757 - DNA, 20 bp, Artificial Sequence
  Description of Artificial Sequence: Synthetic oligonucleotide
  Target: LAMA2; (+) strand; PAM type: NRG; PAM sequence: AGG
aaagtcaatgtacaccacac

SEQ ID NO: 132758 - DNA, 20 bp, Artificial Sequence
  Description of Artificial Sequence: Synthetic oligonucleotide
  Target: LAMA2; (+) strand; PAM type: NRG; PAM sequence: GGG
aagtcaatgtacaccacaca

SEQ ID NO: 132759 - DNA, 20 bp, Artificial Sequence
  Description of Artificial Sequence: Synthetic oligonucleotide
  Target: LAMA2; (+) strand; PAM type: NRG; PAM sequence: TAG
tcaatgtacaccacacaggg

SEQ ID NO: 132760 - DNA, 20 bp, Artificial Sequence
  Description of Artificial Sequence: Synthetic oligonucleotide
  Target: LAMA2; (+) strand; PAM type: NRG; PAM sequence: TGG
gtagttcactattgaaatca

SEQ ID NO: 132761 - DNA, 20 bp, Artificial Sequence
  Description of Artificial Sequence: Synthetic oligonucleotide
  Target: LAMA2; (+) strand; PAM type: NRG; PAM sequence: GAG
agttcactattgaaatcatg

SEQ ID NO: 132762 - DNA, 20 bp, Artificial Sequence
  Description of Artificial Sequence: Synthetic oligonucleotide
  Target: LAMA2; (+) strand; PAM type: NRG; PAM sequence: AGG
gttcactattgaaatcatgg

SEQ ID NO: 132763 - DNA, 20 bp, Artificial Sequence
  Description of Artificial Sequence: Synthetic oligonucleotide
  Target: LAMA2; (+) strand; PAM type: NRG; PAM sequence: TGG
tgctgtcattaactgcacaa

SEQ ID NO: 132764 - DNA, 20 bp, Artificial Sequence
  Description of Artificial Sequence: Synthetic oligonucleotide
  Target: LAMA2; (+) strand; PAM type: NRG; PAM sequence: GGG
gctgtcattaactgcacaat

SEQ ID NO: 132765 - DNA, 20 bp, Artificial Sequence
  Description of Artificial Sequence: Synthetic oligonucleotide
  Target: LAMA2; (+) strand; PAM type: NRG; PAM sequence: CAG
atgggatactgatgctgcct

SEQ ID NO: 132766 - DNA, 20 bp, Artificial Sequence
  Description of Artificial Sequence: Synthetic oligonucleotide
  Target: LAMA2; (+) strand; PAM type: NRG; PAM sequence: GAG
gggatactgatgctgcctca

SEQ ID NO: 132767 - DNA, 20 bp, Artificial Sequence
  Description of Artificial Sequence: Synthetic oligonucleotide
  Target: LAMA2; (+) strand; PAM type: NRG; PAM sequence: AGG
ggatactgatgctgcctcag

SEQ ID NO: 132768 - DNA, 20 bp, Artificial Sequence
  Description of Artificial Sequence: Synthetic oligonucleotide
  Target: LAMA2; (+) strand; PAM type: NRG; PAM sequence: TGG
actgatgctgcctcagaggc

SEQ ID NO: 132769 - DNA, 20 bp, Artificial Sequence
  Description of Artificial Sequence: Synthetic oligonucleotide
  Target: LAMA2; (+) strand; PAM type: NRG; PAM sequence: CAG
aatctttgtgccaaaccttg

SEQ ID NO: 132770 - DNA, 20 bp, Artificial Sequence
  Description of Artificial Sequence: Synthetic oligonucleotide
  Target: LAMA2; (+) strand; PAM type: NRG; PAM sequence: AAG
ctgtgtgcatttactgacgt

SEQ ID NO: 132771 - DNA, 20 bp, Artificial Sequence
  Description of Artificial Sequence: Synthetic oligonucleotide
  Target: LAMA2; (+) strand; PAM type: NRG; PAM sequence: AAG
ctctccatctctttgatctt

SEQ ID NO: 132772 - DNA, 20 bp, Artificial Sequence
  Description of Artificial Sequence: Synthetic oligonucleotide
  Target: LAMA2; (+) strand; PAM type: NRG; PAM sequence: TGG
tgatcttaagattactcctt

SEQ ID NO: 132773 - DNA, 20 bp, Artificial Sequence
  Description of Artificial Sequence: Synthetic oligonucleotide
  Target: LAMA2; (+) strand; PAM type: NRG; PAM sequence: GGG
gatcttaagattactccttt

SEQ ID NO: 132774 - DNA, 20 bp, Artificial Sequence
  Description of Artificial Sequence: Synthetic oligonucleotide
  Target: LAMA2; (+) strand; PAM type: NRG; PAM sequence: GGG
atcttaagattactcctttg

SEQ ID NO: 132775 - DNA, 20 bp, Artificial Sequence
  Description of Artificial Sequence: Synthetic oligonucleotide
  Target: LAMA2; (+) strand; PAM type: NRG; PAM sequence: TAG
taagattactcctttgggga

SEQ ID NO: 132776 - DNA, 20 bp, Artificial Sequence
  Description of Artificial Sequence: Synthetic oligonucleotide
  Target: LAMA2; (+) strand; PAM type: NRG; PAM sequence: AAG
gattactcctttggggatag

SEQ ID NO: 132777 - DNA, 20 bp, Artificial Sequence
  Description of Artificial Sequence: Synthetic oligonucleotide
  Target: LAMA2; (+) strand; PAM type: NRG; PAM sequence: AGG
attactcctttggggataga

SEQ ID NO: 132778 - DNA, 20 bp, Artificial Sequence
  Description of Artificial Sequence: Synthetic oligonucleotide
  Target: LAMA2; (+) strand; PAM type: NRG; PAM sequence: AAG
ttggggatagaaggtaatat

SEQ ID NO: 132779 - DNA, 20 bp, Artificial Sequence
  Description of Artificial Sequence: Synthetic oligonucleotide
  Target: LAMA2; (+) strand; PAM type: NRG; PAM sequence: AGG
tggggatagaaggtaatata

SEQ ID NO: 132780 - DNA, 20 bp, Artificial Sequence
  Description of Artificial Sequence: Synthetic oligonucleotide
  Target: LAMA2; (+) strand; PAM type: NRG; PAM sequence: AAG
acttaaaaaaaaaatgctca

SEQ ID NO: 132781 - DNA, 20 bp, Artificial Sequence
  Description of Artificial Sequence: Synthetic oligonucleotide
  Target: LAMA2; (+) strand; PAM type: NRG; PAM sequence: GAG
aaaaaaaaaatgctcaaagt

SEQ ID NO: 132782 - DNA, 20 bp, Artificial Sequence
  Description of Artificial Sequence: Synthetic oligonucleotide
  Target: LAMA2; (+) strand; PAM type: NRG; PAM sequence: AAG
aaaaatgctcaaagtgagtg

SEQ ID NO: 132783 - DNA, 20 bp, Artificial Sequence
  Description of Artificial Sequence: Synthetic oligonucleotide
  Target: LAMA2; (+) strand; PAM type: NRG; PAM sequence: AGG
aaaatgctcaaagtgagtga

SEQ ID NO: 132784 - DNA, 20 bp, Artificial Sequence
  Description of Artificial Sequence: Synthetic oligonucleotide
  Target: LAMA2; (+) strand; PAM type: NRG; PAM sequence: AAG
tgctcaaagtgagtgaaggt

SEQ ID NO: 132785 - DNA, 20 bp, Artificial Sequence
  Description of Artificial Sequence: Synthetic oligonucleotide
  Target: LAMA2; (+) strand; PAM type: NRG; PAM sequence: GAG
ctcaaagtgagtgaaggtaa

SEQ ID NO: 132786 - DNA, 20 bp, Artificial Sequence
  Description of Artificial Sequence: Synthetic oligonucleotide
  Target: LAMA2; (+) strand; PAM type: NRG; PAM sequence: CAG
aagagatgttcattttcttc

SEQ ID NO: 132787 - DNA, 20 bp, Artificial Sequence
  Description of Artificial Sequence: Synthetic oligonucleotide
  Target: LAMA2; (+) strand; PAM type: NRG; PAM sequence: AAG
ttcttccagtactgaaaatt

SEQ ID NO: 132788 - DNA, 20 bp, Artificial Sequence
  Description of Artificial Sequence: Synthetic oligonucleotide
  Target: LAMA2; (+) strand; PAM type: NRG; PAM sequence: GAG
cttccagtactgaaaattaa

SEQ ID NO: 132789 - DNA, 20 bp, Artificial Sequence
  Description of Artificial Sequence: Synthetic oligonucleotide
  Target: LAMA2; (+) strand; PAM type: NRG; PAM sequence: CAG
agtactgaaaattaagagta

SEQ ID NO: 132790 - DNA, 20 bp, Artificial Sequence
  Description of Artificial Sequence: Synthetic oligonucleotide
  Target: LAMA2; (+) strand; PAM type: NRG; PAM sequence: AAG
agacccacatgctattatac

SEQ ID NO: 132791 - DNA, 20 bp, Artificial Sequence
  Description of Artificial Sequence: Synthetic oligonucleotide
  Target: LAMA2; (+) strand; PAM type: NRG; PAM sequence: GAG
acccacatgctattatacaa

SEQ ID NO: 132792 - DNA, 20 bp, Artificial Sequence
  Description of Artificial Sequence: Synthetic oligonucleotide
  Target: LAMA2; (+) strand; PAM type: NRG; PAM sequence: AAG
acatgctattatacaagaga

SEQ ID NO: 132793 - DNA, 20 bp, Artificial Sequence
  Description of Artificial Sequence: Synthetic oligonucleotide
  Target: LAMA2; (+) strand; PAM type: NRG; PAM sequence: TAG
tgctattatacaagagaaag

SEQ ID NO: 132794 - DNA, 20 bp, Artificial Sequence
  Description of Artificial Sequence: Synthetic oligonucleotide
  Target: LAMA2; (+) strand; PAM type: NRG; PAM sequence: TGG
gaaagtagtcctatgactgc

SEQ ID NO: 132795 - DNA, 20 bp, Artificial Sequence
  Description of Artificial Sequence: Synthetic oligonucleotide
  Target: LAMA2; (+) strand; PAM type: NRG; PAM sequence: TGG
tatctaatttatcataaccc

SEQ ID NO: 132796 - DNA, 20 bp, Artificial Sequence
  Description of Artificial Sequence: Synthetic oligonucleotide
  Target: LAMA2; (+) strand; PAM type: NRG; PAM sequence: GGG
atctaatttatcataaccct

SEQ ID NO: 132797 - DNA, 20 bp, Artificial Sequence
  Description of Artificial Sequence: Synthetic oligonucleotide
  Target: LAMA2; (+) strand; PAM type: NRG; PAM sequence: GAG
ctaatttatcataaccctgg

SEQ ID NO: 132798 - DNA, 20 bp, Artificial Sequence
  Description of Artificial Sequence: Synthetic oligonucleotide
  Target: LAMA2; (+) strand; PAM type: NRG; PAM sequence: GAG
aatttatcataaccctggga

SEQ ID NO: 132799 - DNA, 20 bp, Artificial Sequence
  Description of Artificial Sequence: Synthetic oligonucleotide
  Target: LAMA2; (+) strand; PAM type: NRG; PAM sequence: TGG
ttatcataaccctgggagag

SEQ ID NO: 132800 - DNA, 20 bp, Artificial Sequence
  Description of Artificial Sequence: Synthetic oligonucleotide
  Target: LAMA2; (+) strand; PAM type: NRG; PAM sequence: TAG
tattgctattcttattttac

SEQ ID NO: 132801 - DNA, 20 bp, Artificial Sequence
  Description of Artificial Sequence: Synthetic oligonucleotide
  Target: LAMA2; (+) strand; PAM type: NRG; PAM sequence: GAG
gctattcttattttactagt

SEQ ID NO: 132802 - DNA, 20 bp, Artificial Sequence
  Description of Artificial Sequence: Synthetic oligonucleotide
  Target: LAMA2; (+) strand; PAM type: NRG; PAM sequence: GAG
tattcttattttactagtga

SEQ ID NO: 132803 - DNA, 20 bp, Artificial Sequence
  Description of Artificial Sequence: Synthetic oligonucleotide
  Target: LAMA2; (+) strand; PAM type: NRG; PAM sequence: AAG
tattttactagtgagagact

SEQ ID NO: 132804 - DNA, 20 bp, Artificial Sequence
  Description of Artificial Sequence: Synthetic oligonucleotide
  Target: LAMA2; (+) strand; PAM type: NRG; PAM sequence: TGG
tgagagactaagtgatttgc

SEQ ID NO: 132805 - DNA, 20 bp, Artificial Sequence
  Description of Artificial Sequence: Synthetic oligonucleotide
  Target: LAMA2; (+) strand; PAM type: NRG; PAM sequence: CGG
gatttgctggtttttgatcc

SEQ ID NO: 132806 - DNA, 20 bp, Artificial Sequence
  Description of Artificial Sequence: Synthetic oligonucleotide
  Target: LAMA2; (+) strand; PAM type: NRG; PAM sequence: GGG
atttgctggtttttgatccc

SEQ ID NO: 132807 - DNA, 20 bp, Artificial Sequence
  Description of Artificial Sequence: Synthetic oligonucleotide
  Target: LAMA2; (+) strand; PAM type: NRG; PAM sequence: AAG
cccgggtctacatgaataca

SEQ ID NO: 132808 - DNA, 20 bp, Artificial Sequence
  Description of Artificial Sequence: Synthetic oligonucleotide
  Target: LAMA2; (+) strand; PAM type: NRG; PAM sequence: TAG
tacaaagctacatctttaat

SEQ ID NO: 132809 - DNA, 20 bp, Artificial Sequence
  Description of Artificial Sequence: Synthetic oligonucleotide
  Target: LAMA2; (+) strand; PAM type: NRG; PAM sequence: TAG
catctttaattagttctcta

SEQ ID NO: 132810 - DNA, 20 bp, Artificial Sequence
  Description of Artificial Sequence: Synthetic oligonucleotide
  Target: LAMA2; (+) strand; PAM type: NRG; PAM sequence: AGG
atctttaattagttctctat

SEQ ID NO: 132811 - DNA, 20 bp, Artificial Sequence
  Description of Artificial Sequence: Synthetic oligonucleotide
  Target: LAMA2; (+) strand; PAM type: NRG; PAM sequence: GGG
tctttaattagttctctata

SEQ ID NO: 132812 - DNA, 20 bp, Artificial Sequence
  Description of Artificial Sequence: Synthetic oligonucleotide
  Target: LAMA2; (+) strand; PAM type: NRG; PAM sequence: AAG
tagttctctatagggtctca

SEQ ID NO: 132813 - DNA, 20 bp, Artificial Sequence
  Description of Artificial Sequence: Synthetic oligonucleotide
  Target: LAMA2; (+) strand; PAM type: NRG; PAM sequence: CAG
ttctctatagggtctcaaag

SEQ ID NO: 132814 - DNA, 20 bp, Artificial Sequence
  Description of Artificial Sequence: Synthetic oligonucleotide
  Target: LAMA2; (+) strand; PAM type: NRG; PAM sequence: TAG
tttttgatctttattaaaca

SEQ ID NO: 132815 - DNA, 20 bp, Artificial Sequence
  Description of Artificial Sequence: Synthetic oligonucleotide
  Target: LAMA2; (+) strand; PAM type: NRG; PAM sequence: AAG
tttattaaacatagatgcaa

SEQ ID NO: 132816 - DNA, 20 bp, Artificial Sequence
  Description of Artificial Sequence: Synthetic oligonucleotide
  Target: LAMA2; (+) strand; PAM type: NRG; PAM sequence: AAG
taataatatttccacaaata

SEQ ID NO: 132817 - DNA, 20 bp, Artificial Sequence
  Description of Artificial Sequence: Synthetic oligonucleotide
  Target: LAMA2; (+) strand; PAM type: NRG; PAM sequence: AGG
aataatatttccacaaataa

SEQ ID NO: 132818 - DNA, 20 bp, Artificial Sequence
  Description of Artificial Sequence: Synthetic oligonucleotide
  Target: LAMA2; (+) strand; PAM type: NRG; PAM sequence: GGG
ataatatttccacaaataaa

SEQ ID NO: 132819 - DNA, 20 bp, Artificial Sequence
  Description of Artificial Sequence: Synthetic oligonucleotide
  Target: LAMA2; (+) strand; PAM type: NRG; PAM sequence: AAG
gttaaccaaaattaatgttc

SEQ ID NO: 132820 - DNA, 20 bp, Artificial Sequence
  Description of Artificial Sequence: Synthetic oligonucleotide
  Target: LAMA2; (+) strand; PAM type: NRG; PAM sequence: CAG
ttaatgttcaagaatccttt

SEQ ID NO: 132821 - DNA, 20 bp, Artificial Sequence
  Description of Artificial Sequence: Synthetic oligonucleotide
  Target: LAMA2; (+) strand; PAM type: NRG; PAM sequence: CAG
ctctacctctttaaatattc

SEQ ID NO: 132822 - DNA, 20 bp, Artificial Sequence
  Description of Artificial Sequence: Synthetic oligonucleotide
  Target: LAMA2; (+) strand; PAM type: NRG; PAM sequence: TGG
ctctttaaatattccagaaa

SEQ ID NO: 132823 - DNA, 20 bp, Artificial Sequence
  Description of Artificial Sequence: Synthetic oligonucleotide
  Target: LAMA2; (+) strand; PAM type: NRG; PAM sequence: CAG
atattccagaaatggtgata

SEQ ID NO: 132824 - DNA, 20 bp, Artificial Sequence
  Description of Artificial Sequence: Synthetic oligonucleotide
  Target: LAMA2; (+) strand; PAM type: NRG; PAM sequence: CAG
tccagaaatggtgatacagt

SEQ ID NO: 132825 - DNA, 20 bp, Artificial Sequence
  Description of Artificial Sequence: Synthetic oligonucleotide
  Target: LAMA2; (+) strand; PAM type: NRG; PAM sequence: AGG
ccagaaatggtgatacagtc

SEQ ID NO: 132826 - DNA, 20 bp, Artificial Sequence
  Description of Artificial Sequence: Synthetic oligonucleotide
  Target: LAMA2; (+) strand; PAM type: NRG; PAM sequence: GAG
agaaatggtgatacagtcag

SEQ ID NO: 132827 - DNA, 20 bp, Artificial Sequence
  Description of Artificial Sequence: Synthetic oligonucleotide
  Target: LAMA2; (+) strand; PAM type: NRG; PAM sequence: CAG
agtcaggagcaatatattgc

SEQ ID NO: 132828 - DNA, 20 bp, Artificial Sequence
  Description of Artificial Sequence: Synthetic oligonucleotide
  Target: LAMA2; (+) strand; PAM type: NRG; PAM sequence: AGG
gtcaggagcaatatattgcc

SEQ ID NO: 132829 - DNA, 20 bp, Artificial Sequence
  Description of Artificial Sequence: Synthetic oligonucleotide
  Target: LAMA2; (+) strand; PAM type: NRG; PAM sequence: TGG
caatatattgccaggaactt

SEQ ID NO: 132830 - DNA, 20 bp, Artificial Sequence
  Description of Artificial Sequence: Synthetic oligonucleotide
  Target: LAMA2; (+) strand; PAM type: NRG; PAM sequence: CAG
tatattgccaggaactttgg

SEQ ID NO: 132831 - DNA, 20 bp, Artificial Sequence
  Description of Artificial Sequence: Synthetic oligonucleotide
  Target: LAMA2; (+) strand; PAM type: NRG; PAM sequence: AGG
atattgccaggaactttggc

SEQ ID NO: 132832 - DNA, 20 bp, Artificial Sequence
  Description of Artificial Sequence: Synthetic oligonucleotide
  Target: LAMA2; (+) strand; PAM type: NRG; PAM sequence: GAG
gccaggaactttggcaggac

SEQ ID NO: 132833 - DNA, 20 bp, Artificial Sequence
  Description of Artificial Sequence: Synthetic oligonucleotide
  Target: LAMA2; (+) strand; PAM type: NRG; PAM sequence: GAG
caggaactttggcaggacga

SEQ ID NO: 132834 - DNA, 20 bp, Artificial Sequence
  Description of Artificial Sequence: Synthetic oligonucleotide
  Target: LAMA2; (+) strand; PAM type: NRG; PAM sequence: TGG
caggacgagagattactttt

SEQ ID NO: 132835 - DNA, 20 bp, Artificial Sequence
  Description of Artificial Sequence: Synthetic oligonucleotide
  Target: LAMA2; (+) strand; PAM type: NRG; PAM sequence: TAG
acgagagattactttttgga

SEQ ID NO: 132836 - DNA, 20 bp, Artificial Sequence
  Description of Artificial Sequence: Synthetic oligonucleotide
  Target: LAMA2; (+) strand; PAM type: NRG; PAM sequence: CAG
gattactttttggatagaat

SEQ ID NO: 132837 - DNA, 20 bp, Artificial Sequence
  Description of Artificial Sequence: Synthetic oligonucleotide
  Target: LAMA2; (+) strand; PAM type: NRG; PAM sequence: CAG
tttttggatagaatcagttg

SEQ ID NO: 132838 - DNA, 20 bp, Artificial Sequence
  Description of Artificial Sequence: Synthetic oligonucleotide
  Target: LAMA2; (+) strand; PAM type: NRG; PAM sequence: AGG
ttttggatagaatcagttgc

SEQ ID NO: 132839 - DNA, 20 bp, Artificial Sequence
  Description of Artificial Sequence: Synthetic oligonucleotide
  Target: LAMA2; (+) strand; PAM type: NRG; PAM sequence: CAG
aattttccaaacgattcaca

SEQ ID NO: 132840 - DNA, 20 bp, Artificial Sequence
  Description of Artificial Sequence: Synthetic oligonucleotide
  Target: LAMA2; (+) strand; PAM type: NRG; PAM sequence: TGG
acagcatcaacttaatcttc

SEQ ID NO: 132841 - DNA, 20 bp, Artificial Sequence
  Description of Artificial Sequence: Synthetic oligonucleotide
  Target: LAMA2; (+) strand; PAM type: NRG; PAM sequence: TAG
taatcttctggaaaacattt

SEQ ID NO: 132842 - DNA, 20 bp, Artificial Sequence
  Description of Artificial Sequence: Synthetic oligonucleotide
  Target: LAMA2; (+) strand; PAM type: NRG; PAM sequence: AGG
aatcttctggaaaacatttt

SEQ ID NO: 132843 - DNA, 20 bp, Artificial Sequence
  Description of Artificial Sequence: Synthetic oligonucleotide
  Target: LAMA2; (+) strand; PAM type: NRG; PAM sequence: GGG
atcttctggaaaacatttta

SEQ ID NO: 132844 - DNA, 20 bp, Artificial Sequence
  Description of Artificial Sequence: Synthetic oligonucleotide
  Target: LAMA2; (+) strand; PAM type: NRG; PAM sequence: CAG
ccacaaatacatattgtacc

SEQ ID NO: 132845 - DNA, 20 bp, Artificial Sequence
  Description of Artificial Sequence: Synthetic oligonucleotide
  Target: LAMA2; (+) strand; PAM type: NRG; PAM sequence: AGG
cacaaatacatattgtaccc

SEQ ID NO: 132846 - DNA, 20 bp, Artificial Sequence
  Description of Artificial Sequence: Synthetic oligonucleotide
  Target: LAMA2; (+) strand; PAM type: NRG; PAM sequence: TAG
tacatattgtacccaggatg

SEQ ID NO: 132847 - DNA, 20 bp, Artificial Sequence
  Description of Artificial Sequence: Synthetic oligonucleotide
  Target: LAMA2; (+) strand; PAM type: NRG; PAM sequence: CAG
aggatgtagtgtacttactg

SEQ ID NO: 132848 - DNA, 20 bp, Artificial Sequence
  Description of Artificial Sequence: Synthetic oligonucleotide
  Target: LAMA2; (+) strand; PAM type: NRG; PAM sequence: TGG
gtagtgtacttactgcagtg

SEQ ID NO: 132849 - DNA, 20 bp, Artificial Sequence
  Description of Artificial Sequence: Synthetic oligonucleotide
  Target: LAMA2; (+) strand; PAM type: NRG; PAM sequence: TGG
gtgtggtctatgatttttct

SEQ ID NO: 132850 - DNA, 20 bp, Artificial Sequence
  Description of Artificial Sequence: Synthetic oligonucleotide
  Target: LAMA2; (+) strand; PAM type: NRG; PAM sequence: AAG
ttcttggcatgcataattca

SEQ ID NO: 132851 - DNA, 20 bp, Artificial Sequence
  Description of Artificial Sequence: Synthetic oligonucleotide
  Target: LAMA2; (+) strand; PAM type: NRG; PAM sequence: CAG
gcatgcataattcaaagacc

SEQ ID NO: 132852 - DNA, 20 bp, Artificial Sequence
  Description of Artificial Sequence: Synthetic oligonucleotide
  Target: LAMA2; (+) strand; PAM type: NRG; PAM sequence: TAG
gcataattcaaagacccaga

SEQ ID NO: 132853 - DNA, 20 bp, Artificial Sequence
  Description of Artificial Sequence: Synthetic oligonucleotide
  Target: LAMA2; (+) strand; PAM type: NRG; PAM sequence: TAG
cagatagaaatgactgattt

SEQ ID NO: 132854 - DNA, 20 bp, Artificial Sequence
  Description of Artificial Sequence: Synthetic oligonucleotide
  Target: LAMA2; (+) strand; PAM type: NRG; PAM sequence: AAG
cacttctaacaataaaacaa

SEQ ID NO: 132855 - DNA, 20 bp, Artificial Sequence
  Description of Artificial Sequence: Synthetic oligonucleotide
  Target: LAMA2; (+) strand; PAM type: NRG; PAM sequence: AAG
taaaacaaaagctcttctac

SEQ ID NO: 132856 - DNA, 20 bp, Artificial Sequence
  Description of Artificial Sequence: Synthetic oligonucleotide
  Target: LAMA2; (+) strand; PAM type: NRG; PAM sequence: GAG
aaacaaaagctcttctacaa

SEQ ID NO: 132857 - DNA, 20 bp, Artificial Sequence
  Description of Artificial Sequence: Synthetic oligonucleotide
  Target: LAMA2; (+) strand; PAM type: NRG; PAM sequence: AAG
gttaaacatatcaatatctc

SEQ ID NO: 132858 - DNA, 20 bp, Artificial Sequence
  Description of Artificial Sequence: Synthetic oligonucleotide
  Target: LAMA2; (+) strand; PAM type: NRG; PAM sequence: AAG
aacatatcaatatctcaagt

SEQ ID NO: 132859 - DNA, 20 bp, Artificial Sequence
  Description of Artificial Sequence: Synthetic oligonucleotide
  Target: LAMA2; (+) strand; PAM type: NRG; PAM sequence: GAG
aagtaagtatgatgaatttt

SEQ ID NO: 132860 - DNA, 20 bp, Artificial Sequence
  Description of Artificial Sequence: Synthetic oligonucleotide
  Target: LAMA2; (+) strand; PAM type: NRG; PAM sequence: TAG
aagtatgatgaattttgaga

SEQ ID NO: 132861 - DNA, 20 bp, Artificial Sequence
  Description of Artificial Sequence: Synthetic oligonucleotide
  Target: LAMA2; (+) strand; PAM type: NRG; PAM sequence: AGG
agtatgatgaattttgagat

SEQ ID NO: 132862 - DNA, 20 bp, Artificial Sequence
  Description of Artificial Sequence: Synthetic oligonucleotide
  Target: LAMA2; (+) strand; PAM type: NRG; PAM sequence: GGG
gtatgatgaattttgagata

SEQ ID NO: 132863 - DNA, 20 bp, Artificial Sequence
  Description of Artificial Sequence: Synthetic oligonucleotide
  Target: LAMA2; (+) strand; PAM type: NRG; PAM sequence: TGG
tgagatagggatcatgccat

SEQ ID NO: 132864 - DNA, 20 bp, Artificial Sequence
  Description of Artificial Sequence: Synthetic oligonucleotide
  Target: LAMA2; (+) strand; PAM type: NRG; PAM sequence: GGG
gagatagggatcatgccatt

SEQ ID NO: 132865 - DNA, 20 bp, Artificial Sequence
  Description of Artificial Sequence: Synthetic oligonucleotide
  Target: LAMA2; (+) strand; PAM type: NRG; PAM sequence: GGG
agatagggatcatgccattg

SEQ ID NO: 132866 - DNA, 20 bp, Artificial Sequence
  Description of Artificial Sequence: Synthetic oligonucleotide
  Target: LAMA2; (+) strand; PAM type: NRG; PAM sequence: TGG
catgccattggggtctcatc

SEQ ID NO: 132867 - DNA, 20 bp, Artificial Sequence
  Description of Artificial Sequence: Synthetic oligonucleotide
  Target: LAMA2; (+) strand; PAM type: NRG; PAM sequence: TGG
gccattggggtctcatctgg

SEQ ID NO: 132868 - DNA, 20 bp, Artificial Sequence
  Description of Artificial Sequence: Synthetic oligonucleotide
  Target: LAMA2; (+) strand; PAM type: NRG; PAM sequence: TGG
ggggtctcatctggtggtca

SEQ ID NO: 132869 - DNA, 20 bp, Artificial Sequence
  Description of Artificial Sequence: Synthetic oligonucleotide
  Target: LAMA2; (+) strand; PAM type: NRG; PAM sequence: GGG
gggtctcatctggtggtcat

SEQ ID NO: 132870 - DNA, 20 bp, Artificial Sequence
  Description of Artificial Sequence: Synthetic oligonucleotide
  Target: LAMA2; (+) strand; PAM type: NRG; PAM sequence: GGG
ggtctcatctggtggtcatg

SEQ ID NO: 132871 - DNA, 20 bp, Artificial Sequence
  Description of Artificial Sequence: Synthetic oligonucleotide
  Target: LAMA2; (+) strand; PAM type: NRG; PAM sequence: TGG
atctggtggtcatggggaaa

SEQ ID NO: 132872 - DNA, 20 bp, Artificial Sequence
  Description of Artificial Sequence: Synthetic oligonucleotide
  Target: LAMA2; (+) strand; PAM type: NRG; PAM sequence: TGG
ggggaaatggtcctctttct

SEQ ID NO: 132873 - DNA, 20 bp, Artificial Sequence
  Description of Artificial Sequence: Synthetic oligonucleotide
  Target: LAMA2; (+) strand; PAM type: NRG; PAM sequence: TGG
tcctctttcttggatatctt

SEQ ID NO: 132874 - DNA, 20 bp, Artificial Sequence
  Description of Artificial Sequence: Synthetic oligonucleotide
  Target: LAMA2; (+) strand; PAM type: NRG; PAM sequence: GAG
ctctttcttggatatctttg

SEQ ID NO: 132875 - DNA, 20 bp, Artificial Sequence
  Description of Artificial Sequence: Synthetic oligonucleotide
  Target: LAMA2; (+) strand; PAM type: NRG; PAM sequence: GAG
ctttcttggatatctttgga

SEQ ID NO: 132876 - DNA, 20 bp, Artificial Sequence
  Description of Artificial Sequence: Synthetic oligonucleotide
  Target: LAMA2; (+) strand; PAM type: NRG; PAM sequence: TAG
gagtatactatttgactctt

SEQ ID NO: 132877 - DNA, 20 bp, Artificial Sequence
  Description of Artificial Sequence: Synthetic oligonucleotide
  Target: LAMA2; (+) strand; PAM type: NRG; PAM sequence: GAG
tttgactctttagtcaaact

SEQ ID NO: 132878 - DNA, 20 bp, Artificial Sequence
  Description of Artificial Sequence: Synthetic oligonucleotide
  Target: LAMA2; (+) strand; PAM type: NRG; PAM sequence: AGG
ttgactctttagtcaaactg

SEQ ID NO: 132879 - DNA, 20 bp, Artificial Sequence
  Description of Artificial Sequence: Synthetic oligonucleotide
  Target: LAMA2; (+) strand; PAM type: NRG; PAM sequence: CAG
tctttagtcaaactgaggat

SEQ ID NO: 132880 - DNA, 20 bp, Artificial Sequence
  Description of Artificial Sequence: Synthetic oligonucleotide
  Target: LAMA2; (+) strand; PAM type: NRG; PAM sequence: AAG
actgaggatcagtattttaa

SEQ ID NO: 132881 - DNA, 20 bp, Artificial Sequence
  Description of Artificial Sequence: Synthetic oligonucleotide
  Target: LAMA2; (+) strand; PAM type: NRG; PAM sequence: AAG
taaaagtctataaaatactt

SEQ ID NO: 132882 - DNA, 20 bp, Artificial Sequence
  Description of Artificial Sequence: Synthetic oligonucleotide
  Target: LAMA2; (+) strand; PAM type: NRG; PAM sequence: TAG
aaaatacttaagccatcttg

SEQ ID NO: 132883 - DNA, 20 bp, Artificial Sequence
  Description of Artificial Sequence: Synthetic oligonucleotide
  Target: LAMA2; (+) strand; PAM type: NRG; PAM sequence: TAG
agccatcttgtagaaataaa

SEQ ID NO: 132884 - DNA, 20 bp, Artificial Sequence
  Description of Artificial Sequence: Synthetic oligonucleotide
  Target: LAMA2; (+) strand; PAM type: NRG; PAM sequence: CAG
aaataaatagtcttcccacc

SEQ ID NO: 132885 - DNA, 20 bp, Artificial Sequence
  Description of Artificial Sequence: Synthetic oligonucleotide
  Target: LAMA2; (+) strand; PAM type: NRG; PAM sequence: TAG
ataatctctgaaataattat

SEQ ID NO: 132886 - DNA, 20 bp, Artificial Sequence
  Description of Artificial Sequence: Synthetic oligonucleotide
  Target: LAMA2; (+) strand; PAM type: NRG; PAM sequence: AGG
taatctctgaaataattatt

SEQ ID NO: 132887 - DNA, 20 bp, Artificial Sequence
  Description of Artificial Sequence: Synthetic oligonucleotide
  Target: LAMA2; (+) strand; PAM type: NRG; PAM sequence: TGG
tctttttctttcaaacactt

SEQ ID NO: 132888 - DNA, 20 bp, Artificial Sequence
  Description of Artificial Sequence: Synthetic oligonucleotide
  Target: LAMA2; (+) strand; PAM type: NRG; PAM sequence: TAG
aacactttggaattataatt

SEQ ID NO: 132889 - DNA, 20 bp, Artificial Sequence
  Description of Artificial Sequence: Synthetic oligonucleotide
  Target: LAMA2; (+) strand; PAM type: NRG; PAM sequence: GAG
atttagattctttaaaaact

SEQ ID NO: 132890 - DNA, 20 bp, Artificial Sequence
  Description of Artificial Sequence: Synthetic oligonucleotide
  Target: LAMA2; (+) strand; PAM type: NRG; PAM sequence: AAG
ttatgactgttttttcaaaa

SEQ ID NO: 132891 - DNA, 20 bp, Artificial Sequence
  Description of Artificial Sequence: Synthetic oligonucleotide
  Target: LAMA2; (+) strand; PAM type: NRG; PAM sequence: TGG
tcaaaaaagcttcaaaattt

SEQ ID NO: 132892 - DNA, 20 bp, Artificial Sequence
  Description of Artificial Sequence: Synthetic oligonucleotide
  Target: LAMA2; (+) strand; PAM type: NRG; PAM sequence: TAG
gttgcatttttttttccaat

SEQ ID NO: 132893 - DNA, 20 bp, Artificial Sequence
  Description of Artificial Sequence: Synthetic oligonucleotide
  Target: LAMA2; (+) strand; PAM type: NRG; PAM sequence: AGG
ttgcatttttttttccaatt

SEQ ID NO: 132894 - DNA, 20 bp, Artificial Sequence
  Description of Artificial Sequence: Synthetic oligonucleotide
  Target: LAMA2; (+) strand; PAM type: NRG; PAM sequence: AAG
tttttttttccaattaggat

SEQ ID NO: 132895 - DNA, 20 bp, Artificial Sequence
  Description of Artificial Sequence: Synthetic oligonucleotide
  Target: LAMA2; (+) strand; PAM type: NRG; PAM sequence: AAG
attaggataagtaattcaaa

SEQ ID NO: 132896 - DNA, 20 bp, Artificial Sequence
  Description of Artificial Sequence: Synthetic oligonucleotide
  Target: LAMA2; (+) strand; PAM type: NRG; PAM sequence: CAG
caaaaagtcacaacatgctt

SEQ ID NO: 132897 - DNA, 20 bp, Artificial Sequence
  Description of Artificial Sequence: Synthetic oligonucleotide
  Target: LAMA2; (+) strand; PAM type: NRG; PAM sequence: TAG
ccaaaaatccattgtgaaaa

SEQ ID NO: 132898 - DNA, 20 bp, Artificial Sequence
  Description of Artificial Sequence: Synthetic oligonucleotide
  Target: LAMA2; (+) strand; PAM type: NRG; PAM sequence: TAG
tccattgtgaaaatagaaat

SEQ ID NO: 132899 - DNA, 20 bp, Artificial Sequence
  Description of Artificial Sequence: Synthetic oligonucleotide
  Target: LAMA2; (+) strand; PAM type: NRG; PAM sequence: AAG
aaatgatctttcaaaaaatt

SEQ ID NO: 132900 - DNA, 20 bp, Artificial Sequence
  Description of Artificial Sequence: Synthetic oligonucleotide
  Target: LAMA2; (+) strand; PAM type: NRG; PAM sequence: AAG
taagaaatcattttttgaaa

SEQ ID NO: 132901 - DNA, 20 bp, Artificial Sequence
  Description of Artificial Sequence: Synthetic oligonucleotide
  Target: LAMA2; (+) strand; PAM type: NRG; PAM sequence: TGG
aatcattttttgaaaaagtg

SEQ ID NO: 132902 - DNA, 20 bp, Artificial Sequence
  Description of Artificial Sequence: Synthetic oligonucleotide
  Target: LAMA2; (+) strand; PAM type: NRG; PAM sequence: GAG
tcattttttgaaaaagtgtg

SEQ ID NO: 132903 - DNA, 20 bp, Artificial Sequence
  Description of Artificial Sequence: Synthetic oligonucleotide
  Target: LAMA2; (+) strand; PAM type: NRG; PAM sequence: AAG
aaagtgtggagtcattaatt

SEQ ID NO: 132904 - DNA, 20 bp, Artificial Sequence
  Description of Artificial Sequence: Synthetic oligonucleotide
  Target: LAMA2; (+) strand; PAM type: NRG; PAM sequence: AAG
ctcaaatgtccattttcaaa

SEQ ID NO: 132905 - DNA, 20 bp, Artificial Sequence
  Description of Artificial Sequence: Synthetic oligonucleotide
  Target: LAMA2; (+) strand; PAM type: NRG; PAM sequence: CAG
aatgtccattttcaaaaaga

SEQ ID NO: 132906 - DNA, 20 bp, Artificial Sequence
  Description of Artificial Sequence: Synthetic oligonucleotide
  Target: LAMA2; (+) strand; PAM type: NRG; PAM sequence: CAG
cattttcaaaaagacagatg

SEQ ID NO: 132907 - DNA, 20 bp, Artificial Sequence
  Description of Artificial Sequence: Synthetic oligonucleotide
  Target: LAMA2; (+) strand; PAM type: NRG; PAM sequence: TAG
ttcaaaaagacagatgcagt

SEQ ID NO: 132908 - DNA, 20 bp, Artificial Sequence
  Description of Artificial Sequence: Synthetic oligonucleotide
  Target: LAMA2; (+) strand; PAM type: NRG; PAM sequence: AAG
aaaaagacagatgcagttag

SEQ ID NO: 132909 - DNA, 20 bp, Artificial Sequence
  Description of Artificial Sequence: Synthetic oligonucleotide
  Target: LAMA2; (+) strand; PAM type: NRG; PAM sequence: AGG
aaaagacagatgcagttaga

SEQ ID NO: 132910 - DNA, 20 bp, Artificial Sequence
  Description of Artificial Sequence: Synthetic oligonucleotide
  Target: LAMA2; (+) strand; PAM type: NRG; PAM sequence: AAG
acagatgcagttagaaggaa

SEQ ID NO: 132911 - DNA, 20 bp, Artificial Sequence
  Description of Artificial Sequence: Synthetic oligonucleotide
  Target: LAMA2; (+) strand; PAM type: NRG; PAM sequence: TAG
gaaggaaaagactatgaatg

SEQ ID NO: 132912 - DNA, 20 bp, Artificial Sequence
  Description of Artificial Sequence: Synthetic oligonucleotide
  Target: LAMA2; (+) strand; PAM type: NRG; PAM sequence: AGG
aaggaaaagactatgaatgt

SEQ ID NO: 132913 - DNA, 20 bp, Artificial Sequence
  Description of Artificial Sequence: Synthetic oligonucleotide
  Target: LAMA2; (+) strand; PAM type: NRG; PAM sequence: CAG
aaagactatgaatgtaggtt

SEQ ID NO: 132914 - DNA, 20 bp, Artificial Sequence
  Description of Artificial Sequence: Synthetic oligonucleotide
  Target: LAMA2; (+) strand; PAM type: NRG; PAM sequence: AGG
aagactatgaatgtaggttc

SEQ ID NO: 132915 - DNA, 20 bp, Artificial Sequence
  Description of Artificial Sequence: Synthetic oligonucleotide
  Target: LAMA2; (+) strand; PAM type: NRG; PAM sequence: GGG
agactatgaatgtaggttca

SEQ ID NO: 132916 - DNA, 20 bp, Artificial Sequence
  Description of Artificial Sequence: Synthetic oligonucleotide
  Target: LAMA2; (+) strand; PAM type: NRG; PAM sequence: CAG
tatgaatgtaggttcagggc

SEQ ID NO: 132917 - DNA, 20 bp, Artificial Sequence
  Description of Artificial Sequence: Synthetic oligonucleotide
  Target: LAMA2; (+) strand; PAM type: NRG; PAM sequence: GAG
tgaatgtaggttcagggcca

SEQ ID NO: 132918 - DNA, 20 bp, Artificial Sequence
  Description of Artificial Sequence: Synthetic oligonucleotide
  Target: LAMA2; (+) strand; PAM type: NRG; PAM sequence: AGG
gaatgtaggttcagggccag

SEQ ID NO: 132919 - DNA, 20 bp, Artificial Sequence
  Description of Artificial Sequence: Synthetic oligonucleotide
  Target: LAMA2; (+) strand; PAM type: NRG; PAM sequence: TAG
ctgttgaaattgccttgata

SEQ ID NO: 132920 - DNA, 20 bp, Artificial Sequence
  Description of Artificial Sequence: Synthetic oligonucleotide
  Target: LAMA2; (+) strand; PAM type: NRG; PAM sequence: TAG
attgccttgatatagattca

SEQ ID NO: 132921 - DNA, 20 bp, Artificial Sequence
  Description of Artificial Sequence: Synthetic oligonucleotide
  Target: LAMA2; (+) strand; PAM type: NRG; PAM sequence: GAG
tagattcatagattgcaaat

SEQ ID NO: 132922 - DNA, 20 bp, Artificial Sequence
  Description of Artificial Sequence: Synthetic oligonucleotide
  Target: LAMA2; (+) strand; PAM type: NRG; PAM sequence: TGG
aaaatttaaacccttgaata

SEQ ID NO: 132923 - DNA, 20 bp, Artificial Sequence
  Description of Artificial Sequence: Synthetic oligonucleotide
  Target: LAMA2; (+) strand; PAM type: NRG; PAM sequence: CAG
aacccttgaatatggtatct

SEQ ID NO: 132924 - DNA, 20 bp, Artificial Sequence
  Description of Artificial Sequence: Synthetic oligonucleotide
  Target: LAMA2; (+) strand; PAM type: NRG; PAM sequence: AGG
acccttgaatatggtatctc

SEQ ID NO: 132925 - DNA, 20 bp, Artificial Sequence
  Description of Artificial Sequence: Synthetic oligonucleotide
  Target: LAMA2; (+) strand; PAM type: NRG; PAM sequence: CAG
tgaatatggtatctcaggca

SEQ ID NO: 132926 - DNA, 20 bp, Artificial Sequence
  Description of Artificial Sequence: Synthetic oligonucleotide
  Target: LAMA2; (+) strand; PAM type: NRG; PAM sequence: GAG
aatatggtatctcaggcaca

SEQ ID NO: 132927 - DNA, 20 bp, Artificial Sequence
  Description of Artificial Sequence: Synthetic oligonucleotide
  Target: LAMA2; (+) strand; PAM type: NRG; PAM sequence: GAG
tggtatctcaggcacagagt

SEQ ID NO: 132928 - DNA, 20 bp, Artificial Sequence
  Description of Artificial Sequence: Synthetic oligonucleotide
  Target: LAMA2; (+) strand; PAM type: NRG; PAM sequence: CAG
atgtgattcttaccgcctac

SEQ ID NO: 132929 - DNA, 20 bp, Artificial Sequence
  Description of Artificial Sequence: Synthetic oligonucleotide
  Target: LAMA2; (+) strand; PAM type: NRG; PAM sequence: CAG
cagctgtcttccgatttcac

SEQ ID NO: 132930 - DNA, 20 bp, Artificial Sequence
  Description of Artificial Sequence: Synthetic oligonucleotide
  Target: LAMA2; (+) strand; PAM type: NRG; PAM sequence: AAG
caccagatgaccttccctat

SEQ ID NO: 132931 - DNA, 20 bp, Artificial Sequence
  Description of Artificial Sequence: Synthetic oligonucleotide
  Target: LAMA2; (+) strand; PAM type: NRG; PAM sequence: TGG
cacgtaactcataaaatgca

SEQ ID NO: 132932 - DNA, 20 bp, Artificial Sequence
  Description of Artificial Sequence: Synthetic oligonucleotide
  Target: LAMA2; (+) strand; PAM type: NRG; PAM sequence: TGG
actcataaaatgcatggctc

SEQ ID NO: 132933 - DNA, 20 bp, Artificial Sequence
  Description of Artificial Sequence: Synthetic oligonucleotide
  Target: LAMA2; (+) strand; PAM type: NRG; PAM sequence: GAG
tcataaaatgcatggctctg

SEQ ID NO: 132934 - DNA, 20 bp, Artificial Sequence
  Description of Artificial Sequence: Synthetic oligonucleotide
  Target: LAMA2; (+) strand; PAM type: NRG; PAM sequence: CGG
ctggagaacaattatcatga

SEQ ID NO: 132935 - DNA, 20 bp, Artificial Sequence
  Description of Artificial Sequence: Synthetic oligonucleotide
  Target: LAMA2; (+) strand; PAM type: NRG; PAM sequence: GGG
tggagaacaattatcatgac

SEQ ID NO: 132936 - DNA, 20 bp, Artificial Sequence
  Description of Artificial Sequence: Synthetic oligonucleotide
  Target: LAMA2; (+) strand; PAM type: NRG; PAM sequence: GAG
gagaacaattatcatgacgg

SEQ ID NO: 132937 - DNA, 20 bp, Artificial Sequence
  Description of Artificial Sequence: Synthetic oligonucleotide
  Target: LAMA2; (+) strand; PAM type: NRG; PAM sequence: TGG
agtatgctttcttgattata

SEQ ID NO: 132938 - DNA, 20 bp, Artificial Sequence
  Description of Artificial Sequence: Synthetic oligonucleotide
  Target: LAMA2; (+) strand; PAM type: NRG; PAM sequence: CAG
atgctttcttgattatatgg

SEQ ID NO: 132939 - DNA, 20 bp, Artificial Sequence
  Description of Artificial Sequence: Synthetic oligonucleotide
  Target: LAMA2; (+) strand; PAM type: NRG; PAM sequence: AGG
tgctttcttgattatatggc

SEQ ID NO: 132940 - DNA, 20 bp, Artificial Sequence
  Description of Artificial Sequence: Synthetic oligonucleotide
  Target: LAMA2; (+) strand; PAM type: NRG; PAM sequence: AAG
ctttcccacctctgcttttg

SEQ ID NO: 132941 - DNA, 20 bp, Artificial Sequence
  Description of Artificial Sequence: Synthetic oligonucleotide
  Target: LAMA2; (+) strand; PAM type: NRG; PAM sequence: AGG
tttcccacctctgcttttga

SEQ ID NO: 132942 - DNA, 20 bp, Artificial Sequence
  Description of Artificial Sequence: Synthetic oligonucleotide
  Target: LAMA2; (+) strand; PAM type: NRG; PAM sequence: AAG
tctgcttttgaaggatatta

SEQ ID NO: 132943 - DNA, 20 bp, Artificial Sequence
  Description of Artificial Sequence: Synthetic oligonucleotide
  Target: LAMA2; (+) strand; PAM type: NRG; PAM sequence: AGG
ctgcttttgaaggatattaa

SEQ ID NO: 132944 - DNA, 20 bp, Artificial Sequence
  Description of Artificial Sequence: Synthetic oligonucleotide
  Target: LAMA2; (+) strand; PAM type: NRG; PAM sequence: GAG
ttttgaaggatattaaaggt

SEQ ID NO: 132945 - DNA, 20 bp, Artificial Sequence
  Description of Artificial Sequence: Synthetic oligonucleotide
  Target: LAMA2; (+) strand; PAM type: NRG; PAM sequence: CAG
aggtgagattaaaaatgctc

SEQ ID NO: 132946 - DNA, 20 bp, Artificial Sequence
  Description of Artificial Sequence: Synthetic oligonucleotide
  Target: LAMA2; (+) strand; PAM type: NRG; PAM sequence: CAG
ttctgcttgtctgattgtaa

SEQ ID NO: 132947 - DNA, 20 bp, Artificial Sequence
  Description of Artificial Sequence: Synthetic oligonucleotide
  Target: LAMA2; (+) strand; PAM type: NRG; PAM sequence: AAG
cttgtctgattgtaacagtg

SEQ ID NO: 132948 - DNA, 20 bp, Artificial Sequence
  Description of Artificial Sequence: Synthetic oligonucleotide
  Target: LAMA2; (+) strand; PAM type: NRG; PAM sequence: AGG
ttgtctgattgtaacagtga

SEQ ID NO: 132949 - DNA, 20 bp, Artificial Sequence
  Description of Artificial Sequence: Synthetic oligonucleotide
  Target: LAMA2; (+) strand; PAM type: NRG; PAM sequence: GAG
gtctgattgtaacagtgaag

SEQ ID NO: 132950 - DNA, 20 bp, Artificial Sequence
  Description of Artificial Sequence: Synthetic oligonucleotide
  Target: LAMA2; (+) strand; PAM type: NRG; PAM sequence: TAG
gaaggagacaaaattgattc

SEQ ID NO: 132951 - DNA, 20 bp, Artificial Sequence
  Description of Artificial Sequence: Synthetic oligonucleotide
  Target: LAMA2; (+) strand; PAM type: NRG; PAM sequence: TGG
acaaaattgattctagctta

SEQ ID NO: 132952 - DNA, 20 bp, Artificial Sequence
  Description of Artificial Sequence: Synthetic oligonucleotide
  Target: LAMA2; (+) strand; PAM type: NRG; PAM sequence: CAG
attgattctagcttatggct

SEQ ID NO: 132953 - DNA, 20 bp, Artificial Sequence
  Description of Artificial Sequence: Synthetic oligonucleotide
  Target: LAMA2; (+) strand; PAM type: NRG; PAM sequence: CAG
agtgtttcaatgttattctg

SEQ ID NO: 132954 - DNA, 20 bp, Artificial Sequence
  Description of Artificial Sequence: Synthetic oligonucleotide
  Target: LAMA2; (+) strand; PAM type: NRG; PAM sequence: CAG
attctgcagcacttgtttgc

SEQ ID NO: 132955 - DNA, 20 bp, Artificial Sequence
  Description of Artificial Sequence: Synthetic oligonucleotide
  Target: LAMA2; (+) strand; PAM type: NRG; PAM sequence: CAG
ctgcagcacttgtttgccag

SEQ ID NO: 132956 - DNA, 20 bp, Artificial Sequence
  Description of Artificial Sequence: Synthetic oligonucleotide
  Target: LAMA2; (+) strand; PAM type: NRG; PAM sequence: TAG
acttgtttgccagcagctgt

SEQ ID NO: 132957 - DNA, 20 bp, Artificial Sequence
  Description of Artificial Sequence: Synthetic oligonucleotide
  Target: LAMA2; (+) strand; PAM type: NRG; PAM sequence: AGG
cttgtttgccagcagctgtt

SEQ ID NO: 132958 - DNA, 20 bp, Artificial Sequence
  Description of Artificial Sequence: Synthetic oligonucleotide
  Target: LAMA2; (+) strand; PAM type: NRG; PAM sequence: GGG
ttgtttgccagcagctgtta

SEQ ID NO: 132959 - DNA, 20 bp, Artificial Sequence
  Description of Artificial Sequence: Synthetic oligonucleotide
  Target: LAMA2; (+) strand; PAM type: NRG; PAM sequence: CAG
gcagctgttagggattattg

SEQ ID NO: 132960 - DNA, 20 bp, Artificial Sequence
  Description of Artificial Sequence: Synthetic oligonucleotide
  Target: LAMA2; (+) strand; PAM type: NRG; PAM sequence: AGG
cagctgttagggattattgc

SEQ ID NO: 132961 - DNA, 20 bp, Artificial Sequence
  Description of Artificial Sequence: Synthetic oligonucleotide
  Target: LAMA2; (+) strand; PAM type: NRG; PAM sequence: CAG
attattgcaggtttctttgt

SEQ ID NO: 132962 - DNA, 20 bp, Artificial Sequence
  Description of Artificial Sequence: Synthetic oligonucleotide
  Target: LAMA2; (+) strand; PAM type: NRG; PAM sequence: AGG
ttattgcaggtttctttgtc

SEQ ID NO: 132963 - DNA, 20 bp, Artificial Sequence
  Description of Artificial Sequence: Synthetic oligonucleotide
  Target: LAMA2; (+) strand; PAM type: NRG; PAM sequence: CAG
gcaggtttctttgtcaggaa

SEQ ID NO: 132964 - DNA, 20 bp, Artificial Sequence
  Description of Artificial Sequence: Synthetic oligonucleotide
  Target: LAMA2; (+) strand; PAM type: NRG; PAM sequence: TGG
tttctttgtcaggaacagtg

SEQ ID NO: 132965 - DNA, 20 bp, Artificial Sequence
  Description of Artificial Sequence: Synthetic oligonucleotide
  Target: LAMA2; (+) strand; PAM type: NRG; PAM sequence: CAG
gtgtggcaacaataataaat

SEQ ID NO: 132966 - DNA, 20 bp, Artificial Sequence
  Description of Artificial Sequence: Synthetic oligonucleotide
  Target: LAMA2; (+) strand; PAM type: NRG; PAM sequence: TAG
caacaataataaatcagatt

SEQ ID NO: 132967 - DNA, 20 bp, Artificial Sequence
  Description of Artificial Sequence: Synthetic oligonucleotide
  Target: LAMA2; (+) strand; PAM type: NRG; PAM sequence: TGG
ataataaatcagatttagac

SEQ ID NO: 132968 - DNA, 20 bp, Artificial Sequence
  Description of Artificial Sequence: Synthetic oligonucleotide
  Target: LAMA2; (+) strand; PAM type: NRG; PAM sequence: AAG
cagatttagactggctactg

SEQ ID NO: 132969 - DNA, 20 bp, Artificial Sequence
  Description of Artificial Sequence: Synthetic oligonucleotide
  Target: LAMA2; (+) strand; PAM type: NRG; PAM sequence: AGG
agatttagactggctactga

SEQ ID NO: 132970 - DNA, 20 bp, Artificial Sequence
  Description of Artificial Sequence: Synthetic oligonucleotide
  Target: LAMA2; (+) strand; PAM type: NRG; PAM sequence: GGG
gatttagactggctactgaa

SEQ ID NO: 132971 - DNA, 20 bp, Artificial Sequence
  Description of Artificial Sequence: Synthetic oligonucleotide
  Target: LAMA2; (+) strand; PAM type: NRG; PAM sequence: GGG
atttagactggctactgaag

SEQ ID NO: 132972 - DNA, 20 bp, Artificial Sequence
  Description of Artificial Sequence: Synthetic oligonucleotide
  Target: LAMA2; (+) strand; PAM type: NRG; PAM sequence: AAG
tactgaaggggtttgtttaa

SEQ ID NO: 132973 - DNA, 20 bp, Artificial Sequence
  Description of Artificial Sequence: Synthetic oligonucleotide
  Target: LAMA2; (+) strand; PAM type: NRG; PAM sequence: CAG
aaaagatttaaaaatctctt

SEQ ID NO: 132974 - DNA, 20 bp, Artificial Sequence
  Description of Artificial Sequence: Synthetic oligonucleotide
  Target: LAMA2; (+) strand; PAM type: NRG; PAM sequence: GAG
aagatttaaaaatctcttca

SEQ ID NO: 132975 - DNA, 20 bp, Artificial Sequence
  Description of Artificial Sequence: Synthetic oligonucleotide
  Target: LAMA2; (+) strand; PAM type: NRG; PAM sequence: AAG
taaaaatctcttcagagtca

SEQ ID NO: 132976 - DNA, 20 bp, Artificial Sequence
  Description of Artificial Sequence: Synthetic oligonucleotide
  Target: LAMA2; (+) strand; PAM type: NRG; PAM sequence: TGG
tcaaagatgttaattctacc

SEQ ID NO: 132977 - DNA, 20 bp, Artificial Sequence
  Description of Artificial Sequence: Synthetic oligonucleotide
  Target: LAMA2; (+) strand; PAM type: NRG; PAM sequence: CAG
gttaattctacctggtgaac

SEQ ID NO: 132978 - DNA, 20 bp, Artificial Sequence
  Description of Artificial Sequence: Synthetic oligonucleotide
  Target: LAMA2; (+) strand; PAM type: NRG; PAM sequence: TGG
gaatgatcctgcatatatct

SEQ ID NO: 132979 - DNA, 20 bp, Artificial Sequence
  Description of Artificial Sequence: Synthetic oligonucleotide
  Target: LAMA2; (+) strand; PAM type: NRG; PAM sequence: GGG
aatgatcctgcatatatctt

SEQ ID NO: 132980 - DNA, 20 bp, Artificial Sequence
  Description of Artificial Sequence: Synthetic oligonucleotide
  Target: LAMA2; (+) strand; PAM type: NRG; PAM sequence: CAG
atcctgcatatatcttggga

SEQ ID NO: 132981 - DNA, 20 bp, Artificial Sequence
  Description of Artificial Sequence: Synthetic oligonucleotide
  Target: LAMA2; (+) strand; PAM type: NRG; PAM sequence: TGG
agacttatattttctaaatc

SEQ ID NO: 132982 - DNA, 20 bp, Artificial Sequence
  Description of Artificial Sequence: Synthetic oligonucleotide
  Target: LAMA2; (+) strand; PAM type: NRG; PAM sequence: GGG
gacttatattttctaaatct

SEQ ID NO: 132983 - DNA, 20 bp, Artificial Sequence
  Description of Artificial Sequence: Synthetic oligonucleotide
  Target: LAMA2; (+) strand; PAM type: NRG; PAM sequence: AAG
atgatcatacatgcactgaa

SEQ ID NO: 132984 - DNA, 20 bp, Artificial Sequence
  Description of Artificial Sequence: Synthetic oligonucleotide
  Target: LAMA2; (+) strand; PAM type: NRG; PAM sequence: AAG
atcatacatgcactgaaaag

SEQ ID NO: 132985 - DNA, 20 bp, Artificial Sequence
  Description of Artificial Sequence: Synthetic oligonucleotide
  Target: LAMA2; (+) strand; PAM type: NRG; PAM sequence: CAG
aaaagaagaccatcttctcc

SEQ ID NO: 132986 - DNA, 20 bp, Artificial Sequence
  Description of Artificial Sequence: Synthetic oligonucleotide
  Target: LAMA2; (+) strand; PAM type: NRG; PAM sequence: AAG
ccagaaatatacaacactga

SEQ ID NO: 132987 - DNA, 20 bp, Artificial Sequence
  Description of Artificial Sequence: Synthetic oligonucleotide
  Target: LAMA2; (+) strand; PAM type: NRG; PAM sequence: AAG
ctctaccaaacatgcatgaa

SEQ ID NO: 132988 - DNA, 20 bp, Artificial Sequence
  Description of Artificial Sequence: Synthetic oligonucleotide
  Target: LAMA2; (+) strand; PAM type: NRG; PAM sequence: TAG
accaaacatgcatgaaaaga

SEQ ID NO: 132989 - DNA, 20 bp, Artificial Sequence
  Description of Artificial Sequence: Synthetic oligonucleotide
  Target: LAMA2; (+) strand; PAM type: NRG; PAM sequence: AAG
acatgcatgaaaagatagca

SEQ ID NO: 132990 - DNA, 20 bp, Artificial Sequence
  Description of Artificial Sequence: Synthetic oligonucleotide
  Target: LAMA2; (+) strand; PAM type: NRG; PAM sequence: AGG
catgcatgaaaagatagcaa

SEQ ID NO: 132991 - DNA, 20 bp, Artificial Sequence
  Description of Artificial Sequence: Synthetic oligonucleotide
  Target: LAMA2; (+) strand; PAM type: NRG; PAM sequence: TAG
tgtttctttcctctttcgtt

SEQ ID NO: 132992 - DNA, 20 bp, Artificial Sequence
  Description of Artificial Sequence: Synthetic oligonucleotide
  Target: LAMA2; (+) strand; PAM type: NRG; PAM sequence: AGG
gtttctttcctctttcgttt

SEQ ID NO: 132993 - DNA, 20 bp, Artificial Sequence
  Description of Artificial Sequence: Synthetic oligonucleotide
  Target: LAMA2; (+) strand; PAM type: NRG; PAM sequence: TAG
cctctttcgtttaggtgaaa

SEQ ID NO: 132994 - DNA, 20 bp, Artificial Sequence
  Description of Artificial Sequence: Synthetic oligonucleotide
  Target: LAMA2; (+) strand; PAM type: NRG; PAM sequence: GAG
tctttcgtttaggtgaaata

SEQ ID NO: 132995 - DNA, 20 bp, Artificial Sequence
  Description of Artificial Sequence: Synthetic oligonucleotide
  Target: LAMA2; (+) strand; PAM type: NRG; PAM sequence: AGG
ctttcgtttaggtgaaatag

SEQ ID NO: 132996 - DNA, 20 bp, Artificial Sequence
  Description of Artificial Sequence: Synthetic oligonucleotide
  Target: LAMA2; (+) strand; PAM type: NRG; PAM sequence: CAG
tttaggtgaaatagaggata

SEQ ID NO: 132997 - DNA, 20 bp, Artificial Sequence
  Description of Artificial Sequence: Synthetic oligonucleotide
  Target: LAMA2; (+) strand; PAM type: NRG; PAM sequence: TAG
gaggatacagctctgatcat

SEQ ID NO: 132998 - DNA, 20 bp, Artificial Sequence
  Description of Artificial Sequence: Synthetic oligonucleotide
  Target: LAMA2; (+) strand; PAM type: NRG; PAM sequence: TGG
ctgatcattagaatttcata

SEQ ID NO: 132999 - DNA, 20 bp, Artificial Sequence
  Description of Artificial Sequence: Synthetic oligonucleotide
  Target: LAMA2; (+) strand; PAM type: NRG; PAM sequence: TAG
atggcaaacgctcacacaca

SEQ ID NO: 133000 - DNA, 20 bp, Artificial Sequence
  Description of Artificial Sequence: Synthetic oligonucleotide
  Target: LAMA2; (+) strand; PAM type: NRG; PAM sequence: TGG
gcaaacgctcacacacatag

SEQ ID NO: 133001 - DNA, 20 bp, Artificial Sequence
  Description of Artificial Sequence: Synthetic oligonucleotide
  Target: LAMA2; (+) strand; PAM type: NRG; PAM sequence: GAG
ctcacacacatagtggattt

SEQ ID NO: 133002 - DNA, 20 bp, Artificial Sequence
  Description of Artificial Sequence: Synthetic oligonucleotide
  Target: LAMA2; (+) strand; PAM type: NRG; PAM sequence: AGG
tcacacacatagtggatttg

SEQ ID NO: 133003 - DNA, 20 bp, Artificial Sequence
  Description of Artificial Sequence: Synthetic oligonucleotide
  Target: LAMA2; (+) strand; PAM type: NRG; PAM sequence: TAG
gaaatcaattttcactaatc

SEQ ID NO: 133004 - DNA, 20 bp, Artificial Sequence
  Description of Artificial Sequence: Synthetic oligonucleotide
  Target: LAMA2; (+) strand; PAM type: NRG; PAM sequence: AAG
atctagaaaattctctcctc

SEQ ID NO: 133005 - DNA, 20 bp, Artificial Sequence
  Description of Artificial Sequence: Synthetic oligonucleotide
  Target: LAMA2; (+) strand; PAM type: NRG; PAM sequence: GAG
ctagaaaattctctcctcaa

SEQ ID NO: 133006 - DNA, 20 bp, Artificial Sequence
  Description of Artificial Sequence: Synthetic oligonucleotide
  Target: LAMA2; (+) strand; PAM type: NRG; PAM sequence: AAG
aaattctctcctcaagagaa

SEQ ID NO: 133007 - DNA, 20 bp, Artificial Sequence
  Description of Artificial Sequence: Synthetic oligonucleotide
  Target: LAMA2; (+) strand; PAM type: NRG; PAM sequence: AGG
aattctctcctcaagagaaa

SEQ ID NO: 133008 - DNA, 20 bp, Artificial Sequence
  Description of Artificial Sequence: Synthetic oligonucleotide
  Target: LAMA2; (+) strand; PAM type: NRG; PAM sequence: GGG
attctctcctcaagagaaaa

SEQ ID NO: 133009 - DNA, 20 bp, Artificial Sequence
  Description of Artificial Sequence: Synthetic oligonucleotide
  Target: LAMA2; (+) strand; PAM type: NRG; PAM sequence: TAG
tatcttttgcctactttaaa

SEQ ID NO: 133010 - DNA, 20 bp, Artificial Sequence
  Description of Artificial Sequence: Synthetic oligonucleotide
  Target: LAMA2; (+) strand; PAM type: NRG; PAM sequence: AGG
atcttttgcctactttaaat

SEQ ID NO: 133011 - DNA, 20 bp, Artificial Sequence
  Description of Artificial Sequence: Synthetic oligonucleotide
  Target: LAMA2; (+) strand; PAM type: NRG; PAM sequence: GGG
tcttttgcctactttaaata

SEQ ID NO: 133012 - DNA, 20 bp, Artificial Sequence
  Description of Artificial Sequence: Synthetic oligonucleotide
  Target: LAMA2; (+) strand; PAM type: NRG; PAM sequence: AAG
tgcctactttaaatagggaa

SEQ ID NO: 133013 - DNA, 20 bp, Artificial Sequence
  Description of Artificial Sequence: Synthetic oligonucleotide
  Target: LAMA2; (+) strand; PAM type: NRG; PAM sequence: AGG
gcctactttaaatagggaaa

SEQ ID NO: 133014 - DNA, 20 bp, Artificial Sequence
  Description of Artificial Sequence: Synthetic oligonucleotide
  Target: LAMA2; (+) strand; PAM type: NRG; PAM sequence: AAG
aatagggaaaaggtgactct

SEQ ID NO: 133015 - DNA, 20 bp, Artificial Sequence
  Description of Artificial Sequence: Synthetic oligonucleotide
  Target: LAMA2; (+) strand; PAM type: NRG; PAM sequence: AGG
atagggaaaaggtgactcta

SEQ ID NO: 133016 - DNA, 20 bp, Artificial Sequence
  Description of Artificial Sequence: Synthetic oligonucleotide
  Target: LAMA2; (+) strand; PAM type: NRG; PAM sequence: TGG
gaaattgactttacccttcc

SEQ ID NO: 133017 - DNA, 20 bp, Artificial Sequence
  Description of Artificial Sequence: Synthetic oligonucleotide
  Target: LAMA2; (+) strand; PAM type: NRG; PAM sequence: TAG
tgactttacccttcctggta

SEQ ID NO: 133018 - DNA, 20 bp, Artificial Sequence
  Description of Artificial Sequence: Synthetic oligonucleotide
  Target: LAMA2; (+) strand; PAM type: NRG; PAM sequence: TGG
ttacccttcctggtatagaa

SEQ ID NO: 133019 - DNA, 20 bp, Artificial Sequence
  Description of Artificial Sequence: Synthetic oligonucleotide
  Target: LAMA2; (+) strand; PAM type: NRG; PAM sequence: GAG
atagaatggcatttcacatt

SEQ ID NO: 133020 - DNA, 20 bp, Artificial Sequence
  Description of Artificial Sequence: Synthetic oligonucleotide
  Target: LAMA2; (+) strand; PAM type: NRG; PAM sequence: TAG
catttcacattgagaaaaac

SEQ ID NO: 133021 - DNA, 20 bp, Artificial Sequence
  Description of Artificial Sequence: Synthetic oligonucleotide
  Target: LAMA2; (+) strand; PAM type: NRG; PAM sequence: AGG
atttcacattgagaaaaact

SEQ ID NO: 133022 - DNA, 20 bp, Artificial Sequence
  Description of Artificial Sequence: Synthetic oligonucleotide
  Target: LAMA2; (+) strand; PAM type: NRG; PAM sequence: GGG
tttcacattgagaaaaacta

SEQ ID NO: 133023 - DNA, 20 bp, Artificial Sequence
  Description of Artificial Sequence: Synthetic oligonucleotide
  Target: LAMA2; (+) strand; PAM type: NRG; PAM sequence: GAG
tcacattgagaaaaactagg

SEQ ID NO: 133024 - DNA, 20 bp, Artificial Sequence
  Description of Artificial Sequence: Synthetic oligonucleotide
  Target: LAMA2; (+) strand; PAM type: NRG; PAM sequence: AAG
cattgagaaaaactagggag

SEQ ID NO: 133025 - DNA, 20 bp, Artificial Sequence
  Description of Artificial Sequence: Synthetic oligonucleotide
  Target: LAMA2; (+) strand; PAM type: NRG; PAM sequence: AAG
aaaactagggagaagcactg

SEQ ID NO: 133026 - DNA, 20 bp, Artificial Sequence
  Description of Artificial Sequence: Synthetic oligonucleotide
  Target: LAMA2; (+) strand; PAM type: NRG; PAM sequence: TGG
gagaagcactgaagaattaa

SEQ ID NO: 133027 - DNA, 20 bp, Artificial Sequence
  Description of Artificial Sequence: Synthetic oligonucleotide
  Target: LAMA2; (+) strand; PAM type: NRG; PAM sequence: GGG
agaagcactgaagaattaat

SEQ ID NO: 133028 - DNA, 20 bp, Artificial Sequence
  Description of Artificial Sequence: Synthetic oligonucleotide
  Target: LAMA2; (+) strand; PAM type: NRG; PAM sequence: CAG
agcactgaagaattaatggg

SEQ ID NO: 133029 - DNA, 20 bp, Artificial Sequence
  Description of Artificial Sequence: Synthetic oligonucleotide
  Target: LAMA2; (+) strand; PAM type: NRG; PAM sequence: TGG
actgaagaattaatgggcag

SEQ ID NO: 133030 - DNA, 20 bp, Artificial Sequence
  Description of Artificial Sequence: Synthetic oligonucleotide
  Target: LAMA2; (+) strand; PAM type: NRG; PAM sequence: GGG
ctgaagaattaatgggcagt

SEQ ID NO: 133031 - DNA, 20 bp, Artificial Sequence
  Description of Artificial Sequence: Synthetic oligonucleotide
  Target: LAMA2; (+) strand; PAM type: NRG; PAM sequence: GGG
tgaagaattaatgggcagtg

SEQ ID NO: 133032 - DNA, 20 bp, Artificial Sequence
  Description of Artificial Sequence: Synthetic oligonucleotide
  Target: LAMA2; (+) strand; PAM type: NRG; PAM sequence: GAG
aagaattaatgggcagtggg

SEQ ID NO: 133033 - DNA, 20 bp, Artificial Sequence
  Description of Artificial Sequence: Synthetic oligonucleotide
  Target: LAMA2; (+) strand; PAM type: NRG; PAM sequence: GAG
gaattaatgggcagtgggga

SEQ ID NO: 133034 - DNA, 20 bp, Artificial Sequence
  Description of Artificial Sequence: Synthetic oligonucleotide
  Target: LAMA2; (+) strand; PAM type: NRG; PAM sequence: TAG
gggcagtggggagagaaatg

SEQ ID NO: 133035 - DNA, 20 bp, Artificial Sequence
  Description of Artificial Sequence: Synthetic oligonucleotide
  Target: LAMA2; (+) strand; PAM type: NRG; PAM sequence: TGG
cattactttattatttgtcg

SEQ ID NO: 133036 - DNA, 20 bp, Artificial Sequence
  Description of Artificial Sequence: Synthetic oligonucleotide
  Target: LAMA2; (+) strand; PAM type: NRG; PAM sequence: GAG
tccaaatatgtgtttctcct

SEQ ID NO: 133037 - DNA, 20 bp, Artificial Sequence
  Description of Artificial Sequence: Synthetic oligonucleotide
  Target: LAMA2; (+) strand; PAM type: NRG; PAM sequence: AGG
ccaaatatgtgtttctcctg

SEQ ID NO: 133038 - DNA, 20 bp, Artificial Sequence
  Description of Artificial Sequence: Synthetic oligonucleotide
  Target: LAMA2; (+) strand; PAM type: NRG; PAM sequence: TAG
aggtaaaatttcaaaaattc

SEQ ID NO: 133039 - DNA, 20 bp, Artificial Sequence
  Description of Artificial Sequence: Synthetic oligonucleotide
  Target: LAMA2; (+) strand; PAM type: NRG; PAM sequence: TGG
aaaaattctagatgatgttt

SEQ ID NO: 133040 - DNA, 20 bp, Artificial Sequence
  Description of Artificial Sequence: Synthetic oligonucleotide
  Target: LAMA2; (+) strand; PAM type: NRG; PAM sequence: GAG
aaattctagatgatgttttg

SEQ ID NO: 133041 - DNA, 20 bp, Artificial Sequence
  Description of Artificial Sequence: Synthetic oligonucleotide
  Target: LAMA2; (+) strand; PAM type: NRG; PAM sequence: AGG
aattctagatgatgttttgg

SEQ ID NO: 133042 - DNA, 20 bp, Artificial Sequence
  Description of Artificial Sequence: Synthetic oligonucleotide
  Target: LAMA2; (+) strand; PAM type: NRG; PAM sequence: TAG
atgatgttttggaggttctg

SEQ ID NO: 133043 - DNA, 20 bp, Artificial Sequence
  Description of Artificial Sequence: Synthetic oligonucleotide
  Target: LAMA2; (+) strand; PAM type: NRG; PAM sequence: GAG
gatgttttggaggttctgta

SEQ ID NO: 133044 - DNA, 20 bp, Artificial Sequence
  Description of Artificial Sequence: Synthetic oligonucleotide
  Target: LAMA2; (+) strand; PAM type: NRG; PAM sequence: AAG
gttttggaggttctgtagag

SEQ ID NO: 133045 - DNA, 20 bp, Artificial Sequence
  Description of Artificial Sequence: Synthetic oligonucleotide
  Target: LAMA2; (+) strand; PAM type: NRG; PAM sequence: AGG
ttttggaggttctgtagaga

SEQ ID NO: 133046 - DNA, 20 bp, Artificial Sequence
  Description of Artificial Sequence: Synthetic oligonucleotide
  Target: LAMA2; (+) strand; PAM type: NRG; PAM sequence: TGG
ggttctgtagagaaggtgaa

SEQ ID NO: 133047 - DNA, 20 bp, Artificial Sequence
  Description of Artificial Sequence: Synthetic oligonucleotide
  Target: LAMA2; (+) strand; PAM type: NRG; PAM sequence: TAG
tgtagagaaggtgaatggta

SEQ ID NO: 133048 - DNA, 20 bp, Artificial Sequence
  Description of Artificial Sequence: Synthetic oligonucleotide
  Target: LAMA2; (+) strand; PAM type: NRG; PAM sequence: GAG
tagagaaggtgaatggtata

SEQ ID NO: 133049 - DNA, 20 bp, Artificial Sequence
  Description of Artificial Sequence: Synthetic oligonucleotide
  Target: LAMA2; (+) strand; PAM type: NRG; PAM sequence: AAG
aggtgaatggtatagagcta

SEQ ID NO: 133050 - DNA, 20 bp, Artificial Sequence
  Description of Artificial Sequence: Synthetic oligonucleotide
  Target: LAMA2; (+) strand; PAM type: NRG; PAM sequence: AAG
tcaaattttatttgtgaaaa

SEQ ID NO: 133051 - DNA, 20 bp, Artificial Sequence
  Description of Artificial Sequence: Synthetic oligonucleotide
  Target: LAMA2; (+) strand; PAM type: NRG; PAM sequence: CAG
aattttatttgtgaaaaaag

SEQ ID NO: 133052 - DNA, 20 bp, Artificial Sequence
  Description of Artificial Sequence: Synthetic oligonucleotide
  Target: LAMA2; (+) strand; PAM type: NRG; PAM sequence: GAG
atttattcttttttttcttt

SEQ ID NO: 133053 - DNA, 20 bp, Artificial Sequence
  Description of Artificial Sequence: Synthetic oligonucleotide
  Target: LAMA2; (+) strand; PAM type: NRG; PAM sequence: TGG
attcttttttttctttgaga

SEQ ID NO: 133054 - DNA, 20 bp, Artificial Sequence
  Description of Artificial Sequence: Synthetic oligonucleotide
  Target: LAMA2; (+) strand; PAM type: NRG; PAM sequence: GAG
tcttttttttctttgagatg

SEQ ID NO: 133055 - DNA, 20 bp, Artificial Sequence
  Description of Artificial Sequence: Synthetic oligonucleotide
  Target: LAMA2; (+) strand; PAM type: NRG; PAM sequence: TGG
agtctcgctctgtcaccccc

SEQ ID NO: 133056 - DNA, 20 bp, Artificial Sequence
  Description of Artificial Sequence: Synthetic oligonucleotide
  Target: LAMA2; (+) strand; PAM type: NRG; PAM sequence: TGG
tcgctctgtcaccccctggc

SEQ ID NO: 133057 - DNA, 20 bp, Artificial Sequence
  Description of Artificial Sequence: Synthetic oligonucleotide
  Target: LAMA2; (+) strand; PAM type: NRG; PAM sequence: GAG
gctctgtcaccccctggctg

SEQ ID NO: 133058 - DNA, 20 bp, Artificial Sequence
  Description of Artificial Sequence: Synthetic oligonucleotide
  Target: LAMA2; (+) strand; PAM type: NRG; PAM sequence: CAG
gtcaccccctggctggagtg

SEQ ID NO: 133059 - DNA, 20 bp, Artificial Sequence
  Description of Artificial Sequence: Synthetic oligonucleotide
  Target: LAMA2; (+) strand; PAM type: NRG; PAM sequence: TGG
accccctggctggagtgcag

SEQ ID NO: 133060 - DNA, 20 bp, Artificial Sequence
  Description of Artificial Sequence: Synthetic oligonucleotide
  Target: LAMA2; (+) strand; PAM type: NRG; PAM sequence: TGG
ggagtgcagtggcttgatct

SEQ ID NO: 133061 - DNA, 20 bp, Artificial Sequence
  Description of Artificial Sequence: Synthetic oligonucleotide
  Target: LAMA2; (+) strand; PAM type: NRG; PAM sequence: CAG
atcttggctcactgcaacct

SEQ ID NO: 133062 - DNA, 20 bp, Artificial Sequence
  Description of Artificial Sequence: Synthetic oligonucleotide
  Target: LAMA2; (+) strand; PAM type: NRG; PAM sequence: CAG
tcactgcaacctcagcctcc

SEQ ID NO: 133063 - DNA, 20 bp, Artificial Sequence
  Description of Artificial Sequence: Synthetic oligonucleotide
  Target: LAMA2; (+) strand; PAM type: NRG; PAM sequence: AGG
cactgcaacctcagcctccc

SEQ ID NO: 133064 - DNA, 20 bp, Artificial Sequence
  Description of Artificial Sequence: Synthetic oligonucleotide
  Target: LAMA2; (+) strand; PAM type: NRG; PAM sequence: AAG
aacctcagcctcccaggttc

SEQ ID NO: 133065 - DNA, 20 bp, Artificial Sequence
  Description of Artificial Sequence: Synthetic oligonucleotide
  Target: LAMA2; (+) strand; PAM type: NRG; PAM sequence: CAG
ttcaagtaattctcctgcct

SEQ ID NO: 133066 - DNA, 20 bp, Artificial Sequence
  Description of Artificial Sequence: Synthetic oligonucleotide
  Target: LAMA2; (+) strand; PAM type: NRG; PAM sequence: GAG
ttctcctgcctcagcctccc

SEQ ID NO: 133067 - DNA, 20 bp, Artificial Sequence
  Description of Artificial Sequence: Synthetic oligonucleotide
  Target: LAMA2; (+) strand; PAM type: NRG; PAM sequence: TAG
tcctgcctcagcctcccgag

SEQ ID NO: 133068 - DNA, 20 bp, Artificial Sequence
  Description of Artificial Sequence: Synthetic oligonucleotide
  Target: LAMA2; (+) strand; PAM type: NRG; PAM sequence: TGG
gcctcagcctcccgagtagc

SEQ ID NO: 133069 - DNA, 20 bp, Artificial Sequence
  Description of Artificial Sequence: Synthetic oligonucleotide
  Target: LAMA2; (+) strand; PAM type: NRG; PAM sequence: GGG
cctcagcctcccgagtagct

SEQ ID NO: 133070 - DNA, 20 bp, Artificial Sequence
  Description of Artificial Sequence: Synthetic oligonucleotide
  Target: LAMA2; (+) strand; PAM type: NRG; PAM sequence: TAG
gcctcccgagtagctgggac

SEQ ID NO: 133071 - DNA, 20 bp, Artificial Sequence
  Description of Artificial Sequence: Synthetic oligonucleotide
  Target: LAMA2; (+) strand; PAM type: NRG; PAM sequence: TGG
cttaatcccatttatccatg

SEQ ID NO: 133072 - DNA, 20 bp, Artificial Sequence
  Description of Artificial Sequence: Synthetic oligonucleotide
  Target: LAMA2; (+) strand; PAM type: NRG; PAM sequence: GAG
taatcccatttatccatgtg

SEQ ID NO: 133073 - DNA, 20 bp, Artificial Sequence
  Description of Artificial Sequence: Synthetic oligonucleotide
  Target: LAMA2; (+) strand; PAM type: NRG; PAM sequence: TAG
tctttttgctctgtcactaa

SEQ ID NO: 133074 - DNA, 20 bp, Artificial Sequence
  Description of Artificial Sequence: Synthetic oligonucleotide
  Target: LAMA2; (+) strand; PAM type: NRG; PAM sequence: GAG
tttttgctctgtcactaata

SEQ ID NO: 133075 - DNA, 20 bp, Artificial Sequence
  Description of Artificial Sequence: Synthetic oligonucleotide
  Target: LAMA2; (+) strand; PAM type: NRG; PAM sequence: CAG
tctgtcactaatagagcttt

SEQ ID NO: 133076 - DNA, 20 bp, Artificial Sequence
  Description of Artificial Sequence: Synthetic oligonucleotide
  Target: LAMA2; (+) strand; PAM type: NRG; PAM sequence: AAG
taatagagctttcagctact

SEQ ID NO: 133077 - DNA, 20 bp, Artificial Sequence
  Description of Artificial Sequence: Synthetic oligonucleotide
  Target: LAMA2; (+) strand; PAM type: NRG; PAM sequence: CAG
ctttcagctactaagacaca

SEQ ID NO: 133078 - DNA, 20 bp, Artificial Sequence
  Description of Artificial Sequence: Synthetic oligonucleotide
  Target: LAMA2; (+) strand; PAM type: NRG; PAM sequence: AGG
tttcagctactaagacacac

SEQ ID NO: 133079 - DNA, 20 bp, Artificial Sequence
  Description of Artificial Sequence: Synthetic oligonucleotide
  Target: LAMA2; (+) strand; PAM type: NRG; PAM sequence: GAG
tcagctactaagacacacag

SEQ ID NO: 133080 - DNA, 20 bp, Artificial Sequence
  Description of Artificial Sequence: Synthetic oligonucleotide
  Target: LAMA2; (+) strand; PAM type: NRG; PAM sequence: TAG
agacacacaggagtcctttc

SEQ ID NO: 133081 - DNA, 20 bp, Artificial Sequence
  Description of Artificial Sequence: Synthetic oligonucleotide
  Target: LAMA2; (+) strand; PAM type: NRG; PAM sequence: GAG
acacacaggagtcctttcta

SEQ ID NO: 133082 - DNA, 20 bp, Artificial Sequence
  Description of Artificial Sequence: Synthetic oligonucleotide
  Target: LAMA2; (+) strand; PAM type: NRG; PAM sequence: GAG
acacaggagtcctttctaga

SEQ ID NO: 133083 - DNA, 20 bp, Artificial Sequence
  Description of Artificial Sequence: Synthetic oligonucleotide
  Target: LAMA2; (+) strand; PAM type: NRG; PAM sequence: TGG
attaaccacatacatcattt

SEQ ID NO: 133084 - DNA, 20 bp, Artificial Sequence
  Description of Artificial Sequence: Synthetic oligonucleotide
  Target: LAMA2; (+) strand; PAM type: NRG; PAM sequence: TGG
aaccacatacatcattttgg

SEQ ID NO: 133085 - DNA, 20 bp, Artificial Sequence
  Description of Artificial Sequence: Synthetic oligonucleotide
  Target: LAMA2; (+) strand; PAM type: NRG; PAM sequence: CAG
cattttggtggcaaacctca

SEQ ID NO: 133086 - DNA, 20 bp, Artificial Sequence
  Description of Artificial Sequence: Synthetic oligonucleotide
  Target: LAMA2; (+) strand; PAM type: NRG; PAM sequence: CAG
gtggcaaacctcacagccac

SEQ ID NO: 133087 - DNA, 20 bp, Artificial Sequence
  Description of Artificial Sequence: Synthetic oligonucleotide
  Target: LAMA2; (+) strand; PAM type: NRG; PAM sequence: TAG
tcacagccaccagtcattta

SEQ ID NO: 133088 - DNA, 20 bp, Artificial Sequence
  Description of Artificial Sequence: Synthetic oligonucleotide
  Target: LAMA2; (+) strand; PAM type: NRG; PAM sequence: AAG
caccagtcatttatagtacc

SEQ ID NO: 133089 - DNA, 20 bp, Artificial Sequence
  Description of Artificial Sequence: Synthetic oligonucleotide
  Target: LAMA2; (+) strand; PAM type: NRG; PAM sequence: TGG
agtaccaagtccctgctctt

SEQ ID NO: 133090 - DNA, 20 bp, Artificial Sequence
  Description of Artificial Sequence: Synthetic oligonucleotide
  Target: LAMA2; (+) strand; PAM type: NRG; PAM sequence: GGG
gtaccaagtccctgctcttt

SEQ ID NO: 133091 - DNA, 20 bp, Artificial Sequence
  Description of Artificial Sequence: Synthetic oligonucleotide
  Target: LAMA2; (+) strand; PAM type: NRG; PAM sequence: CAG
agtccctgctctttgggtaa

SEQ ID NO: 133092 - DNA, 20 bp, Artificial Sequence
  Description of Artificial Sequence: Synthetic oligonucleotide
  Target: LAMA2; (+) strand; PAM type: NRG; PAM sequence: TGG
ccctgctctttgggtaacag

SEQ ID NO: 133093 - DNA, 20 bp, Artificial Sequence
  Description of Artificial Sequence: Synthetic oligonucleotide
  Target: LAMA2; (+) strand; PAM type: NRG; PAM sequence: AAG
ctctttgggtaacagtggat

SEQ ID NO: 133094 - DNA, 20 bp, Artificial Sequence
  Description of Artificial Sequence: Synthetic oligonucleotide
  Target: LAMA2; (+) strand; PAM type: NRG; PAM sequence: AAG
gtggataagaaatgctacac

SEQ ID NO: 133095 - DNA, 20 bp, Artificial Sequence
  Description of Artificial Sequence: Synthetic oligonucleotide
  Target: LAMA2; (+) strand; PAM type: NRG; PAM sequence: TGG
tgctacacaagctccttatg

SEQ ID NO: 133096 - DNA, 20 bp, Artificial Sequence
  Description of Artificial Sequence: Synthetic oligonucleotide
  Target: LAMA2; (+) strand; PAM type: NRG; PAM sequence: GAG
ctacacaagctccttatgtg

SEQ ID NO: 133097 - DNA, 20 bp, Artificial Sequence
  Description of Artificial Sequence: Synthetic oligonucleotide
  Target: LAMA2; (+) strand; PAM type: NRG; PAM sequence: AAG
caagctccttatgtggagaa

SEQ ID NO: 133098 - DNA, 20 bp, Artificial Sequence
  Description of Artificial Sequence: Synthetic oligonucleotide
  Target: LAMA2; (+) strand; PAM type: NRG; PAM sequence: TGG
gaaaagactgttctcctatt

SEQ ID NO: 133099 - DNA, 20 bp, Artificial Sequence
  Description of Artificial Sequence: Synthetic oligonucleotide
  Target: LAMA2; (+) strand; PAM type: NRG; PAM sequence: AAG
aagactgttctcctatttgg

SEQ ID NO: 133100 - DNA, 20 bp, Artificial Sequence
  Description of Artificial Sequence: Synthetic oligonucleotide
  Target: LAMA2; (+) strand; PAM type: NRG; PAM sequence: AAG
cttgtcctttatgttttttc

SEQ ID NO: 133101 - DNA, 20 bp, Artificial Sequence
  Description of Artificial Sequence: Synthetic oligonucleotide
  Target: LAMA2; (+) strand; PAM type: NRG; PAM sequence: TAG
ttttcaagcatttgtatcat

SEQ ID NO: 133102 - DNA, 20 bp, Artificial Sequence
  Description of Artificial Sequence: Synthetic oligonucleotide
  Target: LAMA2; (+) strand; PAM type: NRG; PAM sequence: AGG
tttcaagcatttgtatcatt

SEQ ID NO: 133103 - DNA, 20 bp, Artificial Sequence
  Description of Artificial Sequence: Synthetic oligonucleotide
  Target: LAMA2; (+) strand; PAM type: NRG; PAM sequence: AAG
aagcatttgtatcattaggc

SEQ ID NO: 133104 - DNA, 20 bp, Artificial Sequence
  Description of Artificial Sequence: Synthetic oligonucleotide
  Target: LAMA2; (+) strand; PAM type: NRG; PAM sequence: AGG
agcatttgtatcattaggca

SEQ ID NO: 133105 - DNA, 20 bp, Artificial Sequence
  Description of Artificial Sequence: Synthetic oligonucleotide
  Target: LAMA2; (+) strand; PAM type: NRG; PAM sequence: TGG
ttaggcaaggctctgcctaa

SEQ ID NO: 133106 - DNA, 20 bp, Artificial Sequence
  Description of Artificial Sequence: Synthetic oligonucleotide
  Target: LAMA2; (+) strand; PAM type: NRG; PAM sequence: AAG
ggcaaggctctgcctaatgg

SEQ ID NO: 133107 - DNA, 20 bp, Artificial Sequence
  Description of Artificial Sequence: Synthetic oligonucleotide
  Target: LAMA2; (+) strand; PAM type: NRG; PAM sequence: GAG
caaggctctgcctaatggaa

SEQ ID NO: 133108 - DNA, 20 bp, Artificial Sequence
  Description of Artificial Sequence: Synthetic oligonucleotide
  Target: LAMA2; (+) strand; PAM type: NRG; PAM sequence: CAG
atttactcttactctgtgcc

SEQ ID NO: 133109 - DNA, 20 bp, Artificial Sequence
  Description of Artificial Sequence: Synthetic oligonucleotide
  Target: LAMA2; (+) strand; PAM type: NRG; PAM sequence: AGG
tttactcttactctgtgccc

SEQ ID NO: 133110 - DNA, 20 bp, Artificial Sequence
  Description of Artificial Sequence: Synthetic oligonucleotide
  Target: LAMA2; (+) strand; PAM type: NRG; PAM sequence: TGG
actcttactctgtgcccagg

SEQ ID NO: 133111 - DNA, 20 bp, Artificial Sequence
  Description of Artificial Sequence: Synthetic oligonucleotide
  Target: LAMA2; (+) strand; PAM type: NRG; PAM sequence: TGG
ccaggtggctcgtccatctc

SEQ ID NO: 133112 - DNA, 20 bp, Artificial Sequence
  Description of Artificial Sequence: Synthetic oligonucleotide
  Target: LAMA2; (+) strand; PAM type: NRG; PAM sequence: GGG
caggtggctcgtccatctct

SEQ ID NO: 133113 - DNA, 20 bp, Artificial Sequence
  Description of Artificial Sequence: Synthetic oligonucleotide
  Target: LAMA2; (+) strand; PAM type: NRG; PAM sequence: AAG
gtccatctctgggtattttc

SEQ ID NO: 133114 - DNA, 20 bp, Artificial Sequence
  Description of Artificial Sequence: Synthetic oligonucleotide
  Target: LAMA2; (+) strand; PAM type: NRG; PAM sequence: TGG
ctctgggtattttcaagcat

SEQ ID NO: 133115 - DNA, 20 bp, Artificial Sequence
  Description of Artificial Sequence: Synthetic oligonucleotide
  Target: LAMA2; (+) strand; PAM type: NRG; PAM sequence: GAG
ctgggtattttcaagcattg

SEQ ID NO: 133116 - DNA, 20 bp, Artificial Sequence
  Description of Artificial Sequence: Synthetic oligonucleotide
  Target: LAMA2; (+) strand; PAM type: NRG; PAM sequence: AGG
tgggtattttcaagcattgg

SEQ ID NO: 133117 - DNA, 20 bp, Artificial Sequence
  Description of Artificial Sequence: Synthetic oligonucleotide
  Target: LAMA2; (+) strand; PAM type: NRG; PAM sequence: TGG
gtattttcaagcattggagg

SEQ ID NO: 133118 - DNA, 20 bp, Artificial Sequence
  Description of Artificial Sequence: Synthetic oligonucleotide
  Target: LAMA2; (+) strand; PAM type: NRG; PAM sequence: TAG
tcaagcattggaggtggcaa

SEQ ID NO: 133119 - DNA, 20 bp, Artificial Sequence
  Description of Artificial Sequence: Synthetic oligonucleotide
  Target: LAMA2; (+) strand; PAM type: NRG; PAM sequence: TAG
ggaggtggcaatagtgtgct

SEQ ID NO: 133120 - DNA, 20 bp, Artificial Sequence
  Description of Artificial Sequence: Synthetic oligonucleotide
  Target: LAMA2; (+) strand; PAM type: NRG; PAM sequence: AAG
gcaatagtgtgcttagcctc

SEQ ID NO: 133121 - DNA, 20 bp, Artificial Sequence
  Description of Artificial Sequence: Synthetic oligonucleotide
  Target: LAMA2; (+) strand; PAM type: NRG; PAM sequence: GAG
gtgtgcttagcctcaagact

SEQ ID NO: 133122 - DNA, 20 bp, Artificial Sequence
  Description of Artificial Sequence: Synthetic oligonucleotide
  Target: LAMA2; (+) strand; PAM type: NRG; PAM sequence: AAG
cttagcctcaagactgagca

SEQ ID NO: 133123 - DNA, 20 bp, Artificial Sequence
  Description of Artificial Sequence: Synthetic oligonucleotide
  Target: LAMA2; (+) strand; PAM type: NRG; PAM sequence: CAG
gagcaaagaaatgaactttc

SEQ ID NO: 133124 - DNA, 20 bp, Artificial Sequence
  Description of Artificial Sequence: Synthetic oligonucleotide
  Target: LAMA2; (+) strand; PAM type: NRG; PAM sequence: GAG
gcaaagaaatgaactttcca

SEQ ID NO: 133125 - DNA, 20 bp, Artificial Sequence
  Description of Artificial Sequence: Synthetic oligonucleotide
  Target: LAMA2; (+) strand; PAM type: NRG; PAM sequence: GAG
ctcttaaaatatcccattct

SEQ ID NO: 133126 - DNA, 20 bp, Artificial Sequence
  Description of Artificial Sequence: Synthetic oligonucleotide
  Target: LAMA2; (+) strand; PAM type: NRG; PAM sequence: GAG
cttaaaatatcccattctga

SEQ ID NO: 133127 - DNA, 20 bp, Artificial Sequence
  Description of Artificial Sequence: Synthetic oligonucleotide
  Target: LAMA2; (+) strand; PAM type: NRG; PAM sequence: TAG
ctgagagcacatgtttctct

SEQ ID NO: 133128 - DNA, 20 bp, Artificial Sequence
  Description of Artificial Sequence: Synthetic oligonucleotide
  Target: LAMA2; (+) strand; PAM type: NRG; PAM sequence: CGG
tctcttagtactgtttactc

SEQ ID NO: 133129 - DNA, 20 bp, Artificial Sequence
  Description of Artificial Sequence: Synthetic oligonucleotide
  Target: LAMA2; (+) strand; PAM type: NRG; PAM sequence: CAG
tactgtttactccggacttt

SEQ ID NO: 133130 - DNA, 20 bp, Artificial Sequence
  Description of Artificial Sequence: Synthetic oligonucleotide
  Target: LAMA2; (+) strand; PAM type: NRG; PAM sequence: AGG
actgtttactccggactttc

SEQ ID NO: 133131 - DNA, 20 bp, Artificial Sequence
  Description of Artificial Sequence: Synthetic oligonucleotide
  Target: LAMA2; (+) strand; PAM type: NRG; PAM sequence: GGG
ctgtttactccggactttca

SEQ ID NO: 133132 - DNA, 20 bp, Artificial Sequence
  Description of Artificial Sequence: Synthetic oligonucleotide
  Target: LAMA2; (+) strand; PAM type: NRG; PAM sequence: CAG
ttactccggactttcagggt

SEQ ID NO: 133133 - DNA, 20 bp, Artificial Sequence
  Description of Artificial Sequence: Synthetic oligonucleotide
  Target: LAMA2; (+) strand; PAM type: NRG; PAM sequence: TAG
ctccggactttcagggtcag

SEQ ID NO: 133134 - DNA, 20 bp, Artificial Sequence
  Description of Artificial Sequence: Synthetic oligonucleotide
  Target: LAMA2; (+) strand; PAM type: NRG; PAM sequence: AGG
tccggactttcagggtcagt

SEQ ID NO: 133135 - DNA, 20 bp, Artificial Sequence
  Description of Artificial Sequence: Synthetic oligonucleotide
  Target: LAMA2; (+) strand; PAM type: NRG; PAM sequence: AAG
gactttcagggtcagtaggc

SEQ ID NO: 133136 - DNA, 20 bp, Artificial Sequence
  Description of Artificial Sequence: Synthetic oligonucleotide
  Target: LAMA2; (+) strand; PAM type: NRG; PAM sequence: TGG
ggcaagcttttcaacaaatt

SEQ ID NO: 133137 - DNA, 20 bp, Artificial Sequence
  Description of Artificial Sequence: Synthetic oligonucleotide
  Target: LAMA2; (+) strand; PAM type: NRG; PAM sequence: TGG
tttcttttaaaaactatttt

SEQ ID NO: 133138 - DNA, 20 bp, Artificial Sequence
  Description of Artificial Sequence: Synthetic oligonucleotide
  Target: LAMA2; (+) strand; PAM type: NRG; PAM sequence: TAG
cttttaaaaactatttttgg

SEQ ID NO: 133139 - DNA, 20 bp, Artificial Sequence
  Description of Artificial Sequence: Synthetic oligonucleotide
  Target: LAMA2; (+) strand; PAM type: NRG; PAM sequence: TGG
gtagttttgttaaatgtgtc

SEQ ID NO: 133140 - DNA, 20 bp, Artificial Sequence
  Description of Artificial Sequence: Synthetic oligonucleotide
  Target: LAMA2; (+) strand; PAM type: NRG; PAM sequence: AAG
tgtgtctggtaattcatttt

SEQ ID NO: 133141 - DNA, 20 bp, Artificial Sequence
  Description of Artificial Sequence: Synthetic oligonucleotide
  Target: LAMA2; (+) strand; PAM type: NRG; PAM sequence: TGG
gtctggtaattcattttaag

SEQ ID NO: 133142 - DNA, 20 bp, Artificial Sequence
  Description of Artificial Sequence: Synthetic oligonucleotide
  Target: LAMA2; (+) strand; PAM type: NRG; PAM sequence: AAG
gtaattcattttaagtggaa

SEQ ID NO: 133143 - DNA, 20 bp, Artificial Sequence
  Description of Artificial Sequence: Synthetic oligonucleotide
  Target: LAMA2; (+) strand; PAM type: NRG; PAM sequence: AGG
taattcattttaagtggaaa

SEQ ID NO: 133144 - DNA, 20 bp, Artificial Sequence
  Description of Artificial Sequence: Synthetic oligonucleotide
  Target: LAMA2; (+) strand; PAM type: NRG; PAM sequence: GGG
aattcattttaagtggaaaa

SEQ ID NO: 133145 - DNA, 20 bp, Artificial Sequence
  Description of Artificial Sequence: Synthetic oligonucleotide
  Target: LAMA2; (+) strand; PAM type: NRG; PAM sequence: TGG
cattttaagtggaaaaggga

SEQ ID NO: 133146 - DNA, 20 bp, Artificial Sequence
  Description of Artificial Sequence: Synthetic oligonucleotide
  Target: LAMA2; (+) strand; PAM type: NRG; PAM sequence: GAG
ttttaagtggaaaagggatg

SEQ ID NO: 133147 - DNA, 20 bp, Artificial Sequence
  Description of Artificial Sequence: Synthetic oligonucleotide
  Target: LAMA2; (+) strand; PAM type: NRG; PAM sequence: AAG
gtggaaaagggatggagata

SEQ ID NO: 133148 - DNA, 20 bp, Artificial Sequence
  Description of Artificial Sequence: Synthetic oligonucleotide
  Target: LAMA2; (+) strand; PAM type: NRG; PAM sequence: AGG
tggaaaagggatggagataa

SEQ ID NO: 133149 - DNA, 20 bp, Artificial Sequence
  Description of Artificial Sequence: Synthetic oligonucleotide
  Target: LAMA2; (+) strand; PAM type: NRG; PAM sequence: GGG
ggaaaagggatggagataaa

SEQ ID NO: 133150 - DNA, 20 bp, Artificial Sequence
  Description of Artificial Sequence: Synthetic oligonucleotide
  Target: LAMA2; (+) strand; PAM type: NRG; PAM sequence: TAG
aaagggatggagataaaggg

SEQ ID NO: 133151 - DNA, 20 bp, Artificial Sequence
  Description of Artificial Sequence: Synthetic oligonucleotide
  Target: LAMA2; (+) strand; PAM type: NRG; PAM sequence: AGG
aagggatggagataaagggt

SEQ ID NO: 133152 - DNA, 20 bp, Artificial Sequence
  Description of Artificial Sequence: Synthetic oligonucleotide
  Target: LAMA2; (+) strand; PAM type: NRG; PAM sequence: TAG
ggatggagataaagggtagg

SEQ ID NO: 133153 - DNA, 20 bp, Artificial Sequence
  Description of Artificial Sequence: Synthetic oligonucleotide
  Target: LAMA2; (+) strand; PAM type: NRG; PAM sequence: AAG
ggtagaattgtaaatgtcct

SEQ ID NO: 133154 - DNA, 20 bp, Artificial Sequence
  Description of Artificial Sequence: Synthetic oligonucleotide
  Target: LAMA2; (+) strand; PAM type: NRG; PAM sequence: AAG
tatcatcctatgtttttgat

SEQ ID NO: 133155 - DNA, 20 bp, Artificial Sequence
  Description of Artificial Sequence: Synthetic oligonucleotide
  Target: LAMA2; (+) strand; PAM type: NRG; PAM sequence: TGG
tgtttttgataagttttatc

SEQ ID NO: 133156 - DNA, 20 bp, Artificial Sequence
  Description of Artificial Sequence: Synthetic oligonucleotide
  Target: LAMA2; (+) strand; PAM type: NRG; PAM sequence: CAG
tgataagttttatctggtaa

SEQ ID NO: 133157 - DNA, 20 bp, Artificial Sequence
  Description of Artificial Sequence: Synthetic oligonucleotide
  Target: LAMA2; (+) strand; PAM type: NRG; PAM sequence: TAG
ctggtaacagacaaacattg

SEQ ID NO: 133158 - DNA, 20 bp, Artificial Sequence
  Description of Artificial Sequence: Synthetic oligonucleotide
  Target: LAMA2; (+) strand; PAM type: NRG; PAM sequence: AAG
gtaacagacaaacattgtag

SEQ ID NO: 133159 - DNA, 20 bp, Artificial Sequence
  Description of Artificial Sequence: Synthetic oligonucleotide
  Target: LAMA2; (+) strand; PAM type: NRG; PAM sequence: AAG
cagacaaacattgtagaagc

SEQ ID NO: 133160 - DNA, 20 bp, Artificial Sequence
  Description of Artificial Sequence: Synthetic oligonucleotide
  Target: LAMA2; (+) strand; PAM type: NRG; PAM sequence: AAG
acaaacattgtagaagcaag

SEQ ID NO: 133161 - DNA, 20 bp, Artificial Sequence
  Description of Artificial Sequence: Synthetic oligonucleotide
  Target: LAMA2; (+) strand; PAM type: NRG; PAM sequence: AGG
caaacattgtagaagcaaga

SEQ ID NO: 133162 - DNA, 20 bp, Artificial Sequence
  Description of Artificial Sequence: Synthetic oligonucleotide
  Target: LAMA2; (+) strand; PAM type: NRG; PAM sequence: GGG
aaacattgtagaagcaagaa

SEQ ID NO: 133163 - DNA, 20 bp, Artificial Sequence
  Description of Artificial Sequence: Synthetic oligonucleotide
  Target: LAMA2; (+) strand; PAM type: NRG; PAM sequence: GGG
aacattgtagaagcaagaag

SEQ ID NO: 133164 - DNA, 20 bp, Artificial Sequence
  Description of Artificial Sequence: Synthetic oligonucleotide
  Target: LAMA2; (+) strand; PAM type: NRG; PAM sequence: AAG
gggtttaatgttgttaaata

SEQ ID NO: 133165 - DNA, 20 bp, Artificial Sequence
  Description of Artificial Sequence: Synthetic oligonucleotide
  Target: LAMA2; (+) strand; PAM type: NRG; PAM sequence: AAG
aaataaagaaaatgtattaa

SEQ ID NO: 133166 - DNA, 20 bp, Artificial Sequence
  Description of Artificial Sequence: Synthetic oligonucleotide
  Target: LAMA2; (+) strand; PAM type: NRG; PAM sequence: GAG
ataaagaaaatgtattaaaa

SEQ ID NO: 133167 - DNA, 20 bp, Artificial Sequence
  Description of Artificial Sequence: Synthetic oligonucleotide
  Target: LAMA2; (+) strand; PAM type: NRG; PAM sequence: GAG
atgtattaaaagagaaaaac

SEQ ID NO: 133168 - DNA, 20 bp, Artificial Sequence
  Description of Artificial Sequence: Synthetic oligonucleotide
  Target: LAMA2; (+) strand; PAM type: NRG; PAM sequence: AGG
tgtattaaaagagaaaaacg

SEQ ID NO: 133169 - DNA, 20 bp, Artificial Sequence
  Description of Artificial Sequence: Synthetic oligonucleotide
  Target: LAMA2; (+) strand; PAM type: NRG; PAM sequence: TGG
aaaagagaaaaacgaggcac

SEQ ID NO: 133170 - DNA, 20 bp, Artificial Sequence
  Description of Artificial Sequence: Synthetic oligonucleotide
  Target: LAMA2; (+) strand; PAM type: NRG; PAM sequence: GGG
aaagagaaaaacgaggcact

SEQ ID NO: 133171 - DNA, 20 bp, Artificial Sequence
  Description of Artificial Sequence: Synthetic oligonucleotide
  Target: LAMA2; (+) strand; PAM type: NRG; PAM sequence: CAG
acccttgtgttccttctact

SEQ ID NO: 133172 - DNA, 20 bp, Artificial Sequence
  Description of Artificial Sequence: Synthetic oligonucleotide
  Target: LAMA2; (+) strand; PAM type: NRG; PAM sequence: AGG
cccttgtgttccttctactc

SEQ ID NO: 133173 - DNA, 20 bp, Artificial Sequence
  Description of Artificial Sequence: Synthetic oligonucleotide
  Target: LAMA2; (+) strand; PAM type: NRG; PAM sequence: CAG
aggactccattgtaaatgct

SEQ ID NO: 133174 - DNA, 20 bp, Artificial Sequence
  Description of Artificial Sequence: Synthetic oligonucleotide
  Target: LAMA2; (+) strand; PAM type: NRG; PAM sequence: AGG
ggactccattgtaaatgctc

SEQ ID NO: 133175 - DNA, 20 bp, Artificial Sequence
  Description of Artificial Sequence: Synthetic oligonucleotide
  Target: LAMA2; (+) strand; PAM type: NRG; PAM sequence: CAG
aatttttttgtcatttgatg

SEQ ID NO: 133176 - DNA, 20 bp, Artificial Sequence
  Description of Artificial Sequence: Synthetic oligonucleotide
  Target: LAMA2; (+) strand; PAM type: NRG; PAM sequence: AAG
ctgtaccttgtctttctgca

SEQ ID NO: 133177 - DNA, 20 bp, Artificial Sequence
  Description of Artificial Sequence: Synthetic oligonucleotide
  Target: LAMA2; (+) strand; PAM type: NRG; PAM sequence: AAG
ccttgtctttctgcaaagca

SEQ ID NO: 133178 - DNA, 20 bp, Artificial Sequence
  Description of Artificial Sequence: Synthetic oligonucleotide
  Target: LAMA2; (+) strand; PAM type: NRG; PAM sequence: TAG
gcaaagcaaagataatattg

SEQ ID NO: 133179 - DNA, 20 bp, Artificial Sequence
  Description of Artificial Sequence: Synthetic oligonucleotide
  Target: LAMA2; (+) strand; PAM type: NRG; PAM sequence: TGG
taatattgtagtttaaaact

SEQ ID NO: 133180 - DNA, 20 bp, Artificial Sequence
  Description of Artificial Sequence: Synthetic oligonucleotide
  Target: LAMA2; (+) strand; PAM type: NRG; PAM sequence: GAG
acttggctatccaccaccat

SEQ ID NO: 133181 - DNA, 20 bp, Artificial Sequence
  Description of Artificial Sequence: Synthetic oligonucleotide
  Target: LAMA2; (+) strand; PAM type: NRG; PAM sequence: AGG
cttggctatccaccaccatg

SEQ ID NO: 133182 - DNA, 20 bp, Artificial Sequence
  Description of Artificial Sequence: Synthetic oligonucleotide
  Target: LAMA2; (+) strand; PAM type: NRG; PAM sequence: GGG
ttggctatccaccaccatga

SEQ ID NO: 133183 - DNA, 20 bp, Artificial Sequence
  Description of Artificial Sequence: Synthetic oligonucleotide
  Target: LAMA2; (+) strand; PAM type: NRG; PAM sequence: CAG
atgcttctcttatttttctg

SEQ ID NO: 133184 - DNA, 20 bp, Artificial Sequence
  Description of Artificial Sequence: Synthetic oligonucleotide
  Target: LAMA2; (+) strand; PAM type: NRG; PAM sequence: CAG
agaaacatttaaaatttctt

SEQ ID NO: 133185 - DNA, 20 bp, Artificial Sequence
  Description of Artificial Sequence: Synthetic oligonucleotide
  Target: LAMA2; (+) strand; PAM type: NRG; PAM sequence: TAG
acttacctgaattttaaaaa

SEQ ID NO: 133186 - DNA, 20 bp, Artificial Sequence
  Description of Artificial Sequence: Synthetic oligonucleotide
  Target: LAMA2; (+) strand; PAM type: NRG; PAM sequence: TAG
tgaattttaaaaatagaata

SEQ ID NO: 133187 - DNA, 20 bp, Artificial Sequence
  Description of Artificial Sequence: Synthetic oligonucleotide
  Target: LAMA2; (+) strand; PAM type: NRG; PAM sequence: TAG
gactcactcactgttattaa

SEQ ID NO: 133188 - DNA, 20 bp, Artificial Sequence
  Description of Artificial Sequence: Synthetic oligonucleotide
  Target: LAMA2; (+) strand; PAM type: NRG; PAM sequence: AAG
tttgaatattatgctttgtt

SEQ ID NO: 133189 - DNA, 20 bp, Artificial Sequence
  Description of Artificial Sequence: Synthetic oligonucleotide
  Target: LAMA2; (+) strand; PAM type: NRG; PAM sequence: TAG
ttatgctttgttaagttatt

SEQ ID NO: 133190 - DNA, 20 bp, Artificial Sequence
  Description of Artificial Sequence: Synthetic oligonucleotide
  Target: LAMA2; (+) strand; PAM type: NRG; PAM sequence: AAG
aatgtaaaatcaaaattatt

SEQ ID NO: 133191 - DNA, 20 bp, Artificial Sequence
  Description of Artificial Sequence: Synthetic oligonucleotide
  Target: LAMA2; (+) strand; PAM type: NRG; PAM sequence: AAG
gttataattatttatgatat

SEQ ID NO: 133192 - DNA, 20 bp, Artificial Sequence
  Description of Artificial Sequence: Synthetic oligonucleotide
  Target: LAMA2; (+) strand; PAM type: NRG; PAM sequence: AAG
ataattatttatgatataag

SEQ ID NO: 133193 - DNA, 20 bp, Artificial Sequence
  Description of Artificial Sequence: Synthetic oligonucleotide
  Target: LAMA2; (+) strand; PAM type: NRG; PAM sequence: TGG
atgatataagaagtattctg

SEQ ID NO: 133194 - DNA, 20 bp, Artificial Sequence
  Description of Artificial Sequence: Synthetic oligonucleotide
  Target: LAMA2; (+) strand; PAM type: NRG; PAM sequence: AAG
taagaagtattctgtggata

SEQ ID NO: 133195 - DNA, 20 bp, Artificial Sequence
  Description of Artificial Sequence: Synthetic oligonucleotide
  Target: LAMA2; (+) strand; PAM type: NRG; PAM sequence: TGG
gataaagtatacatttattt

SEQ ID NO: 133196 - DNA, 20 bp, Artificial Sequence
  Description of Artificial Sequence: Synthetic oligonucleotide
  Target: LAMA2; (+) strand; PAM type: NRG; PAM sequence: TAG
atacatttattttggatatt

SEQ ID NO: 133197 - DNA, 20 bp, Artificial Sequence
  Description of Artificial Sequence: Synthetic oligonucleotide
  Target: LAMA2; (+) strand; PAM type: NRG; PAM sequence: TGG
gaataatttttgtttgtttt

SEQ ID NO: 133198 - DNA, 20 bp, Artificial Sequence
  Description of Artificial Sequence: Synthetic oligonucleotide
  Target: LAMA2; (+) strand; PAM type: NRG; PAM sequence: CAG
tcctttttcttgactattta

SEQ ID NO: 133199 - DNA, 20 bp, Artificial Sequence
  Description of Artificial Sequence: Synthetic oligonucleotide
  Target: LAMA2; (+) strand; PAM type: NRG; PAM sequence: AGG
cctttttcttgactatttac

SEQ ID NO: 133200 - DNA, 20 bp, Artificial Sequence
  Description of Artificial Sequence: Synthetic oligonucleotide
  Target: LAMA2; (+) strand; PAM type: NRG; PAM sequence: TAG
tcttgactatttacaggaaa

SEQ ID NO: 133201 - DNA, 20 bp, Artificial Sequence
  Description of Artificial Sequence: Synthetic oligonucleotide
  Target: LAMA2; (+) strand; PAM type: NRG; PAM sequence: TAG
gactatttacaggaaatagc

SEQ ID NO: 133202 - DNA, 20 bp, Artificial Sequence
  Description of Artificial Sequence: Synthetic oligonucleotide
  Target: LAMA2; (+) strand; PAM type: NRG; PAM sequence: TAG
ttacaggaaatagctagtta

SEQ ID NO: 133203 - DNA, 20 bp, Artificial Sequence
  Description of Artificial Sequence: Synthetic oligonucleotide
  Target: LAMA2; (+) strand; PAM type: NRG; PAM sequence: AGG
tacaggaaatagctagttat

SEQ ID NO: 133204 - DNA, 20 bp, Artificial Sequence
  Description of Artificial Sequence: Synthetic oligonucleotide
  Target: LAMA2; (+) strand; PAM type: NRG; PAM sequence: AAG
gctagttataggttttacct

SEQ ID NO: 133205 - DNA, 20 bp, Artificial Sequence
  Description of Artificial Sequence: Synthetic oligonucleotide
  Target: LAMA2; (+) strand; PAM type: NRG; PAM sequence: AAG
gttttacctaagtctcattc

SEQ ID NO: 133206 - DNA, 20 bp, Artificial Sequence
  Description of Artificial Sequence: Synthetic oligonucleotide
  Target: LAMA2; (+) strand; PAM type: NRG; PAM sequence: TGG
ctaagtctcattcaagctaa

SEQ ID NO: 133207 - DNA, 20 bp, Artificial Sequence
  Description of Artificial Sequence: Synthetic oligonucleotide
  Target: LAMA2; (+) strand; PAM type: NRG; PAM sequence: AAG
gctaatggattatgcaaata

SEQ ID NO: 133208 - DNA, 20 bp, Artificial Sequence
  Description of Artificial Sequence: Synthetic oligonucleotide
  Target: LAMA2; (+) strand; PAM type: NRG; PAM sequence: AAG
caaataaagtttgctcactg

SEQ ID NO: 133209 - DNA, 20 bp, Artificial Sequence
  Description of Artificial Sequence: Synthetic oligonucleotide
  Target: LAMA2; (+) strand; PAM type: NRG; PAM sequence: AGG
aaataaagtttgctcactga

SEQ ID NO: 133210 - DNA, 20 bp, Artificial Sequence
  Description of Artificial Sequence: Synthetic oligonucleotide
  Target: LAMA2; (+) strand; PAM type: NRG; PAM sequence: AAG
aagtttgctcactgaaggac

SEQ ID NO: 133211 - DNA, 20 bp, Artificial Sequence
  Description of Artificial Sequence: Synthetic oligonucleotide
  Target: LAMA2; (+) strand; PAM type: NRG; PAM sequence: TGG
aatattctgtatcttttttc

SEQ ID NO: 133212 - DNA, 20 bp, Artificial Sequence
  Description of Artificial Sequence: Synthetic oligonucleotide
  Target: LAMA2; (+) strand; PAM type: NRG; PAM sequence: AAG
tatcttttttctggttcttc

SEQ ID NO: 133213 - DNA, 20 bp, Artificial Sequence
  Description of Artificial Sequence: Synthetic oligonucleotide
  Target: LAMA2; (+) strand; PAM type: NRG; PAM sequence: AGG
atcttttttctggttcttca

SEQ ID NO: 133214 - DNA, 20 bp, Artificial Sequence
  Description of Artificial Sequence: Synthetic oligonucleotide
  Target: LAMA2; (+) strand; PAM type: NRG; PAM sequence: TAG
tttctggttcttcaaggtga

SEQ ID NO: 133215 - DNA, 20 bp, Artificial Sequence
  Description of Artificial Sequence: Synthetic oligonucleotide
  Target: LAMA2; (+) strand; PAM type: NRG; PAM sequence: AAG
cttcaaggtgatagttcata

SEQ ID NO: 133216 - DNA, 20 bp, Artificial Sequence
  Description of Artificial Sequence: Synthetic oligonucleotide
  Target: LAMA2; (+) strand; PAM type: NRG; PAM sequence: AAG
aagaatatgttccattgaca

SEQ ID NO: 133217 - DNA, 20 bp, Artificial Sequence
  Description of Artificial Sequence: Synthetic oligonucleotide
  Target: LAMA2; (+) strand; PAM type: NRG; PAM sequence: TAG
atatgttccattgacaaagt

SEQ ID NO: 133218 - DNA, 20 bp, Artificial Sequence
  Description of Artificial Sequence: Synthetic oligonucleotide
  Target: LAMA2; (+) strand; PAM type: NRG; PAM sequence: TAG
acaaagttagttatgttttt

SEQ ID NO: 133219 - DNA, 20 bp, Artificial Sequence
  Description of Artificial Sequence: Synthetic oligonucleotide
  Target: LAMA2; (+) strand; PAM type: NRG; PAM sequence: AAG
ttagcttattaaactaattt

SEQ ID NO: 133220 - DNA, 20 bp, Artificial Sequence
  Description of Artificial Sequence: Synthetic oligonucleotide
  Target: LAMA2; (+) strand; PAM type: NRG; PAM sequence: AGG
tagcttattaaactaattta

SEQ ID NO: 133221 - DNA, 20 bp, Artificial Sequence
  Description of Artificial Sequence: Synthetic oligonucleotide
  Target: LAMA2; (+) strand; PAM type: NRG; PAM sequence: AAG
attaaactaatttaaggaca

SEQ ID NO: 133222 - DNA, 20 bp, Artificial Sequence
  Description of Artificial Sequence: Synthetic oligonucleotide
  Target: LAMA2; (+) strand; PAM type: NRG; PAM sequence: AAG
aaactaatttaaggacaaag

SEQ ID NO: 133223 - DNA, 20 bp, Artificial Sequence
  Description of Artificial Sequence: Synthetic oligonucleotide
  Target: LAMA2; (+) strand; PAM type: NRG; PAM sequence: GAG
actaatttaaggacaaagaa

SEQ ID NO: 133224 - DNA, 20 bp, Artificial Sequence
  Description of Artificial Sequence: Synthetic oligonucleotide
  Target: LAMA2; (+) strand; PAM type: NRG; PAM sequence: TGG
attttcaaacccactgtgct

SEQ ID NO: 133225 - DNA, 20 bp, Artificial Sequence
  Description of Artificial Sequence: Synthetic oligonucleotide
  Target: LAMA2; (+) strand; PAM type: NRG; PAM sequence: GAG
ctaattatgtttttgcctgt

SEQ ID NO: 133226 - DNA, 20 bp, Artificial Sequence
  Description of Artificial Sequence: Synthetic oligonucleotide
  Target: LAMA2; (+) strand; PAM type: NRG; PAM sequence: CGG
atgtttttgcctgtgagata

SEQ ID NO: 133227 - DNA, 20 bp, Artificial Sequence
  Description of Artificial Sequence: Synthetic oligonucleotide
  Target: LAMA2; (+) strand; PAM type: NRG; PAM sequence: TGG
tgcctgtgagatacggattt

SEQ ID NO: 133228 - DNA, 20 bp, Artificial Sequence
  Description of Artificial Sequence: Synthetic oligonucleotide
  Target: LAMA2; (+) strand; PAM type: NRG; PAM sequence: GAG
cctgtgagatacggattttg

SEQ ID NO: 133229 - DNA, 20 bp, Artificial Sequence
  Description of Artificial Sequence: Synthetic oligonucleotide
  Target: LAMA2; (+) strand; PAM type: NRG; PAM sequence: AGG
ctgtgagatacggattttgg

SEQ ID NO: 133230 - DNA, 20 bp, Artificial Sequence
  Description of Artificial Sequence: Synthetic oligonucleotide
  Target: LAMA2; (+) strand; PAM type: NRG; PAM sequence: AAG
ttggaggctgtatttgcaat

SEQ ID NO: 133231 - DNA, 20 bp, Artificial Sequence
  Description of Artificial Sequence: Synthetic oligonucleotide
  Target: LAMA2; (+) strand; PAM type: NRG; PAM sequence: TAG
tataaaatatttgtcttaaa

SEQ ID NO: 133232 - DNA, 20 bp, Artificial Sequence
  Description of Artificial Sequence: Synthetic oligonucleotide
  Target: LAMA2; (+) strand; PAM type: NRG; PAM sequence: AGG
ataaaatatttgtcttaaat

SEQ ID NO: 133233 - DNA, 20 bp, Artificial Sequence
  Description of Artificial Sequence: Synthetic oligonucleotide
  Target: LAMA2; (+) strand; PAM type: NRG; PAM sequence: GGG
taaaatatttgtcttaaata

SEQ ID NO: 133234 - DNA, 20 bp, Artificial Sequence
  Description of Artificial Sequence: Synthetic oligonucleotide
  Target: LAMA2; (+) strand; PAM type: NRG; PAM sequence: GAG
aaatatttgtcttaaatagg

SEQ ID NO: 133235 - DNA, 20 bp, Artificial Sequence
  Description of Artificial Sequence: Synthetic oligonucleotide
  Target: LAMA2; (+) strand; PAM type: NRG; PAM sequence: CAG
ctcttcaacgtatcatatta

SEQ ID NO: 133236 - DNA, 20 bp, Artificial Sequence
  Description of Artificial Sequence: Synthetic oligonucleotide
  Target: LAMA2; (+) strand; PAM type: NRG; PAM sequence: GAG
tattacagtgattcctcaat

SEQ ID NO: 133237 - DNA, 20 bp, Artificial Sequence
  Description of Artificial Sequence: Synthetic oligonucleotide
  Target: LAMA2; (+) strand; PAM type: NRG; PAM sequence: CAG
tacagtgattcctcaatgag

SEQ ID NO: 133238 - DNA, 20 bp, Artificial Sequence
  Description of Artificial Sequence: Synthetic oligonucleotide
  Target: LAMA2; (+) strand; PAM type: NRG; PAM sequence: CAG
gacgtattacctatcaccat

SEQ ID NO: 133239 - DNA, 20 bp, Artificial Sequence
  Description of Artificial Sequence: Synthetic oligonucleotide
  Target: LAMA2; (+) strand; PAM type: NRG; PAM sequence: AGG
acgtattacctatcaccatc

SEQ ID NO: 133240 - DNA, 20 bp, Artificial Sequence
  Description of Artificial Sequence: Synthetic oligonucleotide
  Target: LAMA2; (+) strand; PAM type: NRG; PAM sequence: TAG
tatgttatgaaactcacttt

SEQ ID NO: 133241 - DNA, 20 bp, Artificial Sequence
  Description of Artificial Sequence: Synthetic oligonucleotide
  Target: LAMA2; (+) strand; PAM type: NRG; PAM sequence: GAG
tgttatgaaactcactttta

SEQ ID NO: 133242 - DNA, 20 bp, Artificial Sequence
  Description of Artificial Sequence: Synthetic oligonucleotide
  Target: LAMA2; (+) strand; PAM type: NRG; PAM sequence: AAG
gaaactcacttttagagata

SEQ ID NO: 133243 - DNA, 20 bp, Artificial Sequence
  Description of Artificial Sequence: Synthetic oligonucleotide
  Target: LAMA2; (+) strand; PAM type: NRG; PAM sequence: TGG
ccaattattgaatctaaatg

SEQ ID NO: 133244 - DNA, 20 bp, Artificial Sequence
  Description of Artificial Sequence: Synthetic oligonucleotide
  Target: LAMA2; (+) strand; PAM type: NRG; PAM sequence: GGG
caattattgaatctaaatgt

SEQ ID NO: 133245 - DNA, 20 bp, Artificial Sequence
  Description of Artificial Sequence: Synthetic oligonucleotide
  Target: LAMA2; (+) strand; PAM type: NRG; PAM sequence: CAG
tgaatctaaatgtgggcata

SEQ ID NO: 133246 - DNA, 20 bp, Artificial Sequence
  Description of Artificial Sequence: Synthetic oligonucleotide
  Target: LAMA2; (+) strand; PAM type: NRG; PAM sequence: AGG
gaatctaaatgtgggcatac

SEQ ID NO: 133247 - DNA, 20 bp, Artificial Sequence
  Description of Artificial Sequence: Synthetic oligonucleotide
  Target: LAMA2; (+) strand; PAM type: NRG; PAM sequence: AAG
gggcatacaggttttatttg

SEQ ID NO: 133248 - DNA, 20 bp, Artificial Sequence
  Description of Artificial Sequence: Synthetic oligonucleotide
  Target: LAMA2; (+) strand; PAM type: NRG; PAM sequence: CAG
catacaggttttatttgaag

SEQ ID NO: 133249 - DNA, 20 bp, Artificial Sequence
  Description of Artificial Sequence: Synthetic oligonucleotide
  Target: LAMA2; (+) strand; PAM type: NRG; PAM sequence: CAG
ttttatttgaagcagtcttt

SEQ ID NO: 133250 - DNA, 20 bp, Artificial Sequence
  Description of Artificial Sequence: Synthetic oligonucleotide
  Target: LAMA2; (+) strand; PAM type: NRG; PAM sequence: TAG
ttttatttaaaaattttgaa

SEQ ID NO: 133251 - DNA, 20 bp, Artificial Sequence
  Description of Artificial Sequence: Synthetic oligonucleotide
  Target: LAMA2; (+) strand; PAM type: NRG; PAM sequence: AGG
tttatttaaaaattttgaat

SEQ ID NO: 133252 - DNA, 20 bp, Artificial Sequence
  Description of Artificial Sequence: Synthetic oligonucleotide
  Target: LAMA2; (+) strand; PAM type: NRG; PAM sequence: TGG
tttaaaaattttgaataggc

SEQ ID NO: 133253 - DNA, 20 bp, Artificial Sequence
  Description of Artificial Sequence: Synthetic oligonucleotide
  Target: LAMA2; (+) strand; PAM type: NRG; PAM sequence: GGG
ttaaaaattttgaataggct

SEQ ID NO: 133254 - DNA, 20 bp, Artificial Sequence
  Description of Artificial Sequence: Synthetic oligonucleotide
  Target: LAMA2; (+) strand; PAM type: NRG; PAM sequence: TGG
aattttgaataggctgggtg

SEQ ID NO: 133255 - DNA, 20 bp, Artificial Sequence
  Description of Artificial Sequence: Synthetic oligonucleotide
  Target: LAMA2; (+) strand; PAM type: NRG; PAM sequence: TGG
tttgaataggctgggtgtgg

SEQ ID NO: 133256 - DNA, 20 bp, Artificial Sequence
  Description of Artificial Sequence: Synthetic oligonucleotide
  Target: LAMA2; (+) strand; PAM type: NRG; PAM sequence: CAG
gtggctcacgcctgtaatcc

SEQ ID NO: 133257 - DNA, 20 bp, Artificial Sequence
  Description of Artificial Sequence: Synthetic oligonucleotide
  Target: LAMA2; (+) strand; PAM type: NRG; PAM sequence: TGG
cgcctgtaatcccagcactt

SEQ ID NO: 133258 - DNA, 20 bp, Artificial Sequence
  Description of Artificial Sequence: Synthetic oligonucleotide
  Target: LAMA2; (+) strand; PAM type: NRG; PAM sequence: GGG
gcctgtaatcccagcacttt

SEQ ID NO: 133259 - DNA, 20 bp, Artificial Sequence
  Description of Artificial Sequence: Synthetic oligonucleotide
  Target: LAMA2; (+) strand; PAM type: NRG; PAM sequence: GAG
ctgtaatcccagcactttgg

SEQ ID NO: 133260 - DNA, 20 bp, Artificial Sequence
  Description of Artificial Sequence: Synthetic oligonucleotide
  Target: LAMA2; (+) strand; PAM type: NRG; PAM sequence: AGG
tgtaatcccagcactttggg

SEQ ID NO: 133261 - DNA, 20 bp, Artificial Sequence
  Description of Artificial Sequence: Synthetic oligonucleotide
  Target: LAMA2; (+) strand; PAM type: NRG; PAM sequence: GAG
tcccagcactttgggaggct

SEQ ID NO: 133262 - DNA, 20 bp, Artificial Sequence
  Description of Artificial Sequence: Synthetic oligonucleotide
  Target: LAMA2; (+) strand; PAM type: NRG; PAM sequence: AGG
cccagcactttgggaggctg

SEQ ID NO: 133263 - DNA, 20 bp, Artificial Sequence
  Description of Artificial Sequence: Synthetic oligonucleotide
  Target: LAMA2; (+) strand; PAM type: NRG; PAM sequence: CGG
agcactttgggaggctgagg

SEQ ID NO: 133264 - DNA, 20 bp, Artificial Sequence
  Description of Artificial Sequence: Synthetic oligonucleotide
  Target: LAMA2; (+) strand; PAM type: NRG; PAM sequence: GGG
gcactttgggaggctgaggc

SEQ ID NO: 133265 - DNA, 20 bp, Artificial Sequence
  Description of Artificial Sequence: Synthetic oligonucleotide
  Target: LAMA2; (+) strand; PAM type: NRG; PAM sequence: CGG
ctttgggaggctgaggcggg

SEQ ID NO: 133266 - DNA, 20 bp, Artificial Sequence
  Description of Artificial Sequence: Synthetic oligonucleotide
  Target: LAMA2; (+) strand; PAM type: NRG; PAM sequence: GAG
ggctgaggcgggcggatcac

SEQ ID NO: 133267 - DNA, 20 bp, Artificial Sequence
  Description of Artificial Sequence: Synthetic oligonucleotide
  Target: LAMA2; (+) strand; PAM type: NRG; PAM sequence: AGG
gctgaggcgggcggatcacg

SEQ ID NO: 133268 - DNA, 20 bp, Artificial Sequence
  Description of Artificial Sequence: Synthetic oligonucleotide
  Target: LAMA2; (+) strand; PAM type: NRG; PAM sequence: CAG
aggcgggcggatcacgaggt

SEQ ID NO: 133269 - DNA, 20 bp, Artificial Sequence
  Description of Artificial Sequence: Synthetic oligonucleotide
  Target: LAMA2; (+) strand; PAM type: NRG; PAM sequence: AGG
ggcgggcggatcacgaggtc

SEQ ID NO: 133270 - DNA, 20 bp, Artificial Sequence
  Description of Artificial Sequence: Synthetic oligonucleotide
  Target: LAMA2; (+) strand; PAM type: NRG; PAM sequence: GAG
cgggcggatcacgaggtcag

SEQ ID NO: 133271 - DNA, 20 bp, Artificial Sequence
  Description of Artificial Sequence: Synthetic oligonucleotide
  Target: LAMA2; (+) strand; PAM type: NRG; PAM sequence: GAG
gatcacgaggtcaggagatc

SEQ ID NO: 133272 - DNA, 20 bp, Artificial Sequence
  Description of Artificial Sequence: Synthetic oligonucleotide
  Target: LAMA2; (+) strand; PAM type: NRG; PAM sequence: TGG
tcaggagatcgagaccatcc

SEQ ID NO: 133273 - DNA, 20 bp, Artificial Sequence
  Description of Artificial Sequence: Synthetic oligonucleotide
  Target: LAMA2; (+) strand; PAM type: NRG; PAM sequence: CGG
cgagaccatcctggctacca

SEQ ID NO: 133274 - DNA, 20 bp, Artificial Sequence
  Description of Artificial Sequence: Synthetic oligonucleotide
  Target: LAMA2; (+) strand; PAM type: NRG; PAM sequence: TAG
actaaaaatccaaaaaaaat

SEQ ID NO: 133275 - DNA, 20 bp, Artificial Sequence
  Description of Artificial Sequence: Synthetic oligonucleotide
  Target: LAMA2; (+) strand; PAM type: NRG; PAM sequence: CGG
aaatccaaaaaaaattagcc

SEQ ID NO: 133276 - DNA, 20 bp, Artificial Sequence
  Description of Artificial Sequence: Synthetic oligonucleotide
  Target: LAMA2; (+) strand; PAM type: NRG; PAM sequence: TGG
caaaaaaaattagcccggcg

SEQ ID NO: 133277 - DNA, 20 bp, Artificial Sequence
  Description of Artificial Sequence: Synthetic oligonucleotide
  Target: LAMA2; (+) strand; PAM type: NRG; PAM sequence: TGG
aaaaaattagcccggcgtgg

SEQ ID NO: 133278 - DNA, 20 bp, Artificial Sequence
  Description of Artificial Sequence: Synthetic oligonucleotide
  Target: LAMA2; (+) strand; PAM type: NRG; PAM sequence: CGG
aaattagcccggcgtggtgg

SEQ ID NO: 133279 - DNA, 20 bp, Artificial Sequence
  Description of Artificial Sequence: Synthetic oligonucleotide
  Target: LAMA2; (+) strand; PAM type: NRG; PAM sequence: GGG
aattagcccggcgtggtggc

SEQ ID NO: 133280 - DNA, 20 bp, Artificial Sequence
  Description of Artificial Sequence: Synthetic oligonucleotide
  Target: LAMA2; (+) strand; PAM type: NRG; PAM sequence: TAG
ggcgtggtggcgggcgcctg

SEQ ID NO: 133281 - DNA, 20 bp, Artificial Sequence
  Description of Artificial Sequence: Synthetic oligonucleotide
  Target: LAMA2; (+) strand; PAM type: NRG; PAM sequence: CAG
gtggcgggcgcctgtagtcc

SEQ ID NO: 133282 - DNA, 20 bp, Artificial Sequence
  Description of Artificial Sequence: Synthetic oligonucleotide
  Target: LAMA2; (+) strand; PAM type: NRG; PAM sequence: CGG
cgcctgtagtcccagctact

SEQ ID NO: 133283 - DNA, 20 bp, Artificial Sequence
  Description of Artificial Sequence: Synthetic oligonucleotide
  Target: LAMA2; (+) strand; PAM type: NRG; PAM sequence: GGG
gcctgtagtcccagctactc

SEQ ID NO: 133284 - DNA, 20 bp, Artificial Sequence
  Description of Artificial Sequence: Synthetic oligonucleotide
  Target: LAMA2; (+) strand; PAM type: NRG; PAM sequence: GAG
ctgtagtcccagctactcgg

SEQ ID NO: 133285 - DNA, 20 bp, Artificial Sequence
  Description of Artificial Sequence: Synthetic oligonucleotide
  Target: LAMA2; (+) strand; PAM type: NRG; PAM sequence: AGG
tgtagtcccagctactcggg

SEQ ID NO: 133286 - DNA, 20 bp, Artificial Sequence
  Description of Artificial Sequence: Synthetic oligonucleotide
  Target: LAMA2; (+) strand; PAM type: NRG; PAM sequence: GAG
tcccagctactcgggaggct

SEQ ID NO: 133287 - DNA, 20 bp, Artificial Sequence
  Description of Artificial Sequence: Synthetic oligonucleotide
  Target: LAMA2; (+) strand; PAM type: NRG; PAM sequence: AGG
cccagctactcgggaggctg

SEQ ID NO: 133288 - DNA, 20 bp, Artificial Sequence
  Description of Artificial Sequence: Synthetic oligonucleotide
  Target: LAMA2; (+) strand; PAM type: NRG; PAM sequence: CAG
agctactcgggaggctgagg

SEQ ID NO: 133289 - DNA, 20 bp, Artificial Sequence
  Description of Artificial Sequence: Synthetic oligonucleotide
  Target: LAMA2; (+) strand; PAM type: NRG; PAM sequence: AGG
gctactcgggaggctgaggc

SEQ ID NO: 133290 - DNA, 20 bp, Artificial Sequence
  Description of Artificial Sequence: Synthetic oligonucleotide
  Target: LAMA2; (+) strand; PAM type: NRG; PAM sequence: GAG
tactcgggaggctgaggcag

SEQ ID NO: 133291 - DNA, 20 bp, Artificial Sequence
  Description of Artificial Sequence: Synthetic oligonucleotide
  Target: LAMA2; (+) strand; PAM type: NRG; PAM sequence: TGG
gggaggctgaggcaggagaa

SEQ ID NO: 133292 - DNA, 20 bp, Artificial Sequence
  Description of Artificial Sequence: Synthetic oligonucleotide
  Target: LAMA2; (+) strand; PAM type: NRG; PAM sequence: CGG
aggctgaggcaggagaatgg

SEQ ID NO: 133293 - DNA, 20 bp, Artificial Sequence
  Description of Artificial Sequence: Synthetic oligonucleotide
  Target: LAMA2; (+) strand; PAM type: NRG; PAM sequence: GGG
ggctgaggcaggagaatggc

SEQ ID NO: 133294 - DNA, 20 bp, Artificial Sequence
  Description of Artificial Sequence: Synthetic oligonucleotide
  Target: LAMA2; (+) strand; PAM type: NRG; PAM sequence: CGG
gcaggagaatggcgggaacc

SEQ ID NO: 133295 - DNA, 20 bp, Artificial Sequence
  Description of Artificial Sequence: Synthetic oligonucleotide
  Target: LAMA2; (+) strand; PAM type: NRG; PAM sequence: GGG
caggagaatggcgggaaccc

SEQ ID NO: 133296 - DNA, 20 bp, Artificial Sequence
  Description of Artificial Sequence: Synthetic oligonucleotide
  Target: LAMA2; (+) strand; PAM type: NRG; PAM sequence: GAG
ggagaatggcgggaacccgg

SEQ ID NO: 133297 - DNA, 20 bp, Artificial Sequence
  Description of Artificial Sequence: Synthetic oligonucleotide
  Target: LAMA2; (+) strand; PAM type: NRG; PAM sequence: AGG
gagaatggcgggaacccggg

SEQ ID NO: 133298 - DNA, 20 bp, Artificial Sequence
  Description of Artificial Sequence: Synthetic oligonucleotide
  Target: LAMA2; (+) strand; PAM type: NRG; PAM sequence: CGG
aatggcgggaacccgggagg

SEQ ID NO: 133299 - DNA, 20 bp, Artificial Sequence
  Description of Artificial Sequence: Synthetic oligonucleotide
  Target: LAMA2; (+) strand; PAM type: NRG; PAM sequence: GAG
tggcgggaacccgggaggcg

SEQ ID NO: 133300 - DNA, 20 bp, Artificial Sequence
  Description of Artificial Sequence: Synthetic oligonucleotide
  Target: LAMA2; (+) strand; PAM type: NRG; PAM sequence: CAG
aacccgggaggcggagcctg

SEQ ID NO: 133301 - DNA, 20 bp, Artificial Sequence
  Description of Artificial Sequence: Synthetic oligonucleotide
  Target: LAMA2; (+) strand; PAM type: NRG; PAM sequence: AGG
acccgggaggcggagcctgc

SEQ ID NO: 133302 - DNA, 20 bp, Artificial Sequence
  Description of Artificial Sequence: Synthetic oligonucleotide
  Target: LAMA2; (+) strand; PAM type: NRG; PAM sequence: GGG
cccgggaggcggagcctgca

SEQ ID NO: 133303 - DNA, 20 bp, Artificial Sequence
  Description of Artificial Sequence: Synthetic oligonucleotide
  Target: LAMA2; (+) strand; PAM type: NRG; PAM sequence: GAG
cgggaggcggagcctgcagg

SEQ ID NO: 133304 - DNA, 20 bp, Artificial Sequence
  Description of Artificial Sequence: Synthetic oligonucleotide
  Target: LAMA2; (+) strand; PAM type: NRG; PAM sequence: GAG
ggcggagcctgcagggagcc

SEQ ID NO: 133305 - DNA, 20 bp, Artificial Sequence
  Description of Artificial Sequence: Synthetic oligonucleotide
  Target: LAMA2; (+) strand; PAM type: NRG; PAM sequence: CAG
gagccgagatcgcgccactg

SEQ ID NO: 133306 - DNA, 20 bp, Artificial Sequence
  Description of Artificial Sequence: Synthetic oligonucleotide
  Target: LAMA2; (+) strand; PAM type: NRG; PAM sequence: CGG
gagatcgcgccactgcagtc

SEQ ID NO: 133307 - DNA, 20 bp, Artificial Sequence
  Description of Artificial Sequence: Synthetic oligonucleotide
  Target: LAMA2; (+) strand; PAM type: NRG; PAM sequence: TGG
cgcgccactgcagtccggcc

SEQ ID NO: 133308 - DNA, 20 bp, Artificial Sequence
  Description of Artificial Sequence: Synthetic oligonucleotide
  Target: LAMA2; (+) strand; PAM type: NRG; PAM sequence: GGG
gcgccactgcagtccggcct

SEQ ID NO: 133309 - DNA, 20 bp, Artificial Sequence
  Description of Artificial Sequence: Synthetic oligonucleotide
  Target: LAMA2; (+) strand; PAM type: NRG; PAM sequence: AAG
ctgcagtccggcctgggcga

SEQ ID NO: 133310 - DNA, 20 bp, Artificial Sequence
  Description of Artificial Sequence: Synthetic oligonucleotide
  Target: LAMA2; (+) strand; PAM type: NRG; PAM sequence: GAG
gcagtccggcctgggcgaaa

SEQ ID NO: 133311 - DNA, 20 bp, Artificial Sequence
  Description of Artificial Sequence: Synthetic oligonucleotide
  Target: LAMA2; (+) strand; PAM type: NRG; PAM sequence: GAG
agtccggcctgggcgaaaga

SEQ ID NO: 133312 - DNA, 20 bp, Artificial Sequence
  Description of Artificial Sequence: Synthetic oligonucleotide
  Target: LAMA2; (+) strand; PAM type: NRG; PAM sequence: GAG
tccggcctgggcgaaagaga

SEQ ID NO: 133313 - DNA, 20 bp, Artificial Sequence
  Description of Artificial Sequence: Synthetic oligonucleotide
  Target: LAMA2; (+) strand; PAM type: NRG; PAM sequence: TAG
aaaaattttttttgaataaa

SEQ ID NO: 133314 - DNA, 20 bp, Artificial Sequence
  Description of Artificial Sequence: Synthetic oligonucleotide
  Target: LAMA2; (+) strand; PAM type: NRG; PAM sequence: TAG
gaataaatagaataatgtga

SEQ ID NO: 133315 - DNA, 20 bp, Artificial Sequence
  Description of Artificial Sequence: Synthetic oligonucleotide
  Target: LAMA2; (+) strand; PAM type: NRG; PAM sequence: TGG
tagaataatgtgatagcaaa

SEQ ID NO: 133316 - DNA, 20 bp, Artificial Sequence
  Description of Artificial Sequence: Synthetic oligonucleotide
  Target: LAMA2; (+) strand; PAM type: NRG; PAM sequence: TAG
ataatgtgatagcaaatggc

SEQ ID NO: 133317 - DNA, 20 bp, Artificial Sequence
  Description of Artificial Sequence: Synthetic oligonucleotide
  Target: LAMA2; (+) strand; PAM type: NRG; PAM sequence: CAG
tgtgatagcaaatggctaga

SEQ ID NO: 133318 - DNA, 20 bp, Artificial Sequence
  Description of Artificial Sequence: Synthetic oligonucleotide
  Target: LAMA2; (+) strand; PAM type: NRG; PAM sequence: AAG
caaatggctagacagctatt

SEQ ID NO: 133319 - DNA, 20 bp, Artificial Sequence
  Description of Artificial Sequence: Synthetic oligonucleotide
  Target: LAMA2; (+) strand; PAM type: NRG; PAM sequence: AGG
aaatggctagacagctatta

SEQ ID NO: 133320 - DNA, 20 bp, Artificial Sequence
  Description of Artificial Sequence: Synthetic oligonucleotide
  Target: LAMA2; (+) strand; PAM type: NRG; PAM sequence: TGG
tggctagacagctattaagg

SEQ ID NO: 133321 - DNA, 20 bp, Artificial Sequence
  Description of Artificial Sequence: Synthetic oligonucleotide
  Target: LAMA2; (+) strand; PAM type: NRG; PAM sequence: AAG
agacagctattaaggtggtc

SEQ ID NO: 133322 - DNA, 20 bp, Artificial Sequence
  Description of Artificial Sequence: Synthetic oligonucleotide
  Target: LAMA2; (+) strand; PAM type: NRG; PAM sequence: AGG
gacagctattaaggtggtca

SEQ ID NO: 133323 - DNA, 20 bp, Artificial Sequence
  Description of Artificial Sequence: Synthetic oligonucleotide
  Target: LAMA2; (+) strand; PAM type: NRG; PAM sequence: AAG
ggtcaaggaaaacccactaa

SEQ ID NO: 133324 - DNA, 20 bp, Artificial Sequence
  Description of Artificial Sequence: Synthetic oligonucleotide
  Target: LAMA2; (+) strand; PAM type: NRG; PAM sequence: CAG
gaaaacccactaaaagaaac

SEQ ID NO: 133325 - DNA, 20 bp, Artificial Sequence
  Description of Artificial Sequence: Synthetic oligonucleotide
  Target: LAMA2; (+) strand; PAM type: NRG; PAM sequence: TAG
cccactaaaagaaaccagca

SEQ ID NO: 133326 - DNA, 20 bp, Artificial Sequence
  Description of Artificial Sequence: Synthetic oligonucleotide
  Target: LAMA2; (+) strand; PAM type: NRG; PAM sequence: GAG
accagcatagtattttgtat

SEQ ID NO: 133327 - DNA, 20 bp, Artificial Sequence
  Description of Artificial Sequence: Synthetic oligonucleotide
  Target: LAMA2; (+) strand; PAM type: NRG; PAM sequence: TAG
catagtattttgtatgagca

SEQ ID NO: 133328 - DNA, 20 bp, Artificial Sequence
  Description of Artificial Sequence: Synthetic oligonucleotide
  Target: LAMA2; (+) strand; PAM type: NRG; PAM sequence: AAG
agtattttgtatgagcatag

SEQ ID NO: 133329 - DNA, 20 bp, Artificial Sequence
  Description of Artificial Sequence: Synthetic oligonucleotide
  Target: LAMA2; (+) strand; PAM type: NRG; PAM sequence: AGG
gtattttgtatgagcataga

SEQ ID NO: 133330 - DNA, 20 bp, Artificial Sequence
  Description of Artificial Sequence: Synthetic oligonucleotide
  Target: LAMA2; (+) strand; PAM type: NRG; PAM sequence: TGG
ttgtatgagcatagaaggtg

SEQ ID NO: 133331 - DNA, 20 bp, Artificial Sequence
  Description of Artificial Sequence: Synthetic oligonucleotide
  Target: LAMA2; (+) strand; PAM type: NRG; PAM sequence: GGG
tgtatgagcatagaaggtgt

SEQ ID NO: 133332 - DNA, 20 bp, Artificial Sequence
  Description of Artificial Sequence: Synthetic oligonucleotide
  Target: LAMA2; (+) strand; PAM type: NRG; PAM sequence: TAG
tgagcatagaaggtgtgggt

SEQ ID NO: 133333 - DNA, 20 bp, Artificial Sequence
  Description of Artificial Sequence: Synthetic oligonucleotide
  Target: LAMA2; (+) strand; PAM type: NRG; PAM sequence: GAG
agcatagaaggtgtgggtta

SEQ ID NO: 133334 - DNA, 20 bp, Artificial Sequence
  Description of Artificial Sequence: Synthetic oligonucleotide
  Target: LAMA2; (+) strand; PAM type: NRG; PAM sequence: TAG
gaaatccaatgtctctattt

SEQ ID NO: 133335 - DNA, 20 bp, Artificial Sequence
  Description of Artificial Sequence: Synthetic oligonucleotide
  Target: LAMA2; (+) strand; PAM type: NRG; PAM sequence: AAG
tccaatgtctctattttaga

SEQ ID NO: 133336 - DNA, 20 bp, Artificial Sequence
  Description of Artificial Sequence: Synthetic oligonucleotide
  Target: LAMA2; (+) strand; PAM type: NRG; PAM sequence: AAG
ttttagaaagaaatgtcatc

SEQ ID NO: 133337 - DNA, 20 bp, Artificial Sequence
  Description of Artificial Sequence: Synthetic oligonucleotide
  Target: LAMA2; (+) strand; PAM type: NRG; PAM sequence: AGG
tttagaaagaaatgtcatca

SEQ ID NO: 133338 - DNA, 20 bp, Artificial Sequence
  Description of Artificial Sequence: Synthetic oligonucleotide
  Target: LAMA2; (+) strand; PAM type: NRG; PAM sequence: TGG
agaaagaaatgtcatcaagg

SEQ ID NO: 133339 - DNA, 20 bp, Artificial Sequence
  Description of Artificial Sequence: Synthetic oligonucleotide
  Target: LAMA2; (+) strand; PAM type: NRG; PAM sequence: CAG
agaaatgtcatcaaggtgga

SEQ ID NO: 133340 - DNA, 20 bp, Artificial Sequence
  Description of Artificial Sequence: Synthetic oligonucleotide
  Target: LAMA2; (+) strand; PAM type: NRG; PAM sequence: AGG
gaaatgtcatcaaggtggac

SEQ ID NO: 133341 - DNA, 20 bp, Artificial Sequence
  Description of Artificial Sequence: Synthetic oligonucleotide
  Target: LAMA2; (+) strand; PAM type: NRG; PAM sequence: GGG
aaatgtcatcaaggtggaca

SEQ ID NO: 133342 - DNA, 20 bp, Artificial Sequence
  Description of Artificial Sequence: Synthetic oligonucleotide
  Target: LAMA2; (+) strand; PAM type: NRG; PAM sequence: CAG
tcatcaaggtggacagggac

SEQ ID NO: 133343 - DNA, 20 bp, Artificial Sequence
  Description of Artificial Sequence: Synthetic oligonucleotide
  Target: LAMA2; (+) strand; PAM type: NRG; PAM sequence: TAG
tggacagggaccagaacatg

SEQ ID NO: 133344 - DNA, 20 bp, Artificial Sequence
  Description of Artificial Sequence: Synthetic oligonucleotide
  Target: LAMA2; (+) strand; PAM type: NRG; PAM sequence: AAG
cagaacatgtagcactttgt

SEQ ID NO: 133345 - DNA, 20 bp, Artificial Sequence
  Description of Artificial Sequence: Synthetic oligonucleotide
  Target: LAMA2; (+) strand; PAM type: NRG; PAM sequence: AAG
tagcactttgtaagccacga

SEQ ID NO: 133346 - DNA, 20 bp, Artificial Sequence
  Description of Artificial Sequence: Synthetic oligonucleotide
  Target: LAMA2; (+) strand; PAM type: NRG; PAM sequence: AGG
agcactttgtaagccacgaa

SEQ ID NO: 133347 - DNA, 20 bp, Artificial Sequence
  Description of Artificial Sequence: Synthetic oligonucleotide
  Target: LAMA2; (+) strand; PAM type: NRG; PAM sequence: TAG
gcattttcattttattcttg

SEQ ID NO: 133348 - DNA, 20 bp, Artificial Sequence
  Description of Artificial Sequence: Synthetic oligonucleotide
  Target: LAMA2; (+) strand; PAM type: NRG; PAM sequence: AAG
attttattcttgtagatttt

SEQ ID NO: 133349 - DNA, 20 bp, Artificial Sequence
  Description of Artificial Sequence: Synthetic oligonucleotide
  Target: LAMA2; (+) strand; PAM type: NRG; PAM sequence: TAG
ttattcttgtagattttaag

SEQ ID NO: 133350 - DNA, 20 bp, Artificial Sequence
  Description of Artificial Sequence: Synthetic oligonucleotide
  Target: LAMA2; (+) strand; PAM type: NRG; PAM sequence: GAG
attcttgtagattttaagta

SEQ ID NO: 133351 - DNA, 20 bp, Artificial Sequence
  Description of Artificial Sequence: Synthetic oligonucleotide
  Target: LAMA2; (+) strand; PAM type: NRG; PAM sequence: CAG
gtagattttaagtagagatg

SEQ ID NO: 133352 - DNA, 20 bp, Artificial Sequence
  Description of Artificial Sequence: Synthetic oligonucleotide
  Target: LAMA2; (+) strand; PAM type: NRG; PAM sequence: TAG
agctttcttctcacatattt

SEQ ID NO: 133353 - DNA, 20 bp, Artificial Sequence
  Description of Artificial Sequence: Synthetic oligonucleotide
  Target: LAMA2; (+) strand; PAM type: NRG; PAM sequence: TGG
atattttagaaatatttatt

SEQ ID NO: 133354 - DNA, 20 bp, Artificial Sequence
  Description of Artificial Sequence: Synthetic oligonucleotide
  Target: LAMA2; (+) strand; PAM type: NRG; PAM sequence: TAG
atatttatttggttaccata

SEQ ID NO: 133355 - DNA, 20 bp, Artificial Sequence
  Description of Artificial Sequence: Synthetic oligonucleotide
  Target: LAMA2; (+) strand; PAM type: NRG; PAM sequence: GAG
atttatttggttaccatata

SEQ ID NO: 133356 - DNA, 20 bp, Artificial Sequence
  Description of Artificial Sequence: Synthetic oligonucleotide
  Target: LAMA2; (+) strand; PAM type: NRG; PAM sequence: CAG
atttggttaccatatagagc

SEQ ID NO: 133357 - DNA, 20 bp, Artificial Sequence
  Description of Artificial Sequence: Synthetic oligonucleotide
  Target: LAMA2; (+) strand; PAM type: NRG; PAM sequence: TAG
atatagagccagttctcata

SEQ ID NO: 133358 - DNA, 20 bp, Artificial Sequence
  Description of Artificial Sequence: Synthetic oligonucleotide
  Target: LAMA2; (+) strand; PAM type: NRG; PAM sequence: GAG
atagagccagttctcatata

SEQ ID NO: 133359 - DNA, 20 bp, Artificial Sequence
  Description of Artificial Sequence: Synthetic oligonucleotide
  Target: LAMA2; (+) strand; PAM type: NRG; PAM sequence: GAG
agagaatttattctctatat

SEQ ID NO: 133360 - DNA, 20 bp, Artificial Sequence
  Description of Artificial Sequence: Synthetic oligonucleotide
  Target: LAMA2; (+) strand; PAM type: NRG; PAM sequence: TAG
atttattctctatatgagaa

SEQ ID NO: 133361 - DNA, 20 bp, Artificial Sequence
  Description of Artificial Sequence: Synthetic oligonucleotide
  Target: LAMA2; (+) strand; PAM type: NRG; PAM sequence: GAG
ttattctctatatgagaata

SEQ ID NO: 133362 - DNA, 20 bp, Artificial Sequence
  Description of Artificial Sequence: Synthetic oligonucleotide
  Target: LAMA2; (+) strand; PAM type: NRG; PAM sequence: TGG
atgagaatagagaataaatt

SEQ ID NO: 133363 - DNA, 20 bp, Artificial Sequence
  Description of Artificial Sequence: Synthetic oligonucleotide
  Target: LAMA2; (+) strand; PAM type: NRG; PAM sequence: AAG
atagagaataaatttggtgc

SEQ ID NO: 133364 - DNA, 20 bp, Artificial Sequence
  Description of Artificial Sequence: Synthetic oligonucleotide
  Target: LAMA2; (+) strand; PAM type: NRG; PAM sequence: CGG
ttggtgcaagaaataaatat

SEQ ID NO: 133365 - DNA, 20 bp, Artificial Sequence
  Description of Artificial Sequence: Synthetic oligonucleotide
  Target: LAMA2; (+) strand; PAM type: NRG; PAM sequence: GGG
tggtgcaagaaataaatatc

SEQ ID NO: 133366 - DNA, 20 bp, Artificial Sequence
  Description of Artificial Sequence: Synthetic oligonucleotide
  Target: LAMA2; (+) strand; PAM type: NRG; PAM sequence: AAG
aagaaataaatatcgggtgc

SEQ ID NO: 133367 - DNA, 20 bp, Artificial Sequence
  Description of Artificial Sequence: Synthetic oligonucleotide
  Target: LAMA2; (+) strand; PAM type: NRG; PAM sequence: TAG
atcgggtgcaagatctaaaa

SEQ ID NO: 133368 - DNA, 20 bp, Artificial Sequence
  Description of Artificial Sequence: Synthetic oligonucleotide
  Target: LAMA2; (+) strand; PAM type: NRG; PAM sequence: AGG
tcgggtgcaagatctaaaat

SEQ ID NO: 133369 - DNA, 20 bp, Artificial Sequence
  Description of Artificial Sequence: Synthetic oligonucleotide
  Target: LAMA2; (+) strand; PAM type: NRG; PAM sequence: AAG
ggtgcaagatctaaaatagg

SEQ ID NO: 133370 - DNA, 20 bp, Artificial Sequence
  Description of Artificial Sequence: Synthetic oligonucleotide
  Target: LAMA2; (+) strand; PAM type: NRG; PAM sequence: CAG
caagatctaaaataggaaga

SEQ ID NO: 133371 - DNA, 20 bp, Artificial Sequence
  Description of Artificial Sequence: Synthetic oligonucleotide
  Target: LAMA2; (+) strand; PAM type: NRG; PAM sequence: AGG
aagatctaaaataggaagac

SEQ ID NO: 133372 - DNA, 20 bp, Artificial Sequence
  Description of Artificial Sequence: Synthetic oligonucleotide
  Target: LAMA2; (+) strand; PAM type: NRG; PAM sequence: GAG
aaaataggaagacaggttat

SEQ ID NO: 133373 - DNA, 20 bp, Artificial Sequence
  Description of Artificial Sequence: Synthetic oligonucleotide
  Target: LAMA2; (+) strand; PAM type: NRG; PAM sequence: AGG
aaataggaagacaggttatg

SEQ ID NO: 133374 - DNA, 20 bp, Artificial Sequence
  Description of Artificial Sequence: Synthetic oligonucleotide
  Target: LAMA2; (+) strand; PAM type: NRG; PAM sequence: TGG
aagacaggttatgaggctgt

SEQ ID NO: 133375 - DNA, 20 bp, Artificial Sequence
  Description of Artificial Sequence: Synthetic oligonucleotide
  Target: LAMA2; (+) strand; PAM type: NRG; PAM sequence: TGG
ctgttggatccccattataa

SEQ ID NO: 133376 - DNA, 20 bp, Artificial Sequence
  Description of Artificial Sequence: Synthetic oligonucleotide
  Target: LAMA2; (+) strand; PAM type: NRG; PAM sequence: CAG
ttggatccccattataatgg

SEQ ID NO: 133377 - DNA, 20 bp, Artificial Sequence
  Description of Artificial Sequence: Synthetic oligonucleotide
  Target: LAMA2; (+) strand; PAM type: NRG; PAM sequence: TGG
tccccattataatggcagct

SEQ ID NO: 133378 - DNA, 20 bp, Artificial Sequence
  Description of Artificial Sequence: Synthetic oligonucleotide
  Target: LAMA2; (+) strand; PAM type: NRG; PAM sequence: GAG
attataatggcagcttggat

SEQ ID NO: 133379 - DNA, 20 bp, Artificial Sequence
  Description of Artificial Sequence: Synthetic oligonucleotide
  Target: LAMA2; (+) strand; PAM type: NRG; PAM sequence: TAG
taatggcagcttggatgaga

SEQ ID NO: 133380 - DNA, 20 bp, Artificial Sequence
  Description of Artificial Sequence: Synthetic oligonucleotide
  Target: LAMA2; (+) strand; PAM type: NRG; PAM sequence: AGG
aatggcagcttggatgagat

SEQ ID NO: 133381 - DNA, 20 bp, Artificial Sequence
  Description of Artificial Sequence: Synthetic oligonucleotide
  Target: LAMA2; (+) strand; PAM type: NRG; PAM sequence: TGG
tgagataggtttcatgaaaa

SEQ ID NO: 133382 - DNA, 20 bp, Artificial Sequence
  Description of Artificial Sequence: Synthetic oligonucleotide
  Target: LAMA2; (+) strand; PAM type: NRG; PAM sequence: GGG
gagataggtttcatgaaaat

SEQ ID NO: 133383 - DNA, 20 bp, Artificial Sequence
  Description of Artificial Sequence: Synthetic oligonucleotide
  Target: LAMA2; (+) strand; PAM type: NRG; PAM sequence: AAG
ggtttcatgaaaatgggaaa

SEQ ID NO: 133384 - DNA, 20 bp, Artificial Sequence
  Description of Artificial Sequence: Synthetic oligonucleotide
  Target: LAMA2; (+) strand; PAM type: NRG; PAM sequence: CAG
ttcatgaaaatgggaaaaag

SEQ ID NO: 133385 - DNA, 20 bp, Artificial Sequence
  Description of Artificial Sequence: Synthetic oligonucleotide
  Target: LAMA2; (+) strand; PAM type: NRG; PAM sequence: TGG
tgggaaaaagcagacatgtg

SEQ ID NO: 133386 - DNA, 20 bp, Artificial Sequence
  Description of Artificial Sequence: Synthetic oligonucleotide
  Target: LAMA2; (+) strand; PAM type: NRG; PAM sequence: GGG
gggaaaaagcagacatgtgt

SEQ ID NO: 133387 - DNA, 20 bp, Artificial Sequence
  Description of Artificial Sequence: Synthetic oligonucleotide
  Target: LAMA2; (+) strand; PAM type: NRG; PAM sequence: TAG
cagacatgtgtgggatgttt

SEQ ID NO: 133388 - DNA, 20 bp, Artificial Sequence
  Description of Artificial Sequence: Synthetic oligonucleotide
  Target: LAMA2; (+) strand; PAM type: NRG; PAM sequence: AGG
agacatgtgtgggatgtttt

SEQ ID NO: 133389 - DNA, 20 bp, Artificial Sequence
  Description of Artificial Sequence: Synthetic oligonucleotide
  Target: LAMA2; (+) strand; PAM type: NRG; PAM sequence: CAG
catgtgtgggatgttttagg

SEQ ID NO: 133390 - DNA, 20 bp, Artificial Sequence
  Description of Artificial Sequence: Synthetic oligonucleotide
  Target: LAMA2; (+) strand; PAM type: NRG; PAM sequence: TGG
tgtgggatgttttaggcagc

SEQ ID NO: 133391 - DNA, 20 bp, Artificial Sequence
  Description of Artificial Sequence: Synthetic oligonucleotide
  Target: LAMA2; (+) strand; PAM type: NRG; PAM sequence: TAG
ttttaggcagctggaatcaa

SEQ ID NO: 133392 - DNA, 20 bp, Artificial Sequence
  Description of Artificial Sequence: Synthetic oligonucleotide
  Target: LAMA2; (+) strand; PAM type: NRG; PAM sequence: TGG
gaatcaatagtacttattaa

SEQ ID NO: 133393 - DNA, 20 bp, Artificial Sequence
  Description of Artificial Sequence: Synthetic oligonucleotide
  Target: LAMA2; (+) strand; PAM type: NRG; PAM sequence: CAG
aatagtacttattaatggcc

SEQ ID NO: 133394 - DNA, 20 bp, Artificial Sequence
  Description of Artificial Sequence: Synthetic oligonucleotide
  Target: LAMA2; (+) strand; PAM type: NRG; PAM sequence: GAG
tagtacttattaatggccca

SEQ ID NO: 133395 - DNA, 20 bp, Artificial Sequence
  Description of Artificial Sequence: Synthetic oligonucleotide
  Target: LAMA2; (+) strand; PAM type: NRG; PAM sequence: AGG
agtacttattaatggcccag

SEQ ID NO: 133396 - DNA, 20 bp, Artificial Sequence
  Description of Artificial Sequence: Synthetic oligonucleotide
  Target: LAMA2; (+) strand; PAM type: NRG; PAM sequence: TGG
ttattaatggcccagaggtc

SEQ ID NO: 133397 - DNA, 20 bp, Artificial Sequence
  Description of Artificial Sequence: Synthetic oligonucleotide
  Target: LAMA2; (+) strand; PAM type: NRG; PAM sequence: GGG
tattaatggcccagaggtct

SEQ ID NO: 133398 - DNA, 20 bp, Artificial Sequence
  Description of Artificial Sequence: Synthetic oligonucleotide
  Target: LAMA2; (+) strand; PAM type: NRG; PAM sequence: TAG
taatggcccagaggtctggg

SEQ ID NO: 133399 - DNA, 20 bp, Artificial Sequence
  Description of Artificial Sequence: Synthetic oligonucleotide
  Target: LAMA2; (+) strand; PAM type: NRG; PAM sequence: AAG
gcccagaggtctgggtagta

SEQ ID NO: 133400 - DNA, 20 bp, Artificial Sequence
  Description of Artificial Sequence: Synthetic oligonucleotide
  Target: LAMA2; (+) strand; PAM type: NRG; PAM sequence: AGG
cccagaggtctgggtagtaa

SEQ ID NO: 133401 - DNA, 20 bp, Artificial Sequence
  Description of Artificial Sequence: Synthetic oligonucleotide
  Target: LAMA2; (+) strand; PAM type: NRG; PAM sequence: AAG
gaggtctgggtagtaaagga

SEQ ID NO: 133402 - DNA, 20 bp, Artificial Sequence
  Description of Artificial Sequence: Synthetic oligonucleotide
  Target: LAMA2; (+) strand; PAM type: NRG; PAM sequence: GAG
ggtctgggtagtaaaggaaa

SEQ ID NO: 133403 - DNA, 20 bp, Artificial Sequence
  Description of Artificial Sequence: Synthetic oligonucleotide
  Target: LAMA2; (+) strand; PAM type: NRG; PAM sequence: AGG
gtctgggtagtaaaggaaag

SEQ ID NO: 133404 - DNA, 20 bp, Artificial Sequence
  Description of Artificial Sequence: Synthetic oligonucleotide
  Target: LAMA2; (+) strand; PAM type: NRG; PAM sequence: GAG
ctgggtagtaaaggaaagag

SEQ ID NO: 133405 - DNA, 20 bp, Artificial Sequence
  Description of Artificial Sequence: Synthetic oligonucleotide
  Target: LAMA2; (+) strand; PAM type: NRG; PAM sequence: TAG
aaaggaaagaggagaaactt

SEQ ID NO: 133406 - DNA, 20 bp, Artificial Sequence
  Description of Artificial Sequence: Synthetic oligonucleotide
  Target: LAMA2; (+) strand; PAM type: NRG; PAM sequence: AAG
aaagaggagaaactttagat

SEQ ID NO: 133407 - DNA, 20 bp, Artificial Sequence
  Description of Artificial Sequence: Synthetic oligonucleotide
  Target: LAMA2; (+) strand; PAM type: NRG; PAM sequence: AGG
aagaggagaaactttagata

SEQ ID NO: 133408 - DNA, 20 bp, Artificial Sequence
  Description of Artificial Sequence: Synthetic oligonucleotide
  Target: LAMA2; (+) strand; PAM type: NRG; PAM sequence: CAG
aggagaaactttagataagg

SEQ ID NO: 133409 - DNA, 20 bp, Artificial Sequence
  Description of Artificial Sequence: Synthetic oligonucleotide
  Target: LAMA2; (+) strand; PAM type: NRG; PAM sequence: TAG
gaaactttagataaggcagt

SEQ ID NO: 133410 - DNA, 20 bp, Artificial Sequence
  Description of Artificial Sequence: Synthetic oligonucleotide
  Target: LAMA2; (+) strand; PAM type: NRG; PAM sequence: GAG
aactttagataaggcagtta

SEQ ID NO: 133411 - DNA, 20 bp, Artificial Sequence
  Description of Artificial Sequence: Synthetic oligonucleotide
  Target: LAMA2; (+) strand; PAM type: NRG; PAM sequence: AAG
tttagataaggcagttagag

SEQ ID NO: 133412 - DNA, 20 bp, Artificial Sequence
  Description of Artificial Sequence: Synthetic oligonucleotide
  Target: LAMA2; (+) strand; PAM type: NRG; PAM sequence: AGG
ttagataaggcagttagaga

SEQ ID NO: 133413 - DNA, 20 bp, Artificial Sequence
  Description of Artificial Sequence: Synthetic oligonucleotide
  Target: LAMA2; (+) strand; PAM type: NRG; PAM sequence: AAG
gcagttagagaaggaaaatc

SEQ ID NO: 133414 - DNA, 20 bp, Artificial Sequence
  Description of Artificial Sequence: Synthetic oligonucleotide
  Target: LAMA2; (+) strand; PAM type: NRG; PAM sequence: AGG
cagttagagaaggaaaatca

SEQ ID NO: 133415 - DNA, 20 bp, Artificial Sequence
  Description of Artificial Sequence: Synthetic oligonucleotide
  Target: LAMA2; (+) strand; PAM type: NRG; PAM sequence: TAG
tagagaaggaaaatcaagga

SEQ ID NO: 133416 - DNA, 20 bp, Artificial Sequence
  Description of Artificial Sequence: Synthetic oligonucleotide
  Target: LAMA2; (+) strand; PAM type: NRG; PAM sequence: TAG
ggaaaatcaaggatagattc

SEQ ID NO: 133417 - DNA, 20 bp, Artificial Sequence
  Description of Artificial Sequence: Synthetic oligonucleotide
  Target: LAMA2; (+) strand; PAM type: NRG; PAM sequence: GAG
agattctagatttttgtctt

SEQ ID NO: 133418 - DNA, 20 bp, Artificial Sequence
  Description of Artificial Sequence: Synthetic oligonucleotide
  Target: LAMA2; (+) strand; PAM type: NRG; PAM sequence: TGG
ttttgtcttgagcaactgca

SEQ ID NO: 133419 - DNA, 20 bp, Artificial Sequence
  Description of Artificial Sequence: Synthetic oligonucleotide
  Target: LAMA2; (+) strand; PAM type: NRG; PAM sequence: TGG
gtcttgagcaactgcatgga

SEQ ID NO: 133420 - DNA, 20 bp, Artificial Sequence
  Description of Artificial Sequence: Synthetic oligonucleotide
  Target: LAMA2; (+) strand; PAM type: NRG; PAM sequence: TGG
ggtgatgtcattgaatgtga

SEQ ID NO: 133421 - DNA, 20 bp, Artificial Sequence
  Description of Artificial Sequence: Synthetic oligonucleotide
  Target: LAMA2; (+) strand; PAM type: NRG; PAM sequence: TAG
tgtcattgaatgtgatggaa

SEQ ID NO: 133422 - DNA, 20 bp, Artificial Sequence
  Description of Artificial Sequence: Synthetic oligonucleotide
  Target: LAMA2; (+) strand; PAM type: NRG; PAM sequence: CGG
ttgaatgtgatggaatagat

SEQ ID NO: 133423 - DNA, 20 bp, Artificial Sequence
  Description of Artificial Sequence: Synthetic oligonucleotide
  Target: LAMA2; (+) strand; PAM type: NRG; PAM sequence: GGG
tgaatgtgatggaatagatc

SEQ ID NO: 133424 - DNA, 20 bp, Artificial Sequence
  Description of Artificial Sequence: Synthetic oligonucleotide
  Target: LAMA2; (+) strand; PAM type: NRG; PAM sequence: GAG
aatgtgatggaatagatcgg

SEQ ID NO: 133425 - DNA, 20 bp, Artificial Sequence
  Description of Artificial Sequence: Synthetic oligonucleotide
  Target: LAMA2; (+) strand; PAM type: NRG; PAM sequence: AGG
atgtgatggaatagatcggg

SEQ ID NO: 133426 - DNA, 20 bp, Artificial Sequence
  Description of Artificial Sequence: Synthetic oligonucleotide
  Target: LAMA2; (+) strand; PAM type: NRG; PAM sequence: GGG
tgtgatggaatagatcggga

SEQ ID NO: 133427 - DNA, 20 bp, Artificial Sequence
  Description of Artificial Sequence: Synthetic oligonucleotide
  Target: LAMA2; (+) strand; PAM type: NRG; PAM sequence: GGG
gtgatggaatagatcgggag

SEQ ID NO: 133428 - DNA, 20 bp, Artificial Sequence
  Description of Artificial Sequence: Synthetic oligonucleotide
  Target: LAMA2; (+) strand; PAM type: NRG; PAM sequence: AAG
gaatagatcgggaggggtgc

SEQ ID NO: 133429 - DNA, 20 bp, Artificial Sequence
  Description of Artificial Sequence: Synthetic oligonucleotide
  Target: LAMA2; (+) strand; PAM type: NRG; PAM sequence: TGG
gaggggtgcaagatttttca

SEQ ID NO: 133430 - DNA, 20 bp, Artificial Sequence
  Description of Artificial Sequence: Synthetic oligonucleotide
  Target: LAMA2; (+) strand; PAM type: NRG; PAM sequence: GAG
ggggtgcaagatttttcatg

SEQ ID NO: 133431 - DNA, 20 bp, Artificial Sequence
  Description of Artificial Sequence: Synthetic oligonucleotide
  Target: LAMA2; (+) strand; PAM type: NRG; PAM sequence: AGG
gggtgcaagatttttcatgg

SEQ ID NO: 133432 - DNA, 20 bp, Artificial Sequence
  Description of Artificial Sequence: Synthetic oligonucleotide
  Target: LAMA2; (+) strand; PAM type: NRG; PAM sequence: GGG
ggtgcaagatttttcatgga

SEQ ID NO: 133433 - DNA, 20 bp, Artificial Sequence
  Description of Artificial Sequence: Synthetic oligonucleotide
  Target: LAMA2; (+) strand; PAM type: NRG; PAM sequence: AAG
gcaagatttttcatggaggg

SEQ ID NO: 133434 - DNA, 20 bp, Artificial Sequence
  Description of Artificial Sequence: Synthetic oligonucleotide
  Target: LAMA2; (+) strand; PAM type: NRG; PAM sequence: AGG
caagatttttcatggaggga

SEQ ID NO: 133435 - DNA, 20 bp, Artificial Sequence
  Description of Artificial Sequence: Synthetic oligonucleotide
  Target: LAMA2; (+) strand; PAM type: NRG; PAM sequence: CAG
atttttcatggagggaaggc

SEQ ID NO: 133436 - DNA, 20 bp, Artificial Sequence
  Description of Artificial Sequence: Synthetic oligonucleotide
  Target: LAMA2; (+) strand; PAM type: NRG; PAM sequence: GAG
ttttcatggagggaaggcca

SEQ ID NO: 133437 - DNA, 20 bp, Artificial Sequence
  Description of Artificial Sequence: Synthetic oligonucleotide
  Target: LAMA2; (+) strand; PAM type: NRG; PAM sequence: AAG
tcatggagggaaggccagag

SEQ ID NO: 133438 - DNA, 20 bp, Artificial Sequence
  Description of Artificial Sequence: Synthetic oligonucleotide
  Target: LAMA2; (+) strand; PAM type: NRG; PAM sequence: CAG
agggaaggccagagaagaaa

SEQ ID NO: 133439 - DNA, 20 bp, Artificial Sequence
  Description of Artificial Sequence: Synthetic oligonucleotide
  Target: LAMA2; (+) strand; PAM type: NRG; PAM sequence: TAG
gagaagaaacagttctgcta

SEQ ID NO: 133440 - DNA, 20 bp, Artificial Sequence
  Description of Artificial Sequence: Synthetic oligonucleotide
  Target: LAMA2; (+) strand; PAM type: NRG; PAM sequence: TAG
gctatagccatactgaattt

SEQ ID NO: 133441 - DNA, 20 bp, Artificial Sequence
  Description of Artificial Sequence: Synthetic oligonucleotide
  Target: LAMA2; (+) strand; PAM type: NRG; PAM sequence: AGG
ctatagccatactgaatttt

SEQ ID NO: 133442 - DNA, 20 bp, Artificial Sequence
  Description of Artificial Sequence: Synthetic oligonucleotide
  Target: LAMA2; (+) strand; PAM type: NRG; PAM sequence: TAG
actgaattttaggcaccttt

SEQ ID NO: 133443 - DNA, 20 bp, Artificial Sequence
  Description of Artificial Sequence: Synthetic oligonucleotide
  Target: LAMA2; (+) strand; PAM type: NRG; PAM sequence: TAG
gcaccttttagacatctaaa

SEQ ID NO: 133444 - DNA, 20 bp, Artificial Sequence
  Description of Artificial Sequence: Synthetic oligonucleotide
  Target: LAMA2; (+) strand; PAM type: NRG; PAM sequence: TGG
agaactattgatttaatatt

SEQ ID NO: 133445 - DNA, 20 bp, Artificial Sequence
  Description of Artificial Sequence: Synthetic oligonucleotide
  Target: LAMA2; (+) strand; PAM type: NRG; PAM sequence: AAG
gatttaatatttggatatgt

SEQ ID NO: 133446 - DNA, 20 bp, Artificial Sequence
  Description of Artificial Sequence: Synthetic oligonucleotide
  Target: LAMA2; (+) strand; PAM type: NRG; PAM sequence: TGG
catctgtatgccatctgttc

SEQ ID NO: 133447 - DNA, 20 bp, Artificial Sequence
  Description of Artificial Sequence: Synthetic oligonucleotide
  Target: LAMA2; (+) strand; PAM type: NRG; PAM sequence: CGG
tgttctggctatcttacatt

SEQ ID NO: 133448 - DNA, 20 bp, Artificial Sequence
  Description of Artificial Sequence: Synthetic oligonucleotide
  Target: LAMA2; (+) strand; PAM type: NRG; PAM sequence: TGG
atcctgtgtattttttacac

SEQ ID NO: 133449 - DNA, 20 bp, Artificial Sequence
  Description of Artificial Sequence: Synthetic oligonucleotide
  Target: LAMA2; (+) strand; PAM type: NRG; PAM sequence: TGG
gtgtattttttacactggcc

SEQ ID NO: 133450 - DNA, 20 bp, Artificial Sequence
  Description of Artificial Sequence: Synthetic oligonucleotide
  Target: LAMA2; (+) strand; PAM type: NRG; PAM sequence: AAG
ttttttacactggcctggaa

SEQ ID NO: 133451 - DNA, 20 bp, Artificial Sequence
  Description of Artificial Sequence: Synthetic oligonucleotide
  Target: LAMA2; (+) strand; PAM type: NRG; PAM sequence: TGG
ttacactggcctggaaaagc

SEQ ID NO: 133452 - DNA, 20 bp, Artificial Sequence
  Description of Artificial Sequence: Synthetic oligonucleotide
  Target: LAMA2; (+) strand; PAM type: NRG; PAM sequence: TAG
ctggaaaagctggcaaaacc

SEQ ID NO: 133453 - DNA, 20 bp, Artificial Sequence
  Description of Artificial Sequence: Synthetic oligonucleotide
  Target: LAMA2; (+) strand; PAM type: NRG; PAM sequence: CAG
cctctgcgtttataccattt

SEQ ID NO: 133454 - DNA, 20 bp, Artificial Sequence
  Description of Artificial Sequence: Synthetic oligonucleotide
  Target: LAMA2; (+) strand; PAM type: NRG; PAM sequence: CAG
gtttataccatttcagttga

SEQ ID NO: 133455 - DNA, 20 bp, Artificial Sequence
  Description of Artificial Sequence: Synthetic oligonucleotide
  Target: LAMA2; (+) strand; PAM type: NRG; PAM sequence: AGG
tttataccatttcagttgac

SEQ ID NO: 133456 - DNA, 20 bp, Artificial Sequence
  Description of Artificial Sequence: Synthetic oligonucleotide
  Target: LAMA2; (+) strand; PAM type: NRG; PAM sequence: AAG
cagttgacaggtctaatttt

SEQ ID NO: 133457 - DNA, 20 bp, Artificial Sequence
  Description of Artificial Sequence: Synthetic oligonucleotide
  Target: LAMA2; (+) strand; PAM type: NRG; PAM sequence: AAG
ttgattattcatttgtacac

SEQ ID NO: 133458 - DNA, 20 bp, Artificial Sequence
  Description of Artificial Sequence: Synthetic oligonucleotide
  Target: LAMA2; (+) strand; PAM type: NRG; PAM sequence: GAG
tttgtacacaagtatttgtt

SEQ ID NO: 133459 - DNA, 20 bp, Artificial Sequence
  Description of Artificial Sequence: Synthetic oligonucleotide
  Target: LAMA2; (+) strand; PAM type: NRG; PAM sequence: CAG
cacaagtatttgttgagtac

SEQ ID NO: 133460 - DNA, 20 bp, Artificial Sequence
  Description of Artificial Sequence: Synthetic oligonucleotide
  Target: LAMA2; (+) strand; PAM type: NRG; PAM sequence: TAG
tatttgttgagtaccagaaa

SEQ ID NO: 133461 - DNA, 20 bp, Artificial Sequence
  Description of Artificial Sequence: Synthetic oligonucleotide
  Target: LAMA2; (+) strand; PAM type: NRG; PAM sequence: TAG
tgagtaccagaaatagcatt

SEQ ID NO: 133462 - DNA, 20 bp, Artificial Sequence
  Description of Artificial Sequence: Synthetic oligonucleotide
  Target: LAMA2; (+) strand; PAM type: NRG; PAM sequence: AAG
aaatagcatttagtcatttc

SEQ ID NO: 133463 - DNA, 20 bp, Artificial Sequence
  Description of Artificial Sequence: Synthetic oligonucleotide
  Target: LAMA2; (+) strand; PAM type: NRG; PAM sequence: TAG
catttagtcatttcaagctt

SEQ ID NO: 133464 - DNA, 20 bp, Artificial Sequence
  Description of Artificial Sequence: Synthetic oligonucleotide
  Target: LAMA2; (+) strand; PAM type: NRG; PAM sequence: CAG
tttttcatcatcctattctc

SEQ ID NO: 133465 - DNA, 20 bp, Artificial Sequence
  Description of Artificial Sequence: Synthetic oligonucleotide
  Target: LAMA2; (+) strand; PAM type: NRG; PAM sequence: CAG
tcatcctattctccagattt

SEQ ID NO: 133466 - DNA, 20 bp, Artificial Sequence
  Description of Artificial Sequence: Synthetic oligonucleotide
  Target: LAMA2; (+) strand; PAM type: NRG; PAM sequence: CAG
tcctattctccagatttcag

SEQ ID NO: 133467 - DNA, 20 bp, Artificial Sequence
  Description of Artificial Sequence: Synthetic oligonucleotide
  Target: LAMA2; (+) strand; PAM type: NRG; PAM sequence: CAG
tctccagatttcagcagcat

SEQ ID NO: 133468 - DNA, 20 bp, Artificial Sequence
  Description of Artificial Sequence: Synthetic oligonucleotide
  Target: LAMA2; (+) strand; PAM type: NRG; PAM sequence: AAG
ccagatttcagcagcatcag

SEQ ID NO: 133469 - DNA, 20 bp, Artificial Sequence
  Description of Artificial Sequence: Synthetic oligonucleotide
  Target: LAMA2; (+) strand; PAM type: NRG; PAM sequence: CGG
agccatataaacactgcctt

SEQ ID NO: 133470 - DNA, 20 bp, Artificial Sequence
  Description of Artificial Sequence: Synthetic oligonucleotide
  Target: LAMA2; (+) strand; PAM type: NRG; PAM sequence: TGG
atataaacactgccttcgga

SEQ ID NO: 133471 - DNA, 20 bp, Artificial Sequence
  Description of Artificial Sequence: Synthetic oligonucleotide
  Target: LAMA2; (+) strand; PAM type: NRG; PAM sequence: TAG
cactgccttcggatggccct

SEQ ID NO: 133472 - DNA, 20 bp, Artificial Sequence
  Description of Artificial Sequence: Synthetic oligonucleotide
  Target: LAMA2; (+) strand; PAM type: NRG; PAM sequence: TGG
gccttcggatggcccttaga

SEQ ID NO: 133473 - DNA, 20 bp, Artificial Sequence
  Description of Artificial Sequence: Synthetic oligonucleotide
  Target: LAMA2; (+) strand; PAM type: NRG; PAM sequence: AAG
atggcccttagatggccacc

SEQ ID NO: 133474 - DNA, 20 bp, Artificial Sequence
  Description of Artificial Sequence: Synthetic oligonucleotide
  Target: LAMA2; (+) strand; PAM type: NRG; PAM sequence: TAG
agatggccaccaagatcccc

SEQ ID NO: 133475 - DNA, 20 bp, Artificial Sequence
  Description of Artificial Sequence: Synthetic oligonucleotide
  Target: LAMA2; (+) strand; PAM type: NRG; PAM sequence: AAG
agttacattttctgtgtaca

SEQ ID NO: 133476 - DNA, 20 bp, Artificial Sequence
  Description of Artificial Sequence: Synthetic oligonucleotide
  Target: LAMA2; (+) strand; PAM type: NRG; PAM sequence: CAG
tacattttctgtgtacaaag

SEQ ID NO: 133477 - DNA, 20 bp, Artificial Sequence
  Description of Artificial Sequence: Synthetic oligonucleotide
  Target: LAMA2; (+) strand; PAM type: NRG; PAM sequence: AAG
attttctgtgtacaaagcag

SEQ ID NO: 133478 - DNA, 20 bp, Artificial Sequence
  Description of Artificial Sequence: Synthetic oligonucleotide
  Target: LAMA2; (+) strand; PAM type: NRG; PAM sequence: AAG
tctgtgtacaaagcagaaga

SEQ ID NO: 133479 - DNA, 20 bp, Artificial Sequence
  Description of Artificial Sequence: Synthetic oligonucleotide
  Target: LAMA2; (+) strand; PAM type: NRG; PAM sequence: CAG
gatgtccttcattctgtaca

SEQ ID NO: 133480 - DNA, 20 bp, Artificial Sequence
  Description of Artificial Sequence: Synthetic oligonucleotide
  Target: LAMA2; (+) strand; PAM type: NRG; PAM sequence: TGG
gtacacagtgtgctacactg

SEQ ID NO: 133481 - DNA, 20 bp, Artificial Sequence
  Description of Artificial Sequence: Synthetic oligonucleotide
  Target: LAMA2; (+) strand; PAM type: NRG; PAM sequence: TAG
cagtgtgctacactgtggtt

SEQ ID NO: 133482 - DNA, 20 bp, Artificial Sequence
  Description of Artificial Sequence: Synthetic oligonucleotide
  Target: LAMA2; (+) strand; PAM type: NRG; PAM sequence: AAG
tgtggtttagtttattatta

SEQ ID NO: 133483 - DNA, 20 bp, Artificial Sequence
  Description of Artificial Sequence: Synthetic oligonucleotide
  Target: LAMA2; (+) strand; PAM type: NRG; PAM sequence: GAG
tggtttagtttattattaaa

SEQ ID NO: 133484 - DNA, 20 bp, Artificial Sequence
  Description of Artificial Sequence: Synthetic oligonucleotide
  Target: LAMA2; (+) strand; PAM type: NRG; PAM sequence: AAG
ttattaaagagcataattaa

SEQ ID NO: 133485 - DNA, 20 bp, Artificial Sequence
  Description of Artificial Sequence: Synthetic oligonucleotide
  Target: LAMA2; (+) strand; PAM type: NRG; PAM sequence: TAG
aaaagaaaaaatatgctatt

SEQ ID NO: 133486 - DNA, 20 bp, Artificial Sequence
  Description of Artificial Sequence: Synthetic oligonucleotide
  Target: LAMA2; (+) strand; PAM type: NRG; PAM sequence: AGG
aaagaaaaaatatgctattt

SEQ ID NO: 133487 - DNA, 20 bp, Artificial Sequence
  Description of Artificial Sequence: Synthetic oligonucleotide
  Target: LAMA2; (+) strand; PAM type: NRG; PAM sequence: TGG
aaaaatatgctatttaggtt

SEQ ID NO: 133488 - DNA, 20 bp, Artificial Sequence
  Description of Artificial Sequence: Synthetic oligonucleotide
  Target: LAMA2; (+) strand; PAM type: NRG; PAM sequence: AAG
aggtttggattactaatttt

SEQ ID NO: 133489 - DNA, 20 bp, Artificial Sequence
  Description of Artificial Sequence: Synthetic oligonucleotide
  Target: LAMA2; (+) strand; PAM type: NRG; PAM sequence: AAG
ctttatatcatatttctttg

SEQ ID NO: 133490 - DNA, 20 bp, Artificial Sequence
  Description of Artificial Sequence: Synthetic oligonucleotide
  Target: LAMA2; (+) strand; PAM type: NRG; PAM sequence: TAG
atatcatatttctttgaagc

SEQ ID NO: 133491 - DNA, 20 bp, Artificial Sequence
  Description of Artificial Sequence: Synthetic oligonucleotide
  Target: LAMA2; (+) strand; PAM type: NRG; PAM sequence: CAG
ctagacatgtattcaaacct

SEQ ID NO: 133492 - DNA, 20 bp, Artificial Sequence
  Description of Artificial Sequence: Synthetic oligonucleotide
  Target: LAMA2; (+) strand; PAM type: NRG; PAM sequence: TAG
acctcagctcccccaataat

SEQ ID NO: 133493 - DNA, 20 bp, Artificial Sequence
  Description of Artificial Sequence: Synthetic oligonucleotide
  Target: LAMA2; (+) strand; PAM type: NRG; PAM sequence: TGG
aataattagatatttgaaca

SEQ ID NO: 133494 - DNA, 20 bp, Artificial Sequence
  Description of Artificial Sequence: Synthetic oligonucleotide
  Target: LAMA2; (+) strand; PAM type: NRG; PAM sequence: TGG
aattagatatttgaacatgg

SEQ ID NO: 133495 - DNA, 20 bp, Artificial Sequence
  Description of Artificial Sequence: Synthetic oligonucleotide
  Target: LAMA2; (+) strand; PAM type: NRG; PAM sequence: TAG
atatttgaacatggtggaaa

SEQ ID NO: 133496 - DNA, 20 bp, Artificial Sequence
  Description of Artificial Sequence: Synthetic oligonucleotide
  Target: LAMA2; (+) strand; PAM type: NRG; PAM sequence: AAG
aacctatcatctttaaaaca

SEQ ID NO: 133497 - DNA, 20 bp, Artificial Sequence
  Description of Artificial Sequence: Synthetic oligonucleotide
  Target: LAMA2; (+) strand; PAM type: NRG; PAM sequence: AGG
acctatcatctttaaaacaa

SEQ ID NO: 133498 - DNA, 20 bp, Artificial Sequence
  Description of Artificial Sequence: Synthetic oligonucleotide
  Target: LAMA2; (+) strand; PAM type: NRG; PAM sequence: TAG
acaaaggatataaaatctaa

SEQ ID NO: 133499 - DNA, 20 bp, Artificial Sequence
  Description of Artificial Sequence: Synthetic oligonucleotide
  Target: LAMA2; (+) strand; PAM type: NRG; PAM sequence: GAG
aaaggatataaaatctaata

SEQ ID NO: 133500 - DNA, 20 bp, Artificial Sequence
  Description of Artificial Sequence: Synthetic oligonucleotide
  Target: LAMA2; (+) strand; PAM type: NRG; PAM sequence: TGG
ggatataaaatctaatagag

SEQ ID NO: 133501 - DNA, 20 bp, Artificial Sequence
  Description of Artificial Sequence: Synthetic oligonucleotide
  Target: LAMA2; (+) strand; PAM type: NRG; PAM sequence: AAG
tggataacatgattataata

SEQ ID NO: 133502 - DNA, 20 bp, Artificial Sequence
  Description of Artificial Sequence: Synthetic oligonucleotide
  Target: LAMA2; (+) strand; PAM type: NRG; PAM sequence: AAG
atgattataataaagatata

SEQ ID NO: 133503 - DNA, 20 bp, Artificial Sequence
  Description of Artificial Sequence: Synthetic oligonucleotide
  Target: LAMA2; (+) strand; PAM type: NRG; PAM sequence: AAG
taaagattataaaatattaa

SEQ ID NO: 133504 - DNA, 20 bp, Artificial Sequence
  Description of Artificial Sequence: Synthetic oligonucleotide
  Target: LAMA2; (+) strand; PAM type: NRG; PAM sequence: TAG
taaaagttcaatattgtcat

SEQ ID NO: 133505 - DNA, 20 bp, Artificial Sequence
  Description of Artificial Sequence: Synthetic oligonucleotide
  Target: LAMA2; (+) strand; PAM type: NRG; PAM sequence: GAG
attagactctaatcaataat

SEQ ID NO: 133506 - DNA, 20 bp, Artificial Sequence
  Description of Artificial Sequence: Synthetic oligonucleotide
  Target: LAMA2; (+) strand; PAM type: NRG; PAM sequence: AAG
acgtattatattttgacatg

SEQ ID NO: 133507 - DNA, 20 bp, Artificial Sequence
  Description of Artificial Sequence: Synthetic oligonucleotide
  Target: LAMA2; (+) strand; PAM type: NRG; PAM sequence: TAG
ttttgacatgaagaactatt

SEQ ID NO: 133508 - DNA, 20 bp, Artificial Sequence
  Description of Artificial Sequence: Synthetic oligonucleotide
  Target: LAMA2; (+) strand; PAM type: NRG; PAM sequence: TAG
catgaagaactatttagcct

SEQ ID NO: 133509 - DNA, 20 bp, Artificial Sequence
  Description of Artificial Sequence: Synthetic oligonucleotide
  Target: LAMA2; (+) strand; PAM type: NRG; PAM sequence: GAG
tgaagaactatttagcctta

SEQ ID NO: 133510 - DNA, 20 bp, Artificial Sequence
  Description of Artificial Sequence: Synthetic oligonucleotide
  Target: LAMA2; (+) strand; PAM type: NRG; PAM sequence: AAG
tagagctttgaaatataact

SEQ ID NO: 133511 - DNA, 20 bp, Artificial Sequence
  Description of Artificial Sequence: Synthetic oligonucleotide
  Target: LAMA2; (+) strand; PAM type: NRG; PAM sequence: TAG
atctattaaaataaattaaa

SEQ ID NO: 133512 - DNA, 20 bp, Artificial Sequence
  Description of Artificial Sequence: Synthetic oligonucleotide
  Target: LAMA2; (+) strand; PAM type: NRG; PAM sequence: AAG
attaaatagaatatattcca

SEQ ID NO: 133513 - DNA, 20 bp, Artificial Sequence
  Description of Artificial Sequence: Synthetic oligonucleotide
  Target: LAMA2; (+) strand; PAM type: NRG; PAM sequence: CAG
aatgttttcccatattaact

SEQ ID NO: 133514 - DNA, 20 bp, Artificial Sequence
  Description of Artificial Sequence: Synthetic oligonucleotide
  Target: LAMA2; (+) strand; PAM type: NRG; PAM sequence: TAG
aactgaatatatatcattta

SEQ ID NO: 133515 - DNA, 20 bp, Artificial Sequence
  Description of Artificial Sequence: Synthetic oligonucleotide
  Target: LAMA2; (+) strand; PAM type: NRG; PAM sequence: AAG
tatatatcatttatagatac

SEQ ID NO: 133516 - DNA, 20 bp, Artificial Sequence
  Description of Artificial Sequence: Synthetic oligonucleotide
  Target: LAMA2; (+) strand; PAM type: NRG; PAM sequence: TAG
atcatttatagatacaagca

SEQ ID NO: 133517 - DNA, 20 bp, Artificial Sequence
  Description of Artificial Sequence: Synthetic oligonucleotide
  Target: LAMA2; (+) strand; PAM type: NRG; PAM sequence: GAG
catttatagatacaagcata

SEQ ID NO: 133518 - DNA, 20 bp, Artificial Sequence
  Description of Artificial Sequence: Synthetic oligonucleotide
  Target: LAMA2; (+) strand; PAM type: NRG; PAM sequence: CAG
acaagcatagagtttaaatt

SEQ ID NO: 133519 - DNA, 20 bp, Artificial Sequence
  Description of Artificial Sequence: Synthetic oligonucleotide
  Target: LAMA2; (+) strand; PAM type: NRG; PAM sequence: AGG
caagcatagagtttaaattc

SEQ ID NO: 133520 - DNA, 20 bp, Artificial Sequence
  Description of Artificial Sequence: Synthetic oligonucleotide
  Target: LAMA2; (+) strand; PAM type: NRG; PAM sequence: TGG
taaattcaggtaatcttatt

SEQ ID NO: 133521 - DNA, 20 bp, Artificial Sequence
  Description of Artificial Sequence: Synthetic oligonucleotide
  Target: LAMA2; (+) strand; PAM type: NRG; PAM sequence: TAG
ttggatgtacaaaccgtgaa

SEQ ID NO: 133522 - DNA, 20 bp, Artificial Sequence
  Description of Artificial Sequence: Synthetic oligonucleotide
  Target: LAMA2; (+) strand; PAM type: NRG; PAM sequence: GAG
ggatgtacaaaccgtgaata

SEQ ID NO: 133523 - DNA, 20 bp, Artificial Sequence
  Description of Artificial Sequence: Synthetic oligonucleotide
  Target: LAMA2; (+) strand; PAM type: NRG; PAM sequence: AAG
aaaccgtgaatagagacatt

SEQ ID NO: 133524 - DNA, 20 bp, Artificial Sequence
  Description of Artificial Sequence: Synthetic oligonucleotide
  Target: LAMA2; (+) strand; PAM type: NRG; PAM sequence: AGG
aaccgtgaatagagacatta

SEQ ID NO: 133525 - DNA, 20 bp, Artificial Sequence
  Description of Artificial Sequence: Synthetic oligonucleotide
  Target: LAMA2; (+) strand; PAM type: NRG; PAM sequence: AAG
tgaatagagacattaaggaa

SEQ ID NO: 133526 - DNA, 20 bp, Artificial Sequence
  Description of Artificial Sequence: Synthetic oligonucleotide
  Target: LAMA2; (+) strand; PAM type: NRG; PAM sequence: TAG
atagagacattaaggaaaag

SEQ ID NO: 133527 - DNA, 20 bp, Artificial Sequence
  Description of Artificial Sequence: Synthetic oligonucleotide
  Target: LAMA2; (+) strand; PAM type: NRG; PAM sequence: CAG
aattaattatatcgaatctt

SEQ ID NO: 133528 - DNA, 20 bp, Artificial Sequence
  Description of Artificial Sequence: Synthetic oligonucleotide
  Target: LAMA2; (+) strand; PAM type: NRG; PAM sequence: GAG
ttaattatatcgaatcttca

SEQ ID NO: 133529 - DNA, 20 bp, Artificial Sequence
  Description of Artificial Sequence: Synthetic oligonucleotide
  Target: LAMA2; (+) strand; PAM type: NRG; PAM sequence: CAG
cctcttcctaaaaacacata

SEQ ID NO: 133530 - DNA, 20 bp, Artificial Sequence
  Description of Artificial Sequence: Synthetic oligonucleotide
  Target: LAMA2; (+) strand; PAM type: NRG; PAM sequence: AGG
ctcttcctaaaaacacatac

SEQ ID NO: 133531 - DNA, 20 bp, Artificial Sequence
  Description of Artificial Sequence: Synthetic oligonucleotide
  Target: LAMA2; (+) strand; PAM type: NRG; PAM sequence: TAG
cctaaaaacacatacaggtt

SEQ ID NO: 133532 - DNA, 20 bp, Artificial Sequence
  Description of Artificial Sequence: Synthetic oligonucleotide
  Target: LAMA2; (+) strand; PAM type: NRG; PAM sequence: AGG
ctaaaaacacatacaggttt

SEQ ID NO: 133533 - DNA, 20 bp, Artificial Sequence
  Description of Artificial Sequence: Synthetic oligonucleotide
  Target: LAMA2; (+) strand; PAM type: NRG; PAM sequence: AAG
catacaggtttaggctgatc

SEQ ID NO: 133534 - DNA, 20 bp, Artificial Sequence
  Description of Artificial Sequence: Synthetic oligonucleotide
  Target: LAMA2; (+) strand; PAM type: NRG; PAM sequence: GAG
aagatatcaatgtctgctct

SEQ ID NO: 133535 - DNA, 20 bp, Artificial Sequence
  Description of Artificial Sequence: Synthetic oligonucleotide
  Target: LAMA2; (+) strand; PAM type: NRG; PAM sequence: AAG
tgtctgctctgagatcatca

SEQ ID NO: 133536 - DNA, 20 bp, Artificial Sequence
  Description of Artificial Sequence: Synthetic oligonucleotide
  Target: LAMA2; (+) strand; PAM type: NRG; PAM sequence: AAG
caaagtaatgcgtccattct

SEQ ID NO: 133537 - DNA, 20 bp, Artificial Sequence
  Description of Artificial Sequence: Synthetic oligonucleotide
  Target: LAMA2; (+) strand; PAM type: NRG; PAM sequence: AAG
agtaatgcgtccattctaag

SEQ ID NO: 133538 - DNA, 20 bp, Artificial Sequence
  Description of Artificial Sequence: Synthetic oligonucleotide
  Target: LAMA2; (+) strand; PAM type: NRG; PAM sequence: TAG
gcgtccattctaagaagcac

SEQ ID NO: 133539 - DNA, 20 bp, Artificial Sequence
  Description of Artificial Sequence: Synthetic oligonucleotide
  Target: LAMA2; (+) strand; PAM type: NRG; PAM sequence: TGG
tccattctaagaagcactag

SEQ ID NO: 133540 - DNA, 20 bp, Artificial Sequence
  Description of Artificial Sequence: Synthetic oligonucleotide
  Target: LAMA2; (+) strand; PAM type: NRG; PAM sequence: CGG
actagtggcatatatgatca

SEQ ID NO: 133541 - DNA, 20 bp, Artificial Sequence
  Description of Artificial Sequence: Synthetic oligonucleotide
  Target: LAMA2; (+) strand; PAM type: NRG; PAM sequence: TAG
agtggcatatatgatcacgg

SEQ ID NO: 133542 - DNA, 20 bp, Artificial Sequence
  Description of Artificial Sequence: Synthetic oligonucleotide
  Target: LAMA2; (+) strand; PAM type: NRG; PAM sequence: AAG
ggcatatatgatcacggtag

SEQ ID NO: 133543 - DNA, 20 bp, Artificial Sequence
  Description of Artificial Sequence: Synthetic oligonucleotide
  Target: LAMA2; (+) strand; PAM type: NRG; PAM sequence: GAG
catatatgatcacggtagaa

SEQ ID NO: 133544 - DNA, 20 bp, Artificial Sequence
  Description of Artificial Sequence: Synthetic oligonucleotide
  Target: LAMA2; (+) strand; PAM type: NRG; PAM sequence: AAG
tatgatcacggtagaagagc

SEQ ID NO: 133545 - DNA, 20 bp, Artificial Sequence
  Description of Artificial Sequence: Synthetic oligonucleotide
  Target: LAMA2; (+) strand; PAM type: NRG; PAM sequence: AAG
tcacggtagaagagcaagaa

SEQ ID NO: 133546 - DNA, 20 bp, Artificial Sequence
  Description of Artificial Sequence: Synthetic oligonucleotide
  Target: LAMA2; (+) strand; PAM type: NRG; PAM sequence: AGG
cacggtagaagagcaagaaa

SEQ ID NO: 133547 - DNA, 20 bp, Artificial Sequence
  Description of Artificial Sequence: Synthetic oligonucleotide
  Target: LAMA2; (+) strand; PAM type: NRG; PAM sequence: GAG
cggtagaagagcaagaaaag

SEQ ID NO: 133548 - DNA, 20 bp, Artificial Sequence
  Description of Artificial Sequence: Synthetic oligonucleotide
  Target: LAMA2; (+) strand; PAM type: NRG; PAM sequence: TAG
caagaaaaggagccctcact

SEQ ID NO: 133549 - DNA, 20 bp, Artificial Sequence
  Description of Artificial Sequence: Synthetic oligonucleotide
  Target: LAMA2; (+) strand; PAM type: NRG; PAM sequence: AAG
gccctcacttagaaccccat

SEQ ID NO: 133550 - DNA, 20 bp, Artificial Sequence
  Description of Artificial Sequence: Synthetic oligonucleotide
  Target: LAMA2; (+) strand; PAM type: NRG; PAM sequence: CAG
tcacttagaaccccataaga

SEQ ID NO: 133551 - DNA, 20 bp, Artificial Sequence
  Description of Artificial Sequence: Synthetic oligonucleotide
  Target: LAMA2; (+) strand; PAM type: NRG; PAM sequence: AGG
cacttagaaccccataagac

SEQ ID NO: 133552 - DNA, 20 bp, Artificial Sequence
  Description of Artificial Sequence: Synthetic oligonucleotide
  Target: LAMA2; (+) strand; PAM type: NRG; PAM sequence: AAG
tagaaccccataagacagga

SEQ ID NO: 133553 - DNA, 20 bp, Artificial Sequence
  Description of Artificial Sequence: Synthetic oligonucleotide
  Target: LAMA2; (+) strand; PAM type: NRG; PAM sequence: CAG
cccataagacaggaaagata

SEQ ID NO: 133554 - DNA, 20 bp, Artificial Sequence
  Description of Artificial Sequence: Synthetic oligonucleotide
  Target: LAMA2; (+) strand; PAM type: NRG; PAM sequence: CAG
cagcatcaacctctcctctc

SEQ ID NO: 133555 - DNA, 20 bp, Artificial Sequence
  Description of Artificial Sequence: Synthetic oligonucleotide
  Target: LAMA2; (+) strand; PAM type: NRG; PAM sequence: TGG
tctccagtttatctgtgtta

SEQ ID NO: 133556 - DNA, 20 bp, Artificial Sequence
  Description of Artificial Sequence: Synthetic oligonucleotide
  Target: LAMA2; (+) strand; PAM type: NRG; PAM sequence: AAG
ttatctgtgttatggattgt

SEQ ID NO: 133557 - DNA, 20 bp, Artificial Sequence
  Description of Artificial Sequence: Synthetic oligonucleotide
  Target: LAMA2; (+) strand; PAM type: NRG; PAM sequence: GAG
atctgtgttatggattgtaa

SEQ ID NO: 133558 - DNA, 20 bp, Artificial Sequence
  Description of Artificial Sequence: Synthetic oligonucleotide
  Target: LAMA2; (+) strand; PAM type: NRG; PAM sequence: TAG
ttttgaaataatattttact

SEQ ID NO: 133559 - DNA, 20 bp, Artificial Sequence
  Description of Artificial Sequence: Synthetic oligonucleotide
  Target: LAMA2; (+) strand; PAM type: NRG; PAM sequence: AAG
aaataatattttacttagta

SEQ ID NO: 133560 - DNA, 20 bp, Artificial Sequence
  Description of Artificial Sequence: Synthetic oligonucleotide
  Target: LAMA2; (+) strand; PAM type: NRG; PAM sequence: AAG
cttagtaaagtaatatccac

SEQ ID NO: 133561 - DNA, 20 bp, Artificial Sequence
  Description of Artificial Sequence: Synthetic oligonucleotide
  Target: LAMA2; (+) strand; PAM type: NRG; PAM sequence: AAG
tgaaaaacattaaacatttt

SEQ ID NO: 133562 - DNA, 20 bp, Artificial Sequence
  Description of Artificial Sequence: Synthetic oligonucleotide
  Target: LAMA2; (+) strand; PAM type: NRG; PAM sequence: AAG
accatattcttgccaactct

SEQ ID NO: 133563 - DNA, 20 bp, Artificial Sequence
  Description of Artificial Sequence: Synthetic oligonucleotide
  Target: LAMA2; (+) strand; PAM type: NRG; PAM sequence: AGG
ccatattcttgccaactcta

SEQ ID NO: 133564 - DNA, 20 bp, Artificial Sequence
  Description of Artificial Sequence: Synthetic oligonucleotide
  Target: LAMA2; (+) strand; PAM type: NRG; PAM sequence: TAG
actctaaggtactctaacac

SEQ ID NO: 133565 - DNA, 20 bp, Artificial Sequence
  Description of Artificial Sequence: Synthetic oligonucleotide
  Target: LAMA2; (+) strand; PAM type: NRG; PAM sequence: TGG
acttgttatatttgttactt

SEQ ID NO: 133566 - DNA, 20 bp, Artificial Sequence
  Description of Artificial Sequence: Synthetic oligonucleotide
  Target: LAMA2; (+) strand; PAM type: NRG; PAM sequence: AAG
ttactttggtacgaatgtca

SEQ ID NO: 133567 - DNA, 20 bp, Artificial Sequence
  Description of Artificial Sequence: Synthetic oligonucleotide
  Target: LAMA2; (+) strand; PAM type: NRG; PAM sequence: AAG
tttggtacgaatgtcaaaga

SEQ ID NO: 133568 - DNA, 20 bp, Artificial Sequence
  Description of Artificial Sequence: Synthetic oligonucleotide
  Target: LAMA2; (+) strand; PAM type: NRG; PAM sequence: AGG
ttggtacgaatgtcaaagaa

SEQ ID NO: 133569 - DNA, 20 bp, Artificial Sequence
  Description of Artificial Sequence: Synthetic oligonucleotide
  Target: LAMA2; (+) strand; PAM type: NRG; PAM sequence: AAG
caaagaaaggtattacctgt

SEQ ID NO: 133570 - DNA, 20 bp, Artificial Sequence
  Description of Artificial Sequence: Synthetic oligonucleotide
  Target: LAMA2; (+) strand; PAM type: NRG; PAM sequence: TAG
aaggtattacctgtaagtat

SEQ ID NO: 133571 - DNA, 20 bp, Artificial Sequence
  Description of Artificial Sequence: Synthetic oligonucleotide
  Target: LAMA2; (+) strand; PAM type: NRG; PAM sequence: GAG
ggtattacctgtaagtatta

SEQ ID NO: 133572 - DNA, 20 bp, Artificial Sequence
  Description of Artificial Sequence: Synthetic oligonucleotide
  Target: LAMA2; (+) strand; PAM type: NRG; PAM sequence: AAG
ttcctcattgttcctaaaca

SEQ ID NO: 133573 - DNA, 20 bp, Artificial Sequence
  Description of Artificial Sequence: Synthetic oligonucleotide
  Target: LAMA2; (+) strand; PAM type: NRG; PAM sequence: TAG
acaaagaatttctttttatg

SEQ ID NO: 133574 - DNA, 20 bp, Artificial Sequence
  Description of Artificial Sequence: Synthetic oligonucleotide
  Target: LAMA2; (+) strand; PAM type: NRG; PAM sequence: TAG
tctttttatgtagtctgcac

SEQ ID NO: 133575 - DNA, 20 bp, Artificial Sequence
  Description of Artificial Sequence: Synthetic oligonucleotide
  Target: LAMA2; (+) strand; PAM type: NRG; PAM sequence: AGG
ctttttatgtagtctgcact

SEQ ID NO: 133576 - DNA, 20 bp, Artificial Sequence
  Description of Artificial Sequence: Synthetic oligonucleotide
  Target: LAMA2; (+) strand; PAM type: NRG; PAM sequence: TGG
atgtagtctgcactaggaat

SEQ ID NO: 133577 - DNA, 20 bp, Artificial Sequence
  Description of Artificial Sequence: Synthetic oligonucleotide
  Target: LAMA2; (+) strand; PAM type: NRG; PAM sequence: CAG
gaaatgatgcacataaaata

SEQ ID NO: 133578 - DNA, 20 bp, Artificial Sequence
  Description of Artificial Sequence: Synthetic oligonucleotide
  Target: LAMA2; (+) strand; PAM type: NRG; PAM sequence: GAG
aatacagctttttaatctgt

SEQ ID NO: 133579 - DNA, 20 bp, Artificial Sequence
  Description of Artificial Sequence: Synthetic oligonucleotide
  Target: LAMA2; (+) strand; PAM type: NRG; PAM sequence: TAG
gtgagattgtttatgcatct

SEQ ID NO: 133580 - DNA, 20 bp, Artificial Sequence
  Description of Artificial Sequence: Synthetic oligonucleotide
  Target: LAMA2; (+) strand; PAM type: NRG; PAM sequence: AGG
tgagattgtttatgcatctt

SEQ ID NO: 133581 - DNA, 20 bp, Artificial Sequence
  Description of Artificial Sequence: Synthetic oligonucleotide
  Target: LAMA2; (+) strand; PAM type: NRG; PAM sequence: TAG
ttatgcatcttaggtttgct

SEQ ID NO: 133582 - DNA, 20 bp, Artificial Sequence
  Description of Artificial Sequence: Synthetic oligonucleotide
  Target: LAMA2; (+) strand; PAM type: NRG; PAM sequence: TGG
atttgtattttgaactcttc

SEQ ID NO: 133583 - DNA, 20 bp, Artificial Sequence
  Description of Artificial Sequence: Synthetic oligonucleotide
  Target: LAMA2; (+) strand; PAM type: NRG; PAM sequence: TAG
actcttctggcttttaactg

SEQ ID NO: 133584 - DNA, 20 bp, Artificial Sequence
  Description of Artificial Sequence: Synthetic oligonucleotide
  Target: LAMA2; (+) strand; PAM type: NRG; PAM sequence: TGG
cttctggcttttaactgtag

SEQ ID NO: 133585 - DNA, 20 bp, Artificial Sequence
  Description of Artificial Sequence: Synthetic oligonucleotide
  Target: LAMA2; (+) strand; PAM type: NRG; PAM sequence: TGG
ttttaactgtagtggaaatt

SEQ ID NO: 133586 - DNA, 20 bp, Artificial Sequence
  Description of Artificial Sequence: Synthetic oligonucleotide
  Target: LAMA2; (+) strand; PAM type: NRG; PAM sequence: AAG
tgtagtggaaatttggattg

SEQ ID NO: 133587 - DNA, 20 bp, Artificial Sequence
  Description of Artificial Sequence: Synthetic oligonucleotide
  Target: LAMA2; (+) strand; PAM type: NRG; PAM sequence: TGG
gaaatttggattgaagacaa

SEQ ID NO: 133588 - DNA, 20 bp, Artificial Sequence
  Description of Artificial Sequence: Synthetic oligonucleotide
  Target: LAMA2; (+) strand; PAM type: NRG; PAM sequence: GAG
ttgaagacaatggaaaccgt

SEQ ID NO: 133589 - DNA, 20 bp, Artificial Sequence
  Description of Artificial Sequence: Synthetic oligonucleotide
  Target: LAMA2; (+) strand; PAM type: NRG; PAM sequence: AGG
tgaagacaatggaaaccgtg

SEQ ID NO: 133590 - DNA, 20 bp, Artificial Sequence
  Description of Artificial Sequence: Synthetic oligonucleotide
  Target: LAMA2; (+) strand; PAM type: NRG; PAM sequence: GAG
atataaacttgcatccaacc

SEQ ID NO: 133591 - DNA, 20 bp, Artificial Sequence
  Description of Artificial Sequence: Synthetic oligonucleotide
  Target: LAMA2; (+) strand; PAM type: NRG; PAM sequence: CAG
actcttatctgcacttcaat

SEQ ID NO: 133592 - DNA, 20 bp, Artificial Sequence
  Description of Artificial Sequence: Synthetic oligonucleotide
  Target: LAMA2; (+) strand; PAM type: NRG; PAM sequence: CAG
cttatctgcacttcaatcag

SEQ ID NO: 133593 - DNA, 20 bp, Artificial Sequence
  Description of Artificial Sequence: Synthetic oligonucleotide
  Target: LAMA2; (+) strand; PAM type: NRG; PAM sequence: AGG
ttatctgcacttcaatcagc

SEQ ID NO: 133594 - DNA, 20 bp, Artificial Sequence
  Description of Artificial Sequence: Synthetic oligonucleotide
  Target: LAMA2; (+) strand; PAM type: NRG; PAM sequence: GAG
atctgcacttcaatcagcag

SEQ ID NO: 133595 - DNA, 20 bp, Artificial Sequence
  Description of Artificial Sequence: Synthetic oligonucleotide
  Target: LAMA2; (+) strand; PAM type: NRG; PAM sequence: AGG
tctgcacttcaatcagcagg

SEQ ID NO: 133596 - DNA, 20 bp, Artificial Sequence
  Description of Artificial Sequence: Synthetic oligonucleotide
  Target: LAMA2; (+) strand; PAM type: NRG; PAM sequence: CAG
atcagcaggaggttcttttt

SEQ ID NO: 133597 - DNA, 20 bp, Artificial Sequence
  Description of Artificial Sequence: Synthetic oligonucleotide
  Target: LAMA2; (+) strand; PAM type: NRG; PAM sequence: TAG
aggttctttttcagtttgtt

SEQ ID NO: 133598 - DNA, 20 bp, Artificial Sequence
  Description of Artificial Sequence: Synthetic oligonucleotide
  Target: LAMA2; (+) strand; PAM type: NRG; PAM sequence: AAG
tttttcagtttgtttagaaa

SEQ ID NO: 133599 - DNA, 20 bp, Artificial Sequence
  Description of Artificial Sequence: Synthetic oligonucleotide
  Target: LAMA2; (+) strand; PAM type: NRG; PAM sequence: TAG
ttcagtttgtttagaaaaag

SEQ ID NO: 133600 - DNA, 20 bp, Artificial Sequence
  Description of Artificial Sequence: Synthetic oligonucleotide
  Target: LAMA2; (+) strand; PAM type: NRG; PAM sequence: AGG
tcagtttgtttagaaaaagt

SEQ ID NO: 133601 - DNA, 20 bp, Artificial Sequence
  Description of Artificial Sequence: Synthetic oligonucleotide
  Target: LAMA2; (+) strand; PAM type: NRG; PAM sequence: GGG
cagtttgtttagaaaaagta

SEQ ID NO: 133602 - DNA, 20 bp, Artificial Sequence
  Description of Artificial Sequence: Synthetic oligonucleotide
  Target: LAMA2; (+) strand; PAM type: NRG; PAM sequence: TGG
agtagggcctgtcatctgca

SEQ ID NO: 133603 - DNA, 20 bp, Artificial Sequence
  Description of Artificial Sequence: Synthetic oligonucleotide
  Target: LAMA2; (+) strand; PAM type: NRG; PAM sequence: AAG
catggcatacaatctttaca

SEQ ID NO: 133604 - DNA, 20 bp, Artificial Sequence
  Description of Artificial Sequence: Synthetic oligonucleotide
  Target: LAMA2; (+) strand; PAM type: NRG; PAM sequence: GAG
ccctttgtgttttaactact

SEQ ID NO: 133605 - DNA, 20 bp, Artificial Sequence
  Description of Artificial Sequence: Synthetic oligonucleotide
  Target: LAMA2; (+) strand; PAM type: NRG; PAM sequence: CAG
gttttaactactgagtgctg

SEQ ID NO: 133606 - DNA, 20 bp, Artificial Sequence
  Description of Artificial Sequence: Synthetic oligonucleotide
  Target: LAMA2; (+) strand; PAM type: NRG; PAM sequence: CAG
acttctgtctaactgcaaaa

SEQ ID NO: 133607 - DNA, 20 bp, Artificial Sequence
  Description of Artificial Sequence: Synthetic oligonucleotide
  Target: LAMA2; (+) strand; PAM type: NRG; PAM sequence: AAG
gtctaactgcaaaacagttt

SEQ ID NO: 133608 - DNA, 20 bp, Artificial Sequence
  Description of Artificial Sequence: Synthetic oligonucleotide
  Target: LAMA2; (+) strand; PAM type: NRG; PAM sequence: AGG
tctaactgcaaaacagttta

SEQ ID NO: 133609 - DNA, 20 bp, Artificial Sequence
  Description of Artificial Sequence: Synthetic oligonucleotide
  Target: LAMA2; (+) strand; PAM type: NRG; PAM sequence: AAG
atcatctatgacaatgttaa

SEQ ID NO: 133610 - DNA, 20 bp, Artificial Sequence
  Description of Artificial Sequence: Synthetic oligonucleotide
  Target: LAMA2; (+) strand; PAM type: NRG; PAM sequence: AAG
ttaaaagtaaaacccaatca

SEQ ID NO: 133611 - DNA, 20 bp, Artificial Sequence
  Description of Artificial Sequence: Synthetic oligonucleotide
  Target: LAMA2; (+) strand; PAM type: NRG; PAM sequence: TAG
gtttatattatcatgcataa

SEQ ID NO: 133612 - DNA, 20 bp, Artificial Sequence
  Description of Artificial Sequence: Synthetic oligonucleotide
  Target: LAMA2; (+) strand; PAM type: NRG; PAM sequence: AAG
attatcatgcataatagacc

SEQ ID NO: 133613 - DNA, 20 bp, Artificial Sequence
  Description of Artificial Sequence: Synthetic oligonucleotide
  Target: LAMA2; (+) strand; PAM type: NRG; PAM sequence: CGG
accattatctgaataccaaa

SEQ ID NO: 133614 - DNA, 20 bp, Artificial Sequence
  Description of Artificial Sequence: Synthetic oligonucleotide
  Target: LAMA2; (+) strand; PAM type: NRG; PAM sequence: GGG
ccattatctgaataccaaac

SEQ ID NO: 133615 - DNA, 20 bp, Artificial Sequence
  Description of Artificial Sequence: Synthetic oligonucleotide
  Target: LAMA2; (+) strand; PAM type: NRG; PAM sequence: GGG
cattatctgaataccaaacg

SEQ ID NO: 133616 - DNA, 20 bp, Artificial Sequence
  Description of Artificial Sequence: Synthetic oligonucleotide
  Target: LAMA2; (+) strand; PAM type: NRG; PAM sequence: CAG
ccaaataattctctatgatt

SEQ ID NO: 133617 - DNA, 20 bp, Artificial Sequence
  Description of Artificial Sequence: Synthetic oligonucleotide
  Target: LAMA2; (+) strand; PAM type: NRG; PAM sequence: GAG
taattctctatgattcagat

SEQ ID NO: 133618 - DNA, 20 bp, Artificial Sequence
  Description of Artificial Sequence: Synthetic oligonucleotide
  Target: LAMA2; (+) strand; PAM type: NRG; PAM sequence: AAG
atgattcagatgagacataa

SEQ ID NO: 133619 - DNA, 20 bp, Artificial Sequence
  Description of Artificial Sequence: Synthetic oligonucleotide
  Target: LAMA2; (+) strand; PAM type: NRG; PAM sequence: AAG
cataaaagtgctttaaaaac

SEQ ID NO: 133620 - DNA, 20 bp, Artificial Sequence
  Description of Artificial Sequence: Synthetic oligonucleotide
  Target: LAMA2; (+) strand; PAM type: NRG; PAM sequence: TGG
gtgctttaaaaacaagtatg

SEQ ID NO: 133621 - DNA, 20 bp, Artificial Sequence
  Description of Artificial Sequence: Synthetic oligonucleotide
  Target: LAMA2; (+) strand; PAM type: NRG; PAM sequence: TGG
gtatgtggtaaaaatcactt

SEQ ID NO: 133622 - DNA, 20 bp, Artificial Sequence
  Description of Artificial Sequence: Synthetic oligonucleotide
  Target: LAMA2; (+) strand; PAM type: NRG; PAM sequence: TGG
aaatcactttggaaaacctt

SEQ ID NO: 133623 - DNA, 20 bp, Artificial Sequence
  Description of Artificial Sequence: Synthetic oligonucleotide
  Target: LAMA2; (+) strand; PAM type: NRG; PAM sequence: AAG
gatgttgcaattcaacttgt

SEQ ID NO: 133624 - DNA, 20 bp, Artificial Sequence
  Description of Artificial Sequence: Synthetic oligonucleotide
  Target: LAMA2; (+) strand; PAM type: NRG; PAM sequence: AAG
caacttgtaagcatatactc

SEQ ID NO: 133625 - DNA, 20 bp, Artificial Sequence
  Description of Artificial Sequence: Synthetic oligonucleotide
  Target: LAMA2; (+) strand; PAM type: NRG; PAM sequence: GAG
acttgtaagcatatactcaa

SEQ ID NO: 133626 - DNA, 20 bp, Artificial Sequence
  Description of Artificial Sequence: Synthetic oligonucleotide
  Target: LAMA2; (+) strand; PAM type: NRG; PAM sequence: TAG
aagcatatactcaagagaaa

SEQ ID NO: 133627 - DNA, 20 bp, Artificial Sequence
  Description of Artificial Sequence: Synthetic oligonucleotide
  Target: LAMA2; (+) strand; PAM type: NRG; PAM sequence: AGG
agcatatactcaagagaaat

SEQ ID NO: 133628 - DNA, 20 bp, Artificial Sequence
  Description of Artificial Sequence: Synthetic oligonucleotide
  Target: LAMA2; (+) strand; PAM type: NRG; PAM sequence: AAG
aataggtgcacatgtgtaca

SEQ ID NO: 133629 - DNA, 20 bp, Artificial Sequence
  Description of Artificial Sequence: Synthetic oligonucleotide
  Target: LAMA2; (+) strand; PAM type: NRG; PAM sequence: AAG
atgtgtacaaagacatattc

SEQ ID NO: 133630 - DNA, 20 bp, Artificial Sequence
  Description of Artificial Sequence: Synthetic oligonucleotide
  Target: LAMA2; (+) strand; PAM type: NRG; PAM sequence: CAG
atattcaagaatgctcataa

SEQ ID NO: 133631 - DNA, 20 bp, Artificial Sequence
  Description of Artificial Sequence: Synthetic oligonucleotide
  Target: LAMA2; (+) strand; PAM type: NRG; PAM sequence: AAG
agcactattaataatatcta

SEQ ID NO: 133632 - DNA, 20 bp, Artificial Sequence
  Description of Artificial Sequence: Synthetic oligonucleotide
  Target: LAMA2; (+) strand; PAM type: NRG; PAM sequence: TGG
ctattaataatatctaaagc

SEQ ID NO: 133633 - DNA, 20 bp, Artificial Sequence
  Description of Artificial Sequence: Synthetic oligonucleotide
  Target: LAMA2; (+) strand; PAM type: NRG; PAM sequence: TGG
taaccaaatgacatcgctat

SEQ ID NO: 133634 - DNA, 20 bp, Artificial Sequence
  Description of Artificial Sequence: Synthetic oligonucleotide
  Target: LAMA2; (+) strand; PAM type: NRG; PAM sequence: TAG
tggcatgaataaatatttca

SEQ ID NO: 133635 - DNA, 20 bp, Artificial Sequence
  Description of Artificial Sequence: Synthetic oligonucleotide
  Target: LAMA2; (+) strand; PAM type: NRG; PAM sequence: TAG
atttcatagtatcataatat

SEQ ID NO: 133636 - DNA, 20 bp, Artificial Sequence
  Description of Artificial Sequence: Synthetic oligonucleotide
  Target: LAMA2; (+) strand; PAM type: NRG; PAM sequence: AGG
tttcatagtatcataatatt

SEQ ID NO: 133637 - DNA, 20 bp, Artificial Sequence
  Description of Artificial Sequence: Synthetic oligonucleotide
  Target: LAMA2; (+) strand; PAM type: NRG; PAM sequence: AAG
ataatattaggaatactata

SEQ ID NO: 133638 - DNA, 20 bp, Artificial Sequence
  Description of Artificial Sequence: Synthetic oligonucleotide
  Target: LAMA2; (+) strand; PAM type: NRG; PAM sequence: CAG
atattaggaatactataaag

SEQ ID NO: 133639 - DNA, 20 bp, Artificial Sequence
  Description of Artificial Sequence: Synthetic oligonucleotide
  Target: LAMA2; (+) strand; PAM type: NRG; PAM sequence: CAG
caaacaactgttatacccaa

SEQ ID NO: 133640 - DNA, 20 bp, Artificial Sequence
  Description of Artificial Sequence: Synthetic oligonucleotide
  Target: LAMA2; (+) strand; PAM type: NRG; PAM sequence: CGG
aactgttatacccaacagca

SEQ ID NO: 133641 - DNA, 20 bp, Artificial Sequence
  Description of Artificial Sequence: Synthetic oligonucleotide
  Target: LAMA2; (+) strand; PAM type: NRG; PAM sequence: GGG
actgttatacccaacagcac

SEQ ID NO: 133642 - DNA, 20 bp, Artificial Sequence
  Description of Artificial Sequence: Synthetic oligonucleotide
  Target: LAMA2; (+) strand; PAM type: NRG; PAM sequence: AAG
gaacccttaaacataatctt

SEQ ID NO: 133643 - DNA, 20 bp, Artificial Sequence
  Description of Artificial Sequence: Synthetic oligonucleotide
  Target: LAMA2; (+) strand; PAM type: NRG; PAM sequence: AGG
aacccttaaacataatctta

SEQ ID NO: 133644 - DNA, 20 bp, Artificial Sequence
  Description of Artificial Sequence: Synthetic oligonucleotide
  Target: LAMA2; (+) strand; PAM type: NRG; PAM sequence: AAG
ttaaacataatcttaaggaa

SEQ ID NO: 133645 - DNA, 20 bp, Artificial Sequence
  Description of Artificial Sequence: Synthetic oligonucleotide
  Target: LAMA2; (+) strand; PAM type: NRG; PAM sequence: TAG
taatcttaaggaaaagaaat

SEQ ID NO: 133646 - DNA, 20 bp, Artificial Sequence
  Description of Artificial Sequence: Synthetic oligonucleotide
  Target: LAMA2; (+) strand; PAM type: NRG; PAM sequence: AAG
ggaaaagaaattagacataa

SEQ ID NO: 133647 - DNA, 20 bp, Artificial Sequence
  Description of Artificial Sequence: Synthetic oligonucleotide
  Target: LAMA2; (+) strand; PAM type: NRG; PAM sequence: GAG
aaaagaaattagacataaaa

SEQ ID NO: 133648 - DNA, 20 bp, Artificial Sequence
  Description of Artificial Sequence: Synthetic oligonucleotide
  Target: LAMA2; (+) strand; PAM type: NRG; PAM sequence: CAG
attagacataaaagagtata

SEQ ID NO: 133649 - DNA, 20 bp, Artificial Sequence
  Description of Artificial Sequence: Synthetic oligonucleotide
  Target: LAMA2; (+) strand; PAM type: NRG; PAM sequence: TAG
attcatataacattcaaaaa

SEQ ID NO: 133650 - DNA, 20 bp, Artificial Sequence
  Description of Artificial Sequence: Synthetic oligonucleotide
  Target: LAMA2; (+) strand; PAM type: NRG; PAM sequence: TAG
atgcaattcaactttcatgc

SEQ ID NO: 133651 - DNA, 20 bp, Artificial Sequence
  Description of Artificial Sequence: Synthetic oligonucleotide
  Target: LAMA2; (+) strand; PAM type: NRG; PAM sequence: TAG
aattcaactttcatgctaga

SEQ ID NO: 133652 - DNA, 20 bp, Artificial Sequence
  Description of Artificial Sequence: Synthetic oligonucleotide
  Target: LAMA2; (+) strand; PAM type: NRG; PAM sequence: AAG
tcaactttcatgctagatag

SEQ ID NO: 133653 - DNA, 20 bp, Artificial Sequence
  Description of Artificial Sequence: Synthetic oligonucleotide
  Target: LAMA2; (+) strand; PAM type: NRG; PAM sequence: CAG
ctttcatgctagatagaagt

SEQ ID NO: 133654 - DNA, 20 bp, Artificial Sequence
  Description of Artificial Sequence: Synthetic oligonucleotide
  Target: LAMA2; (+) strand; PAM type: NRG; PAM sequence: AGG
tttcatgctagatagaagtc

SEQ ID NO: 133655 - DNA, 20 bp, Artificial Sequence
  Description of Artificial Sequence: Synthetic oligonucleotide
  Target: LAMA2; (+) strand; PAM type: NRG; PAM sequence: TAG
ctagatagaagtcaggatac

SEQ ID NO: 133656 - DNA, 20 bp, Artificial Sequence
  Description of Artificial Sequence: Synthetic oligonucleotide
  Target: LAMA2; (+) strand; PAM type: NRG; PAM sequence: TGG
gtcaggatactagttatctt

SEQ ID NO: 133657 - DNA, 20 bp, Artificial Sequence
  Description of Artificial Sequence: Synthetic oligonucleotide
  Target: LAMA2; (+) strand; PAM type: NRG; PAM sequence: AAG
ggatactagttatctttgga

SEQ ID NO: 133658 - DNA, 20 bp, Artificial Sequence
  Description of Artificial Sequence: Synthetic oligonucleotide
  Target: LAMA2; (+) strand; PAM type: NRG; PAM sequence: AGG
gatactagttatctttggaa

SEQ ID NO: 133659 - DNA, 20 bp, Artificial Sequence
  Description of Artificial Sequence: Synthetic oligonucleotide
  Target: LAMA2; (+) strand; PAM type: NRG; PAM sequence: GGG
atactagttatctttggaaa

SEQ ID NO: 133660 - DNA, 20 bp, Artificial Sequence
  Description of Artificial Sequence: Synthetic oligonucleotide
  Target: LAMA2; (+) strand; PAM type: NRG; PAM sequence: TAG
ctagttatctttggaaaggg

SEQ ID NO: 133661 - DNA, 20 bp, Artificial Sequence
  Description of Artificial Sequence: Synthetic oligonucleotide
  Target: LAMA2; (+) strand; PAM type: NRG; PAM sequence: GAG
agttatctttggaaagggta

SEQ ID NO: 133662 - DNA, 20 bp, Artificial Sequence
  Description of Artificial Sequence: Synthetic oligonucleotide
  Target: LAMA2; (+) strand; PAM type: NRG; PAM sequence: TAG
atctttggaaagggtagaga

SEQ ID NO: 133663 - DNA, 20 bp, Artificial Sequence
  Description of Artificial Sequence: Synthetic oligonucleotide
  Target: LAMA2; (+) strand; PAM type: NRG; PAM sequence: AGG
tctttggaaagggtagagat

SEQ ID NO: 133664 - DNA, 20 bp, Artificial Sequence
  Description of Artificial Sequence: Synthetic oligonucleotide
  Target: LAMA2; (+) strand; PAM type: NRG; PAM sequence: GGG
ctttggaaagggtagagata

SEQ ID NO: 133665 - DNA, 20 bp, Artificial Sequence
  Description of Artificial Sequence: Synthetic oligonucleotide
  Target: LAMA2; (+) strand; PAM type: NRG; PAM sequence: GAG
ttggaaagggtagagatagg

SEQ ID NO: 133666 - DNA, 20 bp, Artificial Sequence
  Description of Artificial Sequence: Synthetic oligonucleotide
  Target: LAMA2; (+) strand; PAM type: NRG; PAM sequence: AGG
tggaaagggtagagataggg

SEQ ID NO: 133667 - DNA, 20 bp, Artificial Sequence
  Description of Artificial Sequence: Synthetic oligonucleotide
  Target: LAMA2; (+) strand; PAM type: NRG; PAM sequence: TAG
gtagagatagggaggattct

SEQ ID NO: 133668 - DNA, 20 bp, Artificial Sequence
  Description of Artificial Sequence: Synthetic oligonucleotide
  Target: LAMA2; (+) strand; PAM type: NRG; PAM sequence: TGG
gatagggaggattcttagta

SEQ ID NO: 133669 - DNA, 20 bp, Artificial Sequence
  Description of Artificial Sequence: Synthetic oligonucleotide
  Target: LAMA2; (+) strand; PAM type: NRG; PAM sequence: GGG
atagggaggattcttagtat

SEQ ID NO: 133670 - DNA, 20 bp, Artificial Sequence
  Description of Artificial Sequence: Synthetic oligonucleotide
  Target: LAMA2; (+) strand; PAM type: NRG; PAM sequence: TGG
ttctcttttgatctatatga

SEQ ID NO: 133671 - DNA, 20 bp, Artificial Sequence
  Description of Artificial Sequence: Synthetic oligonucleotide
  Target: LAMA2; (+) strand; PAM type: NRG; PAM sequence: TAG
tgatctatatgatggttaca

SEQ ID NO: 133672 - DNA, 20 bp, Artificial Sequence
  Description of Artificial Sequence: Synthetic oligonucleotide
  Target: LAMA2; (+) strand; PAM type: NRG; PAM sequence: AGG
gatctatatgatggttacat

SEQ ID NO: 133673 - DNA, 20 bp, Artificial Sequence
  Description of Artificial Sequence: Synthetic oligonucleotide
  Target: LAMA2; (+) strand; PAM type: NRG; PAM sequence: TAG
gttacataggtttttatatg

SEQ ID NO: 133674 - DNA, 20 bp, Artificial Sequence
  Description of Artificial Sequence: Synthetic oligonucleotide
  Target: LAMA2; (+) strand; PAM type: NRG; PAM sequence: AGG
ttacataggtttttatatgt

SEQ ID NO: 133675 - DNA, 20 bp, Artificial Sequence
  Description of Artificial Sequence: Synthetic oligonucleotide
  Target: LAMA2; (+) strand; PAM type: NRG; PAM sequence: GAG
tgataatatgatcatacatt

SEQ ID NO: 133676 - DNA, 20 bp, Artificial Sequence
  Description of Artificial Sequence: Synthetic oligonucleotide
  Target: LAMA2; (+) strand; PAM type: NRG; PAM sequence: AGG
gataatatgatcatacattg

SEQ ID NO: 133677 - DNA, 20 bp, Artificial Sequence
  Description of Artificial Sequence: Synthetic oligonucleotide
  Target: LAMA2; (+) strand; PAM type: NRG; PAM sequence: AAG
aggtttttatttattacaat

SEQ ID NO: 133678 - DNA, 20 bp, Artificial Sequence
  Description of Artificial Sequence: Synthetic oligonucleotide
  Target: LAMA2; (+) strand; PAM type: NRG; PAM sequence: GAG
tttatttattacaataagtt

SEQ ID NO: 133679 - DNA, 20 bp, Artificial Sequence
  Description of Artificial Sequence: Synthetic oligonucleotide
  Target: LAMA2; (+) strand; PAM type: NRG; PAM sequence: AAG
caataagttgagattattca

SEQ ID NO: 133680 - DNA, 20 bp, Artificial Sequence
  Description of Artificial Sequence: Synthetic oligonucleotide
  Target: LAMA2; (+) strand; PAM type: NRG; PAM sequence: AGG
aataagttgagattattcaa

SEQ ID NO: 133681 - DNA, 20 bp, Artificial Sequence
  Description of Artificial Sequence: Synthetic oligonucleotide
  Target: LAMA2; (+) strand; PAM type: NRG; PAM sequence: AAG
accaatttttaaaatgttct

SEQ ID NO: 133682 - DNA, 20 bp, Artificial Sequence
  Description of Artificial Sequence: Synthetic oligonucleotide
  Target: LAMA2; (+) strand; PAM type: NRG; PAM sequence: GAG
caatttttaaaatgttctaa

SEQ ID NO: 133683 - DNA, 20 bp, Artificial Sequence
  Description of Artificial Sequence: Synthetic oligonucleotide
  Target: LAMA2; (+) strand; PAM type: NRG; PAM sequence: AAG
ttttaaaatgttctaagaga

SEQ ID NO: 133684 - DNA, 20 bp, Artificial Sequence
  Description of Artificial Sequence: Synthetic oligonucleotide
  Target: LAMA2; (+) strand; PAM type: NRG; PAM sequence: AAG
aaatgttctaagagaaagaa

SEQ ID NO: 133685 - DNA, 20 bp, Artificial Sequence
  Description of Artificial Sequence: Synthetic oligonucleotide
  Target: LAMA2; (+) strand; PAM type: NRG; PAM sequence: TAG
acaccccatttccttgtcac

SEQ ID NO: 133686 - DNA, 20 bp, Artificial Sequence
  Description of Artificial Sequence: Synthetic oligonucleotide
  Target: LAMA2; (+) strand; PAM type: NRG; PAM sequence: GAG
accccatttccttgtcacta

SEQ ID NO: 133687 - DNA, 20 bp, Artificial Sequence
  Description of Artificial Sequence: Synthetic oligonucleotide
  Target: LAMA2; (+) strand; PAM type: NRG; PAM sequence: CAG
ttatgttcaaatcgtatata

SEQ ID NO: 133688 - DNA, 20 bp, Artificial Sequence
  Description of Artificial Sequence: Synthetic oligonucleotide
  Target: LAMA2; (+) strand; PAM type: NRG; PAM sequence: AAG
gtatctaaaatatgctgaat

SEQ ID NO: 133689 - DNA, 20 bp, Artificial Sequence
  Description of Artificial Sequence: Synthetic oligonucleotide
  Target: LAMA2; (+) strand; PAM type: NRG; PAM sequence: TAG
agcaaatcaacaactacatc

SEQ ID NO: 133690 - DNA, 20 bp, Artificial Sequence
  Description of Artificial Sequence: Synthetic oligonucleotide
  Target: LAMA2; (+) strand; PAM type: NRG; PAM sequence: CAG
tagacttctgcatcgcaaac

SEQ ID NO: 133691 - DNA, 20 bp, Artificial Sequence
  Description of Artificial Sequence: Synthetic oligonucleotide
  Target: LAMA2; (+) strand; PAM type: NRG; PAM sequence: AAG
tgcattttatctcacactta

SEQ ID NO: 133692 - DNA, 20 bp, Artificial Sequence
  Description of Artificial Sequence: Synthetic oligonucleotide
  Target: LAMA2; (+) strand; PAM type: NRG; PAM sequence: AAG
tcttccaatatattgaccat

SEQ ID NO: 133693 - DNA, 20 bp, Artificial Sequence
  Description of Artificial Sequence: Synthetic oligonucleotide
  Target: LAMA2; (+) strand; PAM type: NRG; PAM sequence: GAG
accataagtaaatgtaatat

SEQ ID NO: 133694 - DNA, 20 bp, Artificial Sequence
  Description of Artificial Sequence: Synthetic oligonucleotide
  Target: LAMA2; (+) strand; PAM type: NRG; PAM sequence: TGG
ttttgtaactcaatgtctgt

SEQ ID NO: 133695 - DNA, 20 bp, Artificial Sequence
  Description of Artificial Sequence: Synthetic oligonucleotide
  Target: LAMA2; (+) strand; PAM type: NRG; PAM sequence: AAG
gatttatcttgatttttata

SEQ ID NO: 133696 - DNA, 20 bp, Artificial Sequence
  Description of Artificial Sequence: Synthetic oligonucleotide
  Target: LAMA2; (+) strand; PAM type: NRG; PAM sequence: CAG
atcttgatttttataaagtt

SEQ ID NO: 133697 - DNA, 20 bp, Artificial Sequence
  Description of Artificial Sequence: Synthetic oligonucleotide
  Target: LAMA2; (+) strand; PAM type: NRG; PAM sequence: GAG
tcttttgtttctatttttgt

SEQ ID NO: 133698 - DNA, 20 bp, Artificial Sequence
  Description of Artificial Sequence: Synthetic oligonucleotide
  Target: LAMA2; (+) strand; PAM type: NRG; PAM sequence: AGG
cttttgtttctatttttgtg

SEQ ID NO: 133699 - DNA, 20 bp, Artificial Sequence
  Description of Artificial Sequence: Synthetic oligonucleotide
  Target: LAMA2; (+) strand; PAM type: NRG; PAM sequence: TAG
tctatttttgtgaggcacta

SEQ ID NO: 133700 - DNA, 20 bp, Artificial Sequence
  Description of Artificial Sequence: Synthetic oligonucleotide
  Target: LAMA2; (+) strand; PAM type: NRG; PAM sequence: TGG
tgtaataaatgttactgata

SEQ ID NO: 133701 - DNA, 20 bp, Artificial Sequence
  Description of Artificial Sequence: Synthetic oligonucleotide
  Target: LAMA2; (+) strand; PAM type: NRG; PAM sequence: TAG
tactgatatggcctcctact

SEQ ID NO: 133702 - DNA, 20 bp, Artificial Sequence
  Description of Artificial Sequence: Synthetic oligonucleotide
  Target: LAMA2; (+) strand; PAM type: NRG; PAM sequence: GAG
acttagaaaatgttattcat

SEQ ID NO: 133703 - DNA, 20 bp, Artificial Sequence
  Description of Artificial Sequence: Synthetic oligonucleotide
  Target: LAMA2; (+) strand; PAM type: NRG; PAM sequence: GAG
ttagaaaatgttattcatga

SEQ ID NO: 133704 - DNA, 20 bp, Artificial Sequence
  Description of Artificial Sequence: Synthetic oligonucleotide
  Target: LAMA2; (+) strand; PAM type: NRG; PAM sequence: TAG
tcatgagagtatattgattt

SEQ ID NO: 133705 - DNA, 20 bp, Artificial Sequence
  Description of Artificial Sequence: Synthetic oligonucleotide
  Target: LAMA2; (+) strand; PAM type: NRG; PAM sequence: CAG
tatttacatatgtacatcca

SEQ ID NO: 133706 - DNA, 20 bp, Artificial Sequence
  Description of Artificial Sequence: Synthetic oligonucleotide
  Target: LAMA2; (+) strand; PAM type: NRG; PAM sequence: AGG
atttacatatgtacatccac

SEQ ID NO: 133707 - DNA, 20 bp, Artificial Sequence
  Description of Artificial Sequence: Synthetic oligonucleotide
  Target: LAMA2; (+) strand; PAM type: NRG; PAM sequence: TAG
ggtttgcatatgtaaaaata

SEQ ID NO: 133708 - DNA, 20 bp, Artificial Sequence
  Description of Artificial Sequence: Synthetic oligonucleotide
  Target: LAMA2; (+) strand; PAM type: NRG; PAM sequence: AAG
ttatttacttactattgaaa

SEQ ID NO: 133709 - DNA, 20 bp, Artificial Sequence
  Description of Artificial Sequence: Synthetic oligonucleotide
  Target: LAMA2; (+) strand; PAM type: NRG; PAM sequence: TGG
actattgaaaaagtgtatta

SEQ ID NO: 133710 - DNA, 20 bp, Artificial Sequence
  Description of Artificial Sequence: Synthetic oligonucleotide
  Target: LAMA2; (+) strand; PAM type: NRG; PAM sequence: AAG
attgaaaaagtgtattatgg

SEQ ID NO: 133711 - DNA, 20 bp, Artificial Sequence
  Description of Artificial Sequence: Synthetic oligonucleotide
  Target: LAMA2; (+) strand; PAM type: NRG; PAM sequence: AAG
aagtgtattatggaagataa

SEQ ID NO: 133712 - DNA, 20 bp, Artificial Sequence
  Description of Artificial Sequence: Synthetic oligonucleotide
  Target: LAMA2; (+) strand; PAM type: NRG; PAM sequence: AGG
agtgtattatggaagataaa

SEQ ID NO: 133713 - DNA, 20 bp, Artificial Sequence
  Description of Artificial Sequence: Synthetic oligonucleotide
  Target: LAMA2; (+) strand; PAM type: NRG; PAM sequence: CAG
taaaaggttttcatctctgt

SEQ ID NO: 133714 - DNA, 20 bp, Artificial Sequence
  Description of Artificial Sequence: Synthetic oligonucleotide
  Target: LAMA2; (+) strand; PAM type: NRG; PAM sequence: CAG
ttcatctctgtcagatacga

SEQ ID NO: 133715 - DNA, 20 bp, Artificial Sequence
  Description of Artificial Sequence: Synthetic oligonucleotide
  Target: LAMA2; (+) strand; PAM type: NRG; PAM sequence: AGG
tcatctctgtcagatacgac

SEQ ID NO: 133716 - DNA, 20 bp, Artificial Sequence
  Description of Artificial Sequence: Synthetic oligonucleotide
  Target: LAMA2; (+) strand; PAM type: NRG; PAM sequence: TGG
cagatacgacaggtgaactt

SEQ ID NO: 133717 - DNA, 20 bp, Artificial Sequence
  Description of Artificial Sequence: Synthetic oligonucleotide
  Target: LAMA2; (+) strand; PAM type: NRG; PAM sequence: AAG
caggtgaactttggtaacat

SEQ ID NO: 133718 - DNA, 20 bp, Artificial Sequence
  Description of Artificial Sequence: Synthetic oligonucleotide
  Target: LAMA2; (+) strand; PAM type: NRG; PAM sequence: AGG
aggtgaactttggtaacata

SEQ ID NO: 133719 - DNA, 20 bp, Artificial Sequence
  Description of Artificial Sequence: Synthetic oligonucleotide
  Target: LAMA2; (+) strand; PAM type: NRG; PAM sequence: TAG
aactttggtaacataaggcc

SEQ ID NO: 133720 - DNA, 20 bp, Artificial Sequence
  Description of Artificial Sequence: Synthetic oligonucleotide
  Target: LAMA2; (+) strand; PAM type: NRG; PAM sequence: AAG
tggtaacataaggcctagca

SEQ ID NO: 133721 - DNA, 20 bp, Artificial Sequence
  Description of Artificial Sequence: Synthetic oligonucleotide
  Target: LAMA2; (+) strand; PAM type: NRG; PAM sequence: TGG
acatatatatatatataaaa

SEQ ID NO: 133722 - DNA, 20 bp, Artificial Sequence
  Description of Artificial Sequence: Synthetic oligonucleotide
  Target: LAMA2; (+) strand; PAM type: NRG; PAM sequence: TGG
aatggtttttcataatttca

SEQ ID NO: 133723 - DNA, 20 bp, Artificial Sequence
  Description of Artificial Sequence: Synthetic oligonucleotide
  Target: LAMA2; (+) strand; PAM type: NRG; PAM sequence: GGG
atggtttttcataatttcat

SEQ ID NO: 133724 - DNA, 20 bp, Artificial Sequence
  Description of Artificial Sequence: Synthetic oligonucleotide
  Target: LAMA2; (+) strand; PAM type: NRG; PAM sequence: AAG
tttcatgggatgcatcatcc

SEQ ID NO: 133725 - DNA, 20 bp, Artificial Sequence
  Description of Artificial Sequence: Synthetic oligonucleotide
  Target: LAMA2; (+) strand; PAM type: NRG; PAM sequence: GAG
tcatgggatgcatcatccaa

SEQ ID NO: 133726 - DNA, 20 bp, Artificial Sequence
  Description of Artificial Sequence: Synthetic oligonucleotide
  Target: LAMA2; (+) strand; PAM type: NRG; PAM sequence: CAG
atcatccaagagaatgatca

SEQ ID NO: 133727 - DNA, 20 bp, Artificial Sequence
  Description of Artificial Sequence: Synthetic oligonucleotide
  Target: LAMA2; (+) strand; PAM type: NRG; PAM sequence: TAG
tactaattactgccattgac

SEQ ID NO: 133728 - DNA, 20 bp, Artificial Sequence
  Description of Artificial Sequence: Synthetic oligonucleotide
  Target: LAMA2; (+) strand; PAM type: NRG; PAM sequence: CAG
actagccacctgccacatgc

SEQ ID NO: 133729 - DNA, 20 bp, Artificial Sequence
  Description of Artificial Sequence: Synthetic oligonucleotide
  Target: LAMA2; (+) strand; PAM type: NRG; PAM sequence: TGG
cctgccacatgccagacaca

SEQ ID NO: 133730 - DNA, 20 bp, Artificial Sequence
  Description of Artificial Sequence: Synthetic oligonucleotide
  Target: LAMA2; (+) strand; PAM type: NRG; PAM sequence: TGG
atgccagacacatggtgaca

SEQ ID NO: 133731 - DNA, 20 bp, Artificial Sequence
  Description of Artificial Sequence: Synthetic oligonucleotide
  Target: LAMA2; (+) strand; PAM type: NRG; PAM sequence: TAG
tggctgatgataacatgtga

SEQ ID NO: 133732 - DNA, 20 bp, Artificial Sequence
  Description of Artificial Sequence: Synthetic oligonucleotide
  Target: LAMA2; (+) strand; PAM type: NRG; PAM sequence: AGG
ggctgatgataacatgtgat

SEQ ID NO: 133733 - DNA, 20 bp, Artificial Sequence
  Description of Artificial Sequence: Synthetic oligonucleotide
  Target: LAMA2; (+) strand; PAM type: NRG; PAM sequence: AAG
acatgtgataggtgtttccc

SEQ ID NO: 133734 - DNA, 20 bp, Artificial Sequence
  Description of Artificial Sequence: Synthetic oligonucleotide
  Target: LAMA2; (+) strand; PAM type: NRG; PAM sequence: GAG
atgtgataggtgtttcccaa

SEQ ID NO: 133735 - DNA, 20 bp, Artificial Sequence
  Description of Artificial Sequence: Synthetic oligonucleotide
  Target: LAMA2; (+) strand; PAM type: NRG; PAM sequence: GAG
gtgataggtgtttcccaaga

SEQ ID NO: 133736 - DNA, 20 bp, Artificial Sequence
  Description of Artificial Sequence: Synthetic oligonucleotide
  Target: LAMA2; (+) strand; PAM type: NRG; PAM sequence: AAG
ccaagagagtccctttaaac

SEQ ID NO: 133737 - DNA, 20 bp, Artificial Sequence
  Description of Artificial Sequence: Synthetic oligonucleotide
  Target: LAMA2; (+) strand; PAM type: NRG; PAM sequence: AGG
caagagagtccctttaaaca

SEQ ID NO: 133738 - DNA, 20 bp, Artificial Sequence
  Description of Artificial Sequence: Synthetic oligonucleotide
  Target: LAMA2; (+) strand; PAM type: NRG; PAM sequence: AAG
ttcctgtcttcatattgatg

SEQ ID NO: 133739 - DNA, 20 bp, Artificial Sequence
  Description of Artificial Sequence: Synthetic oligonucleotide
  Target: LAMA2; (+) strand; PAM type: NRG; PAM sequence: AAG
ttatttcatttattctatga

SEQ ID NO: 133740 - DNA, 20 bp, Artificial Sequence
  Description of Artificial Sequence: Synthetic oligonucleotide
  Target: LAMA2; (+) strand; PAM type: NRG; PAM sequence: TGG
tattctatgaaagacaaaat

SEQ ID NO: 133741 - DNA, 20 bp, Artificial Sequence
  Description of Artificial Sequence: Synthetic oligonucleotide
  Target: LAMA2; (+) strand; PAM type: NRG; PAM sequence: AAG
agacaaaattggcattttaa

SEQ ID NO: 133742 - DNA, 20 bp, Artificial Sequence
  Description of Artificial Sequence: Synthetic oligonucleotide
  Target: LAMA2; (+) strand; PAM type: NRG; PAM sequence: TAG
caaaattggcattttaaaag

SEQ ID NO: 133743 - DNA, 20 bp, Artificial Sequence
  Description of Artificial Sequence: Synthetic oligonucleotide
  Target: LAMA2; (+) strand; PAM type: NRG; PAM sequence: CGG
ggcattttaaaagtagaaca

SEQ ID NO: 133744 - DNA, 20 bp, Artificial Sequence
  Description of Artificial Sequence: Synthetic oligonucleotide
  Target: LAMA2; (+) strand; PAM type: NRG; PAM sequence: GAG
tcttttgatacctgtcatct

SEQ ID NO: 133745 - DNA, 20 bp, Artificial Sequence
  Description of Artificial Sequence: Synthetic oligonucleotide
  Target: LAMA2; (+) strand; PAM type: NRG; PAM sequence: AAG
cctgtcatctgagataccca

SEQ ID NO: 133746 - DNA, 20 bp, Artificial Sequence
  Description of Artificial Sequence: Synthetic oligonucleotide
  Target: LAMA2; (+) strand; PAM type: NRG; PAM sequence: AGG
ctgtcatctgagatacccaa

SEQ ID NO: 133747 - DNA, 20 bp, Artificial Sequence
  Description of Artificial Sequence: Synthetic oligonucleotide
  Target: LAMA2; (+) strand; PAM type: NRG; PAM sequence: AAG
acccaaaggatttttttttt

SEQ ID NO: 133748 - DNA, 20 bp, Artificial Sequence
  Description of Artificial Sequence: Synthetic oligonucleotide
  Target: LAMA2; (+) strand; PAM type: NRG; PAM sequence: TAG
aaaggattttttttttaagt

SEQ ID NO: 133749 - DNA, 20 bp, Artificial Sequence
  Description of Artificial Sequence: Synthetic oligonucleotide
  Target: LAMA2; (+) strand; PAM type: NRG; PAM sequence: AAG
tttttttttaagttagcatc

SEQ ID NO: 133750 - DNA, 20 bp, Artificial Sequence
  Description of Artificial Sequence: Synthetic oligonucleotide
  Target: LAMA2; (+) strand; PAM type: NRG; PAM sequence: AGG
ttttttttaagttagcatca

SEQ ID NO: 133751 - DNA, 20 bp, Artificial Sequence
  Description of Artificial Sequence: Synthetic oligonucleotide
  Target: LAMA2; (+) strand; PAM type: NRG; PAM sequence: GGG
tttttttaagttagcatcaa

SEQ ID NO: 133752 - DNA, 20 bp, Artificial Sequence
  Description of Artificial Sequence: Synthetic oligonucleotide
  Target: LAMA2; (+) strand; PAM type: NRG; PAM sequence: AAG
agggtaaataataacaaatg

SEQ ID NO: 133753 - DNA, 20 bp, Artificial Sequence
  Description of Artificial Sequence: Synthetic oligonucleotide
  Target: LAMA2; (+) strand; PAM type: NRG; PAM sequence: TAG
caaatgaagttattttatgt

SEQ ID NO: 133754 - DNA, 20 bp, Artificial Sequence
  Description of Artificial Sequence: Synthetic oligonucleotide
  Target: LAMA2; (+) strand; PAM type: NRG; PAM sequence: TAG
ttattttatgttagatcttg

SEQ ID NO: 133755 - DNA, 20 bp, Artificial Sequence
  Description of Artificial Sequence: Synthetic oligonucleotide
  Target: LAMA2; (+) strand; PAM type: NRG; PAM sequence: AGG
tattttatgttagatcttgt

SEQ ID NO: 133756 - DNA, 20 bp, Artificial Sequence
  Description of Artificial Sequence: Synthetic oligonucleotide
  Target: LAMA2; (+) strand; PAM type: NRG; PAM sequence: CAG
tgtaggtctaaatatatgca

SEQ ID NO: 133757 - DNA, 20 bp, Artificial Sequence
  Description of Artificial Sequence: Synthetic oligonucleotide
  Target: LAMA2; (+) strand; PAM type: NRG; PAM sequence: CAG
aatatttaacatcctgaaat

SEQ ID NO: 133758 - DNA, 20 bp, Artificial Sequence
  Description of Artificial Sequence: Synthetic oligonucleotide
  Target: LAMA2; (+) strand; PAM type: NRG; PAM sequence: TGG
atcagaaattttgtttctga

SEQ ID NO: 133759 - DNA, 20 bp, Artificial Sequence
  Description of Artificial Sequence: Synthetic oligonucleotide
  Target: LAMA2; (+) strand; PAM type: NRG; PAM sequence: TAG
ttatgtgatttgaaacattt

SEQ ID NO: 133760 - DNA, 20 bp, Artificial Sequence
  Description of Artificial Sequence: Synthetic oligonucleotide
  Target: LAMA2; (+) strand; PAM type: NRG; PAM sequence: AGG
tatgtgatttgaaacatttt

SEQ ID NO: 133761 - DNA, 20 bp, Artificial Sequence
  Description of Artificial Sequence: Synthetic oligonucleotide
  Target: LAMA2; (+) strand; PAM type: NRG; PAM sequence: GGG
atgtgatttgaaacatttta

SEQ ID NO: 133762 - DNA, 20 bp, Artificial Sequence
  Description of Artificial Sequence: Synthetic oligonucleotide
  Target: LAMA2; (+) strand; PAM type: NRG; PAM sequence: TGG
attttcctgtctactttgca

SEQ ID NO: 133763 - DNA, 20 bp, Artificial Sequence
  Description of Artificial Sequence: Synthetic oligonucleotide
  Target: LAMA2; (+) strand; PAM type: NRG; PAM sequence: CAG
actttgcatggaaaaaacta

SEQ ID NO: 133764 - DNA, 20 bp, Artificial Sequence
  Description of Artificial Sequence: Synthetic oligonucleotide
  Target: LAMA2; (+) strand; PAM type: NRG; PAM sequence: TAG
actacagactttgtcaaatc

SEQ ID NO: 133765 - DNA, 20 bp, Artificial Sequence
  Description of Artificial Sequence: Synthetic oligonucleotide
  Target: LAMA2; (+) strand; PAM type: NRG; PAM sequence: TGG
tttgtcaaatctagttgcct

SEQ ID NO: 133766 - DNA, 20 bp, Artificial Sequence
  Description of Artificial Sequence: Synthetic oligonucleotide
  Target: LAMA2; (+) strand; PAM type: NRG; PAM sequence: AAG
gtcaaatctagttgccttgg

SEQ ID NO: 133767 - DNA, 20 bp, Artificial Sequence
  Description of Artificial Sequence: Synthetic oligonucleotide
  Target: LAMA2; (+) strand; PAM type: NRG; PAM sequence: AAG
aaatctagttgccttggaag

SEQ ID NO: 133768 - DNA, 20 bp, Artificial Sequence
  Description of Artificial Sequence: Synthetic oligonucleotide
  Target: LAMA2; (+) strand; PAM type: NRG; PAM sequence: AAG
gccttggaagaagaatgaat

SEQ ID NO: 133769 - DNA, 20 bp, Artificial Sequence
  Description of Artificial Sequence: Synthetic oligonucleotide
  Target: LAMA2; (+) strand; PAM type: NRG; PAM sequence: GAG
cttggaagaagaatgaataa

SEQ ID NO: 133770 - DNA, 20 bp, Artificial Sequence
  Description of Artificial Sequence: Synthetic oligonucleotide
  Target: LAMA2; (+) strand; PAM type: NRG; PAM sequence: AGG
ttggaagaagaatgaataag

SEQ ID NO: 133771 - DNA, 20 bp, Artificial Sequence
  Description of Artificial Sequence: Synthetic oligonucleotide
  Target: LAMA2; (+) strand; PAM type: NRG; PAM sequence: GAG
ggaagaagaatgaataagag

SEQ ID NO: 133772 - DNA, 20 bp, Artificial Sequence
  Description of Artificial Sequence: Synthetic oligonucleotide
  Target: LAMA2; (+) strand; PAM type: NRG; PAM sequence: AAG
caaaatatttttgctatttc

SEQ ID NO: 133773 - DNA, 20 bp, Artificial Sequence
  Description of Artificial Sequence: Synthetic oligonucleotide
  Target: LAMA2; (+) strand; PAM type: NRG; PAM sequence: TAG
ttgaattgattttgaaataa

SEQ ID NO: 133774 - DNA, 20 bp, Artificial Sequence
  Description of Artificial Sequence: Synthetic oligonucleotide
  Target: LAMA2; (+) strand; PAM type: NRG; PAM sequence: CAG
tgattttgaaataatagttt

SEQ ID NO: 133775 - DNA, 20 bp, Artificial Sequence
  Description of Artificial Sequence: Synthetic oligonucleotide
  Target: LAMA2; (+) strand; PAM type: NRG; PAM sequence: AGG
gattttgaaataatagtttc

SEQ ID NO: 133776 - DNA, 20 bp, Artificial Sequence
  Description of Artificial Sequence: Synthetic oligonucleotide
  Target: LAMA2; (+) strand; PAM type: NRG; PAM sequence: TAG
taaataataaactgtctttt

SEQ ID NO: 133777 - DNA, 20 bp, Artificial Sequence
  Description of Artificial Sequence: Synthetic oligonucleotide
  Target: LAMA2; (+) strand; PAM type: NRG; PAM sequence: AGG
aaataataaactgtcttttt

SEQ ID NO: 133778 - DNA, 20 bp, Artificial Sequence
  Description of Artificial Sequence: Synthetic oligonucleotide
  Target: LAMA2; (+) strand; PAM type: NRG; PAM sequence: AAG
actgtctttttaggaaacaa

SEQ ID NO: 133779 - DNA, 20 bp, Artificial Sequence
  Description of Artificial Sequence: Synthetic oligonucleotide
  Target: LAMA2; (+) strand; PAM type: NRG; PAM sequence: AAG
gtctttttaggaaacaaaag

SEQ ID NO: 133780 - DNA, 20 bp, Artificial Sequence
  Description of Artificial Sequence: Synthetic oligonucleotide
  Target: LAMA2; (+) strand; PAM type: NRG; PAM sequence: TAG
aggaaacaaaagaagtattt

SEQ ID NO: 133781 - DNA, 20 bp, Artificial Sequence
  Description of Artificial Sequence: Synthetic oligonucleotide
  Target: LAMA2; (+) strand; PAM type: NRG; PAM sequence: AAG
caaaagaagtattttagaaa

SEQ ID NO: 133782 - DNA, 20 bp, Artificial Sequence
  Description of Artificial Sequence: Synthetic oligonucleotide
  Target: LAMA2; (+) strand; PAM type: NRG; PAM sequence: AAG
ttttagaaaaagacattaaa

SEQ ID NO: 133783 - DNA, 20 bp, Artificial Sequence
  Description of Artificial Sequence: Synthetic oligonucleotide
  Target: LAMA2; (+) strand; PAM type: NRG; PAM sequence: TAG
ttaaaaagactttattaaaa

SEQ ID NO: 133784 - DNA, 20 bp, Artificial Sequence
  Description of Artificial Sequence: Synthetic oligonucleotide
  Target: LAMA2; (+) strand; PAM type: NRG; PAM sequence: GAG
aaaaagactttattaaaata

SEQ ID NO: 133785 - DNA, 20 bp, Artificial Sequence
  Description of Artificial Sequence: Synthetic oligonucleotide
  Target: LAMA2; (+) strand; PAM type: NRG; PAM sequence: AGG
aaaagactttattaaaatag

SEQ ID NO: 133786 - DNA, 20 bp, Artificial Sequence
  Description of Artificial Sequence: Synthetic oligonucleotide
  Target: LAMA2; (+) strand; PAM type: NRG; PAM sequence: AAG
atgatcttgtttgttgcttt

SEQ ID NO: 133787 - DNA, 20 bp, Artificial Sequence
  Description of Artificial Sequence: Synthetic oligonucleotide
  Target: LAMA2; (+) strand; PAM type: NRG; PAM sequence: CAG
atcttgtttgttgctttaag

SEQ ID NO: 133788 - DNA, 20 bp, Artificial Sequence
  Description of Artificial Sequence: Synthetic oligonucleotide
  Target: LAMA2; (+) strand; PAM type: NRG; PAM sequence: TAG
gttgctttaagcagtttatg

SEQ ID NO: 133789 - DNA, 20 bp, Artificial Sequence
  Description of Artificial Sequence: Synthetic oligonucleotide
  Target: LAMA2; (+) strand; PAM type: NRG; PAM sequence: AAG
gcagtttatgtagtaacttt

SEQ ID NO: 133790 - DNA, 20 bp, Artificial Sequence
  Description of Artificial Sequence: Synthetic oligonucleotide
  Target: LAMA2; (+) strand; PAM type: NRG; PAM sequence: AGG
cagtttatgtagtaacttta

SEQ ID NO: 133791 - DNA, 20 bp, Artificial Sequence
  Description of Artificial Sequence: Synthetic oligonucleotide
  Target: LAMA2; (+) strand; PAM type: NRG; PAM sequence: TGG
tttatgtagtaactttaagg

SEQ ID NO: 133792 - DNA, 20 bp, Artificial Sequence
  Description of Artificial Sequence: Synthetic oligonucleotide
  Target: LAMA2; (+) strand; PAM type: NRG; PAM sequence: TAG
atgtagtaactttaaggtgg

SEQ ID NO: 133793 - DNA, 20 bp, Artificial Sequence
  Description of Artificial Sequence: Synthetic oligonucleotide
  Target: LAMA2; (+) strand; PAM type: NRG; PAM sequence: AAG
agtaactttaaggtggtaga

SEQ ID NO: 133794 - DNA, 20 bp, Artificial Sequence
  Description of Artificial Sequence: Synthetic oligonucleotide
  Target: LAMA2; (+) strand; PAM type: NRG; PAM sequence: CAG
tttaaggtggtagaaagtgt

SEQ ID NO: 133795 - DNA, 20 bp, Artificial Sequence
  Description of Artificial Sequence: Synthetic oligonucleotide
  Target: LAMA2; (+) strand; PAM type: NRG; PAM sequence: AGG
ttaaggtggtagaaagtgtc

SEQ ID NO: 133796 - DNA, 20 bp, Artificial Sequence
  Description of Artificial Sequence: Synthetic oligonucleotide
  Target: LAMA2; (+) strand; PAM type: NRG; PAM sequence: AAG
agtgtcaggaaatcaatttg

SEQ ID NO: 133797 - DNA, 20 bp, Artificial Sequence
  Description of Artificial Sequence: Synthetic oligonucleotide
  Target: LAMA2; (+) strand; PAM type: NRG; PAM sequence: AGG
gtgtcaggaaatcaatttga

SEQ ID NO: 133798 - DNA, 20 bp, Artificial Sequence
  Description of Artificial Sequence: Synthetic oligonucleotide
  Target: LAMA2; (+) strand; PAM type: NRG; PAM sequence: AAG
ggcaaatcttcacatatgaa

SEQ ID NO: 133799 - DNA, 20 bp, Artificial Sequence
  Description of Artificial Sequence: Synthetic oligonucleotide
  Target: LAMA2; (+) strand; PAM type: NRG; PAM sequence: CAG
tcttcacatatgaaaagaat

SEQ ID NO: 133800 - DNA, 20 bp, Artificial Sequence
  Description of Artificial Sequence: Synthetic oligonucleotide
  Target: LAMA2; (+) strand; PAM type: NRG; PAM sequence: CAG
aagaatcagaaatgttaact

SEQ ID NO: 133801 - DNA, 20 bp, Artificial Sequence
  Description of Artificial Sequence: Synthetic oligonucleotide
  Target: LAMA2; (+) strand; PAM type: NRG; PAM sequence: AGG
agaatcagaaatgttaactc

SEQ ID NO: 133802 - DNA, 20 bp, Artificial Sequence
  Description of Artificial Sequence: Synthetic oligonucleotide
  Target: LAMA2; (+) strand; PAM type: NRG; PAM sequence: AAG
taactcaggtcttaaataaa

SEQ ID NO: 133803 - DNA, 20 bp, Artificial Sequence
  Description of Artificial Sequence: Synthetic oligonucleotide
  Target: LAMA2; (+) strand; PAM type: NRG; PAM sequence: AGG
aactcaggtcttaaataaaa

SEQ ID NO: 133804 - DNA, 20 bp, Artificial Sequence
  Description of Artificial Sequence: Synthetic oligonucleotide
  Target: LAMA2; (+) strand; PAM type: NRG; PAM sequence: AAG
tcaggtcttaaataaaaagg

SEQ ID NO: 133805 - DNA, 20 bp, Artificial Sequence
  Description of Artificial Sequence: Synthetic oligonucleotide
  Target: LAMA2; (+) strand; PAM type: NRG; PAM sequence: AAG
gaattaatatgatatattaa

SEQ ID NO: 133806 - DNA, 20 bp, Artificial Sequence
  Description of Artificial Sequence: Synthetic oligonucleotide
  Target: LAMA2; (+) strand; PAM type: NRG; PAM sequence: AAG
atatattaaaagtgatacga

SEQ ID NO: 133807 - DNA, 20 bp, Artificial Sequence
  Description of Artificial Sequence: Synthetic oligonucleotide
  Target: LAMA2; (+) strand; PAM type: NRG; PAM sequence: AAG
taaaagtgatacgaaagtca

SEQ ID NO: 133808 - DNA, 20 bp, Artificial Sequence
  Description of Artificial Sequence: Synthetic oligonucleotide
  Target: LAMA2; (+) strand; PAM type: NRG; PAM sequence: AGG
aaaagtgatacgaaagtcaa

SEQ ID NO: 133809 - DNA, 20 bp, Artificial Sequence
  Description of Artificial Sequence: Synthetic oligonucleotide
  Target: LAMA2; (+) strand; PAM type: NRG; PAM sequence: AAG
gtgatacgaaagtcaaagga

SEQ ID NO: 133810 - DNA, 20 bp, Artificial Sequence
  Description of Artificial Sequence: Synthetic oligonucleotide
  Target: LAMA2; (+) strand; PAM type: NRG; PAM sequence: GAG
aagtcaaaggaaagattgat

SEQ ID NO: 133811 - DNA, 20 bp, Artificial Sequence
  Description of Artificial Sequence: Synthetic oligonucleotide
  Target: LAMA2; (+) strand; PAM type: NRG; PAM sequence: GAG
gagacttattaatatgaaat

SEQ ID NO: 133812 - DNA, 20 bp, Artificial Sequence
  Description of Artificial Sequence: Synthetic oligonucleotide
  Target: LAMA2; (+) strand; PAM type: NRG; PAM sequence: AGG
agacttattaatatgaaatg

SEQ ID NO: 133813 - DNA, 20 bp, Artificial Sequence
  Description of Artificial Sequence: Synthetic oligonucleotide
  Target: LAMA2; (+) strand; PAM type: NRG; PAM sequence: AAG
ggtttcttcaataaatatgt

SEQ ID NO: 133814 - DNA, 20 bp, Artificial Sequence
  Description of Artificial Sequence: Synthetic oligonucleotide
  Target: LAMA2; (+) strand; PAM type: NRG; PAM sequence: AAG
ataaatatgtaagtacaaaa

SEQ ID NO: 133815 - DNA, 20 bp, Artificial Sequence
  Description of Artificial Sequence: Synthetic oligonucleotide
  Target: LAMA2; (+) strand; PAM type: NRG; PAM sequence: AAG
caaaaaagttaaattgtatt

SEQ ID NO: 133816 - DNA, 20 bp, Artificial Sequence
  Description of Artificial Sequence: Synthetic oligonucleotide
  Target: LAMA2; (+) strand; PAM type: NRG; PAM sequence: GAG
taaattgtattaagaaactt

SEQ ID NO: 133817 - DNA, 20 bp, Artificial Sequence
  Description of Artificial Sequence: Synthetic oligonucleotide
  Target: LAMA2; (+) strand; PAM type: NRG; PAM sequence: AAG
tgagatttaaaaaaaaaaaa

SEQ ID NO: 133818 - DNA, 20 bp, Artificial Sequence
  Description of Artificial Sequence: Synthetic oligonucleotide
  Target: LAMA2; (+) strand; PAM type: NRG; PAM sequence: AAG
tttaaaaaaaaaaaaaagcg

SEQ ID NO: 133819 - DNA, 20 bp, Artificial Sequence
  Description of Artificial Sequence: Synthetic oligonucleotide
  Target: LAMA2; (+) strand; PAM type: NRG; PAM sequence: GAG
gtatttaaactacccctctt

SEQ ID NO: 133820 - DNA, 20 bp, Artificial Sequence
  Description of Artificial Sequence: Synthetic oligonucleotide
  Target: LAMA2; (+) strand; PAM type: NRG; PAM sequence: CAG
aactacccctcttgagctcc

SEQ ID NO: 133821 - DNA, 20 bp, Artificial Sequence
  Description of Artificial Sequence: Synthetic oligonucleotide
  Target: LAMA2; (+) strand; PAM type: NRG; PAM sequence: TAG
gctcccagccacattcctct

SEQ ID NO: 133822 - DNA, 20 bp, Artificial Sequence
  Description of Artificial Sequence: Synthetic oligonucleotide
  Target: LAMA2; (+) strand; PAM type: NRG; PAM sequence: TGG
tgtctaataataacacttct

SEQ ID NO: 133823 - DNA, 20 bp, Artificial Sequence
  Description of Artificial Sequence: Synthetic oligonucleotide
  Target: LAMA2; (+) strand; PAM type: NRG; PAM sequence: TGG
acacttcttggctatttcac

SEQ ID NO: 133824 - DNA, 20 bp, Artificial Sequence
  Description of Artificial Sequence: Synthetic oligonucleotide
  Target: LAMA2; (+) strand; PAM type: NRG; PAM sequence: TAG
cactggatatttctaaatga

SEQ ID NO: 133825 - DNA, 20 bp, Artificial Sequence
  Description of Artificial Sequence: Synthetic oligonucleotide
  Target: LAMA2; (+) strand; PAM type: NRG; PAM sequence: AGG
actggatatttctaaatgat

SEQ ID NO: 133826 - DNA, 20 bp, Artificial Sequence
  Description of Artificial Sequence: Synthetic oligonucleotide
  Target: LAMA2; (+) strand; PAM type: NRG; PAM sequence: GGG
ctggatatttctaaatgata

SEQ ID NO: 133827 - DNA, 20 bp, Artificial Sequence
  Description of Artificial Sequence: Synthetic oligonucleotide
  Target: LAMA2; (+) strand; PAM type: NRG; PAM sequence: TAG
atcaattgacattccttttt

SEQ ID NO: 133828 - DNA, 20 bp, Artificial Sequence
  Description of Artificial Sequence: Synthetic oligonucleotide
  Target: LAMA2; (+) strand; PAM type: NRG; PAM sequence: TAG
cttttttagaaatcatgact

SEQ ID NO: 133829 - DNA, 20 bp, Artificial Sequence
  Description of Artificial Sequence: Synthetic oligonucleotide
  Target: LAMA2; (+) strand; PAM type: NRG; PAM sequence: CAG
agctacttatactccatctt

SEQ ID NO: 133830 - DNA, 20 bp, Artificial Sequence
  Description of Artificial Sequence: Synthetic oligonucleotide
  Target: LAMA2; (+) strand; PAM type: NRG; PAM sequence: AAG
atgtttctgtgttttatctt

SEQ ID NO: 133831 - DNA, 20 bp, Artificial Sequence
  Description of Artificial Sequence: Synthetic oligonucleotide
  Target: LAMA2; (+) strand; PAM type: NRG; PAM sequence: GAG
gtttctgtgttttatcttaa

SEQ ID NO: 133832 - DNA, 20 bp, Artificial Sequence
  Description of Artificial Sequence: Synthetic oligonucleotide
  Target: LAMA2; (+) strand; PAM type: NRG; PAM sequence: AGG
tttctgtgttttatcttaag

SEQ ID NO: 133833 - DNA, 20 bp, Artificial Sequence
  Description of Artificial Sequence: Synthetic oligonucleotide
  Target: LAMA2; (+) strand; PAM type: NRG; PAM sequence: TGG
ttttatttgtttatttttcc

SEQ ID NO: 133834 - DNA, 20 bp, Artificial Sequence
  Description of Artificial Sequence: Synthetic oligonucleotide
  Target: LAMA2; (+) strand; PAM type: NRG; PAM sequence: GGG
tttatttgtttatttttcct

SEQ ID NO: 133835 - DNA, 20 bp, Artificial Sequence
  Description of Artificial Sequence: Synthetic oligonucleotide
  Target: LAMA2; (+) strand; PAM type: NRG; PAM sequence: TAG
gtttatttttcctgggtctt

SEQ ID NO: 133836 - DNA, 20 bp, Artificial Sequence
  Description of Artificial Sequence: Synthetic oligonucleotide
  Target: LAMA2; (+) strand; PAM type: NRG; PAM sequence: TAG
ccactaacatttcaaaatat

SEQ ID NO: 133837 - DNA, 20 bp, Artificial Sequence
  Description of Artificial Sequence: Synthetic oligonucleotide
  Target: LAMA2; (+) strand; PAM type: NRG; PAM sequence: TAG
aaaatattagttattctaaa

SEQ ID NO: 133838 - DNA, 20 bp, Artificial Sequence
  Description of Artificial Sequence: Synthetic oligonucleotide
  Target: LAMA2; (+) strand; PAM type: NRG; PAM sequence: TAG
taaatagtctgacttttctt

SEQ ID NO: 133839 - DNA, 20 bp, Artificial Sequence
  Description of Artificial Sequence: Synthetic oligonucleotide
  Target: LAMA2; (+) strand; PAM type: NRG; PAM sequence: GAG
aatagtctgacttttcttta

SEQ ID NO: 133840 - DNA, 20 bp, Artificial Sequence
  Description of Artificial Sequence: Synthetic oligonucleotide
  Target: LAMA2; (+) strand; PAM type: NRG; PAM sequence: AAG
tctttagagttcttcactca

SEQ ID NO: 133841 - DNA, 20 bp, Artificial Sequence
  Description of Artificial Sequence: Synthetic oligonucleotide
  Target: LAMA2; (+) strand; PAM type: NRG; PAM sequence: TAG
cctctatgttctgcctgaat

SEQ ID NO: 133842 - DNA, 20 bp, Artificial Sequence
  Description of Artificial Sequence: Synthetic oligonucleotide
  Target: LAMA2; (+) strand; PAM type: NRG; PAM sequence: AGG
ctctatgttctgcctgaatt

SEQ ID NO: 133843 - DNA, 20 bp, Artificial Sequence
  Description of Artificial Sequence: Synthetic oligonucleotide
  Target: LAMA2; (+) strand; PAM type: NRG; PAM sequence: TGG
actgtactgtttttctacat

SEQ ID NO: 133844 - DNA, 20 bp, Artificial Sequence
  Description of Artificial Sequence: Synthetic oligonucleotide
  Target: LAMA2; (+) strand; PAM type: NRG; PAM sequence: CAG
ctacattggatctaccttgt

SEQ ID NO: 133845 - DNA, 20 bp, Artificial Sequence
  Description of Artificial Sequence: Synthetic oligonucleotide
  Target: LAMA2; (+) strand; PAM type: NRG; PAM sequence: AGG
tacattggatctaccttgtc

SEQ ID NO: 133846 - DNA, 20 bp, Artificial Sequence
  Description of Artificial Sequence: Synthetic oligonucleotide
  Target: LAMA2; (+) strand; PAM type: NRG; PAM sequence: GGG
acattggatctaccttgtca

SEQ ID NO: 133847 - DNA, 20 bp, Artificial Sequence
  Description of Artificial Sequence: Synthetic oligonucleotide
  Target: LAMA2; (+) strand; PAM type: NRG; PAM sequence: TGG
atccacaccttcctctttct

SEQ ID NO: 133848 - DNA, 20 bp, Artificial Sequence
  Description of Artificial Sequence: Synthetic oligonucleotide
  Target: LAMA2; (+) strand; PAM type: NRG; PAM sequence: TGG
ggtttactttctcattttgc

SEQ ID NO: 133849 - DNA, 20 bp, Artificial Sequence
  Description of Artificial Sequence: Synthetic oligonucleotide
  Target: LAMA2; (+) strand; PAM type: NRG; PAM sequence: GAG
tttactttctcattttgctg

SEQ ID NO: 133850 - DNA, 20 bp, Artificial Sequence
  Description of Artificial Sequence: Synthetic oligonucleotide
  Target: LAMA2; (+) strand; PAM type: NRG; PAM sequence: TGG
tgctggagcacatcctcaaa

SEQ ID NO: 133851 - DNA, 20 bp, Artificial Sequence
  Description of Artificial Sequence: Synthetic oligonucleotide
  Target: LAMA2; (+) strand; PAM type: NRG; PAM sequence: AAG
acatcctcaaatggcttctt

SEQ ID NO: 133852 - DNA, 20 bp, Artificial Sequence
  Description of Artificial Sequence: Synthetic oligonucleotide
  Target: LAMA2; (+) strand; PAM type: NRG; PAM sequence: TGG
gcttcttaagaaatattaca

SEQ ID NO: 133853 - DNA, 20 bp, Artificial Sequence
  Description of Artificial Sequence: Synthetic oligonucleotide
  Target: LAMA2; (+) strand; PAM type: NRG; PAM sequence: GGG
cttcttaagaaatattacat

SEQ ID NO: 133854 - DNA, 20 bp, Artificial Sequence
  Description of Artificial Sequence: Synthetic oligonucleotide
  Target: LAMA2; (+) strand; PAM type: NRG; PAM sequence: CAG
cttaagaaatattacatggg

SEQ ID NO: 133855 - DNA, 20 bp, Artificial Sequence
  Description of Artificial Sequence: Synthetic oligonucleotide
  Target: LAMA2; (+) strand; PAM type: NRG; PAM sequence: GAG
acatgggcagtgaattttct

SEQ ID NO: 133856 - DNA, 20 bp, Artificial Sequence
  Description of Artificial Sequence: Synthetic oligonucleotide
  Target: LAMA2; (+) strand; PAM type: NRG; PAM sequence: CAG
gtgaattttctgagtccttc

SEQ ID NO: 133857 - DNA, 20 bp, Artificial Sequence
  Description of Artificial Sequence: Synthetic oligonucleotide
  Target: LAMA2; (+) strand; PAM type: NRG; PAM sequence: TGG
actcattgcaatatacaaaa

SEQ ID NO: 133858 - DNA, 20 bp, Artificial Sequence
  Description of Artificial Sequence: Synthetic oligonucleotide
  Target: LAMA2; (+) strand; PAM type: NRG; PAM sequence: CAG
cattgcaatatacaaaatgg

SEQ ID NO: 133859 - DNA, 20 bp, Artificial Sequence
  Description of Artificial Sequence: Synthetic oligonucleotide
  Target: LAMA2; (+) strand; PAM type: NRG; PAM sequence: AGG
attgcaatatacaaaatggc

SEQ ID NO: 133860 - DNA, 20 bp, Artificial Sequence
  Description of Artificial Sequence: Synthetic oligonucleotide
  Target: LAMA2; (+) strand; PAM type: NRG; PAM sequence: AAG
atttatatacttattccttc

SEQ ID NO: 133861 - DNA, 20 bp, Artificial Sequence
  Description of Artificial Sequence: Synthetic oligonucleotide
  Target: LAMA2; (+) strand; PAM type: NRG; PAM sequence: TGG
atacttattccttcaagttt

SEQ ID NO: 133862 - DNA, 20 bp, Artificial Sequence
  Description of Artificial Sequence: Synthetic oligonucleotide
  Target: LAMA2; (+) strand; PAM type: NRG; PAM sequence: CAG
taaattccttctaatttctc

SEQ ID NO: 133863 - DNA, 20 bp, Artificial Sequence
  Description of Artificial Sequence: Synthetic oligonucleotide
  Target: LAMA2; (+) strand; PAM type: NRG; PAM sequence: GAG
tacttttttgaaactcccat

SEQ ID NO: 133864 - DNA, 20 bp, Artificial Sequence
  Description of Artificial Sequence: Synthetic oligonucleotide
  Target: LAMA2; (+) strand; PAM type: NRG; PAM sequence: TGG
aaatttttaccttgttgtat

SEQ ID NO: 133865 - DNA, 20 bp, Artificial Sequence
  Description of Artificial Sequence: Synthetic oligonucleotide
  Target: LAMA2; (+) strand; PAM type: NRG; PAM sequence: CAG
tatcatttctctcatatttt

SEQ ID NO: 133866 - DNA, 20 bp, Artificial Sequence
  Description of Artificial Sequence: Synthetic oligonucleotide
  Target: LAMA2; (+) strand; PAM type: NRG; PAM sequence: TGG
atttttttgtttctcttttg

SEQ ID NO: 133867 - DNA, 20 bp, Artificial Sequence
  Description of Artificial Sequence: Synthetic oligonucleotide
  Target: LAMA2; (+) strand; PAM type: NRG; PAM sequence: GGG
tttttttgtttctcttttgt

SEQ ID NO: 133868 - DNA, 20 bp, Artificial Sequence
  Description of Artificial Sequence: Synthetic oligonucleotide
  Target: LAMA2; (+) strand; PAM type: NRG; PAM sequence: AAG
tgccttcaacttttttgtcc

SEQ ID NO: 133869 - DNA, 20 bp, Artificial Sequence
  Description of Artificial Sequence: Synthetic oligonucleotide
  Target: LAMA2; (+) strand; PAM type: NRG; PAM sequence: GAG
ccttcaacttttttgtccaa

SEQ ID NO: 133870 - DNA, 20 bp, Artificial Sequence
  Description of Artificial Sequence: Synthetic oligonucleotide
  Target: LAMA2; (+) strand; PAM type: NRG; PAM sequence: AAG
atattaaaactttattttaa

SEQ ID NO: 133871 - DNA, 20 bp, Artificial Sequence
  Description of Artificial Sequence: Synthetic oligonucleotide
  Target: LAMA2; (+) strand; PAM type: NRG; PAM sequence: TAG
atctcttcaaaaatattaat

SEQ ID NO: 133872 - DNA, 20 bp, Artificial Sequence
  Description of Artificial Sequence: Synthetic oligonucleotide
  Target: LAMA2; (+) strand; PAM type: NRG; PAM sequence: CAG
tcttcaaaaatattaattag

SEQ ID NO: 133873 - DNA, 20 bp, Artificial Sequence
  Description of Artificial Sequence: Synthetic oligonucleotide
  Target: LAMA2; (+) strand; PAM type: NRG; PAM sequence: CAG
tttgcttttaaaaatattat

SEQ ID NO: 133874 - DNA, 20 bp, Artificial Sequence
  Description of Artificial Sequence: Synthetic oligonucleotide
  Target: LAMA2; (+) strand; PAM type: NRG; PAM sequence: AAG
atattatcagttttttaaat

SEQ ID NO: 133875 - DNA, 20 bp, Artificial Sequence
  Description of Artificial Sequence: Synthetic oligonucleotide
  Target: LAMA2; (+) strand; PAM type: NRG; PAM sequence: CAG
ttaaataagcatttgtcctc

SEQ ID NO: 133876 - DNA, 20 bp, Artificial Sequence
  Description of Artificial Sequence: Synthetic oligonucleotide
  Target: LAMA2; (+) strand; PAM type: NRG; PAM sequence: GAG
tgttgattcttcttttccat

SEQ ID NO: 133877 - DNA, 20 bp, Artificial Sequence
  Description of Artificial Sequence: Synthetic oligonucleotide
  Target: LAMA2; (+) strand; PAM type: NRG; PAM sequence: AGG
gttgattcttcttttccatg

SEQ ID NO: 133878 - DNA, 20 bp, Artificial Sequence
  Description of Artificial Sequence: Synthetic oligonucleotide
  Target: LAMA2; (+) strand; PAM type: NRG; PAM sequence: GGG
ttgattcttcttttccatga

SEQ ID NO: 133879 - DNA, 20 bp, Artificial Sequence
  Description of Artificial Sequence: Synthetic oligonucleotide
  Target: LAMA2; (+) strand; PAM type: NRG; PAM sequence: TGG
ttaactgtgatatcctaaaa

SEQ ID NO: 133880 - DNA, 20 bp, Artificial Sequence
  Description of Artificial Sequence: Synthetic oligonucleotide
  Target: LAMA2; (+) strand; PAM type: NRG; PAM sequence: GAG
tatcctaaaatggcctgatt

SEQ ID NO: 133881 - DNA, 20 bp, Artificial Sequence
  Description of Artificial Sequence: Synthetic oligonucleotide
  Target: LAMA2; (+) strand; PAM type: NRG; PAM sequence: AGG
atcctaaaatggcctgattg

SEQ ID NO: 133882 - DNA, 20 bp, Artificial Sequence
  Description of Artificial Sequence: Synthetic oligonucleotide
  Target: LAMA2; (+) strand; PAM type: NRG; PAM sequence: GAG
gcctgattgaggaactgatt

SEQ ID NO: 133883 - DNA, 20 bp, Artificial Sequence
  Description of Artificial Sequence: Synthetic oligonucleotide
  Target: LAMA2; (+) strand; PAM type: NRG; PAM sequence: AAG
aggaactgattgagatgatt

SEQ ID NO: 133884 - DNA, 20 bp, Artificial Sequence
  Description of Artificial Sequence: Synthetic oligonucleotide
  Target: LAMA2; (+) strand; PAM type: NRG; PAM sequence: GAG
gaactgattgagatgattaa

SEQ ID NO: 133885 - DNA, 20 bp, Artificial Sequence
  Description of Artificial Sequence: Synthetic oligonucleotide
  Target: LAMA2; (+) strand; PAM type: NRG; PAM sequence: TAG
tgagatgattaagagctctg

SEQ ID NO: 133886 - DNA, 20 bp, Artificial Sequence
  Description of Artificial Sequence: Synthetic oligonucleotide
  Target: LAMA2; (+) strand; PAM type: NRG; PAM sequence: CAG
gatgattaagagctctgtag

SEQ ID NO: 133887 - DNA, 20 bp, Artificial Sequence
  Description of Artificial Sequence: Synthetic oligonucleotide
  Target: LAMA2; (+) strand; PAM type: NRG; PAM sequence: AGG
atgattaagagctctgtagc

SEQ ID NO: 133888 - DNA, 20 bp, Artificial Sequence
  Description of Artificial Sequence: Synthetic oligonucleotide
  Target: LAMA2; (+) strand; PAM type: NRG; PAM sequence: GGG
tgattaagagctctgtagca

SEQ ID NO: 133889 - DNA, 20 bp, Artificial Sequence
  Description of Artificial Sequence: Synthetic oligonucleotide
  Target: LAMA2; (+) strand; PAM type: NRG; PAM sequence: CAG
aagagctctgtagcagggcg

SEQ ID NO: 133890 - DNA, 20 bp, Artificial Sequence
  Description of Artificial Sequence: Synthetic oligonucleotide
  Target: LAMA2; (+) strand; PAM type: NRG; PAM sequence: TGG
agctctgtagcagggcgcag

SEQ ID NO: 133891 - DNA, 20 bp, Artificial Sequence
  Description of Artificial Sequence: Synthetic oligonucleotide
  Target: LAMA2; (+) strand; PAM type: NRG; PAM sequence: TAG
gtggctcacgcctgtaatcc

SEQ ID NO: 133892 - DNA, 20 bp, Artificial Sequence
  Description of Artificial Sequence: Synthetic oligonucleotide
  Target: LAMA2; (+) strand; PAM type: NRG; PAM sequence: GAG
tgtaatcctagcacttctgt

SEQ ID NO: 133893 - DNA, 20 bp, Artificial Sequence
  Description of Artificial Sequence: Synthetic oligonucleotide
  Target: LAMA2; (+) strand; PAM type: NRG; PAM sequence: AGG
gtaatcctagcacttctgtg

SEQ ID NO: 133894 - DNA, 20 bp, Artificial Sequence
  Description of Artificial Sequence: Synthetic oligonucleotide
  Target: LAMA2; (+) strand; PAM type: NRG; PAM sequence: GAG
cctagcacttctgtgaggct

SEQ ID NO: 133895 - DNA, 20 bp, Artificial Sequence
  Description of Artificial Sequence: Synthetic oligonucleotide
  Target: LAMA2; (+) strand; PAM type: NRG; PAM sequence: AGG
ctagcacttctgtgaggctg

SEQ ID NO: 133896 - DNA, 20 bp, Artificial Sequence
  Description of Artificial Sequence: Synthetic oligonucleotide
  Target: LAMA2; (+) strand; PAM type: NRG; PAM sequence: CAG
gcacttctgtgaggctgagg

SEQ ID NO: 133897 - DNA, 20 bp, Artificial Sequence
  Description of Artificial Sequence: Synthetic oligonucleotide
  Target: LAMA2; (+) strand; PAM type: NRG; PAM sequence: AGG
cacttctgtgaggctgaggc

SEQ ID NO: 133898 - DNA, 20 bp, Artificial Sequence
  Description of Artificial Sequence: Synthetic oligonucleotide
  Target: LAMA2; (+) strand; PAM type: NRG; PAM sequence: CAG
ttctgtgaggctgaggcagg

SEQ ID NO: 133899 - DNA, 20 bp, Artificial Sequence
  Description of Artificial Sequence: Synthetic oligonucleotide
  Target: LAMA2; (+) strand; PAM type: NRG; PAM sequence: GAG
ctgaggcaggcagatcacct

SEQ ID NO: 133900 - DNA, 20 bp, Artificial Sequence
  Description of Artificial Sequence: Synthetic oligonucleotide
  Target: LAMA2; (+) strand; PAM type: NRG; PAM sequence: AGG
tgaggcaggcagatcacctg

SEQ ID NO: 133901 - DNA, 20 bp, Artificial Sequence
  Description of Artificial Sequence: Synthetic oligonucleotide
  Target: LAMA2; (+) strand; PAM type: NRG; PAM sequence: CAG
gcaggcagatcacctgaggt

SEQ ID NO: 133902 - DNA, 20 bp, Artificial Sequence
  Description of Artificial Sequence: Synthetic oligonucleotide
  Target: LAMA2; (+) strand; PAM type: NRG; PAM sequence: AGG
caggcagatcacctgaggtc

SEQ ID NO: 133903 - DNA, 20 bp, Artificial Sequence
  Description of Artificial Sequence: Synthetic oligonucleotide
  Target: LAMA2; (+) strand; PAM type: NRG; PAM sequence: GAG
ggcagatcacctgaggtcag

SEQ ID NO: 133904 - DNA, 20 bp, Artificial Sequence
  Description of Artificial Sequence: Synthetic oligonucleotide
  Target: LAMA2; (+) strand; PAM type: NRG; PAM sequence: GAG
tcacctgaggtcaggagttc

SEQ ID NO: 133905 - DNA, 20 bp, Artificial Sequence
  Description of Artificial Sequence: Synthetic oligonucleotide
  Target: LAMA2; (+) strand; PAM type: NRG; PAM sequence: CAG
tgaggtcaggagttcgagac

SEQ ID NO: 133906 - DNA, 20 bp, Artificial Sequence
  Description of Artificial Sequence: Synthetic oligonucleotide
  Target: LAMA2; (+) strand; PAM type: NRG; PAM sequence: TGG
tcaggagttcgagaccagcc

SEQ ID NO: 133907 - DNA, 20 bp, Artificial Sequence
  Description of Artificial Sequence: Synthetic oligonucleotide
  Target: LAMA2; (+) strand; PAM type: NRG; PAM sequence: TGG
cgagaccagcctggccaaca

SEQ ID NO: 133908 - DNA, 20 bp, Artificial Sequence
  Description of Artificial Sequence: Synthetic oligonucleotide
  Target: LAMA2; (+) strand; PAM type: NRG; PAM sequence: TGG
tggccaacatggcgaaaccc

SEQ ID NO: 133909 - DNA, 20 bp, Artificial Sequence
  Description of Artificial Sequence: Synthetic oligonucleotide
  Target: LAMA2; (+) strand; PAM type: NRG; PAM sequence: AAG
gaaaccctggtctctactaa

SEQ ID NO: 133910 - DNA, 20 bp, Artificial Sequence
  Description of Artificial Sequence: Synthetic oligonucleotide
  Target: LAMA2; (+) strand; PAM type: NRG; PAM sequence: CAG
tctactaaaagtaccaaaat

SEQ ID NO: 133911 - DNA, 20 bp, Artificial Sequence
  Description of Artificial Sequence: Synthetic oligonucleotide
  Target: LAMA2; (+) strand; PAM type: NRG; PAM sequence: CAG
ctaaaagtaccaaaatcagc

SEQ ID NO: 133912 - DNA, 20 bp, Artificial Sequence
  Description of Artificial Sequence: Synthetic oligonucleotide
  Target: LAMA2; (+) strand; PAM type: NRG; PAM sequence: AGG
taaaagtaccaaaatcagcc

SEQ ID NO: 133913 - DNA, 20 bp, Artificial Sequence
  Description of Artificial Sequence: Synthetic oligonucleotide
  Target: LAMA2; (+) strand; PAM type: NRG; PAM sequence: TGG
gtaccaaaatcagccaggtg

SEQ ID NO: 133914 - DNA, 20 bp, Artificial Sequence
  Description of Artificial Sequence: Synthetic oligonucleotide
  Target: LAMA2; (+) strand; PAM type: NRG; PAM sequence: TGG
ccaaaatcagccaggtgtgg

SEQ ID NO: 133915 - DNA, 20 bp, Artificial Sequence
  Description of Artificial Sequence: Synthetic oligonucleotide
  Target: LAMA2; (+) strand; PAM type: NRG; PAM sequence: CAG
aaatcagccaggtgtggtgg

SEQ ID NO: 133916 - DNA, 20 bp, Artificial Sequence
  Description of Artificial Sequence: Synthetic oligonucleotide
  Target: LAMA2; (+) strand; PAM type: NRG; PAM sequence: AGG
aatcagccaggtgtggtggc

SEQ ID NO: 133917 - DNA, 20 bp, Artificial Sequence
  Description of Artificial Sequence: Synthetic oligonucleotide
  Target: LAMA2; (+) strand; PAM type: NRG; PAM sequence: CAG
gtggcaggcacctgtaatcc

SEQ ID NO: 133918 - DNA, 20 bp, Artificial Sequence
  Description of Artificial Sequence: Synthetic oligonucleotide
  Target: LAMA2; (+) strand; PAM type: NRG; PAM sequence: CAG
cacctgtaatcccagctact

SEQ ID NO: 133919 - DNA, 20 bp, Artificial Sequence
  Description of Artificial Sequence: Synthetic oligonucleotide
  Target: LAMA2; (+) strand; PAM type: NRG; PAM sequence: AGG
acctgtaatcccagctactc

SEQ ID NO: 133920 - DNA, 20 bp, Artificial Sequence
  Description of Artificial Sequence: Synthetic oligonucleotide
  Target: LAMA2; (+) strand; PAM type: NRG; PAM sequence: GAG
ctgtaatcccagctactcag

SEQ ID NO: 133921 - DNA, 20 bp, Artificial Sequence
  Description of Artificial Sequence: Synthetic oligonucleotide
  Target: LAMA2; (+) strand; PAM type: NRG; PAM sequence: AGG
tgtaatcccagctactcagg

SEQ ID NO: 133922 - DNA, 20 bp, Artificial Sequence
  Description of Artificial Sequence: Synthetic oligonucleotide
  Target: LAMA2; (+) strand; PAM type: NRG; PAM sequence: GAG
tcccagctactcaggaggct

SEQ ID NO: 133923 - DNA, 20 bp, Artificial Sequence
  Description of Artificial Sequence: Synthetic oligonucleotide
  Target: LAMA2; (+) strand; PAM type: NRG; PAM sequence: AGG
cccagctactcaggaggctg

SEQ ID NO: 133924 - DNA, 20 bp, Artificial Sequence
  Description of Artificial Sequence: Synthetic oligonucleotide
  Target: LAMA2; (+) strand; PAM type: NRG; PAM sequence: CAG
agctactcaggaggctgagg

SEQ ID NO: 133925 - DNA, 20 bp, Artificial Sequence
  Description of Artificial Sequence: Synthetic oligonucleotide
  Target: LAMA2; (+) strand; PAM type: NRG; PAM sequence: AGG
gctactcaggaggctgaggc

SEQ ID NO: 133926 - DNA, 20 bp, Artificial Sequence
  Description of Artificial Sequence: Synthetic oligonucleotide
  Target: LAMA2; (+) strand; PAM type: NRG; PAM sequence: GAG
tactcaggaggctgaggcag

SEQ ID NO: 133927 - DNA, 20 bp, Artificial Sequence
  Description of Artificial Sequence: Synthetic oligonucleotide
  Target: LAMA2; (+) strand; PAM type: NRG; PAM sequence: TGG
caggagaattgctaaaaact

SEQ ID NO: 133928 - DNA, 20 bp, Artificial Sequence
  Description of Artificial Sequence: Synthetic oligonucleotide
  Target: LAMA2; (+) strand; PAM type: NRG; PAM sequence: GGG
aggagaattgctaaaaactt

SEQ ID NO: 133929 - DNA, 20 bp, Artificial Sequence
  Description of Artificial Sequence: Synthetic oligonucleotide
  Target: LAMA2; (+) strand; PAM type: NRG; PAM sequence: GAG
gagaattgctaaaaacttgg

SEQ ID NO: 133930 - DNA, 20 bp, Artificial Sequence
  Description of Artificial Sequence: Synthetic oligonucleotide
  Target: LAMA2; (+) strand; PAM type: NRG; PAM sequence: AGG
agaattgctaaaaacttggg

SEQ ID NO: 133931 - DNA, 20 bp, Artificial Sequence
  Description of Artificial Sequence: Synthetic oligonucleotide
  Target: LAMA2; (+) strand; PAM type: NRG; PAM sequence: AAG
ttgctaaaaacttgggaggc

SEQ ID NO: 133932 - DNA, 20 bp, Artificial Sequence
  Description of Artificial Sequence: Synthetic oligonucleotide
  Target: LAMA2; (+) strand; PAM type: NRG; PAM sequence: GAG
gctaaaaacttgggaggcaa

SEQ ID NO: 133933 - DNA, 20 bp, Artificial Sequence
  Description of Artificial Sequence: Synthetic oligonucleotide
  Target: LAMA2; (+) strand; PAM type: NRG; PAM sequence: CAG
aacttgggaggcaagagttg

SEQ ID NO: 133934 - DNA, 20 bp, Artificial Sequence
  Description of Artificial Sequence: Synthetic oligonucleotide
  Target: LAMA2; (+) strand; PAM type: NRG; PAM sequence: GAG
tgggaggcaagagttgcagt

SEQ ID NO: 133935 - DNA, 20 bp, Artificial Sequence
  Description of Artificial Sequence: Synthetic oligonucleotide
  Target: LAMA2; (+) strand; PAM type: NRG; PAM sequence: GAG
ggcaagagttgcagtgagct

SEQ ID NO: 133936 - DNA, 20 bp, Artificial Sequence
  Description of Artificial Sequence: Synthetic oligonucleotide
  Target: LAMA2; (+) strand; PAM type: NRG; PAM sequence: CAG
gagatcgcaccactgcactc

SEQ ID NO: 133937 - DNA, 20 bp, Artificial Sequence
  Description of Artificial Sequence: Synthetic oligonucleotide
  Target: LAMA2; (+) strand; PAM type: NRG; PAM sequence: TGG
cgcaccactgcactccagcc

SEQ ID NO: 133938 - DNA, 20 bp, Artificial Sequence
  Description of Artificial Sequence: Synthetic oligonucleotide
  Target: LAMA2; (+) strand; PAM type: NRG; PAM sequence: GGG
gcaccactgcactccagcct

SEQ ID NO: 133939 - DNA, 20 bp, Artificial Sequence
  Description of Artificial Sequence: Synthetic oligonucleotide
  Target: LAMA2; (+) strand; PAM type: NRG; PAM sequence: AAG
tgcactccagcctgggcgac

SEQ ID NO: 133940 - DNA, 20 bp, Artificial Sequence
  Description of Artificial Sequence: Synthetic oligonucleotide
  Target: LAMA2; (+) strand; PAM type: NRG; PAM sequence: GAG
cactccagcctgggcgacaa

SEQ ID NO: 133941 - DNA, 20 bp, Artificial Sequence
  Description of Artificial Sequence: Synthetic oligonucleotide
  Target: LAMA2; (+) strand; PAM type: NRG; PAM sequence: AAG
ccagcctgggcgacaagagc

SEQ ID NO: 133942 - DNA, 20 bp, Artificial Sequence
  Description of Artificial Sequence: Synthetic oligonucleotide
  Target: LAMA2; (+) strand; PAM type: NRG; PAM sequence: AAG
gagcaagactccatctcaaa

SEQ ID NO: 133943 - DNA, 20 bp, Artificial Sequence
  Description of Artificial Sequence: Synthetic oligonucleotide
  Target: LAMA2; (+) strand; PAM type: NRG; PAM sequence: AAG
ccatctcaaaaagaaaaaaa

SEQ ID NO: 133944 - DNA, 20 bp, Artificial Sequence
  Description of Artificial Sequence: Synthetic oligonucleotide
  Target: LAMA2; (+) strand; PAM type: NRG; PAM sequence: AAG
aaaagaaaaaaaaaaaaaaa

SEQ ID NO: 133945 - DNA, 20 bp, Artificial Sequence
  Description of Artificial Sequence: Synthetic oligonucleotide
  Target: LAMA2; (+) strand; PAM type: NRG; PAM sequence: AAG
agaaaaaaaaaaaaaaaaag

SEQ ID NO: 133946 - DNA, 20 bp, Artificial Sequence
  Description of Artificial Sequence: Synthetic oligonucleotide
  Target: LAMA2; (+) strand; PAM type: NRG; PAM sequence: TAG
aaaaaaaagaagtctgtgta

SEQ ID NO: 133947 - DNA, 20 bp, Artificial Sequence
  Description of Artificial Sequence: Synthetic oligonucleotide
  Target: LAMA2; (+) strand; PAM type: NRG; PAM sequence: AGG
aaaaaaagaagtctgtgtat

SEQ ID NO: 133948 - DNA, 20 bp, Artificial Sequence
  Description of Artificial Sequence: Synthetic oligonucleotide
  Target: LAMA2; (+) strand; PAM type: NRG; PAM sequence: GGG
aaaaaagaagtctgtgtata

SEQ ID NO: 133949 - DNA, 20 bp, Artificial Sequence
  Description of Artificial Sequence: Synthetic oligonucleotide
  Target: LAMA2; (+) strand; PAM type: NRG; PAM sequence: CAG
aaagaagtctgtgtataggg

SEQ ID NO: 133950 - DNA, 20 bp, Artificial Sequence
  Description of Artificial Sequence: Synthetic oligonucleotide
  Target: LAMA2; (+) strand; PAM type: NRG; PAM sequence: AGG
aagaagtctgtgtatagggc

SEQ ID NO: 133951 - DNA, 20 bp, Artificial Sequence
  Description of Artificial Sequence: Synthetic oligonucleotide
  Target: LAMA2; (+) strand; PAM type: NRG; PAM sequence: AAG
ctgtgtatagggcaggacga

SEQ ID NO: 133952 - DNA, 20 bp, Artificial Sequence
  Description of Artificial Sequence: Synthetic oligonucleotide
  Target: LAMA2; (+) strand; PAM type: NRG; PAM sequence: AGG
tgtgtatagggcaggacgaa

SEQ ID NO: 133953 - DNA, 20 bp, Artificial Sequence
  Description of Artificial Sequence: Synthetic oligonucleotide
  Target: LAMA2; (+) strand; PAM type: NRG; PAM sequence: TGG
gggcaggacgaaaggtgatt

SEQ ID NO: 133954 - DNA, 20 bp, Artificial Sequence
  Description of Artificial Sequence: Synthetic oligonucleotide
  Target: LAMA2; (+) strand; PAM type: NRG; PAM sequence: TAG
caggacgaaaggtgatttgg

SEQ ID NO: 133955 - DNA, 20 bp, Artificial Sequence
  Description of Artificial Sequence: Synthetic oligonucleotide
  Target: LAMA2; (+) strand; PAM type: NRG; PAM sequence: AAG
acgaaaggtgatttggtaga

SEQ ID NO: 133956 - DNA, 20 bp, Artificial Sequence
  Description of Artificial Sequence: Synthetic oligonucleotide
  Target: LAMA2; (+) strand; PAM type: NRG; PAM sequence: TAG
aaggtgatttggtagaaagc

SEQ ID NO: 133957 - DNA, 20 bp, Artificial Sequence
  Description of Artificial Sequence: Synthetic oligonucleotide
  Target: LAMA2; (+) strand; PAM type: NRG; PAM sequence: CAG
tagaaagctagctgttttgc

SEQ ID NO: 133958 - DNA, 20 bp, Artificial Sequence
  Description of Artificial Sequence: Synthetic oligonucleotide
  Target: LAMA2; (+) strand; PAM type: NRG; PAM sequence: AGG
agaaagctagctgttttgcc

SEQ ID NO: 133959 - DNA, 20 bp, Artificial Sequence
  Description of Artificial Sequence: Synthetic oligonucleotide
  Target: LAMA2; (+) strand; PAM type: NRG; PAM sequence: CAG
aagctagctgttttgccagg

SEQ ID NO: 133960 - DNA, 20 bp, Artificial Sequence
  Description of Artificial Sequence: Synthetic oligonucleotide
  Target: LAMA2; (+) strand; PAM type: NRG; PAM sequence: AAG
tgccaggcagcattaaatgt

SEQ ID NO: 133961 - DNA, 20 bp, Artificial Sequence
  Description of Artificial Sequence: Synthetic oligonucleotide
  Target: LAMA2; (+) strand; PAM type: NRG; PAM sequence: CAG
gcattaaatgtaagaatgtg

SEQ ID NO: 133962 - DNA, 20 bp, Artificial Sequence
  Description of Artificial Sequence: Synthetic oligonucleotide
  Target: LAMA2; (+) strand; PAM type: NRG; PAM sequence: TGG
aatgtgcagattttttcctc

SEQ ID NO: 133963 - DNA, 20 bp, Artificial Sequence
  Description of Artificial Sequence: Synthetic oligonucleotide
  Target: LAMA2; (+) strand; PAM type: NRG; PAM sequence: GGG
atgtgcagattttttcctct

SEQ ID NO: 133964 - DNA, 20 bp, Artificial Sequence
  Description of Artificial Sequence: Synthetic oligonucleotide
  Target: LAMA2; (+) strand; PAM type: NRG; PAM sequence: CAG
ctgggatcctgtcatttctc

SEQ ID NO: 133965 - DNA, 20 bp, Artificial Sequence
  Description of Artificial Sequence: Synthetic oligonucleotide
  Target: LAMA2; (+) strand; PAM type: NRG; PAM sequence: TGG
atcctgtcatttctccagaa

SEQ ID NO: 133966 - DNA, 20 bp, Artificial Sequence
  Description of Artificial Sequence: Synthetic oligonucleotide
  Target: LAMA2; (+) strand; PAM type: NRG; PAM sequence: TGG
gtaatctccatacttattcc

SEQ ID NO: 133967 - DNA, 20 bp, Artificial Sequence
  Description of Artificial Sequence: Synthetic oligonucleotide
  Target: LAMA2; (+) strand; PAM type: NRG; PAM sequence: GAG
aatctccatacttattcctg

SEQ ID NO: 133968 - DNA, 20 bp, Artificial Sequence
  Description of Artificial Sequence: Synthetic oligonucleotide
  Target: LAMA2; (+) strand; PAM type: NRG; PAM sequence: AGG
atctccatacttattcctgg

SEQ ID NO: 133969 - DNA, 20 bp, Artificial Sequence
  Description of Artificial Sequence: Synthetic oligonucleotide
  Target: LAMA2; (+) strand; PAM type: NRG; PAM sequence: GAG
ctccatacttattcctggag

SEQ ID NO: 133970 - DNA, 20 bp, Artificial Sequence
  Description of Artificial Sequence: Synthetic oligonucleotide
  Target: LAMA2; (+) strand; PAM type: NRG; PAM sequence: GAG
ccatacttattcctggagga

SEQ ID NO: 133971 - DNA, 20 bp, Artificial Sequence
  Description of Artificial Sequence: Synthetic oligonucleotide
  Target: LAMA2; (+) strand; PAM type: NRG; PAM sequence: AGG
catacttattcctggaggag

SEQ ID NO: 133972 - DNA, 20 bp, Artificial Sequence
  Description of Artificial Sequence: Synthetic oligonucleotide
  Target: LAMA2; (+) strand; PAM type: NRG; PAM sequence: TGG
acttattcctggaggagagg

SEQ ID NO: 133973 - DNA, 20 bp, Artificial Sequence
  Description of Artificial Sequence: Synthetic oligonucleotide
  Target: LAMA2; (+) strand; PAM type: NRG; PAM sequence: AAG
cctggaggagaggtggttac

SEQ ID NO: 133974 - DNA, 20 bp, Artificial Sequence
  Description of Artificial Sequence: Synthetic oligonucleotide
  Target: LAMA2; (+) strand; PAM type: NRG; PAM sequence: TGG
agaggtggttacaagtattc

SEQ ID NO: 133975 - DNA, 20 bp, Artificial Sequence
  Description of Artificial Sequence: Synthetic oligonucleotide
  Target: LAMA2; (+) strand; PAM type: NRG; PAM sequence: GGG
gaggtggttacaagtattct

SEQ ID NO: 133976 - DNA, 20 bp, Artificial Sequence
  Description of Artificial Sequence: Synthetic oligonucleotide
  Target: LAMA2; (+) strand; PAM type: NRG; PAM sequence: GGG
aggtggttacaagtattctg

SEQ ID NO: 133977 - DNA, 20 bp, Artificial Sequence
  Description of Artificial Sequence: Synthetic oligonucleotide
  Target: LAMA2; (+) strand; PAM type: NRG; PAM sequence: TGG
tctggggccacaactattct

SEQ ID NO: 133978 - DNA, 20 bp, Artificial Sequence
  Description of Artificial Sequence: Synthetic oligonucleotide
  Target: LAMA2; (+) strand; PAM type: NRG; PAM sequence: AAG
tggccttttgtctacccctg

SEQ ID NO: 133979 - DNA, 20 bp, Artificial Sequence
  Description of Artificial Sequence: Synthetic oligonucleotide
  Target: LAMA2; (+) strand; PAM type: NRG; PAM sequence: TGG
acccctgaagtttccatcac

SEQ ID NO: 133980 - DNA, 20 bp, Artificial Sequence
  Description of Artificial Sequence: Synthetic oligonucleotide
  Target: LAMA2; (+) strand; PAM type: NRG; PAM sequence: TGG
tttccatcactggaataaac

SEQ ID NO: 133981 - DNA, 20 bp, Artificial Sequence
  Description of Artificial Sequence: Synthetic oligonucleotide
  Target: LAMA2; (+) strand; PAM type: NRG; PAM sequence: CAG
catcactggaataaactgga

SEQ ID NO: 133982 - DNA, 20 bp, Artificial Sequence
  Description of Artificial Sequence: Synthetic oligonucleotide
  Target: LAMA2; (+) strand; PAM type: NRG; PAM sequence: TAG
actggaataaactggacagt

SEQ ID NO: 133983 - DNA, 20 bp, Artificial Sequence
  Description of Artificial Sequence: Synthetic oligonucleotide
  Target: LAMA2; (+) strand; PAM type: NRG; PAM sequence: CAG
gaataaactggacagttaga

SEQ ID NO: 133984 - DNA, 20 bp, Artificial Sequence
  Description of Artificial Sequence: Synthetic oligonucleotide
  Target: LAMA2; (+) strand; PAM type: NRG; PAM sequence: GAG
acagttagacagattaacat

SEQ ID NO: 133985 - DNA, 20 bp, Artificial Sequence
  Description of Artificial Sequence: Synthetic oligonucleotide
  Target: LAMA2; (+) strand; PAM type: NRG; PAM sequence: AAG
tagacagattaacatgagaa

SEQ ID NO: 133986 - DNA, 20 bp, Artificial Sequence
  Description of Artificial Sequence: Synthetic oligonucleotide
  Target: LAMA2; (+) strand; PAM type: NRG; PAM sequence: AGG
agacagattaacatgagaaa

SEQ ID NO: 133987 - DNA, 20 bp, Artificial Sequence
  Description of Artificial Sequence: Synthetic oligonucleotide
  Target: LAMA2; (+) strand; PAM type: NRG; PAM sequence: TGG
tcattacacgcacatgtacc

SEQ ID NO: 133988 - DNA, 20 bp, Artificial Sequence
  Description of Artificial Sequence: Synthetic oligonucleotide
  Target: LAMA2; (+) strand; PAM type: NRG; PAM sequence: AAG
ttacacgcacatgtacctgg

SEQ ID NO: 133989 - DNA, 20 bp, Artificial Sequence
  Description of Artificial Sequence: Synthetic oligonucleotide
  Target: LAMA2; (+) strand; PAM type: NRG; PAM sequence: AGG
tacacgcacatgtacctgga

SEQ ID NO: 133990 - DNA, 20 bp, Artificial Sequence
  Description of Artificial Sequence: Synthetic oligonucleotide
  Target: LAMA2; (+) strand; PAM type: NRG; PAM sequence: AAG
catgtacctggaaggcaaca

SEQ ID NO: 133991 - DNA, 20 bp, Artificial Sequence
  Description of Artificial Sequence: Synthetic oligonucleotide
  Target: LAMA2; (+) strand; PAM type: NRG; PAM sequence: GAG
cctggaaggcaacaaagtat

SEQ ID NO: 133992 - DNA, 20 bp, Artificial Sequence
  Description of Artificial Sequence: Synthetic oligonucleotide
  Target: LAMA2; (+) strand; PAM type: NRG; PAM sequence: AAG
gcaacaaagtatgagactta

SEQ ID NO: 133993 - DNA, 20 bp, Artificial Sequence
  Description of Artificial Sequence: Synthetic oligonucleotide
  Target: LAMA2; (+) strand; PAM type: NRG; PAM sequence: GAG
aacaaagtatgagacttaaa

SEQ ID NO: 133994 - DNA, 20 bp, Artificial Sequence
  Description of Artificial Sequence: Synthetic oligonucleotide
  Target: LAMA2; (+) strand; PAM type: NRG; PAM sequence: AGG
acaaagtatgagacttaaag

SEQ ID NO: 133995 - DNA, 20 bp, Artificial Sequence
  Description of Artificial Sequence: Synthetic oligonucleotide
  Target: LAMA2; (+) strand; PAM type: NRG; PAM sequence: GGG
caaagtatgagacttaaaga

SEQ ID NO: 133996 - DNA, 20 bp, Artificial Sequence
  Description of Artificial Sequence: Synthetic oligonucleotide
  Target: LAMA2; (+) strand; PAM type: NRG; PAM sequence: GGG
aaagtatgagacttaaagag

SEQ ID NO: 133997 - DNA, 20 bp, Artificial Sequence
  Description of Artificial Sequence: Synthetic oligonucleotide
  Target: LAMA2; (+) strand; PAM type: NRG; PAM sequence: CAG
tatgagacttaaagaggggc

SEQ ID NO: 133998 - DNA, 20 bp, Artificial Sequence
  Description of Artificial Sequence: Synthetic oligonucleotide
  Target: LAMA2; (+) strand; PAM type: NRG; PAM sequence: TGG
agacttaaagaggggccaga

SEQ ID NO: 133999 - DNA, 20 bp, Artificial Sequence
  Description of Artificial Sequence: Synthetic oligonucleotide
  Target: LAMA2; (+) strand; PAM type: NRG; PAM sequence: TAG
ggggccagatggttgaaatt

SEQ ID NO: 134000 - DNA, 20 bp, Artificial Sequence
  Description of Artificial Sequence: Synthetic oligonucleotide
  Target: LAMA2; (+) strand; PAM type: NRG; PAM sequence: TAG
ccagatggttgaaatttaga

SEQ ID NO: 134001 - DNA, 20 bp, Artificial Sequence
  Description of Artificial Sequence: Synthetic oligonucleotide
  Target: LAMA2; (+) strand; PAM type: NRG; PAM sequence: TGG
gttgaaatttagatagcatc

SEQ ID NO: 134002 - DNA, 20 bp, Artificial Sequence
  Description of Artificial Sequence: Synthetic oligonucleotide
  Target: LAMA2; (+) strand; PAM type: NRG; PAM sequence: GAG
tgaaatttagatagcatctg

SEQ ID NO: 134003 - DNA, 20 bp, Artificial Sequence
  Description of Artificial Sequence: Synthetic oligonucleotide
  Target: LAMA2; (+) strand; PAM type: NRG; PAM sequence: CGG
ttagatagcatctggagata

SEQ ID NO: 134004 - DNA, 20 bp, Artificial Sequence
  Description of Artificial Sequence: Synthetic oligonucleotide
  Target: LAMA2; (+) strand; PAM type: NRG; PAM sequence: AAG
gatagcatctggagatacgg

SEQ ID NO: 134005 - DNA, 20 bp, Artificial Sequence
  Description of Artificial Sequence: Synthetic oligonucleotide
  Target: LAMA2; (+) strand; PAM type: NRG; PAM sequence: AGG
atagcatctggagatacgga

SEQ ID NO: 134006 - DNA, 20 bp, Artificial Sequence
  Description of Artificial Sequence: Synthetic oligonucleotide
  Target: LAMA2; (+) strand; PAM type: NRG; PAM sequence: AAG
gcatctggagatacggaagg

SEQ ID NO: 134007 - DNA, 20 bp, Artificial Sequence
  Description of Artificial Sequence: Synthetic oligonucleotide
  Target: LAMA2; (+) strand; PAM type: NRG; PAM sequence: AGG
catctggagatacggaagga

SEQ ID NO: 134008 - DNA, 20 bp, Artificial Sequence
  Description of Artificial Sequence: Synthetic oligonucleotide
  Target: LAMA2; (+) strand; PAM type: NRG; PAM sequence: AAG
agatacggaaggaaggaaat

SEQ ID NO: 134009 - DNA, 20 bp, Artificial Sequence
  Description of Artificial Sequence: Synthetic oligonucleotide
  Target: LAMA2; (+) strand; PAM type: NRG; PAM sequence: AGG
gatacggaaggaaggaaata

SEQ ID NO: 134010 - DNA, 20 bp, Artificial Sequence
  Description of Artificial Sequence: Synthetic oligonucleotide
  Target: LAMA2; (+) strand; PAM type: NRG; PAM sequence: AAG
aggaaggaaataaggactta

SEQ ID NO: 134011 - DNA, 20 bp, Artificial Sequence
  Description of Artificial Sequence: Synthetic oligonucleotide
  Target: LAMA2; (+) strand; PAM type: NRG; PAM sequence: TAG
aataaggacttaaagtctct

SEQ ID NO: 134012 - DNA, 20 bp, Artificial Sequence
  Description of Artificial Sequence: Synthetic oligonucleotide
  Target: LAMA2; (+) strand; PAM type: NRG; PAM sequence: TAG
aaggacttaaagtctcttag

SEQ ID NO: 134013 - DNA, 20 bp, Artificial Sequence
  Description of Artificial Sequence: Synthetic oligonucleotide
  Target: LAMA2; (+) strand; PAM type: NRG; PAM sequence: AGG
aggacttaaagtctcttagt

SEQ ID NO: 134014 - DNA, 20 bp, Artificial Sequence
  Description of Artificial Sequence: Synthetic oligonucleotide
  Target: LAMA2; (+) strand; PAM type: NRG; PAM sequence: TGG
acttaaagtctcttagtagg

SEQ ID NO: 134015 - DNA, 20 bp, Artificial Sequence
  Description of Artificial Sequence: Synthetic oligonucleotide
  Target: LAMA2; (+) strand; PAM type: NRG; PAM sequence: TGG
taaagtctcttagtaggtgg

SEQ ID NO: 134016 - DNA, 20 bp, Artificial Sequence
  Description of Artificial Sequence: Synthetic oligonucleotide
  Target: LAMA2; (+) strand; PAM type: NRG; PAM sequence: AAG
tcttagtaggtggtggcaac

SEQ ID NO: 134017 - DNA, 20 bp, Artificial Sequence
  Description of Artificial Sequence: Synthetic oligonucleotide
  Target: LAMA2; (+) strand; PAM type: NRG; PAM sequence: TGG
taggtggtggcaacaagctg

SEQ ID NO: 134018 - DNA, 20 bp, Artificial Sequence
  Description of Artificial Sequence: Synthetic oligonucleotide
  Target: LAMA2; (+) strand; PAM type: NRG; PAM sequence: GGG
aggtggtggcaacaagctgt

SEQ ID NO: 134019 - DNA, 20 bp, Artificial Sequence
  Description of Artificial Sequence: Synthetic oligonucleotide
  Target: LAMA2; (+) strand; PAM type: NRG; PAM sequence: GAG
gtggtggcaacaagctgtgg

SEQ ID NO: 134020 - DNA, 20 bp, Artificial Sequence
  Description of Artificial Sequence: Synthetic oligonucleotide
  Target: LAMA2; (+) strand; PAM type: NRG; PAM sequence: GAG
gcaacaagctgtgggagtgt

SEQ ID NO: 134021 - DNA, 20 bp, Artificial Sequence
  Description of Artificial Sequence: Synthetic oligonucleotide
  Target: LAMA2; (+) strand; PAM type: NRG; PAM sequence: AGG
caacaagctgtgggagtgtg

SEQ ID NO: 134022 - DNA, 20 bp, Artificial Sequence
  Description of Artificial Sequence: Synthetic oligonucleotide
  Target: LAMA2; (+) strand; PAM type: NRG; PAM sequence: GAG
acaagctgtgggagtgtgag

SEQ ID NO: 134023 - DNA, 20 bp, Artificial Sequence
  Description of Artificial Sequence: Synthetic oligonucleotide
  Target: LAMA2; (+) strand; PAM type: NRG; PAM sequence: GAG
aagctgtgggagtgtgagga

SEQ ID NO: 134024 - DNA, 20 bp, Artificial Sequence
  Description of Artificial Sequence: Synthetic oligonucleotide
  Target: LAMA2; (+) strand; PAM type: NRG; PAM sequence: AGG
agctgtgggagtgtgaggag

SEQ ID NO: 134025 - DNA, 20 bp, Artificial Sequence
  Description of Artificial Sequence: Synthetic oligonucleotide
  Target: LAMA2; (+) strand; PAM type: NRG; PAM sequence: TGG
gtgtgaggagaggaactgca

SEQ ID NO: 134026 - DNA, 20 bp, Artificial Sequence
  Description of Artificial Sequence: Synthetic oligonucleotide
  Target: LAMA2; (+) strand; PAM type: NRG; PAM sequence: AAG
gaggagaggaactgcatggc

SEQ ID NO: 134027 - DNA, 20 bp, Artificial Sequence
  Description of Artificial Sequence: Synthetic oligonucleotide
  Target: LAMA2; (+) strand; PAM type: NRG; PAM sequence: AAG
gaggaactgcatggcaagca

SEQ ID NO: 134028 - DNA, 20 bp, Artificial Sequence
  Description of Artificial Sequence: Synthetic oligonucleotide
  Target: LAMA2; (+) strand; PAM type: NRG; PAM sequence: AGG
aggaactgcatggcaagcaa

SEQ ID NO: 134029 - DNA, 20 bp, Artificial Sequence
  Description of Artificial Sequence: Synthetic oligonucleotide
  Target: LAMA2; (+) strand; PAM type: NRG; PAM sequence: AAG
gcaaaggttgtcatatcatg

SEQ ID NO: 134030 - DNA, 20 bp, Artificial Sequence
  Description of Artificial Sequence: Synthetic oligonucleotide
  Target: LAMA2; (+) strand; PAM type: NRG; PAM sequence: AAG
gttgtcatatcatgaagata

SEQ ID NO: 134031 - DNA, 20 bp, Artificial Sequence
  Description of Artificial Sequence: Synthetic oligonucleotide
  Target: LAMA2; (+) strand; PAM type: NRG; PAM sequence: AAG
atcatgaagataaagtctct

SEQ ID NO: 134032 - DNA, 20 bp, Artificial Sequence
  Description of Artificial Sequence: Synthetic oligonucleotide
  Target: LAMA2; (+) strand; PAM type: NRG; PAM sequence: AGG
tcatgaagataaagtctcta

SEQ ID NO: 134033 - DNA, 20 bp, Artificial Sequence
  Description of Artificial Sequence: Synthetic oligonucleotide
  Target: LAMA2; (+) strand; PAM type: NRG; PAM sequence: TAG
tgaagataaagtctctaagg

SEQ ID NO: 134034 - DNA, 20 bp, Artificial Sequence
  Description of Artificial Sequence: Synthetic oligonucleotide
  Target: LAMA2; (+) strand; PAM type: NRG; PAM sequence: CAG
gtctctaaggtagcaatcct

SEQ ID NO: 134035 - DNA, 20 bp, Artificial Sequence
  Description of Artificial Sequence: Synthetic oligonucleotide
  Target: LAMA2; (+) strand; PAM type: NRG; PAM sequence: AAG
tctaaggtagcaatcctcag

SEQ ID NO: 134036 - DNA, 20 bp, Artificial Sequence
  Description of Artificial Sequence: Synthetic oligonucleotide
  Target: LAMA2; (+) strand; PAM type: NRG; PAM sequence: AAG
tcctcagaagaacacgtgaa

SEQ ID NO: 134037 - DNA, 20 bp, Artificial Sequence
  Description of Artificial Sequence: Synthetic oligonucleotide
  Target: LAMA2; (+) strand; PAM type: NRG; PAM sequence: AGG
cctcagaagaacacgtgaaa

SEQ ID NO: 134038 - DNA, 20 bp, Artificial Sequence
  Description of Artificial Sequence: Synthetic oligonucleotide
  Target: LAMA2; (+) strand; PAM type: NRG; PAM sequence: CAG
gaacacgtgaaaaggtgtcc

SEQ ID NO: 134039 - DNA, 20 bp, Artificial Sequence
  Description of Artificial Sequence: Synthetic oligonucleotide
  Target: LAMA2; (+) strand; PAM type: NRG; PAM sequence: AGG
aacacgtgaaaaggtgtccc

SEQ ID NO: 134040 - DNA, 20 bp, Artificial Sequence
  Description of Artificial Sequence: Synthetic oligonucleotide
  Target: LAMA2; (+) strand; PAM type: NRG; PAM sequence: TGG
gtgaaaaggtgtcccaggcg

SEQ ID NO: 134041 - DNA, 20 bp, Artificial Sequence
  Description of Artificial Sequence: Synthetic oligonucleotide
  Target: LAMA2; (+) strand; PAM type: NRG; PAM sequence: CGG
gtgtcccaggcgtggtgtcc

SEQ ID NO: 134042 - DNA, 20 bp, Artificial Sequence
  Description of Artificial Sequence: Synthetic oligonucleotide
  Target: LAMA2; (+) strand; PAM type: NRG; PAM sequence: GGG
tgtcccaggcgtggtgtccc

SEQ ID NO: 134043 - DNA, 20 bp, Artificial Sequence
  Description of Artificial Sequence: Synthetic oligonucleotide
  Target: LAMA2; (+) strand; PAM type: NRG; PAM sequence: GAG
tcccaggcgtggtgtcccgg

SEQ ID NO: 134044 - DNA, 20 bp, Artificial Sequence
  Description of Artificial Sequence: Synthetic oligonucleotide
  Target: LAMA2; (+) strand; PAM type: NRG; PAM sequence: GAG
tcccgggagtttcctctcct

SEQ ID NO: 134045 - DNA, 20 bp, Artificial Sequence
  Description of Artificial Sequence: Synthetic oligonucleotide
  Target: LAMA2; (+) strand; PAM type: NRG; PAM sequence: TAG
gggagtttcctctcctgaga

SEQ ID NO: 134046 - DNA, 20 bp, Artificial Sequence
  Description of Artificial Sequence: Synthetic oligonucleotide
  Target: LAMA2; (+) strand; PAM type: NRG; PAM sequence: AGG
ggagtttcctctcctgagat

SEQ ID NO: 134047 - DNA, 20 bp, Artificial Sequence
  Description of Artificial Sequence: Synthetic oligonucleotide
  Target: LAMA2; (+) strand; PAM type: NRG; PAM sequence: TAG
agataggatttaatcttctc

SEQ ID NO: 134048 - DNA, 20 bp, Artificial Sequence
  Description of Artificial Sequence: Synthetic oligonucleotide
  Target: LAMA2; (+) strand; PAM type: NRG; PAM sequence: TAG
ttaatcttctctagttcatg

SEQ ID NO: 134049 - DNA, 20 bp, Artificial Sequence
  Description of Artificial Sequence: Synthetic oligonucleotide
  Target: LAMA2; (+) strand; PAM type: NRG; PAM sequence: CAG
tctctagttcatgtagattc

SEQ ID NO: 134050 - DNA, 20 bp, Artificial Sequence
  Description of Artificial Sequence: Synthetic oligonucleotide
  Target: LAMA2; (+) strand; PAM type: NRG; PAM sequence: AGG
ctctagttcatgtagattcc

SEQ ID NO: 134051 - DNA, 20 bp, Artificial Sequence
  Description of Artificial Sequence: Synthetic oligonucleotide
  Target: LAMA2; (+) strand; PAM type: NRG; PAM sequence: GGG
tctagttcatgtagattcca

SEQ ID NO: 134052 - DNA, 20 bp, Artificial Sequence
  Description of Artificial Sequence: Synthetic oligonucleotide
  Target: LAMA2; (+) strand; PAM type: NRG; PAM sequence: AAG
agttcatgtagattccaggg

SEQ ID NO: 134053 - DNA, 20 bp, Artificial Sequence
  Description of Artificial Sequence: Synthetic oligonucleotide
  Target: LAMA2; (+) strand; PAM type: NRG; PAM sequence: AGG
gttcatgtagattccaggga

SEQ ID NO: 134054 - DNA, 20 bp, Artificial Sequence
  Description of Artificial Sequence: Synthetic oligonucleotide
  Target: LAMA2; (+) strand; PAM type: NRG; PAM sequence: GGG
ttcatgtagattccagggaa

SEQ ID NO: 134055 - DNA, 20 bp, Artificial Sequence
  Description of Artificial Sequence: Synthetic oligonucleotide
  Target: LAMA2; (+) strand; PAM type: NRG; PAM sequence: GGG
tcatgtagattccagggaag

SEQ ID NO: 134056 - DNA, 20 bp, Artificial Sequence
  Description of Artificial Sequence: Synthetic oligonucleotide
  Target: LAMA2; (+) strand; PAM type: NRG; PAM sequence: TGG
catgacaattacattccttc

SEQ ID NO: 134057 - DNA, 20 bp, Artificial Sequence
  Description of Artificial Sequence: Synthetic oligonucleotide
  Target: LAMA2; (+) strand; PAM type: NRG; PAM sequence: GAG
tgacaattacattccttctg

SEQ ID NO: 134058 - DNA, 20 bp, Artificial Sequence
  Description of Artificial Sequence: Synthetic oligonucleotide
  Target: LAMA2; (+) strand; PAM type: NRG; PAM sequence: AGG
gacaattacattccttctgg

SEQ ID NO: 134059 - DNA, 20 bp, Artificial Sequence
  Description of Artificial Sequence: Synthetic oligonucleotide
  Target: LAMA2; (+) strand; PAM type: NRG; PAM sequence: TAG
ccttctggaggaacttccct

SEQ ID NO: 134060 - DNA, 20 bp, Artificial Sequence
  Description of Artificial Sequence: Synthetic oligonucleotide
  Target: LAMA2; (+) strand; PAM type: NRG; PAM sequence: AAG
tggaggaacttcccttagat

SEQ ID NO: 134061 - DNA, 20 bp, Artificial Sequence
  Description of Artificial Sequence: Synthetic oligonucleotide
  Target: LAMA2; (+) strand; PAM type: NRG; PAM sequence: AGG
ggaggaacttcccttagata

SEQ ID NO: 134062 - DNA, 20 bp, Artificial Sequence
  Description of Artificial Sequence: Synthetic oligonucleotide
  Target: LAMA2; (+) strand; PAM type: NRG; PAM sequence: GGG
gaggaacttcccttagataa

SEQ ID NO: 134063 - DNA, 20 bp, Artificial Sequence
  Description of Artificial Sequence: Synthetic oligonucleotide
  Target: LAMA2; (+) strand; PAM type: NRG; PAM sequence: GGG
aggaacttcccttagataag

SEQ ID NO: 134064 - DNA, 20 bp, Artificial Sequence
  Description of Artificial Sequence: Synthetic oligonucleotide
  Target: LAMA2; (+) strand; PAM type: NRG; PAM sequence: GGG
ggaacttcccttagataagg

SEQ ID NO: 134065 - DNA, 20 bp, Artificial Sequence
  Description of Artificial Sequence: Synthetic oligonucleotide
  Target: LAMA2; (+) strand; PAM type: NRG; PAM sequence: CAG
ccttagataagggggaactt

SEQ ID NO: 134066 - DNA, 20 bp, Artificial Sequence
  Description of Artificial Sequence: Synthetic oligonucleotide
  Target: LAMA2; (+) strand; PAM type: NRG; PAM sequence: GAG
ttagataagggggaacttca

SEQ ID NO: 134067 - DNA, 20 bp, Artificial Sequence
  Description of Artificial Sequence: Synthetic oligonucleotide
  Target: LAMA2; (+) strand; PAM type: NRG; PAM sequence: AAG
ataagggggaacttcagaga

SEQ ID NO: 134068 - DNA, 20 bp, Artificial Sequence
  Description of Artificial Sequence: Synthetic oligonucleotide
  Target: LAMA2; (+) strand; PAM type: NRG; PAM sequence: GAG
gaaagcctctccctgtgctt

SEQ ID NO: 134069 - DNA, 20 bp, Artificial Sequence
  Description of Artificial Sequence: Synthetic oligonucleotide
  Target: LAMA2; (+) strand; PAM type: NRG; PAM sequence: AGG
aaagcctctccctgtgcttg

SEQ ID NO: 134070 - DNA, 20 bp, Artificial Sequence
  Description of Artificial Sequence: Synthetic oligonucleotide
  Target: LAMA2; (+) strand; PAM type: NRG; PAM sequence: GAG
agcctctccctgtgcttgag

SEQ ID NO: 134071 - DNA, 20 bp, Artificial Sequence
  Description of Artificial Sequence: Synthetic oligonucleotide
  Target: LAMA2; (+) strand; PAM type: NRG; PAM sequence: GAG
cctctccctgtgcttgagga

SEQ ID NO: 134072 - DNA, 20 bp, Artificial Sequence
  Description of Artificial Sequence: Synthetic oligonucleotide
  Target: LAMA2; (+) strand; PAM type: NRG; PAM sequence: AGG
ctctccctgtgcttgaggag

SEQ ID NO: 134073 - DNA, 20 bp, Artificial Sequence
  Description of Artificial Sequence: Synthetic oligonucleotide
  Target: LAMA2; (+) strand; PAM type: NRG; PAM sequence: CAG
tccctgtgcttgaggagagg

SEQ ID NO: 134074 - DNA, 20 bp, Artificial Sequence
  Description of Artificial Sequence: Synthetic oligonucleotide
  Target: LAMA2; (+) strand; PAM type: NRG; PAM sequence: GAG
cctgtgcttgaggagaggca

SEQ ID NO: 134075 - DNA, 20 bp, Artificial Sequence
  Description of Artificial Sequence: Synthetic oligonucleotide
  Target: LAMA2; (+) strand; PAM type: NRG; PAM sequence: AGG
ctgtgcttgaggagaggcag

SEQ ID NO: 134076 - DNA, 20 bp, Artificial Sequence
  Description of Artificial Sequence: Synthetic oligonucleotide
  Target: LAMA2; (+) strand; PAM type: NRG; PAM sequence: GGG
tgtgcttgaggagaggcaga

SEQ ID NO: 134077 - DNA, 20 bp, Artificial Sequence
  Description of Artificial Sequence: Synthetic oligonucleotide
  Target: LAMA2; (+) strand; PAM type: NRG; PAM sequence: GGG
gtgcttgaggagaggcagag

SEQ ID NO: 134078 - DNA, 20 bp, Artificial Sequence
  Description of Artificial Sequence: Synthetic oligonucleotide
  Target: LAMA2; (+) strand; PAM type: NRG; PAM sequence: GAG
ttgaggagaggcagaggggc

SEQ ID NO: 134079 - DNA, 20 bp, Artificial Sequence
  Description of Artificial Sequence: Synthetic oligonucleotide
  Target: LAMA2; (+) strand; PAM type: NRG; PAM sequence: GAG
gaggagaggcagaggggcga

SEQ ID NO: 134080 - DNA, 20 bp, Artificial Sequence
  Description of Artificial Sequence: Synthetic oligonucleotide
  Target: LAMA2; (+) strand; PAM type: NRG; PAM sequence: TGG
agaggcagaggggcgagaga

SEQ ID NO: 134081 - DNA, 20 bp, Artificial Sequence
  Description of Artificial Sequence: Synthetic oligonucleotide
  Target: LAMA2; (+) strand; PAM type: NRG; PAM sequence: GGG
gaggcagaggggcgagagat

SEQ ID NO: 134082 - DNA, 20 bp, Artificial Sequence
  Description of Artificial Sequence: Synthetic oligonucleotide
  Target: LAMA2; (+) strand; PAM type: NRG; PAM sequence: GAG
ggcagaggggcgagagatgg

SEQ ID NO: 134083 - DNA, 20 bp, Artificial Sequence
  Description of Artificial Sequence: Synthetic oligonucleotide
  Target: LAMA2; (+) strand; PAM type: NRG; PAM sequence: TGG
agaggggcgagagatgggag

SEQ ID NO: 134084 - DNA, 20 bp, Artificial Sequence
  Description of Artificial Sequence: Synthetic oligonucleotide
  Target: LAMA2; (+) strand; PAM type: NRG; PAM sequence: AAG
ggggcgagagatgggagtgg

SEQ ID NO: 134085 - DNA, 20 bp, Artificial Sequence
  Description of Artificial Sequence: Synthetic oligonucleotide
  Target: LAMA2; (+) strand; PAM type: NRG; PAM sequence: AGG
gggcgagagatgggagtgga

SEQ ID NO: 134086 - DNA, 20 bp, Artificial Sequence
  Description of Artificial Sequence: Synthetic oligonucleotide
  Target: LAMA2; (+) strand; PAM type: NRG; PAM sequence: AAG
gagagatgggagtggaaggc

SEQ ID NO: 134087 - DNA, 20 bp, Artificial Sequence
  Description of Artificial Sequence: Synthetic oligonucleotide
  Target: LAMA2; (+) strand; PAM type: NRG; PAM sequence: CAG
gatgggagtggaaggcaagt

SEQ ID NO: 134088 - DNA, 20 bp, Artificial Sequence
  Description of Artificial Sequence: Synthetic oligonucleotide
  Target: LAMA2; (+) strand; PAM type: NRG; PAM sequence: GAG
tgggagtggaaggcaagtca

SEQ ID NO: 134089 - DNA, 20 bp, Artificial Sequence
  Description of Artificial Sequence: Synthetic oligonucleotide
  Target: LAMA2; (+) strand; PAM type: NRG; PAM sequence: GAG
ggagtggaaggcaagtcaga

SEQ ID NO: 134090 - DNA, 20 bp, Artificial Sequence
  Description of Artificial Sequence: Synthetic oligonucleotide
  Target: LAMA2; (+) strand; PAM type: NRG; PAM sequence: TGG
aaggcaagtcagagagaact

SEQ ID NO: 134091 - DNA, 20 bp, Artificial Sequence
  Description of Artificial Sequence: Synthetic oligonucleotide
  Target: LAMA2; (+) strand; PAM type: NRG; PAM sequence: AAG
gtcagagagaacttggttct

SEQ ID NO: 134092 - DNA, 20 bp, Artificial Sequence
  Description of Artificial Sequence: Synthetic oligonucleotide
  Target: LAMA2; (+) strand; PAM type: NRG; PAM sequence: AGG
tcagagagaacttggttcta

SEQ ID NO: 134093 - DNA, 20 bp, Artificial Sequence
  Description of Artificial Sequence: Synthetic oligonucleotide
  Target: LAMA2; (+) strand; PAM type: NRG; PAM sequence: TGG
gagagaacttggttctaagg

SEQ ID NO: 134094 - DNA, 20 bp, Artificial Sequence
  Description of Artificial Sequence: Synthetic oligonucleotide
  Target: LAMA2; (+) strand; PAM type: NRG; PAM sequence: TAG
tggttctaaggtggcttctt

SEQ ID NO: 134095 - DNA, 20 bp, Artificial Sequence
  Description of Artificial Sequence: Synthetic oligonucleotide
  Target: LAMA2; (+) strand; PAM type: NRG; PAM sequence: AAG
aaggtggcttctttagtcca

SEQ ID NO: 134096 - DNA, 20 bp, Artificial Sequence
  Description of Artificial Sequence: Synthetic oligonucleotide
  Target: LAMA2; (+) strand; PAM type: NRG; PAM sequence: CAG
cttctttagtccaaagtgct

SEQ ID NO: 134097 - DNA, 20 bp, Artificial Sequence
  Description of Artificial Sequence: Synthetic oligonucleotide
  Target: LAMA2; (+) strand; PAM type: NRG; PAM sequence: AAG
ccaaagtgctcagctcctca

SEQ ID NO: 134098 - DNA, 20 bp, Artificial Sequence
  Description of Artificial Sequence: Synthetic oligonucleotide
  Target: LAMA2; (+) strand; PAM type: NRG; PAM sequence: TGG
ctcctcaaagcgccatactt

SEQ ID NO: 134099 - DNA, 20 bp, Artificial Sequence
  Description of Artificial Sequence: Synthetic oligonucleotide
  Target: LAMA2; (+) strand; PAM type: NRG; PAM sequence: GAG
cctcaaagcgccatactttg

SEQ ID NO: 134100 - DNA, 20 bp, Artificial Sequence
  Description of Artificial Sequence: Synthetic oligonucleotide
  Target: LAMA2; (+) strand; PAM type: NRG; PAM sequence: GAG
actttggagtactattttct

SEQ ID NO: 134101 - DNA, 20 bp, Artificial Sequence
  Description of Artificial Sequence: Synthetic oligonucleotide
  Target: LAMA2; (+) strand; PAM type: NRG; PAM sequence: CAG
tactattttctgagccctaa

SEQ ID NO: 134102 - DNA, 20 bp, Artificial Sequence
  Description of Artificial Sequence: Synthetic oligonucleotide
  Target: LAMA2; (+) strand; PAM type: NRG; PAM sequence: TGG
tgagccctaacagccacaaa

SEQ ID NO: 134103 - DNA, 20 bp, Artificial Sequence
  Description of Artificial Sequence: Synthetic oligonucleotide
  Target: LAMA2; (+) strand; PAM type: NRG; PAM sequence: AAG
gccctaacagccacaaatgg

SEQ ID NO: 134104 - DNA, 20 bp, Artificial Sequence
  Description of Artificial Sequence: Synthetic oligonucleotide
  Target: LAMA2; (+) strand; PAM type: NRG; PAM sequence: AAG
ctaacagccacaaatggaag

SEQ ID NO: 134105 - DNA, 20 bp, Artificial Sequence
  Description of Artificial Sequence: Synthetic oligonucleotide
  Target: LAMA2; (+) strand; PAM type: NRG; PAM sequence: CAG
ggaagaagtattcccctgta

SEQ ID NO: 134106 - DNA, 20 bp, Artificial Sequence
  Description of Artificial Sequence: Synthetic oligonucleotide
  Target: LAMA2; (+) strand; PAM type: NRG; PAM sequence: AAG
aagtattcccctgtacagaa

SEQ ID NO: 134107 - DNA, 20 bp, Artificial Sequence
  Description of Artificial Sequence: Synthetic oligonucleotide
  Target: LAMA2; (+) strand; PAM type: NRG; PAM sequence: CAG
aaagtttgcattacttttgt

SEQ ID NO: 134108 - DNA, 20 bp, Artificial Sequence
  Description of Artificial Sequence: Synthetic oligonucleotide
  Target: LAMA2; (+) strand; PAM type: NRG; PAM sequence: AAG
tataatcacattttatgaat

SEQ ID NO: 134109 - DNA, 20 bp, Artificial Sequence
  Description of Artificial Sequence: Synthetic oligonucleotide
  Target: LAMA2; (+) strand; PAM type: NRG; PAM sequence: CAG
ataagttttatttcacttaa

SEQ ID NO: 134110 - DNA, 20 bp, Artificial Sequence
  Description of Artificial Sequence: Synthetic oligonucleotide
  Target: LAMA2; (+) strand; PAM type: NRG; PAM sequence: AAG
aaaccacaactttaattccc

SEQ ID NO: 134111 - DNA, 20 bp, Artificial Sequence
  Description of Artificial Sequence: Synthetic oligonucleotide
  Target: LAMA2; (+) strand; PAM type: NRG; PAM sequence: TAG
tttaattcccaagtaactct

SEQ ID NO: 134112 - DNA, 20 bp, Artificial Sequence
  Description of Artificial Sequence: Synthetic oligonucleotide
  Target: LAMA2; (+) strand; PAM type: NRG; PAM sequence: AAG
aattcccaagtaactcttag

SEQ ID NO: 134113 - DNA, 20 bp, Artificial Sequence
  Description of Artificial Sequence: Synthetic oligonucleotide
  Target: LAMA2; (+) strand; PAM type: NRG; PAM sequence: TGG
tcttagaagtttctcctttt

SEQ ID NO: 134114 - DNA, 20 bp, Artificial Sequence
  Description of Artificial Sequence: Synthetic oligonucleotide
  Target: LAMA2; (+) strand; PAM type: NRG; PAM sequence: TAG
tggattttcattttgatgtt

SEQ ID NO: 134115 - DNA, 20 bp, Artificial Sequence
  Description of Artificial Sequence: Synthetic oligonucleotide
  Target: LAMA2; (+) strand; PAM type: NRG; PAM sequence: TAG
attttcattttgatgtttag

SEQ ID NO: 134116 - DNA, 20 bp, Artificial Sequence
  Description of Artificial Sequence: Synthetic oligonucleotide
  Target: LAMA2; (+) strand; PAM type: NRG; PAM sequence: AGG
ttttcattttgatgtttagt

SEQ ID NO: 134117 - DNA, 20 bp, Artificial Sequence
  Description of Artificial Sequence: Synthetic oligonucleotide
  Target: LAMA2; (+) strand; PAM type: NRG; PAM sequence: CAG
tgtttagtaggcttaaattc

SEQ ID NO: 134118 - DNA, 20 bp, Artificial Sequence
  Description of Artificial Sequence: Synthetic oligonucleotide
  Target: LAMA2; (+) strand; PAM type: NRG; PAM sequence: CAG
ccagtgtttaacacaacccc

SEQ ID NO: 134119 - DNA, 20 bp, Artificial Sequence
  Description of Artificial Sequence: Synthetic oligonucleotide
  Target: LAMA2; (+) strand; PAM type: NRG; PAM sequence: GAG
taacacaacccccagctttt

SEQ ID NO: 134120 - DNA, 20 bp, Artificial Sequence
  Description of Artificial Sequence: Synthetic oligonucleotide
  Target: LAMA2; (+) strand; PAM type: NRG; PAM sequence: CAG
aacccccagcttttgagtca

SEQ ID NO: 134121 - DNA, 20 bp, Artificial Sequence
  Description of Artificial Sequence: Synthetic oligonucleotide
  Target: LAMA2; (+) strand; PAM type: NRG; PAM sequence: TAG
agtcacagtttatttcatta

SEQ ID NO: 134122 - DNA, 20 bp, Artificial Sequence
  Description of Artificial Sequence: Synthetic oligonucleotide
  Target: LAMA2; (+) strand; PAM type: NRG; PAM sequence: TAG
cacagtttatttcattatag

SEQ ID NO: 134123 - DNA, 20 bp, Artificial Sequence
  Description of Artificial Sequence: Synthetic oligonucleotide
  Target: LAMA2; (+) strand; PAM type: NRG; PAM sequence: CGG
aattacaatatcttatgaac

SEQ ID NO: 134124 - DNA, 20 bp, Artificial Sequence
  Description of Artificial Sequence: Synthetic oligonucleotide
  Target: LAMA2; (+) strand; PAM type: NRG; PAM sequence: GGG
attacaatatcttatgaacc

SEQ ID NO: 134125 - DNA, 20 bp, Artificial Sequence
  Description of Artificial Sequence: Synthetic oligonucleotide
  Target: LAMA2; (+) strand; PAM type: NRG; PAM sequence: TAG
gggcaaaatgttgacttatt

SEQ ID NO: 134126 - DNA, 20 bp, Artificial Sequence
  Description of Artificial Sequence: Synthetic oligonucleotide
  Target: LAMA2; (+) strand; PAM type: NRG; PAM sequence: AGG
ggcaaaatgttgacttattt

SEQ ID NO: 134127 - DNA, 20 bp, Artificial Sequence
  Description of Artificial Sequence: Synthetic oligonucleotide
  Target: LAMA2; (+) strand; PAM type: NRG; PAM sequence: CAG
aaaatatttcatttgaaaat

SEQ ID NO: 134128 - DNA, 20 bp, Artificial Sequence
  Description of Artificial Sequence: Synthetic oligonucleotide
  Target: LAMA2; (+) strand; PAM type: NRG; PAM sequence: TAG
aaatcagctacattcccatg

SEQ ID NO: 134129 - DNA, 20 bp, Artificial Sequence
  Description of Artificial Sequence: Synthetic oligonucleotide
  Target: LAMA2; (+) strand; PAM type: NRG; PAM sequence: AAG
gtagacttttctttatacaa

SEQ ID NO: 134130 - DNA, 20 bp, Artificial Sequence
  Description of Artificial Sequence: Synthetic oligonucleotide
  Target: LAMA2; (+) strand; PAM type: NRG; PAM sequence: CAG
tacaaaagttaaaataatta

SEQ ID NO: 134131 - DNA, 20 bp, Artificial Sequence
  Description of Artificial Sequence: Synthetic oligonucleotide
  Target: LAMA2; (+) strand; PAM type: NRG; PAM sequence: AAG
aaagttaaaataattacaga

SEQ ID NO: 134132 - DNA, 20 bp, Artificial Sequence
  Description of Artificial Sequence: Synthetic oligonucleotide
  Target: LAMA2; (+) strand; PAM type: NRG; PAM sequence: AGG
aagttaaaataattacagaa

SEQ ID NO: 134133 - DNA, 20 bp, Artificial Sequence
  Description of Artificial Sequence: Synthetic oligonucleotide
  Target: LAMA2; (+) strand; PAM type: NRG; PAM sequence: TAG
aattattctgatgctaaaat

SEQ ID NO: 134134 - DNA, 20 bp, Artificial Sequence
  Description of Artificial Sequence: Synthetic oligonucleotide
  Target: LAMA2; (+) strand; PAM type: NRG; PAM sequence: AAG
attagcctttcattgatttc

SEQ ID NO: 134135 - DNA, 20 bp, Artificial Sequence
  Description of Artificial Sequence: Synthetic oligonucleotide
  Target: LAMA2; (+) strand; PAM type: NRG; PAM sequence: TAG
agcctttcattgatttcaag

SEQ ID NO: 134136 - DNA, 20 bp, Artificial Sequence
  Description of Artificial Sequence: Synthetic oligonucleotide
  Target: LAMA2; (+) strand; PAM type: NRG; PAM sequence: TGG
gatttcaagtagattgtaat

SEQ ID NO: 134137 - DNA, 20 bp, Artificial Sequence
  Description of Artificial Sequence: Synthetic oligonucleotide
  Target: LAMA2; (+) strand; PAM type: NRG; PAM sequence: TAG
tcaagtagattgtaattggc

SEQ ID NO: 134138 - DNA, 20 bp, Artificial Sequence
  Description of Artificial Sequence: Synthetic oligonucleotide
  Target: LAMA2; (+) strand; PAM type: NRG; PAM sequence: AGG
caagtagattgtaattggct

SEQ ID NO: 134139 - DNA, 20 bp, Artificial Sequence
  Description of Artificial Sequence: Synthetic oligonucleotide
  Target: LAMA2; (+) strand; PAM type: NRG; PAM sequence: CAG
aatacatgctttatgtaata

SEQ ID NO: 134140 - DNA, 20 bp, Artificial Sequence
  Description of Artificial Sequence: Synthetic oligonucleotide
  Target: LAMA2; (+) strand; PAM type: NRG; PAM sequence: CAG
gtttatttcttaaactgata

SEQ ID NO: 134141 - DNA, 20 bp, Artificial Sequence
  Description of Artificial Sequence: Synthetic oligonucleotide
  Target: LAMA2; (+) strand; PAM type: NRG; PAM sequence: AAG
atttcttaaactgatacaga

SEQ ID NO: 134142 - DNA, 20 bp, Artificial Sequence
  Description of Artificial Sequence: Synthetic oligonucleotide
  Target: LAMA2; (+) strand; PAM type: NRG; PAM sequence: TGG
acagaaagtgcacataattc

SEQ ID NO: 134143 - DNA, 20 bp, Artificial Sequence
  Description of Artificial Sequence: Synthetic oligonucleotide
  Target: LAMA2; (+) strand; PAM type: NRG; PAM sequence: AAG
gaaagtgcacataattctgg

SEQ ID NO: 134144 - DNA, 20 bp, Artificial Sequence
  Description of Artificial Sequence: Synthetic oligonucleotide
  Target: LAMA2; (+) strand; PAM type: NRG; PAM sequence: AAG
ctggaagtaaaaatgttcaa

SEQ ID NO: 134145 - DNA, 20 bp, Artificial Sequence
  Description of Artificial Sequence: Synthetic oligonucleotide
  Target: LAMA2; (+) strand; PAM type: NRG; PAM sequence: AAG
agtaaaaatgttcaaaagct

SEQ ID NO: 134146 - DNA, 20 bp, Artificial Sequence
  Description of Artificial Sequence: Synthetic oligonucleotide
  Target: LAMA2; (+) strand; PAM type: NRG; PAM sequence: AAG
aaaaatgttcaaaagctaag

SEQ ID NO: 134147 - DNA, 20 bp, Artificial Sequence
  Description of Artificial Sequence: Synthetic oligonucleotide
  Target: LAMA2; (+) strand; PAM type: NRG; PAM sequence: TAG
caatttgctacaaacatata

SEQ ID NO: 134148 - DNA, 20 bp, Artificial Sequence
  Description of Artificial Sequence: Synthetic oligonucleotide
  Target: LAMA2; (+) strand; PAM type: NRG; PAM sequence: GAG
atttgctacaaacatatata

SEQ ID NO: 134149 - DNA, 20 bp, Artificial Sequence
  Description of Artificial Sequence: Synthetic oligonucleotide
  Target: LAMA2; (+) strand; PAM type: NRG; PAM sequence: TAG
ctacaaacatatatagagtg

SEQ ID NO: 134150 - DNA, 20 bp, Artificial Sequence
  Description of Artificial Sequence: Synthetic oligonucleotide
  Target: LAMA2; (+) strand; PAM type: NRG; PAM sequence: TAG
tatagagtgtagttattttc

SEQ ID NO: 134151 - DNA, 20 bp, Artificial Sequence
  Description of Artificial Sequence: Synthetic oligonucleotide
  Target: LAMA2; (+) strand; PAM type: NRG; PAM sequence: AAG
tgtagttattttctagccat

SEQ ID NO: 134152 - DNA, 20 bp, Artificial Sequence
  Description of Artificial Sequence: Synthetic oligonucleotide
  Target: LAMA2; (+) strand; PAM type: NRG; PAM sequence: TAG
tattttctagccataagaat

SEQ ID NO: 134153 - DNA, 20 bp, Artificial Sequence
  Description of Artificial Sequence: Synthetic oligonucleotide
  Target: LAMA2; (+) strand; PAM type: NRG; PAM sequence: CAG
tttctagccataagaattag

SEQ ID NO: 134154 - DNA, 20 bp, Artificial Sequence
  Description of Artificial Sequence: Synthetic oligonucleotide
  Target: LAMA2; (+) strand; PAM type: NRG; PAM sequence: AAG
ctagccataagaattagcag

SEQ ID NO: 134155 - DNA, 20 bp, Artificial Sequence
  Description of Artificial Sequence: Synthetic oligonucleotide
  Target: LAMA2; (+) strand; PAM type: NRG; PAM sequence: TGG
ataagaattagcagaagctt

SEQ ID NO: 134156 - DNA, 20 bp, Artificial Sequence
  Description of Artificial Sequence: Synthetic oligonucleotide
  Target: LAMA2; (+) strand; PAM type: NRG; PAM sequence: GAG
aagaattagcagaagctttg

SEQ ID NO: 134157 - DNA, 20 bp, Artificial Sequence
  Description of Artificial Sequence: Synthetic oligonucleotide
  Target: LAMA2; (+) strand; PAM type: NRG; PAM sequence: GAG
gaattagcagaagctttgga

SEQ ID NO: 134158 - DNA, 20 bp, Artificial Sequence
  Description of Artificial Sequence: Synthetic oligonucleotide
  Target: LAMA2; (+) strand; PAM type: NRG; PAM sequence: AAG
agcagaagctttggagagaa

SEQ ID NO: 134159 - DNA, 20 bp, Artificial Sequence
  Description of Artificial Sequence: Synthetic oligonucleotide
  Target: LAMA2; (+) strand; PAM type: NRG; PAM sequence: AGG
gcagaagctttggagagaaa

SEQ ID NO: 134160 - DNA, 20 bp, Artificial Sequence
  Description of Artificial Sequence: Synthetic oligonucleotide
  Target: LAMA2; (+) strand; PAM type: NRG; PAM sequence: TAG
gaagctttggagagaaaagg

SEQ ID NO: 134161 - DNA, 20 bp, Artificial Sequence
  Description of Artificial Sequence: Synthetic oligonucleotide
  Target: LAMA2; (+) strand; PAM type: NRG; PAM sequence: AGG
aagctttggagagaaaaggt

SEQ ID NO: 134162 - DNA, 20 bp, Artificial Sequence
  Description of Artificial Sequence: Synthetic oligonucleotide
  Target: LAMA2; (+) strand; PAM type: NRG; PAM sequence: GAG
gctttggagagaaaaggtag

SEQ ID NO: 134163 - DNA, 20 bp, Artificial Sequence
  Description of Artificial Sequence: Synthetic oligonucleotide
  Target: LAMA2; (+) strand; PAM type: NRG; PAM sequence: GAG
ggtaggagactgaatgccct

SEQ ID NO: 134164 - DNA, 20 bp, Artificial Sequence
  Description of Artificial Sequence: Synthetic oligonucleotide
  Target: LAMA2; (+) strand; PAM type: NRG; PAM sequence: TAG
gccctgagcatccctttgaa

SEQ ID NO: 134165 - DNA, 20 bp, Artificial Sequence
  Description of Artificial Sequence: Synthetic oligonucleotide
  Target: LAMA2; (+) strand; PAM type: NRG; PAM sequence: CAG
gagcatccctttgaatagct

SEQ ID NO: 134166 - DNA, 20 bp, Artificial Sequence
  Description of Artificial Sequence: Synthetic oligonucleotide
  Target: LAMA2; (+) strand; PAM type: NRG; PAM sequence: AGG
agcatccctttgaatagctc

SEQ ID NO: 134167 - DNA, 20 bp, Artificial Sequence
  Description of Artificial Sequence: Synthetic oligonucleotide
  Target: LAMA2; (+) strand; PAM type: NRG; PAM sequence: AAG
tccctttgaatagctcaggc

SEQ ID NO: 134168 - DNA, 20 bp, Artificial Sequence
  Description of Artificial Sequence: Synthetic oligonucleotide
  Target: LAMA2; (+) strand; PAM type: NRG; PAM sequence: AAG
ctttgaatagctcaggcaag

SEQ ID NO: 134169 - DNA, 20 bp, Artificial Sequence
  Description of Artificial Sequence: Synthetic oligonucleotide
  Target: LAMA2; (+) strand; PAM type: NRG; PAM sequence: GAG
ttgaatagctcaggcaagaa

SEQ ID NO: 134170 - DNA, 20 bp, Artificial Sequence
  Description of Artificial Sequence: Synthetic oligonucleotide
  Target: LAMA2; (+) strand; PAM type: NRG; PAM sequence: AGG
tgaatagctcaggcaagaag

SEQ ID NO: 134171 - DNA, 20 bp, Artificial Sequence
  Description of Artificial Sequence: Synthetic oligonucleotide
  Target: LAMA2; (+) strand; PAM type: NRG; PAM sequence: CAG
aagaagaggtgctattatcc

SEQ ID NO: 134172 - DNA, 20 bp, Artificial Sequence
  Description of Artificial Sequence: Synthetic oligonucleotide
  Target: LAMA2; (+) strand; PAM type: NRG; PAM sequence: AGG
agaagaggtgctattatccc

SEQ ID NO: 134173 - DNA, 20 bp, Artificial Sequence
  Description of Artificial Sequence: Synthetic oligonucleotide
  Target: LAMA2; (+) strand; PAM type: NRG; PAM sequence: GAG
aagaggtgctattatcccag

SEQ ID NO: 134174 - DNA, 20 bp, Artificial Sequence
  Description of Artificial Sequence: Synthetic oligonucleotide
  Target: LAMA2; (+) strand; PAM type: NRG; PAM sequence: AGG
agaggtgctattatcccagg

SEQ ID NO: 134175 - DNA, 20 bp, Artificial Sequence
  Description of Artificial Sequence: Synthetic oligonucleotide
  Target: LAMA2; (+) strand; PAM type: NRG; PAM sequence: GAG
aggtgctattatcccaggag

SEQ ID NO: 134176 - DNA, 20 bp, Artificial Sequence
  Description of Artificial Sequence: Synthetic oligonucleotide
  Target: LAMA2; (+) strand; PAM type: NRG; PAM sequence: AAG
ttatcccaggaggagactgt

SEQ ID NO: 134177 - DNA, 20 bp, Artificial Sequence
  Description of Artificial Sequence: Synthetic oligonucleotide
  Target: LAMA2; (+) strand; PAM type: NRG; PAM sequence: AAG
aagtgacgtttgtgtaattc

SEQ ID NO: 134178 - DNA, 20 bp, Artificial Sequence
  Description of Artificial Sequence: Synthetic oligonucleotide
  Target: LAMA2; (+) strand; PAM type: NRG; PAM sequence: TGG
taattcaagtatgtcctgcc

SEQ ID NO: 134179 - DNA, 20 bp, Artificial Sequence
  Description of Artificial Sequence: Synthetic oligonucleotide
  Target: LAMA2; (+) strand; PAM type: NRG; PAM sequence: AAG
caagtatgtcctgcctggat

SEQ ID NO: 134180 - DNA, 20 bp, Artificial Sequence
  Description of Artificial Sequence: Synthetic oligonucleotide
  Target: LAMA2; (+) strand; PAM type: NRG; PAM sequence: AGG
aagtatgtcctgcctggata

SEQ ID NO: 134181 - DNA, 20 bp, Artificial Sequence
  Description of Artificial Sequence: Synthetic oligonucleotide
  Target: LAMA2; (+) strand; PAM type: NRG; PAM sequence: TGG
cctgcctggataaggacttg

SEQ ID NO: 134182 - DNA, 20 bp, Artificial Sequence
  Description of Artificial Sequence: Synthetic oligonucleotide
  Target: LAMA2; (+) strand; PAM type: NRG; PAM sequence: GGG
ctgcctggataaggacttgt

SEQ ID NO: 134183 - DNA, 20 bp, Artificial Sequence
  Description of Artificial Sequence: Synthetic oligonucleotide
  Target: LAMA2; (+) strand; PAM type: NRG; PAM sequence: AAG
ctggataaggacttgtgggt

SEQ ID NO: 134184 - DNA, 20 bp, Artificial Sequence
  Description of Artificial Sequence: Synthetic oligonucleotide
  Target: LAMA2; (+) strand; PAM type: NRG; PAM sequence: AGG
tggataaggacttgtgggta

SEQ ID NO: 134185 - DNA, 20 bp, Artificial Sequence
  Description of Artificial Sequence: Synthetic oligonucleotide
  Target: LAMA2; (+) strand; PAM type: NRG; PAM sequence: CAG
aggacttgtgggtaaggaaa

SEQ ID NO: 134186 - DNA, 20 bp, Artificial Sequence
  Description of Artificial Sequence: Synthetic oligonucleotide
  Target: LAMA2; (+) strand; PAM type: NRG; PAM sequence: GAG
gacttgtgggtaaggaaaca

SEQ ID NO: 134187 - DNA, 20 bp, Artificial Sequence
  Description of Artificial Sequence: Synthetic oligonucleotide
  Target: LAMA2; (+) strand; PAM type: NRG; PAM sequence: TAG
ttgtgggtaaggaaacagag

SEQ ID NO: 134188 - DNA, 20 bp, Artificial Sequence
  Description of Artificial Sequence: Synthetic oligonucleotide
  Target: LAMA2; (+) strand; PAM type: NRG; PAM sequence: TAG
taaggaaacagagtagtaaa

SEQ ID NO: 134189 - DNA, 20 bp, Artificial Sequence
  Description of Artificial Sequence: Synthetic oligonucleotide
  Target: LAMA2; (+) strand; PAM type: NRG; PAM sequence: AAG
aacagagtagtaaatagcca

SEQ ID NO: 134190 - DNA, 20 bp, Artificial Sequence
  Description of Artificial Sequence: Synthetic oligonucleotide
  Target: LAMA2; (+) strand; PAM type: NRG; PAM sequence: AGG
acagagtagtaaatagccaa

SEQ ID NO: 134191 - DNA, 20 bp, Artificial Sequence
  Description of Artificial Sequence: Synthetic oligonucleotide
  Target: LAMA2; (+) strand; PAM type: NRG; PAM sequence: GGG
cagagtagtaaatagccaaa

SEQ ID NO: 134192 - DNA, 20 bp, Artificial Sequence
  Description of Artificial Sequence: Synthetic oligonucleotide
  Target: LAMA2; (+) strand; PAM type: NRG; PAM sequence: AAG
agtagtaaatagccaaaggg

SEQ ID NO: 134193 - DNA, 20 bp, Artificial Sequence
  Description of Artificial Sequence: Synthetic oligonucleotide
  Target: LAMA2; (+) strand; PAM type: NRG; PAM sequence: AAG
gtaaatagccaaagggaaga

SEQ ID NO: 134194 - DNA, 20 bp, Artificial Sequence
  Description of Artificial Sequence: Synthetic oligonucleotide
  Target: LAMA2; (+) strand; PAM type: NRG; PAM sequence: CAG
atagccaaagggaagaaagt

SEQ ID NO: 134195 - DNA, 20 bp, Artificial Sequence
  Description of Artificial Sequence: Synthetic oligonucleotide
  Target: LAMA2; (+) strand; PAM type: NRG; PAM sequence: AAG
caaagggaagaaagtcagaa

SEQ ID NO: 134196 - DNA, 20 bp, Artificial Sequence
  Description of Artificial Sequence: Synthetic oligonucleotide
  Target: LAMA2; (+) strand; PAM type: NRG; PAM sequence: TAG
ttaaatatatgttatttctt

SEQ ID NO: 134197 - DNA, 20 bp, Artificial Sequence
  Description of Artificial Sequence: Synthetic oligonucleotide
  Target: LAMA2; (+) strand; PAM type: NRG; PAM sequence: AGG
taaatatatgttatttcttt

SEQ ID NO: 134198 - DNA, 20 bp, Artificial Sequence
  Description of Artificial Sequence: Synthetic oligonucleotide
  Target: LAMA2; (+) strand; PAM type: NRG; PAM sequence: GGG
aaatatatgttatttcttta

SEQ ID NO: 134199 - DNA, 20 bp, Artificial Sequence
  Description of Artificial Sequence: Synthetic oligonucleotide
  Target: LAMA2; (+) strand; PAM type: NRG; PAM sequence: CAG
tgttatttctttagggactg

SEQ ID NO: 134200 - DNA, 20 bp, Artificial Sequence
  Description of Artificial Sequence: Synthetic oligonucleotide
  Target: LAMA2; (+) strand; PAM type: NRG; PAM sequence: AGG
gttatttctttagggactgc

SEQ ID NO: 134201 - DNA, 20 bp, Artificial Sequence
  Description of Artificial Sequence: Synthetic oligonucleotide
  Target: LAMA2; (+) strand; PAM type: NRG; PAM sequence: AAG
tagggactgcaggttttaca

SEQ ID NO: 134202 - DNA, 20 bp, Artificial Sequence
  Description of Artificial Sequence: Synthetic oligonucleotide
  Target: LAMA2; (+) strand; PAM type: NRG; PAM sequence: GAG
gggactgcaggttttacaaa

SEQ ID NO: 134203 - DNA, 20 bp, Artificial Sequence
  Description of Artificial Sequence: Synthetic oligonucleotide
  Target: LAMA2; (+) strand; PAM type: NRG; PAM sequence: AAG
gcaggttttacaaagagatg

SEQ ID NO: 134204 - DNA, 20 bp, Artificial Sequence
  Description of Artificial Sequence: Synthetic oligonucleotide
  Target: LAMA2; (+) strand; PAM type: NRG; PAM sequence: CGG
caaagagatgaagactaatt

SEQ ID NO: 134205 - DNA, 20 bp, Artificial Sequence
  Description of Artificial Sequence: Synthetic oligonucleotide
  Target: LAMA2; (+) strand; PAM type: NRG; PAM sequence: AAG
ctacttacctctgtttccaa

SEQ ID NO: 134206 - DNA, 20 bp, Artificial Sequence
  Description of Artificial Sequence: Synthetic oligonucleotide
  Target: LAMA2; (+) strand; PAM type: NRG; PAM sequence: AAG
acctctgtttccaaaagaaa

SEQ ID NO: 134207 - DNA, 20 bp, Artificial Sequence
  Description of Artificial Sequence: Synthetic oligonucleotide
  Target: LAMA2; (+) strand; PAM type: NRG; PAM sequence: CAG
ccaaaagaaaaagactcctc

SEQ ID NO: 134208 - DNA, 20 bp, Artificial Sequence
  Description of Artificial Sequence: Synthetic oligonucleotide
  Target: LAMA2; (+) strand; PAM type: NRG; PAM sequence: TGG
aaaaagactcctccagaatg

SEQ ID NO: 134209 - DNA, 20 bp, Artificial Sequence
  Description of Artificial Sequence: Synthetic oligonucleotide
  Target: LAMA2; (+) strand; PAM type: NRG; PAM sequence: AAG
ctcctccagaatgtggtttt

SEQ ID NO: 134210 - DNA, 20 bp, Artificial Sequence
  Description of Artificial Sequence: Synthetic oligonucleotide
  Target: LAMA2; (+) strand; PAM type: NRG; PAM sequence: TAG
ctccagaatgtggttttaag

SEQ ID NO: 134211 - DNA, 20 bp, Artificial Sequence
  Description of Artificial Sequence: Synthetic oligonucleotide
  Target: LAMA2; (+) strand; PAM type: NRG; PAM sequence: AGG
tccagaatgtggttttaagt

SEQ ID NO: 134212 - DNA, 20 bp, Artificial Sequence
  Description of Artificial Sequence: Synthetic oligonucleotide
  Target: LAMA2; (+) strand; PAM type: NRG; PAM sequence: TGG
atgtggttttaagtaggcca

SEQ ID NO: 134213 - DNA, 20 bp, Artificial Sequence
  Description of Artificial Sequence: Synthetic oligonucleotide
  Target: LAMA2; (+) strand; PAM type: NRG; PAM sequence: AAG
ttaagtaggccatggaccaa

SEQ ID NO: 134214 - DNA, 20 bp, Artificial Sequence
  Description of Artificial Sequence: Synthetic oligonucleotide
  Target: LAMA2; (+) strand; PAM type: NRG; PAM sequence: TAG
agtaggccatggaccaaaag

SEQ ID NO: 134215 - DNA, 20 bp, Artificial Sequence
  Description of Artificial Sequence: Synthetic oligonucleotide
  Target: LAMA2; (+) strand; PAM type: NRG; PAM sequence: AGG
gtaggccatggaccaaaagt

SEQ ID NO: 134216 - DNA, 20 bp, Artificial Sequence
  Description of Artificial Sequence: Synthetic oligonucleotide
  Target: LAMA2; (+) strand; PAM type: NRG; PAM sequence: AAG
atggaccaaaagtaggccac

SEQ ID NO: 134217 - DNA, 20 bp, Artificial Sequence
  Description of Artificial Sequence: Synthetic oligonucleotide
  Target: LAMA2; (+) strand; PAM type: NRG; PAM sequence: AGG
tggaccaaaagtaggccaca

SEQ ID NO: 134218 - DNA, 20 bp, Artificial Sequence
  Description of Artificial Sequence: Synthetic oligonucleotide
  Target: LAMA2; (+) strand; PAM type: NRG; PAM sequence: TGG
caaaagtaggccacaaggca

SEQ ID NO: 134219 - DNA, 20 bp, Artificial Sequence
  Description of Artificial Sequence: Synthetic oligonucleotide
  Target: LAMA2; (+) strand; PAM type: NRG; PAM sequence: CAG
aagtaggccacaaggcatgg

SEQ ID NO: 134220 - DNA, 20 bp, Artificial Sequence
  Description of Artificial Sequence: Synthetic oligonucleotide
  Target: LAMA2; (+) strand; PAM type: NRG; PAM sequence: AGG
agtaggccacaaggcatggc

SEQ ID NO: 134221 - DNA, 20 bp, Artificial Sequence
  Description of Artificial Sequence: Synthetic oligonucleotide
  Target: LAMA2; (+) strand; PAM type: NRG; PAM sequence: CAG
aggccacaaggcatggcagg

SEQ ID NO: 134222 - DNA, 20 bp, Artificial Sequence
  Description of Artificial Sequence: Synthetic oligonucleotide
  Target: LAMA2; (+) strand; PAM type: NRG; PAM sequence: AAG
caggcagctttatgaacttc

SEQ ID NO: 134223 - DNA, 20 bp, Artificial Sequence
  Description of Artificial Sequence: Synthetic oligonucleotide
  Target: LAMA2; (+) strand; PAM type: NRG; PAM sequence: AGG
aggcagctttatgaacttca

SEQ ID NO: 134224 - DNA, 20 bp, Artificial Sequence
  Description of Artificial Sequence: Synthetic oligonucleotide
  Target: LAMA2; (+) strand; PAM type: NRG; PAM sequence: TAG
ctttatgaacttcaaggttc

SEQ ID NO: 134225 - DNA, 20 bp, Artificial Sequence
  Description of Artificial Sequence: Synthetic oligonucleotide
  Target: LAMA2; (+) strand; PAM type: NRG; PAM sequence: AGG
tttatgaacttcaaggttct

SEQ ID NO: 134226 - DNA, 20 bp, Artificial Sequence
  Description of Artificial Sequence: Synthetic oligonucleotide
  Target: LAMA2; (+) strand; PAM type: NRG; PAM sequence: TGG
ttctaggaaatttcatccat

SEQ ID NO: 134227 - DNA, 20 bp, Artificial Sequence
  Description of Artificial Sequence: Synthetic oligonucleotide
  Target: LAMA2; (+) strand; PAM type: NRG; PAM sequence: GAG
ctaggaaatttcatccattg

SEQ ID NO: 134228 - DNA, 20 bp, Artificial Sequence
  Description of Artificial Sequence: Synthetic oligonucleotide
  Target: LAMA2; (+) strand; PAM type: NRG; PAM sequence: GAG
aggaaatttcatccattgga

SEQ ID NO: 134229 - DNA, 20 bp, Artificial Sequence
  Description of Artificial Sequence: Synthetic oligonucleotide
  Target: LAMA2; (+) strand; PAM type: NRG; PAM sequence: CAG
tcatccattggagagttctc

SEQ ID NO: 134230 - DNA, 20 bp, Artificial Sequence
  Description of Artificial Sequence: Synthetic oligonucleotide
  Target: LAMA2; (+) strand; PAM type: NRG; PAM sequence: TAG
tccagtgctttaaacaatat

SEQ ID NO: 134231 - DNA, 20 bp, Artificial Sequence
  Description of Artificial Sequence: Synthetic oligonucleotide
  Target: LAMA2; (+) strand; PAM type: NRG; PAM sequence: AAG
gtgctttaaacaatattaga

SEQ ID NO: 134232 - DNA, 20 bp, Artificial Sequence
  Description of Artificial Sequence: Synthetic oligonucleotide
  Target: LAMA2; (+) strand; PAM type: NRG; PAM sequence: CAG
aaacaatattagaaagaaaa

SEQ ID NO: 134233 - DNA, 20 bp, Artificial Sequence
  Description of Artificial Sequence: Synthetic oligonucleotide
  Target: LAMA2; (+) strand; PAM type: NRG; PAM sequence: CGG
caatattagaaagaaaacag

SEQ ID NO: 134234 - DNA, 20 bp, Artificial Sequence
  Description of Artificial Sequence: Synthetic oligonucleotide
  Target: LAMA2; (+) strand; PAM type: NRG; PAM sequence: TAG
gcggtacaaatcaaccatgc

SEQ ID NO: 134235 - DNA, 20 bp, Artificial Sequence
  Description of Artificial Sequence: Synthetic oligonucleotide
  Target: LAMA2; (+) strand; PAM type: NRG; PAM sequence: AAG
ctagtaaaaatctctcctgc

SEQ ID NO: 134236 - DNA, 20 bp, Artificial Sequence
  Description of Artificial Sequence: Synthetic oligonucleotide
  Target: LAMA2; (+) strand; PAM type: NRG; PAM sequence: GAG
ctctcctgcaagacattact

SEQ ID NO: 134237 - DNA, 20 bp, Artificial Sequence
  Description of Artificial Sequence: Synthetic oligonucleotide
  Target: LAMA2; (+) strand; PAM type: NRG; PAM sequence: TGG
tcctgcaagacattactgag

SEQ ID NO: 134238 - DNA, 20 bp, Artificial Sequence
  Description of Artificial Sequence: Synthetic oligonucleotide
  Target: LAMA2; (+) strand; PAM type: NRG; PAM sequence: AAG
caagacattactgagtggtg

SEQ ID NO: 134239 - DNA, 20 bp, Artificial Sequence
  Description of Artificial Sequence: Synthetic oligonucleotide
  Target: LAMA2; (+) strand; PAM type: NRG; PAM sequence: AAG
attactgagtggtgaagact

SEQ ID NO: 134240 - DNA, 20 bp, Artificial Sequence
  Description of Artificial Sequence: Synthetic oligonucleotide
  Target: LAMA2; (+) strand; PAM type: NRG; PAM sequence: TGG
actgagtggtgaagactaag

SEQ ID NO: 134241 - DNA, 20 bp, Artificial Sequence
  Description of Artificial Sequence: Synthetic oligonucleotide
  Target: LAMA2; (+) strand; PAM type: NRG; PAM sequence: TGG
tgccattgttgttgtattgt

SEQ ID NO: 134242 - DNA, 20 bp, Artificial Sequence
  Description of Artificial Sequence: Synthetic oligonucleotide
  Target: LAMA2; (+) strand; PAM type: NRG; PAM sequence: TGG
attgttgttgtattgttggt

SEQ ID NO: 134243 - DNA, 20 bp, Artificial Sequence
  Description of Artificial Sequence: Synthetic oligonucleotide
  Target: LAMA2; (+) strand; PAM type: NRG; PAM sequence: TGG
ttgttgtattgttggttgga

SEQ ID NO: 134244 - DNA, 20 bp, Artificial Sequence
  Description of Artificial Sequence: Synthetic oligonucleotide
  Target: LAMA2; (+) strand; PAM type: NRG; PAM sequence: TGG
gttggttggatggtttgcct

SEQ ID NO: 134245 - DNA, 20 bp, Artificial Sequence
  Description of Artificial Sequence: Synthetic oligonucleotide
  Target: LAMA2; (+) strand; PAM type: NRG; PAM sequence: TAG
gcttcttttttgttgatttt

SEQ ID NO: 134246 - DNA, 20 bp, Artificial Sequence
  Description of Artificial Sequence: Synthetic oligonucleotide
  Target: LAMA2; (+) strand; PAM type: NRG; PAM sequence: AAG
agcatataaataaaatttat

SEQ ID NO: 134247 - DNA, 20 bp, Artificial Sequence
  Description of Artificial Sequence: Synthetic oligonucleotide
  Target: LAMA2; (+) strand; PAM type: NRG; PAM sequence: AAG
aaaatttataagcccaacaa

SEQ ID NO: 134248 - DNA, 20 bp, Artificial Sequence
  Description of Artificial Sequence: Synthetic oligonucleotide
  Target: LAMA2; (+) strand; PAM type: NRG; PAM sequence: AAG
ttataagcccaacaaaagaa

SEQ ID NO: 134249 - DNA, 20 bp, Artificial Sequence
  Description of Artificial Sequence: Synthetic oligonucleotide
  Target: LAMA2; (+) strand; PAM type: NRG; PAM sequence: AAG
aagcccaacaaaagaaaaga

SEQ ID NO: 134250 - DNA, 20 bp, Artificial Sequence
  Description of Artificial Sequence: Synthetic oligonucleotide
  Target: LAMA2; (+) strand; PAM type: NRG; PAM sequence: AAG
agaaaagaaagcaatctttc

SEQ ID NO: 134251 - DNA, 20 bp, Artificial Sequence
  Description of Artificial Sequence: Synthetic oligonucleotide
  Target: LAMA2; (+) strand; PAM type: NRG; PAM sequence: GAG
aaaagaaagcaatctttcaa

SEQ ID NO: 134252 - DNA, 20 bp, Artificial Sequence
  Description of Artificial Sequence: Synthetic oligonucleotide
  Target: LAMA2; (+) strand; PAM type: NRG; PAM sequence: AGG
aaagaaagcaatctttcaag

SEQ ID NO: 134253 - DNA, 20 bp, Artificial Sequence
  Description of Artificial Sequence: Synthetic oligonucleotide
  Target: LAMA2; (+) strand; PAM type: NRG; PAM sequence: AAG
gcaatctttcaagaggcttt

SEQ ID NO: 134254 - DNA, 20 bp, Artificial Sequence
  Description of Artificial Sequence: Synthetic oligonucleotide
  Target: LAMA2; (+) strand; PAM type: NRG; PAM sequence: GAG
agataacatcatacattttc

SEQ ID NO: 134255 - DNA, 20 bp, Artificial Sequence
  Description of Artificial Sequence: Synthetic oligonucleotide
  Target: LAMA2; (+) strand; PAM type: NRG; PAM sequence: AGG
gataacatcatacattttcg

SEQ ID NO: 134256 - DNA, 20 bp, Artificial Sequence
  Description of Artificial Sequence: Synthetic oligonucleotide
  Target: LAMA2; (+) strand; PAM type: NRG; PAM sequence: AAG
catacattttcgaggttttt

SEQ ID NO: 134257 - DNA, 20 bp, Artificial Sequence
  Description of Artificial Sequence: Synthetic oligonucleotide
  Target: LAMA2; (+) strand; PAM type: NRG; PAM sequence: AGG
atacattttcgaggttttta

SEQ ID NO: 134258 - DNA, 20 bp, Artificial Sequence
  Description of Artificial Sequence: Synthetic oligonucleotide
  Target: LAMA2; (+) strand; PAM type: NRG; PAM sequence: GAG
ttttcgaggtttttaaggct

SEQ ID NO: 134259 - DNA, 20 bp, Artificial Sequence
  Description of Artificial Sequence: Synthetic oligonucleotide
  Target: LAMA2; (+) strand; PAM type: NRG; PAM sequence: AAG
ttctattttgttttacttaa

SEQ ID NO: 134260 - DNA, 20 bp, Artificial Sequence
  Description of Artificial Sequence: Synthetic oligonucleotide
  Target: LAMA2; (+) strand; PAM type: NRG; PAM sequence: AGG
tctattttgttttacttaaa

SEQ ID NO: 134261 - DNA, 20 bp, Artificial Sequence
  Description of Artificial Sequence: Synthetic oligonucleotide
  Target: LAMA2; (+) strand; PAM type: NRG; PAM sequence: CGG
ttttgcttattcatgaaact

SEQ ID NO: 134262 - DNA, 20 bp, Artificial Sequence
  Description of Artificial Sequence: Synthetic oligonucleotide
  Target: LAMA2; (+) strand; PAM type: NRG; PAM sequence: GGG
tttgcttattcatgaaactc

SEQ ID NO: 134263 - DNA, 20 bp, Artificial Sequence
  Description of Artificial Sequence: Synthetic oligonucleotide
  Target: LAMA2; (+) strand; PAM type: NRG; PAM sequence: GAG
tgcttattcatgaaactcgg

SEQ ID NO: 134264 - DNA, 20 bp, Artificial Sequence
  Description of Artificial Sequence: Synthetic oligonucleotide
  Target: LAMA2; (+) strand; PAM type: NRG; PAM sequence: TGG
tcgggagaaattctgtctat

SEQ ID NO: 134265 - DNA, 20 bp, Artificial Sequence
  Description of Artificial Sequence: Synthetic oligonucleotide
  Target: LAMA2; (+) strand; PAM type: NRG; PAM sequence: CAG
ggagaaattctgtctattgg

SEQ ID NO: 134266 - DNA, 20 bp, Artificial Sequence
  Description of Artificial Sequence: Synthetic oligonucleotide
  Target: LAMA2; (+) strand; PAM type: NRG; PAM sequence: AGG
gagaaattctgtctattggc

SEQ ID NO: 134267 - DNA, 20 bp, Artificial Sequence
  Description of Artificial Sequence: Synthetic oligonucleotide
  Target: LAMA2; (+) strand; PAM type: NRG; PAM sequence: AAG
cactcatttactccgaaatt

SEQ ID NO: 134268 - DNA, 20 bp, Artificial Sequence
  Description of Artificial Sequence: Synthetic oligonucleotide
  Target: LAMA2; (+) strand; PAM type: NRG; PAM sequence: CAG
ttactccgaaattaagtgct

SEQ ID NO: 134269 - DNA, 20 bp, Artificial Sequence
  Description of Artificial Sequence: Synthetic oligonucleotide
  Target: LAMA2; (+) strand; PAM type: NRG; PAM sequence: CAG
gcatgttataaattcattct

SEQ ID NO: 134270 - DNA, 20 bp, Artificial Sequence
  Description of Artificial Sequence: Synthetic oligonucleotide
  Target: LAMA2; (+) strand; PAM type: NRG; PAM sequence: TGG
tctcagttgcaaaattttct

SEQ ID NO: 134271 - DNA, 20 bp, Artificial Sequence
  Description of Artificial Sequence: Synthetic oligonucleotide
  Target: LAMA2; (+) strand; PAM type: NRG; PAM sequence: AAG
gcaaaattttcttggtgctt

SEQ ID NO: 134272 - DNA, 20 bp, Artificial Sequence
  Description of Artificial Sequence: Synthetic oligonucleotide
  Target: LAMA2; (+) strand; PAM type: NRG; PAM sequence: TAG
aattgtactttaatcgcttt

SEQ ID NO: 134273 - DNA, 20 bp, Artificial Sequence
  Description of Artificial Sequence: Synthetic oligonucleotide
  Target: LAMA2; (+) strand; PAM type: NRG; PAM sequence: AAG
tttaatcgcttttagccaaa

SEQ ID NO: 134274 - DNA, 20 bp, Artificial Sequence
  Description of Artificial Sequence: Synthetic oligonucleotide
  Target: LAMA2; (+) strand; PAM type: NRG; PAM sequence: TAG
tcgcttttagccaaaaagtt

SEQ ID NO: 134275 - DNA, 20 bp, Artificial Sequence
  Description of Artificial Sequence: Synthetic oligonucleotide
  Target: LAMA2; (+) strand; PAM type: NRG; PAM sequence: TAG
gccaaaaagtttagcaaaaa

SEQ ID NO: 134276 - DNA, 20 bp, Artificial Sequence
  Description of Artificial Sequence: Synthetic oligonucleotide
  Target: LAMA2; (+) strand; PAM type: NRG; PAM sequence: TAG
gcaaaaatagtactttgaca

SEQ ID NO: 134277 - DNA, 20 bp, Artificial Sequence
  Description of Artificial Sequence: Synthetic oligonucleotide
  Target: LAMA2; (+) strand; PAM type: NRG; PAM sequence: CAG
gtactttgacatagtactga

SEQ ID NO: 134278 - DNA, 20 bp, Artificial Sequence
  Description of Artificial Sequence: Synthetic oligonucleotide
  Target: LAMA2; (+) strand; PAM type: NRG; PAM sequence: TAG
tagtactgacagcctgtgct

SEQ ID NO: 134279 - DNA, 20 bp, Artificial Sequence
  Description of Artificial Sequence: Synthetic oligonucleotide
  Target: LAMA2; (+) strand; PAM type: NRG; PAM sequence: TGG
tgcttagattttgataaatg

SEQ ID NO: 134280 - DNA, 20 bp, Artificial Sequence
  Description of Artificial Sequence: Synthetic oligonucleotide
  Target: LAMA2; (+) strand; PAM type: NRG; PAM sequence: TAG
ataaatgtggacaaaatcaa

SEQ ID NO: 134281 - DNA, 20 bp, Artificial Sequence
  Description of Artificial Sequence: Synthetic oligonucleotide
  Target: LAMA2; (+) strand; PAM type: NRG; PAM sequence: TAG
atgtggacaaaatcaataga

SEQ ID NO: 134282 - DNA, 20 bp, Artificial Sequence
  Description of Artificial Sequence: Synthetic oligonucleotide
  Target: LAMA2; (+) strand; PAM type: NRG; PAM sequence: AAG
aaatcaatagatagatgcat

SEQ ID NO: 134283 - DNA, 20 bp, Artificial Sequence
  Description of Artificial Sequence: Synthetic oligonucleotide
  Target: LAMA2; (+) strand; PAM type: NRG; PAM sequence: AGG
aatcaatagatagatgcata

SEQ ID NO: 134284 - DNA, 20 bp, Artificial Sequence
  Description of Artificial Sequence: Synthetic oligonucleotide
  Target: LAMA2; (+) strand; PAM type: NRG; PAM sequence: GAG
tcaatagatagatgcataag

SEQ ID NO: 134285 - DNA, 20 bp, Artificial Sequence
  Description of Artificial Sequence: Synthetic oligonucleotide
  Target: LAMA2; (+) strand; PAM type: NRG; PAM sequence: CAG
atagatgcataaggagtgcc

SEQ ID NO: 134286 - DNA, 20 bp, Artificial Sequence
  Description of Artificial Sequence: Synthetic oligonucleotide
  Target: LAMA2; (+) strand; PAM type: NRG; PAM sequence: AAG
ataaaatcatcatacttcaa

SEQ ID NO: 134287 - DNA, 20 bp, Artificial Sequence
  Description of Artificial Sequence: Synthetic oligonucleotide
  Target: LAMA2; (+) strand; PAM type: NRG; PAM sequence: CAG
gctttttctaacataactca

SEQ ID NO: 134288 - DNA, 20 bp, Artificial Sequence
  Description of Artificial Sequence: Synthetic oligonucleotide
  Target: LAMA2; (+) strand; PAM type: NRG; PAM sequence: TAG
tctaacataactcacagctg

SEQ ID NO: 134289 - DNA, 20 bp, Artificial Sequence
  Description of Artificial Sequence: Synthetic oligonucleotide
  Target: LAMA2; (+) strand; PAM type: NRG; PAM sequence: AAG
agacttttcctttcaataat

SEQ ID NO: 134290 - DNA, 20 bp, Artificial Sequence
  Description of Artificial Sequence: Synthetic oligonucleotide
  Target: LAMA2; (+) strand; PAM type: NRG; PAM sequence: TAG
ataagcaaaaacaattttca

SEQ ID NO: 134291 - DNA, 20 bp, Artificial Sequence
  Description of Artificial Sequence: Synthetic oligonucleotide
  Target: LAMA2; (+) strand; PAM type: NRG; PAM sequence: AAG
ccgacacaactttctattta

SEQ ID NO: 134292 - DNA, 20 bp, Artificial Sequence
  Description of Artificial Sequence: Synthetic oligonucleotide
  Target: LAMA2; (+) strand; PAM type: NRG; PAM sequence: GAG
gacacaactttctatttaaa

SEQ ID NO: 134293 - DNA, 20 bp, Artificial Sequence
  Description of Artificial Sequence: Synthetic oligonucleotide
  Target: LAMA2; (+) strand; PAM type: NRG; PAM sequence: AGG
acacaactttctatttaaag

SEQ ID NO: 134294 - DNA, 20 bp, Artificial Sequence
  Description of Artificial Sequence: Synthetic oligonucleotide
  Target: LAMA2; (+) strand; PAM type: NRG; PAM sequence: CAG
atttaaagaggacttctttg

SEQ ID NO: 134295 - DNA, 20 bp, Artificial Sequence
  Description of Artificial Sequence: Synthetic oligonucleotide
  Target: LAMA2; (+) strand; PAM type: NRG; PAM sequence: AGG
tttaaagaggacttctttgc

SEQ ID NO: 134296 - DNA, 20 bp, Artificial Sequence
  Description of Artificial Sequence: Synthetic oligonucleotide
  Target: LAMA2; (+) strand; PAM type: NRG; PAM sequence: GAG
taaagaggacttctttgcag

SEQ ID NO: 134297 - DNA, 20 bp, Artificial Sequence
  Description of Artificial Sequence: Synthetic oligonucleotide
  Target: LAMA2; (+) strand; PAM type: NRG; PAM sequence: AGG
aaagaggacttctttgcagg

SEQ ID NO: 134298 - DNA, 20 bp, Artificial Sequence
  Description of Artificial Sequence: Synthetic oligonucleotide
  Target: LAMA2; (+) strand; PAM type: NRG; PAM sequence: CAG
gaggacttctttgcaggagg

SEQ ID NO: 134299 - DNA, 20 bp, Artificial Sequence
  Description of Artificial Sequence: Synthetic oligonucleotide
  Target: LAMA2; (+) strand; PAM type: NRG; PAM sequence: TAG
taataactcaacaaaataaa

SEQ ID NO: 134300 - DNA, 20 bp, Artificial Sequence
  Description of Artificial Sequence: Synthetic oligonucleotide
  Target: LAMA2; (+) strand; PAM type: NRG; PAM sequence: AAG
caaaatactattatccccaa

SEQ ID NO: 134301 - DNA, 20 bp, Artificial Sequence
  Description of Artificial Sequence: Synthetic oligonucleotide
  Target: LAMA2; (+) strand; PAM type: NRG; PAM sequence: TGG
actattatccccaaaagtaa

SEQ ID NO: 134302 - DNA, 20 bp, Artificial Sequence
  Description of Artificial Sequence: Synthetic oligonucleotide
  Target: LAMA2; (+) strand; PAM type: NRG; PAM sequence: GGG
ctattatccccaaaagtaat

SEQ ID NO: 134303 - DNA, 20 bp, Artificial Sequence
  Description of Artificial Sequence: Synthetic oligonucleotide
  Target: LAMA2; (+) strand; PAM type: NRG; PAM sequence: TAG
tgggaattttaaaaattatt

SEQ ID NO: 134304 - DNA, 20 bp, Artificial Sequence
  Description of Artificial Sequence: Synthetic oligonucleotide
  Target: LAMA2; (+) strand; PAM type: NRG; PAM sequence: CAG
taaaaattatttagtgtttc

SEQ ID NO: 134305 - DNA, 20 bp, Artificial Sequence
  Description of Artificial Sequence: Synthetic oligonucleotide
  Target: LAMA2; (+) strand; PAM type: NRG; PAM sequence: TAG
attatttagtgtttccagtt

SEQ ID NO: 134306 - DNA, 20 bp, Artificial Sequence
  Description of Artificial Sequence: Synthetic oligonucleotide
  Target: LAMA2; (+) strand; PAM type: NRG; PAM sequence: AAG
tgtttccagtttagatattt

SEQ ID NO: 134307 - DNA, 20 bp, Artificial Sequence
  Description of Artificial Sequence: Synthetic oligonucleotide
  Target: LAMA2; (+) strand; PAM type: NRG; PAM sequence: CAG
ccaccctccacccgttatat

SEQ ID NO: 134308 - DNA, 20 bp, Artificial Sequence
  Description of Artificial Sequence: Synthetic oligonucleotide
  Target: LAMA2; (+) strand; PAM type: NRG; PAM sequence: AGG
caccctccacccgttatatc

SEQ ID NO: 134309 - DNA, 20 bp, Artificial Sequence
  Description of Artificial Sequence: Synthetic oligonucleotide
  Target: LAMA2; (+) strand; PAM type: NRG; PAM sequence: GGG
accctccacccgttatatca

SEQ ID NO: 134310 - DNA, 20 bp, Artificial Sequence
  Description of Artificial Sequence: Synthetic oligonucleotide
  Target: LAMA2; (+) strand; PAM type: NRG; PAM sequence: TAG
ccatccattgtcttttttct

SEQ ID NO: 134311 - DNA, 20 bp, Artificial Sequence
  Description of Artificial Sequence: Synthetic oligonucleotide
  Target: LAMA2; (+) strand; PAM type: NRG; PAM sequence: TAG
atcttgatatgtcaccctat

SEQ ID NO: 134312 - DNA, 20 bp, Artificial Sequence
  Description of Artificial Sequence: Synthetic oligonucleotide
  Target: LAMA2; (+) strand; PAM type: NRG; PAM sequence: CAG
ccctattagttttttccttg

SEQ ID NO: 134313 - DNA, 20 bp, Artificial Sequence
  Description of Artificial Sequence: Synthetic oligonucleotide
  Target: LAMA2; (+) strand; PAM type: NRG; PAM sequence: CAG
cctcatattcattcattctt

SEQ ID NO: 134314 - DNA, 20 bp, Artificial Sequence
  Description of Artificial Sequence: Synthetic oligonucleotide
  Target: LAMA2; (+) strand; PAM type: NRG; PAM sequence: TGG
atattcattcattcttcagc

SEQ ID NO: 134315 - DNA, 20 bp, Artificial Sequence
  Description of Artificial Sequence: Synthetic oligonucleotide
  Target: LAMA2; (+) strand; PAM type: NRG; PAM sequence: TGG
ttcattcattcttcagctgg

SEQ ID NO: 134316 - DNA, 20 bp, Artificial Sequence
  Description of Artificial Sequence: Synthetic oligonucleotide
  Target: LAMA2; (+) strand; PAM type: NRG; PAM sequence: CAG
attcttcagctggtggcaat

SEQ ID NO: 134317 - DNA, 20 bp, Artificial Sequence
  Description of Artificial Sequence: Synthetic oligonucleotide
  Target: LAMA2; (+) strand; PAM type: NRG; PAM sequence: CAG
agctggtggcaatcagcatt

SEQ ID NO: 134318 - DNA, 20 bp, Artificial Sequence
  Description of Artificial Sequence: Synthetic oligonucleotide
  Target: LAMA2; (+) strand; PAM type: NRG; PAM sequence: AAG
aaactgttattaaatccaat

SEQ ID NO: 134319 - DNA, 20 bp, Artificial Sequence
  Description of Artificial Sequence: Synthetic oligonucleotide
  Target: LAMA2; (+) strand; PAM type: NRG; PAM sequence: AAG
aagcctttcatttctgaatc

SEQ ID NO: 134320 - DNA, 20 bp, Artificial Sequence
  Description of Artificial Sequence: Synthetic oligonucleotide
  Target: LAMA2; (+) strand; PAM type: NRG; PAM sequence: AAG
tttcatttctgaatcaagtg

SEQ ID NO: 134321 - DNA, 20 bp, Artificial Sequence
  Description of Artificial Sequence: Synthetic oligonucleotide
  Target: LAMA2; (+) strand; PAM type: NRG; PAM sequence: TGG
tatctttgctgaattcttta

SEQ ID NO: 134322 - DNA, 20 bp, Artificial Sequence
  Description of Artificial Sequence: Synthetic oligonucleotide
  Target: LAMA2; (+) strand; PAM type: NRG; PAM sequence: TGG
cttttcactccatctttctt

SEQ ID NO: 134323 - DNA, 20 bp, Artificial Sequence
  Description of Artificial Sequence: Synthetic oligonucleotide
  Target: LAMA2; (+) strand; PAM type: NRG; PAM sequence: GGG
ttttcactccatctttcttt

SEQ ID NO: 134324 - DNA, 20 bp, Artificial Sequence
  Description of Artificial Sequence: Synthetic oligonucleotide
  Target: LAMA2; (+) strand; PAM type: NRG; PAM sequence: GGG
tttcactccatctttctttg

SEQ ID NO: 134325 - DNA, 20 bp, Artificial Sequence
  Description of Artificial Sequence: Synthetic oligonucleotide
  Target: LAMA2; (+) strand; PAM type: NRG; PAM sequence: AAG
gactctcttccatgacttct

SEQ ID NO: 134326 - DNA, 20 bp, Artificial Sequence
  Description of Artificial Sequence: Synthetic oligonucleotide
  Target: LAMA2; (+) strand; PAM type: NRG; PAM sequence: TAG
ttaattctcttccaccattt

SEQ ID NO: 134327 - DNA, 20 bp, Artificial Sequence
  Description of Artificial Sequence: Synthetic oligonucleotide
  Target: LAMA2; (+) strand; PAM type: NRG; PAM sequence: AGG
taattctcttccaccatttt

SEQ ID NO: 134328 - DNA, 20 bp, Artificial Sequence
  Description of Artificial Sequence: Synthetic oligonucleotide
  Target: LAMA2; (+) strand; PAM type: NRG; PAM sequence: TAG
ccattttaggtttgtctttg

SEQ ID NO: 134329 - DNA, 20 bp, Artificial Sequence
  Description of Artificial Sequence: Synthetic oligonucleotide
  Target: LAMA2; (+) strand; PAM type: NRG; PAM sequence: AGG
cattttaggtttgtctttgt

SEQ ID NO: 134330 - DNA, 20 bp, Artificial Sequence
  Description of Artificial Sequence: Synthetic oligonucleotide
  Target: LAMA2; (+) strand; PAM type: NRG; PAM sequence: TAG
gtctttgtaggtaaccttta

SEQ ID NO: 134331 - DNA, 20 bp, Artificial Sequence
  Description of Artificial Sequence: Synthetic oligonucleotide
  Target: LAMA2; (+) strand; PAM type: NRG; PAM sequence: TAG
gctcctctttttccattcca

SEQ ID NO: 134332 - DNA, 20 bp, Artificial Sequence
  Description of Artificial Sequence: Synthetic oligonucleotide
  Target: LAMA2; (+) strand; PAM type: NRG; PAM sequence: GAG
tcctctttttccattccata

SEQ ID NO: 134333 - DNA, 20 bp, Artificial Sequence
  Description of Artificial Sequence: Synthetic oligonucleotide
  Target: LAMA2; (+) strand; PAM type: NRG; PAM sequence: TGG
tgtacttgcaaacacttcca

SEQ ID NO: 134334 - DNA, 20 bp, Artificial Sequence
  Description of Artificial Sequence: Synthetic oligonucleotide
  Target: LAMA2; (+) strand; PAM type: NRG; PAM sequence: AAG
acttccatggtatctatttc

SEQ ID NO: 134335 - DNA, 20 bp, Artificial Sequence
  Description of Artificial Sequence: Synthetic oligonucleotide
  Target: LAMA2; (+) strand; PAM type: NRG; PAM sequence: AAG
tatttcaagtgtattttgaa

SEQ ID NO: 134336 - DNA, 20 bp, Artificial Sequence
  Description of Artificial Sequence: Synthetic oligonucleotide
  Target: LAMA2; (+) strand; PAM type: NRG; PAM sequence: TAG
attttgaaaagtctaacatc

SEQ ID NO: 134337 - DNA, 20 bp, Artificial Sequence
  Description of Artificial Sequence: Synthetic oligonucleotide
  Target: LAMA2; (+) strand; PAM type: NRG; PAM sequence: AGG
ttttgaaaagtctaacatct

SEQ ID NO: 134338 - DNA, 20 bp, Artificial Sequence
  Description of Artificial Sequence: Synthetic oligonucleotide
  Target: LAMA2; (+) strand; PAM type: NRG; PAM sequence: GAG
actttctgtattctatacct

SEQ ID NO: 134339 - DNA, 20 bp, Artificial Sequence
  Description of Artificial Sequence: Synthetic oligonucleotide
  Target: LAMA2; (+) strand; PAM type: NRG; PAM sequence: CAG
tgtattctatacctgagtgt

SEQ ID NO: 134340 - DNA, 20 bp, Artificial Sequence
  Description of Artificial Sequence: Synthetic oligonucleotide
  Target: LAMA2; (+) strand; PAM type: NRG; PAM sequence: AAG
tctatacctgagtgtcagca

SEQ ID NO: 134341 - DNA, 20 bp, Artificial Sequence
  Description of Artificial Sequence: Synthetic oligonucleotide
  Target: LAMA2; (+) strand; PAM type: NRG; PAM sequence: TGG
tgagtgtcagcaaagacgcc

SEQ ID NO: 134342 - DNA, 20 bp, Artificial Sequence
  Description of Artificial Sequence: Synthetic oligonucleotide
  Target: LAMA2; (+) strand; PAM type: NRG; PAM sequence: GGG
gagtgtcagcaaagacgcct

SEQ ID NO: 134343 - DNA, 20 bp, Artificial Sequence
  Description of Artificial Sequence: Synthetic oligonucleotide
  Target: LAMA2; (+) strand; PAM type: NRG; PAM sequence: GAG
gtgtcagcaaagacgcctgg

SEQ ID NO: 134344 - DNA, 20 bp, Artificial Sequence
  Description of Artificial Sequence: Synthetic oligonucleotide
  Target: LAMA2; (+) strand; PAM type: NRG; PAM sequence: GAG
gacgcctgggagctgtcttt

SEQ ID NO: 134345 - DNA, 20 bp, Artificial Sequence
  Description of Artificial Sequence: Synthetic oligonucleotide
  Target: LAMA2; (+) strand; PAM type: NRG; PAM sequence: TGG
tctcttacctccatatttaa

SEQ ID NO: 134346 - DNA, 20 bp, Artificial Sequence
  Description of Artificial Sequence: Synthetic oligonucleotide
  Target: LAMA2; (+) strand; PAM type: NRG; PAM sequence: TAG
tctttctctatacctaatgt

SEQ ID NO: 134347 - DNA, 20 bp, Artificial Sequence
  Description of Artificial Sequence: Synthetic oligonucleotide
  Target: LAMA2; (+) strand; PAM type: NRG; PAM sequence: TGG
ctttccgccatgtttctatc

SEQ ID NO: 134348 - DNA, 20 bp, Artificial Sequence
  Description of Artificial Sequence: Synthetic oligonucleotide
  Target: LAMA2; (+) strand; PAM type: NRG; PAM sequence: TGG
ttctatctggtttacattgc

SEQ ID NO: 134349 - DNA, 20 bp, Artificial Sequence
  Description of Artificial Sequence: Synthetic oligonucleotide
  Target: LAMA2; (+) strand; PAM type: NRG; PAM sequence: CAG
tctggtttacattgctggaa

SEQ ID NO: 134350 - DNA, 20 bp, Artificial Sequence
  Description of Artificial Sequence: Synthetic oligonucleotide
  Target: LAMA2; (+) strand; PAM type: NRG; PAM sequence: TAG
ctgatttgctatcttgttct

SEQ ID NO: 134351 - DNA, 20 bp, Artificial Sequence
  Description of Artificial Sequence: Synthetic oligonucleotide
  Target: LAMA2; (+) strand; PAM type: NRG; PAM sequence: TAG
ttagtcttgccatcccaact

SEQ ID NO: 134352 - DNA, 20 bp, Artificial Sequence
  Description of Artificial Sequence: Synthetic oligonucleotide
  Target: LAMA2; (+) strand; PAM type: NRG; PAM sequence: CAG
ctgatgtcttttcctttata

SEQ ID NO: 134353 - DNA, 20 bp, Artificial Sequence
  Description of Artificial Sequence: Synthetic oligonucleotide
  Target: LAMA2; (+) strand; PAM type: NRG; PAM sequence: AAG
atctgattttatttacttat

SEQ ID NO: 134354 - DNA, 20 bp, Artificial Sequence
  Description of Artificial Sequence: Synthetic oligonucleotide
  Target: LAMA2; (+) strand; PAM type: NRG; PAM sequence: TAG
ttataagtcatgttctttgt

SEQ ID NO: 134355 - DNA, 20 bp, Artificial Sequence
  Description of Artificial Sequence: Synthetic oligonucleotide
  Target: LAMA2; (+) strand; PAM type: NRG; PAM sequence: TAG
catgttctttgttagctcat

SEQ ID NO: 134356 - DNA, 20 bp, Artificial Sequence
  Description of Artificial Sequence: Synthetic oligonucleotide
  Target: LAMA2; (+) strand; PAM type: NRG; PAM sequence: AGG
atgttctttgttagctcatt

SEQ ID NO: 134357 - DNA, 20 bp, Artificial Sequence
  Description of Artificial Sequence: Synthetic oligonucleotide
  Target: LAMA2; (+) strand; PAM type: NRG; PAM sequence: CAG
ttatttttctgtttgtcatt

SEQ ID NO: 134358 - DNA, 20 bp, Artificial Sequence
  Description of Artificial Sequence: Synthetic oligonucleotide
  Target: LAMA2; (+) strand; PAM type: NRG; PAM sequence: TGG
catttttgttgttgttgttt

SEQ ID NO: 134359 - DNA, 20 bp, Artificial Sequence
  Description of Artificial Sequence: Synthetic oligonucleotide
  Target: LAMA2; (+) strand; PAM type: NRG; PAM sequence: TGG
ttgttgttgttgttttggtt

SEQ ID NO: 134360 - DNA, 20 bp, Artificial Sequence
  Description of Artificial Sequence: Synthetic oligonucleotide
  Target: LAMA2; (+) strand; PAM type: NRG; PAM sequence: TAG
ttgttgttttggtttggttt

SEQ ID NO: 134361 - DNA, 20 bp, Artificial Sequence
  Description of Artificial Sequence: Synthetic oligonucleotide
  Target: LAMA2; (+) strand; PAM type: NRG; PAM sequence: GAG
gttgttttggtttggtttta

SEQ ID NO: 134362 - DNA, 20 bp, Artificial Sequence
  Description of Artificial Sequence: Synthetic oligonucleotide
  Target: LAMA2; (+) strand; PAM type: NRG; PAM sequence: GAG
tttggtttggttttagagac

SEQ ID NO: 134363 - DNA, 20 bp, Artificial Sequence
  Description of Artificial Sequence: Synthetic oligonucleotide
  Target: LAMA2; (+) strand; PAM type: NRG; PAM sequence: AGG
ttggtttggttttagagacg

SEQ ID NO: 134364 - DNA, 20 bp, Artificial Sequence
  Description of Artificial Sequence: Synthetic oligonucleotide
  Target: LAMA2; (+) strand; PAM type: NRG; PAM sequence: CAG
gtttggttttagagacgagg

SEQ ID NO: 134365 - DNA, 20 bp, Artificial Sequence
  Description of Artificial Sequence: Synthetic oligonucleotide
  Target: LAMA2; (+) strand; PAM type: NRG; PAM sequence: AGG
tttggttttagagacgaggc

SEQ ID NO: 134366 - DNA, 20 bp, Artificial Sequence
  Description of Artificial Sequence: Synthetic oligonucleotide
  Target: LAMA2; (+) strand; PAM type: NRG; PAM sequence: TAG
ttagagacgaggcaggtgaa

SEQ ID NO: 134367 - DNA, 20 bp, Artificial Sequence
  Description of Artificial Sequence: Synthetic oligonucleotide
  Target: LAMA2; (+) strand; PAM type: NRG; PAM sequence: AGG
tagagacgaggcaggtgaat

SEQ ID NO: 134368 - DNA, 20 bp, Artificial Sequence
  Description of Artificial Sequence: Synthetic oligonucleotide
  Target: LAMA2; (+) strand; PAM type: NRG; PAM sequence: TAG
acgaggcaggtgaataggta

SEQ ID NO: 134369 - DNA, 20 bp, Artificial Sequence
  Description of Artificial Sequence: Synthetic oligonucleotide
  Target: LAMA2; (+) strand; PAM type: NRG; PAM sequence: AAG
ggtatagactgaatgctcct

SEQ ID NO: 134370 - DNA, 20 bp, Artificial Sequence
  Description of Artificial Sequence: Synthetic oligonucleotide
  Target: LAMA2; (+) strand; PAM type: NRG; PAM sequence: TAG
tagactgaatgctcctaagc

SEQ ID NO: 134371 - DNA, 20 bp, Artificial Sequence
  Description of Artificial Sequence: Synthetic oligonucleotide
  Target: LAMA2; (+) strand; PAM type: NRG; PAM sequence: GAG
ataatgaccaaatgattact

SEQ ID NO: 134372 - DNA, 20 bp, Artificial Sequence
  Description of Artificial Sequence: Synthetic oligonucleotide
  Target: LAMA2; (+) strand; PAM type: NRG; PAM sequence: CAG
tgaccaaatgattactgaga

SEQ ID NO: 134373 - DNA, 20 bp, Artificial Sequence
  Description of Artificial Sequence: Synthetic oligonucleotide
  Target: LAMA2; (+) strand; PAM type: NRG; PAM sequence: AGG
gaccaaatgattactgagac

SEQ ID NO: 134374 - DNA, 20 bp, Artificial Sequence
  Description of Artificial Sequence: Synthetic oligonucleotide
  Target: LAMA2; (+) strand; PAM type: NRG; PAM sequence: GGG
accaaatgattactgagaca

SEQ ID NO: 134375 - DNA, 20 bp, Artificial Sequence
  Description of Artificial Sequence: Synthetic oligonucleotide
  Target: LAMA2; (+) strand; PAM type: NRG; PAM sequence: GAG
atgattactgagacagggat

SEQ ID NO: 134376 - DNA, 20 bp, Artificial Sequence
  Description of Artificial Sequence: Synthetic oligonucleotide
  Target: LAMA2; (+) strand; PAM type: NRG; PAM sequence: TGG
actgagacagggatgagcga

SEQ ID NO: 134377 - DNA, 20 bp, Artificial Sequence
  Description of Artificial Sequence: Synthetic oligonucleotide
  Target: LAMA2; (+) strand; PAM type: NRG; PAM sequence: CAG
agacagggatgagcgatggt

SEQ ID NO: 134378 - DNA, 20 bp, Artificial Sequence
  Description of Artificial Sequence: Synthetic oligonucleotide
  Target: LAMA2; (+) strand; PAM type: NRG; PAM sequence: AAG
gcgatggtcagtgaaattga

SEQ ID NO: 134379 - DNA, 20 bp, Artificial Sequence
  Description of Artificial Sequence: Synthetic oligonucleotide
  Target: LAMA2; (+) strand; PAM type: NRG; PAM sequence: AGG
cgatggtcagtgaaattgaa

SEQ ID NO: 134380 - DNA, 20 bp, Artificial Sequence
  Description of Artificial Sequence: Synthetic oligonucleotide
  Target: LAMA2; (+) strand; PAM type: NRG; PAM sequence: TAG
gtgaaattgaaaggatattt

SEQ ID NO: 134381 - DNA, 20 bp, Artificial Sequence
  Description of Artificial Sequence: Synthetic oligonucleotide
  Target: LAMA2; (+) strand; PAM type: NRG; PAM sequence: CAG
aaattgaaaggatattttag

SEQ ID NO: 134382 - DNA, 20 bp, Artificial Sequence
  Description of Artificial Sequence: Synthetic oligonucleotide
  Target: LAMA2; (+) strand; PAM type: NRG; PAM sequence: AAG
attttagcagctgctttaac

SEQ ID NO: 134383 - DNA, 20 bp, Artificial Sequence
  Description of Artificial Sequence: Synthetic oligonucleotide
  Target: LAMA2; (+) strand; PAM type: NRG; PAM sequence: TGG
cagctgctttaacaagtatc

SEQ ID NO: 134384 - DNA, 20 bp, Artificial Sequence
  Description of Artificial Sequence: Synthetic oligonucleotide
  Target: LAMA2; (+) strand; PAM type: NRG; PAM sequence: GGG
agctgctttaacaagtatct

SEQ ID NO: 134385 - DNA, 20 bp, Artificial Sequence
  Description of Artificial Sequence: Synthetic oligonucleotide
  Target: LAMA2; (+) strand; PAM type: NRG; PAM sequence: AAG
ctttaacaagtatctgggaa

SEQ ID NO: 134386 - DNA, 20 bp, Artificial Sequence
  Description of Artificial Sequence: Synthetic oligonucleotide
  Target: LAMA2; (+) strand; PAM type: NRG; PAM sequence: CGG
acaagtatctgggaaaagtc

SEQ ID NO: 134387 - DNA, 20 bp, Artificial Sequence
  Description of Artificial Sequence: Synthetic oligonucleotide
  Target: LAMA2; (+) strand; PAM type: NRG; PAM sequence: AAG
tgaacgttaatttgtattaa

SEQ ID NO: 134388 - DNA, 20 bp, Artificial Sequence
  Description of Artificial Sequence: Synthetic oligonucleotide
  Target: LAMA2; (+) strand; PAM type: NRG; PAM sequence: CAG
acgttaatttgtattaaaag

SEQ ID NO: 134389 - DNA, 20 bp, Artificial Sequence
  Description of Artificial Sequence: Synthetic oligonucleotide
  Target: LAMA2; (+) strand; PAM type: NRG; PAM sequence: CAG
gtattaaaagcagcatgact

SEQ ID NO: 134390 - DNA, 20 bp, Artificial Sequence
  Description of Artificial Sequence: Synthetic oligonucleotide
  Target: LAMA2; (+) strand; PAM type: NRG; PAM sequence: TAG
tataaaactcaaataaacct

SEQ ID NO: 134391 - DNA, 20 bp, Artificial Sequence
  Description of Artificial Sequence: Synthetic oligonucleotide
  Target: LAMA2; (+) strand; PAM type: NRG; PAM sequence: TGG
actcaaataaaccttagaat

SEQ ID NO: 134392 - DNA, 20 bp, Artificial Sequence
  Description of Artificial Sequence: Synthetic oligonucleotide
  Target: LAMA2; (+) strand; PAM type: NRG; PAM sequence: GAG
ccttagaattggatcttatc

SEQ ID NO: 134393 - DNA, 20 bp, Artificial Sequence
  Description of Artificial Sequence: Synthetic oligonucleotide
  Target: LAMA2; (+) strand; PAM type: NRG; PAM sequence: CAG
ttatcgagtattgtgttata

SEQ ID NO: 134394 - DNA, 20 bp, Artificial Sequence
  Description of Artificial Sequence: Synthetic oligonucleotide
  Target: LAMA2; (+) strand; PAM type: NRG; PAM sequence: GAG
atcgagtattgtgttataca

SEQ ID NO: 134395 - DNA, 20 bp, Artificial Sequence
  Description of Artificial Sequence: Synthetic oligonucleotide
  Target: LAMA2; (+) strand; PAM type: NRG; PAM sequence: TGG
attgtgttatacagagaata

SEQ ID NO: 134396 - DNA, 20 bp, Artificial Sequence
  Description of Artificial Sequence: Synthetic oligonucleotide
  Target: LAMA2; (+) strand; PAM type: NRG; PAM sequence: GAG
tgtgttatacagagaatatg

SEQ ID NO: 134397 - DNA, 20 bp, Artificial Sequence
  Description of Artificial Sequence: Synthetic oligonucleotide
  Target: LAMA2; (+) strand; PAM type: NRG; PAM sequence: TGG
cagagaatatggagaatatg

SEQ ID NO: 134398 - DNA, 20 bp, Artificial Sequence
  Description of Artificial Sequence: Synthetic oligonucleotide
  Target: LAMA2; (+) strand; PAM type: NRG; PAM sequence: GGG
agagaatatggagaatatgt

SEQ ID NO: 134399 - DNA, 20 bp, Artificial Sequence
  Description of Artificial Sequence: Synthetic oligonucleotide
  Target: LAMA2; (+) strand; PAM type: NRG; PAM sequence: GAG
ggagaatatgtgggataaat

SEQ ID NO: 134400 - DNA, 20 bp, Artificial Sequence
  Description of Artificial Sequence: Synthetic oligonucleotide
  Target: LAMA2; (+) strand; PAM type: NRG; PAM sequence: TGG
tgtgggataaatgagtcaaa

SEQ ID NO: 134401 - DNA, 20 bp, Artificial Sequence
  Description of Artificial Sequence: Synthetic oligonucleotide
  Target: LAMA2; (+) strand; PAM type: NRG; PAM sequence: AAG
aaatggtatgttaaaaaaaa

SEQ ID NO: 134402 - DNA, 20 bp, Artificial Sequence
  Description of Artificial Sequence: Synthetic oligonucleotide
  Target: LAMA2; (+) strand; PAM type: NRG; PAM sequence: TAG
tggtatgttaaaaaaaaaag

SEQ ID NO: 134403 - DNA, 20 bp, Artificial Sequence
  Description of Artificial Sequence: Synthetic oligonucleotide
  Target: LAMA2; (+) strand; PAM type: NRG; PAM sequence: AGG
ggtatgttaaaaaaaaaagt

SEQ ID NO: 134404 - DNA, 20 bp, Artificial Sequence
  Description of Artificial Sequence: Synthetic oligonucleotide
  Target: LAMA2; (+) strand; PAM type: NRG; PAM sequence: AAG
atgttaaaaaaaaaagtagg

SEQ ID NO: 134405 - DNA, 20 bp, Artificial Sequence
  Description of Artificial Sequence: Synthetic oligonucleotide
  Target: LAMA2; (+) strand; PAM type: NRG; PAM sequence: TAG
aaaaaaagtaggaagcatga

SEQ ID NO: 134406 - DNA, 20 bp, Artificial Sequence
  Description of Artificial Sequence: Synthetic oligonucleotide
  Target: LAMA2; (+) strand; PAM type: NRG; PAM sequence: TAG
tagactcaattcttaattcc

SEQ ID NO: 134407 - DNA, 20 bp, Artificial Sequence
  Description of Artificial Sequence: Synthetic oligonucleotide
  Target: LAMA2; (+) strand; PAM type: NRG; PAM sequence: GAG
gactcaattcttaattccta

SEQ ID NO: 134408 - DNA, 20 bp, Artificial Sequence
  Description of Artificial Sequence: Synthetic oligonucleotide
  Target: LAMA2; (+) strand; PAM type: NRG; PAM sequence: AGG
actcaattcttaattcctag

SEQ ID NO: 134409 - DNA, 20 bp, Artificial Sequence
  Description of Artificial Sequence: Synthetic oligonucleotide
  Target: LAMA2; (+) strand; PAM type: NRG; PAM sequence: CAG
ttcttaattcctagaggaaa

SEQ ID NO: 134410 - DNA, 20 bp, Artificial Sequence
  Description of Artificial Sequence: Synthetic oligonucleotide
  Target: LAMA2; (+) strand; PAM type: NRG; PAM sequence: GAG
cttaattcctagaggaaaca

SEQ ID NO: 134411 - DNA, 20 bp, Artificial Sequence
  Description of Artificial Sequence: Synthetic oligonucleotide
  Target: LAMA2; (+) strand; PAM type: NRG; PAM sequence: AAG
gaggaaacagagttatgtcc

SEQ ID NO: 134412 - DNA, 20 bp, Artificial Sequence
  Description of Artificial Sequence: Synthetic oligonucleotide
  Target: LAMA2; (+) strand; PAM type: NRG; PAM sequence: AGG
aggaaacagagttatgtcca

SEQ ID NO: 134413 - DNA, 20 bp, Artificial Sequence
  Description of Artificial Sequence: Synthetic oligonucleotide
  Target: LAMA2; (+) strand; PAM type: NRG; PAM sequence: CAG
tattcaacccaatcactgta

SEQ ID NO: 134414 - DNA, 20 bp, Artificial Sequence
  Description of Artificial Sequence: Synthetic oligonucleotide
  Target: LAMA2; (+) strand; PAM type: NRG; PAM sequence: TAG
acccaatcactgtacagctg

SEQ ID NO: 134415 - DNA, 20 bp, Artificial Sequence
  Description of Artificial Sequence: Synthetic oligonucleotide
  Target: LAMA2; (+) strand; PAM type: NRG; PAM sequence: GAG
tttttttttttttttttttt

SEQ ID NO: 134416 - DNA, 20 bp, Artificial Sequence
  Description of Artificial Sequence: Synthetic oligonucleotide
  Target: LAMA2; (+) strand; PAM type: NRG; PAM sequence: CAG
ttttttttttttttttgaga

SEQ ID NO: 134417 - DNA, 20 bp, Artificial Sequence
  Description of Artificial Sequence: Synthetic oligonucleotide
  Target: LAMA2; (+) strand; PAM type: NRG; PAM sequence: CAG
ttttttttttgagacagtct

SEQ ID NO: 134418 - DNA, 20 bp, Artificial Sequence
  Description of Artificial Sequence: Synthetic oligonucleotide
  Target: LAMA2; (+) strand; PAM type: NRG; PAM sequence: CAG
gacagtctcagtccattgcc

SEQ ID NO: 134419 - DNA, 20 bp, Artificial Sequence
  Description of Artificial Sequence: Synthetic oligonucleotide
  Target: LAMA2; (+) strand; PAM type: NRG; PAM sequence: AGG
acagtctcagtccattgccc

SEQ ID NO: 134420 - DNA, 20 bp, Artificial Sequence
  Description of Artificial Sequence: Synthetic oligonucleotide
  Target: LAMA2; (+) strand; PAM type: NRG; PAM sequence: TGG
tctcagtccattgcccaggc

SEQ ID NO: 134421 - DNA, 20 bp, Artificial Sequence
  Description of Artificial Sequence: Synthetic oligonucleotide
  Target: LAMA2; (+) strand; PAM type: NRG; PAM sequence: TGG
ttgcccaggctggtgtgcaa

SEQ ID NO: 134422 - DNA, 20 bp, Artificial Sequence
  Description of Artificial Sequence: Synthetic oligonucleotide
  Target: LAMA2; (+) strand; PAM type: NRG; PAM sequence: CAG
ggtgtgcaatggcatgatct

SEQ ID NO: 134423 - DNA, 20 bp, Artificial Sequence
  Description of Artificial Sequence: Synthetic oligonucleotide
  Target: LAMA2; (+) strand; PAM type: NRG; PAM sequence: CAG
tcactgcaacctctgcctcc

SEQ ID NO: 134424 - DNA, 20 bp, Artificial Sequence
  Description of Artificial Sequence: Synthetic oligonucleotide
  Target: LAMA2; (+) strand; PAM type: NRG; PAM sequence: AGG
cactgcaacctctgcctccc

SEQ ID NO: 134425 - DNA, 20 bp, Artificial Sequence
  Description of Artificial Sequence: Synthetic oligonucleotide
  Target: LAMA2; (+) strand; PAM type: NRG; PAM sequence: CAG
ttaaaacaattctcctgcct

SEQ ID NO: 134426 - DNA, 20 bp, Artificial Sequence
  Description of Artificial Sequence: Synthetic oligonucleotide
  Target: LAMA2; (+) strand; PAM type: NRG; PAM sequence: AAG
ttctcctgcctcagcctccc

SEQ ID NO: 134427 - DNA, 20 bp, Artificial Sequence
  Description of Artificial Sequence: Synthetic oligonucleotide
  Target: LAMA2; (+) strand; PAM type: NRG; PAM sequence: TAG
tcctgcctcagcctcccaag

SEQ ID NO: 134428 - DNA, 20 bp, Artificial Sequence
  Description of Artificial Sequence: Synthetic oligonucleotide
  Target: LAMA2; (+) strand; PAM type: NRG; PAM sequence: TGG
gcctcagcctcccaagtagc

SEQ ID NO: 134429 - DNA, 20 bp, Artificial Sequence
  Description of Artificial Sequence: Synthetic oligonucleotide
  Target: LAMA2; (+) strand; PAM type: NRG; PAM sequence: GGG
cctcagcctcccaagtagct

SEQ ID NO: 134430 - DNA, 20 bp, Artificial Sequence
  Description of Artificial Sequence: Synthetic oligonucleotide
  Target: LAMA2; (+) strand; PAM type: NRG; PAM sequence: CAG
ctcccaagtagctgggatta

SEQ ID NO: 134431 - DNA, 20 bp, Artificial Sequence
  Description of Artificial Sequence: Synthetic oligonucleotide
  Target: LAMA2; (+) strand; PAM type: NRG; PAM sequence: AGG
tcccaagtagctgggattac

SEQ ID NO: 134432 - DNA, 20 bp, Artificial Sequence
  Description of Artificial Sequence: Synthetic oligonucleotide
  Target: LAMA2; (+) strand; PAM type: NRG; PAM sequence: CAG
acaggcacctgccaccatgc

SEQ ID NO: 134433 - DNA, 20 bp, Artificial Sequence
  Description of Artificial Sequence: Synthetic oligonucleotide
  Target: LAMA2; (+) strand; PAM type: NRG; PAM sequence: TAG
attttatttttttgtatttt

SEQ ID NO: 134434 - DNA, 20 bp, Artificial Sequence
  Description of Artificial Sequence: Synthetic oligonucleotide
  Target: LAMA2; (+) strand; PAM type: NRG; PAM sequence: TAG
ttatttttttgtatttttag

SEQ ID NO: 134435 - DNA, 20 bp, Artificial Sequence
  Description of Artificial Sequence: Synthetic oligonucleotide
  Target: LAMA2; (+) strand; PAM type: NRG; PAM sequence: GAG
atttttttgtatttttagta

SEQ ID NO: 134436 - DNA, 20 bp, Artificial Sequence
  Description of Artificial Sequence: Synthetic oligonucleotide
  Target: LAMA2; (+) strand; PAM type: NRG; PAM sequence: CGG
ttttgtatttttagtagaga

SEQ ID NO: 134437 - DNA, 20 bp, Artificial Sequence
  Description of Artificial Sequence: Synthetic oligonucleotide
  Target: LAMA2; (+) strand; PAM type: NRG; PAM sequence: GGG
tttgtatttttagtagagac

SEQ ID NO: 134438 - DNA, 20 bp, Artificial Sequence
  Description of Artificial Sequence: Synthetic oligonucleotide
  Target: LAMA2; (+) strand; PAM type: NRG; PAM sequence: TGG
gagacgggacttcaccatgt

SEQ ID NO: 134439 - DNA, 20 bp, Artificial Sequence
  Description of Artificial Sequence: Synthetic oligonucleotide
  Target: LAMA2; (+) strand; PAM type: NRG; PAM sequence: CAG
cgggacttcaccatgttggc

SEQ ID NO: 134440 - DNA, 20 bp, Artificial Sequence
  Description of Artificial Sequence: Synthetic oligonucleotide
  Target: LAMA2; (+) strand; PAM type: NRG; PAM sequence: TGG
cttcaccatgttggccagcc

SEQ ID NO: 134441 - DNA, 20 bp, Artificial Sequence
  Description of Artificial Sequence: Synthetic oligonucleotide
  Target: LAMA2; (+) strand; PAM type: NRG; PAM sequence: CAG
tggtctcaaacccctgacct

SEQ ID NO: 134442 - DNA, 20 bp, Artificial Sequence
  Description of Artificial Sequence: Synthetic oligonucleotide
  Target: LAMA2; (+) strand; PAM type: NRG; PAM sequence: AGG
ggtctcaaacccctgacctc

SEQ ID NO: 134443 - DNA, 20 bp, Artificial Sequence
  Description of Artificial Sequence: Synthetic oligonucleotide
  Target: LAMA2; (+) strand; PAM type: NRG; PAM sequence: TGG
ctcaggtgatcctcccacct

SEQ ID NO: 134444 - DNA, 20 bp, Artificial Sequence
  Description of Artificial Sequence: Synthetic oligonucleotide
  Target: LAMA2; (+) strand; PAM type: NRG; PAM sequence: AAG
cctcccaccttggcctccca

SEQ ID NO: 134445 - DNA, 20 bp, Artificial Sequence
  Description of Artificial Sequence: Synthetic oligonucleotide
  Target: LAMA2; (+) strand; PAM type: NRG; PAM sequence: TGG
accttggcctcccaaagtgc

SEQ ID NO: 134446 - DNA, 20 bp, Artificial Sequence
  Description of Artificial Sequence: Synthetic oligonucleotide
  Target: LAMA2; (+) strand; PAM type: NRG; PAM sequence: GGG
ccttggcctcccaaagtgct

SEQ ID NO: 134447 - DNA, 20 bp, Artificial Sequence
  Description of Artificial Sequence: Synthetic oligonucleotide
  Target: LAMA2; (+) strand; PAM type: NRG; PAM sequence: CAG
ctcccaaagtgctgggatta

SEQ ID NO: 134448 - DNA, 20 bp, Artificial Sequence
  Description of Artificial Sequence: Synthetic oligonucleotide
  Target: LAMA2; (+) strand; PAM type: NRG; PAM sequence: AGG
tcccaaagtgctgggattac

SEQ ID NO: 134449 - DNA, 20 bp, Artificial Sequence
  Description of Artificial Sequence: Synthetic oligonucleotide
  Target: LAMA2; (+) strand; PAM type: NRG; PAM sequence: GAG
agtgctgggattacaggcat

SEQ ID NO: 134450 - DNA, 20 bp, Artificial Sequence
  Description of Artificial Sequence: Synthetic oligonucleotide
  Target: LAMA2; (+) strand; PAM type: NRG; PAM sequence: TGG
caggcatgagccaccgtgcc

SEQ ID NO: 134451 - DNA, 20 bp, Artificial Sequence
  Description of Artificial Sequence: Synthetic oligonucleotide
  Target: LAMA2; (+) strand; PAM type: NRG; PAM sequence: TGG
aattaatatgatgatgataa

SEQ ID NO: 134452 - DNA, 20 bp, Artificial Sequence
  Description of Artificial Sequence: Synthetic oligonucleotide
  Target: LAMA2; (+) strand; PAM type: NRG; PAM sequence: TAG
atgataatggtatatccaaa

SEQ ID NO: 134453 - DNA, 20 bp, Artificial Sequence
  Description of Artificial Sequence: Synthetic oligonucleotide
  Target: LAMA2; (+) strand; PAM type: NRG; PAM sequence: CAG
ggtatatccaaatagctacc

SEQ ID NO: 134454 - DNA, 20 bp, Artificial Sequence
  Description of Artificial Sequence: Synthetic oligonucleotide
  Target: LAMA2; (+) strand; PAM type: NRG; PAM sequence: TAG
atagctacccagtttttgat

SEQ ID NO: 134455 - DNA, 20 bp, Artificial Sequence
  Description of Artificial Sequence: Synthetic oligonucleotide
  Target: LAMA2; (+) strand; PAM type: NRG; PAM sequence: AGG
tagctacccagtttttgatt

SEQ ID NO: 134456 - DNA, 20 bp, Artificial Sequence
  Description of Artificial Sequence: Synthetic oligonucleotide
  Target: LAMA2; (+) strand; PAM type: NRG; PAM sequence: CAG
ctacccagtttttgattagg

SEQ ID NO: 134457 - DNA, 20 bp, Artificial Sequence
  Description of Artificial Sequence: Synthetic oligonucleotide
  Target: LAMA2; (+) strand; PAM type: NRG; PAM sequence: AAG
cccagtttttgattaggcag

SEQ ID NO: 134458 - DNA, 20 bp, Artificial Sequence
  Description of Artificial Sequence: Synthetic oligonucleotide
  Target: LAMA2; (+) strand; PAM type: NRG; PAM sequence: TGG
attaggcagaagtatgctta

SEQ ID NO: 134459 - DNA, 20 bp, Artificial Sequence
  Description of Artificial Sequence: Synthetic oligonucleotide
  Target: LAMA2; (+) strand; PAM type: NRG; PAM sequence: CAG
ggcagaagtatgcttatggt

SEQ ID NO: 134460 - DNA, 20 bp, Artificial Sequence
  Description of Artificial Sequence: Synthetic oligonucleotide
  Target: LAMA2; (+) strand; PAM type: NRG; PAM sequence: CAG
gaagtatgcttatggtcagt

SEQ ID NO: 134461 - DNA, 20 bp, Artificial Sequence
  Description of Artificial Sequence: Synthetic oligonucleotide
  Target: LAMA2; (+) strand; PAM type: NRG; PAM sequence: GAG
agtatgcttatggtcagtca

SEQ ID NO: 134462 - DNA, 20 bp, Artificial Sequence
  Description of Artificial Sequence: Synthetic oligonucleotide
  Target: LAMA2; (+) strand; PAM type: NRG; PAM sequence: AAG
ttatggtcagtcagagtaaa

SEQ ID NO: 134463 - DNA, 20 bp, Artificial Sequence
  Description of Artificial Sequence: Synthetic oligonucleotide
  Target: LAMA2; (+) strand; PAM type: NRG; PAM sequence: GAG
ggtcagtcagagtaaaaagt

SEQ ID NO: 134464 - DNA, 20 bp, Artificial Sequence
  Description of Artificial Sequence: Synthetic oligonucleotide
  Target: LAMA2; (+) strand; PAM type: NRG; PAM sequence: CAG
gtcagagtaaaaagtgagac

SEQ ID NO: 134465 - DNA, 20 bp, Artificial Sequence
  Description of Artificial Sequence: Synthetic oligonucleotide
  Target: LAMA2; (+) strand; PAM type: NRG; PAM sequence: TGG
agtaaaaagtgagaccagca

SEQ ID NO: 134466 - DNA, 20 bp, Artificial Sequence
  Description of Artificial Sequence: Synthetic oligonucleotide
  Target: LAMA2; (+) strand; PAM type: NRG; PAM sequence: TGG
aaaaagtgagaccagcatgg

SEQ ID NO: 134467 - DNA, 20 bp, Artificial Sequence
  Description of Artificial Sequence: Synthetic oligonucleotide
  Target: LAMA2; (+) strand; PAM type: NRG; PAM sequence: CAG
gtggcatgcacatgtaatcc

SEQ ID NO: 134468 - DNA, 20 bp, Artificial Sequence
  Description of Artificial Sequence: Synthetic oligonucleotide
  Target: LAMA2; (+) strand; PAM type: NRG; PAM sequence: TGG
cacatgtaatcccagctact

SEQ ID NO: 134469 - DNA, 20 bp, Artificial Sequence
  Description of Artificial Sequence: Synthetic oligonucleotide
  Target: LAMA2; (+) strand; PAM type: NRG; PAM sequence: GGG
acatgtaatcccagctactt

SEQ ID NO: 134470 - DNA, 20 bp, Artificial Sequence
  Description of Artificial Sequence: Synthetic oligonucleotide
  Target: LAMA2; (+) strand; PAM type: NRG; PAM sequence: GAG
atgtaatcccagctacttgg

SEQ ID NO: 134471 - DNA, 20 bp, Artificial Sequence
  Description of Artificial Sequence: Synthetic oligonucleotide
  Target: LAMA2; (+) strand; PAM type: NRG; PAM sequence: AGG
tgtaatcccagctacttggg

SEQ ID NO: 134472 - DNA, 20 bp, Artificial Sequence
  Description of Artificial Sequence: Synthetic oligonucleotide
  Target: LAMA2; (+) strand; PAM type: NRG; PAM sequence: CGG
aatcccagctacttgggagg

SEQ ID NO: 134473 - DNA, 20 bp, Artificial Sequence
  Description of Artificial Sequence: Synthetic oligonucleotide
  Target: LAMA2; (+) strand; PAM type: NRG; PAM sequence: GAG
tcccagctacttgggaggcg

SEQ ID NO: 134474 - DNA, 20 bp, Artificial Sequence
  Description of Artificial Sequence: Synthetic oligonucleotide
  Target: LAMA2; (+) strand; PAM type: NRG; PAM sequence: CAG
agctacttgggaggcggaga

SEQ ID NO: 134475 - DNA, 20 bp, Artificial Sequence
  Description of Artificial Sequence: Synthetic oligonucleotide
  Target: LAMA2; (+) strand; PAM type: NRG; PAM sequence: AGG
gctacttgggaggcggagac

SEQ ID NO: 134476 - DNA, 20 bp, Artificial Sequence
  Description of Artificial Sequence: Synthetic oligonucleotide
  Target: LAMA2; (+) strand; PAM type: NRG; PAM sequence: GAG
tacttgggaggcggagacag

SEQ ID NO: 134477 - DNA, 20 bp, Artificial Sequence
  Description of Artificial Sequence: Synthetic oligonucleotide
  Target: LAMA2; (+) strand; PAM type: NRG; PAM sequence: AGG
acttgggaggcggagacagg

SEQ ID NO: 134478 - DNA, 20 bp, Artificial Sequence
  Description of Artificial Sequence: Synthetic oligonucleotide
  Target: LAMA2; (+) strand; PAM type: NRG; PAM sequence: GAG
cggagacaggaggacccttt

SEQ ID NO: 134479 - DNA, 20 bp, Artificial Sequence
  Description of Artificial Sequence: Synthetic oligonucleotide
  Target: LAMA2; (+) strand; PAM type: NRG; PAM sequence: TAG
acaggaggaccctttgagct

SEQ ID NO: 134480 - DNA, 20 bp, Artificial Sequence
  Description of Artificial Sequence: Synthetic oligonucleotide
  Target: LAMA2; (+) strand; PAM type: NRG; PAM sequence: AGG
caggaggaccctttgagctt

SEQ ID NO: 134481 - DNA, 20 bp, Artificial Sequence
  Description of Artificial Sequence: Synthetic oligonucleotide
  Target: LAMA2; (+) strand; PAM type: NRG; PAM sequence: GAG
ggaggaccctttgagcttag

SEQ ID NO: 134482 - DNA, 20 bp, Artificial Sequence
  Description of Artificial Sequence: Synthetic oligonucleotide
  Target: LAMA2; (+) strand; PAM type: NRG; PAM sequence: GAG
ccctttgagcttaggagtct

SEQ ID NO: 134483 - DNA, 20 bp, Artificial Sequence
  Description of Artificial Sequence: Synthetic oligonucleotide
  Target: LAMA2; (+) strand; PAM type: NRG; PAM sequence: AGG
cctttgagcttaggagtctg

SEQ ID NO: 134484 - DNA, 20 bp, Artificial Sequence
  Description of Artificial Sequence: Synthetic oligonucleotide
  Target: LAMA2; (+) strand; PAM type: NRG; PAM sequence: TAG
agcttaggagtctgaggtta

SEQ ID NO: 134485 - DNA, 20 bp, Artificial Sequence
  Description of Artificial Sequence: Synthetic oligonucleotide
  Target: LAMA2; (+) strand; PAM type: NRG; PAM sequence: TAG
actatgattatgcctatgaa

SEQ ID NO: 134486 - DNA, 20 bp, Artificial Sequence
  Description of Artificial Sequence: Synthetic oligonucleotide
  Target: LAMA2; (+) strand; PAM type: NRG; PAM sequence: CAG
tatgaatagccactgcactc

SEQ ID NO: 134487 - DNA, 20 bp, Artificial Sequence
  Description of Artificial Sequence: Synthetic oligonucleotide
  Target: LAMA2; (+) strand; PAM type: NRG; PAM sequence: TGG
atagccactgcactccagcc

SEQ ID NO: 134488 - DNA, 20 bp, Artificial Sequence
  Description of Artificial Sequence: Synthetic oligonucleotide
  Target: LAMA2; (+) strand; PAM type: NRG; PAM sequence: GGG
tagccactgcactccagcct

SEQ ID NO: 134489 - DNA, 20 bp, Artificial Sequence
  Description of Artificial Sequence: Synthetic oligonucleotide
  Target: LAMA2; (+) strand; PAM type: NRG; PAM sequence: CAG
ccactgcactccagcctggg

SEQ ID NO: 134490 - DNA, 20 bp, Artificial Sequence
  Description of Artificial Sequence: Synthetic oligonucleotide
  Target: LAMA2; (+) strand; PAM type: NRG; PAM sequence: TAG
gcactccagcctgggcagtg

SEQ ID NO: 134491 - DNA, 20 bp, Artificial Sequence
  Description of Artificial Sequence: Synthetic oligonucleotide
  Target: LAMA2; (+) strand; PAM type: NRG; PAM sequence: AAG
tccagcctgggcagtgtagc

SEQ ID NO: 134492 - DNA, 20 bp, Artificial Sequence
  Description of Artificial Sequence: Synthetic oligonucleotide
  Target: LAMA2; (+) strand; PAM type: NRG; PAM sequence: AAG
caagaccctatctctgaaaa

SEQ ID NO: 134493 - DNA, 20 bp, Artificial Sequence
  Description of Artificial Sequence: Synthetic oligonucleotide
  Target: LAMA2; (+) strand; PAM type: NRG; PAM sequence: AAG
tatctctgaaaaaagaatca

SEQ ID NO: 134494 - DNA, 20 bp, Artificial Sequence
  Description of Artificial Sequence: Synthetic oligonucleotide
  Target: LAMA2; (+) strand; PAM type: NRG; PAM sequence: AGG
atctctgaaaaaagaatcaa

SEQ ID NO: 134495 - DNA, 20 bp, Artificial Sequence
  Description of Artificial Sequence: Synthetic oligonucleotide
  Target: LAMA2; (+) strand; PAM type: NRG; PAM sequence: AAG
aaaaaagaatcaaaggcctt

SEQ ID NO: 134496 - DNA, 20 bp, Artificial Sequence
  Description of Artificial Sequence: Synthetic oligonucleotide
  Target: LAMA2; (+) strand; PAM type: NRG; PAM sequence: CAG
gaaatattttatttttacct

SEQ ID NO: 134497 - DNA, 20 bp, Artificial Sequence
  Description of Artificial Sequence: Synthetic oligonucleotide
  Target: LAMA2; (+) strand; PAM type: NRG; PAM sequence: TAG
agaaaatttaaaaattaact

SEQ ID NO: 134498 - DNA, 20 bp, Artificial Sequence
  Description of Artificial Sequence: Synthetic oligonucleotide
  Target: LAMA2; (+) strand; PAM type: NRG; PAM sequence: GAG
aaaatttaaaaattaactta

SEQ ID NO: 134499 - DNA, 20 bp, Artificial Sequence
  Description of Artificial Sequence: Synthetic oligonucleotide
  Target: LAMA2; (+) strand; PAM type: NRG; PAM sequence: TAG
aaaattaacttagagctaaa

SEQ ID NO: 134500 - DNA, 20 bp, Artificial Sequence
  Description of Artificial Sequence: Synthetic oligonucleotide
  Target: LAMA2; (+) strand; PAM type: NRG; PAM sequence: TGG
taacttagagctaaatagtt

SEQ ID NO: 134501 - DNA, 20 bp, Artificial Sequence
  Description of Artificial Sequence: Synthetic oligonucleotide
  Target: LAMA2; (+) strand; PAM type: NRG; PAM sequence: GGG
aacttagagctaaatagttt

SEQ ID NO: 134502 - DNA, 20 bp, Artificial Sequence
  Description of Artificial Sequence: Synthetic oligonucleotide
  Target: LAMA2; (+) strand; PAM type: NRG; PAM sequence: TAG
agtttgggtttcattatgtg

SEQ ID NO: 134503 - DNA, 20 bp, Artificial Sequence
  Description of Artificial Sequence: Synthetic oligonucleotide
  Target: LAMA2; (+) strand; PAM type: NRG; PAM sequence: CAG
tgtagaaatgaatcttgcaa

SEQ ID NO: 134504 - DNA, 20 bp, Artificial Sequence
  Description of Artificial Sequence: Synthetic oligonucleotide
  Target: LAMA2; (+) strand; PAM type: NRG; PAM sequence: CAG
aatgaatcttgcaacagtaa

SEQ ID NO: 134505 - DNA, 20 bp, Artificial Sequence
  Description of Artificial Sequence: Synthetic oligonucleotide
  Target: LAMA2; (+) strand; PAM type: NRG; PAM sequence: AAG
agtttcccattacacattat

SEQ ID NO: 134506 - DNA, 20 bp, Artificial Sequence
  Description of Artificial Sequence: Synthetic oligonucleotide
  Target: LAMA2; (+) strand; PAM type: NRG; PAM sequence: GAG
acattataagtgtctgtttt

SEQ ID NO: 134507 - DNA, 20 bp, Artificial Sequence
  Description of Artificial Sequence: Synthetic oligonucleotide
  Target: LAMA2; (+) strand; PAM type: NRG; PAM sequence: GAG
ctgttttgagtaaatttgtt

SEQ ID NO: 134508 - DNA, 20 bp, Artificial Sequence
  Description of Artificial Sequence: Synthetic oligonucleotide
  Target: LAMA2; (+) strand; PAM type: NRG; PAM sequence: AGG
tgttttgagtaaatttgttg

SEQ ID NO: 134509 - DNA, 20 bp, Artificial Sequence
  Description of Artificial Sequence: Synthetic oligonucleotide
  Target: LAMA2; (+) strand; PAM type: NRG; PAM sequence: GAG
ttttgagtaaatttgttgag

SEQ ID NO: 134510 - DNA, 20 bp, Artificial Sequence
  Description of Artificial Sequence: Synthetic oligonucleotide
  Target: LAMA2; (+) strand; PAM type: NRG; PAM sequence: TAG
atttgttgaggagtctaatt

SEQ ID NO: 134511 - DNA, 20 bp, Artificial Sequence
  Description of Artificial Sequence: Synthetic oligonucleotide
  Target: LAMA2; (+) strand; PAM type: NRG; PAM sequence: TGG
tctaatttagtttgaatcac

SEQ ID NO: 134512 - DNA, 20 bp, Artificial Sequence
  Description of Artificial Sequence: Synthetic oligonucleotide
  Target: LAMA2; (+) strand; PAM type: NRG; PAM sequence: GGG
ctaatttagtttgaatcact

SEQ ID NO: 134513 - DNA, 20 bp, Artificial Sequence
  Description of Artificial Sequence: Synthetic oligonucleotide
  Target: LAMA2; (+) strand; PAM type: NRG; PAM sequence: AAG
ttagtttgaatcactgggaa

SEQ ID NO: 134514 - DNA, 20 bp, Artificial Sequence
  Description of Artificial Sequence: Synthetic oligonucleotide
  Target: LAMA2; (+) strand; PAM type: NRG; PAM sequence: GAG
cactgggaaaagacacaatt

SEQ ID NO: 134515 - DNA, 20 bp, Artificial Sequence
  Description of Artificial Sequence: Synthetic oligonucleotide
  Target: LAMA2; (+) strand; PAM type: NRG; PAM sequence: AGG
actgggaaaagacacaattg

SEQ ID NO: 134516 - DNA, 20 bp, Artificial Sequence
  Description of Artificial Sequence: Synthetic oligonucleotide
  Target: LAMA2; (+) strand; PAM type: NRG; PAM sequence: AAG
tacttccacttttttacata

SEQ ID NO: 134517 - DNA, 20 bp, Artificial Sequence
  Description of Artificial Sequence: Synthetic oligonucleotide
  Target: LAMA2; (+) strand; PAM type: NRG; PAM sequence: TAG
taaagtacatcttccacttc

SEQ ID NO: 134518 - DNA, 20 bp, Artificial Sequence
  Description of Artificial Sequence: Synthetic oligonucleotide
  Target: LAMA2; (+) strand; PAM type: NRG; PAM sequence: GAG
aaattttttttttctcactt

SEQ ID NO: 134519 - DNA, 20 bp, Artificial Sequence
  Description of Artificial Sequence: Synthetic oligonucleotide
  Target: LAMA2; (+) strand; PAM type: NRG; PAM sequence: TAG
tcacttgagtcgtttatctg

SEQ ID NO: 134520 - DNA, 20 bp, Artificial Sequence
  Description of Artificial Sequence: Synthetic oligonucleotide
  Target: LAMA2; (+) strand; PAM type: NRG; PAM sequence: AAG
ttgagtcgtttatctgtagt

SEQ ID NO: 134521 - DNA, 20 bp, Artificial Sequence
  Description of Artificial Sequence: Synthetic oligonucleotide
  Target: LAMA2; (+) strand; PAM type: NRG; PAM sequence: TGG
ttatctgtagtaagtaaatt

SEQ ID NO: 134522 - DNA, 20 bp, Artificial Sequence
  Description of Artificial Sequence: Synthetic oligonucleotide
  Target: LAMA2; (+) strand; PAM type: NRG; PAM sequence: GGG
tatctgtagtaagtaaattt

SEQ ID NO: 134523 - DNA, 20 bp, Artificial Sequence
  Description of Artificial Sequence: Synthetic oligonucleotide
  Target: LAMA2; (+) strand; PAM type: NRG; PAM sequence: AAG
gtagtaagtaaatttgggaa

SEQ ID NO: 134524 - DNA, 20 bp, Artificial Sequence
  Description of Artificial Sequence: Synthetic oligonucleotide
  Target: LAMA2; (+) strand; PAM type: NRG; PAM sequence: AAG
agtaaatttgggaaaagtgc

SEQ ID NO: 134525 - DNA, 20 bp, Artificial Sequence
  Description of Artificial Sequence: Synthetic oligonucleotide
  Target: LAMA2; (+) strand; PAM type: NRG; PAM sequence: AAG
atacattgttttgcatttaa

SEQ ID NO: 134526 - DNA, 20 bp, Artificial Sequence
  Description of Artificial Sequence: Synthetic oligonucleotide
  Target: LAMA2; (+) strand; PAM type: NRG; PAM sequence: AAG
ttgttttgcatttaaaagaa

SEQ ID NO: 134527 - DNA, 20 bp, Artificial Sequence
  Description of Artificial Sequence: Synthetic oligonucleotide
  Target: LAMA2; (+) strand; PAM type: NRG; PAM sequence: AAG
atgctatttacaaaaatcaa

SEQ ID NO: 134528 - DNA, 20 bp, Artificial Sequence
  Description of Artificial Sequence: Synthetic oligonucleotide
  Target: LAMA2; (+) strand; PAM type: NRG; PAM sequence: AAG
tcatgaattctgtttgtgtt

SEQ ID NO: 134529 - DNA, 20 bp, Artificial Sequence
  Description of Artificial Sequence: Synthetic oligonucleotide
  Target: LAMA2; (+) strand; PAM type: NRG; PAM sequence: AGG
catgaattctgtttgtgtta

SEQ ID NO: 134530 - DNA, 20 bp, Artificial Sequence
  Description of Artificial Sequence: Synthetic oligonucleotide
  Target: LAMA2; (+) strand; PAM type: NRG; PAM sequence: TAG
gtgttaaggatttaaaaaaa

SEQ ID NO: 134531 - DNA, 20 bp, Artificial Sequence
  Description of Artificial Sequence: Synthetic oligonucleotide
  Target: LAMA2; (+) strand; PAM type: NRG; PAM sequence: TGG
ttaaggatttaaaaaaatag

SEQ ID NO: 134532 - DNA, 20 bp, Artificial Sequence
  Description of Artificial Sequence: Synthetic oligonucleotide
  Target: LAMA2; (+) strand; PAM type: NRG; PAM sequence: GAG
atttaaaaaaatagtggcgt

SEQ ID NO: 134533 - DNA, 20 bp, Artificial Sequence
  Description of Artificial Sequence: Synthetic oligonucleotide
  Target: LAMA2; (+) strand; PAM type: NRG; PAM sequence: TGG
aaaaaatagtggcgtgagaa

SEQ ID NO: 134534 - DNA, 20 bp, Artificial Sequence
  Description of Artificial Sequence: Synthetic oligonucleotide
  Target: LAMA2; (+) strand; PAM type: NRG; PAM sequence: AAG
atggttattgctcttcaata

SEQ ID NO: 134535 - DNA, 20 bp, Artificial Sequence
  Description of Artificial Sequence: Synthetic oligonucleotide
  Target: LAMA2; (+) strand; PAM type: NRG; PAM sequence: TAG
ttattgctcttcaataaaga

SEQ ID NO: 134536 - DNA, 20 bp, Artificial Sequence
  Description of Artificial Sequence: Synthetic oligonucleotide
  Target: LAMA2; (+) strand; PAM type: NRG; PAM sequence: GAG
attgctcttcaataaagata

SEQ ID NO: 134537 - DNA, 20 bp, Artificial Sequence
  Description of Artificial Sequence: Synthetic oligonucleotide
  Target: LAMA2; (+) strand; PAM type: NRG; PAM sequence: TAG
acgttttgctttaacatatc

SEQ ID NO: 134538 - DNA, 20 bp, Artificial Sequence
  Description of Artificial Sequence: Synthetic oligonucleotide
  Target: LAMA2; (+) strand; PAM type: NRG; PAM sequence: GAG
gttttgctttaacatatcta

SEQ ID NO: 134539 - DNA, 20 bp, Artificial Sequence
  Description of Artificial Sequence: Synthetic oligonucleotide
  Target: LAMA2; (+) strand; PAM type: NRG; PAM sequence: AGG
ttttgctttaacatatctag

SEQ ID NO: 134540 - DNA, 20 bp, Artificial Sequence
  Description of Artificial Sequence: Synthetic oligonucleotide
  Target: LAMA2; (+) strand; PAM type: NRG; PAM sequence: TAG
agaggcaactttttcatcga

SEQ ID NO: 134541 - DNA, 20 bp, Artificial Sequence
  Description of Artificial Sequence: Synthetic oligonucleotide
  Target: LAMA2; (+) strand; PAM type: NRG; PAM sequence: TAG
tttttcatcgatagctttat

SEQ ID NO: 134542 - DNA, 20 bp, Artificial Sequence
  Description of Artificial Sequence: Synthetic oligonucleotide
  Target: LAMA2; (+) strand; PAM type: NRG; PAM sequence: TAG
ttcatcgatagctttattag

SEQ ID NO: 134543 - DNA, 20 bp, Artificial Sequence
  Description of Artificial Sequence: Synthetic oligonucleotide
  Target: LAMA2; (+) strand; PAM type: NRG; PAM sequence: AGG
tcatcgatagctttattagt

SEQ ID NO: 134544 - DNA, 20 bp, Artificial Sequence
  Description of Artificial Sequence: Synthetic oligonucleotide
  Target: LAMA2; (+) strand; PAM type: NRG; PAM sequence: AAG
gatagctttattagtaggtc

SEQ ID NO: 134545 - DNA, 20 bp, Artificial Sequence
  Description of Artificial Sequence: Synthetic oligonucleotide
  Target: LAMA2; (+) strand; PAM type: NRG; PAM sequence: AGG
atagctttattagtaggtca

SEQ ID NO: 134546 - DNA, 20 bp, Artificial Sequence
  Description of Artificial Sequence: Synthetic oligonucleotide
  Target: LAMA2; (+) strand; PAM type: NRG; PAM sequence: GAG
agctttattagtaggtcaag

SEQ ID NO: 134547 - DNA, 20 bp, Artificial Sequence
  Description of Artificial Sequence: Synthetic oligonucleotide
  Target: LAMA2; (+) strand; PAM type: NRG; PAM sequence: AAG
gtcaaggagaaatcatacct

SEQ ID NO: 134548 - DNA, 20 bp, Artificial Sequence
  Description of Artificial Sequence: Synthetic oligonucleotide
  Target: LAMA2; (+) strand; PAM type: NRG; PAM sequence: TAG
aaggagaaatcatacctaag

SEQ ID NO: 134549 - DNA, 20 bp, Artificial Sequence
  Description of Artificial Sequence: Synthetic oligonucleotide
  Target: LAMA2; (+) strand; PAM type: NRG; PAM sequence: AAG
agaaatcatacctaagtaga

SEQ ID NO: 134550 - DNA, 20 bp, Artificial Sequence
  Description of Artificial Sequence: Synthetic oligonucleotide
  Target: LAMA2; (+) strand; PAM type: NRG; PAM sequence: AGG
gaaatcatacctaagtagaa

SEQ ID NO: 134551 - DNA, 20 bp, Artificial Sequence
  Description of Artificial Sequence: Synthetic oligonucleotide
  Target: LAMA2; (+) strand; PAM type: NRG; PAM sequence: TGG
tacctaagtagaaaggtccg

SEQ ID NO: 134552 - DNA, 20 bp, Artificial Sequence
  Description of Artificial Sequence: Synthetic oligonucleotide
  Target: LAMA2; (+) strand; PAM type: NRG; PAM sequence: GAG
cctaagtagaaaggtccgtg

SEQ ID NO: 134553 - DNA, 20 bp, Artificial Sequence
  Description of Artificial Sequence: Synthetic oligonucleotide
  Target: LAMA2; (+) strand; PAM type: NRG; PAM sequence: AAG
gtagaaaggtccgtggagaa

SEQ ID NO: 134554 - DNA, 20 bp, Artificial Sequence
  Description of Artificial Sequence: Synthetic oligonucleotide
  Target: LAMA2; (+) strand; PAM type: NRG; PAM sequence: GAG
agaaaggtccgtggagaaaa

SEQ ID NO: 134555 - DNA, 20 bp, Artificial Sequence
  Description of Artificial Sequence: Synthetic oligonucleotide
  Target: LAMA2; (+) strand; PAM type: NRG; PAM sequence: CAG
agaaaagagacaaaccatat

SEQ ID NO: 134556 - DNA, 20 bp, Artificial Sequence
  Description of Artificial Sequence: Synthetic oligonucleotide
  Target: LAMA2; (+) strand; PAM type: NRG; PAM sequence: GAG
aaaagagacaaaccatatca

SEQ ID NO: 134557 - DNA, 20 bp, Artificial Sequence
  Description of Artificial Sequence: Synthetic oligonucleotide
  Target: LAMA2; (+) strand; PAM type: NRG; PAM sequence: AAG
aaattgaaaaaatttaaatc

SEQ ID NO: 134558 - DNA, 20 bp, Artificial Sequence
  Description of Artificial Sequence: Synthetic oligonucleotide
  Target: LAMA2; (+) strand; PAM type: NRG; PAM sequence: AGG
aattgaaaaaatttaaatca

SEQ ID NO: 134559 - DNA, 20 bp, Artificial Sequence
  Description of Artificial Sequence: Synthetic oligonucleotide
  Target: LAMA2; (+) strand; PAM type: NRG; PAM sequence: TGG
gcaaaatcatgcattttaaa

SEQ ID NO: 134560 - DNA, 20 bp, Artificial Sequence
  Description of Artificial Sequence: Synthetic oligonucleotide
  Target: LAMA2; (+) strand; PAM type: NRG; PAM sequence: GGG
caaaatcatgcattttaaat

SEQ ID NO: 134561 - DNA, 20 bp, Artificial Sequence
  Description of Artificial Sequence: Synthetic oligonucleotide
  Target: LAMA2; (+) strand; PAM type: NRG; PAM sequence: TGG
catgcattttaaatgggaaa

SEQ ID NO: 134562 - DNA, 20 bp, Artificial Sequence
  Description of Artificial Sequence: Synthetic oligonucleotide
  Target: LAMA2; (+) strand; PAM type: NRG; PAM sequence: GGG
atgcattttaaatgggaaat

SEQ ID NO: 134563 - DNA, 20 bp, Artificial Sequence
  Description of Artificial Sequence: Synthetic oligonucleotide
  Target: LAMA2; (+) strand; PAM type: NRG; PAM sequence: TAG
atgggaaatgggaaatttca

SEQ ID NO: 134564 - DNA, 20 bp, Artificial Sequence
  Description of Artificial Sequence: Synthetic oligonucleotide
  Target: LAMA2; (+) strand; PAM type: NRG; PAM sequence: TAG
tgggaaatttcatagcttct

SEQ ID NO: 134565 - DNA, 20 bp, Artificial Sequence
  Description of Artificial Sequence: Synthetic oligonucleotide
  Target: LAMA2; (+) strand; PAM type: NRG; PAM sequence: GAG
tagcttcttagcaatgatgt

SEQ ID NO: 134566 - DNA, 20 bp, Artificial Sequence
  Description of Artificial Sequence: Synthetic oligonucleotide
  Target: LAMA2; (+) strand; PAM type: NRG; PAM sequence: TGG
tagcaatgatgtgagctctg

SEQ ID NO: 134567 - DNA, 20 bp, Artificial Sequence
  Description of Artificial Sequence: Synthetic oligonucleotide
  Target: LAMA2; (+) strand; PAM type: NRG; PAM sequence: TGG
atgatgtgagctctgtggtc

SEQ ID NO: 134568 - DNA, 20 bp, Artificial Sequence
  Description of Artificial Sequence: Synthetic oligonucleotide
  Target: LAMA2; (+) strand; PAM type: NRG; PAM sequence: GGG
tgatgtgagctctgtggtct

SEQ ID NO: 134569 - DNA, 20 bp, Artificial Sequence
  Description of Artificial Sequence: Synthetic oligonucleotide
  Target: LAMA2; (+) strand; PAM type: NRG; PAM sequence: TGG
tgtgagctctgtggtctggg

SEQ ID NO: 134570 - DNA, 20 bp, Artificial Sequence
  Description of Artificial Sequence: Synthetic oligonucleotide
  Target: LAMA2; (+) strand; PAM type: NRG; PAM sequence: CAG
ctctgtggtctgggtggatg

SEQ ID NO: 134571 - DNA, 20 bp, Artificial Sequence
  Description of Artificial Sequence: Synthetic oligonucleotide
  Target: LAMA2; (+) strand; PAM type: NRG; PAM sequence: AGG
tctgtggtctgggtggatgc

SEQ ID NO: 134572 - DNA, 20 bp, Artificial Sequence
  Description of Artificial Sequence: Synthetic oligonucleotide
  Target: LAMA2; (+) strand; PAM type: NRG; PAM sequence: GGG
ctgtggtctgggtggatgca

SEQ ID NO: 134573 - DNA, 20 bp, Artificial Sequence
  Description of Artificial Sequence: Synthetic oligonucleotide
  Target: LAMA2; (+) strand; PAM type: NRG; PAM sequence: TGG
ctgggtggatgcagggcatg

SEQ ID NO: 134574 - DNA, 20 bp, Artificial Sequence
  Description of Artificial Sequence: Synthetic oligonucleotide
  Target: LAMA2; (+) strand; PAM type: NRG; PAM sequence: GGG
tgggtggatgcagggcatgt

SEQ ID NO: 134575 - DNA, 20 bp, Artificial Sequence
  Description of Artificial Sequence: Synthetic oligonucleotide
  Target: LAMA2; (+) strand; PAM type: NRG; PAM sequence: AAG
gtgggtgcttttgctcattt

SEQ ID NO: 134576 - DNA, 20 bp, Artificial Sequence
  Description of Artificial Sequence: Synthetic oligonucleotide
  Target: LAMA2; (+) strand; PAM type: NRG; PAM sequence: AGG
tgggtgcttttgctcattta

SEQ ID NO: 134577 - DNA, 20 bp, Artificial Sequence
  Description of Artificial Sequence: Synthetic oligonucleotide
  Target: LAMA2; (+) strand; PAM type: NRG; PAM sequence: TAG
aacattctcaatacattatg

SEQ ID NO: 134578 - DNA, 20 bp, Artificial Sequence
  Description of Artificial Sequence: Synthetic oligonucleotide
  Target: LAMA2; (+) strand; PAM type: NRG; PAM sequence: AAG
tcaatacattatgtagccac

SEQ ID NO: 134579 - DNA, 20 bp, Artificial Sequence
  Description of Artificial Sequence: Synthetic oligonucleotide
  Target: LAMA2; (+) strand; PAM type: NRG; PAM sequence: TAG
tgtagccacaagaaaattta

SEQ ID NO: 134580 - DNA, 20 bp, Artificial Sequence
  Description of Artificial Sequence: Synthetic oligonucleotide
  Target: LAMA2; (+) strand; PAM type: NRG; PAM sequence: TGG
aatttatagtgatttctttt

SEQ ID NO: 134581 - DNA, 20 bp, Artificial Sequence
  Description of Artificial Sequence: Synthetic oligonucleotide
  Target: LAMA2; (+) strand; PAM type: NRG; PAM sequence: TGG
ttatagtgatttctttttgg

SEQ ID NO: 134582 - DNA, 20 bp, Artificial Sequence
  Description of Artificial Sequence: Synthetic oligonucleotide
  Target: LAMA2; (+) strand; PAM type: NRG; PAM sequence: AAG
gatttctttttggtggaaca

SEQ ID NO: 134583 - DNA, 20 bp, Artificial Sequence
  Description of Artificial Sequence: Synthetic oligonucleotide
  Target: LAMA2; (+) strand; PAM type: NRG; PAM sequence: CAG
acaaagtatatgctcttttc

SEQ ID NO: 134584 - DNA, 20 bp, Artificial Sequence
  Description of Artificial Sequence: Synthetic oligonucleotide
  Target: LAMA2; (+) strand; PAM type: NRG; PAM sequence: CAG
gtatatgctcttttccagct

SEQ ID NO: 134585 - DNA, 20 bp, Artificial Sequence
  Description of Artificial Sequence: Synthetic oligonucleotide
  Target: LAMA2; (+) strand; PAM type: NRG; PAM sequence: AGG
tatatgctcttttccagctc

SEQ ID NO: 134586 - DNA, 20 bp, Artificial Sequence
  Description of Artificial Sequence: Synthetic oligonucleotide
  Target: LAMA2; (+) strand; PAM type: NRG; PAM sequence: CAG
tccagctcaggatccttttc

SEQ ID NO: 134587 - DNA, 20 bp, Artificial Sequence
  Description of Artificial Sequence: Synthetic oligonucleotide
  Target: LAMA2; (+) strand; PAM type: NRG; PAM sequence: CAG
tccagtcttcctacacttaa

SEQ ID NO: 134588 - DNA, 20 bp, Artificial Sequence
  Description of Artificial Sequence: Synthetic oligonucleotide
  Target: LAMA2; (+) strand; PAM type: NRG; PAM sequence: CAG
gtcttcctacacttaacagc

SEQ ID NO: 134589 - DNA, 20 bp, Artificial Sequence
  Description of Artificial Sequence: Synthetic oligonucleotide
  Target: LAMA2; (+) strand; PAM type: NRG; PAM sequence: TAG
cttaacagccagtacaaact

SEQ ID NO: 134590 - DNA, 20 bp, Artificial Sequence
  Description of Artificial Sequence: Synthetic oligonucleotide
  Target: LAMA2; (+) strand; PAM type: NRG; PAM sequence: TAG
gccagtacaaacttagtcca

SEQ ID NO: 134591 - DNA, 20 bp, Artificial Sequence
  Description of Artificial Sequence: Synthetic oligonucleotide
  Target: LAMA2; (+) strand; PAM type: NRG; PAM sequence: CAG
tagaacgtatttgttgtgca

SEQ ID NO: 134592 - DNA, 20 bp, Artificial Sequence
  Description of Artificial Sequence: Synthetic oligonucleotide
  Target: LAMA2; (+) strand; PAM type: NRG; PAM sequence: AAG
gcacaaacacacacacatgc

SEQ ID NO: 134593 - DNA, 20 bp, Artificial Sequence
  Description of Artificial Sequence: Synthetic oligonucleotide
  Target: LAMA2; (+) strand; PAM type: NRG; PAM sequence: AGG
cacaaacacacacacatgca

SEQ ID NO: 134594 - DNA, 20 bp, Artificial Sequence
  Description of Artificial Sequence: Synthetic oligonucleotide
  Target: LAMA2; (+) strand; PAM type: NRG; PAM sequence: CAG
acatgcaaggtttcacgaat

SEQ ID NO: 134595 - DNA, 20 bp, Artificial Sequence
  Description of Artificial Sequence: Synthetic oligonucleotide
  Target: LAMA2; (+) strand; PAM type: NRG; PAM sequence: AGG
catgcaaggtttcacgaatc

SEQ ID NO: 134596 - DNA, 20 bp, Artificial Sequence
  Description of Artificial Sequence: Synthetic oligonucleotide
  Target: LAMA2; (+) strand; PAM type: NRG; PAM sequence: TAG
ttttgtgtatgtgtcaaact

SEQ ID NO: 134597 - DNA, 20 bp, Artificial Sequence
  Description of Artificial Sequence: Synthetic oligonucleotide
  Target: LAMA2; (+) strand; PAM type: NRG; PAM sequence: TGG
tgtcaaacttagccatcaac

SEQ ID NO: 134598 - DNA, 20 bp, Artificial Sequence
  Description of Artificial Sequence: Synthetic oligonucleotide
  Target: LAMA2; (+) strand; PAM type: NRG; PAM sequence: TAG
atcaactggaatttgtgttt

SEQ ID NO: 134599 - DNA, 20 bp, Artificial Sequence
  Description of Artificial Sequence: Synthetic oligonucleotide
  Target: LAMA2; (+) strand; PAM type: NRG; PAM sequence: TGG
ctggaatttgtgttttagtt

SEQ ID NO: 134600 - DNA, 20 bp, Artificial Sequence
  Description of Artificial Sequence: Synthetic oligonucleotide
  Target: LAMA2; (+) strand; PAM type: NRG; PAM sequence: CAG
tggatgctgatttacctcat

SEQ ID NO: 134601 - DNA, 20 bp, Artificial Sequence
  Description of Artificial Sequence: Synthetic oligonucleotide
  Target: LAMA2; (+) strand; PAM type: NRG; PAM sequence: TAG
tgcccttcacttactctccc

SEQ ID NO: 134602 - DNA, 20 bp, Artificial Sequence
  Description of Artificial Sequence: Synthetic oligonucleotide
  Target: LAMA2; (+) strand; PAM type: NRG; PAM sequence: TAG
tcacttactctccctagaca

SEQ ID NO: 134603 - DNA, 20 bp, Artificial Sequence
  Description of Artificial Sequence: Synthetic oligonucleotide
  Target: LAMA2; (+) strand; PAM type: NRG; PAM sequence: TAG
ctattttccgtaaaatatgt

SEQ ID NO: 134604 - DNA, 20 bp, Artificial Sequence
  Description of Artificial Sequence: Synthetic oligonucleotide
  Target: LAMA2; (+) strand; PAM type: NRG; PAM sequence: TGG
atttcatatttaatgtgata

SEQ ID NO: 134605 - DNA, 20 bp, Artificial Sequence
  Description of Artificial Sequence: Synthetic oligonucleotide
  Target: LAMA2; (+) strand; PAM type: NRG; PAM sequence: TAG
atatttaatgtgatatggaa

SEQ ID NO: 134606 - DNA, 20 bp, Artificial Sequence
  Description of Artificial Sequence: Synthetic oligonucleotide
  Target: LAMA2; (+) strand; PAM type: NRG; PAM sequence: GAG
aatgtgatatggaatagaat

SEQ ID NO: 134607 - DNA, 20 bp, Artificial Sequence
  Description of Artificial Sequence: Synthetic oligonucleotide
  Target: LAMA2; (+) strand; PAM type: NRG; PAM sequence: GAG
tgtgatatggaatagaatga

SEQ ID NO: 134608 - DNA, 20 bp, Artificial Sequence
  Description of Artificial Sequence: Synthetic oligonucleotide
  Target: LAMA2; (+) strand; PAM type: NRG; PAM sequence: AGG
gtgatatggaatagaatgag

SEQ ID NO: 134609 - DNA, 20 bp, Artificial Sequence
  Description of Artificial Sequence: Synthetic oligonucleotide
  Target: LAMA2; (+) strand; PAM type: NRG; PAM sequence: CAG
tcaattatctttctgtcatg

SEQ ID NO: 134610 - DNA, 20 bp, Artificial Sequence
  Description of Artificial Sequence: Synthetic oligonucleotide
  Target: LAMA2; (+) strand; PAM type: NRG; PAM sequence: AAG
tctgtcatgcagaataaaat

SEQ ID NO: 134611 - DNA, 20 bp, Artificial Sequence
  Description of Artificial Sequence: Synthetic oligonucleotide
  Target: LAMA2; (+) strand; PAM type: NRG; PAM sequence: AAG
aataaaataagtgttttgac

SEQ ID NO: 134612 - DNA, 20 bp, Artificial Sequence
  Description of Artificial Sequence: Synthetic oligonucleotide
  Target: LAMA2; (+) strand; PAM type: NRG; PAM sequence: TGG
caagatataaaaaatattta

SEQ ID NO: 134613 - DNA, 20 bp, Artificial Sequence
  Description of Artificial Sequence: Synthetic oligonucleotide
  Target: LAMA2; (+) strand; PAM type: NRG; PAM sequence: AAG
aaaaaatatttatggtaatt

SEQ ID NO: 134614 - DNA, 20 bp, Artificial Sequence
  Description of Artificial Sequence: Synthetic oligonucleotide
  Target: LAMA2; (+) strand; PAM type: NRG; PAM sequence: CAG
taagtacattcatactgtat

SEQ ID NO: 134615 - DNA, 20 bp, Artificial Sequence
  Description of Artificial Sequence: Synthetic oligonucleotide
  Target: LAMA2; (+) strand; PAM type: NRG; PAM sequence: TAG
tactgtatcagctaaatttg

SEQ ID NO: 134616 - DNA, 20 bp, Artificial Sequence
  Description of Artificial Sequence: Synthetic oligonucleotide
  Target: LAMA2; (+) strand; PAM type: NRG; PAM sequence: GAG
attaaaataaatatattgtc

SEQ ID NO: 134617 - DNA, 20 bp, Artificial Sequence
  Description of Artificial Sequence: Synthetic oligonucleotide
  Target: LAMA2; (+) strand; PAM type: NRG; PAM sequence: GAG
taaatatattgtcgagttgt

SEQ ID NO: 134618 - DNA, 20 bp, Artificial Sequence
  Description of Artificial Sequence: Synthetic oligonucleotide
  Target: LAMA2; (+) strand; PAM type: NRG; PAM sequence: CAG
atatattgtcgagttgtgag

SEQ ID NO: 134619 - DNA, 20 bp, Artificial Sequence
  Description of Artificial Sequence: Synthetic oligonucleotide
  Target: LAMA2; (+) strand; PAM type: NRG; PAM sequence: CAG
ttgtcgagttgtgagcagca

SEQ ID NO: 134620 - DNA, 20 bp, Artificial Sequence
  Description of Artificial Sequence: Synthetic oligonucleotide
  Target: LAMA2; (+) strand; PAM type: NRG; PAM sequence: TGG
tcgagttgtgagcagcacag

SEQ ID NO: 134621 - DNA, 20 bp, Artificial Sequence
  Description of Artificial Sequence: Synthetic oligonucleotide
  Target: LAMA2; (+) strand; PAM type: NRG; PAM sequence: AAG
gttgtgagcagcacagtggt

SEQ ID NO: 134622 - DNA, 20 bp, Artificial Sequence
  Description of Artificial Sequence: Synthetic oligonucleotide
  Target: LAMA2; (+) strand; PAM type: NRG; PAM sequence: AAG
tggtaagaatattttgcatg

SEQ ID NO: 134623 - DNA, 20 bp, Artificial Sequence
  Description of Artificial Sequence: Synthetic oligonucleotide
  Target: LAMA2; (+) strand; PAM type: NRG; PAM sequence: TGG
aagaatattttgcatgaaga

SEQ ID NO: 134624 - DNA, 20 bp, Artificial Sequence
  Description of Artificial Sequence: Synthetic oligonucleotide
  Target: LAMA2; (+) strand; PAM type: NRG; PAM sequence: GAG
cataaatatgcactaaaatt

SEQ ID NO: 134625 - DNA, 20 bp, Artificial Sequence
  Description of Artificial Sequence: Synthetic oligonucleotide
  Target: LAMA2; (+) strand; PAM type: NRG; PAM sequence: CAG
taactgcaaaaaaatgaatg

SEQ ID NO: 134626 - DNA, 20 bp, Artificial Sequence
  Description of Artificial Sequence: Synthetic oligonucleotide
  Target: LAMA2; (+) strand; PAM type: NRG; PAM sequence: TAG
ctgcaaaaaaatgaatgcag

SEQ ID NO: 134627 - DNA, 20 bp, Artificial Sequence
  Description of Artificial Sequence: Synthetic oligonucleotide
  Target: LAMA2; (+) strand; PAM type: NRG; PAM sequence: TAG
gaatgcagtagctacacatt

SEQ ID NO: 134628 - DNA, 20 bp, Artificial Sequence
  Description of Artificial Sequence: Synthetic oligonucleotide
  Target: LAMA2; (+) strand; PAM type: NRG; PAM sequence: AAG
gcagtagctacacatttaga

SEQ ID NO: 134629 - DNA, 20 bp, Artificial Sequence
  Description of Artificial Sequence: Synthetic oligonucleotide
  Target: LAMA2; (+) strand; PAM type: NRG; PAM sequence: AAG
gtagctacacatttagaaag

SEQ ID NO: 134630 - DNA, 20 bp, Artificial Sequence
  Description of Artificial Sequence: Synthetic oligonucleotide
  Target: LAMA2; (+) strand; PAM type: NRG; PAM sequence: AAG
cacatttagaaagaagttct

SEQ ID NO: 134631 - DNA, 20 bp, Artificial Sequence
  Description of Artificial Sequence: Synthetic oligonucleotide
  Target: LAMA2; (+) strand; PAM type: NRG; PAM sequence: AAG
agaaagaagttctaagaata

SEQ ID NO: 134632 - DNA, 20 bp, Artificial Sequence
  Description of Artificial Sequence: Synthetic oligonucleotide
  Target: LAMA2; (+) strand; PAM type: NRG; PAM sequence: CAG
aagaagttctaagaataaag

SEQ ID NO: 134633 - DNA, 20 bp, Artificial Sequence
  Description of Artificial Sequence: Synthetic oligonucleotide
  Target: LAMA2; (+) strand; PAM type: NRG; PAM sequence: TAG
taaagcagtttacaaacaaa

SEQ ID NO: 134634 - DNA, 20 bp, Artificial Sequence
  Description of Artificial Sequence: Synthetic oligonucleotide
  Target: LAMA2; (+) strand; PAM type: NRG; PAM sequence: TAG
tatacatgtatatgctttgt

SEQ ID NO: 134635 - DNA, 20 bp, Artificial Sequence
  Description of Artificial Sequence: Synthetic oligonucleotide
  Target: LAMA2; (+) strand; PAM type: NRG; PAM sequence: AAG
acatgtatatgctttgttag

SEQ ID NO: 134636 - DNA, 20 bp, Artificial Sequence
  Description of Artificial Sequence: Synthetic oligonucleotide
  Target: LAMA2; (+) strand; PAM type: NRG; PAM sequence: AAG
gtatatgctttgttagaaga

SEQ ID NO: 134637 - DNA, 20 bp, Artificial Sequence
  Description of Artificial Sequence: Synthetic oligonucleotide
  Target: LAMA2; (+) strand; PAM type: NRG; PAM sequence: GAG
atatgctttgttagaagaaa

SEQ ID NO: 134638 - DNA, 20 bp, Artificial Sequence
  Description of Artificial Sequence: Synthetic oligonucleotide
  Target: LAMA2; (+) strand; PAM type: NRG; PAM sequence: GAG
gaagaaagagaatttattgt

SEQ ID NO: 134639 - DNA, 20 bp, Artificial Sequence
  Description of Artificial Sequence: Synthetic oligonucleotide
  Target: LAMA2; (+) strand; PAM type: NRG; PAM sequence: TGG
gaaagagaatttattgtgag

SEQ ID NO: 134640 - DNA, 20 bp, Artificial Sequence
  Description of Artificial Sequence: Synthetic oligonucleotide
  Target: LAMA2; (+) strand; PAM type: NRG; PAM sequence: GGG
aaagagaatttattgtgagt

SEQ ID NO: 134641 - DNA, 20 bp, Artificial Sequence
  Description of Artificial Sequence: Synthetic oligonucleotide
  Target: LAMA2; (+) strand; PAM type: NRG; PAM sequence: CAG
gtgggatactttaactcttt

SEQ ID NO: 134642 - DNA, 20 bp, Artificial Sequence
  Description of Artificial Sequence: Synthetic oligonucleotide
  Target: LAMA2; (+) strand; PAM type: NRG; PAM sequence: AAG
ctttaactctttcagatgtt

SEQ ID NO: 134643 - DNA, 20 bp, Artificial Sequence
  Description of Artificial Sequence: Synthetic oligonucleotide
  Target: LAMA2; (+) strand; PAM type: NRG; PAM sequence: AGG
tttaactctttcagatgtta

SEQ ID NO: 134644 - DNA, 20 bp, Artificial Sequence
  Description of Artificial Sequence: Synthetic oligonucleotide
  Target: LAMA2; (+) strand; PAM type: NRG; PAM sequence: AAG
ccaaataacttcattcatgt

SEQ ID NO: 134645 - DNA, 20 bp, Artificial Sequence
  Description of Artificial Sequence: Synthetic oligonucleotide
  Target: LAMA2; (+) strand; PAM type: NRG; PAM sequence: AAG
aataacttcattcatgtaag

SEQ ID NO: 134646 - DNA, 20 bp, Artificial Sequence
  Description of Artificial Sequence: Synthetic oligonucleotide
  Target: LAMA2; (+) strand; PAM type: NRG; PAM sequence: GAG
gtaagaagtatatttcatgt

SEQ ID NO: 134647 - DNA, 20 bp, Artificial Sequence
  Description of Artificial Sequence: Synthetic oligonucleotide
  Target: LAMA2; (+) strand; PAM type: NRG; PAM sequence: CAG
gaagtatatttcatgtgagt

SEQ ID NO: 134648 - DNA, 20 bp, Artificial Sequence
  Description of Artificial Sequence: Synthetic oligonucleotide
  Target: LAMA2; (+) strand; PAM type: NRG; PAM sequence: AGG
aagtatatttcatgtgagtc

SEQ ID NO: 134649 - DNA, 20 bp, Artificial Sequence
  Description of Artificial Sequence: Synthetic oligonucleotide
  Target: LAMA2; (+) strand; PAM type: NRG; PAM sequence: TAG
gtgagtcaggttttattctc

SEQ ID NO: 134650 - DNA, 20 bp, Artificial Sequence
  Description of Artificial Sequence: Synthetic oligonucleotide
  Target: LAMA2; (+) strand; PAM type: NRG; PAM sequence: AGG
tgagtcaggttttattctct

SEQ ID NO: 134651 - DNA, 20 bp, Artificial Sequence
  Description of Artificial Sequence: Synthetic oligonucleotide
  Target: LAMA2; (+) strand; PAM type: NRG; PAM sequence: TGG
tctctaggtgttttctaatg

SEQ ID NO: 134652 - DNA, 20 bp, Artificial Sequence
  Description of Artificial Sequence: Synthetic oligonucleotide
  Target: LAMA2; (+) strand; PAM type: NRG; PAM sequence: GGG
ctctaggtgttttctaatgt

SEQ ID NO: 134653 - DNA, 20 bp, Artificial Sequence
  Description of Artificial Sequence: Synthetic oligonucleotide
  Target: LAMA2; (+) strand; PAM type: NRG; PAM sequence: AAG
aggtgttttctaatgtggga

SEQ ID NO: 134654 - DNA, 20 bp, Artificial Sequence
  Description of Artificial Sequence: Synthetic oligonucleotide
  Target: LAMA2; (+) strand; PAM type: NRG; PAM sequence: AAG
aatgtgggaaagtgaaatac

SEQ ID NO: 134655 - DNA, 20 bp, Artificial Sequence
  Description of Artificial Sequence: Synthetic oligonucleotide
  Target: LAMA2; (+) strand; PAM type: NRG; PAM sequence: AGG
atgtgggaaagtgaaataca

SEQ ID NO: 134656 - DNA, 20 bp, Artificial Sequence
  Description of Artificial Sequence: Synthetic oligonucleotide
  Target: LAMA2; (+) strand; PAM type: NRG; PAM sequence: GGG
tgtgggaaagtgaaatacaa

SEQ ID NO: 134657 - DNA, 20 bp, Artificial Sequence
  Description of Artificial Sequence: Synthetic oligonucleotide
  Target: LAMA2; (+) strand; PAM type: NRG; PAM sequence: TGG
tgaaatacaagggtttgaaa

SEQ ID NO: 134658 - DNA, 20 bp, Artificial Sequence
  Description of Artificial Sequence: Synthetic oligonucleotide
  Target: LAMA2; (+) strand; PAM type: NRG; PAM sequence: TGG
acaagggtttgaaatggttc

SEQ ID NO: 134659 - DNA, 20 bp, Artificial Sequence
  Description of Artificial Sequence: Synthetic oligonucleotide
  Target: LAMA2; (+) strand; PAM type: NRG; PAM sequence: GGG
caagggtttgaaatggttct

SEQ ID NO: 134660 - DNA, 20 bp, Artificial Sequence
  Description of Artificial Sequence: Synthetic oligonucleotide
  Target: LAMA2; (+) strand; PAM type: NRG; PAM sequence: GGG
aagggtttgaaatggttctg

SEQ ID NO: 134661 - DNA, 20 bp, Artificial Sequence
  Description of Artificial Sequence: Synthetic oligonucleotide
  Target: LAMA2; (+) strand; PAM type: NRG; PAM sequence: CAG
ttgaaatggttctggggatg

SEQ ID NO: 134662 - DNA, 20 bp, Artificial Sequence
  Description of Artificial Sequence: Synthetic oligonucleotide
  Target: LAMA2; (+) strand; PAM type: NRG; PAM sequence: CAG
ggggatgcagtctttcctgt

SEQ ID NO: 134663 - DNA, 20 bp, Artificial Sequence
  Description of Artificial Sequence: Synthetic oligonucleotide
  Target: LAMA2; (+) strand; PAM type: NRG; PAM sequence: CAG
cagtctttcctgtcagattc

SEQ ID NO: 134664 - DNA, 20 bp, Artificial Sequence
  Description of Artificial Sequence: Synthetic oligonucleotide
  Target: LAMA2; (+) strand; PAM type: NRG; PAM sequence: CAG
tctttcctgtcagattccag

SEQ ID NO: 134665 - DNA, 20 bp, Artificial Sequence
  Description of Artificial Sequence: Synthetic oligonucleotide
  Target: LAMA2; (+) strand; PAM type: NRG; PAM sequence: TGG
ctgatataatttaatattcg

SEQ ID NO: 134666 - DNA, 20 bp, Artificial Sequence
  Description of Artificial Sequence: Synthetic oligonucleotide
  Target: LAMA2; (+) strand; PAM type: NRG; PAM sequence: AAG
atataatttaatattcgtgg

SEQ ID NO: 134667 - DNA, 20 bp, Artificial Sequence
  Description of Artificial Sequence: Synthetic oligonucleotide
  Target: LAMA2; (+) strand; PAM type: NRG; PAM sequence: CAG
aatttaatattcgtggaaga

SEQ ID NO: 134668 - DNA, 20 bp, Artificial Sequence
  Description of Artificial Sequence: Synthetic oligonucleotide
  Target: LAMA2; (+) strand; PAM type: NRG; PAM sequence: AGG
atttaatattcgtggaagac

SEQ ID NO: 134669 - DNA, 20 bp, Artificial Sequence
  Description of Artificial Sequence: Synthetic oligonucleotide
  Target: LAMA2; (+) strand; PAM type: NRG; PAM sequence: GGG
tttaatattcgtggaagaca

SEQ ID NO: 134670 - DNA, 20 bp, Artificial Sequence
  Description of Artificial Sequence: Synthetic oligonucleotide
  Target: LAMA2; (+) strand; PAM type: NRG; PAM sequence: TAG
cgtggaagacagggcaaata

SEQ ID NO: 134671 - DNA, 20 bp, Artificial Sequence
  Description of Artificial Sequence: Synthetic oligonucleotide
  Target: LAMA2; (+) strand; PAM type: NRG; PAM sequence: TAG
aagacagggcaaatatagaa

SEQ ID NO: 134672 - DNA, 20 bp, Artificial Sequence
  Description of Artificial Sequence: Synthetic oligonucleotide
  Target: LAMA2; (+) strand; PAM type: NRG; PAM sequence: CAG
atagcatcaaattgattttg

SEQ ID NO: 134673 - DNA, 20 bp, Artificial Sequence
  Description of Artificial Sequence: Synthetic oligonucleotide
  Target: LAMA2; (+) strand; PAM type: NRG; PAM sequence: GAG
agcatcaaattgattttgca

SEQ ID NO: 134674 - DNA, 20 bp, Artificial Sequence
  Description of Artificial Sequence: Synthetic oligonucleotide
  Target: LAMA2; (+) strand; PAM type: NRG; PAM sequence: AAG
attgattttgcagagttttc

SEQ ID NO: 134675 - DNA, 20 bp, Artificial Sequence
  Description of Artificial Sequence: Synthetic oligonucleotide
  Target: LAMA2; (+) strand; PAM type: NRG; PAM sequence: CAG
attttgcagagttttcaagc

SEQ ID NO: 134676 - DNA, 20 bp, Artificial Sequence
  Description of Artificial Sequence: Synthetic oligonucleotide
  Target: LAMA2; (+) strand; PAM type: NRG; PAM sequence: TGG
ttttcaagccagatgtccct

SEQ ID NO: 134677 - DNA, 20 bp, Artificial Sequence
  Description of Artificial Sequence: Synthetic oligonucleotide
  Target: LAMA2; (+) strand; PAM type: NRG; PAM sequence: TGG
gatgtcccttggcatttaca

SEQ ID NO: 134678 - DNA, 20 bp, Artificial Sequence
  Description of Artificial Sequence: Synthetic oligonucleotide
  Target: LAMA2; (+) strand; PAM type: NRG; PAM sequence: AAG
gtcccttggcatttacatgg

SEQ ID NO: 134679 - DNA, 20 bp, Artificial Sequence
  Description of Artificial Sequence: Synthetic oligonucleotide
  Target: LAMA2; (+) strand; PAM type: NRG; PAM sequence: AAG
ccttggcatttacatggaag

SEQ ID NO: 134680 - DNA, 20 bp, Artificial Sequence
  Description of Artificial Sequence: Synthetic oligonucleotide
  Target: LAMA2; (+) strand; PAM type: NRG; PAM sequence: AAG
gaagaagtctactgtgtacc

SEQ ID NO: 134681 - DNA, 20 bp, Artificial Sequence
  Description of Artificial Sequence: Synthetic oligonucleotide
  Target: LAMA2; (+) strand; PAM type: NRG; PAM sequence: AAG
agttgcatatttttgtgtgt

SEQ ID NO: 134682 - DNA, 20 bp, Artificial Sequence
  Description of Artificial Sequence: Synthetic oligonucleotide
  Target: LAMA2; (+) strand; PAM type: NRG; PAM sequence: CAG
tatttttgtgtgtaagttct

SEQ ID NO: 134683 - DNA, 20 bp, Artificial Sequence
  Description of Artificial Sequence: Synthetic oligonucleotide
  Target: LAMA2; (+) strand; PAM type: NRG; PAM sequence: TGG
tgtgtgtaagttctcagcca

SEQ ID NO: 134684 - DNA, 20 bp, Artificial Sequence
  Description of Artificial Sequence: Synthetic oligonucleotide
  Target: LAMA2; (+) strand; PAM type: NRG; PAM sequence: TAG
aagttctcagccatggtatg

SEQ ID NO: 134685 - DNA, 20 bp, Artificial Sequence
  Description of Artificial Sequence: Synthetic oligonucleotide
  Target: LAMA2; (+) strand; PAM type: NRG; PAM sequence: TGG
cagccatggtatgtagtcat

SEQ ID NO: 134686 - DNA, 20 bp, Artificial Sequence
  Description of Artificial Sequence: Synthetic oligonucleotide
  Target: LAMA2; (+) strand; PAM type: NRG; PAM sequence: CAG
tgtagtcattggtgttttga

SEQ ID NO: 134687 - DNA, 20 bp, Artificial Sequence
  Description of Artificial Sequence: Synthetic oligonucleotide
  Target: LAMA2; (+) strand; PAM type: NRG; PAM sequence: CAG
tgttttgacagccatctgct

SEQ ID NO: 134688 - DNA, 20 bp, Artificial Sequence
  Description of Artificial Sequence: Synthetic oligonucleotide
  Target: LAMA2; (+) strand; PAM type: NRG; PAM sequence: CAG
cagacctttatttctctgtt

SEQ ID NO: 134689 - DNA, 20 bp, Artificial Sequence
  Description of Artificial Sequence: Synthetic oligonucleotide
  Target: LAMA2; (+) strand; PAM type: NRG; PAM sequence: CAG
tgaacatttttcaaatgttc

SEQ ID NO: 134690 - DNA, 20 bp, Artificial Sequence
  Description of Artificial Sequence: Synthetic oligonucleotide
  Target: LAMA2; (+) strand; PAM type: NRG; PAM sequence: AGG
gaacatttttcaaatgttcc

SEQ ID NO: 134691 - DNA, 20 bp, Artificial Sequence
  Description of Artificial Sequence: Synthetic oligonucleotide
  Target: LAMA2; (+) strand; PAM type: NRG; PAM sequence: TAG
catttttcaaatgttccagg

SEQ ID NO: 134692 - DNA, 20 bp, Artificial Sequence
  Description of Artificial Sequence: Synthetic oligonucleotide
  Target: LAMA2; (+) strand; PAM type: NRG; PAM sequence: AAG
ttccaggtagtttcaatttt

SEQ ID NO: 134693 - DNA, 20 bp, Artificial Sequence
  Description of Artificial Sequence: Synthetic oligonucleotide
  Target: LAMA2; (+) strand; PAM type: NRG; PAM sequence: CAG
tagtttcaattttaagataa

SEQ ID NO: 134694 - DNA, 20 bp, Artificial Sequence
  Description of Artificial Sequence: Synthetic oligonucleotide
  Target: LAMA2; (+) strand; PAM type: NRG; PAM sequence: TAG
attttaagataacagaaaac

SEQ ID NO: 134695 - DNA, 20 bp, Artificial Sequence
  Description of Artificial Sequence: Synthetic oligonucleotide
  Target: LAMA2; (+) strand; PAM type: NRG; PAM sequence: TGG
aacagaaaactagtattcaa

SEQ ID NO: 134696 - DNA, 20 bp, Artificial Sequence
  Description of Artificial Sequence: Synthetic oligonucleotide
  Target: LAMA2; (+) strand; PAM type: NRG; PAM sequence: AAG
actagtattcaatggttaaa

SEQ ID NO: 134697 - DNA, 20 bp, Artificial Sequence
  Description of Artificial Sequence: Synthetic oligonucleotide
  Target: LAMA2; (+) strand; PAM type: NRG; PAM sequence: AAG
tcaatggttaaaaagaaaaa

SEQ ID NO: 134698 - DNA, 20 bp, Artificial Sequence
  Description of Artificial Sequence: Synthetic oligonucleotide
  Target: LAMA2; (+) strand; PAM type: NRG; PAM sequence: TGG
aaaaaagcaatacctatctt

SEQ ID NO: 134699 - DNA, 20 bp, Artificial Sequence
  Description of Artificial Sequence: Synthetic oligonucleotide
  Target: LAMA2; (+) strand; PAM type: NRG; PAM sequence: TAG
agcaatacctatctttggct

SEQ ID NO: 134700 - DNA, 20 bp, Artificial Sequence
  Description of Artificial Sequence: Synthetic oligonucleotide
  Target: LAMA2; (+) strand; PAM type: NRG; PAM sequence: AAG
agtaataacccctaaattga

SEQ ID NO: 134701 - DNA, 20 bp, Artificial Sequence
  Description of Artificial Sequence: Synthetic oligonucleotide
  Target: LAMA2; (+) strand; PAM type: NRG; PAM sequence: TAG
gaaagttaatttcttataaa

SEQ ID NO: 134702 - DNA, 20 bp, Artificial Sequence
  Description of Artificial Sequence: Synthetic oligonucleotide
  Target: LAMA2; (+) strand; PAM type: NRG; PAM sequence: CAG
agttaatttcttataaatag

SEQ ID NO: 134703 - DNA, 20 bp, Artificial Sequence
  Description of Artificial Sequence: Synthetic oligonucleotide
  Target: LAMA2; (+) strand; PAM type: NRG; PAM sequence: GAG
gtgcaaaatgaacaaacttt

SEQ ID NO: 134704 - DNA, 20 bp, Artificial Sequence
  Description of Artificial Sequence: Synthetic oligonucleotide
  Target: LAMA2; (+) strand; PAM type: NRG; PAM sequence: CAG
aaatgaacaaactttgagaa

SEQ ID NO: 134705 - DNA, 20 bp, Artificial Sequence
  Description of Artificial Sequence: Synthetic oligonucleotide
  Target: LAMA2; (+) strand; PAM type: NRG; PAM sequence: GAG
atgaacaaactttgagaaca

SEQ ID NO: 134706 - DNA, 20 bp, Artificial Sequence
  Description of Artificial Sequence: Synthetic oligonucleotide
  Target: LAMA2; (+) strand; PAM type: NRG; PAM sequence: AGG
tgaacaaactttgagaacag

SEQ ID NO: 134707 - DNA, 20 bp, Artificial Sequence
  Description of Artificial Sequence: Synthetic oligonucleotide
  Target: LAMA2; (+) strand; PAM type: NRG; PAM sequence: GAG
gcctcaccttattatcaaat

SEQ ID NO: 134708 - DNA, 20 bp, Artificial Sequence
  Description of Artificial Sequence: Synthetic oligonucleotide
  Target: LAMA2; (+) strand; PAM type: NRG; PAM sequence: TGG
atgagtttgttttaatcatg

SEQ ID NO: 134709 - DNA, 20 bp, Artificial Sequence
  Description of Artificial Sequence: Synthetic oligonucleotide
  Target: LAMA2; (+) strand; PAM type: NRG; PAM sequence: AAG
agtttgttttaatcatgtgg

SEQ ID NO: 134710 - DNA, 20 bp, Artificial Sequence
  Description of Artificial Sequence: Synthetic oligonucleotide
  Target: LAMA2; (+) strand; PAM type: NRG; PAM sequence: AGG
gtttgttttaatcatgtgga

SEQ ID NO: 134711 - DNA, 20 bp, Artificial Sequence
  Description of Artificial Sequence: Synthetic oligonucleotide
  Target: LAMA2; (+) strand; PAM type: NRG; PAM sequence: CAG
ttaatcatgtggaaggctct

SEQ ID NO: 134712 - DNA, 20 bp, Artificial Sequence
  Description of Artificial Sequence: Synthetic oligonucleotide
  Target: LAMA2; (+) strand; PAM type: NRG; PAM sequence: TAG
tcatgtggaaggctctcagc

SEQ ID NO: 134713 - DNA, 20 bp, Artificial Sequence
  Description of Artificial Sequence: Synthetic oligonucleotide
  Target: LAMA2; (+) strand; PAM type: NRG; PAM sequence: GAG
aaggctctcagctagacact

SEQ ID NO: 134714 - DNA, 20 bp, Artificial Sequence
  Description of Artificial Sequence: Synthetic oligonucleotide
  Target: LAMA2; (+) strand; PAM type: NRG; PAM sequence: AGG
aggctctcagctagacactg

SEQ ID NO: 134715 - DNA, 20 bp, Artificial Sequence
  Description of Artificial Sequence: Synthetic oligonucleotide
  Target: LAMA2; (+) strand; PAM type: NRG; PAM sequence: AAG
ctctcagctagacactgagg

SEQ ID NO: 134716 - DNA, 20 bp, Artificial Sequence
  Description of Artificial Sequence: Synthetic oligonucleotide
  Target: LAMA2; (+) strand; PAM type: NRG; PAM sequence: TAG
gctagacactgaggaagtta

SEQ ID NO: 134717 - DNA, 20 bp, Artificial Sequence
  Description of Artificial Sequence: Synthetic oligonucleotide
  Target: LAMA2; (+) strand; PAM type: NRG; PAM sequence: TGG
cactgaggaagttatagaaa

SEQ ID NO: 134718 - DNA, 20 bp, Artificial Sequence
  Description of Artificial Sequence: Synthetic oligonucleotide
  Target: LAMA2; (+) strand; PAM type: NRG; PAM sequence: GGG
actgaggaagttatagaaat

SEQ ID NO: 134719 - DNA, 20 bp, Artificial Sequence
  Description of Artificial Sequence: Synthetic oligonucleotide
  Target: LAMA2; (+) strand; PAM type: NRG; PAM sequence: AAG
ttatagaaatgggtaattcc

SEQ ID NO: 134720 - DNA, 20 bp, Artificial Sequence
  Description of Artificial Sequence: Synthetic oligonucleotide
  Target: LAMA2; (+) strand; PAM type: NRG; PAM sequence: AGG
tatagaaatgggtaattcca

SEQ ID NO: 134721 - DNA, 20 bp, Artificial Sequence
  Description of Artificial Sequence: Synthetic oligonucleotide
  Target: LAMA2; (+) strand; PAM type: NRG; PAM sequence: AAG
aattccaaggtgaatgttcc

SEQ ID NO: 134722 - DNA, 20 bp, Artificial Sequence
  Description of Artificial Sequence: Synthetic oligonucleotide
  Target: LAMA2; (+) strand; PAM type: NRG; PAM sequence: AGG
attccaaggtgaatgttcca

SEQ ID NO: 134723 - DNA, 20 bp, Artificial Sequence
  Description of Artificial Sequence: Synthetic oligonucleotide
  Target: LAMA2; (+) strand; PAM type: NRG; PAM sequence: TAG
caaggtgaatgttccaagga

SEQ ID NO: 134724 - DNA, 20 bp, Artificial Sequence
  Description of Artificial Sequence: Synthetic oligonucleotide
  Target: LAMA2; (+) strand; PAM type: NRG; PAM sequence: AAG
agctatgtcttatacataac

SEQ ID NO: 134725 - DNA, 20 bp, Artificial Sequence
  Description of Artificial Sequence: Synthetic oligonucleotide
  Target: LAMA2; (+) strand; PAM type: NRG; PAM sequence: TAG
tgctgaatgaatgcgtatgt

SEQ ID NO: 134726 - DNA, 20 bp, Artificial Sequence
  Description of Artificial Sequence: Synthetic oligonucleotide
  Target: LAMA2; (+) strand; PAM type: NRG; PAM sequence: TAG
atgttagaatccatatgtaa

SEQ ID NO: 134727 - DNA, 20 bp, Artificial Sequence
  Description of Artificial Sequence: Synthetic oligonucleotide
  Target: LAMA2; (+) strand; PAM type: NRG; PAM sequence: TAG
acatattttcaccccactga

SEQ ID NO: 134728 - DNA, 20 bp, Artificial Sequence
  Description of Artificial Sequence: Synthetic oligonucleotide
  Target: LAMA2; (+) strand; PAM type: NRG; PAM sequence: TGG
cactgatagtttttaatatg

SEQ ID NO: 134729 - DNA, 20 bp, Artificial Sequence
  Description of Artificial Sequence: Synthetic oligonucleotide
  Target: LAMA2; (+) strand; PAM type: NRG; PAM sequence: GAG
ctgatagtttttaatatgtg

SEQ ID NO: 134730 - DNA, 20 bp, Artificial Sequence
  Description of Artificial Sequence: Synthetic oligonucleotide
  Target: LAMA2; (+) strand; PAM type: NRG; PAM sequence: AGG
tgatagtttttaatatgtgg

SEQ ID NO: 134731 - DNA, 20 bp, Artificial Sequence
  Description of Artificial Sequence: Synthetic oligonucleotide
  Target: LAMA2; (+) strand; PAM type: NRG; PAM sequence: TGG
acatatctctgtgttttttg

SEQ ID NO: 134732 - DNA, 20 bp, Artificial Sequence
  Description of Artificial Sequence: Synthetic oligonucleotide
  Target: LAMA2; (+) strand; PAM type: NRG; PAM sequence: GGG
catatctctgtgttttttgt

SEQ ID NO: 134733 - DNA, 20 bp, Artificial Sequence
  Description of Artificial Sequence: Synthetic oligonucleotide
  Target: LAMA2; (+) strand; PAM type: NRG; PAM sequence: GAG
tctctgtgttttttgtgggt

SEQ ID NO: 134734 - DNA, 20 bp, Artificial Sequence
  Description of Artificial Sequence: Synthetic oligonucleotide
  Target: LAMA2; (+) strand; PAM type: NRG; PAM sequence: TAG
ttttttgtgggtgagatatg

SEQ ID NO: 134735 - DNA, 20 bp, Artificial Sequence
  Description of Artificial Sequence: Synthetic oligonucleotide
  Target: LAMA2; (+) strand; PAM type: NRG; PAM sequence: AGG
tttttgtgggtgagatatgt

SEQ ID NO: 134736 - DNA, 20 bp, Artificial Sequence
  Description of Artificial Sequence: Synthetic oligonucleotide
  Target: LAMA2; (+) strand; PAM type: NRG; PAM sequence: AAG
tatgtaggctaacatgtcgt

SEQ ID NO: 134737 - DNA, 20 bp, Artificial Sequence
  Description of Artificial Sequence: Synthetic oligonucleotide
  Target: LAMA2; (+) strand; PAM type: NRG; PAM sequence: AAG
tgaatgaaactgtgtttgat

SEQ ID NO: 134738 - DNA, 20 bp, Artificial Sequence
  Description of Artificial Sequence: Synthetic oligonucleotide
  Target: LAMA2; (+) strand; PAM type: NRG; PAM sequence: AAG
tgtgtttgataagaactgtc

SEQ ID NO: 134739 - DNA, 20 bp, Artificial Sequence
  Description of Artificial Sequence: Synthetic oligonucleotide
  Target: LAMA2; (+) strand; PAM type: NRG; PAM sequence: TGG
agtgttgactatgcacctat

SEQ ID NO: 134740 - DNA, 20 bp, Artificial Sequence
  Description of Artificial Sequence: Synthetic oligonucleotide
  Target: LAMA2; (+) strand; PAM type: NRG; PAM sequence: TAG
ctatgcacctattggtgtgc

SEQ ID NO: 134741 - DNA, 20 bp, Artificial Sequence
  Description of Artificial Sequence: Synthetic oligonucleotide
  Target: LAMA2; (+) strand; PAM type: NRG; PAM sequence: AAG
ttggtgtgctagacattctg

SEQ ID NO: 134742 - DNA, 20 bp, Artificial Sequence
  Description of Artificial Sequence: Synthetic oligonucleotide
  Target: LAMA2; (+) strand; PAM type: NRG; PAM sequence: CAG
tgctagacattctgaagatt

SEQ ID NO: 134743 - DNA, 20 bp, Artificial Sequence
  Description of Artificial Sequence: Synthetic oligonucleotide
  Target: LAMA2; (+) strand; PAM type: NRG; PAM sequence: AAG
tagacattctgaagattcag

SEQ ID NO: 134744 - DNA, 20 bp, Artificial Sequence
  Description of Artificial Sequence: Synthetic oligonucleotide
  Target: LAMA2; (+) strand; PAM type: NRG; PAM sequence: AAG
acattctgaagattcagaag

SEQ ID NO: 134745 - DNA, 20 bp, Artificial Sequence
  Description of Artificial Sequence: Synthetic oligonucleotide
  Target: LAMA2; (+) strand; PAM type: NRG; PAM sequence: CAG
taatgttatgattacatcta

SEQ ID NO: 134746 - DNA, 20 bp, Artificial Sequence
  Description of Artificial Sequence: Synthetic oligonucleotide
  Target: LAMA2; (+) strand; PAM type: NRG; PAM sequence: AAG
tatgattacatctacagaca

SEQ ID NO: 134747 - DNA, 20 bp, Artificial Sequence
  Description of Artificial Sequence: Synthetic oligonucleotide
  Target: LAMA2; (+) strand; PAM type: NRG; PAM sequence: TGG
caaacaatgattctttttaa

SEQ ID NO: 134748 - DNA, 20 bp, Artificial Sequence
  Description of Artificial Sequence: Synthetic oligonucleotide
  Target: LAMA2; (+) strand; PAM type: NRG; PAM sequence: AAG
acttgtgttttttaatgtta

SEQ ID NO: 134749 - DNA, 20 bp, Artificial Sequence
  Description of Artificial Sequence: Synthetic oligonucleotide
  Target: LAMA2; (+) strand; PAM type: NRG; PAM sequence: TGG
gttttttaatgttaaagata

SEQ ID NO: 134750 - DNA, 20 bp, Artificial Sequence
  Description of Artificial Sequence: Synthetic oligonucleotide
  Target: LAMA2; (+) strand; PAM type: NRG; PAM sequence: GGG
ttttttaatgttaaagatat

SEQ ID NO: 134751 - DNA, 20 bp, Artificial Sequence
  Description of Artificial Sequence: Synthetic oligonucleotide
  Target: LAMA2; (+) strand; PAM type: NRG; PAM sequence: AAG
aagatatgggccaaatgata

SEQ ID NO: 134752 - DNA, 20 bp, Artificial Sequence
  Description of Artificial Sequence: Synthetic oligonucleotide
  Target: LAMA2; (+) strand; PAM type: NRG; PAM sequence: CAG
atgggccaaatgataaagaa

SEQ ID NO: 134753 - DNA, 20 bp, Artificial Sequence
  Description of Artificial Sequence: Synthetic oligonucleotide
  Target: LAMA2; (+) strand; PAM type: NRG; PAM sequence: AGG
tgggccaaatgataaagaac

SEQ ID NO: 134754 - DNA, 20 bp, Artificial Sequence
  Description of Artificial Sequence: Synthetic oligonucleotide
  Target: LAMA2; (+) strand; PAM type: NRG; PAM sequence: AAG
caaatgataaagaacaggaa

SEQ ID NO: 134755 - DNA, 20 bp, Artificial Sequence
  Description of Artificial Sequence: Synthetic oligonucleotide
  Target: LAMA2; (+) strand; PAM type: NRG; PAM sequence: GAG
gataaagaacaggaaaagat

SEQ ID NO: 134756 - DNA, 20 bp, Artificial Sequence
  Description of Artificial Sequence: Synthetic oligonucleotide
  Target: LAMA2; (+) strand; PAM type: NRG; PAM sequence: CAG
agatgagtttttttctctat

SEQ ID NO: 134757 - DNA, 20 bp, Artificial Sequence
  Description of Artificial Sequence: Synthetic oligonucleotide
  Target: LAMA2; (+) strand; PAM type: NRG; PAM sequence: AAG
tgagtttttttctctatcag

SEQ ID NO: 134758 - DNA, 20 bp, Artificial Sequence
  Description of Artificial Sequence: Synthetic oligonucleotide
  Target: LAMA2; (+) strand; PAM type: NRG; PAM sequence: AGG
gagtttttttctctatcaga

SEQ ID NO: 134759 - DNA, 20 bp, Artificial Sequence
  Description of Artificial Sequence: Synthetic oligonucleotide
  Target: LAMA2; (+) strand; PAM type: NRG; PAM sequence: TAG
ttttttctctatcagaagga

SEQ ID NO: 134760 - DNA, 20 bp, Artificial Sequence
  Description of Artificial Sequence: Synthetic oligonucleotide
  Target: LAMA2; (+) strand; PAM type: NRG; PAM sequence: GAG
ctatcagaaggatagatttt

SEQ ID NO: 134761 - DNA, 20 bp, Artificial Sequence
  Description of Artificial Sequence: Synthetic oligonucleotide
  Target: LAMA2; (+) strand; PAM type: NRG; PAM sequence: AAG
agattttgagctaatcttga

SEQ ID NO: 134762 - DNA, 20 bp, Artificial Sequence
  Description of Artificial Sequence: Synthetic oligonucleotide
  Target: LAMA2; (+) strand; PAM type: NRG; PAM sequence: TAG
cttgaaagaaatactaaatt

SEQ ID NO: 134763 - DNA, 20 bp, Artificial Sequence
  Description of Artificial Sequence: Synthetic oligonucleotide
  Target: LAMA2; (+) strand; PAM type: NRG; PAM sequence: TGG
aaatactaaatttagactta

SEQ ID NO: 134764 - DNA, 20 bp, Artificial Sequence
  Description of Artificial Sequence: Synthetic oligonucleotide
  Target: LAMA2; (+) strand; PAM type: NRG; PAM sequence: GAG
atactaaatttagacttatg

SEQ ID NO: 134765 - DNA, 20 bp, Artificial Sequence
  Description of Artificial Sequence: Synthetic oligonucleotide
  Target: LAMA2; (+) strand; PAM type: NRG; PAM sequence: TAG
tagacttatggagaataatt

SEQ ID NO: 134766 - DNA, 20 bp, Artificial Sequence
  Description of Artificial Sequence: Synthetic oligonucleotide
  Target: LAMA2; (+) strand; PAM type: NRG; PAM sequence: AGG
agacttatggagaataattt

SEQ ID NO: 134767 - DNA, 20 bp, Artificial Sequence
  Description of Artificial Sequence: Synthetic oligonucleotide
  Target: LAMA2; (+) strand; PAM type: NRG; PAM sequence: AAG
ttatggagaataatttagga

SEQ ID NO: 134768 - DNA, 20 bp, Artificial Sequence
  Description of Artificial Sequence: Synthetic oligonucleotide
  Target: LAMA2; (+) strand; PAM type: NRG; PAM sequence: CAG
gaaagcaattgaacactacc

SEQ ID NO: 134769 - DNA, 20 bp, Artificial Sequence
  Description of Artificial Sequence: Synthetic oligonucleotide
  Target: LAMA2; (+) strand; PAM type: NRG; PAM sequence: AGG
aaagcaattgaacactaccc

SEQ ID NO: 134770 - DNA, 20 bp, Artificial Sequence
  Description of Artificial Sequence: Synthetic oligonucleotide
  Target: LAMA2; (+) strand; PAM type: NRG; PAM sequence: GGG
aagcaattgaacactaccca

SEQ ID NO: 134771 - DNA, 20 bp, Artificial Sequence
  Description of Artificial Sequence: Synthetic oligonucleotide
  Target: LAMA2; (+) strand; PAM type: NRG; PAM sequence: GGG
agcaattgaacactacccag

SEQ ID NO: 134772 - DNA, 20 bp, Artificial Sequence
  Description of Artificial Sequence: Synthetic oligonucleotide
  Target: LAMA2; (+) strand; PAM type: NRG; PAM sequence: GAG
caattgaacactacccaggg

SEQ ID NO: 134773 - DNA, 20 bp, Artificial Sequence
  Description of Artificial Sequence: Synthetic oligonucleotide
  Target: LAMA2; (+) strand; PAM type: NRG; PAM sequence: AGG
aattgaacactacccagggg

SEQ ID NO: 134774 - DNA, 20 bp, Artificial Sequence
  Description of Artificial Sequence: Synthetic oligonucleotide
  Target: LAMA2; (+) strand; PAM type: NRG; PAM sequence: TGG
tgaacactacccaggggagg

SEQ ID NO: 134775 - DNA, 20 bp, Artificial Sequence
  Description of Artificial Sequence: Synthetic oligonucleotide
  Target: LAMA2; (+) strand; PAM type: NRG; PAM sequence: GGG
gaacactacccaggggaggt

SEQ ID NO: 134776 - DNA, 20 bp, Artificial Sequence
  Description of Artificial Sequence: Synthetic oligonucleotide
  Target: LAMA2; (+) strand; PAM type: NRG; PAM sequence: AAG
cactacccaggggaggtggg

SEQ ID NO: 134777 - DNA, 20 bp, Artificial Sequence
  Description of Artificial Sequence: Synthetic oligonucleotide
  Target: LAMA2; (+) strand; PAM type: NRG; PAM sequence: GAG
acccaggggaggtgggaagt

SEQ ID NO: 134778 - DNA, 20 bp, Artificial Sequence
  Description of Artificial Sequence: Synthetic oligonucleotide
  Target: LAMA2; (+) strand; PAM type: NRG; PAM sequence: CAG
gggaagtgagatgctgtgtt

SEQ ID NO: 134779 - DNA, 20 bp, Artificial Sequence
  Description of Artificial Sequence: Synthetic oligonucleotide
  Target: LAMA2; (+) strand; PAM type: NRG; PAM sequence: GAG
gaagtgagatgctgtgttca

SEQ ID NO: 134780 - DNA, 20 bp, Artificial Sequence
  Description of Artificial Sequence: Synthetic oligonucleotide
  Target: LAMA2; (+) strand; PAM type: NRG; PAM sequence: GAG
tgagatgctgtgttcagagt

SEQ ID NO: 134781 - DNA, 20 bp, Artificial Sequence
  Description of Artificial Sequence: Synthetic oligonucleotide
  Target: LAMA2; (+) strand; PAM type: NRG; PAM sequence: AAG
tgctgtgttcagagtgagat

SEQ ID NO: 134782 - DNA, 20 bp, Artificial Sequence
  Description of Artificial Sequence: Synthetic oligonucleotide
  Target: LAMA2; (+) strand; PAM type: NRG; PAM sequence: AGG
gctgtgttcagagtgagata

SEQ ID NO: 134783 - DNA, 20 bp, Artificial Sequence
  Description of Artificial Sequence: Synthetic oligonucleotide
  Target: LAMA2; (+) strand; PAM type: NRG; PAM sequence: CAG
agataaggaaataatttgac

SEQ ID NO: 134784 - DNA, 20 bp, Artificial Sequence
  Description of Artificial Sequence: Synthetic oligonucleotide
  Target: LAMA2; (+) strand; PAM type: NRG; PAM sequence: GAG
ataaggaaataatttgacca

SEQ ID NO: 134785 - DNA, 20 bp, Artificial Sequence
  Description of Artificial Sequence: Synthetic oligonucleotide
  Target: LAMA2; (+) strand; PAM type: NRG; PAM sequence: TGG
gaaataatttgaccagagca

SEQ ID NO: 134786 - DNA, 20 bp, Artificial Sequence
  Description of Artificial Sequence: Synthetic oligonucleotide
  Target: LAMA2; (+) strand; PAM type: NRG; PAM sequence: GGG
aaataatttgaccagagcat

SEQ ID NO: 134787 - DNA, 20 bp, Artificial Sequence
  Description of Artificial Sequence: Synthetic oligonucleotide
  Target: LAMA2; (+) strand; PAM type: NRG; PAM sequence: GAG
cagagcatgggattttaatt

SEQ ID NO: 134788 - DNA, 20 bp, Artificial Sequence
  Description of Artificial Sequence: Synthetic oligonucleotide
  Target: LAMA2; (+) strand; PAM type: NRG; PAM sequence: AAG
ggattttaattgagaatatt

SEQ ID NO: 134789 - DNA, 20 bp, Artificial Sequence
  Description of Artificial Sequence: Synthetic oligonucleotide
  Target: LAMA2; (+) strand; PAM type: NRG; PAM sequence: GAG
attttaattgagaatattaa

SEQ ID NO: 134790 - DNA, 20 bp, Artificial Sequence
  Description of Artificial Sequence: Synthetic oligonucleotide
  Target: LAMA2; (+) strand; PAM type: NRG; PAM sequence: TAG
agataaaattataataaatg

SEQ ID NO: 134791 - DNA, 20 bp, Artificial Sequence
  Description of Artificial Sequence: Synthetic oligonucleotide
  Target: LAMA2; (+) strand; PAM type: NRG; PAM sequence: AGG
gataaaattataataaatgt

SEQ ID NO: 134792 - DNA, 20 bp, Artificial Sequence
  Description of Artificial Sequence: Synthetic oligonucleotide
  Target: LAMA2; (+) strand; PAM type: NRG; PAM sequence: GGG
ataaaattataataaatgta

SEQ ID NO: 134793 - DNA, 20 bp, Artificial Sequence
  Description of Artificial Sequence: Synthetic oligonucleotide
  Target: LAMA2; (+) strand; PAM type: NRG; PAM sequence: AAG
aaattataataaatgtaggg

SEQ ID NO: 134794 - DNA, 20 bp, Artificial Sequence
  Description of Artificial Sequence: Synthetic oligonucleotide
  Target: LAMA2; (+) strand; PAM type: NRG; PAM sequence: AGG
aattataataaatgtaggga

SEQ ID NO: 134795 - DNA, 20 bp, Artificial Sequence
  Description of Artificial Sequence: Synthetic oligonucleotide
  Target: LAMA2; (+) strand; PAM type: NRG; PAM sequence: CAG
taaatgtagggaaggtgtat

SEQ ID NO: 134796 - DNA, 20 bp, Artificial Sequence
  Description of Artificial Sequence: Synthetic oligonucleotide
  Target: LAMA2; (+) strand; PAM type: NRG; PAM sequence: GAG
aatgtagggaaggtgtatca

SEQ ID NO: 134797 - DNA, 20 bp, Artificial Sequence
  Description of Artificial Sequence: Synthetic oligonucleotide
  Target: LAMA2; (+) strand; PAM type: NRG; PAM sequence: GAG
tagggaaggtgtatcagagt

SEQ ID NO: 134798 - DNA, 20 bp, Artificial Sequence
  Description of Artificial Sequence: Synthetic oligonucleotide
  Target: LAMA2; (+) strand; PAM type: NRG; PAM sequence: AAG
atacttgaaatatctaaatg

SEQ ID NO: 134799 - DNA, 20 bp, Artificial Sequence
  Description of Artificial Sequence: Synthetic oligonucleotide
  Target: LAMA2; (+) strand; PAM type: NRG; PAM sequence: AAG
agtatttatgtttactctaa

SEQ ID NO: 134800 - DNA, 20 bp, Artificial Sequence
  Description of Artificial Sequence: Synthetic oligonucleotide
  Target: LAMA2; (+) strand; PAM type: NRG; PAM sequence: AAG
ttatgtttactctaaaagtc

SEQ ID NO: 134801 - DNA, 20 bp, Artificial Sequence
  Description of Artificial Sequence: Synthetic oligonucleotide
  Target: LAMA2; (+) strand; PAM type: NRG; PAM sequence: GAG
gtttactctaaaagtcaagt

SEQ ID NO: 134802 - DNA, 20 bp, Artificial Sequence
  Description of Artificial Sequence: Synthetic oligonucleotide
  Target: LAMA2; (+) strand; PAM type: NRG; PAM sequence: GAG
ttactctaaaagtcaagtga

SEQ ID NO: 134803 - DNA, 20 bp, Artificial Sequence
  Description of Artificial Sequence: Synthetic oligonucleotide
  Target: LAMA2; (+) strand; PAM type: NRG; PAM sequence: GAG
actctaaaagtcaagtgaga

SEQ ID NO: 134804 - DNA, 20 bp, Artificial Sequence
  Description of Artificial Sequence: Synthetic oligonucleotide
  Target: LAMA2; (+) strand; PAM type: NRG; PAM sequence: TGG
aagtcaagtgagagagattc

SEQ ID NO: 134805 - DNA, 20 bp, Artificial Sequence
  Description of Artificial Sequence: Synthetic oligonucleotide
  Target: LAMA2; (+) strand; PAM type: NRG; PAM sequence: GAG
gtcaagtgagagagattctg

SEQ ID NO: 134806 - DNA, 20 bp, Artificial Sequence
  Description of Artificial Sequence: Synthetic oligonucleotide
  Target: LAMA2; (+) strand; PAM type: NRG; PAM sequence: GAG
agtgagagagattctggagt

SEQ ID NO: 134807 - DNA, 20 bp, Artificial Sequence
  Description of Artificial Sequence: Synthetic oligonucleotide
  Target: LAMA2; (+) strand; PAM type: NRG; PAM sequence: AAG
gagagattctggagtgagac

SEQ ID NO: 134808 - DNA, 20 bp, Artificial Sequence
  Description of Artificial Sequence: Synthetic oligonucleotide
  Target: LAMA2; (+) strand; PAM type: NRG; PAM sequence: GAG
ctggagtgagacaagaatgt

SEQ ID NO: 134809 - DNA, 20 bp, Artificial Sequence
  Description of Artificial Sequence: Synthetic oligonucleotide
  Target: LAMA2; (+) strand; PAM type: NRG; PAM sequence: AGG
tggagtgagacaagaatgtg

SEQ ID NO: 134810 - DNA, 20 bp, Artificial Sequence
  Description of Artificial Sequence: Synthetic oligonucleotide
  Target: LAMA2; (+) strand; PAM type: NRG; PAM sequence: TGG
tgagacaagaatgtgaggaa

SEQ ID NO: 134811 - DNA, 20 bp, Artificial Sequence
  Description of Artificial Sequence: Synthetic oligonucleotide
  Target: LAMA2; (+) strand; PAM type: NRG; PAM sequence: GGG
gagacaagaatgtgaggaat

SEQ ID NO: 134812 - DNA, 20 bp, Artificial Sequence
  Description of Artificial Sequence: Synthetic oligonucleotide
  Target: LAMA2; (+) strand; PAM type: NRG; PAM sequence: GGG
agacaagaatgtgaggaatg

SEQ ID NO: 134813 - DNA, 20 bp, Artificial Sequence
  Description of Artificial Sequence: Synthetic oligonucleotide
  Target: LAMA2; (+) strand; PAM type: NRG; PAM sequence: TGG
gtgaggaatggggacttctg

SEQ ID NO: 134814 - DNA, 20 bp, Artificial Sequence
  Description of Artificial Sequence: Synthetic oligonucleotide
  Target: LAMA2; (+) strand; PAM type: NRG; PAM sequence: GAG
gaggaatggggacttctgtg

SEQ ID NO: 134815 - DNA, 20 bp, Artificial Sequence
  Description of Artificial Sequence: Synthetic oligonucleotide
  Target: LAMA2; (+) strand; PAM type: NRG; PAM sequence: TAG
cttctgtggagtttaatcta

SEQ ID NO: 134816 - DNA, 20 bp, Artificial Sequence
  Description of Artificial Sequence: Synthetic oligonucleotide
  Target: LAMA2; (+) strand; PAM type: NRG; PAM sequence: TAG
attattataatctttgcttt

SEQ ID NO: 134817 - DNA, 20 bp, Artificial Sequence
  Description of Artificial Sequence: Synthetic oligonucleotide
  Target: LAMA2; (+) strand; PAM type: NRG; PAM sequence: TAG
attataatctttgcttttag

SEQ ID NO: 134818 - DNA, 20 bp, Artificial Sequence
  Description of Artificial Sequence: Synthetic oligonucleotide
  Target: LAMA2; (+) strand; PAM type: NRG; PAM sequence: TGG
atctttgcttttagtagaaa

SEQ ID NO: 134819 - DNA, 20 bp, Artificial Sequence
  Description of Artificial Sequence: Synthetic oligonucleotide
  Target: LAMA2; (+) strand; PAM type: NRG; PAM sequence: GGG
tctttgcttttagtagaaat

SEQ ID NO: 134820 - DNA, 20 bp, Artificial Sequence
  Description of Artificial Sequence: Synthetic oligonucleotide
  Target: LAMA2; (+) strand; PAM type: NRG; PAM sequence: GGG
ctttgcttttagtagaaatg

SEQ ID NO: 134821 - DNA, 20 bp, Artificial Sequence
  Description of Artificial Sequence: Synthetic oligonucleotide
  Target: LAMA2; (+) strand; PAM type: NRG; PAM sequence: TAG
ttttagtagaaatggggatt

SEQ ID NO: 134822 - DNA, 20 bp, Artificial Sequence
  Description of Artificial Sequence: Synthetic oligonucleotide
  Target: LAMA2; (+) strand; PAM type: NRG; PAM sequence: GAG
ttagtagaaatggggattta

SEQ ID NO: 134823 - DNA, 20 bp, Artificial Sequence
  Description of Artificial Sequence: Synthetic oligonucleotide
  Target: LAMA2; (+) strand; PAM type: NRG; PAM sequence: CAG
aatggggatttagagtacat

SEQ ID NO: 134824 - DNA, 20 bp, Artificial Sequence
  Description of Artificial Sequence: Synthetic oligonucleotide
  Target: LAMA2; (+) strand; PAM type: NRG; PAM sequence: CAG
ggatttagagtacatcagta

SEQ ID NO: 134825 - DNA, 20 bp, Artificial Sequence
  Description of Artificial Sequence: Synthetic oligonucleotide
  Target: LAMA2; (+) strand; PAM type: NRG; PAM sequence: AGG
gatttagagtacatcagtac

SEQ ID NO: 134826 - DNA, 20 bp, Artificial Sequence
  Description of Artificial Sequence: Synthetic oligonucleotide
  Target: LAMA2; (+) strand; PAM type: NRG; PAM sequence: TGG
ttagagtacatcagtacagg

SEQ ID NO: 134827 - DNA, 20 bp, Artificial Sequence
  Description of Artificial Sequence: Synthetic oligonucleotide
  Target: LAMA2; (+) strand; PAM type: NRG; PAM sequence: AAG
taaaacatattttgaaaaac

SEQ ID NO: 134828 - DNA, 20 bp, Artificial Sequence
  Description of Artificial Sequence: Synthetic oligonucleotide
  Target: LAMA2; (+) strand; PAM type: NRG; PAM sequence: AGG
aaaacatattttgaaaaaca

SEQ ID NO: 134829 - DNA, 20 bp, Artificial Sequence
  Description of Artificial Sequence: Synthetic oligonucleotide
  Target: LAMA2; (+) strand; PAM type: NRG; PAM sequence: AAG
atattttgaaaaacaaggat

SEQ ID NO: 134830 - DNA, 20 bp, Artificial Sequence
  Description of Artificial Sequence: Synthetic oligonucleotide
  Target: LAMA2; (+) strand; PAM type: NRG; PAM sequence: TAG
tgaaaaacaaggataagaat

SEQ ID NO: 134831 - DNA, 20 bp, Artificial Sequence
  Description of Artificial Sequence: Synthetic oligonucleotide
  Target: LAMA2; (+) strand; PAM type: NRG; PAM sequence: AAG
ggataagaattagtgtttaa

SEQ ID NO: 134832 - DNA, 20 bp, Artificial Sequence
  Description of Artificial Sequence: Synthetic oligonucleotide
  Target: LAMA2; (+) strand; PAM type: NRG; PAM sequence: AAG
aattagtgtttaaaagctaa

SEQ ID NO: 134833 - DNA, 20 bp, Artificial Sequence
  Description of Artificial Sequence: Synthetic oligonucleotide
  Target: LAMA2; (+) strand; PAM type: NRG; PAM sequence: GAG
ttagtgtttaaaagctaaaa

SEQ ID NO: 134834 - DNA, 20 bp, Artificial Sequence
  Description of Artificial Sequence: Synthetic oligonucleotide
  Target: LAMA2; (+) strand; PAM type: NRG; PAM sequence: AAG
gtgtttaaaagctaaaagag

SEQ ID NO: 134835 - DNA, 20 bp, Artificial Sequence
  Description of Artificial Sequence: Synthetic oligonucleotide
  Target: LAMA2; (+) strand; PAM type: NRG; PAM sequence: CAG
taaaagagaagaatttgtgt

SEQ ID NO: 134836 - DNA, 20 bp, Artificial Sequence
  Description of Artificial Sequence: Synthetic oligonucleotide
  Target: LAMA2; (+) strand; PAM type: NRG; PAM sequence: AAG
tttgtgtcagctgcaaaata

SEQ ID NO: 134837 - DNA, 20 bp, Artificial Sequence
  Description of Artificial Sequence: Synthetic oligonucleotide
  Target: LAMA2; (+) strand; PAM type: NRG; PAM sequence: AAG
tttatcacactctgctgtgt

SEQ ID NO: 134838 - DNA, 20 bp, Artificial Sequence
  Description of Artificial Sequence: Synthetic oligonucleotide
  Target: LAMA2; (+) strand; PAM type: NRG; PAM sequence: CAG
ttctaactcatattgtatat

SEQ ID NO: 134839 - DNA, 20 bp, Artificial Sequence
  Description of Artificial Sequence: Synthetic oligonucleotide
  Target: LAMA2; (+) strand; PAM type: NRG; PAM sequence: CAG
gtattcattaaatatgtctt

SEQ ID NO: 134840 - DNA, 20 bp, Artificial Sequence
  Description of Artificial Sequence: Synthetic oligonucleotide
  Target: LAMA2; (+) strand; PAM type: NRG; PAM sequence: TGG
atatgtcttcagtacttttt

SEQ ID NO: 134841 - DNA, 20 bp, Artificial Sequence
  Description of Artificial Sequence: Synthetic oligonucleotide
  Target: LAMA2; (+) strand; PAM type: NRG; PAM sequence: GGG
tatgtcttcagtactttttt

SEQ ID NO: 134842 - DNA, 20 bp, Artificial Sequence
  Description of Artificial Sequence: Synthetic oligonucleotide
  Target: LAMA2; (+) strand; PAM type: NRG; PAM sequence: CAG
cttcagtacttttttgggtc

SEQ ID NO: 134843 - DNA, 20 bp, Artificial Sequence
  Description of Artificial Sequence: Synthetic oligonucleotide
  Target: LAMA2; (+) strand; PAM type: NRG; PAM sequence: TAG
ttttgggtccagcattacat

SEQ ID NO: 134844 - DNA, 20 bp, Artificial Sequence
  Description of Artificial Sequence: Synthetic oligonucleotide
  Target: LAMA2; (+) strand; PAM type: NRG; PAM sequence: AGG
tttgggtccagcattacatt

SEQ ID NO: 134845 - DNA, 20 bp, Artificial Sequence
  Description of Artificial Sequence: Synthetic oligonucleotide
  Target: LAMA2; (+) strand; PAM type: NRG; PAM sequence: CAG
gggtccagcattacattagg

SEQ ID NO: 134846 - DNA, 20 bp, Artificial Sequence
  Description of Artificial Sequence: Synthetic oligonucleotide
  Target: LAMA2; (+) strand; PAM type: NRG; PAM sequence: CAG
cattaggcagatatattatt

SEQ ID NO: 134847 - DNA, 20 bp, Artificial Sequence
  Description of Artificial Sequence: Synthetic oligonucleotide
  Target: LAMA2; (+) strand; PAM type: NRG; PAM sequence: AAG
aggcagatatattattcagc

SEQ ID NO: 134848 - DNA, 20 bp, Artificial Sequence
  Description of Artificial Sequence: Synthetic oligonucleotide
  Target: LAMA2; (+) strand; PAM type: NRG; PAM sequence: TAG
tattcagcaagttttcaatt

SEQ ID NO: 134849 - DNA, 20 bp, Artificial Sequence
  Description of Artificial Sequence: Synthetic oligonucleotide
  Target: LAMA2; (+) strand; PAM type: NRG; PAM sequence: CAG
agcaagttttcaatttagtt

SEQ ID NO: 134850 - DNA, 20 bp, Artificial Sequence
  Description of Artificial Sequence: Synthetic oligonucleotide
  Target: LAMA2; (+) strand; PAM type: NRG; PAM sequence: AGG
gcaagttttcaatttagttc

SEQ ID NO: 134851 - DNA, 20 bp, Artificial Sequence
  Description of Artificial Sequence: Synthetic oligonucleotide
  Target: LAMA2; (+) strand; PAM type: NRG; PAM sequence: GGG
caagttttcaatttagttca

SEQ ID NO: 134852 - DNA, 20 bp, Artificial Sequence
  Description of Artificial Sequence: Synthetic oligonucleotide
  Target: LAMA2; (+) strand; PAM type: NRG; PAM sequence: AAG
ttttcaatttagttcaggga

SEQ ID NO: 134853 - DNA, 20 bp, Artificial Sequence
  Description of Artificial Sequence: Synthetic oligonucleotide
  Target: LAMA2; (+) strand; PAM type: NRG; PAM sequence: GAG
ttcaatttagttcagggaaa

SEQ ID NO: 134854 - DNA, 20 bp, Artificial Sequence
  Description of Artificial Sequence: Synthetic oligonucleotide
  Target: LAMA2; (+) strand; PAM type: NRG; PAM sequence: AGG
tcaatttagttcagggaaag

SEQ ID NO: 134855 - DNA, 20 bp, Artificial Sequence
  Description of Artificial Sequence: Synthetic oligonucleotide
  Target: LAMA2; (+) strand; PAM type: NRG; PAM sequence: GGG
caatttagttcagggaaaga

SEQ ID NO: 134856 - DNA, 20 bp, Artificial Sequence
  Description of Artificial Sequence: Synthetic oligonucleotide
  Target: LAMA2; (+) strand; PAM type: NRG; PAM sequence: GAG
gggatgataaatattattat

SEQ ID NO: 134857 - DNA, 20 bp, Artificial Sequence
  Description of Artificial Sequence: Synthetic oligonucleotide
  Target: LAMA2; (+) strand; PAM type: NRG; PAM sequence: TAG
taaatattattatgagtgtt

SEQ ID NO: 134858 - DNA, 20 bp, Artificial Sequence
  Description of Artificial Sequence: Synthetic oligonucleotide
  Target: LAMA2; (+) strand; PAM type: NRG; PAM sequence: AAG
tatgagtgtttagaaatatt

SEQ ID NO: 134859 - DNA, 20 bp, Artificial Sequence
  Description of Artificial Sequence: Synthetic oligonucleotide
  Target: LAMA2; (+) strand; PAM type: NRG; PAM sequence: CAG
aagaacccgaatccatttat

SEQ ID NO: 134860 - DNA, 20 bp, Artificial Sequence
  Description of Artificial Sequence: Synthetic oligonucleotide
  Target: LAMA2; (+) strand; PAM type: NRG; PAM sequence: AAG
gtttcataacaatgattttc

SEQ ID NO: 134861 - DNA, 20 bp, Artificial Sequence
  Description of Artificial Sequence: Synthetic oligonucleotide
  Target: LAMA2; (+) strand; PAM type: NRG; PAM sequence: CAG
caagcttgtttcatttctca

SEQ ID NO: 134862 - DNA, 20 bp, Artificial Sequence
  Description of Artificial Sequence: Synthetic oligonucleotide
  Target: LAMA2; (+) strand; PAM type: NRG; PAM sequence: AGG
aagcttgtttcatttctcac

SEQ ID NO: 134863 - DNA, 20 bp, Artificial Sequence
  Description of Artificial Sequence: Synthetic oligonucleotide
  Target: LAMA2; (+) strand; PAM type: NRG; PAM sequence: GGG
agcttgtttcatttctcaca

SEQ ID NO: 134864 - DNA, 20 bp, Artificial Sequence
  Description of Artificial Sequence: Synthetic oligonucleotide
  Target: LAMA2; (+) strand; PAM type: NRG; PAM sequence: TAG
ttgtttcatttctcacaggg

SEQ ID NO: 134865 - DNA, 20 bp, Artificial Sequence
  Description of Artificial Sequence: Synthetic oligonucleotide
  Target: LAMA2; (+) strand; PAM type: NRG; PAM sequence: AAG
catttctcacagggtagaca

SEQ ID NO: 134866 - DNA, 20 bp, Artificial Sequence
  Description of Artificial Sequence: Synthetic oligonucleotide
  Target: LAMA2; (+) strand; PAM type: NRG; PAM sequence: AAG
acaaaatatatatctcataa

SEQ ID NO: 134867 - DNA, 20 bp, Artificial Sequence
  Description of Artificial Sequence: Synthetic oligonucleotide
  Target: LAMA2; (+) strand; PAM type: NRG; PAM sequence: CAG
tcataaaagtaataatctac

SEQ ID NO: 134868 - DNA, 20 bp, Artificial Sequence
  Description of Artificial Sequence: Synthetic oligonucleotide
  Target: LAMA2; (+) strand; PAM type: NRG; PAM sequence: AGG
cataaaagtaataatctacc

SEQ ID NO: 134869 - DNA, 20 bp, Artificial Sequence
  Description of Artificial Sequence: Synthetic oligonucleotide
  Target: LAMA2; (+) strand; PAM type: NRG; PAM sequence: TAG
tctaccaggcatgtttgttg

SEQ ID NO: 134870 - DNA, 20 bp, Artificial Sequence
  Description of Artificial Sequence: Synthetic oligonucleotide
  Target: LAMA2; (+) strand; PAM type: NRG; PAM sequence: AAG
caggcatgtttgttgtagcc

SEQ ID NO: 134871 - DNA, 20 bp, Artificial Sequence
  Description of Artificial Sequence: Synthetic oligonucleotide
  Target: LAMA2; (+) strand; PAM type: NRG; PAM sequence: TAG
gttgtagccaagcaaatata

SEQ ID NO: 134872 - DNA, 20 bp, Artificial Sequence
  Description of Artificial Sequence: Synthetic oligonucleotide
  Target: LAMA2; (+) strand; PAM type: NRG; PAM sequence: TAG
aattctaaaaatattgttta

SEQ ID NO: 134873 - DNA, 20 bp, Artificial Sequence
  Description of Artificial Sequence: Synthetic oligonucleotide
  Target: LAMA2; (+) strand; PAM type: NRG; PAM sequence: TGG
agctcttgtttcaacatgct

SEQ ID NO: 134874 - DNA, 20 bp, Artificial Sequence
  Description of Artificial Sequence: Synthetic oligonucleotide
  Target: LAMA2; (+) strand; PAM type: NRG; PAM sequence: GGG
gctcttgtttcaacatgctt

SEQ ID NO: 134875 - DNA, 20 bp, Artificial Sequence
  Description of Artificial Sequence: Synthetic oligonucleotide
  Target: LAMA2; (+) strand; PAM type: NRG; PAM sequence: AAG
tgtttcaacatgcttgggac

SEQ ID NO: 134876 - DNA, 20 bp, Artificial Sequence
  Description of Artificial Sequence: Synthetic oligonucleotide
  Target: LAMA2; (+) strand; PAM type: NRG; PAM sequence: CAG
ttgggacaagttaatgttta

SEQ ID NO: 134877 - DNA, 20 bp, Artificial Sequence
  Description of Artificial Sequence: Synthetic oligonucleotide
  Target: LAMA2; (+) strand; PAM type: NRG; PAM sequence: GAG
gttaatgtttacagttttgt

SEQ ID NO: 134878 - DNA, 20 bp, Artificial Sequence
  Description of Artificial Sequence: Synthetic oligonucleotide
  Target: LAMA2; (+) strand; PAM type: NRG; PAM sequence: AAG
ctgaaaacatttcattcaat

SEQ ID NO: 134879 - DNA, 20 bp, Artificial Sequence
  Description of Artificial Sequence: Synthetic oligonucleotide
  Target: LAMA2; (+) strand; PAM type: NRG; PAM sequence: GAG
ttcaataagttgaccttctt

SEQ ID NO: 134880 - DNA, 20 bp, Artificial Sequence
  Description of Artificial Sequence: Synthetic oligonucleotide
  Target: LAMA2; (+) strand; PAM type: NRG; PAM sequence: AGG
tcaataagttgaccttcttg

SEQ ID NO: 134881 - DNA, 20 bp, Artificial Sequence
  Description of Artificial Sequence: Synthetic oligonucleotide
  Target: LAMA2; (+) strand; PAM type: NRG; PAM sequence: TGG
cttgaggtttgaataaattt

SEQ ID NO: 134882 - DNA, 20 bp, Artificial Sequence
  Description of Artificial Sequence: Synthetic oligonucleotide
  Target: LAMA2; (+) strand; PAM type: NRG; PAM sequence: GAG
tgaggtttgaataaattttg

SEQ ID NO: 134883 - DNA, 20 bp, Artificial Sequence
  Description of Artificial Sequence: Synthetic oligonucleotide
  Target: LAMA2; (+) strand; PAM type: NRG; PAM sequence: GAG
ttgaataaattttggagcct

SEQ ID NO: 134884 - DNA, 20 bp, Artificial Sequence
  Description of Artificial Sequence: Synthetic oligonucleotide
  Target: LAMA2; (+) strand; PAM type: NRG; PAM sequence: AGG
tgaataaattttggagcctg

SEQ ID NO: 134885 - DNA, 20 bp, Artificial Sequence
  Description of Artificial Sequence: Synthetic oligonucleotide
  Target: LAMA2; (+) strand; PAM type: NRG; PAM sequence: GGG
gaataaattttggagcctga

SEQ ID NO: 134886 - DNA, 20 bp, Artificial Sequence
  Description of Artificial Sequence: Synthetic oligonucleotide
  Target: LAMA2; (+) strand; PAM type: NRG; PAM sequence: TGG
ggagcctgagggaatcaata

SEQ ID NO: 134887 - DNA, 20 bp, Artificial Sequence
  Description of Artificial Sequence: Synthetic oligonucleotide
  Target: LAMA2; (+) strand; PAM type: NRG; PAM sequence: AAG
agggaatcaatatggttttt

SEQ ID NO: 134888 - DNA, 20 bp, Artificial Sequence
  Description of Artificial Sequence: Synthetic oligonucleotide
  Target: LAMA2; (+) strand; PAM type: NRG; PAM sequence: TAG
tggtttttaagttgatctcc

SEQ ID NO: 134889 - DNA, 20 bp, Artificial Sequence
  Description of Artificial Sequence: Synthetic oligonucleotide
  Target: LAMA2; (+) strand; PAM type: NRG; PAM sequence: AGG
ggtttttaagttgatctcct

SEQ ID NO: 134890 - DNA, 20 bp, Artificial Sequence
  Description of Artificial Sequence: Synthetic oligonucleotide
  Target: LAMA2; (+) strand; PAM type: NRG; PAM sequence: AAG
ttgatctcctaggtatgtct

SEQ ID NO: 134891 - DNA, 20 bp, Artificial Sequence
  Description of Artificial Sequence: Synthetic oligonucleotide
  Target: LAMA2; (+) strand; PAM type: NRG; PAM sequence: AAG
tcctaggtatgtctaagttt

SEQ ID NO: 134892 - DNA, 20 bp, Artificial Sequence
  Description of Artificial Sequence: Synthetic oligonucleotide
  Target: LAMA2; (+) strand; PAM type: NRG; PAM sequence: TGG
tcattacattaattatcttt

SEQ ID NO: 134893 - DNA, 20 bp, Artificial Sequence
  Description of Artificial Sequence: Synthetic oligonucleotide
  Target: LAMA2; (+) strand; PAM type: NRG; PAM sequence: CAG
tttggaatattttcactgat

SEQ ID NO: 134894 - DNA, 20 bp, Artificial Sequence
  Description of Artificial Sequence: Synthetic oligonucleotide
  Target: LAMA2; (+) strand; PAM type: NRG; PAM sequence: TAG
tttcactgatcagtaacttc

SEQ ID NO: 134895 - DNA, 20 bp, Artificial Sequence
  Description of Artificial Sequence: Synthetic oligonucleotide
  Target: LAMA2; (+) strand; PAM type: NRG; PAM sequence: AAG
gatcagtaacttctagtcat

SEQ ID NO: 134896 - DNA, 20 bp, Artificial Sequence
  Description of Artificial Sequence: Synthetic oligonucleotide
  Target: LAMA2; (+) strand; PAM type: NRG; PAM sequence: TGG
cttctagtcataagccgttc

SEQ ID NO: 134897 - DNA, 20 bp, Artificial Sequence
  Description of Artificial Sequence: Synthetic oligonucleotide
  Target: LAMA2; (+) strand; PAM type: NRG; PAM sequence: AAG
tcatcaaatttcatatttgt

SEQ ID NO: 134898 - DNA, 20 bp, Artificial Sequence
  Description of Artificial Sequence: Synthetic oligonucleotide
  Target: LAMA2; (+) strand; PAM type: NRG; PAM sequence: TAG
tatttgtaagaaaaaatgac

SEQ ID NO: 134899 - DNA, 20 bp, Artificial Sequence
  Description of Artificial Sequence: Synthetic oligonucleotide
  Target: LAMA2; (+) strand; PAM type: NRG; PAM sequence: TGG
aagaaaaaatgactagcctt

SEQ ID NO: 134900 - DNA, 20 bp, Artificial Sequence
  Description of Artificial Sequence: Synthetic oligonucleotide
  Target: LAMA2; (+) strand; PAM type: NRG; PAM sequence: AAG
ttgacatgcccaaatccacc

SEQ ID NO: 134901 - DNA, 20 bp, Artificial Sequence
  Description of Artificial Sequence: Synthetic oligonucleotide
  Target: LAMA2; (+) strand; PAM type: NRG; PAM sequence: TAG
tatatatctcacttccaaaa

SEQ ID NO: 134902 - DNA, 20 bp, Artificial Sequence
  Description of Artificial Sequence: Synthetic oligonucleotide
  Target: LAMA2; (+) strand; PAM type: NRG; PAM sequence: CAG
tctcacttccaaaatagtct

SEQ ID NO: 134903 - DNA, 20 bp, Artificial Sequence
  Description of Artificial Sequence: Synthetic oligonucleotide
  Target: LAMA2; (+) strand; PAM type: NRG; PAM sequence: AGG
ctcacttccaaaatagtctc

SEQ ID NO: 134904 - DNA, 20 bp, Artificial Sequence
  Description of Artificial Sequence: Synthetic oligonucleotide
  Target: LAMA2; (+) strand; PAM type: NRG; PAM sequence: TAG
tagtctcaggatatgttttc

SEQ ID NO: 134905 - DNA, 20 bp, Artificial Sequence
  Description of Artificial Sequence: Synthetic oligonucleotide
  Target: LAMA2; (+) strand; PAM type: NRG; PAM sequence: TAG
atgttttctagatatgatct

SEQ ID NO: 134906 - DNA, 20 bp, Artificial Sequence
  Description of Artificial Sequence: Synthetic oligonucleotide
  Target: LAMA2; (+) strand; PAM type: NRG; PAM sequence: TGG
ctagatatgatcttagatga

SEQ ID NO: 134907 - DNA, 20 bp, Artificial Sequence
  Description of Artificial Sequence: Synthetic oligonucleotide
  Target: LAMA2; (+) strand; PAM type: NRG; PAM sequence: GAG
agatatgatcttagatgatg

SEQ ID NO: 134908 - DNA, 20 bp, Artificial Sequence
  Description of Artificial Sequence: Synthetic oligonucleotide
  Target: LAMA2; (+) strand; PAM type: NRG; PAM sequence: AAG
gagtgtattgttaaattaac

SEQ ID NO: 134909 - DNA, 20 bp, Artificial Sequence
  Description of Artificial Sequence: Synthetic oligonucleotide
  Target: LAMA2; (+) strand; PAM type: NRG; PAM sequence: TAG
tgtattgttaaattaacaag

SEQ ID NO: 134910 - DNA, 20 bp, Artificial Sequence
  Description of Artificial Sequence: Synthetic oligonucleotide
  Target: LAMA2; (+) strand; PAM type: NRG; PAM sequence: TAG
attaacaagtagtataaaaa

SEQ ID NO: 134911 - DNA, 20 bp, Artificial Sequence
  Description of Artificial Sequence: Synthetic oligonucleotide
  Target: LAMA2; (+) strand; PAM type: NRG; PAM sequence: AAG
caaaatattattaaaaatac

SEQ ID NO: 134912 - DNA, 20 bp, Artificial Sequence
  Description of Artificial Sequence: Synthetic oligonucleotide
  Target: LAMA2; (+) strand; PAM type: NRG; PAM sequence: AGG
aaaatattattaaaaataca

SEQ ID NO: 134913 - DNA, 20 bp, Artificial Sequence
  Description of Artificial Sequence: Synthetic oligonucleotide
  Target: LAMA2; (+) strand; PAM type: NRG; PAM sequence: GAG
aatattattaaaaatacaag

SEQ ID NO: 134914 - DNA, 20 bp, Artificial Sequence
  Description of Artificial Sequence: Synthetic oligonucleotide
  Target: LAMA2; (+) strand; PAM type: NRG; PAM sequence: AAG
ttattaaaaatacaaggaga

SEQ ID NO: 134915 - DNA, 20 bp, Artificial Sequence
  Description of Artificial Sequence: Synthetic oligonucleotide
  Target: LAMA2; (+) strand; PAM type: NRG; PAM sequence: AGG
tattaaaaatacaaggagaa

SEQ ID NO: 134916 - DNA, 20 bp, Artificial Sequence
  Description of Artificial Sequence: Synthetic oligonucleotide
  Target: LAMA2; (+) strand; PAM type: NRG; PAM sequence: TAG
acaaggagaaaggaatatgt

SEQ ID NO: 134917 - DNA, 20 bp, Artificial Sequence
  Description of Artificial Sequence: Synthetic oligonucleotide
  Target: LAMA2; (+) strand; PAM type: NRG; PAM sequence: AAG
gaaaggaatatgttagaaac

SEQ ID NO: 134918 - DNA, 20 bp, Artificial Sequence
  Description of Artificial Sequence: Synthetic oligonucleotide
  Target: LAMA2; (+) strand; PAM type: NRG; PAM sequence: AAG
ggaatatgttagaaacaagt

SEQ ID NO: 134919 - DNA, 20 bp, Artificial Sequence
  Description of Artificial Sequence: Synthetic oligonucleotide
  Target: LAMA2; (+) strand; PAM type: NRG; PAM sequence: AAG
atatgttagaaacaagtaag

SEQ ID NO: 134920 - DNA, 20 bp, Artificial Sequence
  Description of Artificial Sequence: Synthetic oligonucleotide
  Target: LAMA2; (+) strand; PAM type: NRG; PAM sequence: TGG
aacaagtaagaagttccata

SEQ ID NO: 134921 - DNA, 20 bp, Artificial Sequence
  Description of Artificial Sequence: Synthetic oligonucleotide
  Target: LAMA2; (+) strand; PAM type: NRG; PAM sequence: AAG
gttccatatggaaaactgat

SEQ ID NO: 134922 - DNA, 20 bp, Artificial Sequence
  Description of Artificial Sequence: Synthetic oligonucleotide
  Target: LAMA2; (+) strand; PAM type: NRG; PAM sequence: TAG
aaaactgataagcaattttt

SEQ ID NO: 134923 - DNA, 20 bp, Artificial Sequence
  Description of Artificial Sequence: Synthetic oligonucleotide
  Target: LAMA2; (+) strand; PAM type: NRG; PAM sequence: AAG
actgataagcaattttttag

SEQ ID NO: 134924 - DNA, 20 bp, Artificial Sequence
  Description of Artificial Sequence: Synthetic oligonucleotide
  Target: LAMA2; (+) strand; PAM type: NRG; PAM sequence: AAG
aaatctcatgacgctaaaac

SEQ ID NO: 134925 - DNA, 20 bp, Artificial Sequence
  Description of Artificial Sequence: Synthetic oligonucleotide
  Target: LAMA2; (+) strand; PAM type: NRG; PAM sequence: AAG
gacgctaaaacaagatgatg

SEQ ID NO: 134926 - DNA, 20 bp, Artificial Sequence
  Description of Artificial Sequence: Synthetic oligonucleotide
  Target: LAMA2; (+) strand; PAM type: NRG; PAM sequence: AAG
gaagaaattactctgtgtgc

SEQ ID NO: 134927 - DNA, 20 bp, Artificial Sequence
  Description of Artificial Sequence: Synthetic oligonucleotide
  Target: LAMA2; (+) strand; PAM type: NRG; PAM sequence: TGG
aattactctgtgtgcaagtg

SEQ ID NO: 134928 - DNA, 20 bp, Artificial Sequence
  Description of Artificial Sequence: Synthetic oligonucleotide
  Target: LAMA2; (+) strand; PAM type: NRG; PAM sequence: GAG
ttactctgtgtgcaagtgtg

SEQ ID NO: 134929 - DNA, 20 bp, Artificial Sequence
  Description of Artificial Sequence: Synthetic oligonucleotide
  Target: LAMA2; (+) strand; PAM type: NRG; PAM sequence: TAG
tgtgcaagtgtggagaaaaa

SEQ ID NO: 134930 - DNA, 20 bp, Artificial Sequence
  Description of Artificial Sequence: Synthetic oligonucleotide
  Target: LAMA2; (+) strand; PAM type: NRG; PAM sequence: TAG
aaaaatagcttgtgatacca

SEQ ID NO: 134931 - DNA, 20 bp, Artificial Sequence
  Description of Artificial Sequence: Synthetic oligonucleotide
  Target: LAMA2; (+) strand; PAM type: NRG; PAM sequence: TAG
ttgtgataccatagtgatct

SEQ ID NO: 134932 - DNA, 20 bp, Artificial Sequence
  Description of Artificial Sequence: Synthetic oligonucleotide
  Target: LAMA2; (+) strand; PAM type: NRG; PAM sequence: GAG
gtgataccatagtgatctta

SEQ ID NO: 134933 - DNA, 20 bp, Artificial Sequence
  Description of Artificial Sequence: Synthetic oligonucleotide
  Target: LAMA2; (+) strand; PAM type: NRG; PAM sequence: CAG
tcttagagctcattatacat

SEQ ID NO: 134934 - DNA, 20 bp, Artificial Sequence
  Description of Artificial Sequence: Synthetic oligonucleotide
  Target: LAMA2; (+) strand; PAM type: NRG; PAM sequence: AAG
ctcattatacatcagcaatg

SEQ ID NO: 134935 - DNA, 20 bp, Artificial Sequence
  Description of Artificial Sequence: Synthetic oligonucleotide
  Target: LAMA2; (+) strand; PAM type: NRG; PAM sequence: GAG
cattatacatcagcaatgaa

SEQ ID NO: 134936 - DNA, 20 bp, Artificial Sequence
  Description of Artificial Sequence: Synthetic oligonucleotide
  Target: LAMA2; (+) strand; PAM type: NRG; PAM sequence: TAG
ctaccatgcaattaaaatac

SEQ ID NO: 134937 - DNA, 20 bp, Artificial Sequence
  Description of Artificial Sequence: Synthetic oligonucleotide
  Target: LAMA2; (+) strand; PAM type: NRG; PAM sequence: GAG
accatgcaattaaaatacta

SEQ ID NO: 134938 - DNA, 20 bp, Artificial Sequence
  Description of Artificial Sequence: Synthetic oligonucleotide
  Target: LAMA2; (+) strand; PAM type: NRG; PAM sequence: GAG
catgcaattaaaatactaga

SEQ ID NO: 134939 - DNA, 20 bp, Artificial Sequence
  Description of Artificial Sequence: Synthetic oligonucleotide
  Target: LAMA2; (+) strand; PAM type: NRG; PAM sequence: AAG
aaatactagagagtataaat

SEQ ID NO: 134940 - DNA, 20 bp, Artificial Sequence
  Description of Artificial Sequence: Synthetic oligonucleotide
  Target: LAMA2; (+) strand; PAM type: NRG; PAM sequence: TGG
aagattgtaccatgtgtatg

SEQ ID NO: 134941 - DNA, 20 bp, Artificial Sequence
  Description of Artificial Sequence: Synthetic oligonucleotide
  Target: LAMA2; (+) strand; PAM type: NRG; PAM sequence: CAG
attgtaccatgtgtatgtgg

SEQ ID NO: 134942 - DNA, 20 bp, Artificial Sequence
  Description of Artificial Sequence: Synthetic oligonucleotide
  Target: LAMA2; (+) strand; PAM type: NRG; PAM sequence: CAG
tgtggcagcatataaaaact

SEQ ID NO: 134943 - DNA, 20 bp, Artificial Sequence
  Description of Artificial Sequence: Synthetic oligonucleotide
  Target: LAMA2; (+) strand; PAM type: NRG; PAM sequence: AAG
ggcagcatataaaaactcag

SEQ ID NO: 134944 - DNA, 20 bp, Artificial Sequence
  Description of Artificial Sequence: Synthetic oligonucleotide
  Target: LAMA2; (+) strand; PAM type: NRG; PAM sequence: TGG
agcatataaaaactcagaag

SEQ ID NO: 134945 - DNA, 20 bp, Artificial Sequence
  Description of Artificial Sequence: Synthetic oligonucleotide
  Target: LAMA2; (+) strand; PAM type: NRG; PAM sequence: AAG
atataaaaactcagaagtgg

SEQ ID NO: 134946 - DNA, 20 bp, Artificial Sequence
  Description of Artificial Sequence: Synthetic oligonucleotide
  Target: LAMA2; (+) strand; PAM type: NRG; PAM sequence: AGG
tataaaaactcagaagtgga

SEQ ID NO: 134947 - DNA, 20 bp, Artificial Sequence
  Description of Artificial Sequence: Synthetic oligonucleotide
  Target: LAMA2; (+) strand; PAM type: NRG; PAM sequence: TAG
ctcagaagtggaaggaattt

SEQ ID NO: 134948 - DNA, 20 bp, Artificial Sequence
  Description of Artificial Sequence: Synthetic oligonucleotide
  Target: LAMA2; (+) strand; PAM type: NRG; PAM sequence: AAG
aagtggaaggaattttagtc

SEQ ID NO: 134949 - DNA, 20 bp, Artificial Sequence
  Description of Artificial Sequence: Synthetic oligonucleotide
  Target: LAMA2; (+) strand; PAM type: NRG; PAM sequence: AAG
gtcaagtgttactcttgaaa

SEQ ID NO: 134950 - DNA, 20 bp, Artificial Sequence
  Description of Artificial Sequence: Synthetic oligonucleotide
  Target: LAMA2; (+) strand; PAM type: NRG; PAM sequence: CGG
gttactcttgaaaaagcaaa

SEQ ID NO: 134951 - DNA, 20 bp, Artificial Sequence
  Description of Artificial Sequence: Synthetic oligonucleotide
  Target: LAMA2; (+) strand; PAM type: NRG; PAM sequence: TAG
tcttgaaaaagcaaacggat

SEQ ID NO: 134952 - DNA, 20 bp, Artificial Sequence
  Description of Artificial Sequence: Synthetic oligonucleotide
  Target: LAMA2; (+) strand; PAM type: NRG; PAM sequence: AGG
cttgaaaaagcaaacggatt

SEQ ID NO: 134953 - DNA, 20 bp, Artificial Sequence
  Description of Artificial Sequence: Synthetic oligonucleotide
  Target: LAMA2; (+) strand; PAM type: NRG; PAM sequence: TGG
acggattaggaatatttaat

SEQ ID NO: 134954 - DNA, 20 bp, Artificial Sequence
  Description of Artificial Sequence: Synthetic oligonucleotide
  Target: LAMA2; (+) strand; PAM type: NRG; PAM sequence: GAG
ggattaggaatatttaattg

SEQ ID NO: 134955 - DNA, 20 bp, Artificial Sequence
  Description of Artificial Sequence: Synthetic oligonucleotide
  Target: LAMA2; (+) strand; PAM type: NRG; PAM sequence: TAG
tatttaattggagaacaaca

SEQ ID NO: 134956 - DNA, 20 bp, Artificial Sequence
  Description of Artificial Sequence: Synthetic oligonucleotide
  Target: LAMA2; (+) strand; PAM type: NRG; PAM sequence: AAG
caccttctgtaatattattc

SEQ ID NO: 134957 - DNA, 20 bp, Artificial Sequence
  Description of Artificial Sequence: Synthetic oligonucleotide
  Target: LAMA2; (+) strand; PAM type: NRG; PAM sequence: AAG
ttctgtaatattattcaagt

SEQ ID NO: 134958 - DNA, 20 bp, Artificial Sequence
  Description of Artificial Sequence: Synthetic oligonucleotide
  Target: LAMA2; (+) strand; PAM type: NRG; PAM sequence: TGG
caagtaagaatgtctcattt

SEQ ID NO: 134959 - DNA, 20 bp, Artificial Sequence
  Description of Artificial Sequence: Synthetic oligonucleotide
  Target: LAMA2; (+) strand; PAM type: NRG; PAM sequence: TAG
cattttggacatcttactta

SEQ ID NO: 134960 - DNA, 20 bp, Artificial Sequence
  Description of Artificial Sequence: Synthetic oligonucleotide
  Target: LAMA2; (+) strand; PAM type: NRG; PAM sequence: CAG
ttggacatcttacttatagt

SEQ ID NO: 134961 - DNA, 20 bp, Artificial Sequence
  Description of Artificial Sequence: Synthetic oligonucleotide
  Target: LAMA2; (+) strand; PAM type: NRG; PAM sequence: TAG
caaaacactttttaaatgtc

SEQ ID NO: 134962 - DNA, 20 bp, Artificial Sequence
  Description of Artificial Sequence: Synthetic oligonucleotide
  Target: LAMA2; (+) strand; PAM type: NRG; PAM sequence: TGG
atgtctagaaatatttacaa

SEQ ID NO: 134963 - DNA, 20 bp, Artificial Sequence
  Description of Artificial Sequence: Synthetic oligonucleotide
  Target: LAMA2; (+) strand; PAM type: NRG; PAM sequence: GAG
tttacaatggtatttatcct

SEQ ID NO: 134964 - DNA, 20 bp, Artificial Sequence
  Description of Artificial Sequence: Synthetic oligonucleotide
  Target: LAMA2; (+) strand; PAM type: NRG; PAM sequence: TAG
tgagaaatgctaaaaaaaat

SEQ ID NO: 134965 - DNA, 20 bp, Artificial Sequence
  Description of Artificial Sequence: Synthetic oligonucleotide
  Target: LAMA2; (+) strand; PAM type: NRG; PAM sequence: AAG
aaaaaaaattagaaaatgta

SEQ ID NO: 134966 - DNA, 20 bp, Artificial Sequence
  Description of Artificial Sequence: Synthetic oligonucleotide
  Target: LAMA2; (+) strand; PAM type: NRG; PAM sequence: AGG
aaaaaaattagaaaatgtaa

SEQ ID NO: 134967 - DNA, 20 bp, Artificial Sequence
  Description of Artificial Sequence: Synthetic oligonucleotide
  Target: LAMA2; (+) strand; PAM type: NRG; PAM sequence: AAG
agaaaatgtaaaggtgactg

SEQ ID NO: 134968 - DNA, 20 bp, Artificial Sequence
  Description of Artificial Sequence: Synthetic oligonucleotide
  Target: LAMA2; (+) strand; PAM type: NRG; PAM sequence: TAG
aatgtaaaggtgactgaagt

SEQ ID NO: 134969 - DNA, 20 bp, Artificial Sequence
  Description of Artificial Sequence: Synthetic oligonucleotide
  Target: LAMA2; (+) strand; PAM type: NRG; PAM sequence: AGG
atgtaaaggtgactgaagtt

SEQ ID NO: 134970 - DNA, 20 bp, Artificial Sequence
  Description of Artificial Sequence: Synthetic oligonucleotide
  Target: LAMA2; (+) strand; PAM type: NRG; PAM sequence: TGG
gttaggaaataacataaaat

SEQ ID NO: 134971 - DNA, 20 bp, Artificial Sequence
  Description of Artificial Sequence: Synthetic oligonucleotide
  Target: LAMA2; (+) strand; PAM type: NRG; PAM sequence: GAG
aacataaaattggtaatgat

SEQ ID NO: 134972 - DNA, 20 bp, Artificial Sequence
  Description of Artificial Sequence: Synthetic oligonucleotide
  Target: LAMA2; (+) strand; PAM type: NRG; PAM sequence: TGG
atgatgagcaattttcttaa

SEQ ID NO: 134973 - DNA, 20 bp, Artificial Sequence
  Description of Artificial Sequence: Synthetic oligonucleotide
  Target: LAMA2; (+) strand; PAM type: NRG; PAM sequence: TGG
tcttaatggctgttcataac

SEQ ID NO: 134974 - DNA, 20 bp, Artificial Sequence
  Description of Artificial Sequence: Synthetic oligonucleotide
  Target: LAMA2; (+) strand; PAM type: NRG; PAM sequence: CAG
tgttcataactggaaaaaaa

SEQ ID NO: 134975 - DNA, 20 bp, Artificial Sequence
  Description of Artificial Sequence: Synthetic oligonucleotide
  Target: LAMA2; (+) strand; PAM type: NRG; PAM sequence: GAG
ctccgaaatatatgaattgt

SEQ ID NO: 134976 - DNA, 20 bp, Artificial Sequence
  Description of Artificial Sequence: Synthetic oligonucleotide
  Target: LAMA2; (+) strand; PAM type: NRG; PAM sequence: CAG
atgaattgtgagataaactg

SEQ ID NO: 134977 - DNA, 20 bp, Artificial Sequence
  Description of Artificial Sequence: Synthetic oligonucleotide
  Target: LAMA2; (+) strand; PAM type: NRG; PAM sequence: AAG
tgtgagataaactgcagtaa

SEQ ID NO: 134978 - DNA, 20 bp, Artificial Sequence
  Description of Artificial Sequence: Synthetic oligonucleotide
  Target: LAMA2; (+) strand; PAM type: NRG; PAM sequence: AAG
aaactgcagtaaaagacccc

SEQ ID NO: 134979 - DNA, 20 bp, Artificial Sequence
  Description of Artificial Sequence: Synthetic oligonucleotide
  Target: LAMA2; (+) strand; PAM type: NRG; PAM sequence: GAG
gtaaaagaccccaagaaatt

SEQ ID NO: 134980 - DNA, 20 bp, Artificial Sequence
  Description of Artificial Sequence: Synthetic oligonucleotide
  Target: LAMA2; (+) strand; PAM type: NRG; PAM sequence: AGG
taaaagaccccaagaaattg

SEQ ID NO: 134981 - DNA, 20 bp, Artificial Sequence
  Description of Artificial Sequence: Synthetic oligonucleotide
  Target: LAMA2; (+) strand; PAM type: NRG; PAM sequence: GGG
aaaagaccccaagaaattga

SEQ ID NO: 134982 - DNA, 20 bp, Artificial Sequence
  Description of Artificial Sequence: Synthetic oligonucleotide
  Target: LAMA2; (+) strand; PAM type: NRG; PAM sequence: TGG
caagaaattgagggaaacta

SEQ ID NO: 134983 - DNA, 20 bp, Artificial Sequence
  Description of Artificial Sequence: Synthetic oligonucleotide
  Target: LAMA2; (+) strand; PAM type: NRG; PAM sequence: TAG
ggaaactatggaaatgattg

SEQ ID NO: 134984 - DNA, 20 bp, Artificial Sequence
  Description of Artificial Sequence: Synthetic oligonucleotide
  Target: LAMA2; (+) strand; PAM type: NRG; PAM sequence: AAG
actatggaaatgattgtagc

SEQ ID NO: 134985 - DNA, 20 bp, Artificial Sequence
  Description of Artificial Sequence: Synthetic oligonucleotide
  Target: LAMA2; (+) strand; PAM type: NRG; PAM sequence: TGG
atggaaatgattgtagcaag

SEQ ID NO: 134986 - DNA, 20 bp, Artificial Sequence
  Description of Artificial Sequence: Synthetic oligonucleotide
  Target: LAMA2; (+) strand; PAM type: NRG; PAM sequence: TAG
gaaatgattgtagcaagtgg

SEQ ID NO: 134987 - DNA, 20 bp, Artificial Sequence
  Description of Artificial Sequence: Synthetic oligonucleotide
  Target: LAMA2; (+) strand; PAM type: NRG; PAM sequence: AAG
tgattgtagcaagtggtagc

SEQ ID NO: 134988 - DNA, 20 bp, Artificial Sequence
  Description of Artificial Sequence: Synthetic oligonucleotide
  Target: LAMA2; (+) strand; PAM type: NRG; PAM sequence: AAG
tatttttgtttgcattttga

SEQ ID NO: 134989 - DNA, 20 bp, Artificial Sequence
  Description of Artificial Sequence: Synthetic oligonucleotide
  Target: LAMA2; (+) strand; PAM type: NRG; PAM sequence: CAG
ttttgtttgcattttgaaag

SEQ ID NO: 134990 - DNA, 20 bp, Artificial Sequence
  Description of Artificial Sequence: Synthetic oligonucleotide
  Target: LAMA2; (+) strand; PAM type: NRG; PAM sequence: TAG
tgcattttgaaagcagtttt

SEQ ID NO: 134991 - DNA, 20 bp, Artificial Sequence
  Description of Artificial Sequence: Synthetic oligonucleotide
  Target: LAMA2; (+) strand; PAM type: NRG; PAM sequence: TAG
gaaaatcttaaattgatttt

SEQ ID NO: 134992 - DNA, 20 bp, Artificial Sequence
  Description of Artificial Sequence: Synthetic oligonucleotide
  Target: LAMA2; (+) strand; PAM type: NRG; PAM sequence: AGG
aaaatcttaaattgattttt

SEQ ID NO: 134993 - DNA, 20 bp, Artificial Sequence
  Description of Artificial Sequence: Synthetic oligonucleotide
  Target: LAMA2; (+) strand; PAM type: NRG; PAM sequence: TGG
aaattgatttttaggaattc

SEQ ID NO: 134994 - DNA, 20 bp, Artificial Sequence
  Description of Artificial Sequence: Synthetic oligonucleotide
  Target: LAMA2; (+) strand; PAM type: NRG; PAM sequence: GGG
aattgatttttaggaattct

SEQ ID NO: 134995 - DNA, 20 bp, Artificial Sequence
  Description of Artificial Sequence: Synthetic oligonucleotide
  Target: LAMA2; (+) strand; PAM type: NRG; PAM sequence: GGG
attgatttttaggaattctg

SEQ ID NO: 134996 - DNA, 20 bp, Artificial Sequence
  Description of Artificial Sequence: Synthetic oligonucleotide
  Target: LAMA2; (+) strand; PAM type: NRG; PAM sequence: CAG
ttctggggctacttttttct

SEQ ID NO: 134997 - DNA, 20 bp, Artificial Sequence
  Description of Artificial Sequence: Synthetic oligonucleotide
  Target: LAMA2; (+) strand; PAM type: NRG; PAM sequence: TAG
ctacttttttctcagacctc

SEQ ID NO: 134998 - DNA, 20 bp, Artificial Sequence
  Description of Artificial Sequence: Synthetic oligonucleotide
  Target: LAMA2; (+) strand; PAM type: NRG; PAM sequence: AGG
tacttttttctcagacctct

SEQ ID NO: 134999 - DNA, 20 bp, Artificial Sequence
  Description of Artificial Sequence: Synthetic oligonucleotide
  Target: LAMA2; (+) strand; PAM type: NRG; PAM sequence: GGG
acttttttctcagacctcta

SEQ ID NO: 135000 - DNA, 20 bp, Artificial Sequence
  Description of Artificial Sequence: Synthetic oligonucleotide
  Target: LAMA2; (+) strand; PAM type: NRG; PAM sequence: TAG
acctctagggcaaccaattg

SEQ ID NO: 135001 - DNA, 20 bp, Artificial Sequence
  Description of Artificial Sequence: Synthetic oligonucleotide
  Target: LAMA2; (+) strand; PAM type: NRG; PAM sequence: GAG
ctctagggcaaccaattgta

SEQ ID NO: 135002 - DNA, 20 bp, Artificial Sequence
  Description of Artificial Sequence: Synthetic oligonucleotide
  Target: LAMA2; (+) strand; PAM type: NRG; PAM sequence: CAG
cccccttctgttaattgact

SEQ ID NO: 135003 - DNA, 20 bp, Artificial Sequence
  Description of Artificial Sequence: Synthetic oligonucleotide
  Target: LAMA2; (+) strand; PAM type: NRG; PAM sequence: AAG
tcagatctgcttacatatta

SEQ ID NO: 135004 - DNA, 20 bp, Artificial Sequence
  Description of Artificial Sequence: Synthetic oligonucleotide
  Target: LAMA2; (+) strand; PAM type: NRG; PAM sequence: AGG
cagatctgcttacatattaa

SEQ ID NO: 135005 - DNA, 20 bp, Artificial Sequence
  Description of Artificial Sequence: Synthetic oligonucleotide
  Target: LAMA2; (+) strand; PAM type: NRG; PAM sequence: TGG
tacatattaaaggccacctc

SEQ ID NO: 135006 - DNA, 20 bp, Artificial Sequence
  Description of Artificial Sequence: Synthetic oligonucleotide
  Target: LAMA2; (+) strand; PAM type: NRG; PAM sequence: CAG
taaaggccacctctggttct

SEQ ID NO: 135007 - DNA, 20 bp, Artificial Sequence
  Description of Artificial Sequence: Synthetic oligonucleotide
  Target: LAMA2; (+) strand; PAM type: NRG; PAM sequence: TGG
ggccacctctggttctcagc

SEQ ID NO: 135008 - DNA, 20 bp, Artificial Sequence
  Description of Artificial Sequence: Synthetic oligonucleotide
  Target: LAMA2; (+) strand; PAM type: NRG; PAM sequence: AAG
tctggttctcagctggaaaa

SEQ ID NO: 135009 - DNA, 20 bp, Artificial Sequence
  Description of Artificial Sequence: Synthetic oligonucleotide
  Target: LAMA2; (+) strand; PAM type: NRG; PAM sequence: GAG
tggttctcagctggaaaaaa

SEQ ID NO: 135010 - DNA, 20 bp, Artificial Sequence
  Description of Artificial Sequence: Synthetic oligonucleotide
  Target: LAMA2; (+) strand; PAM type: NRG; PAM sequence: CAG
agagttcctcccttttgaaa

SEQ ID NO: 135011 - DNA, 20 bp, Artificial Sequence
  Description of Artificial Sequence: Synthetic oligonucleotide
  Target: LAMA2; (+) strand; PAM type: NRG; PAM sequence: CAG
cccttttgaaacagttgact

SEQ ID NO: 135012 - DNA, 20 bp, Artificial Sequence
  Description of Artificial Sequence: Synthetic oligonucleotide
  Target: LAMA2; (+) strand; PAM type: NRG; PAM sequence: CAG
tgaaacagttgactcagaat

SEQ ID NO: 135013 - DNA, 20 bp, Artificial Sequence
  Description of Artificial Sequence: Synthetic oligonucleotide
  Target: LAMA2; (+) strand; PAM type: NRG; PAM sequence: CAG
cagaatcagttccttccttt

SEQ ID NO: 135014 - DNA, 20 bp, Artificial Sequence
  Description of Artificial Sequence: Synthetic oligonucleotide
  Target: LAMA2; (+) strand; PAM type: NRG; PAM sequence: TGG
aattactttgtcttctaacc

SEQ ID NO: 135015 - DNA, 20 bp, Artificial Sequence
  Description of Artificial Sequence: Synthetic oligonucleotide
  Target: LAMA2; (+) strand; PAM type: NRG; PAM sequence: GGG
attactttgtcttctaacct

SEQ ID NO: 135016 - DNA, 20 bp, Artificial Sequence
  Description of Artificial Sequence: Synthetic oligonucleotide
  Target: LAMA2; (+) strand; PAM type: NRG; PAM sequence: GGG
ttactttgtcttctaacctg

SEQ ID NO: 135017 - DNA, 20 bp, Artificial Sequence
  Description of Artificial Sequence: Synthetic oligonucleotide
  Target: LAMA2; (+) strand; PAM type: NRG; PAM sequence: TAG
ctggggtcctaatctttgcc

SEQ ID NO: 135018 - DNA, 20 bp, Artificial Sequence
  Description of Artificial Sequence: Synthetic oligonucleotide
  Target: LAMA2; (+) strand; PAM type: NRG; PAM sequence: AGG
tggggtcctaatctttgcct

SEQ ID NO: 135019 - DNA, 20 bp, Artificial Sequence
  Description of Artificial Sequence: Synthetic oligonucleotide
  Target: LAMA2; (+) strand; PAM type: NRG; PAM sequence: AAG
aatctttgcctaggaattta

SEQ ID NO: 135020 - DNA, 20 bp, Artificial Sequence
  Description of Artificial Sequence: Synthetic oligonucleotide
  Target: LAMA2; (+) strand; PAM type: NRG; PAM sequence: AAG
ttgcctaggaatttaaagta

SEQ ID NO: 135021 - DNA, 20 bp, Artificial Sequence
  Description of Artificial Sequence: Synthetic oligonucleotide
  Target: LAMA2; (+) strand; PAM type: NRG; PAM sequence: TGG
taggaatttaaagtaaagat

SEQ ID NO: 135022 - DNA, 20 bp, Artificial Sequence
  Description of Artificial Sequence: Synthetic oligonucleotide
  Target: LAMA2; (+) strand; PAM type: NRG; PAM sequence: TAG
acttgtatctacctttactt

SEQ ID NO: 135023 - DNA, 20 bp, Artificial Sequence
  Description of Artificial Sequence: Synthetic oligonucleotide
  Target: LAMA2; (+) strand; PAM type: NRG; PAM sequence: TGG
ctttactttagctcaccctc

SEQ ID NO: 135024 - DNA, 20 bp, Artificial Sequence
  Description of Artificial Sequence: Synthetic oligonucleotide
  Target: LAMA2; (+) strand; PAM type: NRG; PAM sequence: GGG
tttactttagctcaccctct

SEQ ID NO: 135025 - DNA, 20 bp, Artificial Sequence
  Description of Artificial Sequence: Synthetic oligonucleotide
  Target: LAMA2; (+) strand; PAM type: NRG; PAM sequence: TGG
tttagctcaccctctgggcg

SEQ ID NO: 135026 - DNA, 20 bp, Artificial Sequence
  Description of Artificial Sequence: Synthetic oligonucleotide
  Target: LAMA2; (+) strand; PAM type: NRG; PAM sequence: TAG
caccctctgggcgtggcctc

SEQ ID NO: 135027 - DNA, 20 bp, Artificial Sequence
  Description of Artificial Sequence: Synthetic oligonucleotide
  Target: LAMA2; (+) strand; PAM type: NRG; PAM sequence: CAG
ctctgggcgtggcctctagc

SEQ ID NO: 135028 - DNA, 20 bp, Artificial Sequence
  Description of Artificial Sequence: Synthetic oligonucleotide
  Target: LAMA2; (+) strand; PAM type: NRG; PAM sequence: GAG
cctctagccagtctcacttt

SEQ ID NO: 135029 - DNA, 20 bp, Artificial Sequence
  Description of Artificial Sequence: Synthetic oligonucleotide
  Target: LAMA2; (+) strand; PAM type: NRG; PAM sequence: TAG
ttaatttaatgtttccaatg

SEQ ID NO: 135030 - DNA, 20 bp, Artificial Sequence
  Description of Artificial Sequence: Synthetic oligonucleotide
  Target: LAMA2; (+) strand; PAM type: NRG; PAM sequence: CAG
aatacatctcaaaaattatg

SEQ ID NO: 135031 - DNA, 20 bp, Artificial Sequence
  Description of Artificial Sequence: Synthetic oligonucleotide
  Target: LAMA2; (+) strand; PAM type: NRG; PAM sequence: AAG
acatctcaaaaattatgcag

SEQ ID NO: 135032 - DNA, 20 bp, Artificial Sequence
  Description of Artificial Sequence: Synthetic oligonucleotide
  Target: LAMA2; (+) strand; PAM type: NRG; PAM sequence: TGG
tatcatataatgttcttgca

SEQ ID NO: 135033 - DNA, 20 bp, Artificial Sequence
  Description of Artificial Sequence: Synthetic oligonucleotide
  Target: LAMA2; (+) strand; PAM type: NRG; PAM sequence: GGG
atcatataatgttcttgcat

SEQ ID NO: 135034 - DNA, 20 bp, Artificial Sequence
  Description of Artificial Sequence: Synthetic oligonucleotide
  Target: LAMA2; (+) strand; PAM type: NRG; PAM sequence: AAG
aatgttcttgcatgggtctg

SEQ ID NO: 135035 - DNA, 20 bp, Artificial Sequence
  Description of Artificial Sequence: Synthetic oligonucleotide
  Target: LAMA2; (+) strand; PAM type: NRG; PAM sequence: AAG
catgggtctgaagctctttg

SEQ ID NO: 135036 - DNA, 20 bp, Artificial Sequence
  Description of Artificial Sequence: Synthetic oligonucleotide
  Target: LAMA2; (+) strand; PAM type: NRG; PAM sequence: AGG
atgggtctgaagctctttga

SEQ ID NO: 135037 - DNA, 20 bp, Artificial Sequence
  Description of Artificial Sequence: Synthetic oligonucleotide
  Target: LAMA2; (+) strand; PAM type: NRG; PAM sequence: AAG
gtctgaagctctttgaaggc

SEQ ID NO: 135038 - DNA, 20 bp, Artificial Sequence
  Description of Artificial Sequence: Synthetic oligonucleotide
  Target: LAMA2; (+) strand; PAM type: NRG; PAM sequence: AGG
tctgaagctctttgaaggca

SEQ ID NO: 135039 - DNA, 20 bp, Artificial Sequence
  Description of Artificial Sequence: Synthetic oligonucleotide
  Target: LAMA2; (+) strand; PAM type: NRG; PAM sequence: GGG
ctgaagctctttgaaggcaa

SEQ ID NO: 135040 - DNA, 20 bp, Artificial Sequence
  Description of Artificial Sequence: Synthetic oligonucleotide
  Target: LAMA2; (+) strand; PAM type: NRG; PAM sequence: TAG
attgttgtgtaattactgcc

SEQ ID NO: 135041 - DNA, 20 bp, Artificial Sequence
  Description of Artificial Sequence: Synthetic oligonucleotide
  Target: LAMA2; (+) strand; PAM type: NRG; PAM sequence: GAG
tgtgtaattactgcctagat

SEQ ID NO: 135042 - DNA, 20 bp, Artificial Sequence
  Description of Artificial Sequence: Synthetic oligonucleotide
  Target: LAMA2; (+) strand; PAM type: NRG; PAM sequence: TGG
ttactgcctagatgagtact

SEQ ID NO: 135043 - DNA, 20 bp, Artificial Sequence
  Description of Artificial Sequence: Synthetic oligonucleotide
  Target: LAMA2; (+) strand; PAM type: NRG; PAM sequence: AAG
tgcctagatgagtacttgga

SEQ ID NO: 135044 - DNA, 20 bp, Artificial Sequence
  Description of Artificial Sequence: Synthetic oligonucleotide
  Target: LAMA2; (+) strand; PAM type: NRG; PAM sequence: AGG
gcctagatgagtacttggaa

SEQ ID NO: 135045 - DNA, 20 bp, Artificial Sequence
  Description of Artificial Sequence: Synthetic oligonucleotide
  Target: LAMA2; (+) strand; PAM type: NRG; PAM sequence: TGG
tagatgagtacttggaaagg

SEQ ID NO: 135046 - DNA, 20 bp, Artificial Sequence
  Description of Artificial Sequence: Synthetic oligonucleotide
  Target: LAMA2; (+) strand; PAM type: NRG; PAM sequence: GAG
gatgagtacttggaaaggtg

SEQ ID NO: 135047 - DNA, 20 bp, Artificial Sequence
  Description of Artificial Sequence: Synthetic oligonucleotide
  Target: LAMA2; (+) strand; PAM type: NRG; PAM sequence: TAG
caatgaatatgtgttgcata

SEQ ID NO: 135048 - DNA, 20 bp, Artificial Sequence
  Description of Artificial Sequence: Synthetic oligonucleotide
  Target: LAMA2; (+) strand; PAM type: NRG; PAM sequence: AAG
atatgtgttgcatatagttt

SEQ ID NO: 135049 - DNA, 20 bp, Artificial Sequence
  Description of Artificial Sequence: Synthetic oligonucleotide
  Target: LAMA2; (+) strand; PAM type: NRG; PAM sequence: AAG
tgtgttgcatatagtttaag

SEQ ID NO: 135050 - DNA, 20 bp, Artificial Sequence
  Description of Artificial Sequence: Synthetic oligonucleotide
  Target: LAMA2; (+) strand; PAM type: NRG; PAM sequence: TGG
gcatatagtttaagaagaac

SEQ ID NO: 135051 - DNA, 20 bp, Artificial Sequence
  Description of Artificial Sequence: Synthetic oligonucleotide
  Target: LAMA2; (+) strand; PAM type: NRG; PAM sequence: GGG
catatagtttaagaagaact

SEQ ID NO: 135052 - DNA, 20 bp, Artificial Sequence
  Description of Artificial Sequence: Synthetic oligonucleotide
  Target: LAMA2; (+) strand; PAM type: NRG; PAM sequence: TGG
agtttaagaagaactgggac

SEQ ID NO: 135053 - DNA, 20 bp, Artificial Sequence
  Description of Artificial Sequence: Synthetic oligonucleotide
  Target: LAMA2; (+) strand; PAM type: NRG; PAM sequence: TAG
agaagaactgggactggaat

SEQ ID NO: 135054 - DNA, 20 bp, Artificial Sequence
  Description of Artificial Sequence: Synthetic oligonucleotide
  Target: LAMA2; (+) strand; PAM type: NRG; PAM sequence: TAG
agaaacacatgttccgtctt

SEQ ID NO: 135055 - DNA, 20 bp, Artificial Sequence
  Description of Artificial Sequence: Synthetic oligonucleotide
  Target: LAMA2; (+) strand; PAM type: NRG; PAM sequence: GAG
attattttatctatgatatt

SEQ ID NO: 135056 - DNA, 20 bp, Artificial Sequence
  Description of Artificial Sequence: Synthetic oligonucleotide
  Target: LAMA2; (+) strand; PAM type: NRG; PAM sequence: AAG
ttttatctatgatattgagc

SEQ ID NO: 135057 - DNA, 20 bp, Artificial Sequence
  Description of Artificial Sequence: Synthetic oligonucleotide
  Target: LAMA2; (+) strand; PAM type: NRG; PAM sequence: TAG
tgcctatcccatctatatta

SEQ ID NO: 135058 - DNA, 20 bp, Artificial Sequence
  Description of Artificial Sequence: Synthetic oligonucleotide
  Target: LAMA2; (+) strand; PAM type: NRG; PAM sequence: TGG
catctatattatagctttgt

SEQ ID NO: 135059 - DNA, 20 bp, Artificial Sequence
  Description of Artificial Sequence: Synthetic oligonucleotide
  Target: LAMA2; (+) strand; PAM type: NRG; PAM sequence: AAG
ctatattatagctttgttgg

SEQ ID NO: 135060 - DNA, 20 bp, Artificial Sequence
  Description of Artificial Sequence: Synthetic oligonucleotide
  Target: LAMA2; (+) strand; PAM type: NRG; PAM sequence: AAG
atagctttgttggaagactc

SEQ ID NO: 135061 - DNA, 20 bp, Artificial Sequence
  Description of Artificial Sequence: Synthetic oligonucleotide
  Target: LAMA2; (+) strand; PAM type: NRG; PAM sequence: AGG
tagctttgttggaagactca

SEQ ID NO: 135062 - DNA, 20 bp, Artificial Sequence
  Description of Artificial Sequence: Synthetic oligonucleotide
  Target: LAMA2; (+) strand; PAM type: NRG; PAM sequence: GGG
agctttgttggaagactcaa

SEQ ID NO: 135063 - DNA, 20 bp, Artificial Sequence
  Description of Artificial Sequence: Synthetic oligonucleotide
  Target: LAMA2; (+) strand; PAM type: NRG; PAM sequence: AAG
gttggaagactcaagggata

SEQ ID NO: 135064 - DNA, 20 bp, Artificial Sequence
  Description of Artificial Sequence: Synthetic oligonucleotide
  Target: LAMA2; (+) strand; PAM type: NRG; PAM sequence: TAG
gataaagtgaaaatgctttg

SEQ ID NO: 135065 - DNA, 20 bp, Artificial Sequence
  Description of Artificial Sequence: Synthetic oligonucleotide
  Target: LAMA2; (+) strand; PAM type: NRG; PAM sequence: GAG
taaagtgaaaatgctttgta

SEQ ID NO: 135066 - DNA, 20 bp, Artificial Sequence
  Description of Artificial Sequence: Synthetic oligonucleotide
  Target: LAMA2; (+) strand; PAM type: NRG; PAM sequence: CAG
tgaaaatgctttgtagagtt

SEQ ID NO: 135067 - DNA, 20 bp, Artificial Sequence
  Description of Artificial Sequence: Synthetic oligonucleotide
  Target: LAMA2; (+) strand; PAM type: NRG; PAM sequence: TGG
tcagtgctacacatttatta

SEQ ID NO: 135068 - DNA, 20 bp, Artificial Sequence
  Description of Artificial Sequence: Synthetic oligonucleotide
  Target: LAMA2; (+) strand; PAM type: NRG; PAM sequence: AAG
attgtacataacatgtgaca

SEQ ID NO: 135069 - DNA, 20 bp, Artificial Sequence
  Description of Artificial Sequence: Synthetic oligonucleotide
  Target: LAMA2; (+) strand; PAM type: NRG; PAM sequence: AAG
tacataacatgtgacaaaga

SEQ ID NO: 135070 - DNA, 20 bp, Artificial Sequence
  Description of Artificial Sequence: Synthetic oligonucleotide
  Target: LAMA2; (+) strand; PAM type: NRG; PAM sequence: AGG
acataacatgtgacaaagaa

SEQ ID NO: 135071 - DNA, 20 bp, Artificial Sequence
  Description of Artificial Sequence: Synthetic oligonucleotide
  Target: LAMA2; (+) strand; PAM type: NRG; PAM sequence: TGG
atgtgacaaagaaaggctta

SEQ ID NO: 135072 - DNA, 20 bp, Artificial Sequence
  Description of Artificial Sequence: Synthetic oligonucleotide
  Target: LAMA2; (+) strand; PAM type: NRG; PAM sequence: TGG
caaagaaaggcttatggttt

SEQ ID NO: 135073 - DNA, 20 bp, Artificial Sequence
  Description of Artificial Sequence: Synthetic oligonucleotide
  Target: LAMA2; (+) strand; PAM type: NRG; PAM sequence: GAG
aagaaaggcttatggttttg

SEQ ID NO: 135074 - DNA, 20 bp, Artificial Sequence
  Description of Artificial Sequence: Synthetic oligonucleotide
  Target: LAMA2; (+) strand; PAM type: NRG; PAM sequence: TAG
gttttggagtttgtttattt

SEQ ID NO: 135075 - DNA, 20 bp, Artificial Sequence
  Description of Artificial Sequence: Synthetic oligonucleotide
  Target: LAMA2; (+) strand; PAM type: NRG; PAM sequence: AAG
ttggagtttgtttattttag

SEQ ID NO: 135076 - DNA, 20 bp, Artificial Sequence
  Description of Artificial Sequence: Synthetic oligonucleotide
  Target: LAMA2; (+) strand; PAM type: NRG; PAM sequence: CAG
gtttgtttattttagaagac

SEQ ID NO: 135077 - DNA, 20 bp, Artificial Sequence
  Description of Artificial Sequence: Synthetic oligonucleotide
  Target: LAMA2; (+) strand; PAM type: NRG; PAM sequence: TAG
ttttagaagaccagataaac

SEQ ID NO: 135078 - DNA, 20 bp, Artificial Sequence
  Description of Artificial Sequence: Synthetic oligonucleotide
  Target: LAMA2; (+) strand; PAM type: NRG; PAM sequence: AAG
tagaacaaatattttccatg

SEQ ID NO: 135079 - DNA, 20 bp, Artificial Sequence
  Description of Artificial Sequence: Synthetic oligonucleotide
  Target: LAMA2; (+) strand; PAM type: NRG; PAM sequence: AAG
aacaaatattttccatgaag

SEQ ID NO: 135080 - DNA, 20 bp, Artificial Sequence
  Description of Artificial Sequence: Synthetic oligonucleotide
  Target: LAMA2; (+) strand; PAM type: NRG; PAM sequence: TAG
gaagaagttttttttcgtgt

SEQ ID NO: 135081 - DNA, 20 bp, Artificial Sequence
  Description of Artificial Sequence: Synthetic oligonucleotide
  Target: LAMA2; (+) strand; PAM type: NRG; PAM sequence: GAG
taaattgattcacaaaattt

SEQ ID NO: 135082 - DNA, 20 bp, Artificial Sequence
  Description of Artificial Sequence: Synthetic oligonucleotide
  Target: LAMA2; (+) strand; PAM type: NRG; PAM sequence: AGG
aaattgattcacaaaatttg

SEQ ID NO: 135083 - DNA, 20 bp, Artificial Sequence
  Description of Artificial Sequence: Synthetic oligonucleotide
  Target: LAMA2; (+) strand; PAM type: NRG; PAM sequence: GAG
aattttatgaatattttact

SEQ ID NO: 135084 - DNA, 20 bp, Artificial Sequence
  Description of Artificial Sequence: Synthetic oligonucleotide
  Target: LAMA2; (+) strand; PAM type: NRG; PAM sequence: CAG
actgagcacctatatgatgt

SEQ ID NO: 135085 - DNA, 20 bp, Artificial Sequence
  Description of Artificial Sequence: Synthetic oligonucleotide
  Target: LAMA2; (+) strand; PAM type: NRG; PAM sequence: AAG
taattgtctctgaaaataaa

SEQ ID NO: 135086 - DNA, 20 bp, Artificial Sequence
  Description of Artificial Sequence: Synthetic oligonucleotide
  Target: LAMA2; (+) strand; PAM type: NRG; PAM sequence: TGG
ataaaaagattaataaatca

SEQ ID NO: 135087 - DNA, 20 bp, Artificial Sequence
  Description of Artificial Sequence: Synthetic oligonucleotide
  Target: LAMA2; (+) strand; PAM type: NRG; PAM sequence: AAG
aaatcatggcttctgccttc

SEQ ID NO: 135088 - DNA, 20 bp, Artificial Sequence
  Description of Artificial Sequence: Synthetic oligonucleotide
  Target: LAMA2; (+) strand; PAM type: NRG; PAM sequence: AGG
aatcatggcttctgccttca

SEQ ID NO: 135089 - DNA, 20 bp, Artificial Sequence
  Description of Artificial Sequence: Synthetic oligonucleotide
  Target: LAMA2; (+) strand; PAM type: NRG; PAM sequence: TAG
gcttctgccttcaaggaact

SEQ ID NO: 135090 - DNA, 20 bp, Artificial Sequence
  Description of Artificial Sequence: Synthetic oligonucleotide
  Target: LAMA2; (+) strand; PAM type: NRG; PAM sequence: GAG
ttctgccttcaaggaactta

SEQ ID NO: 135091 - DNA, 20 bp, Artificial Sequence
  Description of Artificial Sequence: Synthetic oligonucleotide
  Target: LAMA2; (+) strand; PAM type: NRG; PAM sequence: TAG
ccttcaaggaacttagagtt

SEQ ID NO: 135092 - DNA, 20 bp, Artificial Sequence
  Description of Artificial Sequence: Synthetic oligonucleotide
  Target: LAMA2; (+) strand; PAM type: NRG; PAM sequence: TGG
tcaaggaacttagagtttag

SEQ ID NO: 135093 - DNA, 20 bp, Artificial Sequence
  Description of Artificial Sequence: Synthetic oligonucleotide
  Target: LAMA2; (+) strand; PAM type: NRG; PAM sequence: TAG
aacttagagtttagtggtta

SEQ ID NO: 135094 - DNA, 20 bp, Artificial Sequence
  Description of Artificial Sequence: Synthetic oligonucleotide
  Target: LAMA2; (+) strand; PAM type: NRG; PAM sequence: TGG
gtttagtggttatagaatgt

SEQ ID NO: 135095 - DNA, 20 bp, Artificial Sequence
  Description of Artificial Sequence: Synthetic oligonucleotide
  Target: LAMA2; (+) strand; PAM type: NRG; PAM sequence: TGG
gaatgttggtttaaaaaaaa

SEQ ID NO: 135096 - DNA, 20 bp, Artificial Sequence
  Description of Artificial Sequence: Synthetic oligonucleotide
  Target: LAMA2; (+) strand; PAM type: NRG; PAM sequence: GAG
gacaaaaactcataatatct

SEQ ID NO: 135097 - DNA, 20 bp, Artificial Sequence
  Description of Artificial Sequence: Synthetic oligonucleotide
  Target: LAMA2; (+) strand; PAM type: NRG; PAM sequence: GAG
caaaaactcataatatctga

SEQ ID NO: 135098 - DNA, 20 bp, Artificial Sequence
  Description of Artificial Sequence: Synthetic oligonucleotide
  Target: LAMA2; (+) strand; PAM type: NRG; PAM sequence: AAG
atatgtgcttgctaaatgaa

SEQ ID NO: 135099 - DNA, 20 bp, Artificial Sequence
  Description of Artificial Sequence: Synthetic oligonucleotide
  Target: LAMA2; (+) strand; PAM type: NRG; PAM sequence: TAG
tgctaaatgaaaagaattat

SEQ ID NO: 135100 - DNA, 20 bp, Artificial Sequence
  Description of Artificial Sequence: Synthetic oligonucleotide
  Target: LAMA2; (+) strand; PAM type: NRG; PAM sequence: AAG
tttttacttgaaatatttac

SEQ ID NO: 135101 - DNA, 20 bp, Artificial Sequence
  Description of Artificial Sequence: Synthetic oligonucleotide
  Target: LAMA2; (+) strand; PAM type: NRG; PAM sequence: GAG
tttacttgaaatatttacaa

SEQ ID NO: 135102 - DNA, 20 bp, Artificial Sequence
  Description of Artificial Sequence: Synthetic oligonucleotide
  Target: LAMA2; (+) strand; PAM type: NRG; PAM sequence: AGG
ttacttgaaatatttacaag

SEQ ID NO: 135103 - DNA, 20 bp, Artificial Sequence
  Description of Artificial Sequence: Synthetic oligonucleotide
  Target: LAMA2; (+) strand; PAM type: NRG; PAM sequence: CAG
gaaatatttacaagaggaaa

SEQ ID NO: 135104 - DNA, 20 bp, Artificial Sequence
  Description of Artificial Sequence: Synthetic oligonucleotide
  Target: LAMA2; (+) strand; PAM type: NRG; PAM sequence: TGG
aagaggaaacagaatatttg

SEQ ID NO: 135105 - DNA, 20 bp, Artificial Sequence
  Description of Artificial Sequence: Synthetic oligonucleotide
  Target: LAMA2; (+) strand; PAM type: NRG; PAM sequence: GGG
agaggaaacagaatatttgt

SEQ ID NO: 135106 - DNA, 20 bp, Artificial Sequence
  Description of Artificial Sequence: Synthetic oligonucleotide
  Target: LAMA2; (+) strand; PAM type: NRG; PAM sequence: CAG
tatttatgtgtgtgttcaaa

SEQ ID NO: 135107 - DNA, 20 bp, Artificial Sequence
  Description of Artificial Sequence: Synthetic oligonucleotide
  Target: LAMA2; (+) strand; PAM type: NRG; PAM sequence: TAG
gtgtgtgttcaaacagctgc

SEQ ID NO: 135108 - DNA, 20 bp, Artificial Sequence
  Description of Artificial Sequence: Synthetic oligonucleotide
  Target: LAMA2; (+) strand; PAM type: NRG; PAM sequence: GAG
gtgtgttcaaacagctgcta

SEQ ID NO: 135109 - DNA, 20 bp, Artificial Sequence
  Description of Artificial Sequence: Synthetic oligonucleotide
  Target: LAMA2; (+) strand; PAM type: NRG; PAM sequence: AAG
caaacagctgctagagaaca

SEQ ID NO: 135110 - DNA, 20 bp, Artificial Sequence
  Description of Artificial Sequence: Synthetic oligonucleotide
  Target: LAMA2; (+) strand; PAM type: NRG; PAM sequence: AAG
aaaaaatttgtctataaaac

SEQ ID NO: 135111 - DNA, 20 bp, Artificial Sequence
  Description of Artificial Sequence: Synthetic oligonucleotide
  Target: LAMA2; (+) strand; PAM type: NRG; PAM sequence: TAG
ctataaaacaagtattttca

SEQ ID NO: 135112 - DNA, 20 bp, Artificial Sequence
  Description of Artificial Sequence: Synthetic oligonucleotide
  Target: LAMA2; (+) strand; PAM type: NRG; PAM sequence: AAG
gtattttcatagatatacta

SEQ ID NO: 135113 - DNA, 20 bp, Artificial Sequence
  Description of Artificial Sequence: Synthetic oligonucleotide
  Target: LAMA2; (+) strand; PAM type: NRG; PAM sequence: TAG
atagatatactaaagctgca

SEQ ID NO: 135114 - DNA, 20 bp, Artificial Sequence
  Description of Artificial Sequence: Synthetic oligonucleotide
  Target: LAMA2; (+) strand; PAM type: NRG; PAM sequence: TAG
ctgcatagaatttgctttta

SEQ ID NO: 135115 - DNA, 20 bp, Artificial Sequence
  Description of Artificial Sequence: Synthetic oligonucleotide
  Target: LAMA2; (+) strand; PAM type: NRG; PAM sequence: CAG
tttgcttttatagcataaaa

SEQ ID NO: 135116 - DNA, 20 bp, Artificial Sequence
  Description of Artificial Sequence: Synthetic oligonucleotide
  Target: LAMA2; (+) strand; PAM type: NRG; PAM sequence: TAG
tttatagcataaaacagaat

SEQ ID NO: 135117 - DNA, 20 bp, Artificial Sequence
  Description of Artificial Sequence: Synthetic oligonucleotide
  Target: LAMA2; (+) strand; PAM type: NRG; PAM sequence: GAG
taaaacagaattagatgctt

SEQ ID NO: 135118 - DNA, 20 bp, Artificial Sequence
  Description of Artificial Sequence: Synthetic oligonucleotide
  Target: LAMA2; (+) strand; PAM type: NRG; PAM sequence: CAG
acagaattagatgcttgagt

SEQ ID NO: 135119 - DNA, 20 bp, Artificial Sequence
  Description of Artificial Sequence: Synthetic oligonucleotide
  Target: LAMA2; (+) strand; PAM type: NRG; PAM sequence: TAG
taattctttacactatgcat

SEQ ID NO: 135120 - DNA, 20 bp, Artificial Sequence
  Description of Artificial Sequence: Synthetic oligonucleotide
  Target: LAMA2; (+) strand; PAM type: NRG; PAM sequence: AGG
aattctttacactatgcatt

SEQ ID NO: 135121 - DNA, 20 bp, Artificial Sequence
  Description of Artificial Sequence: Synthetic oligonucleotide
  Target: LAMA2; (+) strand; PAM type: NRG; PAM sequence: GAG
tttacactatgcattaggct

SEQ ID NO: 135122 - DNA, 20 bp, Artificial Sequence
  Description of Artificial Sequence: Synthetic oligonucleotide
  Target: LAMA2; (+) strand; PAM type: NRG; PAM sequence: AGG
ttacactatgcattaggctg

SEQ ID NO: 135123 - DNA, 20 bp, Artificial Sequence
  Description of Artificial Sequence: Synthetic oligonucleotide
  Target: LAMA2; (+) strand; PAM type: NRG; PAM sequence: TGG
ctatgcattaggctgaggcc

SEQ ID NO: 135124 - DNA, 20 bp, Artificial Sequence
  Description of Artificial Sequence: Synthetic oligonucleotide
  Target: LAMA2; (+) strand; PAM type: NRG; PAM sequence: AAG
tgaggcctggtgtaatttga

SEQ ID NO: 135125 - DNA, 20 bp, Artificial Sequence
  Description of Artificial Sequence: Synthetic oligonucleotide
  Target: LAMA2; (+) strand; PAM type: NRG; PAM sequence: TAG
atttgaaagtgataatgcaa

SEQ ID NO: 135126 - DNA, 20 bp, Artificial Sequence
  Description of Artificial Sequence: Synthetic oligonucleotide
  Target: LAMA2; (+) strand; PAM type: NRG; PAM sequence: GAG
ttgaaagtgataatgcaata

SEQ ID NO: 135127 - DNA, 20 bp, Artificial Sequence
  Description of Artificial Sequence: Synthetic oligonucleotide
  Target: LAMA2; (+) strand; PAM type: NRG; PAM sequence: CAG
ataatgcaatagagaaattc

SEQ ID NO: 135128 - DNA, 20 bp, Artificial Sequence
  Description of Artificial Sequence: Synthetic oligonucleotide
  Target: LAMA2; (+) strand; PAM type: NRG; PAM sequence: AAG
atgcaatagagaaattccag

SEQ ID NO: 135129 - DNA, 20 bp, Artificial Sequence
  Description of Artificial Sequence: Synthetic oligonucleotide
  Target: LAMA2; (+) strand; PAM type: NRG; PAM sequence: TGG
aatagagaaattccagaagc

SEQ ID NO: 135130 - DNA, 20 bp, Artificial Sequence
  Description of Artificial Sequence: Synthetic oligonucleotide
  Target: LAMA2; (+) strand; PAM type: NRG; PAM sequence: GGG
atagagaaattccagaagct

SEQ ID NO: 135131 - DNA, 20 bp, Artificial Sequence
  Description of Artificial Sequence: Synthetic oligonucleotide
  Target: LAMA2; (+) strand; PAM type: NRG; PAM sequence: GGG
tagagaaattccagaagctg

SEQ ID NO: 135132 - DNA, 20 bp, Artificial Sequence
  Description of Artificial Sequence: Synthetic oligonucleotide
  Target: LAMA2; (+) strand; PAM type: NRG; PAM sequence: GGG
agagaaattccagaagctgg

SEQ ID NO: 135133 - DNA, 20 bp, Artificial Sequence
  Description of Artificial Sequence: Synthetic oligonucleotide
  Target: LAMA2; (+) strand; PAM type: NRG; PAM sequence: TGG
gaaattccagaagctggggg

SEQ ID NO: 135134 - DNA, 20 bp, Artificial Sequence
  Description of Artificial Sequence: Synthetic oligonucleotide
  Target: LAMA2; (+) strand; PAM type: NRG; PAM sequence: GGG
aaattccagaagctgggggt

SEQ ID NO: 135135 - DNA, 20 bp, Artificial Sequence
  Description of Artificial Sequence: Synthetic oligonucleotide
  Target: LAMA2; (+) strand; PAM type: NRG; PAM sequence: GGG
aattccagaagctgggggtg

SEQ ID NO: 135136 - DNA, 20 bp, Artificial Sequence
  Description of Artificial Sequence: Synthetic oligonucleotide
  Target: LAMA2; (+) strand; PAM type: NRG; PAM sequence: GGG
attccagaagctgggggtgg

SEQ ID NO: 135137 - DNA, 20 bp, Artificial Sequence
  Description of Artificial Sequence: Synthetic oligonucleotide
  Target: LAMA2; (+) strand; PAM type: NRG; PAM sequence: GGG
ttccagaagctgggggtggg

SEQ ID NO: 135138 - DNA, 20 bp, Artificial Sequence
  Description of Artificial Sequence: Synthetic oligonucleotide
  Target: LAMA2; (+) strand; PAM type: NRG; PAM sequence: TAG
gaagctgggggtggggggaa

SEQ ID NO: 135139 - DNA, 20 bp, Artificial Sequence
  Description of Artificial Sequence: Synthetic oligonucleotide
  Target: LAMA2; (+) strand; PAM type: NRG; PAM sequence: TGG
tgggggtggggggaatagac

SEQ ID NO: 135140 - DNA, 20 bp, Artificial Sequence
  Description of Artificial Sequence: Synthetic oligonucleotide
  Target: LAMA2; (+) strand; PAM type: NRG; PAM sequence: CAG
ctggatattgcaaaatgcat

SEQ ID NO: 135141 - DNA, 20 bp, Artificial Sequence
  Description of Artificial Sequence: Synthetic oligonucleotide
  Target: LAMA2; (+) strand; PAM type: NRG; PAM sequence: TAG
atattgcaaaatgcatcagt

SEQ ID NO: 135142 - DNA, 20 bp, Artificial Sequence
  Description of Artificial Sequence: Synthetic oligonucleotide
  Target: LAMA2; (+) strand; PAM type: NRG; PAM sequence: TAG
accaaaccaacctaatccca

SEQ ID NO: 135143 - DNA, 20 bp, Artificial Sequence
  Description of Artificial Sequence: Synthetic oligonucleotide
  Target: LAMA2; (+) strand; PAM type: NRG; PAM sequence: GAG
caaaccaacctaatcccata

SEQ ID NO: 135144 - DNA, 20 bp, Artificial Sequence
  Description of Artificial Sequence: Synthetic oligonucleotide
  Target: LAMA2; (+) strand; PAM type: NRG; PAM sequence: AAG
ctaatcccatagagaattca

SEQ ID NO: 135145 - DNA, 20 bp, Artificial Sequence
  Description of Artificial Sequence: Synthetic oligonucleotide
  Target: LAMA2; (+) strand; PAM type: NRG; PAM sequence: AAG
aattcaaagtgactcacgaa

SEQ ID NO: 135146 - DNA, 20 bp, Artificial Sequence
  Description of Artificial Sequence: Synthetic oligonucleotide
  Target: LAMA2; (+) strand; PAM type: NRG; PAM sequence: AAG
actcacgaaaagacacacaa

SEQ ID NO: 135147 - DNA, 20 bp, Artificial Sequence
  Description of Artificial Sequence: Synthetic oligonucleotide
  Target: LAMA2; (+) strand; PAM type: NRG; PAM sequence: AAG
cacgaaaagacacacaaaag

SEQ ID NO: 135148 - DNA, 20 bp, Artificial Sequence
  Description of Artificial Sequence: Synthetic oligonucleotide
  Target: LAMA2; (+) strand; PAM type: NRG; PAM sequence: AAG
aaatgttttgtttattttcc

SEQ ID NO: 135149 - DNA, 20 bp, Artificial Sequence
  Description of Artificial Sequence: Synthetic oligonucleotide
  Target: LAMA2; (+) strand; PAM type: NRG; PAM sequence: TGG
gttttgtttattttccaaga

SEQ ID NO: 135150 - DNA, 20 bp, Artificial Sequence
  Description of Artificial Sequence: Synthetic oligonucleotide
  Target: LAMA2; (+) strand; PAM type: NRG; PAM sequence: CAG
gatggaaaatgtaaactatc

SEQ ID NO: 135151 - DNA, 20 bp, Artificial Sequence
  Description of Artificial Sequence: Synthetic oligonucleotide
  Target: LAMA2; (+) strand; PAM type: NRG; PAM sequence: GAG
tggaaaatgtaaactatcca

SEQ ID NO: 135152 - DNA, 20 bp, Artificial Sequence
  Description of Artificial Sequence: Synthetic oligonucleotide
  Target: LAMA2; (+) strand; PAM type: NRG; PAM sequence: AGG
ggaaaatgtaaactatccag

SEQ ID NO: 135153 - DNA, 20 bp, Artificial Sequence
  Description of Artificial Sequence: Synthetic oligonucleotide
  Target: LAMA2; (+) strand; PAM type: NRG; PAM sequence: CAG
aatgtaaactatccagagga

SEQ ID NO: 135154 - DNA, 20 bp, Artificial Sequence
  Description of Artificial Sequence: Synthetic oligonucleotide
  Target: LAMA2; (+) strand; PAM type: NRG; PAM sequence: TGG
gtaaactatccagaggacag

SEQ ID NO: 135155 - DNA, 20 bp, Artificial Sequence
  Description of Artificial Sequence: Synthetic oligonucleotide
  Target: LAMA2; (+) strand; PAM type: NRG; PAM sequence: TGG
ctatccagaggacagtggta

SEQ ID NO: 135156 - DNA, 20 bp, Artificial Sequence
  Description of Artificial Sequence: Synthetic oligonucleotide
  Target: LAMA2; (+) strand; PAM type: NRG; PAM sequence: GGG
tatccagaggacagtggtat

SEQ ID NO: 135157 - DNA, 20 bp, Artificial Sequence
  Description of Artificial Sequence: Synthetic oligonucleotide
  Target: LAMA2; (+) strand; PAM type: NRG; PAM sequence: TAG
agaggacagtggtatgggtt

SEQ ID NO: 135158 - DNA, 20 bp, Artificial Sequence
  Description of Artificial Sequence: Synthetic oligonucleotide
  Target: LAMA2; (+) strand; PAM type: NRG; PAM sequence: AAG
gacagtggtatgggtttaga

SEQ ID NO: 135159 - DNA, 20 bp, Artificial Sequence
  Description of Artificial Sequence: Synthetic oligonucleotide
  Target: LAMA2; (+) strand; PAM type: NRG; PAM sequence: AAG
caattcacacaataaatttt

SEQ ID NO: 135160 - DNA, 20 bp, Artificial Sequence
  Description of Artificial Sequence: Synthetic oligonucleotide
  Target: LAMA2; (+) strand; PAM type: NRG; PAM sequence: AGG
aattcacacaataaatttta

SEQ ID NO: 135161 - DNA, 20 bp, Artificial Sequence
  Description of Artificial Sequence: Synthetic oligonucleotide
  Target: LAMA2; (+) strand; PAM type: NRG; PAM sequence: TGG
aataaattttaaggaaataa

SEQ ID NO: 135162 - DNA, 20 bp, Artificial Sequence
  Description of Artificial Sequence: Synthetic oligonucleotide
  Target: LAMA2; (+) strand; PAM type: NRG; PAM sequence: TAG
ttttaaggaaataatggttt

SEQ ID NO: 135163 - DNA, 20 bp, Artificial Sequence
  Description of Artificial Sequence: Synthetic oligonucleotide
  Target: LAMA2; (+) strand; PAM type: NRG; PAM sequence: TGG
tttgatgctaacattatttc

SEQ ID NO: 135164 - DNA, 20 bp, Artificial Sequence
  Description of Artificial Sequence: Synthetic oligonucleotide
  Target: LAMA2; (+) strand; PAM type: NRG; PAM sequence: GGG
ttgatgctaacattatttct

SEQ ID NO: 135165 - DNA, 20 bp, Artificial Sequence
  Description of Artificial Sequence: Synthetic oligonucleotide
  Target: LAMA2; (+) strand; PAM type: NRG; PAM sequence: AAG
aacattatttctgggcttcc

SEQ ID NO: 135166 - DNA, 20 bp, Artificial Sequence
  Description of Artificial Sequence: Synthetic oligonucleotide
  Target: LAMA2; (+) strand; PAM type: NRG; PAM sequence: TGG
gttatttttgttgtgttgtt

SEQ ID NO: 135167 - DNA, 20 bp, Artificial Sequence
  Description of Artificial Sequence: Synthetic oligonucleotide
  Target: LAMA2; (+) strand; PAM type: NRG; PAM sequence: TAG
tgttgtttggttttgtgttt

SEQ ID NO: 135168 - DNA, 20 bp, Artificial Sequence
  Description of Artificial Sequence: Synthetic oligonucleotide
  Target: LAMA2; (+) strand; PAM type: NRG; PAM sequence: AAG
gtctttttattttctgacaa

SEQ ID NO: 135169 - DNA, 20 bp, Artificial Sequence
  Description of Artificial Sequence: Synthetic oligonucleotide
  Target: LAMA2; (+) strand; PAM type: NRG; PAM sequence: AAG
ttttattttctgacaaaaga

SEQ ID NO: 135170 - DNA, 20 bp, Artificial Sequence
  Description of Artificial Sequence: Synthetic oligonucleotide
  Target: LAMA2; (+) strand; PAM type: NRG; PAM sequence: CAG
aagaaagtttgccatgtctc

SEQ ID NO: 135171 - DNA, 20 bp, Artificial Sequence
  Description of Artificial Sequence: Synthetic oligonucleotide
  Target: LAMA2; (+) strand; PAM type: NRG; PAM sequence: CAG
agtttgccatgtctccagaa

SEQ ID NO: 135172 - DNA, 20 bp, Artificial Sequence
  Description of Artificial Sequence: Synthetic oligonucleotide
  Target: LAMA2; (+) strand; PAM type: NRG; PAM sequence: AGG
gtttgccatgtctccagaac

SEQ ID NO: 135173 - DNA, 20 bp, Artificial Sequence
  Description of Artificial Sequence: Synthetic oligonucleotide
  Target: LAMA2; (+) strand; PAM type: NRG; PAM sequence: TGG
tcttttctttttttttgaaa

SEQ ID NO: 135174 - DNA, 20 bp, Artificial Sequence
  Description of Artificial Sequence: Synthetic oligonucleotide
  Target: LAMA2; (+) strand; PAM type: NRG; PAM sequence: GAG
ttttctttttttttgaaatg

SEQ ID NO: 135175 - DNA, 20 bp, Artificial Sequence
  Description of Artificial Sequence: Synthetic oligonucleotide
  Target: LAMA2; (+) strand; PAM type: NRG; PAM sequence: CAG
tggagtcttactctgttgcc

SEQ ID NO: 135176 - DNA, 20 bp, Artificial Sequence
  Description of Artificial Sequence: Synthetic oligonucleotide
  Target: LAMA2; (+) strand; PAM type: NRG; PAM sequence: AGG
ggagtcttactctgttgccc

SEQ ID NO: 135177 - DNA, 20 bp, Artificial Sequence
  Description of Artificial Sequence: Synthetic oligonucleotide
  Target: LAMA2; (+) strand; PAM type: NRG; PAM sequence: TGG
tcttactctgttgcccaggc

SEQ ID NO: 135178 - DNA, 20 bp, Artificial Sequence
  Description of Artificial Sequence: Synthetic oligonucleotide
  Target: LAMA2; (+) strand; PAM type: NRG; PAM sequence: GAG
ttactctgttgcccaggctg

SEQ ID NO: 135179 - DNA, 20 bp, Artificial Sequence
  Description of Artificial Sequence: Synthetic oligonucleotide
  Target: LAMA2; (+) strand; PAM type: NRG; PAM sequence: CAG
ctgttgcccaggctggagta

SEQ ID NO: 135180 - DNA, 20 bp, Artificial Sequence
  Description of Artificial Sequence: Synthetic oligonucleotide
  Target: LAMA2; (+) strand; PAM type: NRG; PAM sequence: TGG
ttgcccaggctggagtacag

SEQ ID NO: 135181 - DNA, 20 bp, Artificial Sequence
  Description of Artificial Sequence: Synthetic oligonucleotide
  Target: LAMA2; (+) strand; PAM type: NRG; PAM sequence: TGG
tctctgcaacctctacctcc

SEQ ID NO: 135182 - DNA, 20 bp, Artificial Sequence
  Description of Artificial Sequence: Synthetic oligonucleotide
  Target: LAMA2; (+) strand; PAM type: NRG; PAM sequence: GGG
ctctgcaacctctacctcct

SEQ ID NO: 135183 - DNA, 20 bp, Artificial Sequence
  Description of Artificial Sequence: Synthetic oligonucleotide
  Target: LAMA2; (+) strand; PAM type: NRG; PAM sequence: GAG
ttctcctgccttatcctccc

SEQ ID NO: 135184 - DNA, 20 bp, Artificial Sequence
  Description of Artificial Sequence: Synthetic oligonucleotide
  Target: LAMA2; (+) strand; PAM type: NRG; PAM sequence: TAG
tcctgccttatcctcccgag

SEQ ID NO: 135185 - DNA, 20 bp, Artificial Sequence
  Description of Artificial Sequence: Synthetic oligonucleotide
  Target: LAMA2; (+) strand; PAM type: NRG; PAM sequence: TGG
gccttatcctcccgagtagc

SEQ ID NO: 135186 - DNA, 20 bp, Artificial Sequence
  Description of Artificial Sequence: Synthetic oligonucleotide
  Target: LAMA2; (+) strand; PAM type: NRG; PAM sequence: GGG
ccttatcctcccgagtagct

SEQ ID NO: 135187 - DNA, 20 bp, Artificial Sequence
  Description of Artificial Sequence: Synthetic oligonucleotide
  Target: LAMA2; (+) strand; PAM type: NRG; PAM sequence: CAG
ctcccgagtagctgggatta

SEQ ID NO: 135188 - DNA, 20 bp, Artificial Sequence
  Description of Artificial Sequence: Synthetic oligonucleotide
  Target: LAMA2; (+) strand; PAM type: NRG; PAM sequence: AGG
tcccgagtagctgggattac

SEQ ID NO: 135189 - DNA, 20 bp, Artificial Sequence
  Description of Artificial Sequence: Synthetic oligonucleotide
  Target: LAMA2; (+) strand; PAM type: NRG; PAM sequence: TGG
caggcatacactaccatgcc

SEQ ID NO: 135190 - DNA, 20 bp, Artificial Sequence
  Description of Artificial Sequence: Synthetic oligonucleotide
  Target: LAMA2; (+) strand; PAM type: NRG; PAM sequence: TAG
ctggccaatttttgtatttt

SEQ ID NO: 135191 - DNA, 20 bp, Artificial Sequence
  Description of Artificial Sequence: Synthetic oligonucleotide
  Target: LAMA2; (+) strand; PAM type: NRG; PAM sequence: TAG
gccaatttttgtatttttag

SEQ ID NO: 135192 - DNA, 20 bp, Artificial Sequence
  Description of Artificial Sequence: Synthetic oligonucleotide
  Target: LAMA2; (+) strand; PAM type: NRG; PAM sequence: GAG
caatttttgtatttttagta

SEQ ID NO: 135193 - DNA, 20 bp, Artificial Sequence
  Description of Artificial Sequence: Synthetic oligonucleotide
  Target: LAMA2; (+) strand; PAM type: NRG; PAM sequence: CAG
ttttgtatttttagtagaga

SEQ ID NO: 135194 - DNA, 20 bp, Artificial Sequence
  Description of Artificial Sequence: Synthetic oligonucleotide
  Target: LAMA2; (+) strand; PAM type: NRG; PAM sequence: AGG
tttgtatttttagtagagac

SEQ ID NO: 135195 - DNA, 20 bp, Artificial Sequence
  Description of Artificial Sequence: Synthetic oligonucleotide
  Target: LAMA2; (+) strand; PAM type: NRG; PAM sequence: GGG
ttgtatttttagtagagaca

SEQ ID NO: 135196 - DNA, 20 bp, Artificial Sequence
  Description of Artificial Sequence: Synthetic oligonucleotide
  Target: LAMA2; (+) strand; PAM type: NRG; PAM sequence: TGG
tttttagtagagacagggtt

SEQ ID NO: 135197 - DNA, 20 bp, Artificial Sequence
  Description of Artificial Sequence: Synthetic oligonucleotide
  Target: LAMA2; (+) strand; PAM type: NRG; PAM sequence: TGG
gagacagggtttggccatgt

SEQ ID NO: 135198 - DNA, 20 bp, Artificial Sequence
  Description of Artificial Sequence: Synthetic oligonucleotide
  Target: LAMA2; (+) strand; PAM type: NRG; PAM sequence: CAG
cagggtttggccatgttggc

SEQ ID NO: 135199 - DNA, 20 bp, Artificial Sequence
  Description of Artificial Sequence: Synthetic oligonucleotide
  Target: LAMA2; (+) strand; PAM type: NRG; PAM sequence: AGG
agggtttggccatgttggcc

SEQ ID NO: 135200 - DNA, 20 bp, Artificial Sequence
  Description of Artificial Sequence: Synthetic oligonucleotide
  Target: LAMA2; (+) strand; PAM type: NRG; PAM sequence: TGG
tttggccatgttggccaggc

SEQ ID NO: 135201 - DNA, 20 bp, Artificial Sequence
  Description of Artificial Sequence: Synthetic oligonucleotide
  Target: LAMA2; (+) strand; PAM type: NRG; PAM sequence: CAG
gctggtcttgaactcctact

SEQ ID NO: 135202 - DNA, 20 bp, Artificial Sequence
  Description of Artificial Sequence: Synthetic oligonucleotide
  Target: LAMA2; (+) strand; PAM type: NRG; PAM sequence: AGG
ctggtcttgaactcctactc

SEQ ID NO: 135203 - DNA, 20 bp, Artificial Sequence
  Description of Artificial Sequence: Synthetic oligonucleotide
  Target: LAMA2; (+) strand; PAM type: NRG; PAM sequence: CGG
ctcaggtgatcctcctgcct

SEQ ID NO: 135204 - DNA, 20 bp, Artificial Sequence
  Description of Artificial Sequence: Synthetic oligonucleotide
  Target: LAMA2; (+) strand; PAM type: NRG; PAM sequence: AAG
cctcctgcctcggcctccca

SEQ ID NO: 135205 - DNA, 20 bp, Artificial Sequence
  Description of Artificial Sequence: Synthetic oligonucleotide
  Target: LAMA2; (+) strand; PAM type: NRG; PAM sequence: TGG
gcctcggcctcccaaagtgc

SEQ ID NO: 135206 - DNA, 20 bp, Artificial Sequence
  Description of Artificial Sequence: Synthetic oligonucleotide
  Target: LAMA2; (+) strand; PAM type: NRG; PAM sequence: GGG
cctcggcctcccaaagtgct

SEQ ID NO: 135207 - DNA, 20 bp, Artificial Sequence
  Description of Artificial Sequence: Synthetic oligonucleotide
  Target: LAMA2; (+) strand; PAM type: NRG; PAM sequence: CAG
ctcccaaagtgctgggatta

SEQ ID NO: 135208 - DNA, 20 bp, Artificial Sequence
  Description of Artificial Sequence: Synthetic oligonucleotide
  Target: LAMA2; (+) strand; PAM type: NRG; PAM sequence: AGG
tcccaaagtgctgggattac

SEQ ID NO: 135209 - DNA, 20 bp, Artificial Sequence
  Description of Artificial Sequence: Synthetic oligonucleotide
  Target: LAMA2; (+) strand; PAM type: NRG; PAM sequence: GAG
agtgctgggattacaggcgt

SEQ ID NO: 135210 - DNA, 20 bp, Artificial Sequence
  Description of Artificial Sequence: Synthetic oligonucleotide
  Target: LAMA2; (+) strand; PAM type: NRG; PAM sequence: CAG
ggattacaggcgtgagccac

SEQ ID NO: 135211 - DNA, 20 bp, Artificial Sequence
  Description of Artificial Sequence: Synthetic oligonucleotide
  Target: LAMA2; (+) strand; PAM type: NRG; PAM sequence: AGG
gattacaggcgtgagccacc

SEQ ID NO: 135212 - DNA, 20 bp, Artificial Sequence
  Description of Artificial Sequence: Synthetic oligonucleotide
  Target: LAMA2; (+) strand; PAM type: NRG; PAM sequence: TGG
ctctgatatgaatttcttat

SEQ ID NO: 135213 - DNA, 20 bp, Artificial Sequence
  Description of Artificial Sequence: Synthetic oligonucleotide
  Target: LAMA2; (+) strand; PAM type: NRG; PAM sequence: GAG
ctgatatgaatttcttattg

SEQ ID NO: 135214 - DNA, 20 bp, Artificial Sequence
  Description of Artificial Sequence: Synthetic oligonucleotide
  Target: LAMA2; (+) strand; PAM type: NRG; PAM sequence: CAG
ggagaatccctttatgtgtc

SEQ ID NO: 135215 - DNA, 20 bp, Artificial Sequence
  Description of Artificial Sequence: Synthetic oligonucleotide
  Target: LAMA2; (+) strand; PAM type: NRG; PAM sequence: TGG
cctttatgtgtccagccctg

SEQ ID NO: 135216 - DNA, 20 bp, Artificial Sequence
  Description of Artificial Sequence: Synthetic oligonucleotide
  Target: LAMA2; (+) strand; PAM type: NRG; PAM sequence: TAG
ttatgtgtccagccctgtgg

SEQ ID NO: 135217 - DNA, 20 bp, Artificial Sequence
  Description of Artificial Sequence: Synthetic oligonucleotide
  Target: LAMA2; (+) strand; PAM type: NRG; PAM sequence: AGG
tatgtgtccagccctgtggt

SEQ ID NO: 135218 - DNA, 20 bp, Artificial Sequence
  Description of Artificial Sequence: Synthetic oligonucleotide
  Target: LAMA2; (+) strand; PAM type: NRG; PAM sequence: GAG
ccagccctgtggtaggctct

SEQ ID NO: 135219 - DNA, 20 bp, Artificial Sequence
  Description of Artificial Sequence: Synthetic oligonucleotide
  Target: LAMA2; (+) strand; PAM type: NRG; PAM sequence: TAG
tgtggtaggctctgagaata

SEQ ID NO: 135220 - DNA, 20 bp, Artificial Sequence
  Description of Artificial Sequence: Synthetic oligonucleotide
  Target: LAMA2; (+) strand; PAM type: NRG; PAM sequence: AAG
ctgagaatatagtaatgaac

SEQ ID NO: 135221 - DNA, 20 bp, Artificial Sequence
  Description of Artificial Sequence: Synthetic oligonucleotide
  Target: LAMA2; (+) strand; PAM type: NRG; PAM sequence: AGG
tgagaatatagtaatgaaca

SEQ ID NO: 135222 - DNA, 20 bp, Artificial Sequence
  Description of Artificial Sequence: Synthetic oligonucleotide
  Target: LAMA2; (+) strand; PAM type: NRG; PAM sequence: TAG
caaggtaaacaaaacataca

SEQ ID NO: 135223 - DNA, 20 bp, Artificial Sequence
  Description of Artificial Sequence: Synthetic oligonucleotide
  Target: LAMA2; (+) strand; PAM type: NRG; PAM sequence: AAG
acatagtctctcccatcatg

SEQ ID NO: 135224 - DNA, 20 bp, Artificial Sequence
  Description of Artificial Sequence: Synthetic oligonucleotide
  Target: LAMA2; (+) strand; PAM type: NRG; PAM sequence: CAG
ccatcatgaagcttacgttc

SEQ ID NO: 135225 - DNA, 20 bp, Artificial Sequence
  Description of Artificial Sequence: Synthetic oligonucleotide
  Target: LAMA2; (+) strand; PAM type: NRG; PAM sequence: AAG
catgaagcttacgttccagc

SEQ ID NO: 135226 - DNA, 20 bp, Artificial Sequence
  Description of Artificial Sequence: Synthetic oligonucleotide
  Target: LAMA2; (+) strand; PAM type: NRG; PAM sequence: AGG
atgaagcttacgttccagca

SEQ ID NO: 135227 - DNA, 20 bp, Artificial Sequence
  Description of Artificial Sequence: Synthetic oligonucleotide
  Target: LAMA2; (+) strand; PAM type: NRG; PAM sequence: AAG
aagcttacgttccagcaagg

SEQ ID NO: 135228 - DNA, 20 bp, Artificial Sequence
  Description of Artificial Sequence: Synthetic oligonucleotide
  Target: LAMA2; (+) strand; PAM type: NRG; PAM sequence: TAG
ttacgttccagcaaggaagc

SEQ ID NO: 135229 - DNA, 20 bp, Artificial Sequence
  Description of Artificial Sequence: Synthetic oligonucleotide
  Target: LAMA2; (+) strand; PAM type: NRG; PAM sequence: TAG
caaggaagctagaccttcaa

SEQ ID NO: 135230 - DNA, 20 bp, Artificial Sequence
  Description of Artificial Sequence: Synthetic oligonucleotide
  Target: LAMA2; (+) strand; PAM type: NRG; PAM sequence: CAG
ttaaaattataccttgtaat

SEQ ID NO: 135231 - DNA, 20 bp, Artificial Sequence
  Description of Artificial Sequence: Synthetic oligonucleotide
  Target: LAMA2; (+) strand; PAM type: NRG; PAM sequence: AAG
ccttgtaatcagtgctatgc

SEQ ID NO: 135232 - DNA, 20 bp, Artificial Sequence
  Description of Artificial Sequence: Synthetic oligonucleotide
  Target: LAMA2; (+) strand; PAM type: NRG; PAM sequence: AAG
cagtgctatgcaagaaaaat

SEQ ID NO: 135233 - DNA, 20 bp, Artificial Sequence
  Description of Artificial Sequence: Synthetic oligonucleotide
  Target: LAMA2; (+) strand; PAM type: NRG; PAM sequence: AGG
agtgctatgcaagaaaaata

SEQ ID NO: 135234 - DNA, 20 bp, Artificial Sequence
  Description of Artificial Sequence: Synthetic oligonucleotide
  Target: LAMA2; (+) strand; PAM type: NRG; PAM sequence: CAG
gctatgcaagaaaaataagg

SEQ ID NO: 135235 - DNA, 20 bp, Artificial Sequence
  Description of Artificial Sequence: Synthetic oligonucleotide
  Target: LAMA2; (+) strand; PAM type: NRG; PAM sequence: TAG
caagaaaaataaggcagaat

SEQ ID NO: 135236 - DNA, 20 bp, Artificial Sequence
  Description of Artificial Sequence: Synthetic oligonucleotide
  Target: LAMA2; (+) strand; PAM type: NRG; PAM sequence: AGG
aagaaaaataaggcagaatt

SEQ ID NO: 135237 - DNA, 20 bp, Artificial Sequence
  Description of Artificial Sequence: Synthetic oligonucleotide
  Target: LAMA2; (+) strand; PAM type: NRG; PAM sequence: GGG
agaaaaataaggcagaatta

SEQ ID NO: 135238 - DNA, 20 bp, Artificial Sequence
  Description of Artificial Sequence: Synthetic oligonucleotide
  Target: LAMA2; (+) strand; PAM type: NRG; PAM sequence: GGG
gaaaaataaggcagaattag

SEQ ID NO: 135239 - DNA, 20 bp, Artificial Sequence
  Description of Artificial Sequence: Synthetic oligonucleotide
  Target: LAMA2; (+) strand; PAM type: NRG; PAM sequence: AAG
cagaattaggggctgtaatg

SEQ ID NO: 135240 - DNA, 20 bp, Artificial Sequence
  Description of Artificial Sequence: Synthetic oligonucleotide
  Target: LAMA2; (+) strand; PAM type: NRG; PAM sequence: AGG
agaattaggggctgtaatga

SEQ ID NO: 135241 - DNA, 20 bp, Artificial Sequence
  Description of Artificial Sequence: Synthetic oligonucleotide
  Target: LAMA2; (+) strand; PAM type: NRG; PAM sequence: AAG
taatgaaggacctgtttaca

SEQ ID NO: 135242 - DNA, 20 bp, Artificial Sequence
  Description of Artificial Sequence: Synthetic oligonucleotide
  Target: LAMA2; (+) strand; PAM type: NRG; PAM sequence: TAG
aggacctgtttacaaagcat

SEQ ID NO: 135243 - DNA, 20 bp, Artificial Sequence
  Description of Artificial Sequence: Synthetic oligonucleotide
  Target: LAMA2; (+) strand; PAM type: NRG; PAM sequence: AGG
ggacctgtttacaaagcatt

SEQ ID NO: 135244 - DNA, 20 bp, Artificial Sequence
  Description of Artificial Sequence: Synthetic oligonucleotide
  Target: LAMA2; (+) strand; PAM type: NRG; PAM sequence: AAG
ctgtttacaaagcattagga

SEQ ID NO: 135245 - DNA, 20 bp, Artificial Sequence
  Description of Artificial Sequence: Synthetic oligonucleotide
  Target: LAMA2; (+) strand; PAM type: NRG; PAM sequence: TGG
aagcattaggaaagccctca

SEQ ID NO: 135246 - DNA, 20 bp, Artificial Sequence
  Description of Artificial Sequence: Synthetic oligonucleotide
  Target: LAMA2; (+) strand; PAM type: NRG; PAM sequence: GAG
gcattaggaaagccctcatg

SEQ ID NO: 135247 - DNA, 20 bp, Artificial Sequence
  Description of Artificial Sequence: Synthetic oligonucleotide
  Target: LAMA2; (+) strand; PAM type: NRG; PAM sequence: AGG
cattaggaaagccctcatgg

SEQ ID NO: 135248 - DNA, 20 bp, Artificial Sequence
  Description of Artificial Sequence: Synthetic oligonucleotide
  Target: LAMA2; (+) strand; PAM type: NRG; PAM sequence: AAG
aaagccctcatggaggaaat

SEQ ID NO: 135249 - DNA, 20 bp, Artificial Sequence
  Description of Artificial Sequence: Synthetic oligonucleotide
  Target: LAMA2; (+) strand; PAM type: NRG; PAM sequence: AAG
cctcatggaggaaataagac

SEQ ID NO: 135250 - DNA, 20 bp, Artificial Sequence
  Description of Artificial Sequence: Synthetic oligonucleotide
  Target: LAMA2; (+) strand; PAM type: NRG; PAM sequence: AGG
ctcatggaggaaataagaca

SEQ ID NO: 135251 - DNA, 20 bp, Artificial Sequence
  Description of Artificial Sequence: Synthetic oligonucleotide
  Target: LAMA2; (+) strand; PAM type: NRG; PAM sequence: AAG
atggaggaaataagacaagg

SEQ ID NO: 135252 - DNA, 20 bp, Artificial Sequence
  Description of Artificial Sequence: Synthetic oligonucleotide
  Target: LAMA2; (+) strand; PAM type: NRG; PAM sequence: TAG
gaagaaacacttgtgaacaa

SEQ ID NO: 135253 - DNA, 20 bp, Artificial Sequence
  Description of Artificial Sequence: Synthetic oligonucleotide
  Target: LAMA2; (+) strand; PAM type: NRG; PAM sequence: AGG
aagaaacacttgtgaacaat

SEQ ID NO: 135254 - DNA, 20 bp, Artificial Sequence
  Description of Artificial Sequence: Synthetic oligonucleotide
  Target: LAMA2; (+) strand; PAM type: NRG; PAM sequence: AAG
aaacacttgtgaacaatagg

SEQ ID NO: 135255 - DNA, 20 bp, Artificial Sequence
  Description of Artificial Sequence: Synthetic oligonucleotide
  Target: LAMA2; (+) strand; PAM type: NRG; PAM sequence: AGG
aacacttgtgaacaatagga

SEQ ID NO: 135256 - DNA, 20 bp, Artificial Sequence
  Description of Artificial Sequence: Synthetic oligonucleotide
  Target: LAMA2; (+) strand; PAM type: NRG; PAM sequence: AAG
gaacaataggaaggtatgtg

SEQ ID NO: 135257 - DNA, 20 bp, Artificial Sequence
  Description of Artificial Sequence: Synthetic oligonucleotide
  Target: LAMA2; (+) strand; PAM type: NRG; PAM sequence: AAG
ataggaaggtatgtgaagtg

SEQ ID NO: 135258 - DNA, 20 bp, Artificial Sequence
  Description of Artificial Sequence: Synthetic oligonucleotide
  Target: LAMA2; (+) strand; PAM type: NRG; PAM sequence: AGG
taggaaggtatgtgaagtga

SEQ ID NO: 135259 - DNA, 20 bp, Artificial Sequence
  Description of Artificial Sequence: Synthetic oligonucleotide
  Target: LAMA2; (+) strand; PAM type: NRG; PAM sequence: GAG
ggaaggtatgtgaagtgaag

SEQ ID NO: 135260 - DNA, 20 bp, Artificial Sequence
  Description of Artificial Sequence: Synthetic oligonucleotide
  Target: LAMA2; (+) strand; PAM type: NRG; PAM sequence: AAG
atgtgaagtgaaggagcgtt

SEQ ID NO: 135261 - DNA, 20 bp, Artificial Sequence
  Description of Artificial Sequence: Synthetic oligonucleotide
  Target: LAMA2; (+) strand; PAM type: NRG; PAM sequence: AGG
tgtgaagtgaaggagcgtta

SEQ ID NO: 135262 - DNA, 20 bp, Artificial Sequence
  Description of Artificial Sequence: Synthetic oligonucleotide
  Target: LAMA2; (+) strand; PAM type: NRG; PAM sequence: CAG
agtgaaggagcgttaaggaa

SEQ ID NO: 135263 - DNA, 20 bp, Artificial Sequence
  Description of Artificial Sequence: Synthetic oligonucleotide
  Target: LAMA2; (+) strand; PAM type: NRG; PAM sequence: GAG
tgaaggagcgttaaggaaca

SEQ ID NO: 135264 - DNA, 20 bp, Artificial Sequence
  Description of Artificial Sequence: Synthetic oligonucleotide
  Target: LAMA2; (+) strand; PAM type: NRG; PAM sequence: TAG
cgttaaggaacagagatttc

SEQ ID NO: 135265 - DNA, 20 bp, Artificial Sequence
  Description of Artificial Sequence: Synthetic oligonucleotide
  Target: LAMA2; (+) strand; PAM type: NRG; PAM sequence: AAG
aggaacagagatttctagac

SEQ ID NO: 135266 - DNA, 20 bp, Artificial Sequence
  Description of Artificial Sequence: Synthetic oligonucleotide
  Target: LAMA2; (+) strand; PAM type: NRG; PAM sequence: AAG
gagatttctagacaagccct

SEQ ID NO: 135267 - DNA, 20 bp, Artificial Sequence
  Description of Artificial Sequence: Synthetic oligonucleotide
  Target: LAMA2; (+) strand; PAM type: NRG; PAM sequence: AAG
tttctagacaagccctaagc

SEQ ID NO: 135268 - DNA, 20 bp, Artificial Sequence
  Description of Artificial Sequence: Synthetic oligonucleotide
  Target: LAMA2; (+) strand; PAM type: NRG; PAM sequence: AGG
ttctagacaagccctaagca

SEQ ID NO: 135269 - DNA, 20 bp, Artificial Sequence
  Description of Artificial Sequence: Synthetic oligonucleotide
  Target: LAMA2; (+) strand; PAM type: NRG; PAM sequence: AAG
acaagccctaagcaaggaaa

SEQ ID NO: 135270 - DNA, 20 bp, Artificial Sequence
  Description of Artificial Sequence: Synthetic oligonucleotide
  Target: LAMA2; (+) strand; PAM type: NRG; PAM sequence: CAG
agccctaagcaaggaaaaag

SEQ ID NO: 135271 - DNA, 20 bp, Artificial Sequence
  Description of Artificial Sequence: Synthetic oligonucleotide
  Target: LAMA2; (+) strand; PAM type: NRG; PAM sequence: GAG
ccctaagcaaggaaaaagca

SEQ ID NO: 135272 - DNA, 20 bp, Artificial Sequence
  Description of Artificial Sequence: Synthetic oligonucleotide
  Target: LAMA2; (+) strand; PAM type: NRG; PAM sequence: TAG
gaaaaagcagagctttattc

SEQ ID NO: 135273 - DNA, 20 bp, Artificial Sequence
  Description of Artificial Sequence: Synthetic oligonucleotide
  Target: LAMA2; (+) strand; PAM type: NRG; PAM sequence: CGG
gcagagctttattctagaat

SEQ ID NO: 135274 - DNA, 20 bp, Artificial Sequence
  Description of Artificial Sequence: Synthetic oligonucleotide
  Target: LAMA2; (+) strand; PAM type: NRG; PAM sequence: AAG
tttattctagaatcggacta

SEQ ID NO: 135275 - DNA, 20 bp, Artificial Sequence
  Description of Artificial Sequence: Synthetic oligonucleotide
  Target: LAMA2; (+) strand; PAM type: NRG; PAM sequence: AGG
ttattctagaatcggactaa

SEQ ID NO: 135276 - DNA, 20 bp, Artificial Sequence
  Description of Artificial Sequence: Synthetic oligonucleotide
  Target: LAMA2; (+) strand; PAM type: NRG; PAM sequence: CAG
ttctagaatcggactaaagg

SEQ ID NO: 135277 - DNA, 20 bp, Artificial Sequence
  Description of Artificial Sequence: Synthetic oligonucleotide
  Target: LAMA2; (+) strand; PAM type: NRG; PAM sequence: CAG
cagtattcgttgaatgtgat

SEQ ID NO: 135278 - DNA, 20 bp, Artificial Sequence
  Description of Artificial Sequence: Synthetic oligonucleotide
  Target: LAMA2; (+) strand; PAM type: NRG; PAM sequence: GAG
gtattcgttgaatgtgatca

SEQ ID NO: 135279 - DNA, 20 bp, Artificial Sequence
  Description of Artificial Sequence: Synthetic oligonucleotide
  Target: LAMA2; (+) strand; PAM type: NRG; PAM sequence: AGG
tattcgttgaatgtgatcag

SEQ ID NO: 135280 - DNA, 20 bp, Artificial Sequence
  Description of Artificial Sequence: Synthetic oligonucleotide
  Target: LAMA2; (+) strand; PAM type: NRG; PAM sequence: AAG
atgtgatcagaggacattgt

SEQ ID NO: 135281 - DNA, 20 bp, Artificial Sequence
  Description of Artificial Sequence: Synthetic oligonucleotide
  Target: LAMA2; (+) strand; PAM type: NRG; PAM sequence: CAG
gatcagaggacattgtaagc

SEQ ID NO: 135282 - DNA, 20 bp, Artificial Sequence
  Description of Artificial Sequence: Synthetic oligonucleotide
  Target: LAMA2; (+) strand; PAM type: NRG; PAM sequence: AGG
atcagaggacattgtaagcc

SEQ ID NO: 135283 - DNA, 20 bp, Artificial Sequence
  Description of Artificial Sequence: Synthetic oligonucleotide
  Target: LAMA2; (+) strand; PAM type: NRG; PAM sequence: TAG
aatcattttgaattttaacc

SEQ ID NO: 135284 - DNA, 20 bp, Artificial Sequence
  Description of Artificial Sequence: Synthetic oligonucleotide
  Target: LAMA2; (+) strand; PAM type: NRG; PAM sequence: AGG
atcattttgaattttaacct

SEQ ID NO: 135285 - DNA, 20 bp, Artificial Sequence
  Description of Artificial Sequence: Synthetic oligonucleotide
  Target: LAMA2; (+) strand; PAM type: NRG; PAM sequence: AAG
tacaattatgatctattttt

SEQ ID NO: 135286 - DNA, 20 bp, Artificial Sequence
  Description of Artificial Sequence: Synthetic oligonucleotide
  Target: LAMA2; (+) strand; PAM type: NRG; PAM sequence: AAG
aattatgatctatttttaag

SEQ ID NO: 135287 - DNA, 20 bp, Artificial Sequence
  Description of Artificial Sequence: Synthetic oligonucleotide
  Target: LAMA2; (+) strand; PAM type: NRG; PAM sequence: CAG
tttaagaagactgacttgat

SEQ ID NO: 135288 - DNA, 20 bp, Artificial Sequence
  Description of Artificial Sequence: Synthetic oligonucleotide
  Target: LAMA2; (+) strand; PAM type: NRG; PAM sequence: AAG
cttgatcagatttgaatctt

SEQ ID NO: 135289 - DNA, 20 bp, Artificial Sequence
  Description of Artificial Sequence: Synthetic oligonucleotide
  Target: LAMA2; (+) strand; PAM type: NRG; PAM sequence: AAG
gaaaactcattatgtaaaaa

SEQ ID NO: 135290 - DNA, 20 bp, Artificial Sequence
  Description of Artificial Sequence: Synthetic oligonucleotide
  Target: LAMA2; (+) strand; PAM type: NRG; PAM sequence: AGG
aaaactcattatgtaaaaaa

SEQ ID NO: 135291 - DNA, 20 bp, Artificial Sequence
  Description of Artificial Sequence: Synthetic oligonucleotide
  Target: LAMA2; (+) strand; PAM type: NRG; PAM sequence: GGG
aaactcattatgtaaaaaaa

SEQ ID NO: 135292 - DNA, 20 bp, Artificial Sequence
  Description of Artificial Sequence: Synthetic oligonucleotide
  Target: LAMA2; (+) strand; PAM type: NRG; PAM sequence: AAG
attatgtaaaaaaagggcta

SEQ ID NO: 135293 - DNA, 20 bp, Artificial Sequence
  Description of Artificial Sequence: Synthetic oligonucleotide
  Target: LAMA2; (+) strand; PAM type: NRG; PAM sequence: AAG
tgtaaaaaaagggctaaaga

SEQ ID NO: 135294 - DNA, 20 bp, Artificial Sequence
  Description of Artificial Sequence: Synthetic oligonucleotide
  Target: LAMA2; (+) strand; PAM type: NRG; PAM sequence: AGG
gtaaaaaaagggctaaagaa

SEQ ID NO: 135295 - DNA, 20 bp, Artificial Sequence
  Description of Artificial Sequence: Synthetic oligonucleotide
  Target: LAMA2; (+) strand; PAM type: NRG; PAM sequence: AAG
aaaagggctaaagaaaggat

SEQ ID NO: 135296 - DNA, 20 bp, Artificial Sequence
  Description of Artificial Sequence: Synthetic oligonucleotide
  Target: LAMA2; (+) strand; PAM type: NRG; PAM sequence: AGG
aaagggctaaagaaaggata

SEQ ID NO: 135297 - DNA, 20 bp, Artificial Sequence
  Description of Artificial Sequence: Synthetic oligonucleotide
  Target: LAMA2; (+) strand; PAM type: NRG; PAM sequence: GGG
aagggctaaagaaaggataa

SEQ ID NO: 135298 - DNA, 20 bp, Artificial Sequence
  Description of Artificial Sequence: Synthetic oligonucleotide
  Target: LAMA2; (+) strand; PAM type: NRG; PAM sequence: TAG
ggctaaagaaaggataaggg

SEQ ID NO: 135299 - DNA, 20 bp, Artificial Sequence
  Description of Artificial Sequence: Synthetic oligonucleotide
  Target: LAMA2; (+) strand; PAM type: NRG; PAM sequence: CAG
aaagaaaggataagggtagt

SEQ ID NO: 135300 - DNA, 20 bp, Artificial Sequence
  Description of Artificial Sequence: Synthetic oligonucleotide
  Target: LAMA2; (+) strand; PAM type: NRG; PAM sequence: CAG
gaaaggataagggtagtcag

SEQ ID NO: 135301 - DNA, 20 bp, Artificial Sequence
  Description of Artificial Sequence: Synthetic oligonucleotide
  Target: LAMA2; (+) strand; PAM type: NRG; PAM sequence: AGG
aaaggataagggtagtcagc

SEQ ID NO: 135302 - DNA, 20 bp, Artificial Sequence
  Description of Artificial Sequence: Synthetic oligonucleotide
  Target: LAMA2; (+) strand; PAM type: NRG; PAM sequence: CAG
agggtagtcagcaggccatt

SEQ ID NO: 135303 - DNA, 20 bp, Artificial Sequence
  Description of Artificial Sequence: Synthetic oligonucleotide
  Target: LAMA2; (+) strand; PAM type: NRG; PAM sequence: AGG
gggtagtcagcaggccattc

SEQ ID NO: 135304 - DNA, 20 bp, Artificial Sequence
  Description of Artificial Sequence: Synthetic oligonucleotide
  Target: LAMA2; (+) strand; PAM type: NRG; PAM sequence: GAG
gtagtcagcaggccattcag

SEQ ID NO: 135305 - DNA, 20 bp, Artificial Sequence
  Description of Artificial Sequence: Synthetic oligonucleotide
  Target: LAMA2; (+) strand; PAM type: NRG; PAM sequence: AGG
tagtcagcaggccattcagg

SEQ ID NO: 135306 - DNA, 20 bp, Artificial Sequence
  Description of Artificial Sequence: Synthetic oligonucleotide
  Target: LAMA2; (+) strand; PAM type: NRG; PAM sequence: CAG
ggccattcaggaggctattg

SEQ ID NO: 135307 - DNA, 20 bp, Artificial Sequence
  Description of Artificial Sequence: Synthetic oligonucleotide
  Target: LAMA2; (+) strand; PAM type: NRG; PAM sequence: CAG
aggaggctattgcagatgtc

SEQ ID NO: 135308 - DNA, 20 bp, Artificial Sequence
  Description of Artificial Sequence: Synthetic oligonucleotide
  Target: LAMA2; (+) strand; PAM type: NRG; PAM sequence: TGG
tgttacaaatgcttgtgact

SEQ ID NO: 135309 - DNA, 20 bp, Artificial Sequence
  Description of Artificial Sequence: Synthetic oligonucleotide
  Target: LAMA2; (+) strand; PAM type: NRG; PAM sequence: AAG
aatgcttgtgacttggcccc

SEQ ID NO: 135310 - DNA, 20 bp, Artificial Sequence
  Description of Artificial Sequence: Synthetic oligonucleotide
  Target: LAMA2; (+) strand; PAM type: NRG; PAM sequence: TGG
tgtgacttggccccaagtat

SEQ ID NO: 135311 - DNA, 20 bp, Artificial Sequence
  Description of Artificial Sequence: Synthetic oligonucleotide
  Target: LAMA2; (+) strand; PAM type: NRG; PAM sequence: TGG
ccaagtattggcaatgaccc

SEQ ID NO: 135312 - DNA, 20 bp, Artificial Sequence
  Description of Artificial Sequence: Synthetic oligonucleotide
  Target: LAMA2; (+) strand; PAM type: NRG; PAM sequence: GAG
aagtattggcaatgaccctg

SEQ ID NO: 135313 - DNA, 20 bp, Artificial Sequence
  Description of Artificial Sequence: Synthetic oligonucleotide
  Target: LAMA2; (+) strand; PAM type: NRG; PAM sequence: GAG
gtattggcaatgaccctgga

SEQ ID NO: 135314 - DNA, 20 bp, Artificial Sequence
  Description of Artificial Sequence: Synthetic oligonucleotide
  Target: LAMA2; (+) strand; PAM type: NRG; PAM sequence: AAG
ttggcaatgaccctggagag

SEQ ID NO: 135315 - DNA, 20 bp, Artificial Sequence
  Description of Artificial Sequence: Synthetic oligonucleotide
  Target: LAMA2; (+) strand; PAM type: NRG; PAM sequence: CAG
gcaatgaccctggagagaag

SEQ ID NO: 135316 - DNA, 20 bp, Artificial Sequence
  Description of Artificial Sequence: Synthetic oligonucleotide
  Target: LAMA2; (+) strand; PAM type: NRG; PAM sequence: TGG
tgaccctggagagaagcaga

SEQ ID NO: 135317 - DNA, 20 bp, Artificial Sequence
  Description of Artificial Sequence: Synthetic oligonucleotide
  Target: LAMA2; (+) strand; PAM type: NRG; PAM sequence: CGG
gatggatctgatatttattt

SEQ ID NO: 135318 - DNA, 20 bp, Artificial Sequence
  Description of Artificial Sequence: Synthetic oligonucleotide
  Target: LAMA2; (+) strand; PAM type: NRG; PAM sequence: GAG
tggatctgatatttatttcg

SEQ ID NO: 135319 - DNA, 20 bp, Artificial Sequence
  Description of Artificial Sequence: Synthetic oligonucleotide
  Target: LAMA2; (+) strand; PAM type: NRG; PAM sequence: TAG
tctgatatttatttcggagt

SEQ ID NO: 135320 - DNA, 20 bp, Artificial Sequence
  Description of Artificial Sequence: Synthetic oligonucleotide
  Target: LAMA2; (+) strand; PAM type: NRG; PAM sequence: TGG
cataatatgaaatgatgcaa

SEQ ID NO: 135321 - DNA, 20 bp, Artificial Sequence
  Description of Artificial Sequence: Synthetic oligonucleotide
  Target: LAMA2; (+) strand; PAM type: NRG; PAM sequence: CGG
atggcatcaataacgactcc

SEQ ID NO: 135322 - DNA, 20 bp, Artificial Sequence
  Description of Artificial Sequence: Synthetic oligonucleotide
  Target: LAMA2; (+) strand; PAM type: NRG; PAM sequence: GAG
cgactcccggttttctctat

SEQ ID NO: 135323 - DNA, 20 bp, Artificial Sequence
  Description of Artificial Sequence: Synthetic oligonucleotide
  Target: LAMA2; (+) strand; PAM type: NRG; PAM sequence: TGG
cggttttctctatgagacac

SEQ ID NO: 135324 - DNA, 20 bp, Artificial Sequence
  Description of Artificial Sequence: Synthetic oligonucleotide
  Target: LAMA2; (+) strand; PAM type: NRG; PAM sequence: GGG
ggttttctctatgagacact

SEQ ID NO: 135325 - DNA, 20 bp, Artificial Sequence
  Description of Artificial Sequence: Synthetic oligonucleotide
  Target: LAMA2; (+) strand; PAM type: NRG; PAM sequence: TGG
tttctctatgagacactggg

SEQ ID NO: 135326 - DNA, 20 bp, Artificial Sequence
  Description of Artificial Sequence: Synthetic oligonucleotide
  Target: LAMA2; (+) strand; PAM type: NRG; PAM sequence: GGG
ttctctatgagacactgggt

SEQ ID NO: 135327 - DNA, 20 bp, Artificial Sequence
  Description of Artificial Sequence: Synthetic oligonucleotide
  Target: LAMA2; (+) strand; PAM type: NRG; PAM sequence: AAG
agacactgggtgggtaaact

SEQ ID NO: 135328 - DNA, 20 bp, Artificial Sequence
  Description of Artificial Sequence: Synthetic oligonucleotide
  Target: LAMA2; (+) strand; PAM type: NRG; PAM sequence: GAG
tgggtaaactaagatgtgtt

SEQ ID NO: 135329 - DNA, 20 bp, Artificial Sequence
  Description of Artificial Sequence: Synthetic oligonucleotide
  Target: LAMA2; (+) strand; PAM type: NRG; PAM sequence: GAG
aactaagatgtgttgagctt

SEQ ID NO: 135330 - DNA, 20 bp, Artificial Sequence
  Description of Artificial Sequence: Synthetic oligonucleotide
  Target: LAMA2; (+) strand; PAM type: NRG; PAM sequence: GAG
ctaagatgtgttgagcttga

SEQ ID NO: 135331 - DNA, 20 bp, Artificial Sequence
  Description of Artificial Sequence: Synthetic oligonucleotide
  Target: LAMA2; (+) strand; PAM type: NRG; PAM sequence: CAG
gtgttgagcttgagagaatt

SEQ ID NO: 135332 - DNA, 20 bp, Artificial Sequence
  Description of Artificial Sequence: Synthetic oligonucleotide
  Target: LAMA2; (+) strand; PAM type: NRG; PAM sequence: AGG
tgttgagcttgagagaattc

SEQ ID NO: 135333 - DNA, 20 bp, Artificial Sequence
  Description of Artificial Sequence: Synthetic oligonucleotide
  Target: LAMA2; (+) strand; PAM type: NRG; PAM sequence: GAG
ttgagcttgagagaattcag

SEQ ID NO: 135334 - DNA, 20 bp, Artificial Sequence
  Description of Artificial Sequence: Synthetic oligonucleotide
  Target: LAMA2; (+) strand; PAM type: NRG; PAM sequence: TAG
agcttgagagaattcaggag

SEQ ID NO: 135335 - DNA, 20 bp, Artificial Sequence
  Description of Artificial Sequence: Synthetic oligonucleotide
  Target: LAMA2; (+) strand; PAM type: NRG; PAM sequence: TGG
aattcaggagtagctaaatc

SEQ ID NO: 135336 - DNA, 20 bp, Artificial Sequence
  Description of Artificial Sequence: Synthetic oligonucleotide
  Target: LAMA2; (+) strand; PAM type: NRG; PAM sequence: GGG
attcaggagtagctaaatct

SEQ ID NO: 135337 - DNA, 20 bp, Artificial Sequence
  Description of Artificial Sequence: Synthetic oligonucleotide
  Target: LAMA2; (+) strand; PAM type: NRG; PAM sequence: CGG
gctaaatctgggtgtccctt

SEQ ID NO: 135338 - DNA, 20 bp, Artificial Sequence
  Description of Artificial Sequence: Synthetic oligonucleotide
  Target: LAMA2; (+) strand; PAM type: NRG; PAM sequence: GGG
ctaaatctgggtgtcccttc

SEQ ID NO: 135339 - DNA, 20 bp, Artificial Sequence
  Description of Artificial Sequence: Synthetic oligonucleotide
  Target: LAMA2; (+) strand; PAM type: NRG; PAM sequence: TGG
aatctgggtgtcccttcggg

SEQ ID NO: 135340 - DNA, 20 bp, Artificial Sequence
  Description of Artificial Sequence: Synthetic oligonucleotide
  Target: LAMA2; (+) strand; PAM type: NRG; PAM sequence: GGG
atctgggtgtcccttcgggt

SEQ ID NO: 135341 - DNA, 20 bp, Artificial Sequence
  Description of Artificial Sequence: Synthetic oligonucleotide
  Target: LAMA2; (+) strand; PAM type: NRG; PAM sequence: GGG
tctgggtgtcccttcgggtg

SEQ ID NO: 135342 - DNA, 20 bp, Artificial Sequence
  Description of Artificial Sequence: Synthetic oligonucleotide
  Target: LAMA2; (+) strand; PAM type: NRG; PAM sequence: TAG
gtgtcccttcgggtggggat

SEQ ID NO: 135343 - DNA, 20 bp, Artificial Sequence
  Description of Artificial Sequence: Synthetic oligonucleotide
  Target: LAMA2; (+) strand; PAM type: NRG; PAM sequence: TGG
gaaaaccacgaactctactt

SEQ ID NO: 135344 - DNA, 20 bp, Artificial Sequence
  Description of Artificial Sequence: Synthetic oligonucleotide
  Target: LAMA2; (+) strand; PAM type: NRG; PAM sequence: GAG
aaaccacgaactctactttg

SEQ ID NO: 135345 - DNA, 20 bp, Artificial Sequence
  Description of Artificial Sequence: Synthetic oligonucleotide
  Target: LAMA2; (+) strand; PAM type: NRG; PAM sequence: GAG
accacgaactctactttgga

SEQ ID NO: 135346 - DNA, 20 bp, Artificial Sequence
  Description of Artificial Sequence: Synthetic oligonucleotide
  Target: LAMA2; (+) strand; PAM type: NRG; PAM sequence: GAG
attaaatttgtgatgttcct

SEQ ID NO: 135347 - DNA, 20 bp, Artificial Sequence
  Description of Artificial Sequence: Synthetic oligonucleotide
  Target: LAMA2; (+) strand; PAM type: NRG; PAM sequence: TGG
tcctgagacgtctaaaaaaa

SEQ ID NO: 135348 - DNA, 20 bp, Artificial Sequence
  Description of Artificial Sequence: Synthetic oligonucleotide
  Target: LAMA2; (+) strand; PAM type: NRG; PAM sequence: GAG
ctgagacgtctaaaaaaatg

SEQ ID NO: 135349 - DNA, 20 bp, Artificial Sequence
  Description of Artificial Sequence: Synthetic oligonucleotide
  Target: LAMA2; (+) strand; PAM type: NRG; PAM sequence: CAG
taaaaaaatggagatttaac

SEQ ID NO: 135350 - DNA, 20 bp, Artificial Sequence
  Description of Artificial Sequence: Synthetic oligonucleotide
  Target: LAMA2; (+) strand; PAM type: NRG; PAM sequence: AGG
aaaaaaatggagatttaacc

SEQ ID NO: 135351 - DNA, 20 bp, Artificial Sequence
  Description of Artificial Sequence: Synthetic oligonucleotide
  Target: LAMA2; (+) strand; PAM type: NRG; PAM sequence: TGG
tggagatttaaccaggcatt

SEQ ID NO: 135352 - DNA, 20 bp, Artificial Sequence
  Description of Artificial Sequence: Synthetic oligonucleotide
  Target: LAMA2; (+) strand; PAM type: NRG; PAM sequence: TAG
taaccaggcatttggatata

SEQ ID NO: 135353 - DNA, 20 bp, Artificial Sequence
  Description of Artificial Sequence: Synthetic oligonucleotide
  Target: LAMA2; (+) strand; PAM type: NRG; PAM sequence: CAG
gatatatagctctatacttt

SEQ ID NO: 135354 - DNA, 20 bp, Artificial Sequence
  Description of Artificial Sequence: Synthetic oligonucleotide
  Target: LAMA2; (+) strand; PAM type: NRG; PAM sequence: AAG
tatagctctatactttcaga

SEQ ID NO: 135355 - DNA, 20 bp, Artificial Sequence
  Description of Artificial Sequence: Synthetic oligonucleotide
  Target: LAMA2; (+) strand; PAM type: NRG; PAM sequence: TGG
tatactttcagaaagatacc

SEQ ID NO: 135356 - DNA, 20 bp, Artificial Sequence
  Description of Artificial Sequence: Synthetic oligonucleotide
  Target: LAMA2; (+) strand; PAM type: NRG; PAM sequence: TGG
tttcagaaagatacctggtc

SEQ ID NO: 135357 - DNA, 20 bp, Artificial Sequence
  Description of Artificial Sequence: Synthetic oligonucleotide
  Target: LAMA2; (+) strand; PAM type: NRG; PAM sequence: GAG
tcagaaagatacctggtctg

SEQ ID NO: 135358 - DNA, 20 bp, Artificial Sequence
  Description of Artificial Sequence: Synthetic oligonucleotide
  Target: LAMA2; (+) strand; PAM type: NRG; PAM sequence: TGG
cctggtctggagatataact

SEQ ID NO: 135359 - DNA, 20 bp, Artificial Sequence
  Description of Artificial Sequence: Synthetic oligonucleotide
  Target: LAMA2; (+) strand; PAM type: NRG; PAM sequence: GGG
ctggtctggagatataactt

SEQ ID NO: 135360 - DNA, 20 bp, Artificial Sequence
  Description of Artificial Sequence: Synthetic oligonucleotide
  Target: LAMA2; (+) strand; PAM type: NRG; PAM sequence: GAG
ggtctggagatataacttgg

SEQ ID NO: 135361 - DNA, 20 bp, Artificial Sequence
  Description of Artificial Sequence: Synthetic oligonucleotide
  Target: LAMA2; (+) strand; PAM type: NRG; PAM sequence: CAG
cttgggagttattgactcta

SEQ ID NO: 135362 - DNA, 20 bp, Artificial Sequence
  Description of Artificial Sequence: Synthetic oligonucleotide
  Target: LAMA2; (+) strand; PAM type: NRG; PAM sequence: TGG
ggagttattgactctacaga

SEQ ID NO: 135363 - DNA, 20 bp, Artificial Sequence
  Description of Artificial Sequence: Synthetic oligonucleotide
  Target: LAMA2; (+) strand; PAM type: NRG; PAM sequence: TGG
ctctacagatggtgtgtaaa

SEQ ID NO: 135364 - DNA, 20 bp, Artificial Sequence
  Description of Artificial Sequence: Synthetic oligonucleotide
  Target: LAMA2; (+) strand; PAM type: NRG; PAM sequence: GGG
tctacagatggtgtgtaaat

SEQ ID NO: 135365 - DNA, 20 bp, Artificial Sequence
  Description of Artificial Sequence: Synthetic oligonucleotide
  Target: LAMA2; (+) strand; PAM type: NRG; PAM sequence: TGG
cagatggtgtgtaaatgggt

SEQ ID NO: 135366 - DNA, 20 bp, Artificial Sequence
  Description of Artificial Sequence: Synthetic oligonucleotide
  Target: LAMA2; (+) strand; PAM type: NRG; PAM sequence: AAG
atggtgtgtaaatgggttgg

SEQ ID NO: 135367 - DNA, 20 bp, Artificial Sequence
  Description of Artificial Sequence: Synthetic oligonucleotide
  Target: LAMA2; (+) strand; PAM type: NRG; PAM sequence: TGG
gtgtgtaaatgggttggaag

SEQ ID NO: 135368 - DNA, 20 bp, Artificial Sequence
  Description of Artificial Sequence: Synthetic oligonucleotide
  Target: LAMA2; (+) strand; PAM type: NRG; PAM sequence: GGG
tgtgtaaatgggttggaagt

SEQ ID NO: 135369 - DNA, 20 bp, Artificial Sequence
  Description of Artificial Sequence: Synthetic oligonucleotide
  Target: LAMA2; (+) strand; PAM type: NRG; PAM sequence: AAG
taaatgggttggaagtgggt

SEQ ID NO: 135370 - DNA, 20 bp, Artificial Sequence
  Description of Artificial Sequence: Synthetic oligonucleotide
  Target: LAMA2; (+) strand; PAM type: NRG; PAM sequence: TGG
ggttggaagtgggtaagatt

SEQ ID NO: 135371 - DNA, 20 bp, Artificial Sequence
  Description of Artificial Sequence: Synthetic oligonucleotide
  Target: LAMA2; (+) strand; PAM type: NRG; PAM sequence: GGG
gttggaagtgggtaagattt

SEQ ID NO: 135372 - DNA, 20 bp, Artificial Sequence
  Description of Artificial Sequence: Synthetic oligonucleotide
  Target: LAMA2; (+) strand; PAM type: NRG; PAM sequence: GGG
ttggaagtgggtaagatttg

SEQ ID NO: 135373 - DNA, 20 bp, Artificial Sequence
  Description of Artificial Sequence: Synthetic oligonucleotide
  Target: LAMA2; (+) strand; PAM type: NRG; PAM sequence: AAG
gaagtgggtaagatttgggg

SEQ ID NO: 135374 - DNA, 20 bp, Artificial Sequence
  Description of Artificial Sequence: Synthetic oligonucleotide
  Target: LAMA2; (+) strand; PAM type: NRG; PAM sequence: GAG
agtgggtaagatttggggaa

SEQ ID NO: 135375 - DNA, 20 bp, Artificial Sequence
  Description of Artificial Sequence: Synthetic oligonucleotide
  Target: LAMA2; (+) strand; PAM type: NRG; PAM sequence: AAG
gggtaagatttggggaagag

SEQ ID NO: 135376 - DNA, 20 bp, Artificial Sequence
  Description of Artificial Sequence: Synthetic oligonucleotide
  Target: LAMA2; (+) strand; PAM type: NRG; PAM sequence: AAG
ggggaagagaagaatgaaat

SEQ ID NO: 135377 - DNA, 20 bp, Artificial Sequence
  Description of Artificial Sequence: Synthetic oligonucleotide
  Target: LAMA2; (+) strand; PAM type: NRG; PAM sequence: CAG
aatgaaataagaaaatgatc

SEQ ID NO: 135378 - DNA, 20 bp, Artificial Sequence
  Description of Artificial Sequence: Synthetic oligonucleotide
  Target: LAMA2; (+) strand; PAM type: NRG; PAM sequence: AGG
atgaaataagaaaatgatcc

SEQ ID NO: 135379 - DNA, 20 bp, Artificial Sequence
  Description of Artificial Sequence: Synthetic oligonucleotide
  Target: LAMA2; (+) strand; PAM type: NRG; PAM sequence: AAG
taagaaaatgatccaggatt

SEQ ID NO: 135380 - DNA, 20 bp, Artificial Sequence
  Description of Artificial Sequence: Synthetic oligonucleotide
  Target: LAMA2; (+) strand; PAM type: NRG; PAM sequence: GAG
atgatccaggattaagccct

SEQ ID NO: 135381 - DNA, 20 bp, Artificial Sequence
  Description of Artificial Sequence: Synthetic oligonucleotide
  Target: LAMA2; (+) strand; PAM type: NRG; PAM sequence: AGG
tgatccaggattaagccctg

SEQ ID NO: 135382 - DNA, 20 bp, Artificial Sequence
  Description of Artificial Sequence: Synthetic oligonucleotide
  Target: LAMA2; (+) strand; PAM type: NRG; PAM sequence: TAG
taagccctgaggaacgataa

SEQ ID NO: 135383 - DNA, 20 bp, Artificial Sequence
  Description of Artificial Sequence: Synthetic oligonucleotide
  Target: LAMA2; (+) strand; PAM type: NRG; PAM sequence: AAG
gttactgataaaaaaaaaaa

SEQ ID NO: 135384 - DNA, 20 bp, Artificial Sequence
  Description of Artificial Sequence: Synthetic oligonucleotide
  Target: LAMA2; (+) strand; PAM type: NRG; PAM sequence: AAG
tgataaaaaaaaaaaaagaa

SEQ ID NO: 135385 - DNA, 20 bp, Artificial Sequence
  Description of Artificial Sequence: Synthetic oligonucleotide
  Target: LAMA2; (+) strand; PAM type: NRG; PAM sequence: AAG
aaaaaaaaaagaaaagaatg

SEQ ID NO: 135386 - DNA, 20 bp, Artificial Sequence
  Description of Artificial Sequence: Synthetic oligonucleotide
  Target: LAMA2; (+) strand; PAM type: NRG; PAM sequence: AAG
ttttctgtttcattttttct

SEQ ID NO: 135387 - DNA, 20 bp, Artificial Sequence
  Description of Artificial Sequence: Synthetic oligonucleotide
  Target: LAMA2; (+) strand; PAM type: NRG; PAM sequence: AAG
tcattttttctaagtctttt

SEQ ID NO: 135388 - DNA, 20 bp, Artificial Sequence
  Description of Artificial Sequence: Synthetic oligonucleotide
  Target: LAMA2; (+) strand; PAM type: NRG; PAM sequence: CAG
tttttctaagtcttttaagc

SEQ ID NO: 135389 - DNA, 20 bp, Artificial Sequence
  Description of Artificial Sequence: Synthetic oligonucleotide
  Target: LAMA2; (+) strand; PAM type: NRG; PAM sequence: GAG
tttctaagtcttttaagcca

SEQ ID NO: 135390 - DNA, 20 bp, Artificial Sequence
  Description of Artificial Sequence: Synthetic oligonucleotide
  Target: LAMA2; (+) strand; PAM type: NRG; PAM sequence: TGG
aagccagagaaaacataatg

SEQ ID NO: 135391 - DNA, 20 bp, Artificial Sequence
  Description of Artificial Sequence: Synthetic oligonucleotide
  Target: LAMA2; (+) strand; PAM type: NRG; PAM sequence: CAG
agagaaaacataatgtggaa

SEQ ID NO: 135392 - DNA, 20 bp, Artificial Sequence
  Description of Artificial Sequence: Synthetic oligonucleotide
  Target: LAMA2; (+) strand; PAM type: NRG; PAM sequence: TAG
ttttatgtgtgttttatcac

SEQ ID NO: 135393 - DNA, 20 bp, Artificial Sequence
  Description of Artificial Sequence: Synthetic oligonucleotide
  Target: LAMA2; (+) strand; PAM type: NRG; PAM sequence: GAG
ttatgtgtgttttatcacta

SEQ ID NO: 135394 - DNA, 20 bp, Artificial Sequence
  Description of Artificial Sequence: Synthetic oligonucleotide
  Target: LAMA2; (+) strand; PAM type: NRG; PAM sequence: AAG
tgtgttttatcactagagat

SEQ ID NO: 135395 - DNA, 20 bp, Artificial Sequence
  Description of Artificial Sequence: Synthetic oligonucleotide
  Target: LAMA2; (+) strand; PAM type: NRG; PAM sequence: AAG
actagagataagaaattgtc

SEQ ID NO: 135396 - DNA, 20 bp, Artificial Sequence
  Description of Artificial Sequence: Synthetic oligonucleotide
  Target: LAMA2; (+) strand; PAM type: NRG; PAM sequence: AAG
gaaattgtcaagctgtcctt

SEQ ID NO: 135397 - DNA, 20 bp, Artificial Sequence
  Description of Artificial Sequence: Synthetic oligonucleotide
  Target: LAMA2; (+) strand; PAM type: NRG; PAM sequence: AGG
aaattgtcaagctgtcctta

SEQ ID NO: 135398 - DNA, 20 bp, Artificial Sequence
  Description of Artificial Sequence: Synthetic oligonucleotide
  Target: LAMA2; (+) strand; PAM type: NRG; PAM sequence: CAG
gtcaagctgtccttaaggac

SEQ ID NO: 135399 - DNA, 20 bp, Artificial Sequence
  Description of Artificial Sequence: Synthetic oligonucleotide
  Target: LAMA2; (+) strand; PAM type: NRG; PAM sequence: AGG
tcaagctgtccttaaggacc

SEQ ID NO: 135400 - DNA, 20 bp, Artificial Sequence
  Description of Artificial Sequence: Synthetic oligonucleotide
  Target: LAMA2; (+) strand; PAM type: NRG; PAM sequence: GGG
caagctgtccttaaggacca

SEQ ID NO: 135401 - DNA, 20 bp, Artificial Sequence
  Description of Artificial Sequence: Synthetic oligonucleotide
  Target: LAMA2; (+) strand; PAM type: NRG; PAM sequence: GAG
agctgtccttaaggaccagg

SEQ ID NO: 135402 - DNA, 20 bp, Artificial Sequence
  Description of Artificial Sequence: Synthetic oligonucleotide
  Target: LAMA2; (+) strand; PAM type: NRG; PAM sequence: AGG
gctgtccttaaggaccaggg

SEQ ID NO: 135403 - DNA, 20 bp, Artificial Sequence
  Description of Artificial Sequence: Synthetic oligonucleotide
  Target: LAMA2; (+) strand; PAM type: NRG; PAM sequence: GGG
ctgtccttaaggaccaggga

SEQ ID NO: 135404 - DNA, 20 bp, Artificial Sequence
  Description of Artificial Sequence: Synthetic oligonucleotide
  Target: LAMA2; (+) strand; PAM type: NRG; PAM sequence: TGG
taaggaccagggagggccca

SEQ ID NO: 135405 - DNA, 20 bp, Artificial Sequence
  Description of Artificial Sequence: Synthetic oligonucleotide
  Target: LAMA2; (+) strand; PAM type: NRG; PAM sequence: GGG
aaggaccagggagggcccat

SEQ ID NO: 135406 - DNA, 20 bp, Artificial Sequence
  Description of Artificial Sequence: Synthetic oligonucleotide
  Target: LAMA2; (+) strand; PAM type: NRG; PAM sequence: GGG
aggaccagggagggcccatg

SEQ ID NO: 135407 - DNA, 20 bp, Artificial Sequence
  Description of Artificial Sequence: Synthetic oligonucleotide
  Target: LAMA2; (+) strand; PAM type: NRG; PAM sequence: CAG
cagggagggcccatggggaa

SEQ ID NO: 135408 - DNA, 20 bp, Artificial Sequence
  Description of Artificial Sequence: Synthetic oligonucleotide
  Target: LAMA2; (+) strand; PAM type: NRG; PAM sequence: AAG
tgatgctgttgtattcatca

SEQ ID NO: 135409 - DNA, 20 bp, Artificial Sequence
  Description of Artificial Sequence: Synthetic oligonucleotide
  Target: LAMA2; (+) strand; PAM type: NRG; PAM sequence: TAG
ctgttgtattcatcaaagca

SEQ ID NO: 135410 - DNA, 20 bp, Artificial Sequence
  Description of Artificial Sequence: Synthetic oligonucleotide
  Target: LAMA2; (+) strand; PAM type: NRG; PAM sequence: GAG
gtattcatcaaagcatagat

SEQ ID NO: 135411 - DNA, 20 bp, Artificial Sequence
  Description of Artificial Sequence: Synthetic oligonucleotide
  Target: LAMA2; (+) strand; PAM type: NRG; PAM sequence: GAG
ctcttctgatatttttgttt

SEQ ID NO: 135412 - DNA, 20 bp, Artificial Sequence
  Description of Artificial Sequence: Synthetic oligonucleotide
  Target: LAMA2; (+) strand; PAM type: NRG; PAM sequence: AGG
tcttctgatatttttgtttg

SEQ ID NO: 135413 - DNA, 20 bp, Artificial Sequence
  Description of Artificial Sequence: Synthetic oligonucleotide
  Target: LAMA2; (+) strand; PAM type: NRG; PAM sequence: AAG
tgtttgaggaacatgaatat

SEQ ID NO: 135414 - DNA, 20 bp, Artificial Sequence
  Description of Artificial Sequence: Synthetic oligonucleotide
  Target: LAMA2; (+) strand; PAM type: NRG; PAM sequence: TAG
tgaatataagctcatgctcc

SEQ ID NO: 135415 - DNA, 20 bp, Artificial Sequence
  Description of Artificial Sequence: Synthetic oligonucleotide
  Target: LAMA2; (+) strand; PAM type: NRG; PAM sequence: TAG
ataagctcatgctcctagca

SEQ ID NO: 135416 - DNA, 20 bp, Artificial Sequence
  Description of Artificial Sequence: Synthetic oligonucleotide
  Target: LAMA2; (+) strand; PAM type: NRG; PAM sequence: TAG
catgctcctagcatagcaat

SEQ ID NO: 135417 - DNA, 20 bp, Artificial Sequence
  Description of Artificial Sequence: Synthetic oligonucleotide
  Target: LAMA2; (+) strand; PAM type: NRG; PAM sequence: TAG
tcctagcatagcaattagtt

SEQ ID NO: 135418 - DNA, 20 bp, Artificial Sequence
  Description of Artificial Sequence: Synthetic oligonucleotide
  Target: LAMA2; (+) strand; PAM type: NRG; PAM sequence: GAG
ctagcatagcaattagttta

SEQ ID NO: 135419 - DNA, 20 bp, Artificial Sequence
  Description of Artificial Sequence: Synthetic oligonucleotide
  Target: LAMA2; (+) strand; PAM type: NRG; PAM sequence: CAG
attttttgaattattaactg

SEQ ID NO: 135420 - DNA, 20 bp, Artificial Sequence
  Description of Artificial Sequence: Synthetic oligonucleotide
  Target: LAMA2; (+) strand; PAM type: NRG; PAM sequence: AAG
tgaattattaactgcagaca

SEQ ID NO: 135421 - DNA, 20 bp, Artificial Sequence
  Description of Artificial Sequence: Synthetic oligonucleotide
  Target: LAMA2; (+) strand; PAM type: NRG; PAM sequence: AAG
ttttttgttttctatatcac

SEQ ID NO: 135422 - DNA, 20 bp, Artificial Sequence
  Description of Artificial Sequence: Synthetic oligonucleotide
  Target: LAMA2; (+) strand; PAM type: NRG; PAM sequence: TGG
atatcacaagtacctttttt

SEQ ID NO: 135423 - DNA, 20 bp, Artificial Sequence
  Description of Artificial Sequence: Synthetic oligonucleotide
  Target: LAMA2; (+) strand; PAM type: NRG; PAM sequence: AAG
caagtacctttttttggttt

SEQ ID NO: 135424 - DNA, 20 bp, Artificial Sequence
  Description of Artificial Sequence: Synthetic oligonucleotide
  Target: LAMA2; (+) strand; PAM type: NRG; PAM sequence: AGG
aagtacctttttttggttta

SEQ ID NO: 135425 - DNA, 20 bp, Artificial Sequence
  Description of Artificial Sequence: Synthetic oligonucleotide
  Target: LAMA2; (+) strand; PAM type: NRG; PAM sequence: GAG
ctctccttgctttatatttt

SEQ ID NO: 135426 - DNA, 20 bp, Artificial Sequence
  Description of Artificial Sequence: Synthetic oligonucleotide
  Target: LAMA2; (+) strand; PAM type: NRG; PAM sequence: AAG
gtttacacactaacctgcca

SEQ ID NO: 135427 - DNA, 20 bp, Artificial Sequence
  Description of Artificial Sequence: Synthetic oligonucleotide
  Target: LAMA2; (+) strand; PAM type: NRG; PAM sequence: GAG
ttacacactaacctgccaaa

SEQ ID NO: 135428 - DNA, 20 bp, Artificial Sequence
  Description of Artificial Sequence: Synthetic oligonucleotide
  Target: LAMA2; (+) strand; PAM type: NRG; PAM sequence: TAG
taacctgccaaagagacatc

SEQ ID NO: 135429 - DNA, 20 bp, Artificial Sequence
  Description of Artificial Sequence: Synthetic oligonucleotide
  Target: LAMA2; (+) strand; PAM type: NRG; PAM sequence: TAG
ccaaagagacatctagttta

SEQ ID NO: 135430 - DNA, 20 bp, Artificial Sequence
  Description of Artificial Sequence: Synthetic oligonucleotide
  Target: LAMA2; (+) strand; PAM type: NRG; PAM sequence: AGG
caaagagacatctagtttat

SEQ ID NO: 135431 - DNA, 20 bp, Artificial Sequence
  Description of Artificial Sequence: Synthetic oligonucleotide
  Target: LAMA2; (+) strand; PAM type: NRG; PAM sequence: TGG
ctagtttataggcttgattt

SEQ ID NO: 135432 - DNA, 20 bp, Artificial Sequence
  Description of Artificial Sequence: Synthetic oligonucleotide
  Target: LAMA2; (+) strand; PAM type: NRG; PAM sequence: AAG
gtttataggcttgattttgg

SEQ ID NO: 135433 - DNA, 20 bp, Artificial Sequence
  Description of Artificial Sequence: Synthetic oligonucleotide
  Target: LAMA2; (+) strand; PAM type: NRG; PAM sequence: AAG
ataggcttgattttggaaga

SEQ ID NO: 135434 - DNA, 20 bp, Artificial Sequence
  Description of Artificial Sequence: Synthetic oligonucleotide
  Target: LAMA2; (+) strand; PAM type: NRG; PAM sequence: CAG
gcttgattttggaagaaaga

SEQ ID NO: 135435 - DNA, 20 bp, Artificial Sequence
  Description of Artificial Sequence: Synthetic oligonucleotide
  Target: LAMA2; (+) strand; PAM type: NRG; PAM sequence: AAG
tgattttggaagaaagacag

SEQ ID NO: 135436 - DNA, 20 bp, Artificial Sequence
  Description of Artificial Sequence: Synthetic oligonucleotide
  Target: LAMA2; (+) strand; PAM type: NRG; PAM sequence: GAG
attttggaagaaagacagaa

SEQ ID NO: 135437 - DNA, 20 bp, Artificial Sequence
  Description of Artificial Sequence: Synthetic oligonucleotide
  Target: LAMA2; (+) strand; PAM type: NRG; PAM sequence: GAG
tttggaagaaagacagaaga

SEQ ID NO: 135438 - DNA, 20 bp, Artificial Sequence
  Description of Artificial Sequence: Synthetic oligonucleotide
  Target: LAMA2; (+) strand; PAM type: NRG; PAM sequence: CAG
ggaagaaagacagaagagag

SEQ ID NO: 135439 - DNA, 20 bp, Artificial Sequence
  Description of Artificial Sequence: Synthetic oligonucleotide
  Target: LAMA2; (+) strand; PAM type: NRG; PAM sequence: AAG
atgttccgctgatattgatg

SEQ ID NO: 135440 - DNA, 20 bp, Artificial Sequence
  Description of Artificial Sequence: Synthetic oligonucleotide
  Target: LAMA2; (+) strand; PAM type: NRG; PAM sequence: GAG
tccgctgatattgatgaagt

SEQ ID NO: 135441 - DNA, 20 bp, Artificial Sequence
  Description of Artificial Sequence: Synthetic oligonucleotide
  Target: LAMA2; (+) strand; PAM type: NRG; PAM sequence: AGG
ccgctgatattgatgaagtg

SEQ ID NO: 135442 - DNA, 20 bp, Artificial Sequence
  Description of Artificial Sequence: Synthetic oligonucleotide
  Target: LAMA2; (+) strand; PAM type: NRG; PAM sequence: TGG
tgatattgatgaagtgaggt

SEQ ID NO: 135443 - DNA, 20 bp, Artificial Sequence
  Description of Artificial Sequence: Synthetic oligonucleotide
  Target: LAMA2; (+) strand; PAM type: NRG; PAM sequence: AAG
tattgatgaagtgaggttgg

SEQ ID NO: 135444 - DNA, 20 bp, Artificial Sequence
  Description of Artificial Sequence: Synthetic oligonucleotide
  Target: LAMA2; (+) strand; PAM type: NRG; PAM sequence: AAG
tgatgaagtgaggttggaag

SEQ ID NO: 135445 - DNA, 20 bp, Artificial Sequence
  Description of Artificial Sequence: Synthetic oligonucleotide
  Target: LAMA2; (+) strand; PAM type: NRG; PAM sequence: TGG
aagtgaggttggaagaagct

SEQ ID NO: 135446 - DNA, 20 bp, Artificial Sequence
  Description of Artificial Sequence: Synthetic oligonucleotide
  Target: LAMA2; (+) strand; PAM type: NRG; PAM sequence: AAG
tgaggttggaagaagcttgg

SEQ ID NO: 135447 - DNA, 20 bp, Artificial Sequence
  Description of Artificial Sequence: Synthetic oligonucleotide
  Target: LAMA2; (+) strand; PAM type: NRG; PAM sequence: CAG
ggttggaagaagcttggaag

SEQ ID NO: 135448 - DNA, 20 bp, Artificial Sequence
  Description of Artificial Sequence: Synthetic oligonucleotide
  Target: LAMA2; (+) strand; PAM type: NRG; PAM sequence: TGG
caccccctctatgaatattt

SEQ ID NO: 135449 - DNA, 20 bp, Artificial Sequence
  Description of Artificial Sequence: Synthetic oligonucleotide
  Target: LAMA2; (+) strand; PAM type: NRG; PAM sequence: GGG
accccctctatgaatatttt

SEQ ID NO: 135450 - DNA, 20 bp, Artificial Sequence
  Description of Artificial Sequence: Synthetic oligonucleotide
  Target: LAMA2; (+) strand; PAM type: NRG; PAM sequence: TGG
tattttgggtacccttatgc

SEQ ID NO: 135451 - DNA, 20 bp, Artificial Sequence
  Description of Artificial Sequence: Synthetic oligonucleotide
  Target: LAMA2; (+) strand; PAM type: NRG; PAM sequence: AAG
tatgctggaacattccaaat

SEQ ID NO: 135452 - DNA, 20 bp, Artificial Sequence
  Description of Artificial Sequence: Synthetic oligonucleotide
  Target: LAMA2; (+) strand; PAM type: NRG; PAM sequence: CAG
aacattccaaataagtgccc

SEQ ID NO: 135453 - DNA, 20 bp, Artificial Sequence
  Description of Artificial Sequence: Synthetic oligonucleotide
  Target: LAMA2; (+) strand; PAM type: NRG; PAM sequence: TGG
ccaaataagtgccccagcta

SEQ ID NO: 135454 - DNA, 20 bp, Artificial Sequence
  Description of Artificial Sequence: Synthetic oligonucleotide
  Target: LAMA2; (+) strand; PAM type: NRG; PAM sequence: GGG
caaataagtgccccagctat

SEQ ID NO: 135455 - DNA, 20 bp, Artificial Sequence
  Description of Artificial Sequence: Synthetic oligonucleotide
  Target: LAMA2; (+) strand; PAM type: NRG; PAM sequence: AAG
ttttctcataatgattctga

SEQ ID NO: 135456 - DNA, 20 bp, Artificial Sequence
  Description of Artificial Sequence: Synthetic oligonucleotide
  Target: LAMA2; (+) strand; PAM type: NRG; PAM sequence: TGG
ataatgattctgaaagcctt

SEQ ID NO: 135457 - DNA, 20 bp, Artificial Sequence
  Description of Artificial Sequence: Synthetic oligonucleotide
  Target: LAMA2; (+) strand; PAM type: NRG; PAM sequence: GGG
taatgattctgaaagccttt

SEQ ID NO: 135458 - DNA, 20 bp, Artificial Sequence
  Description of Artificial Sequence: Synthetic oligonucleotide
  Target: LAMA2; (+) strand; PAM type: NRG; PAM sequence: TAG
tgaaagcctttgggatgatt

SEQ ID NO: 135459 - DNA, 20 bp, Artificial Sequence
  Description of Artificial Sequence: Synthetic oligonucleotide
  Target: LAMA2; (+) strand; PAM type: NRG; PAM sequence: AGG
gaaagcctttgggatgattt

SEQ ID NO: 135460 - DNA, 20 bp, Artificial Sequence
  Description of Artificial Sequence: Synthetic oligonucleotide
  Target: LAMA2; (+) strand; PAM type: NRG; PAM sequence: AAG
atgatttaggattgttctac

SEQ ID NO: 135461 - DNA, 20 bp, Artificial Sequence
  Description of Artificial Sequence: Synthetic oligonucleotide
  Target: LAMA2; (+) strand; PAM type: NRG; PAM sequence: TGG
atttaggattgttctacaag

SEQ ID NO: 135462 - DNA, 20 bp, Artificial Sequence
  Description of Artificial Sequence: Synthetic oligonucleotide
  Target: LAMA2; (+) strand; PAM type: NRG; PAM sequence: AAG
gtggaacataaaccaaaaca

SEQ ID NO: 135463 - DNA, 20 bp, Artificial Sequence
  Description of Artificial Sequence: Synthetic oligonucleotide
  Target: LAMA2; (+) strand; PAM type: NRG; PAM sequence: CAG
gaacataaaccaaaacaaag

SEQ ID NO: 135464 - DNA, 20 bp, Artificial Sequence
  Description of Artificial Sequence: Synthetic oligonucleotide
  Target: LAMA2; (+) strand; PAM type: NRG; PAM sequence: TGG
aaccaaaacaaagcagttcg

SEQ ID NO: 135465 - DNA, 20 bp, Artificial Sequence
  Description of Artificial Sequence: Synthetic oligonucleotide
  Target: LAMA2; (+) strand; PAM type: NRG; PAM sequence: TGG
tcgtggactctaattttaaa

SEQ ID NO: 135466 - DNA, 20 bp, Artificial Sequence
  Description of Artificial Sequence: Synthetic oligonucleotide
  Target: LAMA2; (+) strand; PAM type: NRG; PAM sequence: GGG
cgtggactctaattttaaat

SEQ ID NO: 135467 - DNA, 20 bp, Artificial Sequence
  Description of Artificial Sequence: Synthetic oligonucleotide
  Target: LAMA2; (+) strand; PAM type: NRG; PAM sequence: TGG
ctctaattttaaatgggtga

SEQ ID NO: 135468 - DNA, 20 bp, Artificial Sequence
  Description of Artificial Sequence: Synthetic oligonucleotide
  Target: LAMA2; (+) strand; PAM type: NRG; PAM sequence: GAG
attttaaatgggtgatggat

SEQ ID NO: 135469 - DNA, 20 bp, Artificial Sequence
  Description of Artificial Sequence: Synthetic oligonucleotide
  Target: LAMA2; (+) strand; PAM type: NRG; PAM sequence: AAG
agatttcaatgcaaattgta

SEQ ID NO: 135470 - DNA, 20 bp, Artificial Sequence
  Description of Artificial Sequence: Synthetic oligonucleotide
  Target: LAMA2; (+) strand; PAM type: NRG; PAM sequence: CAG
aagactgaaaatgatgtgac

SEQ ID NO: 135471 - DNA, 20 bp, Artificial Sequence
  Description of Artificial Sequence: Synthetic oligonucleotide
  Target: LAMA2; (+) strand; PAM type: NRG; PAM sequence: GAG
gactgaaaatgatgtgacca

SEQ ID NO: 135472 - DNA, 20 bp, Artificial Sequence
  Description of Artificial Sequence: Synthetic oligonucleotide
  Target: LAMA2; (+) strand; PAM type: NRG; PAM sequence: AAG
tgaaaatgatgtgaccagag

SEQ ID NO: 135473 - DNA, 20 bp, Artificial Sequence
  Description of Artificial Sequence: Synthetic oligonucleotide
  Target: LAMA2; (+) strand; PAM type: NRG; PAM sequence: AGG
gaaaatgatgtgaccagaga

SEQ ID NO: 135474 - DNA, 20 bp, Artificial Sequence
  Description of Artificial Sequence: Synthetic oligonucleotide
  Target: LAMA2; (+) strand; PAM type: NRG; PAM sequence: GGG
aaaatgatgtgaccagagaa

SEQ ID NO: 135475 - DNA, 20 bp, Artificial Sequence
  Description of Artificial Sequence: Synthetic oligonucleotide
  Target: LAMA2; (+) strand; PAM type: NRG; PAM sequence: TAG
gtgaccagagaagggacccc

SEQ ID NO: 135476 - DNA, 20 bp, Artificial Sequence
  Description of Artificial Sequence: Synthetic oligonucleotide
  Target: LAMA2; (+) strand; PAM type: NRG; PAM sequence: TAG
ccagagaagggacccctaga

SEQ ID NO: 135477 - DNA, 20 bp, Artificial Sequence
  Description of Artificial Sequence: Synthetic oligonucleotide
  Target: LAMA2; (+) strand; PAM type: NRG; PAM sequence: AAG
agaagggacccctagatagt

SEQ ID NO: 135478 - DNA, 20 bp, Artificial Sequence
  Description of Artificial Sequence: Synthetic oligonucleotide
  Target: LAMA2; (+) strand; PAM type: NRG; PAM sequence: CAG
agtaagtactcaataaatga

SEQ ID NO: 135479 - DNA, 20 bp, Artificial Sequence
  Description of Artificial Sequence: Synthetic oligonucleotide
  Target: LAMA2; (+) strand; PAM type: NRG; PAM sequence: AAG
aagtactcaataaatgacag

SEQ ID NO: 135480 - DNA, 20 bp, Artificial Sequence
  Description of Artificial Sequence: Synthetic oligonucleotide
  Target: LAMA2; (+) strand; PAM type: NRG; PAM sequence: CAG
tactcaataaatgacagaag

SEQ ID NO: 135481 - DNA, 20 bp, Artificial Sequence
  Description of Artificial Sequence: Synthetic oligonucleotide
  Target: LAMA2; (+) strand; PAM type: NRG; PAM sequence: AGG
actcaataaatgacagaagc

SEQ ID NO: 135482 - DNA, 20 bp, Artificial Sequence
  Description of Artificial Sequence: Synthetic oligonucleotide
  Target: LAMA2; (+) strand; PAM type: NRG; PAM sequence: GGG
ctcaataaatgacagaagca

SEQ ID NO: 135483 - DNA, 20 bp, Artificial Sequence
  Description of Artificial Sequence: Synthetic oligonucleotide
  Target: LAMA2; (+) strand; PAM type: NRG; PAM sequence: TAG
taaatgacagaagcagggta

SEQ ID NO: 135484 - DNA, 20 bp, Artificial Sequence
  Description of Artificial Sequence: Synthetic oligonucleotide
  Target: LAMA2; (+) strand; PAM type: NRG; PAM sequence: TGG
tatagtatgaacctgtttct

SEQ ID NO: 135485 - DNA, 20 bp, Artificial Sequence
  Description of Artificial Sequence: Synthetic oligonucleotide
  Target: LAMA2; (+) strand; PAM type: NRG; PAM sequence: GGG
atagtatgaacctgtttctt

SEQ ID NO: 135486 - DNA, 20 bp, Artificial Sequence
  Description of Artificial Sequence: Synthetic oligonucleotide
  Target: LAMA2; (+) strand; PAM type: NRG; PAM sequence: TAG
gaacctgtttcttgggaaaa

SEQ ID NO: 135487 - DNA, 20 bp, Artificial Sequence
  Description of Artificial Sequence: Synthetic oligonucleotide
  Target: LAMA2; (+) strand; PAM type: NRG; PAM sequence: AAG
ttcttgggaaaatagacttg

SEQ ID NO: 135488 - DNA, 20 bp, Artificial Sequence
  Description of Artificial Sequence: Synthetic oligonucleotide
  Target: LAMA2; (+) strand; PAM type: NRG; PAM sequence: TAG
tgggaaaatagacttgaagt

SEQ ID NO: 135489 - DNA, 20 bp, Artificial Sequence
  Description of Artificial Sequence: Synthetic oligonucleotide
  Target: LAMA2; (+) strand; PAM type: NRG; PAM sequence: AAG
aaatagacttgaagttagac

SEQ ID NO: 135490 - DNA, 20 bp, Artificial Sequence
  Description of Artificial Sequence: Synthetic oligonucleotide
  Target: LAMA2; (+) strand; PAM type: NRG; PAM sequence: TAG
gaatctatttaatcaaactc

SEQ ID NO: 135491 - DNA, 20 bp, Artificial Sequence
  Description of Artificial Sequence: Synthetic oligonucleotide
  Target: LAMA2; (+) strand; PAM type: NRG; PAM sequence: TGG
acttttgttttttgttgctt

SEQ ID NO: 135492 - DNA, 20 bp, Artificial Sequence
  Description of Artificial Sequence: Synthetic oligonucleotide
  Target: LAMA2; (+) strand; PAM type: NRG; PAM sequence: TGG
tttttgttgctttggttttt

SEQ ID NO: 135493 - DNA, 20 bp, Artificial Sequence
  Description of Artificial Sequence: Synthetic oligonucleotide
  Target: LAMA2; (+) strand; PAM type: NRG; PAM sequence: GAG
tttgttgctttggttttttg

SEQ ID NO: 135494 - DNA, 20 bp, Artificial Sequence
  Description of Artificial Sequence: Synthetic oligonucleotide
  Target: LAMA2; (+) strand; PAM type: NRG; PAM sequence: AAG
ttggagtttttttgcacttc

SEQ ID NO: 135495 - DNA, 20 bp, Artificial Sequence
  Description of Artificial Sequence: Synthetic oligonucleotide
  Target: LAMA2; (+) strand; PAM type: NRG; PAM sequence: AAG
gagtttttttgcacttcaag

SEQ ID NO: 135496 - DNA, 20 bp, Artificial Sequence
  Description of Artificial Sequence: Synthetic oligonucleotide
  Target: LAMA2; (+) strand; PAM type: NRG; PAM sequence: GAG
tcaagaagtctttttgatct

SEQ ID NO: 135497 - DNA, 20 bp, Artificial Sequence
  Description of Artificial Sequence: Synthetic oligonucleotide
  Target: LAMA2; (+) strand; PAM type: NRG; PAM sequence: AGG
caagaagtctttttgatctg

SEQ ID NO: 135498 - DNA, 20 bp, Artificial Sequence
  Description of Artificial Sequence: Synthetic oligonucleotide
  Target: LAMA2; (+) strand; PAM type: NRG; PAM sequence: TAG
gaagtctttttgatctgagg

SEQ ID NO: 135499 - DNA, 20 bp, Artificial Sequence
  Description of Artificial Sequence: Synthetic oligonucleotide
  Target: LAMA2; (+) strand; PAM type: NRG; PAM sequence: TAG
ctttttgatctgaggtagtg

SEQ ID NO: 135500 - DNA, 20 bp, Artificial Sequence
  Description of Artificial Sequence: Synthetic oligonucleotide
  Target: LAMA2; (+) strand; PAM type: NRG; PAM sequence: AAG
gtagtcaactctaatttatt

SEQ ID NO: 135501 - DNA, 20 bp, Artificial Sequence
  Description of Artificial Sequence: Synthetic oligonucleotide
  Target: LAMA2; (+) strand; PAM type: NRG; PAM sequence: AAG
actctaatttattaagcatg

SEQ ID NO: 135502 - DNA, 20 bp, Artificial Sequence
  Description of Artificial Sequence: Synthetic oligonucleotide
  Target: LAMA2; (+) strand; PAM type: NRG; PAM sequence: TGG
tttattaagcatgaagtgat

SEQ ID NO: 135503 - DNA, 20 bp, Artificial Sequence
  Description of Artificial Sequence: Synthetic oligonucleotide
  Target: LAMA2; (+) strand; PAM type: NRG; PAM sequence: CAG
aagcatgaagtgattggtta

SEQ ID NO: 135504 - DNA, 20 bp, Artificial Sequence
  Description of Artificial Sequence: Synthetic oligonucleotide
  Target: LAMA2; (+) strand; PAM type: NRG; PAM sequence: AGG
agcatgaagtgattggttac

SEQ ID NO: 135505 - DNA, 20 bp, Artificial Sequence
  Description of Artificial Sequence: Synthetic oligonucleotide
  Target: LAMA2; (+) strand; PAM type: NRG; PAM sequence: AAG
ttggttacaggtattttaac

SEQ ID NO: 135506 - DNA, 20 bp, Artificial Sequence
  Description of Artificial Sequence: Synthetic oligonucleotide
  Target: LAMA2; (+) strand; PAM type: NRG; PAM sequence: TGG
caggtattttaacaagtatt

SEQ ID NO: 135507 - DNA, 20 bp, Artificial Sequence
  Description of Artificial Sequence: Synthetic oligonucleotide
  Target: LAMA2; (+) strand; PAM type: NRG; PAM sequence: GAG
ggtattttaacaagtatttg

SEQ ID NO: 135508 - DNA, 20 bp, Artificial Sequence
  Description of Artificial Sequence: Synthetic oligonucleotide
  Target: LAMA2; (+) strand; PAM type: NRG; PAM sequence: AGG
gtattttaacaagtatttgg

SEQ ID NO: 135509 - DNA, 20 bp, Artificial Sequence
  Description of Artificial Sequence: Synthetic oligonucleotide
  Target: LAMA2; (+) strand; PAM type: NRG; PAM sequence: GAG
attttaacaagtatttggag

SEQ ID NO: 135510 - DNA, 20 bp, Artificial Sequence
  Description of Artificial Sequence: Synthetic oligonucleotide
  Target: LAMA2; (+) strand; PAM type: NRG; PAM sequence: TGG
aacaagtatttggaggagtt

SEQ ID NO: 135511 - DNA, 20 bp, Artificial Sequence
  Description of Artificial Sequence: Synthetic oligonucleotide
  Target: LAMA2; (+) strand; PAM type: NRG; PAM sequence: GGG
acaagtatttggaggagttt

SEQ ID NO: 135512 - DNA, 20 bp, Artificial Sequence
  Description of Artificial Sequence: Synthetic oligonucleotide
  Target: LAMA2; (+) strand; PAM type: NRG; PAM sequence: GGG
caagtatttggaggagtttg

SEQ ID NO: 135513 - DNA, 20 bp, Artificial Sequence
  Description of Artificial Sequence: Synthetic oligonucleotide
  Target: LAMA2; (+) strand; PAM type: NRG; PAM sequence: AAG
gtatttggaggagtttgggg

SEQ ID NO: 135514 - DNA, 20 bp, Artificial Sequence
  Description of Artificial Sequence: Synthetic oligonucleotide
  Target: LAMA2; (+) strand; PAM type: NRG; PAM sequence: AAG
ggaggagtttggggaagttg

SEQ ID NO: 135515 - DNA, 20 bp, Artificial Sequence
  Description of Artificial Sequence: Synthetic oligonucleotide
  Target: LAMA2; (+) strand; PAM type: NRG; PAM sequence: AAG
aagtacgaacacattatttg

SEQ ID NO: 135516 - DNA, 20 bp, Artificial Sequence
  Description of Artificial Sequence: Synthetic oligonucleotide
  Target: LAMA2; (+) strand; PAM type: NRG; PAM sequence: CAG
attatttgaagtcactgtta

SEQ ID NO: 135517 - DNA, 20 bp, Artificial Sequence
  Description of Artificial Sequence: Synthetic oligonucleotide
  Target: LAMA2; (+) strand; PAM type: NRG; PAM sequence: GAG
tatttgaagtcactgttaca

SEQ ID NO: 135518 - DNA, 20 bp, Artificial Sequence
  Description of Artificial Sequence: Synthetic oligonucleotide
  Target: LAMA2; (+) strand; PAM type: NRG; PAM sequence: AGG
atttgaagtcactgttacag

SEQ ID NO: 135519 - DNA, 20 bp, Artificial Sequence
  Description of Artificial Sequence: Synthetic oligonucleotide
  Target: LAMA2; (+) strand; PAM type: NRG; PAM sequence: TAG
ctattttgtccttcctgatg

SEQ ID NO: 135520 - DNA, 20 bp, Artificial Sequence
  Description of Artificial Sequence: Synthetic oligonucleotide
  Target: LAMA2; (+) strand; PAM type: NRG; PAM sequence: TAG
gtccttcctgatgtagccat

SEQ ID NO: 135521 - DNA, 20 bp, Artificial Sequence
  Description of Artificial Sequence: Synthetic oligonucleotide
  Target: LAMA2; (+) strand; PAM type: NRG; PAM sequence: AAG
gtagccattagtgttcctac

SEQ ID NO: 135522 - DNA, 20 bp, Artificial Sequence
  Description of Artificial Sequence: Synthetic oligonucleotide
  Target: LAMA2; (+) strand; PAM type: NRG; PAM sequence: TGG
tagtgttcctacaagaaatc

SEQ ID NO: 135523 - DNA, 20 bp, Artificial Sequence
  Description of Artificial Sequence: Synthetic oligonucleotide
  Target: LAMA2; (+) strand; PAM type: NRG; PAM sequence: CAG
agaaatctggattatcatga

SEQ ID NO: 135524 - DNA, 20 bp, Artificial Sequence
  Description of Artificial Sequence: Synthetic oligonucleotide
  Target: LAMA2; (+) strand; PAM type: NRG; PAM sequence: TAG
cctttttctttttttaattt

SEQ ID NO: 135525 - DNA, 20 bp, Artificial Sequence
  Description of Artificial Sequence: Synthetic oligonucleotide
  Target: LAMA2; (+) strand; PAM type: NRG; PAM sequence: TAG
tctttttttaattttagatt

SEQ ID NO: 135526 - DNA, 20 bp, Artificial Sequence
  Description of Artificial Sequence: Synthetic oligonucleotide
  Target: LAMA2; (+) strand; PAM type: NRG; PAM sequence: AGG
ctttttttaattttagattt

SEQ ID NO: 135527 - DNA, 20 bp, Artificial Sequence
  Description of Artificial Sequence: Synthetic oligonucleotide
  Target: LAMA2; (+) strand; PAM type: NRG; PAM sequence: GGG
tttttttaattttagattta

SEQ ID NO: 135528 - DNA, 20 bp, Artificial Sequence
  Description of Artificial Sequence: Synthetic oligonucleotide
  Target: LAMA2; (+) strand; PAM type: NRG; PAM sequence: GGG
ttttttaattttagatttag

SEQ ID NO: 135529 - DNA, 20 bp, Artificial Sequence
  Description of Artificial Sequence: Synthetic oligonucleotide
  Target: LAMA2; (+) strand; PAM type: NRG; PAM sequence: TGG
agatttaggggatacatgtg

SEQ ID NO: 135530 - DNA, 20 bp, Artificial Sequence
  Description of Artificial Sequence: Synthetic oligonucleotide
  Target: LAMA2; (+) strand; PAM type: NRG; PAM sequence: GGG
gatttaggggatacatgtgt

SEQ ID NO: 135531 - DNA, 20 bp, Artificial Sequence
  Description of Artificial Sequence: Synthetic oligonucleotide
  Target: LAMA2; (+) strand; PAM type: NRG; PAM sequence: TGG
acatgtgtgggtttgtgaca

SEQ ID NO: 135532 - DNA, 20 bp, Artificial Sequence
  Description of Artificial Sequence: Synthetic oligonucleotide
  Target: LAMA2; (+) strand; PAM type: NRG; PAM sequence: GGG
catgtgtgggtttgtgacat

SEQ ID NO: 135533 - DNA, 20 bp, Artificial Sequence
  Description of Artificial Sequence: Synthetic oligonucleotide
  Target: LAMA2; (+) strand; PAM type: NRG; PAM sequence: TGG
gacatgggtatattgtgtaa

SEQ ID NO: 135534 - DNA, 20 bp, Artificial Sequence
  Description of Artificial Sequence: Synthetic oligonucleotide
  Target: LAMA2; (+) strand; PAM type: NRG; PAM sequence: GAG
tgggtatattgtgtaatggt

SEQ ID NO: 135535 - DNA, 20 bp, Artificial Sequence
  Description of Artificial Sequence: Synthetic oligonucleotide
  Target: LAMA2; (+) strand; PAM type: NRG; PAM sequence: AGG
gggtatattgtgtaatggtg

SEQ ID NO: 135536 - DNA, 20 bp, Artificial Sequence
  Description of Artificial Sequence: Synthetic oligonucleotide
  Target: LAMA2; (+) strand; PAM type: NRG; PAM sequence: TGG
tattgtgtaatggtgaggtt

SEQ ID NO: 135537 - DNA, 20 bp, Artificial Sequence
  Description of Artificial Sequence: Synthetic oligonucleotide
  Target: LAMA2; (+) strand; PAM type: NRG; PAM sequence: GGG
attgtgtaatggtgaggttt

SEQ ID NO: 135538 - DNA, 20 bp, Artificial Sequence
  Description of Artificial Sequence: Synthetic oligonucleotide
  Target: LAMA2; (+) strand; PAM type: NRG; PAM sequence: TGG
tactgaacccatcacccaaa

SEQ ID NO: 135539 - DNA, 20 bp, Artificial Sequence
  Description of Artificial Sequence: Synthetic oligonucleotide
  Target: LAMA2; (+) strand; PAM type: NRG; PAM sequence: CAG
caaatggtgaacattgtatt

SEQ ID NO: 135540 - DNA, 20 bp, Artificial Sequence
  Description of Artificial Sequence: Synthetic oligonucleotide
  Target: LAMA2; (+) strand; PAM type: NRG; PAM sequence: CAG
tggtgaacattgtattcagt

SEQ ID NO: 135541 - DNA, 20 bp, Artificial Sequence
  Description of Artificial Sequence: Synthetic oligonucleotide
  Target: LAMA2; (+) strand; PAM type: NRG; PAM sequence: CAG
gtattcagtcagtaattttt

SEQ ID NO: 135542 - DNA, 20 bp, Artificial Sequence
  Description of Artificial Sequence: Synthetic oligonucleotide
  Target: LAMA2; (+) strand; PAM type: NRG; PAM sequence: CAG
ttcagtcctcattcctctcc

SEQ ID NO: 135543 - DNA, 20 bp, Artificial Sequence
  Description of Artificial Sequence: Synthetic oligonucleotide
  Target: LAMA2; (+) strand; PAM type: NRG; PAM sequence: TGG
cctcttcccttttgtattcc

SEQ ID NO: 135544 - DNA, 20 bp, Artificial Sequence
  Description of Artificial Sequence: Synthetic oligonucleotide
  Target: LAMA2; (+) strand; PAM type: NRG; PAM sequence: GGG
ctcttcccttttgtattcct

SEQ ID NO: 135545 - DNA, 20 bp, Artificial Sequence
  Description of Artificial Sequence: Synthetic oligonucleotide
  Target: LAMA2; (+) strand; PAM type: NRG; PAM sequence: TAG
ttccatgtgtatccattgtt

SEQ ID NO: 135546 - DNA, 20 bp, Artificial Sequence
  Description of Artificial Sequence: Synthetic oligonucleotide
  Target: LAMA2; (+) strand; PAM type: NRG; PAM sequence: TAG
tccattgtttagctcccact

SEQ ID NO: 135547 - DNA, 20 bp, Artificial Sequence
  Description of Artificial Sequence: Synthetic oligonucleotide
  Target: LAMA2; (+) strand; PAM type: NRG; PAM sequence: AAG
attgtttagctcccacttag

SEQ ID NO: 135548 - DNA, 20 bp, Artificial Sequence
  Description of Artificial Sequence: Synthetic oligonucleotide
  Target: LAMA2; (+) strand; PAM type: NRG; PAM sequence: GAG
atattcaattttctgcttct

SEQ ID NO: 135549 - DNA, 20 bp, Artificial Sequence
  Description of Artificial Sequence: Synthetic oligonucleotide
  Target: LAMA2; (+) strand; PAM type: NRG; PAM sequence: TAG
tgcttctgagttatttcact

SEQ ID NO: 135550 - DNA, 20 bp, Artificial Sequence
  Description of Artificial Sequence: Synthetic oligonucleotide
  Target: LAMA2; (+) strand; PAM type: NRG; PAM sequence: AGG
gcttctgagttatttcactt

SEQ ID NO: 135551 - DNA, 20 bp, Artificial Sequence
  Description of Artificial Sequence: Synthetic oligonucleotide
  Target: LAMA2; (+) strand; PAM type: NRG; PAM sequence: TGG
agttatttcacttaggataa

SEQ ID NO: 135552 - DNA, 20 bp, Artificial Sequence
  Description of Artificial Sequence: Synthetic oligonucleotide
  Target: LAMA2; (+) strand; PAM type: NRG; PAM sequence: CAG
tcacttaggataatggcctc

SEQ ID NO: 135553 - DNA, 20 bp, Artificial Sequence
  Description of Artificial Sequence: Synthetic oligonucleotide
  Target: LAMA2; (+) strand; PAM type: NRG; PAM sequence: AAG
gctccatccatgttgctgca

SEQ ID NO: 135554 - DNA, 20 bp, Artificial Sequence
  Description of Artificial Sequence: Synthetic oligonucleotide
  Target: LAMA2; (+) strand; PAM type: NRG; PAM sequence: AGG
ctccatccatgttgctgcaa

SEQ ID NO: 135555 - DNA, 20 bp, Artificial Sequence
  Description of Artificial Sequence: Synthetic oligonucleotide
  Target: LAMA2; (+) strand; PAM type: NRG; PAM sequence: TGG
catgatttcattatttttta

SEQ ID NO: 135556 - DNA, 20 bp, Artificial Sequence
  Description of Artificial Sequence: Synthetic oligonucleotide
  Target: LAMA2; (+) strand; PAM type: NRG; PAM sequence: CAG
cattattttttatggctgca

SEQ ID NO: 135557 - DNA, 20 bp, Artificial Sequence
  Description of Artificial Sequence: Synthetic oligonucleotide
  Target: LAMA2; (+) strand; PAM type: NRG; PAM sequence: TGG
tatggctgcacagtattcca

SEQ ID NO: 135558 - DNA, 20 bp, Artificial Sequence
  Description of Artificial Sequence: Synthetic oligonucleotide
  Target: LAMA2; (+) strand; PAM type: NRG; PAM sequence: TAG
ttctttgtccaaccaacaca

SEQ ID NO: 135559 - DNA, 20 bp, Artificial Sequence
  Description of Artificial Sequence: Synthetic oligonucleotide
  Target: LAMA2; (+) strand; PAM type: NRG; PAM sequence: GAG
caaccaacacatagattgtt

SEQ ID NO: 135560 - DNA, 20 bp, Artificial Sequence
  Description of Artificial Sequence: Synthetic oligonucleotide
  Target: LAMA2; (+) strand; PAM type: NRG; PAM sequence: TAG
cacatagattgttgagcaca

SEQ ID NO: 135561 - DNA, 20 bp, Artificial Sequence
  Description of Artificial Sequence: Synthetic oligonucleotide
  Target: LAMA2; (+) strand; PAM type: NRG; PAM sequence: GAG
gattgttgagcacatagatt

SEQ ID NO: 135562 - DNA, 20 bp, Artificial Sequence
  Description of Artificial Sequence: Synthetic oligonucleotide
  Target: LAMA2; (+) strand; PAM type: NRG; PAM sequence: TAG
catgactttgctattgtgaa

SEQ ID NO: 135563 - DNA, 20 bp, Artificial Sequence
  Description of Artificial Sequence: Synthetic oligonucleotide
  Target: LAMA2; (+) strand; PAM type: NRG; PAM sequence: TAG
ctgcaacaaacacacaaatg

SEQ ID NO: 135564 - DNA, 20 bp, Artificial Sequence
  Description of Artificial Sequence: Synthetic oligonucleotide
  Target: LAMA2; (+) strand; PAM type: NRG; PAM sequence: AGG
tgcaacaaacacacaaatgt

SEQ ID NO: 135565 - DNA, 20 bp, Artificial Sequence
  Description of Artificial Sequence: Synthetic oligonucleotide
  Target: LAMA2; (+) strand; PAM type: NRG; PAM sequence: TAG
atgtaggtgtctttttgata

SEQ ID NO: 135566 - DNA, 20 bp, Artificial Sequence
  Description of Artificial Sequence: Synthetic oligonucleotide
  Target: LAMA2; (+) strand; PAM type: NRG; PAM sequence: TAG
aggtgtctttttgatatagt

SEQ ID NO: 135567 - DNA, 20 bp, Artificial Sequence
  Description of Artificial Sequence: Synthetic oligonucleotide
  Target: LAMA2; (+) strand; PAM type: NRG; PAM sequence: TGG
tatagttagttcttttcctt

SEQ ID NO: 135568 - DNA, 20 bp, Artificial Sequence
  Description of Artificial Sequence: Synthetic oligonucleotide
  Target: LAMA2; (+) strand; PAM type: NRG; PAM sequence: GGG
atagttagttcttttccttt

SEQ ID NO: 135569 - DNA, 20 bp, Artificial Sequence
  Description of Artificial Sequence: Synthetic oligonucleotide
  Target: LAMA2; (+) strand; PAM type: NRG; PAM sequence: TAG
gttagttcttttcctttggg

SEQ ID NO: 135570 - DNA, 20 bp, Artificial Sequence
  Description of Artificial Sequence: Synthetic oligonucleotide
  Target: LAMA2; (+) strand; PAM type: NRG; PAM sequence: CAG
ttttcctttgggtagatacc

SEQ ID NO: 135571 - DNA, 20 bp, Artificial Sequence
  Description of Artificial Sequence: Synthetic oligonucleotide
  Target: LAMA2; (+) strand; PAM type: NRG; PAM sequence: TGG
tttgggtagatacccagtaa

SEQ ID NO: 135572 - DNA, 20 bp, Artificial Sequence
  Description of Artificial Sequence: Synthetic oligonucleotide
  Target: LAMA2; (+) strand; PAM type: NRG; PAM sequence: GGG
ttgggtagatacccagtaat

SEQ ID NO: 135573 - DNA, 20 bp, Artificial Sequence
  Description of Artificial Sequence: Synthetic oligonucleotide
  Target: LAMA2; (+) strand; PAM type: NRG; PAM sequence: TAG
aatgggattgctatatcaaa

SEQ ID NO: 135574 - DNA, 20 bp, Artificial Sequence
  Description of Artificial Sequence: Synthetic oligonucleotide
  Target: LAMA2; (+) strand; PAM type: NRG; PAM sequence: TAG
gggattgctatatcaaatag

SEQ ID NO: 135575 - DNA, 20 bp, Artificial Sequence
  Description of Artificial Sequence: Synthetic oligonucleotide
  Target: LAMA2; (+) strand; PAM type: NRG; PAM sequence: AAG
agttctcttttttgttcttt

SEQ ID NO: 135576 - DNA, 20 bp, Artificial Sequence
  Description of Artificial Sequence: Synthetic oligonucleotide
  Target: LAMA2; (+) strand; PAM type: NRG; PAM sequence: TAG
actctccatattgatttcca

SEQ ID NO: 135577 - DNA, 20 bp, Artificial Sequence
  Description of Artificial Sequence: Synthetic oligonucleotide
  Target: LAMA2; (+) strand; PAM type: NRG; PAM sequence: AGG
ctctccatattgatttccat

SEQ ID NO: 135578 - DNA, 20 bp, Artificial Sequence
  Description of Artificial Sequence: Synthetic oligonucleotide
  Target: LAMA2; (+) strand; PAM type: NRG; PAM sequence: GGG
tctccatattgatttccata

SEQ ID NO: 135579 - DNA, 20 bp, Artificial Sequence
  Description of Artificial Sequence: Synthetic oligonucleotide
  Target: LAMA2; (+) strand; PAM type: NRG; PAM sequence: GGG
ctccatattgatttccatag

SEQ ID NO: 135580 - DNA, 20 bp, Artificial Sequence
  Description of Artificial Sequence: Synthetic oligonucleotide
  Target: LAMA2; (+) strand; PAM type: NRG; PAM sequence: CAG
gaactaatttacattcccac

SEQ ID NO: 135581 - DNA, 20 bp, Artificial Sequence
  Description of Artificial Sequence: Synthetic oligonucleotide
  Target: LAMA2; (+) strand; PAM type: NRG; PAM sequence: CAG
ctaatttacattcccaccag

SEQ ID NO: 135582 - DNA, 20 bp, Artificial Sequence
  Description of Artificial Sequence: Synthetic oligonucleotide
  Target: LAMA2; (+) strand; PAM type: NRG; PAM sequence: AAG
cattcccaccagcagcgtat

SEQ ID NO: 135583 - DNA, 20 bp, Artificial Sequence
  Description of Artificial Sequence: Synthetic oligonucleotide
  Target: LAMA2; (+) strand; PAM type: NRG; PAM sequence: TAG
attttttgactttttaatac

SEQ ID NO: 135584 - DNA, 20 bp, Artificial Sequence
  Description of Artificial Sequence: Synthetic oligonucleotide
  Target: LAMA2; (+) strand; PAM type: NRG; PAM sequence: TGG
ctattctaatttgtatgact

SEQ ID NO: 135585 - DNA, 20 bp, Artificial Sequence
  Description of Artificial Sequence: Synthetic oligonucleotide
  Target: LAMA2; (+) strand; PAM type: NRG; PAM sequence: TGG
tatgacttggtatctcattg

SEQ ID NO: 135586 - DNA, 20 bp, Artificial Sequence
  Description of Artificial Sequence: Synthetic oligonucleotide
  Target: LAMA2; (+) strand; PAM type: NRG; PAM sequence: TAG
atttgcatctccctgatgat

SEQ ID NO: 135587 - DNA, 20 bp, Artificial Sequence
  Description of Artificial Sequence: Synthetic oligonucleotide
  Target: LAMA2; (+) strand; PAM type: NRG; PAM sequence: GAG
ccctgatgattagtgatact

SEQ ID NO: 135588 - DNA, 20 bp, Artificial Sequence
  Description of Artificial Sequence: Synthetic oligonucleotide
  Target: LAMA2; (+) strand; PAM type: NRG; PAM sequence: TGG
gcattttttcatttgctttt

SEQ ID NO: 135589 - DNA, 20 bp, Artificial Sequence
  Description of Artificial Sequence: Synthetic oligonucleotide
  Target: LAMA2; (+) strand; PAM type: NRG; PAM sequence: TAG
tcttttcttttttttttttt

SEQ ID NO: 135590 - DNA, 20 bp, Artificial Sequence
  Description of Artificial Sequence: Synthetic oligonucleotide
  Target: LAMA2; (+) strand; PAM type: NRG; PAM sequence: AAG
tttcttttttttttttttag

SEQ ID NO: 135591 - DNA, 20 bp, Artificial Sequence
  Description of Artificial Sequence: Synthetic oligonucleotide
  Target: LAMA2; (+) strand; PAM type: NRG; PAM sequence: TGG
tttcctttgcccacttttaa

SEQ ID NO: 135592 - DNA, 20 bp, Artificial Sequence
  Description of Artificial Sequence: Synthetic oligonucleotide
  Target: LAMA2; (+) strand; PAM type: NRG; PAM sequence: GAG
tcctttgcccacttttaatg

SEQ ID NO: 135593 - DNA, 20 bp, Artificial Sequence
  Description of Artificial Sequence: Synthetic oligonucleotide
  Target: LAMA2; (+) strand; PAM type: NRG; PAM sequence: AAG
tgtttttttcttgttgattt

SEQ ID NO: 135594 - DNA, 20 bp, Artificial Sequence
  Description of Artificial Sequence: Synthetic oligonucleotide
  Target: LAMA2; (+) strand; PAM type: NRG; PAM sequence: TAG
ttgttgatttaagtttctta

SEQ ID NO: 135595 - DNA, 20 bp, Artificial Sequence
  Description of Artificial Sequence: Synthetic oligonucleotide
  Target: LAMA2; (+) strand; PAM type: NRG; PAM sequence: TGG
tttaagtttcttatagtttc

SEQ ID NO: 135596 - DNA, 20 bp, Artificial Sequence
  Description of Artificial Sequence: Synthetic oligonucleotide
  Target: LAMA2; (+) strand; PAM type: NRG; PAM sequence: TAG
ttcttatagtttctggatat

SEQ ID NO: 135597 - DNA, 20 bp, Artificial Sequence
  Description of Artificial Sequence: Synthetic oligonucleotide
  Target: LAMA2; (+) strand; PAM type: NRG; PAM sequence: CAG
tctggatattagtcatttgt

SEQ ID NO: 135598 - DNA, 20 bp, Artificial Sequence
  Description of Artificial Sequence: Synthetic oligonucleotide
  Target: LAMA2; (+) strand; PAM type: NRG; PAM sequence: CAG
ttagtcatttgtcagatgca

SEQ ID NO: 135599 - DNA, 20 bp, Artificial Sequence
  Description of Artificial Sequence: Synthetic oligonucleotide
  Target: LAMA2; (+) strand; PAM type: NRG; PAM sequence: TAG
tcatttgtcagatgcacagt

SEQ ID NO: 135600 - DNA, 20 bp, Artificial Sequence
  Description of Artificial Sequence: Synthetic oligonucleotide
  Target: LAMA2; (+) strand; PAM type: NRG; PAM sequence: CAG
aaatattttctgtcattctg

SEQ ID NO: 135601 - DNA, 20 bp, Artificial Sequence
  Description of Artificial Sequence: Synthetic oligonucleotide
  Target: LAMA2; (+) strand; PAM type: NRG; PAM sequence: TAG
tttgctgtgcaaacgccgtt

SEQ ID NO: 135602 - DNA, 20 bp, Artificial Sequence
  Description of Artificial Sequence: Synthetic oligonucleotide
  Target: LAMA2; (+) strand; PAM type: NRG; PAM sequence: AAG
aaacgccgtttagtttaatt

SEQ ID NO: 135603 - DNA, 20 bp, Artificial Sequence
  Description of Artificial Sequence: Synthetic oligonucleotide
  Target: LAMA2; (+) strand; PAM type: NRG; PAM sequence: TAG
tttgcatttgcttttgcaat

SEQ ID NO: 135604 - DNA, 20 bp, Artificial Sequence
  Description of Artificial Sequence: Synthetic oligonucleotide
  Target: LAMA2; (+) strand; PAM type: NRG; PAM sequence: TAG
tttgcttttgcaattagtct

SEQ ID NO: 135605 - DNA, 20 bp, Artificial Sequence
  Description of Artificial Sequence: Synthetic oligonucleotide
  Target: LAMA2; (+) strand; PAM type: NRG; PAM sequence: TAG
ttagtcattaattctttacc

SEQ ID NO: 135606 - DNA, 20 bp, Artificial Sequence
  Description of Artificial Sequence: Synthetic oligonucleotide
  Target: LAMA2; (+) strand; PAM type: NRG; PAM sequence: AGG
tagtcattaattctttacct

SEQ ID NO: 135607 - DNA, 20 bp, Artificial Sequence
  Description of Artificial Sequence: Synthetic oligonucleotide
  Target: LAMA2; (+) strand; PAM type: NRG; PAM sequence: GAG
tctttacctaggccaatgtc

SEQ ID NO: 135608 - DNA, 20 bp, Artificial Sequence
  Description of Artificial Sequence: Synthetic oligonucleotide
  Target: LAMA2; (+) strand; PAM type: NRG; PAM sequence: TAG
atgtcgagaataatttttcc

SEQ ID NO: 135609 - DNA, 20 bp, Artificial Sequence
  Description of Artificial Sequence: Synthetic oligonucleotide
  Target: LAMA2; (+) strand; PAM type: NRG; PAM sequence: AGG
tgtcgagaataatttttcct

SEQ ID NO: 135610 - DNA, 20 bp, Artificial Sequence
  Description of Artificial Sequence: Synthetic oligonucleotide
  Target: LAMA2; (+) strand; PAM type: NRG; PAM sequence: TGG
tttcctaggttttcttttta

SEQ ID NO: 135611 - DNA, 20 bp, Artificial Sequence
  Description of Artificial Sequence: Synthetic oligonucleotide
  Target: LAMA2; (+) strand; PAM type: NRG; PAM sequence: CAG
aggttttctttttatggttt

SEQ ID NO: 135612 - DNA, 20 bp, Artificial Sequence
  Description of Artificial Sequence: Synthetic oligonucleotide
  Target: LAMA2; (+) strand; PAM type: NRG; PAM sequence: AGG
ggttttctttttatggtttc

SEQ ID NO: 135613 - DNA, 20 bp, Artificial Sequence
  Description of Artificial Sequence: Synthetic oligonucleotide
  Target: LAMA2; (+) strand; PAM type: NRG; PAM sequence: AAG
tggtttcaggtcttgcattt

SEQ ID NO: 135614 - DNA, 20 bp, Artificial Sequence
  Description of Artificial Sequence: Synthetic oligonucleotide
  Target: LAMA2; (+) strand; PAM type: NRG; PAM sequence: GAG
ttaagtctttaattgatctt

SEQ ID NO: 135615 - DNA, 20 bp, Artificial Sequence
  Description of Artificial Sequence: Synthetic oligonucleotide
  Target: LAMA2; (+) strand; PAM type: NRG; PAM sequence: TGG
cttgagttaatttttgtata

SEQ ID NO: 135616 - DNA, 20 bp, Artificial Sequence
  Description of Artificial Sequence: Synthetic oligonucleotide
  Target: LAMA2; (+) strand; PAM type: NRG; PAM sequence: TAG
tttttgtatatggtgacaca

SEQ ID NO: 135617 - DNA, 20 bp, Artificial Sequence
  Description of Artificial Sequence: Synthetic oligonucleotide
  Target: LAMA2; (+) strand; PAM type: NRG; PAM sequence: AGG
ttttgtatatggtgacacat

SEQ ID NO: 135618 - DNA, 20 bp, Artificial Sequence
  Description of Artificial Sequence: Synthetic oligonucleotide
  Target: LAMA2; (+) strand; PAM type: NRG; PAM sequence: GGG
tttgtatatggtgacacata

SEQ ID NO: 135619 - DNA, 20 bp, Artificial Sequence
  Description of Artificial Sequence: Synthetic oligonucleotide
  Target: LAMA2; (+) strand; PAM type: NRG; PAM sequence: CAG
atatggtgacacatagggtc

SEQ ID NO: 135620 - DNA, 20 bp, Artificial Sequence
  Description of Artificial Sequence: Synthetic oligonucleotide
  Target: LAMA2; (+) strand; PAM type: NRG; PAM sequence: TAG
gtccagtttcattcttccgc

SEQ ID NO: 135621 - DNA, 20 bp, Artificial Sequence
  Description of Artificial Sequence: Synthetic oligonucleotide
  Target: LAMA2; (+) strand; PAM type: NRG; PAM sequence: CAG
agtttcattcttccgctagc

SEQ ID NO: 135622 - DNA, 20 bp, Artificial Sequence
  Description of Artificial Sequence: Synthetic oligonucleotide
  Target: LAMA2; (+) strand; PAM type: NRG; PAM sequence: TAG
tccgctagccagttattaaa

SEQ ID NO: 135623 - DNA, 20 bp, Artificial Sequence
  Description of Artificial Sequence: Synthetic oligonucleotide
  Target: LAMA2; (+) strand; PAM type: NRG; PAM sequence: AGG
ccgctagccagttattaaat

SEQ ID NO: 135624 - DNA, 20 bp, Artificial Sequence
  Description of Artificial Sequence: Synthetic oligonucleotide
  Target: LAMA2; (+) strand; PAM type: NRG; PAM sequence: GGG
cgctagccagttattaaata

SEQ ID NO: 135625 - DNA, 20 bp, Artificial Sequence
  Description of Artificial Sequence: Synthetic oligonucleotide
  Target: LAMA2; (+) strand; PAM type: NRG; PAM sequence: AAG
tatttttattgactttgtcg

SEQ ID NO: 135626 - DNA, 20 bp, Artificial Sequence
  Description of Artificial Sequence: Synthetic oligonucleotide
  Target: LAMA2; (+) strand; PAM type: NRG; PAM sequence: TAG
ttattgactttgtcgaagat

SEQ ID NO: 135627 - DNA, 20 bp, Artificial Sequence
  Description of Artificial Sequence: Synthetic oligonucleotide
  Target: LAMA2; (+) strand; PAM type: NRG; PAM sequence: TAG
actttgtcgaagattagttg

SEQ ID NO: 135628 - DNA, 20 bp, Artificial Sequence
  Description of Artificial Sequence: Synthetic oligonucleotide
  Target: LAMA2; (+) strand; PAM type: NRG; PAM sequence: AGG
ctttgtcgaagattagttgt

SEQ ID NO: 135629 - DNA, 20 bp, Artificial Sequence
  Description of Artificial Sequence: Synthetic oligonucleotide
  Target: LAMA2; (+) strand; PAM type: NRG; PAM sequence: TGG
gaagattagttgtaggaata

SEQ ID NO: 135630 - DNA, 20 bp, Artificial Sequence
  Description of Artificial Sequence: Synthetic oligonucleotide
  Target: LAMA2; (+) strand; PAM type: NRG; PAM sequence: TAG
ataccattaccatgctgttt

SEQ ID NO: 135631 - DNA, 20 bp, Artificial Sequence
  Description of Artificial Sequence: Synthetic oligonucleotide
  Target: LAMA2; (+) strand; PAM type: NRG; PAM sequence: TAG
ccatgctgttttagttacta

SEQ ID NO: 135632 - DNA, 20 bp, Artificial Sequence
  Description of Artificial Sequence: Synthetic oligonucleotide
  Target: LAMA2; (+) strand; PAM type: NRG; PAM sequence: TAG
ttttagttactatagcctca

SEQ ID NO: 135633 - DNA, 20 bp, Artificial Sequence
  Description of Artificial Sequence: Synthetic oligonucleotide
  Target: LAMA2; (+) strand; PAM type: NRG; PAM sequence: CAG
ttactatagcctcatagtct

SEQ ID NO: 135634 - DNA, 20 bp, Artificial Sequence
  Description of Artificial Sequence: Synthetic oligonucleotide
  Target: LAMA2; (+) strand; PAM type: NRG; PAM sequence: GAG
actatagcctcatagtctca

SEQ ID NO: 135635 - DNA, 20 bp, Artificial Sequence
  Description of Artificial Sequence: Synthetic oligonucleotide
  Target: LAMA2; (+) strand; PAM type: NRG; PAM sequence: TAG
agcctcatagtctcagagca

SEQ ID NO: 135636 - DNA, 20 bp, Artificial Sequence
  Description of Artificial Sequence: Synthetic oligonucleotide
  Target: LAMA2; (+) strand; PAM type: NRG; PAM sequence: AAG
tagtctcagagcatagtgtg

SEQ ID NO: 135637 - DNA, 20 bp, Artificial Sequence
  Description of Artificial Sequence: Synthetic oligonucleotide
  Target: LAMA2; (+) strand; PAM type: NRG; PAM sequence: CAG
ctcagagcatagtgtgaagt

SEQ ID NO: 135638 - DNA, 20 bp, Artificial Sequence
  Description of Artificial Sequence: Synthetic oligonucleotide
  Target: LAMA2; (+) strand; PAM type: NRG; PAM sequence: AGG
tcagagcatagtgtgaagtc

SEQ ID NO: 135639 - DNA, 20 bp, Artificial Sequence
  Description of Artificial Sequence: Synthetic oligonucleotide
  Target: LAMA2; (+) strand; PAM type: NRG; PAM sequence: CAG
gtcaggtgatgtgatgcccc

SEQ ID NO: 135640 - DNA, 20 bp, Artificial Sequence
  Description of Artificial Sequence: Synthetic oligonucleotide
  Target: LAMA2; (+) strand; PAM type: NRG; PAM sequence: TAG
ccagcgttgatctttttgct

SEQ ID NO: 135641 - DNA, 20 bp, Artificial Sequence
  Description of Artificial Sequence: Synthetic oligonucleotide
  Target: LAMA2; (+) strand; PAM type: NRG; PAM sequence: TGG
ctttttgcttagaattgctt

SEQ ID NO: 135642 - DNA, 20 bp, Artificial Sequence
  Description of Artificial Sequence: Synthetic oligonucleotide
  Target: LAMA2; (+) strand; PAM type: NRG; PAM sequence: TGG
ttagaattgctttggttatt

SEQ ID NO: 135643 - DNA, 20 bp, Artificial Sequence
  Description of Artificial Sequence: Synthetic oligonucleotide
  Target: LAMA2; (+) strand; PAM type: NRG; PAM sequence: GGG
tagaattgctttggttattt

SEQ ID NO: 135644 - DNA, 20 bp, Artificial Sequence
  Description of Artificial Sequence: Synthetic oligonucleotide
  Target: LAMA2; (+) strand; PAM type: NRG; PAM sequence: TAG
ttttgtttccatattaattt

SEQ ID NO: 135645 - DNA, 20 bp, Artificial Sequence
  Description of Artificial Sequence: Synthetic oligonucleotide
  Target: LAMA2; (+) strand; PAM type: NRG; PAM sequence: TGG
aattctgtgaaaaatgacat

SEQ ID NO: 135646 - DNA, 20 bp, Artificial Sequence
  Description of Artificial Sequence: Synthetic oligonucleotide
  Target: LAMA2; (+) strand; PAM type: NRG; PAM sequence: TAG
aaatgacattggtaatttga

SEQ ID NO: 135647 - DNA, 20 bp, Artificial Sequence
  Description of Artificial Sequence: Synthetic oligonucleotide
  Target: LAMA2; (+) strand; PAM type: NRG; PAM sequence: AGG
aatgacattggtaatttgat

SEQ ID NO: 135648 - DNA, 20 bp, Artificial Sequence
  Description of Artificial Sequence: Synthetic oligonucleotide
  Target: LAMA2; (+) strand; PAM type: NRG; PAM sequence: GGG
atgacattggtaatttgata

SEQ ID NO: 135649 - DNA, 20 bp, Artificial Sequence
  Description of Artificial Sequence: Synthetic oligonucleotide
  Target: LAMA2; (+) strand; PAM type: NRG; PAM sequence: TAG
tagggattgcactgaatctg

SEQ ID NO: 135650 - DNA, 20 bp, Artificial Sequence
  Description of Artificial Sequence: Synthetic oligonucleotide
  Target: LAMA2; (+) strand; PAM type: NRG; PAM sequence: TGG
actgaatctgtagattgttt

SEQ ID NO: 135651 - DNA, 20 bp, Artificial Sequence
  Description of Artificial Sequence: Synthetic oligonucleotide
  Target: LAMA2; (+) strand; PAM type: NRG; PAM sequence: GGG
ctgaatctgtagattgtttt

SEQ ID NO: 135652 - DNA, 20 bp, Artificial Sequence
  Description of Artificial Sequence: Synthetic oligonucleotide
  Target: LAMA2; (+) strand; PAM type: NRG; PAM sequence: TAG
aatctgtagattgttttggg

SEQ ID NO: 135653 - DNA, 20 bp, Artificial Sequence
  Description of Artificial Sequence: Synthetic oligonucleotide
  Target: LAMA2; (+) strand; PAM type: NRG; PAM sequence: TAG
gtagattgttttgggtagca

SEQ ID NO: 135654 - DNA, 20 bp, Artificial Sequence
  Description of Artificial Sequence: Synthetic oligonucleotide
  Target: LAMA2; (+) strand; PAM type: NRG; PAM sequence: GAG
tattgattctttctatccat

SEQ ID NO: 135655 - DNA, 20 bp, Artificial Sequence
  Description of Artificial Sequence: Synthetic oligonucleotide
  Target: LAMA2; (+) strand; PAM type: NRG; PAM sequence: TGG
attctttctatccatgagca

SEQ ID NO: 135656 - DNA, 20 bp, Artificial Sequence
  Description of Artificial Sequence: Synthetic oligonucleotide
  Target: LAMA2; (+) strand; PAM type: NRG; PAM sequence: CAG
tcatttatgatttctttcct

SEQ ID NO: 135657 - DNA, 20 bp, Artificial Sequence
  Description of Artificial Sequence: Synthetic oligonucleotide
  Target: LAMA2; (+) strand; PAM type: NRG; PAM sequence: AAG
tttctttcctcagtgttttg

SEQ ID NO: 135658 - DNA, 20 bp, Artificial Sequence
  Description of Artificial Sequence: Synthetic oligonucleotide
  Target: LAMA2; (+) strand; PAM type: NRG; PAM sequence: TGG
aagaaatcataatcaattcc

SEQ ID NO: 135659 - DNA, 20 bp, Artificial Sequence
  Description of Artificial Sequence: Synthetic oligonucleotide
  Target: LAMA2; (+) strand; PAM type: NRG; PAM sequence: TAG
aaatcataatcaattcctgg

SEQ ID NO: 135660 - DNA, 20 bp, Artificial Sequence
  Description of Artificial Sequence: Synthetic oligonucleotide
  Target: LAMA2; (+) strand; PAM type: NRG; PAM sequence: GAG
atcataatcaattcctggta

SEQ ID NO: 135661 - DNA, 20 bp, Artificial Sequence
  Description of Artificial Sequence: Synthetic oligonucleotide
  Target: LAMA2; (+) strand; PAM type: NRG; PAM sequence: TGG
gtagagatcttttacctcct

SEQ ID NO: 135662 - DNA, 20 bp, Artificial Sequence
  Description of Artificial Sequence: Synthetic oligonucleotide
  Target: LAMA2; (+) strand; PAM type: NRG; PAM sequence: TAG
tccttggttaaatgtattcc

SEQ ID NO: 135663 - DNA, 20 bp, Artificial Sequence
  Description of Artificial Sequence: Synthetic oligonucleotide
  Target: LAMA2; (+) strand; PAM type: NRG; PAM sequence: AGG
ccttggttaaatgtattcct

SEQ ID NO: 135664 - DNA, 20 bp, Artificial Sequence
  Description of Artificial Sequence: Synthetic oligonucleotide
  Target: LAMA2; (+) strand; PAM type: NRG; PAM sequence: TAG
cctaggtatttcacttttaa

SEQ ID NO: 135665 - DNA, 20 bp, Artificial Sequence
  Description of Artificial Sequence: Synthetic oligonucleotide
  Target: LAMA2; (+) strand; PAM type: NRG; PAM sequence: CAG
gtatgtctaaattttaatca

SEQ ID NO: 135666 - DNA, 20 bp, Artificial Sequence
  Description of Artificial Sequence: Synthetic oligonucleotide
  Target: LAMA2; (+) strand; PAM type: NRG; PAM sequence: TGG
ttttaatcacagcaaattta

SEQ ID NO: 135667 - DNA, 20 bp, Artificial Sequence
  Description of Artificial Sequence: Synthetic oligonucleotide
  Target: LAMA2; (+) strand; PAM type: NRG; PAM sequence: TAG
tggtgtaatcctatcttaat

SEQ ID NO: 135668 - DNA, 20 bp, Artificial Sequence
  Description of Artificial Sequence: Synthetic oligonucleotide
  Target: LAMA2; (+) strand; PAM type: NRG; PAM sequence: TGG
gtaatcctatcttaattaga

SEQ ID NO: 135669 - DNA, 20 bp, Artificial Sequence
  Description of Artificial Sequence: Synthetic oligonucleotide
  Target: LAMA2; (+) strand; PAM type: NRG; PAM sequence: TGG
agatggatgatgtcctttgt

SEQ ID NO: 135670 - DNA, 20 bp, Artificial Sequence
  Description of Artificial Sequence: Synthetic oligonucleotide
  Target: LAMA2; (+) strand; PAM type: NRG; PAM sequence: GGG
gatggatgatgtcctttgtt

SEQ ID NO: 135671 - DNA, 20 bp, Artificial Sequence
  Description of Artificial Sequence: Synthetic oligonucleotide
  Target: LAMA2; (+) strand; PAM type: NRG; PAM sequence: TAG
taataaaatctaatactgct

SEQ ID NO: 135672 - DNA, 20 bp, Artificial Sequence
  Description of Artificial Sequence: Synthetic oligonucleotide
  Target: LAMA2; (+) strand; PAM type: NRG; PAM sequence: TGG
aaaatctaatactgcttagc

SEQ ID NO: 135673 - DNA, 20 bp, Artificial Sequence
  Description of Artificial Sequence: Synthetic oligonucleotide
  Target: LAMA2; (+) strand; PAM type: NRG; PAM sequence: AAG
taatactgcttagctggacc

SEQ ID NO: 135674 - DNA, 20 bp, Artificial Sequence
  Description of Artificial Sequence: Synthetic oligonucleotide
  Target: LAMA2; (+) strand; PAM type: NRG; PAM sequence: TGG
tactgcttagctggaccaag

SEQ ID NO: 135675 - DNA, 20 bp, Artificial Sequence
  Description of Artificial Sequence: Synthetic oligonucleotide
  Target: LAMA2; (+) strand; PAM type: NRG; PAM sequence: AAG
cttagctggaccaagtggat

SEQ ID NO: 135676 - DNA, 20 bp, Artificial Sequence
  Description of Artificial Sequence: Synthetic oligonucleotide
  Target: LAMA2; (+) strand; PAM type: NRG; PAM sequence: TAG
taagatgacatttgaatcca

SEQ ID NO: 135677 - DNA, 20 bp, Artificial Sequence
  Description of Artificial Sequence: Synthetic oligonucleotide
  Target: LAMA2; (+) strand; PAM type: NRG; PAM sequence: TGG
gatgacatttgaatccatag

SEQ ID NO: 135678 - DNA, 20 bp, Artificial Sequence
  Description of Artificial Sequence: Synthetic oligonucleotide
  Target: LAMA2; (+) strand; PAM type: NRG; PAM sequence: TAG
tgaatccatagtggaccttg

SEQ ID NO: 135679 - DNA, 20 bp, Artificial Sequence
  Description of Artificial Sequence: Synthetic oligonucleotide
  Target: LAMA2; (+) strand; PAM type: NRG; PAM sequence: TGG
cttgtagcccttcttttatt

SEQ ID NO: 135680 - DNA, 20 bp, Artificial Sequence
  Description of Artificial Sequence: Synthetic oligonucleotide
  Target: LAMA2; (+) strand; PAM type: NRG; PAM sequence: GGG
ttgtagcccttcttttattt

SEQ ID NO: 135681 - DNA, 20 bp, Artificial Sequence
  Description of Artificial Sequence: Synthetic oligonucleotide
  Target: LAMA2; (+) strand; PAM type: NRG; PAM sequence: TAG
ttatttgggtatctactata

SEQ ID NO: 135682 - DNA, 20 bp, Artificial Sequence
  Description of Artificial Sequence: Synthetic oligonucleotide
  Target: LAMA2; (+) strand; PAM type: NRG; PAM sequence: GAG
atttgggtatctactatata

SEQ ID NO: 135683 - DNA, 20 bp, Artificial Sequence
  Description of Artificial Sequence: Synthetic oligonucleotide
  Target: LAMA2; (+) strand; PAM type: NRG; PAM sequence: TGG
ctactatatagagaaaacat

SEQ ID NO: 135684 - DNA, 20 bp, Artificial Sequence
  Description of Artificial Sequence: Synthetic oligonucleotide
  Target: LAMA2; (+) strand; PAM type: NRG; PAM sequence: AAG
ggtattctataaacatgcct

SEQ ID NO: 135685 - DNA, 20 bp, Artificial Sequence
  Description of Artificial Sequence: Synthetic oligonucleotide
  Target: LAMA2; (+) strand; PAM type: NRG; PAM sequence: TGG
taaacatgcctaagatccat

SEQ ID NO: 135686 - DNA, 20 bp, Artificial Sequence
  Description of Artificial Sequence: Synthetic oligonucleotide
  Target: LAMA2; (+) strand; PAM type: NRG; PAM sequence: GAG
aacatgcctaagatccattg

SEQ ID NO: 135687 - DNA, 20 bp, Artificial Sequence
  Description of Artificial Sequence: Synthetic oligonucleotide
  Target: LAMA2; (+) strand; PAM type: NRG; PAM sequence: TGG
aagatccattggagtatgta

SEQ ID NO: 135688 - DNA, 20 bp, Artificial Sequence
  Description of Artificial Sequence: Synthetic oligonucleotide
  Target: LAMA2; (+) strand; PAM type: NRG; PAM sequence: TAG
tccattggagtatgtatggt

SEQ ID NO: 135689 - DNA, 20 bp, Artificial Sequence
  Description of Artificial Sequence: Synthetic oligonucleotide
  Target: LAMA2; (+) strand; PAM type: NRG; PAM sequence: TGG
agctctgtttattttctttt

SEQ ID NO: 135690 - DNA, 20 bp, Artificial Sequence
  Description of Artificial Sequence: Synthetic oligonucleotide
  Target: LAMA2; (+) strand; PAM type: NRG; PAM sequence: TGG
cattttcactgtaacctgtt

SEQ ID NO: 135691 - DNA, 20 bp, Artificial Sequence
  Description of Artificial Sequence: Synthetic oligonucleotide
  Target: LAMA2; (+) strand; PAM type: NRG; PAM sequence: AAG
tttcactgtaacctgtttgg

SEQ ID NO: 135692 - DNA, 20 bp, Artificial Sequence
  Description of Artificial Sequence: Synthetic oligonucleotide
  Target: LAMA2; (+) strand; PAM type: NRG; PAM sequence: AGG
ttcactgtaacctgtttgga

SEQ ID NO: 135693 - DNA, 20 bp, Artificial Sequence
  Description of Artificial Sequence: Synthetic oligonucleotide
  Target: LAMA2; (+) strand; PAM type: NRG; PAM sequence: AAG
actgtaacctgtttggaagg

SEQ ID NO: 135694 - DNA, 20 bp, Artificial Sequence
  Description of Artificial Sequence: Synthetic oligonucleotide
  Target: LAMA2; (+) strand; PAM type: NRG; PAM sequence: GAG
tgtaacctgtttggaaggaa

SEQ ID NO: 135695 - DNA, 20 bp, Artificial Sequence
  Description of Artificial Sequence: Synthetic oligonucleotide
  Target: LAMA2; (+) strand; PAM type: NRG; PAM sequence: GAG
taacctgtttggaaggaaga

SEQ ID NO: 135696 - DNA, 20 bp, Artificial Sequence
  Description of Artificial Sequence: Synthetic oligonucleotide
  Target: LAMA2; (+) strand; PAM type: NRG; PAM sequence: AAG
ctgtttggaaggaagagagt

SEQ ID NO: 135697 - DNA, 20 bp, Artificial Sequence
  Description of Artificial Sequence: Synthetic oligonucleotide
  Target: LAMA2; (+) strand; PAM type: NRG; PAM sequence: CAG
aattttaaaaattaattcaa

SEQ ID NO: 135698 - DNA, 20 bp, Artificial Sequence
  Description of Artificial Sequence: Synthetic oligonucleotide
  Target: LAMA2; (+) strand; PAM type: NRG; PAM sequence: GAG
ttttaaaaattaattcaaca

SEQ ID NO: 135699 - DNA, 20 bp, Artificial Sequence
  Description of Artificial Sequence: Synthetic oligonucleotide
  Target: LAMA2; (+) strand; PAM type: NRG; PAM sequence: AAG
tttttctgattaaaaaaaaa

SEQ ID NO: 135700 - DNA, 20 bp, Artificial Sequence
  Description of Artificial Sequence: Synthetic oligonucleotide
  Target: LAMA2; (+) strand; PAM type: NRG; PAM sequence: AAG
ttctgattaaaaaaaaaaag

SEQ ID NO: 135701 - DNA, 20 bp, Artificial Sequence
  Description of Artificial Sequence: Synthetic oligonucleotide
  Target: LAMA2; (+) strand; PAM type: NRG; PAM sequence: AAG
tgattaaaaaaaaaaagaag

SEQ ID NO: 135702 - DNA, 20 bp, Artificial Sequence
  Description of Artificial Sequence: Synthetic oligonucleotide
  Target: LAMA2; (+) strand; PAM type: NRG; PAM sequence: AAG
ttaaaaaaaaaaagaagaag

SEQ ID NO: 135703 - DNA, 20 bp, Artificial Sequence
  Description of Artificial Sequence: Synthetic oligonucleotide
  Target: LAMA2; (+) strand; PAM type: NRG; PAM sequence: AAG
aaaaaaaagaagaagaagaa

SEQ ID NO: 135704 - DNA, 20 bp, Artificial Sequence
  Description of Artificial Sequence: Synthetic oligonucleotide
  Target: LAMA2; (+) strand; PAM type: NRG; PAM sequence: GAG
aaaaaagaagaagaagaaaa

SEQ ID NO: 135705 - DNA, 20 bp, Artificial Sequence
  Description of Artificial Sequence: Synthetic oligonucleotide
  Target: LAMA2; (+) strand; PAM type: NRG; PAM sequence: CAG
aagaagaagaaaagagccca

SEQ ID NO: 135706 - DNA, 20 bp, Artificial Sequence
  Description of Artificial Sequence: Synthetic oligonucleotide
  Target: LAMA2; (+) strand; PAM type: NRG; PAM sequence: CAG
aagaagaaaagagcccacag

SEQ ID NO: 135707 - DNA, 20 bp, Artificial Sequence
  Description of Artificial Sequence: Synthetic oligonucleotide
  Target: LAMA2; (+) strand; PAM type: NRG; PAM sequence: CAG
gaaaagagcccacagcagct

SEQ ID NO: 135708 - DNA, 20 bp, Artificial Sequence
  Description of Artificial Sequence: Synthetic oligonucleotide
  Target: LAMA2; (+) strand; PAM type: NRG; PAM sequence: AAG
aagagcccacagcagctcag

SEQ ID NO: 135709 - DNA, 20 bp, Artificial Sequence
  Description of Artificial Sequence: Synthetic oligonucleotide
  Target: LAMA2; (+) strand; PAM type: NRG; PAM sequence: TAG
ccaaaaatactcttttattt

SEQ ID NO: 135710 - DNA, 20 bp, Artificial Sequence
  Description of Artificial Sequence: Synthetic oligonucleotide
  Target: LAMA2; (+) strand; PAM type: NRG; PAM sequence: AAG
aaaatactcttttattttag

SEQ ID NO: 135711 - DNA, 20 bp, Artificial Sequence
  Description of Artificial Sequence: Synthetic oligonucleotide
  Target: LAMA2; (+) strand; PAM type: NRG; PAM sequence: AAG
cttttattttagaagctgaa

SEQ ID NO: 135712 - DNA, 20 bp, Artificial Sequence
  Description of Artificial Sequence: Synthetic oligonucleotide
  Target: LAMA2; (+) strand; PAM type: NRG; PAM sequence: AGG
ttttattttagaagctgaaa

SEQ ID NO: 135713 - DNA, 20 bp, Artificial Sequence
  Description of Artificial Sequence: Synthetic oligonucleotide
  Target: LAMA2; (+) strand; PAM type: NRG; PAM sequence: GGG
tttattttagaagctgaaaa

SEQ ID NO: 135714 - DNA, 20 bp, Artificial Sequence
  Description of Artificial Sequence: Synthetic oligonucleotide
  Target: LAMA2; (+) strand; PAM type: NRG; PAM sequence: CAG
attttagaagctgaaaaggg

SEQ ID NO: 135715 - DNA, 20 bp, Artificial Sequence
  Description of Artificial Sequence: Synthetic oligonucleotide
  Target: LAMA2; (+) strand; PAM type: NRG; PAM sequence: TGG
aaaagggcagatctaactaa

SEQ ID NO: 135716 - DNA, 20 bp, Artificial Sequence
  Description of Artificial Sequence: Synthetic oligonucleotide
  Target: LAMA2; (+) strand; PAM type: NRG; PAM sequence: AAG
gcagatctaactaatggtac

SEQ ID NO: 135717 - DNA, 20 bp, Artificial Sequence
  Description of Artificial Sequence: Synthetic oligonucleotide
  Target: LAMA2; (+) strand; PAM type: NRG; PAM sequence: AAG
aatggtacaagacaaattga

SEQ ID NO: 135718 - DNA, 20 bp, Artificial Sequence
  Description of Artificial Sequence: Synthetic oligonucleotide
  Target: LAMA2; (+) strand; PAM type: NRG; PAM sequence: CAG
caaattgaaagtcctataaa

SEQ ID NO: 135719 - DNA, 20 bp, Artificial Sequence
  Description of Artificial Sequence: Synthetic oligonucleotide
  Target: LAMA2; (+) strand; PAM type: NRG; PAM sequence: AGG
aaattgaaagtcctataaac

SEQ ID NO: 135720 - DNA, 20 bp, Artificial Sequence
  Description of Artificial Sequence: Synthetic oligonucleotide
  Target: LAMA2; (+) strand; PAM type: NRG; PAM sequence: TAG
gaaagtcctataaacaggaa

SEQ ID NO: 135721 - DNA, 20 bp, Artificial Sequence
  Description of Artificial Sequence: Synthetic oligonucleotide
  Target: LAMA2; (+) strand; PAM type: NRG; PAM sequence: TGG
aatagaatacttactctctt

SEQ ID NO: 135722 - DNA, 20 bp, Artificial Sequence
  Description of Artificial Sequence: Synthetic oligonucleotide
  Target: LAMA2; (+) strand; PAM type: NRG; PAM sequence: TGG
tttgtttgcttctgaacaac

SEQ ID NO: 135723 - DNA, 20 bp, Artificial Sequence
  Description of Artificial Sequence: Synthetic oligonucleotide
  Target: LAMA2; (+) strand; PAM type: NRG; PAM sequence: CAG
caaccttctttctttccccc

SEQ ID NO: 135724 - DNA, 20 bp, Artificial Sequence
  Description of Artificial Sequence: Synthetic oligonucleotide
  Target: LAMA2; (+) strand; PAM type: NRG; PAM sequence: TAG
ctttctttccccccagctct

SEQ ID NO: 135725 - DNA, 20 bp, Artificial Sequence
  Description of Artificial Sequence: Synthetic oligonucleotide
  Target: LAMA2; (+) strand; PAM type: NRG; PAM sequence: AGG
tttctttccccccagctctt

SEQ ID NO: 135726 - DNA, 20 bp, Artificial Sequence
  Description of Artificial Sequence: Synthetic oligonucleotide
  Target: LAMA2; (+) strand; PAM type: NRG; PAM sequence: CAG
gctcttaggcattgttgtgt

SEQ ID NO: 135727 - DNA, 20 bp, Artificial Sequence
  Description of Artificial Sequence: Synthetic oligonucleotide
  Target: LAMA2; (+) strand; PAM type: NRG; PAM sequence: AGG
ctcttaggcattgttgtgtc

SEQ ID NO: 135728 - DNA, 20 bp, Artificial Sequence
  Description of Artificial Sequence: Synthetic oligonucleotide
  Target: LAMA2; (+) strand; PAM type: NRG; PAM sequence: CAG
taggcattgttgtgtcagga

SEQ ID NO: 135729 - DNA, 20 bp, Artificial Sequence
  Description of Artificial Sequence: Synthetic oligonucleotide
  Target: LAMA2; (+) strand; PAM type: NRG; PAM sequence: TGG
ttgttgtgtcaggacagcta

SEQ ID NO: 135730 - DNA, 20 bp, Artificial Sequence
  Description of Artificial Sequence: Synthetic oligonucleotide
  Target: LAMA2; (+) strand; PAM type: NRG; PAM sequence: TGG
aggacagctatggttcaaat

SEQ ID NO: 135731 - DNA, 20 bp, Artificial Sequence
  Description of Artificial Sequence: Synthetic oligonucleotide
  Target: LAMA2; (+) strand; PAM type: NRG; PAM sequence: GGG
ggacagctatggttcaaatt

SEQ ID NO: 135732 - DNA, 20 bp, Artificial Sequence
  Description of Artificial Sequence: Synthetic oligonucleotide
  Target: LAMA2; (+) strand; PAM type: NRG; PAM sequence: CAG
ttcaaattgggctgattttc

SEQ ID NO: 135733 - DNA, 20 bp, Artificial Sequence
  Description of Artificial Sequence: Synthetic oligonucleotide
  Target: LAMA2; (+) strand; PAM type: NRG; PAM sequence: TGG
taaacccttcatctgcatcg

SEQ ID NO: 135734 - DNA, 20 bp, Artificial Sequence
  Description of Artificial Sequence: Synthetic oligonucleotide
  Target: LAMA2; (+) strand; PAM type: NRG; PAM sequence: TAG
cgtggatcaaatacattaac

SEQ ID NO: 135735 - DNA, 20 bp, Artificial Sequence
  Description of Artificial Sequence: Synthetic oligonucleotide
  Target: LAMA2; (+) strand; PAM type: NRG; PAM sequence: CAG
atacattaactagctgtctg

SEQ ID NO: 135736 - DNA, 20 bp, Artificial Sequence
  Description of Artificial Sequence: Synthetic oligonucleotide
  Target: LAMA2; (+) strand; PAM type: NRG; PAM sequence: CAG
aactagctgtctgcagtgca

SEQ ID NO: 135737 - DNA, 20 bp, Artificial Sequence
  Description of Artificial Sequence: Synthetic oligonucleotide
  Target: LAMA2; (+) strand; PAM type: NRG; PAM sequence: TGG
agctgtctgcagtgcacagc

SEQ ID NO: 135738 - DNA, 20 bp, Artificial Sequence
  Description of Artificial Sequence: Synthetic oligonucleotide
  Target: LAMA2; (+) strand; PAM type: NRG; PAM sequence: TAG
tatgctctgacacacccaca

SEQ ID NO: 135739 - DNA, 20 bp, Artificial Sequence
  Description of Artificial Sequence: Synthetic oligonucleotide
  Target: LAMA2; (+) strand; PAM type: NRG; PAM sequence: CAG
tctgacacacccacatagct

SEQ ID NO: 135740 - DNA, 20 bp, Artificial Sequence
  Description of Artificial Sequence: Synthetic oligonucleotide
  Target: LAMA2; (+) strand; PAM type: NRG; PAM sequence: AGG
ctgacacacccacatagctc

SEQ ID NO: 135741 - DNA, 20 bp, Artificial Sequence
  Description of Artificial Sequence: Synthetic oligonucleotide
  Target: LAMA2; (+) strand; PAM type: NRG; PAM sequence: CAG
acccacatagctcaggattt

SEQ ID NO: 135742 - DNA, 20 bp, Artificial Sequence
  Description of Artificial Sequence: Synthetic oligonucleotide
  Target: LAMA2; (+) strand; PAM type: NRG; PAM sequence: CAG
cacatagctcaggatttcag

SEQ ID NO: 135743 - DNA, 20 bp, Artificial Sequence
  Description of Artificial Sequence: Synthetic oligonucleotide
  Target: LAMA2; (+) strand; PAM type: NRG; PAM sequence: TAG
tatctccttttcttccttga

SEQ ID NO: 135744 - DNA, 20 bp, Artificial Sequence
  Description of Artificial Sequence: Synthetic oligonucleotide
  Target: LAMA2; (+) strand; PAM type: NRG; PAM sequence: AGG
atctccttttcttccttgat

SEQ ID NO: 135745 - DNA, 20 bp, Artificial Sequence
  Description of Artificial Sequence: Synthetic oligonucleotide
  Target: LAMA2; (+) strand; PAM type: NRG; PAM sequence: TAG
ttttcttccttgataggtct

SEQ ID NO: 135746 - DNA, 20 bp, Artificial Sequence
  Description of Artificial Sequence: Synthetic oligonucleotide
  Target: LAMA2; (+) strand; PAM type: NRG; PAM sequence: TGG
ggtcttagaacattttaaat

SEQ ID NO: 135747 - DNA, 20 bp, Artificial Sequence
  Description of Artificial Sequence: Synthetic oligonucleotide
  Target: LAMA2; (+) strand; PAM type: NRG; PAM sequence: TAG
atatttttcaaaatgctcca

SEQ ID NO: 135748 - DNA, 20 bp, Artificial Sequence
  Description of Artificial Sequence: Synthetic oligonucleotide
  Target: LAMA2; (+) strand; PAM type: NRG; PAM sequence: TAG
ttcaaaatgctccatagacc

SEQ ID NO: 135749 - DNA, 20 bp, Artificial Sequence
  Description of Artificial Sequence: Synthetic oligonucleotide
  Target: LAMA2; (+) strand; PAM type: NRG; PAM sequence: AAG
aaaatgctccatagacctag

SEQ ID NO: 135750 - DNA, 20 bp, Artificial Sequence
  Description of Artificial Sequence: Synthetic oligonucleotide
  Target: LAMA2; (+) strand; PAM type: NRG; PAM sequence: TGG
catagacctagaagctgaaa

SEQ ID NO: 135751 - DNA, 20 bp, Artificial Sequence
  Description of Artificial Sequence: Synthetic oligonucleotide
  Target: LAMA2; (+) strand; PAM type: NRG; PAM sequence: AAG
gacctagaagctgaaatgga

SEQ ID NO: 135752 - DNA, 20 bp, Artificial Sequence
  Description of Artificial Sequence: Synthetic oligonucleotide
  Target: LAMA2; (+) strand; PAM type: NRG; PAM sequence: TAG
tagaagctgaaatggaaagt

SEQ ID NO: 135753 - DNA, 20 bp, Artificial Sequence
  Description of Artificial Sequence: Synthetic oligonucleotide
  Target: LAMA2; (+) strand; PAM type: NRG; PAM sequence: GAG
aattttgattttattccttt

SEQ ID NO: 135754 - DNA, 20 bp, Artificial Sequence
  Description of Artificial Sequence: Synthetic oligonucleotide
  Target: LAMA2; (+) strand; PAM type: NRG; PAM sequence: GAG
ttttgattttattcctttga

SEQ ID NO: 135755 - DNA, 20 bp, Artificial Sequence
  Description of Artificial Sequence: Synthetic oligonucleotide
  Target: LAMA2; (+) strand; PAM type: NRG; PAM sequence: TGG
gattttattcctttgagaga

SEQ ID NO: 135756 - DNA, 20 bp, Artificial Sequence
  Description of Artificial Sequence: Synthetic oligonucleotide
  Target: LAMA2; (+) strand; PAM type: NRG; PAM sequence: TAG
tttattcctttgagagatgg

SEQ ID NO: 135757 - DNA, 20 bp, Artificial Sequence
  Description of Artificial Sequence: Synthetic oligonucleotide
  Target: LAMA2; (+) strand; PAM type: NRG; PAM sequence: AGG
ttattcctttgagagatggt

SEQ ID NO: 135758 - DNA, 20 bp, Artificial Sequence
  Description of Artificial Sequence: Synthetic oligonucleotide
  Target: LAMA2; (+) strand; PAM type: NRG; PAM sequence: TGG
tttgagagatggtaggtgat

SEQ ID NO: 135759 - DNA, 20 bp, Artificial Sequence
  Description of Artificial Sequence: Synthetic oligonucleotide
  Target: LAMA2; (+) strand; PAM type: NRG; PAM sequence: TAG
ggtaggtgattggcatgaaa

SEQ ID NO: 135760 - DNA, 20 bp, Artificial Sequence
  Description of Artificial Sequence: Synthetic oligonucleotide
  Target: LAMA2; (+) strand; PAM type: NRG; PAM sequence: CAG
aggtgattggcatgaaatag

SEQ ID NO: 135761 - DNA, 20 bp, Artificial Sequence
  Description of Artificial Sequence: Synthetic oligonucleotide
  Target: LAMA2; (+) strand; PAM type: NRG; PAM sequence: AGG
ggtgattggcatgaaatagc

SEQ ID NO: 135762 - DNA, 20 bp, Artificial Sequence
  Description of Artificial Sequence: Synthetic oligonucleotide
  Target: LAMA2; (+) strand; PAM type: NRG; PAM sequence: AAG
ggataaatattgtctaccaa

SEQ ID NO: 135763 - DNA, 20 bp, Artificial Sequence
  Description of Artificial Sequence: Synthetic oligonucleotide
  Target: LAMA2; (+) strand; PAM type: NRG; PAM sequence: AAG
aaatattgtctaccaaaagt

SEQ ID NO: 135764 - DNA, 20 bp, Artificial Sequence
  Description of Artificial Sequence: Synthetic oligonucleotide
  Target: LAMA2; (+) strand; PAM type: NRG; PAM sequence: GAG
ttgtctaccaaaagtaagat

SEQ ID NO: 135765 - DNA, 20 bp, Artificial Sequence
  Description of Artificial Sequence: Synthetic oligonucleotide
  Target: LAMA2; (+) strand; PAM type: NRG; PAM sequence: GAG
gtctaccaaaagtaagatga

SEQ ID NO: 135766 - DNA, 20 bp, Artificial Sequence
  Description of Artificial Sequence: Synthetic oligonucleotide
  Target: LAMA2; (+) strand; PAM type: NRG; PAM sequence: GAG
ctaccaaaagtaagatgaga

SEQ ID NO: 135767 - DNA, 20 bp, Artificial Sequence
  Description of Artificial Sequence: Synthetic oligonucleotide
  Target: LAMA2; (+) strand; PAM type: NRG; PAM sequence: GAG
accaaaagtaagatgagaga

SEQ ID NO: 135768 - DNA, 20 bp, Artificial Sequence
  Description of Artificial Sequence: Synthetic oligonucleotide
  Target: LAMA2; (+) strand; PAM type: NRG; PAM sequence: GAG
caaaagtaagatgagagaga

SEQ ID NO: 135769 - DNA, 20 bp, Artificial Sequence
  Description of Artificial Sequence: Synthetic oligonucleotide
  Target: LAMA2; (+) strand; PAM type: NRG; PAM sequence: AGG
aaaagtaagatgagagagag

SEQ ID NO: 135770 - DNA, 20 bp, Artificial Sequence
  Description of Artificial Sequence: Synthetic oligonucleotide
  Target: LAMA2; (+) strand; PAM type: NRG; PAM sequence: AAG
agtaagatgagagagagagg

SEQ ID NO: 135771 - DNA, 20 bp, Artificial Sequence
  Description of Artificial Sequence: Synthetic oligonucleotide
  Target: LAMA2; (+) strand; PAM type: NRG; PAM sequence: CAG
agatgagagagagaggaaga

SEQ ID NO: 135772 - DNA, 20 bp, Artificial Sequence
  Description of Artificial Sequence: Synthetic oligonucleotide
  Target: LAMA2; (+) strand; PAM type: NRG; PAM sequence: GAG
atgagagagagaggaagaca

SEQ ID NO: 135773 - DNA, 20 bp, Artificial Sequence
  Description of Artificial Sequence: Synthetic oligonucleotide
  Target: LAMA2; (+) strand; PAM type: NRG; PAM sequence: GAG
gagagagagaggaagacaga

SEQ ID NO: 135774 - DNA, 20 bp, Artificial Sequence
  Description of Artificial Sequence: Synthetic oligonucleotide
  Target: LAMA2; (+) strand; PAM type: NRG; PAM sequence: CAG
gagagaggaagacagagaga

SEQ ID NO: 135775 - DNA, 20 bp, Artificial Sequence
  Description of Artificial Sequence: Synthetic oligonucleotide
  Target: LAMA2; (+) strand; PAM type: NRG; PAM sequence: GAG
gagaggaagacagagagaca

SEQ ID NO: 135776 - DNA, 20 bp, Artificial Sequence
  Description of Artificial Sequence: Synthetic oligonucleotide
  Target: LAMA2; (+) strand; PAM type: NRG; PAM sequence: CAG
ggaagacagagagacagaga

SEQ ID NO: 135777 - DNA, 20 bp, Artificial Sequence
  Description of Artificial Sequence: Synthetic oligonucleotide
  Target: LAMA2; (+) strand; PAM type: NRG; PAM sequence: AAG
gacagagagacagagacaga

SEQ ID NO: 135778 - DNA, 20 bp, Artificial Sequence
  Description of Artificial Sequence: Synthetic oligonucleotide
  Target: LAMA2; (+) strand; PAM type: NRG; PAM sequence: AGG
acagagagacagagacagaa

SEQ ID NO: 135779 - DNA, 20 bp, Artificial Sequence
  Description of Artificial Sequence: Synthetic oligonucleotide
  Target: LAMA2; (+) strand; PAM type: NRG; PAM sequence: AAG
gagacagagacagaaaggat

SEQ ID NO: 135780 - DNA, 20 bp, Artificial Sequence
  Description of Artificial Sequence: Synthetic oligonucleotide
  Target: LAMA2; (+) strand; PAM type: NRG; PAM sequence: AGG
agacagagacagaaaggata

SEQ ID NO: 135781 - DNA, 20 bp, Artificial Sequence
  Description of Artificial Sequence: Synthetic oligonucleotide
  Target: LAMA2; (+) strand; PAM type: NRG; PAM sequence: CAG
gagacagaaaggataaggat

SEQ ID NO: 135782 - DNA, 20 bp, Artificial Sequence
  Description of Artificial Sequence: Synthetic oligonucleotide
  Target: LAMA2; (+) strand; PAM type: NRG; PAM sequence: CAG
cagccatgtattattgtaaa

SEQ ID NO: 135783 - DNA, 20 bp, Artificial Sequence
  Description of Artificial Sequence: Synthetic oligonucleotide
  Target: LAMA2; (+) strand; PAM type: NRG; PAM sequence: TAG
gtaaacagtatatgatatct

SEQ ID NO: 135784 - DNA, 20 bp, Artificial Sequence
  Description of Artificial Sequence: Synthetic oligonucleotide
  Target: LAMA2; (+) strand; PAM type: NRG; PAM sequence: GAG
aaacagtatatgatatctta

SEQ ID NO: 135785 - DNA, 20 bp, Artificial Sequence
  Description of Artificial Sequence: Synthetic oligonucleotide
  Target: LAMA2; (+) strand; PAM type: NRG; PAM sequence: AAG
attttaaaatgaatatattg

SEQ ID NO: 135786 - DNA, 20 bp, Artificial Sequence
  Description of Artificial Sequence: Synthetic oligonucleotide
  Target: LAMA2; (+) strand; PAM type: NRG; PAM sequence: TGG
gaattgttgcattgactgaa

SEQ ID NO: 135787 - DNA, 20 bp, Artificial Sequence
  Description of Artificial Sequence: Synthetic oligonucleotide
  Target: LAMA2; (+) strand; PAM type: NRG; PAM sequence: TAG
ttgactgaatggcttttcca

SEQ ID NO: 135788 - DNA, 20 bp, Artificial Sequence
  Description of Artificial Sequence: Synthetic oligonucleotide
  Target: LAMA2; (+) strand; PAM type: NRG; PAM sequence: AAG
ctgaatggcttttccataga

SEQ ID NO: 135789 - DNA, 20 bp, Artificial Sequence
  Description of Artificial Sequence: Synthetic oligonucleotide
  Target: LAMA2; (+) strand; PAM type: NRG; PAM sequence: CAG
gcttttccatagaaagactc

SEQ ID NO: 135790 - DNA, 20 bp, Artificial Sequence
  Description of Artificial Sequence: Synthetic oligonucleotide
  Target: LAMA2; (+) strand; PAM type: NRG; PAM sequence: CAG
agaaagactccagctatcat

SEQ ID NO: 135791 - DNA, 20 bp, Artificial Sequence
  Description of Artificial Sequence: Synthetic oligonucleotide
  Target: LAMA2; (+) strand; PAM type: NRG; PAM sequence: TGG
tcagttatcaattacattat

SEQ ID NO: 135792 - DNA, 20 bp, Artificial Sequence
  Description of Artificial Sequence: Synthetic oligonucleotide
  Target: LAMA2; (+) strand; PAM type: NRG; PAM sequence: TGG
gttatcaattacattattgg

SEQ ID NO: 135793 - DNA, 20 bp, Artificial Sequence
  Description of Artificial Sequence: Synthetic oligonucleotide
  Target: LAMA2; (+) strand; PAM type: NRG; PAM sequence: GAG
caaacttgactataaatgtt

SEQ ID NO: 135794 - DNA, 20 bp, Artificial Sequence
  Description of Artificial Sequence: Synthetic oligonucleotide
  Target: LAMA2; (+) strand; PAM type: NRG; PAM sequence: GAG
taaatgttgagacatttttc

SEQ ID NO: 135795 - DNA, 20 bp, Artificial Sequence
  Description of Artificial Sequence: Synthetic oligonucleotide
  Target: LAMA2; (+) strand; PAM type: NRG; PAM sequence: AAG
gtgtgtgtatgtgtgtgtat

SEQ ID NO: 135796 - DNA, 20 bp, Artificial Sequence
  Description of Artificial Sequence: Synthetic oligonucleotide
  Target: LAMA2; (+) strand; PAM type: NRG; PAM sequence: TGG
gtgtgtgtataagtatctat

SEQ ID NO: 135797 - DNA, 20 bp, Artificial Sequence
  Description of Artificial Sequence: Synthetic oligonucleotide
  Target: LAMA2; (+) strand; PAM type: NRG; PAM sequence: TAG
ctattggtatctccgcatgt

SEQ ID NO: 135798 - DNA, 20 bp, Artificial Sequence
  Description of Artificial Sequence: Synthetic oligonucleotide
  Target: LAMA2; (+) strand; PAM type: NRG; PAM sequence: AAG
taaaaatataataatatgcc

SEQ ID NO: 135799 - DNA, 20 bp, Artificial Sequence
  Description of Artificial Sequence: Synthetic oligonucleotide
  Target: LAMA2; (+) strand; PAM type: NRG; PAM sequence: CGG
atataataatatgccaagta

SEQ ID NO: 135800 - DNA, 20 bp, Artificial Sequence
  Description of Artificial Sequence: Synthetic oligonucleotide
  Target: LAMA2; (+) strand; PAM type: NRG; PAM sequence: AAG
tatgccaagtacggacaatg

SEQ ID NO: 135801 - DNA, 20 bp, Artificial Sequence
  Description of Artificial Sequence: Synthetic oligonucleotide
  Target: LAMA2; (+) strand; PAM type: NRG; PAM sequence: CAG
ccaagtacggacaatgaaga

SEQ ID NO: 135802 - DNA, 20 bp, Artificial Sequence
  Description of Artificial Sequence: Synthetic oligonucleotide
  Target: LAMA2; (+) strand; PAM type: NRG; PAM sequence: GAG
taattttttttttttttttt

SEQ ID NO: 135803 - DNA, 20 bp, Artificial Sequence
  Description of Artificial Sequence: Synthetic oligonucleotide
  Target: LAMA2; (+) strand; PAM type: NRG; PAM sequence: CGG
ttttttttttttttttgaga

SEQ ID NO: 135804 - DNA, 20 bp, Artificial Sequence
  Description of Artificial Sequence: Synthetic oligonucleotide
  Target: LAMA2; (+) strand; PAM type: NRG; PAM sequence: GAG
ttttttttttttttgagacg

SEQ ID NO: 135805 - DNA, 20 bp, Artificial Sequence
  Description of Artificial Sequence: Synthetic oligonucleotide
  Target: LAMA2; (+) strand; PAM type: NRG; PAM sequence: CAG
cggagtctcgctctgtcgcc

SEQ ID NO: 135806 - DNA, 20 bp, Artificial Sequence
  Description of Artificial Sequence: Synthetic oligonucleotide
  Target: LAMA2; (+) strand; PAM type: NRG; PAM sequence: AGG
ggagtctcgctctgtcgccc

SEQ ID NO: 135807 - DNA, 20 bp, Artificial Sequence
  Description of Artificial Sequence: Synthetic oligonucleotide
  Target: LAMA2; (+) strand; PAM type: NRG; PAM sequence: TGG
tctcgctctgtcgcccaggc

SEQ ID NO: 135808 - DNA, 20 bp, Artificial Sequence
  Description of Artificial Sequence: Synthetic oligonucleotide
  Target: LAMA2; (+) strand; PAM type: NRG; PAM sequence: TGG
gctctgtcgcccaggctgga

SEQ ID NO: 135809 - DNA, 20 bp, Artificial Sequence
  Description of Artificial Sequence: Synthetic oligonucleotide
  Target: LAMA2; (+) strand; PAM type: NRG; PAM sequence: GAG
tctgtcgcccaggctggatg

SEQ ID NO: 135810 - DNA, 20 bp, Artificial Sequence
  Description of Artificial Sequence: Synthetic oligonucleotide
  Target: LAMA2; (+) strand; PAM type: NRG; PAM sequence: CAG
cgcccaggctggatggagtg

SEQ ID NO: 135811 - DNA, 20 bp, Artificial Sequence
  Description of Artificial Sequence: Synthetic oligonucleotide
  Target: LAMA2; (+) strand; PAM type: NRG; PAM sequence: TGG
ccaggctggatggagtgcag

SEQ ID NO: 135812 - DNA, 20 bp, Artificial Sequence
  Description of Artificial Sequence: Synthetic oligonucleotide
  Target: LAMA2; (+) strand; PAM type: NRG; PAM sequence: AAG
gcgcgatctctgctcactgc

SEQ ID NO: 135813 - DNA, 20 bp, Artificial Sequence
  Description of Artificial Sequence: Synthetic oligonucleotide
  Target: LAMA2; (+) strand; PAM type: NRG; PAM sequence: CAG
tcactgcaagctccgcctcc

SEQ ID NO: 135814 - DNA, 20 bp, Artificial Sequence
  Description of Artificial Sequence: Synthetic oligonucleotide
  Target: LAMA2; (+) strand; PAM type: NRG; PAM sequence: AGG
cactgcaagctccgcctccc

SEQ ID NO: 135815 - DNA, 20 bp, Artificial Sequence
  Description of Artificial Sequence: Synthetic oligonucleotide
  Target: LAMA2; (+) strand; PAM type: NRG; PAM sequence: CAG
ttcacgccattctcccgcct

SEQ ID NO: 135816 - DNA, 20 bp, Artificial Sequence
  Description of Artificial Sequence: Synthetic oligonucleotide
  Target: LAMA2; (+) strand; PAM type: NRG; PAM sequence: GAG
ttctcccgcctcagcctccc

SEQ ID NO: 135817 - DNA, 20 bp, Artificial Sequence
  Description of Artificial Sequence: Synthetic oligonucleotide
  Target: LAMA2; (+) strand; PAM type: NRG; PAM sequence: TAG
tcccgcctcagcctcccgag

SEQ ID NO: 135818 - DNA, 20 bp, Artificial Sequence
  Description of Artificial Sequence: Synthetic oligonucleotide
  Target: LAMA2; (+) strand; PAM type: NRG; PAM sequence: CAG
ctcccgagtagctgcaacta

SEQ ID NO: 135819 - DNA, 20 bp, Artificial Sequence
  Description of Artificial Sequence: Synthetic oligonucleotide
  Target: LAMA2; (+) strand; PAM type: NRG; PAM sequence: AGG
tcccgagtagctgcaactac

SEQ ID NO: 135820 - DNA, 20 bp, Artificial Sequence
  Description of Artificial Sequence: Synthetic oligonucleotide
  Target: LAMA2; (+) strand; PAM type: NRG; PAM sequence: TGG
caggtgcttgccaccacacc

SEQ ID NO: 135821 - DNA, 20 bp, Artificial Sequence
  Description of Artificial Sequence: Synthetic oligonucleotide
  Target: LAMA2; (+) strand; PAM type: NRG; PAM sequence: TAG
tggctaattttttgtatttt

SEQ ID NO: 135822 - DNA, 20 bp, Artificial Sequence
  Description of Artificial Sequence: Synthetic oligonucleotide
  Target: LAMA2; (+) strand; PAM type: NRG; PAM sequence: TAG
ctaattttttgtatttttag

SEQ ID NO: 135823 - DNA, 20 bp, Artificial Sequence
  Description of Artificial Sequence: Synthetic oligonucleotide
  Target: LAMA2; (+) strand; PAM type: NRG; PAM sequence: GAG
aattttttgtatttttagta

SEQ ID NO: 135824 - DNA, 20 bp, Artificial Sequence
  Description of Artificial Sequence: Synthetic oligonucleotide
  Target: LAMA2; (+) strand; PAM type: NRG; PAM sequence: CAG
ttttgtatttttagtagaga

SEQ ID NO: 135825 - DNA, 20 bp, Artificial Sequence
  Description of Artificial Sequence: Synthetic oligonucleotide
  Target: LAMA2; (+) strand; PAM type: NRG; PAM sequence: AGG
tttgtatttttagtagagac

SEQ ID NO: 135826 - DNA, 20 bp, Artificial Sequence
  Description of Artificial Sequence: Synthetic oligonucleotide
  Target: LAMA2; (+) strand; PAM type: NRG; PAM sequence: GGG
ttgtatttttagtagagaca

SEQ ID NO: 135827 - DNA, 20 bp, Artificial Sequence
  Description of Artificial Sequence: Synthetic oligonucleotide
  Target: LAMA2; (+) strand; PAM type: NRG; PAM sequence: TAG
gagacagggtttcaccgtgt

SEQ ID NO: 135828 - DNA, 20 bp, Artificial Sequence
  Description of Artificial Sequence: Synthetic oligonucleotide
  Target: LAMA2; (+) strand; PAM type: NRG; PAM sequence: CAG
cagggtttcaccgtgttagc

SEQ ID NO: 135829 - DNA, 20 bp, Artificial Sequence
  Description of Artificial Sequence: Synthetic oligonucleotide
  Target: LAMA2; (+) strand; PAM type: NRG; PAM sequence: AGG
agggtttcaccgtgttagcc

SEQ ID NO: 135830 - DNA, 20 bp, Artificial Sequence
  Description of Artificial Sequence: Synthetic oligonucleotide
  Target: LAMA2; (+) strand; PAM type: NRG; PAM sequence: TGG
tttcaccgtgttagccagga

SEQ ID NO: 135831 - DNA, 20 bp, Artificial Sequence
  Description of Artificial Sequence: Synthetic oligonucleotide
  Target: LAMA2; (+) strand; PAM type: NRG; PAM sequence: TGG
acctcgtgatctgcccacct

SEQ ID NO: 135832 - DNA, 20 bp, Artificial Sequence
  Description of Artificial Sequence: Synthetic oligonucleotide
  Target: LAMA2; (+) strand; PAM type: NRG; PAM sequence: AAG
ctgcccaccttggcctccca

SEQ ID NO: 135833 - DNA, 20 bp, Artificial Sequence
  Description of Artificial Sequence: Synthetic oligonucleotide
  Target: LAMA2; (+) strand; PAM type: NRG; PAM sequence: TAG
caccttggcctcccaaagtg

SEQ ID NO: 135834 - DNA, 20 bp, Artificial Sequence
  Description of Artificial Sequence: Synthetic oligonucleotide
  Target: LAMA2; (+) strand; PAM type: NRG; PAM sequence: AAG
caaagtgtagtttaatattt

SEQ ID NO: 135835 - DNA, 20 bp, Artificial Sequence
  Description of Artificial Sequence: Synthetic oligonucleotide
  Target: LAMA2; (+) strand; PAM type: NRG; PAM sequence: AAG
aatatttaagctgataaaac

SEQ ID NO: 135836 - DNA, 20 bp, Artificial Sequence
  Description of Artificial Sequence: Synthetic oligonucleotide
  Target: LAMA2; (+) strand; PAM type: NRG; PAM sequence: TAG
tatatttaaaaaatttttgc

SEQ ID NO: 135837 - DNA, 20 bp, Artificial Sequence
  Description of Artificial Sequence: Synthetic oligonucleotide
  Target: LAMA2; (+) strand; PAM type: NRG; PAM sequence: TAG
aaatttttgctagactacat

SEQ ID NO: 135838 - DNA, 20 bp, Artificial Sequence
  Description of Artificial Sequence: Synthetic oligonucleotide
  Target: LAMA2; (+) strand; PAM type: NRG; PAM sequence: AAG
ttttgctagactacattaga

SEQ ID NO: 135839 - DNA, 20 bp, Artificial Sequence
  Description of Artificial Sequence: Synthetic oligonucleotide
  Target: LAMA2; (+) strand; PAM type: NRG; PAM sequence: AAG
cattagaaagattttcttta

SEQ ID NO: 135840 - DNA, 20 bp, Artificial Sequence
  Description of Artificial Sequence: Synthetic oligonucleotide
  Target: LAMA2; (+) strand; PAM type: NRG; PAM sequence: GAG
aagattttctttaaagatgt

SEQ ID NO: 135841 - DNA, 20 bp, Artificial Sequence
  Description of Artificial Sequence: Synthetic oligonucleotide
  Target: LAMA2; (+) strand; PAM type: NRG; PAM sequence: TAG
ttttctttaaagatgtgagc

SEQ ID NO: 135842 - DNA, 20 bp, Artificial Sequence
  Description of Artificial Sequence: Synthetic oligonucleotide
  Target: LAMA2; (+) strand; PAM type: NRG; PAM sequence: TAG
ctttaaagatgtgagctaga

SEQ ID NO: 135843 - DNA, 20 bp, Artificial Sequence
  Description of Artificial Sequence: Synthetic oligonucleotide
  Target: LAMA2; (+) strand; PAM type: NRG; PAM sequence: GAG
ttaaagatgtgagctagata

SEQ ID NO: 135844 - DNA, 20 bp, Artificial Sequence
  Description of Artificial Sequence: Synthetic oligonucleotide
  Target: LAMA2; (+) strand; PAM type: NRG; PAM sequence: AGG
taaagatgtgagctagatag

SEQ ID NO: 135845 - DNA, 20 bp, Artificial Sequence
  Description of Artificial Sequence: Synthetic oligonucleotide
  Target: LAMA2; (+) strand; PAM type: NRG; PAM sequence: CAG
atgatttatcaaattttaca

SEQ ID NO: 135846 - DNA, 20 bp, Artificial Sequence
  Description of Artificial Sequence: Synthetic oligonucleotide
  Target: LAMA2; (+) strand; PAM type: NRG; PAM sequence: AAG
tatcaaattttacacagtta

SEQ ID NO: 135847 - DNA, 20 bp, Artificial Sequence
  Description of Artificial Sequence: Synthetic oligonucleotide
  Target: LAMA2; (+) strand; PAM type: NRG; PAM sequence: TAG
aaattttacacagttaaaga

SEQ ID NO: 135848 - DNA, 20 bp, Artificial Sequence
  Description of Artificial Sequence: Synthetic oligonucleotide
  Target: LAMA2; (+) strand; PAM type: NRG; PAM sequence: AAG
agttaaagatagtgaaaata

SEQ ID NO: 135849 - DNA, 20 bp, Artificial Sequence
  Description of Artificial Sequence: Synthetic oligonucleotide
  Target: LAMA2; (+) strand; PAM type: NRG; PAM sequence: GAG
ttaaagatagtgaaaataaa

SEQ ID NO: 135850 - DNA, 20 bp, Artificial Sequence
  Description of Artificial Sequence: Synthetic oligonucleotide
  Target: LAMA2; (+) strand; PAM type: NRG; PAM sequence: TAG
agagcacattaaaaaataac

SEQ ID NO: 135851 - DNA, 20 bp, Artificial Sequence
  Description of Artificial Sequence: Synthetic oligonucleotide
  Target: LAMA2; (+) strand; PAM type: NRG; PAM sequence: TGG
cacattaaaaaataactaga

SEQ ID NO: 135852 - DNA, 20 bp, Artificial Sequence
  Description of Artificial Sequence: Synthetic oligonucleotide
  Target: LAMA2; (+) strand; PAM type: NRG; PAM sequence: CAG
tggaaattttcactgtgaaa

SEQ ID NO: 135853 - DNA, 20 bp, Artificial Sequence
  Description of Artificial Sequence: Synthetic oligonucleotide
  Target: LAMA2; (+) strand; PAM type: NRG; PAM sequence: AAG
actgtgaaacagaatttctg

SEQ ID NO: 135854 - DNA, 20 bp, Artificial Sequence
  Description of Artificial Sequence: Synthetic oligonucleotide
  Target: LAMA2; (+) strand; PAM type: NRG; PAM sequence: CGG
acagaatttctgaagtgaca

SEQ ID NO: 135855 - DNA, 20 bp, Artificial Sequence
  Description of Artificial Sequence: Synthetic oligonucleotide
  Target: LAMA2; (+) strand; PAM type: NRG; PAM sequence: TGG
acggtgttcacttctgatca

SEQ ID NO: 135856 - DNA, 20 bp, Artificial Sequence
  Description of Artificial Sequence: Synthetic oligonucleotide
  Target: LAMA2; (+) strand; PAM type: NRG; PAM sequence: GAG
atggtcattgtacaaccatt

SEQ ID NO: 135857 - DNA, 20 bp, Artificial Sequence
  Description of Artificial Sequence: Synthetic oligonucleotide
  Target: LAMA2; (+) strand; PAM type: NRG; PAM sequence: GAG
agtctttgtataattgctgt

SEQ ID NO: 135858 - DNA, 20 bp, Artificial Sequence
  Description of Artificial Sequence: Synthetic oligonucleotide
  Target: LAMA2; (+) strand; PAM type: NRG; PAM sequence: TAG
ctttgtataattgctgtgag

SEQ ID NO: 135859 - DNA, 20 bp, Artificial Sequence
  Description of Artificial Sequence: Synthetic oligonucleotide
  Target: LAMA2; (+) strand; PAM type: NRG; PAM sequence: TAG
ttcccttcactttttttcta

SEQ ID NO: 135860 - DNA, 20 bp, Artificial Sequence
  Description of Artificial Sequence: Synthetic oligonucleotide
  Target: LAMA2; (+) strand; PAM type: NRG; PAM sequence: AAG
tttctatagatatttaaatg

SEQ ID NO: 135861 - DNA, 20 bp, Artificial Sequence
  Description of Artificial Sequence: Synthetic oligonucleotide
  Target: LAMA2; (+) strand; PAM type: NRG; PAM sequence: CAG
tacatatttattcattttgt

SEQ ID NO: 135862 - DNA, 20 bp, Artificial Sequence
  Description of Artificial Sequence: Synthetic oligonucleotide
  Target: LAMA2; (+) strand; PAM type: NRG; PAM sequence: AAG
tcattttgtcagttataatc

SEQ ID NO: 135863 - DNA, 20 bp, Artificial Sequence
  Description of Artificial Sequence: Synthetic oligonucleotide
  Target: LAMA2; (+) strand; PAM type: NRG; PAM sequence: GAG
tctatcttcactctgtgtgt

SEQ ID NO: 135864 - DNA, 20 bp, Artificial Sequence
  Description of Artificial Sequence: Synthetic oligonucleotide
  Target: LAMA2; (+) strand; PAM type: NRG; PAM sequence: GAG
ccatcttccttcttgatcat

SEQ ID NO: 135865 - DNA, 20 bp, Artificial Sequence
  Description of Artificial Sequence: Synthetic oligonucleotide
  Target: LAMA2; (+) strand; PAM type: NRG; PAM sequence: CAG
tccttcttgatcatgagcaa

SEQ ID NO: 135866 - DNA, 20 bp, Artificial Sequence
  Description of Artificial Sequence: Synthetic oligonucleotide
  Target: LAMA2; (+) strand; PAM type: NRG; PAM sequence: AGG
ccttcttgatcatgagcaac

SEQ ID NO: 135867 - DNA, 20 bp, Artificial Sequence
  Description of Artificial Sequence: Synthetic oligonucleotide
  Target: LAMA2; (+) strand; PAM type: NRG; PAM sequence: AAG
ccaccaatactattttactt

SEQ ID NO: 135868 - DNA, 20 bp, Artificial Sequence
  Description of Artificial Sequence: Synthetic oligonucleotide
  Target: LAMA2; (+) strand; PAM type: NRG; PAM sequence: CAG
gaaatataccatataacttg

SEQ ID NO: 135869 - DNA, 20 bp, Artificial Sequence
  Description of Artificial Sequence: Synthetic oligonucleotide
  Target: LAMA2; (+) strand; PAM type: NRG; PAM sequence: GAG
aatataccatataacttgca

SEQ ID NO: 135870 - DNA, 20 bp, Artificial Sequence
  Description of Artificial Sequence: Synthetic oligonucleotide
  Target: LAMA2; (+) strand; PAM type: NRG; PAM sequence: TGG
catataacttgcagagttga

SEQ ID NO: 135871 - DNA, 20 bp, Artificial Sequence
  Description of Artificial Sequence: Synthetic oligonucleotide
  Target: LAMA2; (+) strand; PAM type: NRG; PAM sequence: GGG
atataacttgcagagttgat

SEQ ID NO: 135872 - DNA, 20 bp, Artificial Sequence
  Description of Artificial Sequence: Synthetic oligonucleotide
  Target: LAMA2; (+) strand; PAM type: NRG; PAM sequence: CAG
tgatgggaaaatttgaaaac

SEQ ID NO: 135873 - DNA, 20 bp, Artificial Sequence
  Description of Artificial Sequence: Synthetic oligonucleotide
  Target: LAMA2; (+) strand; PAM type: NRG; PAM sequence: AGG
gatgggaaaatttgaaaacc

SEQ ID NO: 135874 - DNA, 20 bp, Artificial Sequence
  Description of Artificial Sequence: Synthetic oligonucleotide
  Target: LAMA2; (+) strand; PAM type: NRG; PAM sequence: GGG
atgggaaaatttgaaaacca

SEQ ID NO: 135875 - DNA, 20 bp, Artificial Sequence
  Description of Artificial Sequence: Synthetic oligonucleotide
  Target: LAMA2; (+) strand; PAM type: NRG; PAM sequence: GAG
gaaaatttgaaaaccagggt

SEQ ID NO: 135876 - DNA, 20 bp, Artificial Sequence
  Description of Artificial Sequence: Synthetic oligonucleotide
  Target: LAMA2; (+) strand; PAM type: NRG; PAM sequence: AAG
aatttgaaaaccagggtgag

SEQ ID NO: 135877 - DNA, 20 bp, Artificial Sequence
  Description of Artificial Sequence: Synthetic oligonucleotide
  Target: LAMA2; (+) strand; PAM type: NRG; PAM sequence: TGG
tgaaaaccagggtgagaaga

SEQ ID NO: 135878 - DNA, 20 bp, Artificial Sequence
  Description of Artificial Sequence: Synthetic oligonucleotide
  Target: LAMA2; (+) strand; PAM type: NRG; PAM sequence: CAG
aaaccagggtgagaagatgg

SEQ ID NO: 135879 - DNA, 20 bp, Artificial Sequence
  Description of Artificial Sequence: Synthetic oligonucleotide
  Target: LAMA2; (+) strand; PAM type: NRG; PAM sequence: AAG
gtgagaagatggcagacatc

SEQ ID NO: 135880 - DNA, 20 bp, Artificial Sequence
  Description of Artificial Sequence: Synthetic oligonucleotide
  Target: LAMA2; (+) strand; PAM type: NRG; PAM sequence: AGG
tgagaagatggcagacatca

SEQ ID NO: 135881 - DNA, 20 bp, Artificial Sequence
  Description of Artificial Sequence: Synthetic oligonucleotide
  Target: LAMA2; (+) strand; PAM type: NRG; PAM sequence: TAG
gcagacatcaaggtcatccc

SEQ ID NO: 135882 - DNA, 20 bp, Artificial Sequence
  Description of Artificial Sequence: Synthetic oligonucleotide
  Target: LAMA2; (+) strand; PAM type: NRG; PAM sequence: AGG
cagacatcaaggtcatccct

SEQ ID NO: 135883 - DNA, 20 bp, Artificial Sequence
  Description of Artificial Sequence: Synthetic oligonucleotide
  Target: LAMA2; (+) strand; PAM type: NRG; PAM sequence: CAG
cctaggttttgatacctgta

SEQ ID NO: 135884 - DNA, 20 bp, Artificial Sequence
  Description of Artificial Sequence: Synthetic oligonucleotide
  Target: LAMA2; (+) strand; PAM type: NRG; PAM sequence: TAG
gttttgatacctgtacagaa

SEQ ID NO: 135885 - DNA, 20 bp, Artificial Sequence
  Description of Artificial Sequence: Synthetic oligonucleotide
  Target: LAMA2; (+) strand; PAM type: NRG; PAM sequence: TAG
tctgattttccttatctctc

SEQ ID NO: 135886 - DNA, 20 bp, Artificial Sequence
  Description of Artificial Sequence: Synthetic oligonucleotide
  Target: LAMA2; (+) strand; PAM type: NRG; PAM sequence: TAG
atgcttaatattcaaattcc

SEQ ID NO: 135887 - DNA, 20 bp, Artificial Sequence
  Description of Artificial Sequence: Synthetic oligonucleotide
  Target: LAMA2; (+) strand; PAM type: NRG; PAM sequence: AGG
tgcttaatattcaaattcct

SEQ ID NO: 135888 - DNA, 20 bp, Artificial Sequence
  Description of Artificial Sequence: Synthetic oligonucleotide
  Target: LAMA2; (+) strand; PAM type: NRG; PAM sequence: AAG
atattcaaattcctaggcca

SEQ ID NO: 135889 - DNA, 20 bp, Artificial Sequence
  Description of Artificial Sequence: Synthetic oligonucleotide
  Target: LAMA2; (+) strand; PAM type: NRG; PAM sequence: TAG
tgtacatgccctaactgcta

SEQ ID NO: 135890 - DNA, 20 bp, Artificial Sequence
  Description of Artificial Sequence: Synthetic oligonucleotide
  Target: LAMA2; (+) strand; PAM type: NRG; PAM sequence: AGG
gtacatgccctaactgctat

SEQ ID NO: 135891 - DNA, 20 bp, Artificial Sequence
  Description of Artificial Sequence: Synthetic oligonucleotide
  Target: LAMA2; (+) strand; PAM type: NRG; PAM sequence: GGG
tacatgccctaactgctata

SEQ ID NO: 135892 - DNA, 20 bp, Artificial Sequence
  Description of Artificial Sequence: Synthetic oligonucleotide
  Target: LAMA2; (+) strand; PAM type: NRG; PAM sequence: TAG
atgccctaactgctataggg

SEQ ID NO: 135893 - DNA, 20 bp, Artificial Sequence
  Description of Artificial Sequence: Synthetic oligonucleotide
  Target: LAMA2; (+) strand; PAM type: NRG; PAM sequence: AGG
tgccctaactgctatagggt

SEQ ID NO: 135894 - DNA, 20 bp, Artificial Sequence
  Description of Artificial Sequence: Synthetic oligonucleotide
  Target: LAMA2; (+) strand; PAM type: NRG; PAM sequence: GGG
gccctaactgctatagggta

SEQ ID NO: 135895 - DNA, 20 bp, Artificial Sequence
  Description of Artificial Sequence: Synthetic oligonucleotide
  Target: LAMA2; (+) strand; PAM type: NRG; PAM sequence: GAG
cctaactgctatagggtagg

SEQ ID NO: 135896 - DNA, 20 bp, Artificial Sequence
  Description of Artificial Sequence: Synthetic oligonucleotide
  Target: LAMA2; (+) strand; PAM type: NRG; PAM sequence: AAG
aactgctatagggtagggag

SEQ ID NO: 135897 - DNA, 20 bp, Artificial Sequence
  Description of Artificial Sequence: Synthetic oligonucleotide
  Target: LAMA2; (+) strand; PAM type: NRG; PAM sequence: AAG
gctatagggtagggagaaga

SEQ ID NO: 135898 - DNA, 20 bp, Artificial Sequence
  Description of Artificial Sequence: Synthetic oligonucleotide
  Target: LAMA2; (+) strand; PAM type: NRG; PAM sequence: AGG
ctatagggtagggagaagaa

SEQ ID NO: 135899 - DNA, 20 bp, Artificial Sequence
  Description of Artificial Sequence: Synthetic oligonucleotide
  Target: LAMA2; (+) strand; PAM type: NRG; PAM sequence: TGG
ctcctctatttacatttcct

SEQ ID NO: 135900 - DNA, 20 bp, Artificial Sequence
  Description of Artificial Sequence: Synthetic oligonucleotide
  Target: LAMA2; (+) strand; PAM type: NRG; PAM sequence: CAG
ctctatttacatttccttgg

SEQ ID NO: 135901 - DNA, 20 bp, Artificial Sequence
  Description of Artificial Sequence: Synthetic oligonucleotide
  Target: LAMA2; (+) strand; PAM type: NRG; PAM sequence: AGG
tctatttacatttccttggc

SEQ ID NO: 135902 - DNA, 20 bp, Artificial Sequence
  Description of Artificial Sequence: Synthetic oligonucleotide
  Target: LAMA2; (+) strand; PAM type: NRG; PAM sequence: GAG
tatttacatttccttggcag

SEQ ID NO: 135903 - DNA, 20 bp, Artificial Sequence
  Description of Artificial Sequence: Synthetic oligonucleotide
  Target: LAMA2; (+) strand; PAM type: NRG; PAM sequence: AGG
atttacatttccttggcagg

SEQ ID NO: 135904 - DNA, 20 bp, Artificial Sequence
  Description of Artificial Sequence: Synthetic oligonucleotide
  Target: LAMA2; (+) strand; PAM type: NRG; PAM sequence: TAG
tacatttccttggcaggagg

SEQ ID NO: 135905 - DNA, 20 bp, Artificial Sequence
  Description of Artificial Sequence: Synthetic oligonucleotide
  Target: LAMA2; (+) strand; PAM type: NRG; PAM sequence: AGG
acatttccttggcaggaggt

SEQ ID NO: 135906 - DNA, 20 bp, Artificial Sequence
  Description of Artificial Sequence: Synthetic oligonucleotide
  Target: LAMA2; (+) strand; PAM type: NRG; PAM sequence: TAG
aggacactgcataccctcaa

SEQ ID NO: 135907 - DNA, 20 bp, Artificial Sequence
  Description of Artificial Sequence: Synthetic oligonucleotide
  Target: LAMA2; (+) strand; PAM type: NRG; PAM sequence: TAG
acactgcataccctcaatag

SEQ ID NO: 135908 - DNA, 20 bp, Artificial Sequence
  Description of Artificial Sequence: Synthetic oligonucleotide
  Target: LAMA2; (+) strand; PAM type: NRG; PAM sequence: AAG
agacacaatgccaattactc

SEQ ID NO: 135909 - DNA, 20 bp, Artificial Sequence
  Description of Artificial Sequence: Synthetic oligonucleotide
  Target: LAMA2; (+) strand; PAM type: NRG; PAM sequence: AAG
caatgccaattactcaagaa

SEQ ID NO: 135910 - DNA, 20 bp, Artificial Sequence
  Description of Artificial Sequence: Synthetic oligonucleotide
  Target: LAMA2; (+) strand; PAM type: NRG; PAM sequence: TGG
caattactcaagaaaagaaa

SEQ ID NO: 135911 - DNA, 20 bp, Artificial Sequence
  Description of Artificial Sequence: Synthetic oligonucleotide
  Target: LAMA2; (+) strand; PAM type: NRG; PAM sequence: GAG
attactcaagaaaagaaatg

SEQ ID NO: 135912 - DNA, 20 bp, Artificial Sequence
  Description of Artificial Sequence: Synthetic oligonucleotide
  Target: LAMA2; (+) strand; PAM type: NRG; PAM sequence: AGG
ttactcaagaaaagaaatgg

SEQ ID NO: 135913 - DNA, 20 bp, Artificial Sequence
  Description of Artificial Sequence: Synthetic oligonucleotide
  Target: LAMA2; (+) strand; PAM type: NRG; PAM sequence: TGG
aagaaatggaggatgaatgt

SEQ ID NO: 135914 - DNA, 20 bp, Artificial Sequence
  Description of Artificial Sequence: Synthetic oligonucleotide
  Target: LAMA2; (+) strand; PAM type: NRG; PAM sequence: CAG
aatggaggatgaatgttgga

SEQ ID NO: 135915 - DNA, 20 bp, Artificial Sequence
  Description of Artificial Sequence: Synthetic oligonucleotide
  Target: LAMA2; (+) strand; PAM type: NRG; PAM sequence: AAG
aggatgaatgttggacagcc

SEQ ID NO: 135916 - DNA, 20 bp, Artificial Sequence
  Description of Artificial Sequence: Synthetic oligonucleotide
  Target: LAMA2; (+) strand; PAM type: NRG; PAM sequence: AAG
tggacagccaagaaatgatg

SEQ ID NO: 135917 - DNA, 20 bp, Artificial Sequence
  Description of Artificial Sequence: Synthetic oligonucleotide
  Target: LAMA2; (+) strand; PAM type: NRG; PAM sequence: AGG
ggacagccaagaaatgatga

SEQ ID NO: 135918 - DNA, 20 bp, Artificial Sequence
  Description of Artificial Sequence: Synthetic oligonucleotide
  Target: LAMA2; (+) strand; PAM type: NRG; PAM sequence: TAG
ggtctgccacatttttcata

SEQ ID NO: 135919 - DNA, 20 bp, Artificial Sequence
  Description of Artificial Sequence: Synthetic oligonucleotide
  Target: LAMA2; (+) strand; PAM type: NRG; PAM sequence: AGG
gtctgccacatttttcatat

SEQ ID NO: 135920 - DNA, 20 bp, Artificial Sequence
  Description of Artificial Sequence: Synthetic oligonucleotide
  Target: LAMA2; (+) strand; PAM type: NRG; PAM sequence: TGG
gccacatttttcatataggt

SEQ ID NO: 135921 - DNA, 20 bp, Artificial Sequence
  Description of Artificial Sequence: Synthetic oligonucleotide
  Target: LAMA2; (+) strand; PAM type: NRG; PAM sequence: TAG
tttctttgaatgttttcact

SEQ ID NO: 135922 - DNA, 20 bp, Artificial Sequence
  Description of Artificial Sequence: Synthetic oligonucleotide
  Target: LAMA2; (+) strand; PAM type: NRG; PAM sequence: TAG
tttgaatgttttcacttagc

SEQ ID NO: 135923 - DNA, 20 bp, Artificial Sequence
  Description of Artificial Sequence: Synthetic oligonucleotide
  Target: LAMA2; (+) strand; PAM type: NRG; PAM sequence: CAG
acttagctagtgtaccaaaa

SEQ ID NO: 135924 - DNA, 20 bp, Artificial Sequence
  Description of Artificial Sequence: Synthetic oligonucleotide
  Target: LAMA2; (+) strand; PAM type: NRG; PAM sequence: AAG
tctacatttccaccaaatta

SEQ ID NO: 135925 - DNA, 20 bp, Artificial Sequence
  Description of Artificial Sequence: Synthetic oligonucleotide
  Target: LAMA2; (+) strand; PAM type: NRG; PAM sequence: AGG
ctacatttccaccaaattaa

SEQ ID NO: 135926 - DNA, 20 bp, Artificial Sequence
  Description of Artificial Sequence: Synthetic oligonucleotide
  Target: LAMA2; (+) strand; PAM type: NRG; PAM sequence: TAG
caccaaattaaaggtctgat

SEQ ID NO: 135927 - DNA, 20 bp, Artificial Sequence
  Description of Artificial Sequence: Synthetic oligonucleotide
  Target: LAMA2; (+) strand; PAM type: NRG; PAM sequence: AAG
tcatttgccatatttttctc

SEQ ID NO: 135928 - DNA, 20 bp, Artificial Sequence
  Description of Artificial Sequence: Synthetic oligonucleotide
  Target: LAMA2; (+) strand; PAM type: NRG; PAM sequence: AAG
ttgccatatttttctcaaga

SEQ ID NO: 135929 - DNA, 20 bp, Artificial Sequence
  Description of Artificial Sequence: Synthetic oligonucleotide
  Target: LAMA2; (+) strand; PAM type: NRG; PAM sequence: CAG
ttttctcaagaaagattata

SEQ ID NO: 135930 - DNA, 20 bp, Artificial Sequence
  Description of Artificial Sequence: Synthetic oligonucleotide
  Target: LAMA2; (+) strand; PAM type: NRG; PAM sequence: CAG
tgcatgaactcattcttatt

SEQ ID NO: 135931 - DNA, 20 bp, Artificial Sequence
  Description of Artificial Sequence: Synthetic oligonucleotide
  Target: LAMA2; (+) strand; PAM type: NRG; PAM sequence: GAG
tattcagtaaatttaaattt

SEQ ID NO: 135932 - DNA, 20 bp, Artificial Sequence
  Description of Artificial Sequence: Synthetic oligonucleotide
  Target: LAMA2; (+) strand; PAM type: NRG; PAM sequence: TGG
tcagtaaatttaaatttgag

SEQ ID NO: 135933 - DNA, 20 bp, Artificial Sequence
  Description of Artificial Sequence: Synthetic oligonucleotide
  Target: LAMA2; (+) strand; PAM type: NRG; PAM sequence: TAG
gagtggcattatattccaac

SEQ ID NO: 135934 - DNA, 20 bp, Artificial Sequence
  Description of Artificial Sequence: Synthetic oligonucleotide
  Target: LAMA2; (+) strand; PAM type: NRG; PAM sequence: CAG
actagtgctatccatgccct

SEQ ID NO: 135935 - DNA, 20 bp, Artificial Sequence
  Description of Artificial Sequence: Synthetic oligonucleotide
  Target: LAMA2; (+) strand; PAM type: NRG; PAM sequence: TAG
ccatgccctcagtaatttta

SEQ ID NO: 135936 - DNA, 20 bp, Artificial Sequence
  Description of Artificial Sequence: Synthetic oligonucleotide
  Target: LAMA2; (+) strand; PAM type: NRG; PAM sequence: GAG
ctcagtaattttatagactt

SEQ ID NO: 135937 - DNA, 20 bp, Artificial Sequence
  Description of Artificial Sequence: Synthetic oligonucleotide
  Target: LAMA2; (+) strand; PAM type: NRG; PAM sequence: GAG
cagtaattttatagacttga

SEQ ID NO: 135938 - DNA, 20 bp, Artificial Sequence
  Description of Artificial Sequence: Synthetic oligonucleotide
  Target: LAMA2; (+) strand; PAM type: NRG; PAM sequence: AAG
agccaccgtaaaaaatacta

SEQ ID NO: 135939 - DNA, 20 bp, Artificial Sequence
  Description of Artificial Sequence: Synthetic oligonucleotide
  Target: LAMA2; (+) strand; PAM type: NRG; PAM sequence: CAG
cgtaaaaaatactaaagtta

SEQ ID NO: 135940 - DNA, 20 bp, Artificial Sequence
  Description of Artificial Sequence: Synthetic oligonucleotide
  Target: LAMA2; (+) strand; PAM type: NRG; PAM sequence: GAG
tactaaagttacagtatgat

SEQ ID NO: 135941 - DNA, 20 bp, Artificial Sequence
  Description of Artificial Sequence: Synthetic oligonucleotide
  Target: LAMA2; (+) strand; PAM type: NRG; PAM sequence: AGG
actaaagttacagtatgatg

SEQ ID NO: 135942 - DNA, 20 bp, Artificial Sequence
  Description of Artificial Sequence: Synthetic oligonucleotide
  Target: LAMA2; (+) strand; PAM type: NRG; PAM sequence: GGG
ctaaagttacagtatgatga

SEQ ID NO: 135943 - DNA, 20 bp, Artificial Sequence
  Description of Artificial Sequence: Synthetic oligonucleotide
  Target: LAMA2; (+) strand; PAM type: NRG; PAM sequence: AAG
ggttctactaaatatcaact

SEQ ID NO: 135944 - DNA, 20 bp, Artificial Sequence
  Description of Artificial Sequence: Synthetic oligonucleotide
  Target: LAMA2; (+) strand; PAM type: NRG; PAM sequence: CGG
aatatcaactaagtaatata

SEQ ID NO: 135945 - DNA, 20 bp, Artificial Sequence
  Description of Artificial Sequence: Synthetic oligonucleotide
  Target: LAMA2; (+) strand; PAM type: NRG; PAM sequence: AAG
ctaagtaatatacggacacc

SEQ ID NO: 135946 - DNA, 20 bp, Artificial Sequence
  Description of Artificial Sequence: Synthetic oligonucleotide
  Target: LAMA2; (+) strand; PAM type: NRG; PAM sequence: AAG
gtaatatacggacaccaaga

SEQ ID NO: 135947 - DNA, 20 bp, Artificial Sequence
  Description of Artificial Sequence: Synthetic oligonucleotide
  Target: LAMA2; (+) strand; PAM type: NRG; PAM sequence: CAG
tacggacaccaagaaagaaa

SEQ ID NO: 135948 - DNA, 20 bp, Artificial Sequence
  Description of Artificial Sequence: Synthetic oligonucleotide
  Target: LAMA2; (+) strand; PAM type: NRG; PAM sequence: TGG
aagaaacagaaaattctgtg

SEQ ID NO: 135949 - DNA, 20 bp, Artificial Sequence
  Description of Artificial Sequence: Synthetic oligonucleotide
  Target: LAMA2; (+) strand; PAM type: NRG; PAM sequence: AAG
acagaaaattctgtgtggca

SEQ ID NO: 135950 - DNA, 20 bp, Artificial Sequence
  Description of Artificial Sequence: Synthetic oligonucleotide
  Target: LAMA2; (+) strand; PAM type: NRG; PAM sequence: CAG
aaaattctgtgtggcaaagt

SEQ ID NO: 135951 - DNA, 20 bp, Artificial Sequence
  Description of Artificial Sequence: Synthetic oligonucleotide
  Target: LAMA2; (+) strand; PAM type: NRG; PAM sequence: CAG
aaagtcagaaaacactttca

SEQ ID NO: 135952 - DNA, 20 bp, Artificial Sequence
  Description of Artificial Sequence: Synthetic oligonucleotide
  Target: LAMA2; (+) strand; PAM type: NRG; PAM sequence: GAG
agtcagaaaacactttcaca

SEQ ID NO: 135953 - DNA, 20 bp, Artificial Sequence
  Description of Artificial Sequence: Synthetic oligonucleotide
  Target: LAMA2; (+) strand; PAM type: NRG; PAM sequence: CAG
cagaaaacactttcacagag

SEQ ID NO: 135954 - DNA, 20 bp, Artificial Sequence
  Description of Artificial Sequence: Synthetic oligonucleotide
  Target: LAMA2; (+) strand; PAM type: NRG; PAM sequence: AGG
agaaaacactttcacagagc

SEQ ID NO: 135955 - DNA, 20 bp, Artificial Sequence
  Description of Artificial Sequence: Synthetic oligonucleotide
  Target: LAMA2; (+) strand; PAM type: NRG; PAM sequence: GGG
gaaaacactttcacagagca

SEQ ID NO: 135956 - DNA, 20 bp, Artificial Sequence
  Description of Artificial Sequence: Synthetic oligonucleotide
  Target: LAMA2; (+) strand; PAM type: NRG; PAM sequence: GAG
tcacagagcagggaatattt

SEQ ID NO: 135957 - DNA, 20 bp, Artificial Sequence
  Description of Artificial Sequence: Synthetic oligonucleotide
  Target: LAMA2; (+) strand; PAM type: NRG; PAM sequence: AAG
agggaatatttgagctatga

SEQ ID NO: 135958 - DNA, 20 bp, Artificial Sequence
  Description of Artificial Sequence: Synthetic oligonucleotide
  Target: LAMA2; (+) strand; PAM type: NRG; PAM sequence: AAG
aaagatgaacatgcaacaaa

SEQ ID NO: 135959 - DNA, 20 bp, Artificial Sequence
  Description of Artificial Sequence: Synthetic oligonucleotide
  Target: LAMA2; (+) strand; PAM type: NRG; PAM sequence: AGG
aagatgaacatgcaacaaaa

SEQ ID NO: 135960 - DNA, 20 bp, Artificial Sequence
  Description of Artificial Sequence: Synthetic oligonucleotide
  Target: LAMA2; (+) strand; PAM type: NRG; PAM sequence: GGG
agatgaacatgcaacaaaaa

SEQ ID NO: 135961 - DNA, 20 bp, Artificial Sequence
  Description of Artificial Sequence: Synthetic oligonucleotide
  Target: LAMA2; (+) strand; PAM type: NRG; PAM sequence: GAG
atgaacatgcaacaaaaagg

SEQ ID NO: 135962 - DNA, 20 bp, Artificial Sequence
  Description of Artificial Sequence: Synthetic oligonucleotide
  Target: LAMA2; (+) strand; PAM type: NRG; PAM sequence: AAG
agggagaacattctttgttg

SEQ ID NO: 135963 - DNA, 20 bp, Artificial Sequence
  Description of Artificial Sequence: Synthetic oligonucleotide
  Target: LAMA2; (+) strand; PAM type: NRG; PAM sequence: AGG
gggagaacattctttgttga

SEQ ID NO: 135964 - DNA, 20 bp, Artificial Sequence
  Description of Artificial Sequence: Synthetic oligonucleotide
  Target: LAMA2; (+) strand; PAM type: NRG; PAM sequence: GGG
ggagaacattctttgttgaa

SEQ ID NO: 135965 - DNA, 20 bp, Artificial Sequence
  Description of Artificial Sequence: Synthetic oligonucleotide
  Target: LAMA2; (+) strand; PAM type: NRG; PAM sequence: AAG
acattctttgttgaagggac

SEQ ID NO: 135966 - DNA, 20 bp, Artificial Sequence
  Description of Artificial Sequence: Synthetic oligonucleotide
  Target: LAMA2; (+) strand; PAM type: NRG; PAM sequence: AAG
gacaagataatgtcatcaca

SEQ ID NO: 135967 - DNA, 20 bp, Artificial Sequence
  Description of Artificial Sequence: Synthetic oligonucleotide
  Target: LAMA2; (+) strand; PAM type: NRG; PAM sequence: TAG
atgcctgctatatttgtaaa

SEQ ID NO: 135968 - DNA, 20 bp, Artificial Sequence
  Description of Artificial Sequence: Synthetic oligonucleotide
  Target: LAMA2; (+) strand; PAM type: NRG; PAM sequence: AGG
tgcctgctatatttgtaaat

SEQ ID NO: 135969 - DNA, 20 bp, Artificial Sequence
  Description of Artificial Sequence: Synthetic oligonucleotide
  Target: LAMA2; (+) strand; PAM type: NRG; PAM sequence: AAG
ctgctatatttgtaaatagg

SEQ ID NO: 135970 - DNA, 20 bp, Artificial Sequence
  Description of Artificial Sequence: Synthetic oligonucleotide
  Target: LAMA2; (+) strand; PAM type: NRG; PAM sequence: GAG
gctatatttgtaaataggaa

SEQ ID NO: 135971 - DNA, 20 bp, Artificial Sequence
  Description of Artificial Sequence: Synthetic oligonucleotide
  Target: LAMA2; (+) strand; PAM type: NRG; PAM sequence: CAG
atttgtaaataggaagagat

SEQ ID NO: 135972 - DNA, 20 bp, Artificial Sequence
  Description of Artificial Sequence: Synthetic oligonucleotide
  Target: LAMA2; (+) strand; PAM type: NRG; PAM sequence: TAG
ataggaagagatcagttcac

SEQ ID NO: 135973 - DNA, 20 bp, Artificial Sequence
  Description of Artificial Sequence: Synthetic oligonucleotide
  Target: LAMA2; (+) strand; PAM type: NRG; PAM sequence: AAG
gatcagttcactagatgtat

SEQ ID NO: 135974 - DNA, 20 bp, Artificial Sequence
  Description of Artificial Sequence: Synthetic oligonucleotide
  Target: LAMA2; (+) strand; PAM type: NRG; PAM sequence: AAG
cagttcactagatgtataag

SEQ ID NO: 135975 - DNA, 20 bp, Artificial Sequence
  Description of Artificial Sequence: Synthetic oligonucleotide
  Target: LAMA2; (+) strand; PAM type: NRG; PAM sequence: AGG
agttcactagatgtataaga

SEQ ID NO: 135976 - DNA, 20 bp, Artificial Sequence
  Description of Artificial Sequence: Synthetic oligonucleotide
  Target: LAMA2; (+) strand; PAM type: NRG; PAM sequence: AAG
tagatgtataagaaggcatg

SEQ ID NO: 135977 - DNA, 20 bp, Artificial Sequence
  Description of Artificial Sequence: Synthetic oligonucleotide
  Target: LAMA2; (+) strand; PAM type: NRG; PAM sequence: AGG
agatgtataagaaggcatga

SEQ ID NO: 135978 - DNA, 20 bp, Artificial Sequence
  Description of Artificial Sequence: Synthetic oligonucleotide
  Target: LAMA2; (+) strand; PAM type: NRG; PAM sequence: GAG
atgtataagaaggcatgaag

SEQ ID NO: 135979 - DNA, 20 bp, Artificial Sequence
  Description of Artificial Sequence: Synthetic oligonucleotide
  Target: LAMA2; (+) strand; PAM type: NRG; PAM sequence: AGG
tgtataagaaggcatgaagg

SEQ ID NO: 135980 - DNA, 20 bp, Artificial Sequence
  Description of Artificial Sequence: Synthetic oligonucleotide
  Target: LAMA2; (+) strand; PAM type: NRG; PAM sequence: TAG
taagaaggcatgaaggagga

SEQ ID NO: 135981 - DNA, 20 bp, Artificial Sequence
  Description of Artificial Sequence: Synthetic oligonucleotide
  Target: LAMA2; (+) strand; PAM type: NRG; PAM sequence: CAG
ggcatgaaggaggatagcaa

SEQ ID NO: 135982 - DNA, 20 bp, Artificial Sequence
  Description of Artificial Sequence: Synthetic oligonucleotide
  Target: LAMA2; (+) strand; PAM type: NRG; PAM sequence: GAG
gaaggaggatagcaacagat

SEQ ID NO: 135983 - DNA, 20 bp, Artificial Sequence
  Description of Artificial Sequence: Synthetic oligonucleotide
  Target: LAMA2; (+) strand; PAM type: NRG; PAM sequence: CAG
aggatagcaacagatgagtt

SEQ ID NO: 135984 - DNA, 20 bp, Artificial Sequence
  Description of Artificial Sequence: Synthetic oligonucleotide
  Target: LAMA2; (+) strand; PAM type: NRG; PAM sequence: CAG
tagcaacagatgagttcaga

SEQ ID NO: 135985 - DNA, 20 bp, Artificial Sequence
  Description of Artificial Sequence: Synthetic oligonucleotide
  Target: LAMA2; (+) strand; PAM type: NRG; PAM sequence: AGG
agcaacagatgagttcagac

SEQ ID NO: 135986 - DNA, 20 bp, Artificial Sequence
  Description of Artificial Sequence: Synthetic oligonucleotide
  Target: LAMA2; (+) strand; PAM type: NRG; PAM sequence: TAG
aacagatgagttcagacagg

SEQ ID NO: 135987 - DNA, 20 bp, Artificial Sequence
  Description of Artificial Sequence: Synthetic oligonucleotide
  Target: LAMA2; (+) strand; PAM type: NRG; PAM sequence: AAG
gatgagttcagacaggtaga

SEQ ID NO: 135988 - DNA, 20 bp, Artificial Sequence
  Description of Artificial Sequence: Synthetic oligonucleotide
  Target: LAMA2; (+) strand; PAM type: NRG; PAM sequence: CAG
gagttcagacaggtagaaag

SEQ ID NO: 135989 - DNA, 20 bp, Artificial Sequence
  Description of Artificial Sequence: Synthetic oligonucleotide
  Target: LAMA2; (+) strand; PAM type: NRG; PAM sequence: AGG
agttcagacaggtagaaagc

SEQ ID NO: 135990 - DNA, 20 bp, Artificial Sequence
  Description of Artificial Sequence: Synthetic oligonucleotide
  Target: LAMA2; (+) strand; PAM type: NRG; PAM sequence: TAG
caggcctgattataaatgtt

SEQ ID NO: 135991 - DNA, 20 bp, Artificial Sequence
  Description of Artificial Sequence: Synthetic oligonucleotide
  Target: LAMA2; (+) strand; PAM type: NRG; PAM sequence: AAG
ttataaatgtttagatcacc

SEQ ID NO: 135992 - DNA, 20 bp, Artificial Sequence
  Description of Artificial Sequence: Synthetic oligonucleotide
  Target: LAMA2; (+) strand; PAM type: NRG; PAM sequence: AGG
tataaatgtttagatcacca

SEQ ID NO: 135993 - DNA, 20 bp, Artificial Sequence
  Description of Artificial Sequence: Synthetic oligonucleotide
  Target: LAMA2; (+) strand; PAM type: NRG; PAM sequence: GAG
taaatgtttagatcaccaag

SEQ ID NO: 135994 - DNA, 20 bp, Artificial Sequence
  Description of Artificial Sequence: Synthetic oligonucleotide
  Target: LAMA2; (+) strand; PAM type: NRG; PAM sequence: CAG
ggagtttgtctacgacacta

SEQ ID NO: 135995 - DNA, 20 bp, Artificial Sequence
  Description of Artificial Sequence: Synthetic oligonucleotide
  Target: LAMA2; (+) strand; PAM type: NRG; PAM sequence: AGG
gagtttgtctacgacactac

SEQ ID NO: 135996 - DNA, 20 bp, Artificial Sequence
  Description of Artificial Sequence: Synthetic oligonucleotide
  Target: LAMA2; (+) strand; PAM type: NRG; PAM sequence: CAG
gtctacgacactacaggtga

SEQ ID NO: 135997 - DNA, 20 bp, Artificial Sequence
  Description of Artificial Sequence: Synthetic oligonucleotide
  Target: LAMA2; (+) strand; PAM type: NRG; PAM sequence: AGG
tctacgacactacaggtgac

SEQ ID NO: 135998 - DNA, 20 bp, Artificial Sequence
  Description of Artificial Sequence: Synthetic oligonucleotide
  Target: LAMA2; (+) strand; PAM type: NRG; PAM sequence: AAG
aggtgacaggcaactcacaa

SEQ ID NO: 135999 - DNA, 20 bp, Artificial Sequence
  Description of Artificial Sequence: Synthetic oligonucleotide
  Target: LAMA2; (+) strand; PAM type: NRG; PAM sequence: AAG
actcacaaaagtctttaaaa

SEQ ID NO: 136000 - DNA, 20 bp, Artificial Sequence
  Description of Artificial Sequence: Synthetic oligonucleotide
  Target: LAMA2; (+) strand; PAM type: NRG; PAM sequence: AAG
acaaaagtctttaaaaaaga

SEQ ID NO: 136001 - DNA, 20 bp, Artificial Sequence
  Description of Artificial Sequence: Synthetic oligonucleotide
  Target: LAMA2; (+) strand; PAM type: NRG; PAM sequence: GAG
aagtctttaaaaaagaaagt

SEQ ID NO: 136002 - DNA, 20 bp, Artificial Sequence
  Description of Artificial Sequence: Synthetic oligonucleotide
  Target: LAMA2; (+) strand; PAM type: NRG; PAM sequence: TAG
ttaaaaaagaaagtgagttt

SEQ ID NO: 136003 - DNA, 20 bp, Artificial Sequence
  Description of Artificial Sequence: Synthetic oligonucleotide
  Target: LAMA2; (+) strand; PAM type: NRG; PAM sequence: AGG
taaaaaagaaagtgagtttt

SEQ ID NO: 136004 - DNA, 20 bp, Artificial Sequence
  Description of Artificial Sequence: Synthetic oligonucleotide
  Target: LAMA2; (+) strand; PAM type: NRG; PAM sequence: GGG
aaaaaagaaagtgagtttta

SEQ ID NO: 136005 - DNA, 20 bp, Artificial Sequence
  Description of Artificial Sequence: Synthetic oligonucleotide
  Target: LAMA2; (+) strand; PAM type: NRG; PAM sequence: AAG
aaagaaagtgagttttaggg

SEQ ID NO: 136006 - DNA, 20 bp, Artificial Sequence
  Description of Artificial Sequence: Synthetic oligonucleotide
  Target: LAMA2; (+) strand; PAM type: NRG; PAM sequence: TGG
gaagataatttcaacaacaa

SEQ ID NO: 136007 - DNA, 20 bp, Artificial Sequence
  Description of Artificial Sequence: Synthetic oligonucleotide
  Target: LAMA2; (+) strand; PAM type: NRG; PAM sequence: GGG
aagataatttcaacaacaat

SEQ ID NO: 136008 - DNA, 20 bp, Artificial Sequence
  Description of Artificial Sequence: Synthetic oligonucleotide
  Target: LAMA2; (+) strand; PAM type: NRG; PAM sequence: GGG
agataatttcaacaacaatg

SEQ ID NO: 136009 - DNA, 20 bp, Artificial Sequence
  Description of Artificial Sequence: Synthetic oligonucleotide
  Target: LAMA2; (+) strand; PAM type: NRG; PAM sequence: AAG
taatttcaacaacaatgggg

SEQ ID NO: 136010 - DNA, 20 bp, Artificial Sequence
  Description of Artificial Sequence: Synthetic oligonucleotide
  Target: LAMA2; (+) strand; PAM type: NRG; PAM sequence: TGG
acaacaatggggaagattaa

SEQ ID NO: 136011 - DNA, 20 bp, Artificial Sequence
  Description of Artificial Sequence: Synthetic oligonucleotide
  Target: LAMA2; (+) strand; PAM type: NRG; PAM sequence: GGG
caacaatggggaagattaat

SEQ ID NO: 136012 - DNA, 20 bp, Artificial Sequence
  Description of Artificial Sequence: Synthetic oligonucleotide
  Target: LAMA2; (+) strand; PAM type: NRG; PAM sequence: GAG
acaatggggaagattaatgg

SEQ ID NO: 136013 - DNA, 20 bp, Artificial Sequence
  Description of Artificial Sequence: Synthetic oligonucleotide
  Target: LAMA2; (+) strand; PAM type: NRG; PAM sequence: TAG
atggggaagattaatgggag

SEQ ID NO: 136014 - DNA, 20 bp, Artificial Sequence
  Description of Artificial Sequence: Synthetic oligonucleotide
  Target: LAMA2; (+) strand; PAM type: NRG; PAM sequence: GAG
ggggaagattaatgggagta

SEQ ID NO: 136015 - DNA, 20 bp, Artificial Sequence
  Description of Artificial Sequence: Synthetic oligonucleotide
  Target: LAMA2; (+) strand; PAM type: NRG; PAM sequence: CAG
ttaatgggagtagagtcacg

SEQ ID NO: 136016 - DNA, 20 bp, Artificial Sequence
  Description of Artificial Sequence: Synthetic oligonucleotide
  Target: LAMA2; (+) strand; PAM type: NRG; PAM sequence: AGG
taatgggagtagagtcacgc

SEQ ID NO: 136017 - DNA, 20 bp, Artificial Sequence
  Description of Artificial Sequence: Synthetic oligonucleotide
  Target: LAMA2; (+) strand; PAM type: NRG; PAM sequence: AAG
tgggagtagagtcacgcagg

SEQ ID NO: 136018 - DNA, 20 bp, Artificial Sequence
  Description of Artificial Sequence: Synthetic oligonucleotide
  Target: LAMA2; (+) strand; PAM type: NRG; PAM sequence: TAG
gtagagtcacgcaggaagac

SEQ ID NO: 136019 - DNA, 20 bp, Artificial Sequence
  Description of Artificial Sequence: Synthetic oligonucleotide
  Target: LAMA2; (+) strand; PAM type: NRG; PAM sequence: AGG
tagagtcacgcaggaagact

SEQ ID NO: 136020 - DNA, 20 bp, Artificial Sequence
  Description of Artificial Sequence: Synthetic oligonucleotide
  Target: LAMA2; (+) strand; PAM type: NRG; PAM sequence: AAG
agtcacgcaggaagactagg

SEQ ID NO: 136021 - DNA, 20 bp, Artificial Sequence
  Description of Artificial Sequence: Synthetic oligonucleotide
  Target: LAMA2; (+) strand; PAM type: NRG; PAM sequence: AGG
gtcacgcaggaagactagga

SEQ ID NO: 136022 - DNA, 20 bp, Artificial Sequence
  Description of Artificial Sequence: Synthetic oligonucleotide
  Target: LAMA2; (+) strand; PAM type: NRG; PAM sequence: GGG
tcacgcaggaagactaggaa

SEQ ID NO: 136023 - DNA, 20 bp, Artificial Sequence
  Description of Artificial Sequence: Synthetic oligonucleotide
  Target: LAMA2; (+) strand; PAM type: NRG; PAM sequence: CAG
cgcaggaagactaggaaggg

SEQ ID NO: 136024 - DNA, 20 bp, Artificial Sequence
  Description of Artificial Sequence: Synthetic oligonucleotide
  Target: LAMA2; (+) strand; PAM type: NRG; PAM sequence: TGG
aggaagactaggaagggcag

SEQ ID NO: 136025 - DNA, 20 bp, Artificial Sequence
  Description of Artificial Sequence: Synthetic oligonucleotide
  Target: LAMA2; (+) strand; PAM type: NRG; PAM sequence: TGG
gcagtggtgctcaacctgtt

SEQ ID NO: 136026 - DNA, 20 bp, Artificial Sequence
  Description of Artificial Sequence: Synthetic oligonucleotide
  Target: LAMA2; (+) strand; PAM type: NRG; PAM sequence: CAG
gtgctcaacctgtttggcac

SEQ ID NO: 136027 - DNA, 20 bp, Artificial Sequence
  Description of Artificial Sequence: Synthetic oligonucleotide
  Target: LAMA2; (+) strand; PAM type: NRG; PAM sequence: AGG
tgctcaacctgtttggcacc

SEQ ID NO: 136028 - DNA, 20 bp, Artificial Sequence
  Description of Artificial Sequence: Synthetic oligonucleotide
  Target: LAMA2; (+) strand; PAM type: NRG; PAM sequence: GGG
gctcaacctgtttggcacca

SEQ ID NO: 136029 - DNA, 20 bp, Artificial Sequence
  Description of Artificial Sequence: Synthetic oligonucleotide
  Target: LAMA2; (+) strand; PAM type: NRG; PAM sequence: CAG
acctgtttggcaccagggac

SEQ ID NO: 136030 - DNA, 20 bp, Artificial Sequence
  Description of Artificial Sequence: Synthetic oligonucleotide
  Target: LAMA2; (+) strand; PAM type: NRG; PAM sequence: TGG
ggcaccagggaccagttttg

SEQ ID NO: 136031 - DNA, 20 bp, Artificial Sequence
  Description of Artificial Sequence: Synthetic oligonucleotide
  Target: LAMA2; (+) strand; PAM type: NRG; PAM sequence: AAG
accagggaccagttttgtgg

SEQ ID NO: 136032 - DNA, 20 bp, Artificial Sequence
  Description of Artificial Sequence: Synthetic oligonucleotide
  Target: LAMA2; (+) strand; PAM type: NRG; PAM sequence: CAG
gaagacaatttttccattga

SEQ ID NO: 136033 - DNA, 20 bp, Artificial Sequence
  Description of Artificial Sequence: Synthetic oligonucleotide
  Target: LAMA2; (+) strand; PAM type: NRG; PAM sequence: AGG
aagacaatttttccattgac

SEQ ID NO: 136034 - DNA, 20 bp, Artificial Sequence
  Description of Artificial Sequence: Synthetic oligonucleotide
  Target: LAMA2; (+) strand; PAM type: NRG; PAM sequence: GGG
agacaatttttccattgaca

SEQ ID NO: 136035 - DNA, 20 bp, Artificial Sequence
  Description of Artificial Sequence: Synthetic oligonucleotide
  Target: LAMA2; (+) strand; PAM type: NRG; PAM sequence: TAG
aatttttccattgacaggga

SEQ ID NO: 136036 - DNA, 20 bp, Artificial Sequence
  Description of Artificial Sequence: Synthetic oligonucleotide
  Target: LAMA2; (+) strand; PAM type: NRG; PAM sequence: AGG
atttttccattgacagggat

SEQ ID NO: 136037 - DNA, 20 bp, Artificial Sequence
  Description of Artificial Sequence: Synthetic oligonucleotide
  Target: LAMA2; (+) strand; PAM type: NRG; PAM sequence: GGG
tttttccattgacagggata

SEQ ID NO: 136038 - DNA, 20 bp, Artificial Sequence
  Description of Artificial Sequence: Synthetic oligonucleotide
  Target: LAMA2; (+) strand; PAM type: NRG; PAM sequence: GGG
ttttccattgacagggatag

SEQ ID NO: 136039 - DNA, 20 bp, Artificial Sequence
  Description of Artificial Sequence: Synthetic oligonucleotide
  Target: LAMA2; (+) strand; PAM type: NRG; PAM sequence: TGG
tccattgacagggatagggg

SEQ ID NO: 136040 - DNA, 20 bp, Artificial Sequence
  Description of Artificial Sequence: Synthetic oligonucleotide
  Target: LAMA2; (+) strand; PAM type: NRG; PAM sequence: TGG
ttgacagggataggggtgga

SEQ ID NO: 136041 - DNA, 20 bp, Artificial Sequence
  Description of Artificial Sequence: Synthetic oligonucleotide
  Target: LAMA2; (+) strand; PAM type: NRG; PAM sequence: CAG
gggataggggtggatggttt

SEQ ID NO: 136042 - DNA, 20 bp, Artificial Sequence
  Description of Artificial Sequence: Synthetic oligonucleotide
  Target: LAMA2; (+) strand; PAM type: NRG; PAM sequence: AGG
ggataggggtggatggtttc

SEQ ID NO: 136043 - DNA, 20 bp, Artificial Sequence
  Description of Artificial Sequence: Synthetic oligonucleotide
  Target: LAMA2; (+) strand; PAM type: NRG; PAM sequence: CAG
aggatgaaactgttccacct

SEQ ID NO: 136044 - DNA, 20 bp, Artificial Sequence
  Description of Artificial Sequence: Synthetic oligonucleotide
  Target: LAMA2; (+) strand; PAM type: NRG; PAM sequence: CAG
actgttccacctcagatcat

SEQ ID NO: 136045 - DNA, 20 bp, Artificial Sequence
  Description of Artificial Sequence: Synthetic oligonucleotide
  Target: LAMA2; (+) strand; PAM type: NRG; PAM sequence: TAG
cacctcagatcatcagccat

SEQ ID NO: 136046 - DNA, 20 bp, Artificial Sequence
  Description of Artificial Sequence: Synthetic oligonucleotide
  Target: LAMA2; (+) strand; PAM type: NRG; PAM sequence: AAG
atcagccattagattcttat

SEQ ID NO: 136047 - DNA, 20 bp, Artificial Sequence
  Description of Artificial Sequence: Synthetic oligonucleotide
  Target: LAMA2; (+) strand; PAM type: NRG; PAM sequence: TAG
agccattagattcttataag

SEQ ID NO: 136048 - DNA, 20 bp, Artificial Sequence
  Description of Artificial Sequence: Synthetic oligonucleotide
  Target: LAMA2; (+) strand; PAM type: NRG; PAM sequence: TAG
cttataagtagctcacaacc

SEQ ID NO: 136049 - DNA, 20 bp, Artificial Sequence
  Description of Artificial Sequence: Synthetic oligonucleotide
  Target: LAMA2; (+) strand; PAM type: NRG; PAM sequence: CAG
acctagatccctcgcatgca

SEQ ID NO: 136050 - DNA, 20 bp, Artificial Sequence
  Description of Artificial Sequence: Synthetic oligonucleotide
  Target: LAMA2; (+) strand; PAM type: NRG; PAM sequence: TGG
cgcatgcacagttcacaata

SEQ ID NO: 136051 - DNA, 20 bp, Artificial Sequence
  Description of Artificial Sequence: Synthetic oligonucleotide
  Target: LAMA2; (+) strand; PAM type: NRG; PAM sequence: GAG
aatatggttcacgttcctgt

SEQ ID NO: 136052 - DNA, 20 bp, Artificial Sequence
  Description of Artificial Sequence: Synthetic oligonucleotide
  Target: LAMA2; (+) strand; PAM type: NRG; PAM sequence: GAG
tatggttcacgttcctgtga

SEQ ID NO: 136053 - DNA, 20 bp, Artificial Sequence
  Description of Artificial Sequence: Synthetic oligonucleotide
  Target: LAMA2; (+) strand; PAM type: NRG; PAM sequence: CAG
taatgctgttgcttatctga

SEQ ID NO: 136054 - DNA, 20 bp, Artificial Sequence
  Description of Artificial Sequence: Synthetic oligonucleotide
  Target: LAMA2; (+) strand; PAM type: NRG; PAM sequence: AGG
aatgctgttgcttatctgac

SEQ ID NO: 136055 - DNA, 20 bp, Artificial Sequence
  Description of Artificial Sequence: Synthetic oligonucleotide
  Target: LAMA2; (+) strand; PAM type: NRG; PAM sequence: GAG
tgctgttgcttatctgacag

SEQ ID NO: 136056 - DNA, 20 bp, Artificial Sequence
  Description of Artificial Sequence: Synthetic oligonucleotide
  Target: LAMA2; (+) strand; PAM type: NRG; PAM sequence: AGG
gctgttgcttatctgacagg

SEQ ID NO: 136057 - DNA, 20 bp, Artificial Sequence
  Description of Artificial Sequence: Synthetic oligonucleotide
  Target: LAMA2; (+) strand; PAM type: NRG; PAM sequence: CAG
gttgcttatctgacaggagg

SEQ ID NO: 136058 - DNA, 20 bp, Artificial Sequence
  Description of Artificial Sequence: Synthetic oligonucleotide
  Target: LAMA2; (+) strand; PAM type: NRG; PAM sequence: GAG
tgcttatctgacaggaggca

SEQ ID NO: 136059 - DNA, 20 bp, Artificial Sequence
  Description of Artificial Sequence: Synthetic oligonucleotide
  Target: LAMA2; (+) strand; PAM type: NRG; PAM sequence: CAG
atctgacaggaggcagagct

SEQ ID NO: 136060 - DNA, 20 bp, Artificial Sequence
  Description of Artificial Sequence: Synthetic oligonucleotide
  Target: LAMA2; (+) strand; PAM type: NRG; PAM sequence: AGG
tctgacaggaggcagagctc

SEQ ID NO: 136061 - DNA, 20 bp, Artificial Sequence
  Description of Artificial Sequence: Synthetic oligonucleotide
  Target: LAMA2; (+) strand; PAM type: NRG; PAM sequence: TGG
gacaggaggcagagctcagg

SEQ ID NO: 136062 - DNA, 20 bp, Artificial Sequence
  Description of Artificial Sequence: Synthetic oligonucleotide
  Target: LAMA2; (+) strand; PAM type: NRG; PAM sequence: CAG
aggtggtaatgcttgtttgc

SEQ ID NO: 136063 - DNA, 20 bp, Artificial Sequence
  Description of Artificial Sequence: Synthetic oligonucleotide
  Target: LAMA2; (+) strand; PAM type: NRG; PAM sequence: CAG
gccactcacttcctgctgtg

SEQ ID NO: 136064 - DNA, 20 bp, Artificial Sequence
  Description of Artificial Sequence: Synthetic oligonucleotide
  Target: LAMA2; (+) strand; PAM type: NRG; PAM sequence: CAG
ctgtgcagccctgttcctaa

SEQ ID NO: 136065 - DNA, 20 bp, Artificial Sequence
  Description of Artificial Sequence: Synthetic oligonucleotide
  Target: LAMA2; (+) strand; PAM type: NRG; PAM sequence: AGG
tgtgcagccctgttcctaac

SEQ ID NO: 136066 - DNA, 20 bp, Artificial Sequence
  Description of Artificial Sequence: Synthetic oligonucleotide
  Target: LAMA2; (+) strand; PAM type: NRG; PAM sequence: CAG
gccctgttcctaacaggcca

SEQ ID NO: 136067 - DNA, 20 bp, Artificial Sequence
  Description of Artificial Sequence: Synthetic oligonucleotide
  Target: LAMA2; (+) strand; PAM type: NRG; PAM sequence: AGG
ccctgttcctaacaggccac

SEQ ID NO: 136068 - DNA, 20 bp, Artificial Sequence
  Description of Artificial Sequence: Synthetic oligonucleotide
  Target: LAMA2; (+) strand; PAM type: NRG; PAM sequence: TGG
gttcctaacaggccacaggc

SEQ ID NO: 136069 - DNA, 20 bp, Artificial Sequence
  Description of Artificial Sequence: Synthetic oligonucleotide
  Target: LAMA2; (+) strand; PAM type: NRG; PAM sequence: TGG
aacaggccacaggctggtac

SEQ ID NO: 136070 - DNA, 20 bp, Artificial Sequence
  Description of Artificial Sequence: Synthetic oligonucleotide
  Target: LAMA2; (+) strand; PAM type: NRG; PAM sequence: CAG
cacaggctggtactggtctg

SEQ ID NO: 136071 - DNA, 20 bp, Artificial Sequence
  Description of Artificial Sequence: Synthetic oligonucleotide
  Target: LAMA2; (+) strand; PAM type: NRG; PAM sequence: TGG
ctggtactggtctgcagccc

SEQ ID NO: 136072 - DNA, 20 bp, Artificial Sequence
  Description of Artificial Sequence: Synthetic oligonucleotide
  Target: LAMA2; (+) strand; PAM type: NRG; PAM sequence: GGG
tggtactggtctgcagccct

SEQ ID NO: 136073 - DNA, 20 bp, Artificial Sequence
  Description of Artificial Sequence: Synthetic oligonucleotide
  Target: LAMA2; (+) strand; PAM type: NRG; PAM sequence: GGG
ggtactggtctgcagccctg

SEQ ID NO: 136074 - DNA, 20 bp, Artificial Sequence
  Description of Artificial Sequence: Synthetic oligonucleotide
  Target: LAMA2; (+) strand; PAM type: NRG; PAM sequence: TGG
ctggtctgcagccctggggt

SEQ ID NO: 136075 - DNA, 20 bp, Artificial Sequence
  Description of Artificial Sequence: Synthetic oligonucleotide
  Target: LAMA2; (+) strand; PAM type: NRG; PAM sequence: GGG
tggtctgcagccctggggtt

SEQ ID NO: 136076 - DNA, 20 bp, Artificial Sequence
  Description of Artificial Sequence: Synthetic oligonucleotide
  Target: LAMA2; (+) strand; PAM type: NRG; PAM sequence: GGG
ggtctgcagccctggggttg

SEQ ID NO: 136077 - DNA, 20 bp, Artificial Sequence
  Description of Artificial Sequence: Synthetic oligonucleotide
  Target: LAMA2; (+) strand; PAM type: NRG; PAM sequence: CGG
agccctggggttggggaccc

SEQ ID NO: 136078 - DNA, 20 bp, Artificial Sequence
  Description of Artificial Sequence: Synthetic oligonucleotide
  Target: LAMA2; (+) strand; PAM type: NRG; PAM sequence: GGG
gccctggggttggggacccc

SEQ ID NO: 136079 - DNA, 20 bp, Artificial Sequence
  Description of Artificial Sequence: Synthetic oligonucleotide
  Target: LAMA2; (+) strand; PAM type: NRG; PAM sequence: TAG
tggggttggggaccccgggt

SEQ ID NO: 136080 - DNA, 20 bp, Artificial Sequence
  Description of Artificial Sequence: Synthetic oligonucleotide
  Target: LAMA2; (+) strand; PAM type: NRG; PAM sequence: AGG
ggggttggggaccccgggtt

SEQ ID NO: 136081 - DNA, 20 bp, Artificial Sequence
  Description of Artificial Sequence: Synthetic oligonucleotide
  Target: LAMA2; (+) strand; PAM type: NRG; PAM sequence: AAG
atgctactgtaataaatgta

SEQ ID NO: 136082 - DNA, 20 bp, Artificial Sequence
  Description of Artificial Sequence: Synthetic oligonucleotide
  Target: LAMA2; (+) strand; PAM type: NRG; PAM sequence: AAG
tactgtaataaatgtaaagt

SEQ ID NO: 136083 - DNA, 20 bp, Artificial Sequence
  Description of Artificial Sequence: Synthetic oligonucleotide
  Target: LAMA2; (+) strand; PAM type: NRG; PAM sequence: AGG
actgtaataaatgtaaagta

SEQ ID NO: 136084 - DNA, 20 bp, Artificial Sequence
  Description of Artificial Sequence: Synthetic oligonucleotide
  Target: LAMA2; (+) strand; PAM type: NRG; PAM sequence: TAG
taataaatgtaaagtaaggt

SEQ ID NO: 136085 - DNA, 20 bp, Artificial Sequence
  Description of Artificial Sequence: Synthetic oligonucleotide
  Target: LAMA2; (+) strand; PAM type: NRG; PAM sequence: AGG
aataaatgtaaagtaaggtt

SEQ ID NO: 136086 - DNA, 20 bp, Artificial Sequence
  Description of Artificial Sequence: Synthetic oligonucleotide
  Target: LAMA2; (+) strand; PAM type: NRG; PAM sequence: TGG
taaatgttgatgtgtttgtg

SEQ ID NO: 136087 - DNA, 20 bp, Artificial Sequence
  Description of Artificial Sequence: Synthetic oligonucleotide
  Target: LAMA2; (+) strand; PAM type: NRG; PAM sequence: CGG
atgttgatgtgtttgtgtgg

SEQ ID NO: 136088 - DNA, 20 bp, Artificial Sequence
  Description of Artificial Sequence: Synthetic oligonucleotide
  Target: LAMA2; (+) strand; PAM type: NRG; PAM sequence: GGG
tgttgatgtgtttgtgtggc

SEQ ID NO: 136089 - DNA, 20 bp, Artificial Sequence
  Description of Artificial Sequence: Synthetic oligonucleotide
  Target: LAMA2; (+) strand; PAM type: NRG; PAM sequence: GGG
gttgatgtgtttgtgtggcg

SEQ ID NO: 136090 - DNA, 20 bp, Artificial Sequence
  Description of Artificial Sequence: Synthetic oligonucleotide
  Target: LAMA2; (+) strand; PAM type: NRG; PAM sequence: GAG
tgatgtgtttgtgtggcggg

SEQ ID NO: 136091 - DNA, 20 bp, Artificial Sequence
  Description of Artificial Sequence: Synthetic oligonucleotide
  Target: LAMA2; (+) strand; PAM type: NRG; PAM sequence: CGG
tgtgtttgtgtggcggggag

SEQ ID NO: 136092 - DNA, 20 bp, Artificial Sequence
  Description of Artificial Sequence: Synthetic oligonucleotide
  Target: LAMA2; (+) strand; PAM type: NRG; PAM sequence: TAG
gtggcggggagcggtgtgtg

SEQ ID NO: 136093 - DNA, 20 bp, Artificial Sequence
  Description of Artificial Sequence: Synthetic oligonucleotide
  Target: LAMA2; (+) strand; PAM type: NRG; PAM sequence: GAG
cggtgtgtgtagctgaattt

SEQ ID NO: 136094 - DNA, 20 bp, Artificial Sequence
  Description of Artificial Sequence: Synthetic oligonucleotide
  Target: LAMA2; (+) strand; PAM type: NRG; PAM sequence: AGG
ggtgtgtgtagctgaatttg

SEQ ID NO: 136095 - DNA, 20 bp, Artificial Sequence
  Description of Artificial Sequence: Synthetic oligonucleotide
  Target: LAMA2; (+) strand; PAM type: NRG; PAM sequence: TAG
gtgtgtagctgaatttgagg

SEQ ID NO: 136096 - DNA, 20 bp, Artificial Sequence
  Description of Artificial Sequence: Synthetic oligonucleotide
  Target: LAMA2; (+) strand; PAM type: NRG; PAM sequence: GAG
gtgtagctgaatttgaggta

SEQ ID NO: 136097 - DNA, 20 bp, Artificial Sequence
  Description of Artificial Sequence: Synthetic oligonucleotide
  Target: LAMA2; (+) strand; PAM type: NRG; PAM sequence: AAG
gaatttgaggtagagacaaa

SEQ ID NO: 136098 - DNA, 20 bp, Artificial Sequence
  Description of Artificial Sequence: Synthetic oligonucleotide
  Target: LAMA2; (+) strand; PAM type: NRG; PAM sequence: TGG
gagacaaaaagtaattaaac

SEQ ID NO: 136099 - DNA, 20 bp, Artificial Sequence
  Description of Artificial Sequence: Synthetic oligonucleotide
  Target: LAMA2; (+) strand; PAM type: NRG; PAM sequence: AAG
acaaaaagtaattaaactgg

SEQ ID NO: 136100 - DNA, 20 bp, Artificial Sequence
  Description of Artificial Sequence: Synthetic oligonucleotide
  Target: LAMA2; (+) strand; PAM type: NRG; PAM sequence: CAG
aaaagtaattaaactggaag

SEQ ID NO: 136101 - DNA, 20 bp, Artificial Sequence
  Description of Artificial Sequence: Synthetic oligonucleotide
  Target: LAMA2; (+) strand; PAM type: NRG; PAM sequence: TAG
taaactggaagcagaaatct

SEQ ID NO: 136102 - DNA, 20 bp, Artificial Sequence
  Description of Artificial Sequence: Synthetic oligonucleotide
  Target: LAMA2; (+) strand; PAM type: NRG; PAM sequence: TGG
tggaagcagaaatcttagaa

SEQ ID NO: 136103 - DNA, 20 bp, Artificial Sequence
  Description of Artificial Sequence: Synthetic oligonucleotide
  Target: LAMA2; (+) strand; PAM type: NRG; PAM sequence: GGG
ggaagcagaaatcttagaat

SEQ ID NO: 136104 - DNA, 20 bp, Artificial Sequence
  Description of Artificial Sequence: Synthetic oligonucleotide
  Target: LAMA2; (+) strand; PAM type: NRG; PAM sequence: GGG
gaagcagaaatcttagaatg

SEQ ID NO: 136105 - DNA, 20 bp, Artificial Sequence
  Description of Artificial Sequence: Synthetic oligonucleotide
  Target: LAMA2; (+) strand; PAM type: NRG; PAM sequence: AAG
agaaatcttagaatggggaa

SEQ ID NO: 136106 - DNA, 20 bp, Artificial Sequence
  Description of Artificial Sequence: Synthetic oligonucleotide
  Target: LAMA2; (+) strand; PAM type: NRG; PAM sequence: AAG
atcttagaatggggaaaagt

SEQ ID NO: 136107 - DNA, 20 bp, Artificial Sequence
  Description of Artificial Sequence: Synthetic oligonucleotide
  Target: LAMA2; (+) strand; PAM type: NRG; PAM sequence: AGG
tcttagaatggggaaaagta

SEQ ID NO: 136108 - DNA, 20 bp, Artificial Sequence
  Description of Artificial Sequence: Synthetic oligonucleotide
  Target: LAMA2; (+) strand; PAM type: NRG; PAM sequence: AAG
gtaaggcatatttgttcaca

SEQ ID NO: 136109 - DNA, 20 bp, Artificial Sequence
  Description of Artificial Sequence: Synthetic oligonucleotide
  Target: LAMA2; (+) strand; PAM type: NRG; PAM sequence: TGG
aagtatcttttaacattttc

SEQ ID NO: 136110 - DNA, 20 bp, Artificial Sequence
  Description of Artificial Sequence: Synthetic oligonucleotide
  Target: LAMA2; (+) strand; PAM type: NRG; PAM sequence: TGG
ttaacattttctggtttctg

SEQ ID NO: 136111 - DNA, 20 bp, Artificial Sequence
  Description of Artificial Sequence: Synthetic oligonucleotide
  Target: LAMA2; (+) strand; PAM type: NRG; PAM sequence: GAG
aacattttctggtttctgtg

SEQ ID NO: 136112 - DNA, 20 bp, Artificial Sequence
  Description of Artificial Sequence: Synthetic oligonucleotide
  Target: LAMA2; (+) strand; PAM type: NRG; PAM sequence: TGG
gagtcacattttattaatgc

SEQ ID NO: 136113 - DNA, 20 bp, Artificial Sequence
  Description of Artificial Sequence: Synthetic oligonucleotide
  Target: LAMA2; (+) strand; PAM type: NRG; PAM sequence: TAG
ctggttgacatttatctacc

SEQ ID NO: 136114 - DNA, 20 bp, Artificial Sequence
  Description of Artificial Sequence: Synthetic oligonucleotide
  Target: LAMA2; (+) strand; PAM type: NRG; PAM sequence: CAG
atctacctagaaaaaaatga

SEQ ID NO: 136115 - DNA, 20 bp, Artificial Sequence
  Description of Artificial Sequence: Synthetic oligonucleotide
  Target: LAMA2; (+) strand; PAM type: NRG; PAM sequence: CAG
gaaaaaaatgacagaaattt

SEQ ID NO: 136116 - DNA, 20 bp, Artificial Sequence
  Description of Artificial Sequence: Synthetic oligonucleotide
  Target: LAMA2; (+) strand; PAM type: NRG; PAM sequence: AGG
aaaaaaatgacagaaatttc

SEQ ID NO: 136117 - DNA, 20 bp, Artificial Sequence
  Description of Artificial Sequence: Synthetic oligonucleotide
  Target: LAMA2; (+) strand; PAM type: NRG; PAM sequence: AAG
tgacagaaatttcaggaaca

SEQ ID NO: 136118 - DNA, 20 bp, Artificial Sequence
  Description of Artificial Sequence: Synthetic oligonucleotide
  Target: LAMA2; (+) strand; PAM type: NRG; PAM sequence: AGG
gacagaaatttcaggaacaa

SEQ ID NO: 136119 - DNA, 20 bp, Artificial Sequence
  Description of Artificial Sequence: Synthetic oligonucleotide
  Target: LAMA2; (+) strand; PAM type: NRG; PAM sequence: TAG
gaacaaaggtgactatgaat

SEQ ID NO: 136120 - DNA, 20 bp, Artificial Sequence
  Description of Artificial Sequence: Synthetic oligonucleotide
  Target: LAMA2; (+) strand; PAM type: NRG; PAM sequence: AGG
aacaaaggtgactatgaatt

SEQ ID NO: 136121 - DNA, 20 bp, Artificial Sequence
  Description of Artificial Sequence: Synthetic oligonucleotide
  Target: LAMA2; (+) strand; PAM type: NRG; PAM sequence: TGG
attaggtaccaatatttttg

SEQ ID NO: 136122 - DNA, 20 bp, Artificial Sequence
  Description of Artificial Sequence: Synthetic oligonucleotide
  Target: LAMA2; (+) strand; PAM type: NRG; PAM sequence: AAG
ttttgtggatgatcttcatg

SEQ ID NO: 136123 - DNA, 20 bp, Artificial Sequence
  Description of Artificial Sequence: Synthetic oligonucleotide
  Target: LAMA2; (+) strand; PAM type: NRG; PAM sequence: CAG
gtggatgatcttcatgaagt

SEQ ID NO: 136124 - DNA, 20 bp, Artificial Sequence
  Description of Artificial Sequence: Synthetic oligonucleotide
  Target: LAMA2; (+) strand; PAM type: NRG; PAM sequence: TGG
ttcatgaagtcagccaataa

SEQ ID NO: 136125 - DNA, 20 bp, Artificial Sequence
  Description of Artificial Sequence: Synthetic oligonucleotide
  Target: LAMA2; (+) strand; PAM type: NRG; PAM sequence: GAG
catgaagtcagccaataatg

SEQ ID NO: 136126 - DNA, 20 bp, Artificial Sequence
  Description of Artificial Sequence: Synthetic oligonucleotide
  Target: LAMA2; (+) strand; PAM type: NRG; PAM sequence: GAG
agtcagccaataatggagat

SEQ ID NO: 136127 - DNA, 20 bp, Artificial Sequence
  Description of Artificial Sequence: Synthetic oligonucleotide
  Target: LAMA2; (+) strand; PAM type: NRG; PAM sequence: TGG
caataatggagatgagtatg

SEQ ID NO: 136128 - DNA, 20 bp, Artificial Sequence
  Description of Artificial Sequence: Synthetic oligonucleotide
  Target: LAMA2; (+) strand; PAM type: NRG; PAM sequence: AAG
aatggagatgagtatgtgga

SEQ ID NO: 136129 - DNA, 20 bp, Artificial Sequence
  Description of Artificial Sequence: Synthetic oligonucleotide
  Target: LAMA2; (+) strand; PAM type: NRG; PAM sequence: AGG
atggagatgagtatgtggaa

SEQ ID NO: 136130 - DNA, 20 bp, Artificial Sequence
  Description of Artificial Sequence: Synthetic oligonucleotide
  Target: LAMA2; (+) strand; PAM type: NRG; PAM sequence: TGG
agatgagtatgtggaaagga

SEQ ID NO: 136131 - DNA, 20 bp, Artificial Sequence
  Description of Artificial Sequence: Synthetic oligonucleotide
  Target: LAMA2; (+) strand; PAM type: NRG; PAM sequence: TGG
tgtggaaaggatggattatt

SEQ ID NO: 136132 - DNA, 20 bp, Artificial Sequence
  Description of Artificial Sequence: Synthetic oligonucleotide
  Target: LAMA2; (+) strand; PAM type: NRG; PAM sequence: AAG
gattatttggactttttgaa

SEQ ID NO: 136133 - DNA, 20 bp, Artificial Sequence
  Description of Artificial Sequence: Synthetic oligonucleotide
  Target: LAMA2; (+) strand; PAM type: NRG; PAM sequence: AAG
tatttggactttttgaaaag

SEQ ID NO: 136134 - DNA, 20 bp, Artificial Sequence
  Description of Artificial Sequence: Synthetic oligonucleotide
  Target: LAMA2; (+) strand; PAM type: NRG; PAM sequence: TGG
actttttgaaaagaagttat

SEQ ID NO: 136135 - DNA, 20 bp, Artificial Sequence
  Description of Artificial Sequence: Synthetic oligonucleotide
  Target: LAMA2; (+) strand; PAM type: NRG; PAM sequence: GGG
ctttttgaaaagaagttatt

SEQ ID NO: 136136 - DNA, 20 bp, Artificial Sequence
  Description of Artificial Sequence: Synthetic oligonucleotide
  Target: LAMA2; (+) strand; PAM type: NRG; PAM sequence: TGG
aagttattgggtgaacatga

SEQ ID NO: 136137 - DNA, 20 bp, Artificial Sequence
  Description of Artificial Sequence: Synthetic oligonucleotide
  Target: LAMA2; (+) strand; PAM type: NRG; PAM sequence: CAG
gctcatgcctgtaatctcaa

SEQ ID NO: 136138 - DNA, 20 bp, Artificial Sequence
  Description of Artificial Sequence: Synthetic oligonucleotide
  Target: LAMA2; (+) strand; PAM type: NRG; PAM sequence: TGG
tgcctgtaatctcaacagtt

SEQ ID NO: 136139 - DNA, 20 bp, Artificial Sequence
  Description of Artificial Sequence: Synthetic oligonucleotide
  Target: LAMA2; (+) strand; PAM type: NRG; PAM sequence: GGG
gcctgtaatctcaacagttt

SEQ ID NO: 136140 - DNA, 20 bp, Artificial Sequence
  Description of Artificial Sequence: Synthetic oligonucleotide
  Target: LAMA2; (+) strand; PAM type: NRG; PAM sequence: GAG
ctgtaatctcaacagtttgg

SEQ ID NO: 136141 - DNA, 20 bp, Artificial Sequence
  Description of Artificial Sequence: Synthetic oligonucleotide
  Target: LAMA2; (+) strand; PAM type: NRG; PAM sequence: AGG
tgtaatctcaacagtttggg

SEQ ID NO: 136142 - DNA, 20 bp, Artificial Sequence
  Description of Artificial Sequence: Synthetic oligonucleotide
  Target: LAMA2; (+) strand; PAM type: NRG; PAM sequence: GAG
tctcaacagtttgggaggtt

SEQ ID NO: 136143 - DNA, 20 bp, Artificial Sequence
  Description of Artificial Sequence: Synthetic oligonucleotide
  Target: LAMA2; (+) strand; PAM type: NRG; PAM sequence: AGG
ctcaacagtttgggaggttg

SEQ ID NO: 136144 - DNA, 20 bp, Artificial Sequence
  Description of Artificial Sequence: Synthetic oligonucleotide
  Target: LAMA2; (+) strand; PAM type: NRG; PAM sequence: TGG
aacagtttgggaggttgagg

SEQ ID NO: 136145 - DNA, 20 bp, Artificial Sequence
  Description of Artificial Sequence: Synthetic oligonucleotide
  Target: LAMA2; (+) strand; PAM type: NRG; PAM sequence: GGG
acagtttgggaggttgaggt

SEQ ID NO: 136146 - DNA, 20 bp, Artificial Sequence
  Description of Artificial Sequence: Synthetic oligonucleotide
  Target: LAMA2; (+) strand; PAM type: NRG; PAM sequence: GAG
agtttgggaggttgaggtgg

SEQ ID NO: 136147 - DNA, 20 bp, Artificial Sequence
  Description of Artificial Sequence: Synthetic oligonucleotide
  Target: LAMA2; (+) strand; PAM type: NRG; PAM sequence: AGG
gtttgggaggttgaggtggg

SEQ ID NO: 136148 - DNA, 20 bp, Artificial Sequence
  Description of Artificial Sequence: Synthetic oligonucleotide
  Target: LAMA2; (+) strand; PAM type: NRG; PAM sequence: GAG
ttgaggtgggaggatcactt

SEQ ID NO: 136149 - DNA, 20 bp, Artificial Sequence
  Description of Artificial Sequence: Synthetic oligonucleotide
  Target: LAMA2; (+) strand; PAM type: NRG; PAM sequence: AGG
tgaggtgggaggatcacttg

SEQ ID NO: 136150 - DNA, 20 bp, Artificial Sequence
  Description of Artificial Sequence: Synthetic oligonucleotide
  Target: LAMA2; (+) strand; PAM type: NRG; PAM sequence: CAG
gtgggaggatcacttgaggc

SEQ ID NO: 136151 - DNA, 20 bp, Artificial Sequence
  Description of Artificial Sequence: Synthetic oligonucleotide
  Target: LAMA2; (+) strand; PAM type: NRG; PAM sequence: AGG
tgggaggatcacttgaggcc

SEQ ID NO: 136152 - DNA, 20 bp, Artificial Sequence
  Description of Artificial Sequence: Synthetic oligonucleotide
  Target: LAMA2; (+) strand; PAM type: NRG; PAM sequence: GAG
ggaggatcacttgaggccag

SEQ ID NO: 136153 - DNA, 20 bp, Artificial Sequence
  Description of Artificial Sequence: Synthetic oligonucleotide
  Target: LAMA2; (+) strand; PAM type: NRG; PAM sequence: GAG
tcacttgaggccaggagttt

SEQ ID NO: 136154 - DNA, 20 bp, Artificial Sequence
  Description of Artificial Sequence: Synthetic oligonucleotide
  Target: LAMA2; (+) strand; PAM type: NRG; PAM sequence: TGG
ccaggagtttgagataaact

SEQ ID NO: 136155 - DNA, 20 bp, Artificial Sequence
  Description of Artificial Sequence: Synthetic oligonucleotide
  Target: LAMA2; (+) strand; PAM type: NRG; PAM sequence: GGG
caggagtttgagataaactt

SEQ ID NO: 136156 - DNA, 20 bp, Artificial Sequence
  Description of Artificial Sequence: Synthetic oligonucleotide
  Target: LAMA2; (+) strand; PAM type: NRG; PAM sequence: CAG
tttgagataaacttgggcaa

SEQ ID NO: 136157 - DNA, 20 bp, Artificial Sequence
  Description of Artificial Sequence: Synthetic oligonucleotide
  Target: LAMA2; (+) strand; PAM type: NRG; PAM sequence: GAG
tgagataaacttgggcaaca

SEQ ID NO: 136158 - DNA, 20 bp, Artificial Sequence
  Description of Artificial Sequence: Synthetic oligonucleotide
  Target: LAMA2; (+) strand; PAM type: NRG; PAM sequence: AAG
ataaacttgggcaacagagc

SEQ ID NO: 136159 - DNA, 20 bp, Artificial Sequence
  Description of Artificial Sequence: Synthetic oligonucleotide
  Target: LAMA2; (+) strand; PAM type: NRG; PAM sequence: TAG
tacaataattaaaaaaaaaa

SEQ ID NO: 136160 - DNA, 20 bp, Artificial Sequence
  Description of Artificial Sequence: Synthetic oligonucleotide
  Target: LAMA2; (+) strand; PAM type: NRG; PAM sequence: TAG
attaaaaaaaaaatagaaat

SEQ ID NO: 136161 - DNA, 20 bp, Artificial Sequence
  Description of Artificial Sequence: Synthetic oligonucleotide
  Target: LAMA2; (+) strand; PAM type: NRG; PAM sequence: TGG
tagaaattagctgtatgtga

SEQ ID NO: 136162 - DNA, 20 bp, Artificial Sequence
  Description of Artificial Sequence: Synthetic oligonucleotide
  Target: LAMA2; (+) strand; PAM type: NRG; PAM sequence: TAG
tatgtgatggcttgcacctg

SEQ ID NO: 136163 - DNA, 20 bp, Artificial Sequence
  Description of Artificial Sequence: Synthetic oligonucleotide
  Target: LAMA2; (+) strand; PAM type: NRG; PAM sequence: TAG
atggcttgcacctgtagttc

SEQ ID NO: 136164 - DNA, 20 bp, Artificial Sequence
  Description of Artificial Sequence: Synthetic oligonucleotide
  Target: LAMA2; (+) strand; PAM type: NRG; PAM sequence: CAG
cacctgtagttctagctact

SEQ ID NO: 136165 - DNA, 20 bp, Artificial Sequence
  Description of Artificial Sequence: Synthetic oligonucleotide
  Target: LAMA2; (+) strand; PAM type: NRG; PAM sequence: AGG
acctgtagttctagctactc

SEQ ID NO: 136166 - DNA, 20 bp, Artificial Sequence
  Description of Artificial Sequence: Synthetic oligonucleotide
  Target: LAMA2; (+) strand; PAM type: NRG; PAM sequence: CAG
ttctagctactcaggatgct

SEQ ID NO: 136167 - DNA, 20 bp, Artificial Sequence
  Description of Artificial Sequence: Synthetic oligonucleotide
  Target: LAMA2; (+) strand; PAM type: NRG; PAM sequence: AGG
tctagctactcaggatgctc

SEQ ID NO: 136168 - DNA, 20 bp, Artificial Sequence
  Description of Artificial Sequence: Synthetic oligonucleotide
  Target: LAMA2; (+) strand; PAM type: NRG; PAM sequence: AAG
gctactcaggatgctcaggc

SEQ ID NO: 136169 - DNA, 20 bp, Artificial Sequence
  Description of Artificial Sequence: Synthetic oligonucleotide
  Target: LAMA2; (+) strand; PAM type: NRG; PAM sequence: GAG
tactcaggatgctcaggcaa

SEQ ID NO: 136170 - DNA, 20 bp, Artificial Sequence
  Description of Artificial Sequence: Synthetic oligonucleotide
  Target: LAMA2; (+) strand; PAM type: NRG; PAM sequence: AGG
actcaggatgctcaggcaag

SEQ ID NO: 136171 - DNA, 20 bp, Artificial Sequence
  Description of Artificial Sequence: Synthetic oligonucleotide
  Target: LAMA2; (+) strand; PAM type: NRG; PAM sequence: GAG
ctcaggcaagaggatcactt

SEQ ID NO: 136172 - DNA, 20 bp, Artificial Sequence
  Description of Artificial Sequence: Synthetic oligonucleotide
  Target: LAMA2; (+) strand; PAM type: NRG; PAM sequence: TAG
gcaagaggatcacttgagcc

SEQ ID NO: 136173 - DNA, 20 bp, Artificial Sequence
  Description of Artificial Sequence: Synthetic oligonucleotide
  Target: LAMA2; (+) strand; PAM type: NRG; PAM sequence: AGG
caagaggatcacttgagcct

SEQ ID NO: 136174 - DNA, 20 bp, Artificial Sequence
  Description of Artificial Sequence: Synthetic oligonucleotide
  Target: LAMA2; (+) strand; PAM type: NRG; PAM sequence: GAG
agaggatcacttgagcctag

SEQ ID NO: 136175 - DNA, 20 bp, Artificial Sequence
  Description of Artificial Sequence: Synthetic oligonucleotide
  Target: LAMA2; (+) strand; PAM type: NRG; PAM sequence: AGG
gaggatcacttgagcctagg

SEQ ID NO: 136176 - DNA, 20 bp, Artificial Sequence
  Description of Artificial Sequence: Synthetic oligonucleotide
  Target: LAMA2; (+) strand; PAM type: NRG; PAM sequence: CAG
gatcacttgagcctaggagg

SEQ ID NO: 136177 - DNA, 20 bp, Artificial Sequence
  Description of Artificial Sequence: Synthetic oligonucleotide
  Target: LAMA2; (+) strand; PAM type: NRG; PAM sequence: GAG
tcacttgagcctaggaggca

SEQ ID NO: 136178 - DNA, 20 bp, Artificial Sequence
  Description of Artificial Sequence: Synthetic oligonucleotide
  Target: LAMA2; (+) strand; PAM type: NRG; PAM sequence: AGG
cacttgagcctaggaggcag

SEQ ID NO: 136179 - DNA, 20 bp, Artificial Sequence
  Description of Artificial Sequence: Synthetic oligonucleotide
  Target: LAMA2; (+) strand; PAM type: NRG; PAM sequence: CAG
agcctaggaggcagaggctt

SEQ ID NO: 136180 - DNA, 20 bp, Artificial Sequence
  Description of Artificial Sequence: Synthetic oligonucleotide
  Target: LAMA2; (+) strand; PAM type: NRG; PAM sequence: CAG
atgatcatgccactgcactc

SEQ ID NO: 136181 - DNA, 20 bp, Artificial Sequence
  Description of Artificial Sequence: Synthetic oligonucleotide
  Target: LAMA2; (+) strand; PAM type: NRG; PAM sequence: TGG
catgccactgcactccagcc

SEQ ID NO: 136182 - DNA, 20 bp, Artificial Sequence
  Description of Artificial Sequence: Synthetic oligonucleotide
  Target: LAMA2; (+) strand; PAM type: NRG; PAM sequence: GGG
atgccactgcactccagcct

SEQ ID NO: 136183 - DNA, 20 bp, Artificial Sequence
  Description of Artificial Sequence: Synthetic oligonucleotide
  Target: LAMA2; (+) strand; PAM type: NRG; PAM sequence: AAG
tgcactccagcctgggcaac

SEQ ID NO: 136184 - DNA, 20 bp, Artificial Sequence
  Description of Artificial Sequence: Synthetic oligonucleotide
  Target: LAMA2; (+) strand; PAM type: NRG; PAM sequence: GAG
cactccagcctgggcaacaa

SEQ ID NO: 136185 - DNA, 20 bp, Artificial Sequence
  Description of Artificial Sequence: Synthetic oligonucleotide
  Target: LAMA2; (+) strand; PAM type: NRG; PAM sequence: GAG
ccagcctgggcaacaagagt

SEQ ID NO: 136186 - DNA, 20 bp, Artificial Sequence
  Description of Artificial Sequence: Synthetic oligonucleotide
  Target: LAMA2; (+) strand; PAM type: NRG; PAM sequence: AAG
aaaaaattaaacaaattaaa

SEQ ID NO: 136187 - DNA, 20 bp, Artificial Sequence
  Description of Artificial Sequence: Synthetic oligonucleotide
  Target: LAMA2; (+) strand; PAM type: NRG; PAM sequence: AAG
aaacaaattaaaaagaaatg

SEQ ID NO: 136188 - DNA, 20 bp, Artificial Sequence
  Description of Artificial Sequence: Synthetic oligonucleotide
  Target: LAMA2; (+) strand; PAM type: NRG; PAM sequence: GAG
taaaaagaaatgaagttatt

SEQ ID NO: 136189 - DNA, 20 bp, Artificial Sequence
  Description of Artificial Sequence: Synthetic oligonucleotide
  Target: LAMA2; (+) strand; PAM type: NRG; PAM sequence: CAG
gaaatgaagttattgagtga

SEQ ID NO: 136190 - DNA, 20 bp, Artificial Sequence
  Description of Artificial Sequence: Synthetic oligonucleotide
  Target: LAMA2; (+) strand; PAM type: NRG; PAM sequence: AAG
aagttattgagtgacagtta

SEQ ID NO: 136191 - DNA, 20 bp, Artificial Sequence
  Description of Artificial Sequence: Synthetic oligonucleotide
  Target: LAMA2; (+) strand; PAM type: NRG; PAM sequence: AAG
agttaaagaaactgatttgc

SEQ ID NO: 136192 - DNA, 20 bp, Artificial Sequence
  Description of Artificial Sequence: Synthetic oligonucleotide
  Target: LAMA2; (+) strand; PAM type: NRG; PAM sequence: TGG
taaagaaactgatttgcaag

SEQ ID NO: 136193 - DNA, 20 bp, Artificial Sequence
  Description of Artificial Sequence: Synthetic oligonucleotide
  Target: LAMA2; (+) strand; PAM type: NRG; PAM sequence: CAG
actgatttgcaagtggcctt

SEQ ID NO: 136194 - DNA, 20 bp, Artificial Sequence
  Description of Artificial Sequence: Synthetic oligonucleotide
  Target: LAMA2; (+) strand; PAM type: NRG; PAM sequence: AGG
ctgatttgcaagtggccttc

SEQ ID NO: 136195 - DNA, 20 bp, Artificial Sequence
  Description of Artificial Sequence: Synthetic oligonucleotide
  Target: LAMA2; (+) strand; PAM type: NRG; PAM sequence: GAG
gatttgcaagtggccttcag

SEQ ID NO: 136196 - DNA, 20 bp, Artificial Sequence
  Description of Artificial Sequence: Synthetic oligonucleotide
  Target: LAMA2; (+) strand; PAM type: NRG; PAM sequence: AGG
atttgcaagtggccttcagg

SEQ ID NO: 136197 - DNA, 20 bp, Artificial Sequence
  Description of Artificial Sequence: Synthetic oligonucleotide
  Target: LAMA2; (+) strand; PAM type: NRG; PAM sequence: CAG
tgcaagtggccttcaggagg

SEQ ID NO: 136198 - DNA, 20 bp, Artificial Sequence
  Description of Artificial Sequence: Synthetic oligonucleotide
  Target: LAMA2; (+) strand; PAM type: NRG; PAM sequence: AAG
aagtggccttcaggaggcag

SEQ ID NO: 136199 - DNA, 20 bp, Artificial Sequence
  Description of Artificial Sequence: Synthetic oligonucleotide
  Target: LAMA2; (+) strand; PAM type: NRG; PAM sequence: AAG
tggccttcaggaggcagaag

SEQ ID NO: 136200 - DNA, 20 bp, Artificial Sequence
  Description of Artificial Sequence: Synthetic oligonucleotide
  Target: LAMA2; (+) strand; PAM type: NRG; PAM sequence: AGG
ggccttcaggaggcagaaga

SEQ ID NO: 136201 - DNA, 20 bp, Artificial Sequence
  Description of Artificial Sequence: Synthetic oligonucleotide
  Target: LAMA2; (+) strand; PAM type: NRG; PAM sequence: CAG
gaaggctacttgtctttccc

SEQ ID NO: 136202 - DNA, 20 bp, Artificial Sequence
  Description of Artificial Sequence: Synthetic oligonucleotide
  Target: LAMA2; (+) strand; PAM type: NRG; PAM sequence: GAG
agtgattttatgaatccatt

SEQ ID NO: 136203 - DNA, 20 bp, Artificial Sequence
  Description of Artificial Sequence: Synthetic oligonucleotide
  Target: LAMA2; (+) strand; PAM type: NRG; PAM sequence: AGG
gtgattttatgaatccattg

SEQ ID NO: 136204 - DNA, 20 bp, Artificial Sequence
  Description of Artificial Sequence: Synthetic oligonucleotide
  Target: LAMA2; (+) strand; PAM type: NRG; PAM sequence: GAG
gattttatgaatccattgag

SEQ ID NO: 136205 - DNA, 20 bp, Artificial Sequence
  Description of Artificial Sequence: Synthetic oligonucleotide
  Target: LAMA2; (+) strand; PAM type: NRG; PAM sequence: CAG
gaatccattgaggagatctg

SEQ ID NO: 136206 - DNA, 20 bp, Artificial Sequence
  Description of Artificial Sequence: Synthetic oligonucleotide
  Target: LAMA2; (+) strand; PAM type: NRG; PAM sequence: AAG
tccattgaggagatctgcag

SEQ ID NO: 136207 - DNA, 20 bp, Artificial Sequence
  Description of Artificial Sequence: Synthetic oligonucleotide
  Target: LAMA2; (+) strand; PAM type: NRG; PAM sequence: TGG
tgcagaagtgttgtcactgc

SEQ ID NO: 136208 - DNA, 20 bp, Artificial Sequence
  Description of Artificial Sequence: Synthetic oligonucleotide
  Target: LAMA2; (+) strand; PAM type: NRG; PAM sequence: GAG
cagaagtgttgtcactgctg

SEQ ID NO: 136209 - DNA, 20 bp, Artificial Sequence
  Description of Artificial Sequence: Synthetic oligonucleotide
  Target: LAMA2; (+) strand; PAM type: NRG; PAM sequence: AAG
tgtcactgctggagaaaacc

SEQ ID NO: 136210 - DNA, 20 bp, Artificial Sequence
  Description of Artificial Sequence: Synthetic oligonucleotide
  Target: LAMA2; (+) strand; PAM type: NRG; PAM sequence: AGG
gtcactgctggagaaaacca

SEQ ID NO: 136211 - DNA, 20 bp, Artificial Sequence
  Description of Artificial Sequence: Synthetic oligonucleotide
  Target: LAMA2; (+) strand; PAM type: NRG; PAM sequence: AAG
accaaggcttcacttgcaaa

SEQ ID NO: 136212 - DNA, 20 bp, Artificial Sequence
  Description of Artificial Sequence: Synthetic oligonucleotide
  Target: LAMA2; (+) strand; PAM type: NRG; PAM sequence: AGG
ccaaggcttcacttgcaaaa

SEQ ID NO: 136213 - DNA, 20 bp, Artificial Sequence
  Description of Artificial Sequence: Synthetic oligonucleotide
  Target: LAMA2; (+) strand; PAM type: NRG; PAM sequence: GAG
aaggcttcacttgcaaaaag

SEQ ID NO: 136214 - DNA, 20 bp, Artificial Sequence
  Description of Artificial Sequence: Synthetic oligonucleotide
  Target: LAMA2; (+) strand; PAM type: NRG; PAM sequence: GAG
aggagtactttcttaaaact

SEQ ID NO: 136215 - DNA, 20 bp, Artificial Sequence
  Description of Artificial Sequence: Synthetic oligonucleotide
  Target: LAMA2; (+) strand; PAM type: NRG; PAM sequence: TGG
tttcttaaaactgagaaatt

SEQ ID NO: 136216 - DNA, 20 bp, Artificial Sequence
  Description of Artificial Sequence: Synthetic oligonucleotide
  Target: LAMA2; (+) strand; PAM type: NRG; PAM sequence: TAG
agaaatttggaaatatatca

SEQ ID NO: 136217 - DNA, 20 bp, Artificial Sequence
  Description of Artificial Sequence: Synthetic oligonucleotide
  Target: LAMA2; (+) strand; PAM type: NRG; PAM sequence: AGG
gaaatttggaaatatatcat

SEQ ID NO: 136218 - DNA, 20 bp, Artificial Sequence
  Description of Artificial Sequence: Synthetic oligonucleotide
  Target: LAMA2; (+) strand; PAM type: NRG; PAM sequence: AAG
aatatatcataggacttgta

SEQ ID NO: 136219 - DNA, 20 bp, Artificial Sequence
  Description of Artificial Sequence: Synthetic oligonucleotide
  Target: LAMA2; (+) strand; PAM type: NRG; PAM sequence: TGG
taggacttgtaaagctatga

SEQ ID NO: 136220 - DNA, 20 bp, Artificial Sequence
  Description of Artificial Sequence: Synthetic oligonucleotide
  Target: LAMA2; (+) strand; PAM type: NRG; PAM sequence: AAG
gacttgtaaagctatgatgg

SEQ ID NO: 136221 - DNA, 20 bp, Artificial Sequence
  Description of Artificial Sequence: Synthetic oligonucleotide
  Target: LAMA2; (+) strand; PAM type: NRG; PAM sequence: TAG
tgtaaagctatgatggaagt

SEQ ID NO: 136222 - DNA, 20 bp, Artificial Sequence
  Description of Artificial Sequence: Synthetic oligonucleotide
  Target: LAMA2; (+) strand; PAM type: NRG; PAM sequence: GAG
tatgatggaagttagcccat

SEQ ID NO: 136223 - DNA, 20 bp, Artificial Sequence
  Description of Artificial Sequence: Synthetic oligonucleotide
  Target: LAMA2; (+) strand; PAM type: NRG; PAM sequence: CAG
ttagcccatgagtgtgttta

SEQ ID NO: 136224 - DNA, 20 bp, Artificial Sequence
  Description of Artificial Sequence: Synthetic oligonucleotide
  Target: LAMA2; (+) strand; PAM type: NRG; PAM sequence: AAG
gcccatgagtgtgtttacag

SEQ ID NO: 136225 - DNA, 20 bp, Artificial Sequence
  Description of Artificial Sequence: Synthetic oligonucleotide
  Target: LAMA2; (+) strand; PAM type: NRG; PAM sequence: AGG
cccatgagtgtgtttacaga

SEQ ID NO: 136226 - DNA, 20 bp, Artificial Sequence
  Description of Artificial Sequence: Synthetic oligonucleotide
  Target: LAMA2; (+) strand; PAM type: NRG; PAM sequence: CAG
atgagtgtgtttacagaagg

SEQ ID NO: 136227 - DNA, 20 bp, Artificial Sequence
  Description of Artificial Sequence: Synthetic oligonucleotide
  Target: LAMA2; (+) strand; PAM type: NRG; PAM sequence: GAG
gagtgtgtttacagaaggca

SEQ ID NO: 136228 - DNA, 20 bp, Artificial Sequence
  Description of Artificial Sequence: Synthetic oligonucleotide
  Target: LAMA2; (+) strand; PAM type: NRG; PAM sequence: TAG
gtgtttacagaaggcagagc

SEQ ID NO: 136229 - DNA, 20 bp, Artificial Sequence
  Description of Artificial Sequence: Synthetic oligonucleotide
  Target: LAMA2; (+) strand; PAM type: NRG; PAM sequence: TGG
ttacagaaggcagagctaga

SEQ ID NO: 136230 - DNA, 20 bp, Artificial Sequence
  Description of Artificial Sequence: Synthetic oligonucleotide
  Target: LAMA2; (+) strand; PAM type: NRG; PAM sequence: AAG
aaggcagagctagatggcat

SEQ ID NO: 136231 - DNA, 20 bp, Artificial Sequence
  Description of Artificial Sequence: Synthetic oligonucleotide
  Target: LAMA2; (+) strand; PAM type: NRG; PAM sequence: CAG
gagctagatggcataagact

SEQ ID NO: 136232 - DNA, 20 bp, Artificial Sequence
  Description of Artificial Sequence: Synthetic oligonucleotide
  Target: LAMA2; (+) strand; PAM type: NRG; PAM sequence: AGG
agctagatggcataagactc

SEQ ID NO: 136233 - DNA, 20 bp, Artificial Sequence
  Description of Artificial Sequence: Synthetic oligonucleotide
  Target: LAMA2; (+) strand; PAM type: NRG; PAM sequence: GGG
gctagatggcataagactca

SEQ ID NO: 136234 - DNA, 20 bp, Artificial Sequence
  Description of Artificial Sequence: Synthetic oligonucleotide
  Target: LAMA2; (+) strand; PAM type: NRG; PAM sequence: CAG
cataagactcagggatgatg

SEQ ID NO: 136235 - DNA, 20 bp, Artificial Sequence
  Description of Artificial Sequence: Synthetic oligonucleotide
  Target: LAMA2; (+) strand; PAM type: NRG; PAM sequence: AGG
ataagactcagggatgatgc

SEQ ID NO: 136236 - DNA, 20 bp, Artificial Sequence
  Description of Artificial Sequence: Synthetic oligonucleotide
  Target: LAMA2; (+) strand; PAM type: NRG; PAM sequence: GAG
aagactcagggatgatgcag

SEQ ID NO: 136237 - DNA, 20 bp, Artificial Sequence
  Description of Artificial Sequence: Synthetic oligonucleotide
  Target: LAMA2; (+) strand; PAM type: NRG; PAM sequence: AGG
agactcagggatgatgcagg

SEQ ID NO: 136238 - DNA, 20 bp, Artificial Sequence
  Description of Artificial Sequence: Synthetic oligonucleotide
  Target: LAMA2; (+) strand; PAM type: NRG; PAM sequence: TAG
aggtgataaatatttttgtt

SEQ ID NO: 136239 - DNA, 20 bp, Artificial Sequence
  Description of Artificial Sequence: Synthetic oligonucleotide
  Target: LAMA2; (+) strand; PAM type: NRG; PAM sequence: GAG
gtgataaatatttttgttta

SEQ ID NO: 136240 - DNA, 20 bp, Artificial Sequence
  Description of Artificial Sequence: Synthetic oligonucleotide
  Target: LAMA2; (+) strand; PAM type: NRG; PAM sequence: TAG
ataaatatttttgtttagag

SEQ ID NO: 136241 - DNA, 20 bp, Artificial Sequence
  Description of Artificial Sequence: Synthetic oligonucleotide
  Target: LAMA2; (+) strand; PAM type: NRG; PAM sequence: GAG
atatttttgtttagagtagt

SEQ ID NO: 136242 - DNA, 20 bp, Artificial Sequence
  Description of Artificial Sequence: Synthetic oligonucleotide
  Target: LAMA2; (+) strand; PAM type: NRG; PAM sequence: AAG
tttttgtttagagtagtgag

SEQ ID NO: 136243 - DNA, 20 bp, Artificial Sequence
  Description of Artificial Sequence: Synthetic oligonucleotide
  Target: LAMA2; (+) strand; PAM type: NRG; PAM sequence: GAG
tttgtttagagtagtgagaa

SEQ ID NO: 136244 - DNA, 20 bp, Artificial Sequence
  Description of Artificial Sequence: Synthetic oligonucleotide
  Target: LAMA2; (+) strand; PAM type: NRG; PAM sequence: CAG
gtagtgagaagagtgaaaca

SEQ ID NO: 136245 - DNA, 20 bp, Artificial Sequence
  Description of Artificial Sequence: Synthetic oligonucleotide
  Target: LAMA2; (+) strand; PAM type: NRG; PAM sequence: TAG
gtgagaagagtgaaacacag

SEQ ID NO: 136246 - DNA, 20 bp, Artificial Sequence
  Description of Artificial Sequence: Synthetic oligonucleotide
  Target: LAMA2; (+) strand; PAM type: NRG; PAM sequence: TGG
taataaaattttcactcatt

SEQ ID NO: 136247 - DNA, 20 bp, Artificial Sequence
  Description of Artificial Sequence: Synthetic oligonucleotide
  Target: LAMA2; (+) strand; PAM type: NRG; PAM sequence: CAG
tgaaaattgtgtttgaaaac

SEQ ID NO: 136248 - DNA, 20 bp, Artificial Sequence
  Description of Artificial Sequence: Synthetic oligonucleotide
  Target: LAMA2; (+) strand; PAM type: NRG; PAM sequence: TGG
cagctgtgccatttaaattc

SEQ ID NO: 136249 - DNA, 20 bp, Artificial Sequence
  Description of Artificial Sequence: Synthetic oligonucleotide
  Target: LAMA2; (+) strand; PAM type: NRG; PAM sequence: GGG
agctgtgccatttaaattct

SEQ ID NO: 136250 - DNA, 20 bp, Artificial Sequence
  Description of Artificial Sequence: Synthetic oligonucleotide
  Target: LAMA2; (+) strand; PAM type: NRG; PAM sequence: AAG
tttcttcatttgtaaaattc

SEQ ID NO: 136251 - DNA, 20 bp, Artificial Sequence
  Description of Artificial Sequence: Synthetic oligonucleotide
  Target: LAMA2; (+) strand; PAM type: NRG; PAM sequence: TAG
tgtaaaattcaagtttgaac

SEQ ID NO: 136252 - DNA, 20 bp, Artificial Sequence
  Description of Artificial Sequence: Synthetic oligonucleotide
  Target: LAMA2; (+) strand; PAM type: NRG; PAM sequence: AGG
gtaaaattcaagtttgaact

SEQ ID NO: 136253 - DNA, 20 bp, Artificial Sequence
  Description of Artificial Sequence: Synthetic oligonucleotide
  Target: LAMA2; (+) strand; PAM type: NRG; PAM sequence: CAG
aactaaattcttcttgccac

SEQ ID NO: 136254 - DNA, 20 bp, Artificial Sequence
  Description of Artificial Sequence: Synthetic oligonucleotide
  Target: LAMA2; (+) strand; PAM type: NRG; PAM sequence: TAG
caaccttcttcttcatcacc

SEQ ID NO: 136255 - DNA, 20 bp, Artificial Sequence
  Description of Artificial Sequence: Synthetic oligonucleotide
  Target: LAMA2; (+) strand; PAM type: NRG; PAM sequence: GAG
accttcttcttcatcaccta

SEQ ID NO: 136256 - DNA, 20 bp, Artificial Sequence
  Description of Artificial Sequence: Synthetic oligonucleotide
  Target: LAMA2; (+) strand; PAM type: NRG; PAM sequence: AGG
ccttcttcttcatcacctag

SEQ ID NO: 136257 - DNA, 20 bp, Artificial Sequence
  Description of Artificial Sequence: Synthetic oligonucleotide
  Target: LAMA2; (+) strand; PAM type: NRG; PAM sequence: AAG
acctagaggaacattgcctg

SEQ ID NO: 136258 - DNA, 20 bp, Artificial Sequence
  Description of Artificial Sequence: Synthetic oligonucleotide
  Target: LAMA2; (+) strand; PAM type: NRG; PAM sequence: AAG
aggaacattgcctgaagcct

SEQ ID NO: 136259 - DNA, 20 bp, Artificial Sequence
  Description of Artificial Sequence: Synthetic oligonucleotide
  Target: LAMA2; (+) strand; PAM type: NRG; PAM sequence: AGG
ggaacattgcctgaagccta

SEQ ID NO: 136260 - DNA, 20 bp, Artificial Sequence
  Description of Artificial Sequence: Synthetic oligonucleotide
  Target: LAMA2; (+) strand; PAM type: NRG; PAM sequence: AAG
acattgcctgaagcctaagg

SEQ ID NO: 136261 - DNA, 20 bp, Artificial Sequence
  Description of Artificial Sequence: Synthetic oligonucleotide
  Target: LAMA2; (+) strand; PAM type: NRG; PAM sequence: CAG
ttgcctgaagcctaaggaag

SEQ ID NO: 136262 - DNA, 20 bp, Artificial Sequence
  Description of Artificial Sequence: Synthetic oligonucleotide
  Target: LAMA2; (+) strand; PAM type: NRG; PAM sequence: CAG
gcagccttccctgtgccaca

SEQ ID NO: 136263 - DNA, 20 bp, Artificial Sequence
  Description of Artificial Sequence: Synthetic oligonucleotide
  Target: LAMA2; (+) strand; PAM type: NRG; PAM sequence: AAG
gccttccctgtgccacacag

SEQ ID NO: 136264 - DNA, 20 bp, Artificial Sequence
  Description of Artificial Sequence: Synthetic oligonucleotide
  Target: LAMA2; (+) strand; PAM type: NRG; PAM sequence: TAG
gaatttctcattgacttgtg

SEQ ID NO: 136265 - DNA, 20 bp, Artificial Sequence
  Description of Artificial Sequence: Synthetic oligonucleotide
  Target: LAMA2; (+) strand; PAM type: NRG; PAM sequence: AAG
tgacttgtgtagtgcttcaa

SEQ ID NO: 136266 - DNA, 20 bp, Artificial Sequence
  Description of Artificial Sequence: Synthetic oligonucleotide
  Target: LAMA2; (+) strand; PAM type: NRG; PAM sequence: AAG
tacacatcaaacatgattct

SEQ ID NO: 136267 - DNA, 20 bp, Artificial Sequence
  Description of Artificial Sequence: Synthetic oligonucleotide
  Target: LAMA2; (+) strand; PAM type: NRG; PAM sequence: AAG
tcaaacatgattctaagtca

SEQ ID NO: 136268 - DNA, 20 bp, Artificial Sequence
  Description of Artificial Sequence: Synthetic oligonucleotide
  Target: LAMA2; (+) strand; PAM type: NRG; PAM sequence: GAG
tcaaagttcttcatttatat

SEQ ID NO: 136269 - DNA, 20 bp, Artificial Sequence
  Description of Artificial Sequence: Synthetic oligonucleotide
  Target: LAMA2; (+) strand; PAM type: NRG; PAM sequence: AAG
tcttcatttatatgagatta

SEQ ID NO: 136270 - DNA, 20 bp, Artificial Sequence
  Description of Artificial Sequence: Synthetic oligonucleotide
  Target: LAMA2; (+) strand; PAM type: NRG; PAM sequence: TGG
tttatatgagattaaagaac

SEQ ID NO: 136271 - DNA, 20 bp, Artificial Sequence
  Description of Artificial Sequence: Synthetic oligonucleotide
  Target: LAMA2; (+) strand; PAM type: NRG; PAM sequence: AAG
aaagaactggaaaactgtac

SEQ ID NO: 136272 - DNA, 20 bp, Artificial Sequence
  Description of Artificial Sequence: Synthetic oligonucleotide
  Target: LAMA2; (+) strand; PAM type: NRG; PAM sequence: GAG
agaactggaaaactgtacaa

SEQ ID NO: 136273 - DNA, 20 bp, Artificial Sequence
  Description of Artificial Sequence: Synthetic oligonucleotide
  Target: LAMA2; (+) strand; PAM type: NRG; PAM sequence: TAG
ggaaaactgtacaagagaaa

SEQ ID NO: 136274 - DNA, 20 bp, Artificial Sequence
  Description of Artificial Sequence: Synthetic oligonucleotide
  Target: LAMA2; (+) strand; PAM type: NRG; PAM sequence: CAG
aaatagtcacctgctgattg

SEQ ID NO: 136275 - DNA, 20 bp, Artificial Sequence
  Description of Artificial Sequence: Synthetic oligonucleotide
  Target: LAMA2; (+) strand; PAM type: NRG; PAM sequence: AGG
aatagtcacctgctgattgc

SEQ ID NO: 136276 - DNA, 20 bp, Artificial Sequence
  Description of Artificial Sequence: Synthetic oligonucleotide
  Target: LAMA2; (+) strand; PAM type: NRG; PAM sequence: TGG
acctgctgattgcaggcctg

SEQ ID NO: 136277 - DNA, 20 bp, Artificial Sequence
  Description of Artificial Sequence: Synthetic oligonucleotide
  Target: LAMA2; (+) strand; PAM type: NRG; PAM sequence: GGG
cctgctgattgcaggcctgt

SEQ ID NO: 136278 - DNA, 20 bp, Artificial Sequence
  Description of Artificial Sequence: Synthetic oligonucleotide
  Target: LAMA2; (+) strand; PAM type: NRG; PAM sequence: TGG
ttgcaggcctgtgggtttct

SEQ ID NO: 136279 - DNA, 20 bp, Artificial Sequence
  Description of Artificial Sequence: Synthetic oligonucleotide
  Target: LAMA2; (+) strand; PAM type: NRG; PAM sequence: CAG
gtgggtttcttggaaaaact

SEQ ID NO: 136280 - DNA, 20 bp, Artificial Sequence
  Description of Artificial Sequence: Synthetic oligonucleotide
  Target: LAMA2; (+) strand; PAM type: NRG; PAM sequence: CAG
actcagcaattttgcttatc

SEQ ID NO: 136281 - DNA, 20 bp, Artificial Sequence
  Description of Artificial Sequence: Synthetic oligonucleotide
  Target: LAMA2; (+) strand; PAM type: NRG; PAM sequence: AGG
ctcagcaattttgcttatcc

SEQ ID NO: 136282 - DNA, 20 bp, Artificial Sequence
  Description of Artificial Sequence: Synthetic oligonucleotide
  Target: LAMA2; (+) strand; PAM type: NRG; PAM sequence: CAG
tccaggactatctttttgcc

SEQ ID NO: 136283 - DNA, 20 bp, Artificial Sequence
  Description of Artificial Sequence: Synthetic oligonucleotide
  Target: LAMA2; (+) strand; PAM type: NRG; PAM sequence: AAG
gcccagttcctctgattctg

SEQ ID NO: 136284 - DNA, 20 bp, Artificial Sequence
  Description of Artificial Sequence: Synthetic oligonucleotide
  Target: LAMA2; (+) strand; PAM type: NRG; PAM sequence: AGG
cccagttcctctgattctga

SEQ ID NO: 136285 - DNA, 20 bp, Artificial Sequence
  Description of Artificial Sequence: Synthetic oligonucleotide
  Target: LAMA2; (+) strand; PAM type: NRG; PAM sequence: AAG
agttcctctgattctgaagg

SEQ ID NO: 136286 - DNA, 20 bp, Artificial Sequence
  Description of Artificial Sequence: Synthetic oligonucleotide
  Target: LAMA2; (+) strand; PAM type: NRG; PAM sequence: AAG
tgattctgaaggaagttgaa

SEQ ID NO: 136287 - DNA, 20 bp, Artificial Sequence
  Description of Artificial Sequence: Synthetic oligonucleotide
  Target: LAMA2; (+) strand; PAM type: NRG; PAM sequence: TAG
tctgaaggaagttgaaaaga

SEQ ID NO: 136288 - DNA, 20 bp, Artificial Sequence
  Description of Artificial Sequence: Synthetic oligonucleotide
  Target: LAMA2; (+) strand; PAM type: NRG; PAM sequence: AAG
tccttttctacatttgattt

SEQ ID NO: 136289 - DNA, 20 bp, Artificial Sequence
  Description of Artificial Sequence: Synthetic oligonucleotide
  Target: LAMA2; (+) strand; PAM type: NRG; PAM sequence: AAG
ttgaaaatacataaaatcca

SEQ ID NO: 136290 - DNA, 20 bp, Artificial Sequence
  Description of Artificial Sequence: Synthetic oligonucleotide
  Target: LAMA2; (+) strand; PAM type: NRG; PAM sequence: GAG
atacataaaatccaaagaat

SEQ ID NO: 136291 - DNA, 20 bp, Artificial Sequence
  Description of Artificial Sequence: Synthetic oligonucleotide
  Target: LAMA2; (+) strand; PAM type: NRG; PAM sequence: TAG
acatatgtgtcatatttcta

SEQ ID NO: 136292 - DNA, 20 bp, Artificial Sequence
  Description of Artificial Sequence: Synthetic oligonucleotide
  Target: LAMA2; (+) strand; PAM type: NRG; PAM sequence: TGG
tttgaaaattttcatgcact

SEQ ID NO: 136293 - DNA, 20 bp, Artificial Sequence
  Description of Artificial Sequence: Synthetic oligonucleotide
  Target: LAMA2; (+) strand; PAM type: NRG; PAM sequence: AAG
aaaattttcatgcacttggt

SEQ ID NO: 136294 - DNA, 20 bp, Artificial Sequence
  Description of Artificial Sequence: Synthetic oligonucleotide
  Target: LAMA2; (+) strand; PAM type: NRG; PAM sequence: AGG
aaattttcatgcacttggta

SEQ ID NO: 136295 - DNA, 20 bp, Artificial Sequence
  Description of Artificial Sequence: Synthetic oligonucleotide
  Target: LAMA2; (+) strand; PAM type: NRG; PAM sequence: AAG
catgcacttggtaaggttga

SEQ ID NO: 136296 - DNA, 20 bp, Artificial Sequence
  Description of Artificial Sequence: Synthetic oligonucleotide
  Target: LAMA2; (+) strand; PAM type: NRG; PAM sequence: CAG
gtaaggttgaaagaatcata

SEQ ID NO: 136297 - DNA, 20 bp, Artificial Sequence
  Description of Artificial Sequence: Synthetic oligonucleotide
  Target: LAMA2; (+) strand; PAM type: NRG; PAM sequence: TAG
aacactatgtactcgaaatc

SEQ ID NO: 136298 - DNA, 20 bp, Artificial Sequence
  Description of Artificial Sequence: Synthetic oligonucleotide
  Target: LAMA2; (+) strand; PAM type: NRG; PAM sequence: TAG
cgaaatctagattctaaaat

SEQ ID NO: 136299 - DNA, 20 bp, Artificial Sequence
  Description of Artificial Sequence: Synthetic oligonucleotide
  Target: LAMA2; (+) strand; PAM type: NRG; PAM sequence: AGG
gaaatctagattctaaaatt

SEQ ID NO: 136300 - DNA, 20 bp, Artificial Sequence
  Description of Artificial Sequence: Synthetic oligonucleotide
  Target: LAMA2; (+) strand; PAM type: NRG; PAM sequence: AAG
ctagattctaaaattaggcc

SEQ ID NO: 136301 - DNA, 20 bp, Artificial Sequence
  Description of Artificial Sequence: Synthetic oligonucleotide
  Target: LAMA2; (+) strand; PAM type: NRG; PAM sequence: TAG
ttctaaaattaggccaagca

SEQ ID NO: 136302 - DNA, 20 bp, Artificial Sequence
  Description of Artificial Sequence: Synthetic oligonucleotide
  Target: LAMA2; (+) strand; PAM type: NRG; PAM sequence: TGG
taaaattaggccaagcatag

SEQ ID NO: 136303 - DNA, 20 bp, Artificial Sequence
  Description of Artificial Sequence: Synthetic oligonucleotide
  Target: LAMA2; (+) strand; PAM type: NRG; PAM sequence: CAG
gtggctgatgcctgtaatcc

SEQ ID NO: 136304 - DNA, 20 bp, Artificial Sequence
  Description of Artificial Sequence: Synthetic oligonucleotide
  Target: LAMA2; (+) strand; PAM type: NRG; PAM sequence: AGG
tggctgatgcctgtaatccc

SEQ ID NO: 136305 - DNA, 20 bp, Artificial Sequence
  Description of Artificial Sequence: Synthetic oligonucleotide
  Target: LAMA2; (+) strand; PAM type: NRG; PAM sequence: GGG
ggctgatgcctgtaatccca

SEQ ID NO: 136306 - DNA, 20 bp, Artificial Sequence
  Description of Artificial Sequence: Synthetic oligonucleotide
  Target: LAMA2; (+) strand; PAM type: NRG; PAM sequence: TGG
tgcctgtaatcccagggatt

SEQ ID NO: 136307 - DNA, 20 bp, Artificial Sequence
  Description of Artificial Sequence: Synthetic oligonucleotide
  Target: LAMA2; (+) strand; PAM type: NRG; PAM sequence: GGG
gcctgtaatcccagggattt

SEQ ID NO: 136308 - DNA, 20 bp, Artificial Sequence
  Description of Artificial Sequence: Synthetic oligonucleotide
  Target: LAMA2; (+) strand; PAM type: NRG; PAM sequence: GAG
ctgtaatcccagggatttgg

SEQ ID NO: 136309 - DNA, 20 bp, Artificial Sequence
  Description of Artificial Sequence: Synthetic oligonucleotide
  Target: LAMA2; (+) strand; PAM type: NRG; PAM sequence: AGG
tgtaatcccagggatttggg

SEQ ID NO: 136310 - DNA, 20 bp, Artificial Sequence
  Description of Artificial Sequence: Synthetic oligonucleotide
  Target: LAMA2; (+) strand; PAM type: NRG; PAM sequence: GAG
tcccagggatttgggaggct

SEQ ID NO: 136311 - DNA, 20 bp, Artificial Sequence
  Description of Artificial Sequence: Synthetic oligonucleotide
  Target: LAMA2; (+) strand; PAM type: NRG; PAM sequence: AGG
cccagggatttgggaggctg

SEQ ID NO: 136312 - DNA, 20 bp, Artificial Sequence
  Description of Artificial Sequence: Synthetic oligonucleotide
  Target: LAMA2; (+) strand; PAM type: NRG; PAM sequence: TGG
agggatttgggaggctgagg

SEQ ID NO: 136313 - DNA, 20 bp, Artificial Sequence
  Description of Artificial Sequence: Synthetic oligonucleotide
  Target: LAMA2; (+) strand; PAM type: NRG; PAM sequence: GGG
gggatttgggaggctgaggt

SEQ ID NO: 136314 - DNA, 20 bp, Artificial Sequence
  Description of Artificial Sequence: Synthetic oligonucleotide
  Target: LAMA2; (+) strand; PAM type: NRG; PAM sequence: GAG
gatttgggaggctgaggtgg

SEQ ID NO: 136315 - DNA, 20 bp, Artificial Sequence
  Description of Artificial Sequence: Synthetic oligonucleotide
  Target: LAMA2; (+) strand; PAM type: NRG; PAM sequence: GAG
ctgaggtgggagcattgcct

SEQ ID NO: 136316 - DNA, 20 bp, Artificial Sequence
  Description of Artificial Sequence: Synthetic oligonucleotide
  Target: LAMA2; (+) strand; PAM type: NRG; PAM sequence: AGG
tgaggtgggagcattgcctg

SEQ ID NO: 136317 - DNA, 20 bp, Artificial Sequence
  Description of Artificial Sequence: Synthetic oligonucleotide
  Target: LAMA2; (+) strand; PAM type: NRG; PAM sequence: GGG
gaggtgggagcattgcctga

SEQ ID NO: 136318 - DNA, 20 bp, Artificial Sequence
  Description of Artificial Sequence: Synthetic oligonucleotide
  Target: LAMA2; (+) strand; PAM type: NRG; PAM sequence: CAG
gtgggagcattgcctgaggg

SEQ ID NO: 136319 - DNA, 20 bp, Artificial Sequence
  Description of Artificial Sequence: Synthetic oligonucleotide
  Target: LAMA2; (+) strand; PAM type: NRG; PAM sequence: AGG
tgggagcattgcctgagggc

SEQ ID NO: 136320 - DNA, 20 bp, Artificial Sequence
  Description of Artificial Sequence: Synthetic oligonucleotide
  Target: LAMA2; (+) strand; PAM type: NRG; PAM sequence: AAG
ttgcctgagggcaggatttt

SEQ ID NO: 136321 - DNA, 20 bp, Artificial Sequence
  Description of Artificial Sequence: Synthetic oligonucleotide
  Target: LAMA2; (+) strand; PAM type: NRG; PAM sequence: CAG
tgagggcaggattttaagac

SEQ ID NO: 136322 - DNA, 20 bp, Artificial Sequence
  Description of Artificial Sequence: Synthetic oligonucleotide
  Target: LAMA2; (+) strand; PAM type: NRG; PAM sequence: TGG
gcaggattttaagaccagca

SEQ ID NO: 136323 - DNA, 20 bp, Artificial Sequence
  Description of Artificial Sequence: Synthetic oligonucleotide
  Target: LAMA2; (+) strand; PAM type: NRG; PAM sequence: GGG
caggattttaagaccagcat

SEQ ID NO: 136324 - DNA, 20 bp, Artificial Sequence
  Description of Artificial Sequence: Synthetic oligonucleotide
  Target: LAMA2; (+) strand; PAM type: NRG; PAM sequence: TAG
taagaccagcatgggcaaca

SEQ ID NO: 136325 - DNA, 20 bp, Artificial Sequence
  Description of Artificial Sequence: Synthetic oligonucleotide
  Target: LAMA2; (+) strand; PAM type: NRG; PAM sequence: GAG
accagcatgggcaacatagt

SEQ ID NO: 136326 - DNA, 20 bp, Artificial Sequence
  Description of Artificial Sequence: Synthetic oligonucleotide
  Target: LAMA2; (+) strand; PAM type: NRG; PAM sequence: AAG
accatgtctctaccaaaaaa

SEQ ID NO: 136327 - DNA, 20 bp, Artificial Sequence
  Description of Artificial Sequence: Synthetic oligonucleotide
  Target: LAMA2; (+) strand; PAM type: NRG; PAM sequence: AAG
tgtctctaccaaaaaaaagt

SEQ ID NO: 136328 - DNA, 20 bp, Artificial Sequence
  Description of Artificial Sequence: Synthetic oligonucleotide
  Target: LAMA2; (+) strand; PAM type: NRG; PAM sequence: AGG
gtctctaccaaaaaaaagta

SEQ ID NO: 136329 - DNA, 20 bp, Artificial Sequence
  Description of Artificial Sequence: Synthetic oligonucleotide
  Target: LAMA2; (+) strand; PAM type: NRG; PAM sequence: CAG
ctaccaaaaaaaagtaaggc

SEQ ID NO: 136330 - DNA, 20 bp, Artificial Sequence
  Description of Artificial Sequence: Synthetic oligonucleotide
  Target: LAMA2; (+) strand; PAM type: NRG; PAM sequence: CGG
aaaaaaaagtaaggccagca

SEQ ID NO: 136331 - DNA, 20 bp, Artificial Sequence
  Description of Artificial Sequence: Synthetic oligonucleotide
  Target: LAMA2; (+) strand; PAM type: NRG; PAM sequence: TAG
agcacggtgctgcatgcctg

SEQ ID NO: 136332 - DNA, 20 bp, Artificial Sequence
  Description of Artificial Sequence: Synthetic oligonucleotide
  Target: LAMA2; (+) strand; PAM type: NRG; PAM sequence: CAG
gtgctgcatgcctgtagtta

SEQ ID NO: 136333 - DNA, 20 bp, Artificial Sequence
  Description of Artificial Sequence: Synthetic oligonucleotide
  Target: LAMA2; (+) strand; PAM type: NRG; PAM sequence: CAG
tgcctgtagttacagctact

SEQ ID NO: 136334 - DNA, 20 bp, Artificial Sequence
  Description of Artificial Sequence: Synthetic oligonucleotide
  Target: LAMA2; (+) strand; PAM type: NRG; PAM sequence: AGG
gcctgtagttacagctactc

SEQ ID NO: 136335 - DNA, 20 bp, Artificial Sequence
  Description of Artificial Sequence: Synthetic oligonucleotide
  Target: LAMA2; (+) strand; PAM type: NRG; PAM sequence: AAG
tgtagttacagctactcagg

SEQ ID NO: 136336 - DNA, 20 bp, Artificial Sequence
  Description of Artificial Sequence: Synthetic oligonucleotide
  Target: LAMA2; (+) strand; PAM type: NRG; PAM sequence: GAG
ttacagctactcaggaagct

SEQ ID NO: 136337 - DNA, 20 bp, Artificial Sequence
  Description of Artificial Sequence: Synthetic oligonucleotide
  Target: LAMA2; (+) strand; PAM type: NRG; PAM sequence: AGG
tacagctactcaggaagctg

SEQ ID NO: 136338 - DNA, 20 bp, Artificial Sequence
  Description of Artificial Sequence: Synthetic oligonucleotide
  Target: LAMA2; (+) strand; PAM type: NRG; PAM sequence: CAG
agctactcaggaagctgagg

SEQ ID NO: 136339 - DNA, 20 bp, Artificial Sequence
  Description of Artificial Sequence: Synthetic oligonucleotide
  Target: LAMA2; (+) strand; PAM type: NRG; PAM sequence: AGG
gctactcaggaagctgaggc

SEQ ID NO: 136340 - DNA, 20 bp, Artificial Sequence
  Description of Artificial Sequence: Synthetic oligonucleotide
  Target: LAMA2; (+) strand; PAM type: NRG; PAM sequence: GAG
tactcaggaagctgaggcag

SEQ ID NO: 136341 - DNA, 20 bp, Artificial Sequence
  Description of Artificial Sequence: Synthetic oligonucleotide
  Target: LAMA2; (+) strand; PAM type: NRG; PAM sequence: AGG
actcaggaagctgaggcagg

SEQ ID NO: 136342 - DNA, 20 bp, Artificial Sequence
  Description of Artificial Sequence: Synthetic oligonucleotide
  Target: LAMA2; (+) strand; PAM type: NRG; PAM sequence: GAG
ctgaggcaggaggattgctt

SEQ ID NO: 136343 - DNA, 20 bp, Artificial Sequence
  Description of Artificial Sequence: Synthetic oligonucleotide
  Target: LAMA2; (+) strand; PAM type: NRG; PAM sequence: CAG
gcaggaggattgcttgagcc

SEQ ID NO: 136344 - DNA, 20 bp, Artificial Sequence
  Description of Artificial Sequence: Synthetic oligonucleotide
  Target: LAMA2; (+) strand; PAM type: NRG; PAM sequence: AGG
caggaggattgcttgagccc

SEQ ID NO: 136345 - DNA, 20 bp, Artificial Sequence
  Description of Artificial Sequence: Synthetic oligonucleotide
  Target: LAMA2; (+) strand; PAM type: NRG; PAM sequence: GAG
ggaggattgcttgagcccag

SEQ ID NO: 136346 - DNA, 20 bp, Artificial Sequence
  Description of Artificial Sequence: Synthetic oligonucleotide
  Target: LAMA2; (+) strand; PAM type: NRG; PAM sequence: AAG
ttgcttgagcccaggagttc

SEQ ID NO: 136347 - DNA, 20 bp, Artificial Sequence
  Description of Artificial Sequence: Synthetic oligonucleotide
  Target: LAMA2; (+) strand; PAM type: NRG; PAM sequence: AGG
tgcttgagcccaggagttca

SEQ ID NO: 136348 - DNA, 20 bp, Artificial Sequence
  Description of Artificial Sequence: Synthetic oligonucleotide
  Target: LAMA2; (+) strand; PAM type: NRG; PAM sequence: CAG
agcccaggagttcaaggtta

SEQ ID NO: 136349 - DNA, 20 bp, Artificial Sequence
  Description of Artificial Sequence: Synthetic oligonucleotide
  Target: LAMA2; (+) strand; PAM type: NRG; PAM sequence: AAG
aggagttcaaggttacagtg

SEQ ID NO: 136350 - DNA, 20 bp, Artificial Sequence
  Description of Artificial Sequence: Synthetic oligonucleotide
  Target: LAMA2; (+) strand; PAM type: NRG; PAM sequence: TGG
catgctattgcactccaacc

SEQ ID NO: 136351 - DNA, 20 bp, Artificial Sequence
  Description of Artificial Sequence: Synthetic oligonucleotide
  Target: LAMA2; (+) strand; PAM type: NRG; PAM sequence: GGG
atgctattgcactccaacct

SEQ ID NO: 136352 - DNA, 20 bp, Artificial Sequence
  Description of Artificial Sequence: Synthetic oligonucleotide
  Target: LAMA2; (+) strand; PAM type: NRG; PAM sequence: CAG
ttgcactccaacctgggcaa

SEQ ID NO: 136353 - DNA, 20 bp, Artificial Sequence
  Description of Artificial Sequence: Synthetic oligonucleotide
  Target: LAMA2; (+) strand; PAM type: NRG; PAM sequence: GAG
tccaacctgggcaacagaat

SEQ ID NO: 136354 - DNA, 20 bp, Artificial Sequence
  Description of Artificial Sequence: Synthetic oligonucleotide
  Target: LAMA2; (+) strand; PAM type: NRG; PAM sequence: TAG
tgtctcaaaaaaaaaaaaaa

SEQ ID NO: 136355 - DNA, 20 bp, Artificial Sequence
  Description of Artificial Sequence: Synthetic oligonucleotide
  Target: LAMA2; (+) strand; PAM type: NRG; PAM sequence: CAG
aaaaaaaaaatagttaatgc

SEQ ID NO: 136356 - DNA, 20 bp, Artificial Sequence
  Description of Artificial Sequence: Synthetic oligonucleotide
  Target: LAMA2; (+) strand; PAM type: NRG; PAM sequence: AGG
aaaaaaaaatagttaatgcc

SEQ ID NO: 136357 - DNA, 20 bp, Artificial Sequence
  Description of Artificial Sequence: Synthetic oligonucleotide
  Target: LAMA2; (+) strand; PAM type: NRG; PAM sequence: TGG
aaaatagttaatgccaggcg

SEQ ID NO: 136358 - DNA, 20 bp, Artificial Sequence
  Description of Artificial Sequence: Synthetic oligonucleotide
  Target: LAMA2; (+) strand; PAM type: NRG; PAM sequence: CAG
gcctgtaatcctaacacttt

SEQ ID NO: 136359 - DNA, 20 bp, Artificial Sequence
  Description of Artificial Sequence: Synthetic oligonucleotide
  Target: LAMA2; (+) strand; PAM type: NRG; PAM sequence: GAG
ctgtaatcctaacactttca

SEQ ID NO: 136360 - DNA, 20 bp, Artificial Sequence
  Description of Artificial Sequence: Synthetic oligonucleotide
  Target: LAMA2; (+) strand; PAM type: NRG; PAM sequence: AGG
tgtaatcctaacactttcag

SEQ ID NO: 136361 - DNA, 20 bp, Artificial Sequence
  Description of Artificial Sequence: Synthetic oligonucleotide
  Target: LAMA2; (+) strand; PAM type: NRG; PAM sequence: GAG
tcctaacactttcagaggct

SEQ ID NO: 136362 - DNA, 20 bp, Artificial Sequence
  Description of Artificial Sequence: Synthetic oligonucleotide
  Target: LAMA2; (+) strand; PAM type: NRG; PAM sequence: AGG
cctaacactttcagaggctg

SEQ ID NO: 136363 - DNA, 20 bp, Artificial Sequence
  Description of Artificial Sequence: Synthetic oligonucleotide
  Target: LAMA2; (+) strand; PAM type: NRG; PAM sequence: CAG
aacactttcagaggctgagg

SEQ ID NO: 136364 - DNA, 20 bp, Artificial Sequence
  Description of Artificial Sequence: Synthetic oligonucleotide
  Target: LAMA2; (+) strand; PAM type: NRG; PAM sequence: AGG
acactttcagaggctgaggc

SEQ ID NO: 136365 - DNA, 20 bp, Artificial Sequence
  Description of Artificial Sequence: Synthetic oligonucleotide
  Target: LAMA2; (+) strand; PAM type: NRG; PAM sequence: TGG
ctttcagaggctgaggcagg

SEQ ID NO: 136366 - DNA, 20 bp, Artificial Sequence
  Description of Artificial Sequence: Synthetic oligonucleotide
  Target: LAMA2; (+) strand; PAM type: NRG; PAM sequence: CAG
agaggctgaggcaggtggat

SEQ ID NO: 136367 - DNA, 20 bp, Artificial Sequence
  Description of Artificial Sequence: Synthetic oligonucleotide
  Target: LAMA2; (+) strand; PAM type: NRG; PAM sequence: GAG
ctgaggcaggtggatcagtt

SEQ ID NO: 136368 - DNA, 20 bp, Artificial Sequence
  Description of Artificial Sequence: Synthetic oligonucleotide
  Target: LAMA2; (+) strand; PAM type: NRG; PAM sequence: AGG
tgaggcaggtggatcagttg

SEQ ID NO: 136369 - DNA, 20 bp, Artificial Sequence
  Description of Artificial Sequence: Synthetic oligonucleotide
  Target: LAMA2; (+) strand; PAM type: NRG; PAM sequence: CAG
gcaggtggatcagttgaggt

SEQ ID NO: 136370 - DNA, 20 bp, Artificial Sequence
  Description of Artificial Sequence: Synthetic oligonucleotide
  Target: LAMA2; (+) strand; PAM type: NRG; PAM sequence: AGG
caggtggatcagttgaggtc

SEQ ID NO: 136371 - DNA, 20 bp, Artificial Sequence
  Description of Artificial Sequence: Synthetic oligonucleotide
  Target: LAMA2; (+) strand; PAM type: NRG; PAM sequence: GAG
ggtggatcagttgaggtcag

SEQ ID NO: 136372 - DNA, 20 bp, Artificial Sequence
  Description of Artificial Sequence: Synthetic oligonucleotide
  Target: LAMA2; (+) strand; PAM type: NRG; PAM sequence: CAG
tgaggtcaggagttcaaaac

SEQ ID NO: 136373 - DNA, 20 bp, Artificial Sequence
  Description of Artificial Sequence: Synthetic oligonucleotide
  Target: LAMA2; (+) strand; PAM type: NRG; PAM sequence: TGG
tcaggagttcaaaaccagcc

SEQ ID NO: 136374 - DNA, 20 bp, Artificial Sequence
  Description of Artificial Sequence: Synthetic oligonucleotide
  Target: LAMA2; (+) strand; PAM type: NRG; PAM sequence: TGG
caaaaccagcctggctgata

SEQ ID NO: 136375 - DNA, 20 bp, Artificial Sequence
  Description of Artificial Sequence: Synthetic oligonucleotide
  Target: LAMA2; (+) strand; PAM type: NRG; PAM sequence: TAG
tctactaaaaatacaaaaat

SEQ ID NO: 136376 - DNA, 20 bp, Artificial Sequence
  Description of Artificial Sequence: Synthetic oligonucleotide
  Target: LAMA2; (+) strand; PAM type: NRG; PAM sequence: TGG
ctaaaaatacaaaaattagc

SEQ ID NO: 136377 - DNA, 20 bp, Artificial Sequence
  Description of Artificial Sequence: Synthetic oligonucleotide
  Target: LAMA2; (+) strand; PAM type: NRG; PAM sequence: GGG
taaaaatacaaaaattagct

SEQ ID NO: 136378 - DNA, 20 bp, Artificial Sequence
  Description of Artificial Sequence: Synthetic oligonucleotide
  Target: LAMA2; (+) strand; PAM type: NRG; PAM sequence: TGG
atacaaaaattagctgggcg

SEQ ID NO: 136379 - DNA, 20 bp, Artificial Sequence
  Description of Artificial Sequence: Synthetic oligonucleotide
  Target: LAMA2; (+) strand; PAM type: NRG; PAM sequence: TGG
caaaaattagctgggcgtgg

SEQ ID NO: 136380 - DNA, 20 bp, Artificial Sequence
  Description of Artificial Sequence: Synthetic oligonucleotide
  Target: LAMA2; (+) strand; PAM type: NRG; PAM sequence: CAG
aaattagctgggcgtggtgg

SEQ ID NO: 136381 - DNA, 20 bp, Artificial Sequence
  Description of Artificial Sequence: Synthetic oligonucleotide
  Target: LAMA2; (+) strand; PAM type: NRG; PAM sequence: AGG
aattagctgggcgtggtggc

SEQ ID NO: 136382 - DNA, 20 bp, Artificial Sequence
  Description of Artificial Sequence: Synthetic oligonucleotide
  Target: LAMA2; (+) strand; PAM type: NRG; PAM sequence: CAG
gtggcaggctcctgtaatcc

SEQ ID NO: 136383 - DNA, 20 bp, Artificial Sequence
  Description of Artificial Sequence: Synthetic oligonucleotide
  Target: LAMA2; (+) strand; PAM type: NRG; PAM sequence: CGG
ctcctgtaatcccagctact

SEQ ID NO: 136384 - DNA, 20 bp, Artificial Sequence
  Description of Artificial Sequence: Synthetic oligonucleotide
  Target: LAMA2; (+) strand; PAM type: NRG; PAM sequence: GGG
tcctgtaatcccagctactc

SEQ ID NO: 136385 - DNA, 20 bp, Artificial Sequence
  Description of Artificial Sequence: Synthetic oligonucleotide
  Target: LAMA2; (+) strand; PAM type: NRG; PAM sequence: GAG
ctgtaatcccagctactcgg

SEQ ID NO: 136386 - DNA, 20 bp, Artificial Sequence
  Description of Artificial Sequence: Synthetic oligonucleotide
  Target: LAMA2; (+) strand; PAM type: NRG; PAM sequence: AGG
tgtaatcccagctactcggg

SEQ ID NO: 136387 - DNA, 20 bp, Artificial Sequence
  Description of Artificial Sequence: Synthetic oligonucleotide
  Target: LAMA2; (+) strand; PAM type: NRG; PAM sequence: GAG
tcccagctactcgggaggct

SEQ ID NO: 136388 - DNA, 20 bp, Artificial Sequence
  Description of Artificial Sequence: Synthetic oligonucleotide
  Target: LAMA2; (+) strand; PAM type: NRG; PAM sequence: AGG
cccagctactcgggaggctg

SEQ ID NO: 136389 - DNA, 20 bp, Artificial Sequence
  Description of Artificial Sequence: Synthetic oligonucleotide
  Target: LAMA2; (+) strand; PAM type: NRG; PAM sequence: CAG
agctactcgggaggctgagg

SEQ ID NO: 136390 - DNA, 20 bp, Artificial Sequence
  Description of Artificial Sequence: Synthetic oligonucleotide
  Target: LAMA2; (+) strand; PAM type: NRG; PAM sequence: AGG
gctactcgggaggctgaggc

SEQ ID NO: 136391 - DNA, 20 bp, Artificial Sequence
  Description of Artificial Sequence: Synthetic oligonucleotide
  Target: LAMA2; (+) strand; PAM type: NRG; PAM sequence: GAG
tactcgggaggctgaggcag

SEQ ID NO: 136392 - DNA, 20 bp, Artificial Sequence
  Description of Artificial Sequence: Synthetic oligonucleotide
  Target: LAMA2; (+) strand; PAM type: NRG; PAM sequence: GAG
caggagaatcacttgaacct

SEQ ID NO: 136393 - DNA, 20 bp, Artificial Sequence
  Description of Artificial Sequence: Synthetic oligonucleotide
  Target: LAMA2; (+) strand; PAM type: NRG; PAM sequence: GAG
ggagaatcacttgaacctga

SEQ ID NO: 136394 - DNA, 20 bp, Artificial Sequence
  Description of Artificial Sequence: Synthetic oligonucleotide
  Target: LAMA2; (+) strand; PAM type: NRG; PAM sequence: AGG
gagaatcacttgaacctgag

SEQ ID NO: 136395 - DNA, 20 bp, Artificial Sequence
  Description of Artificial Sequence: Synthetic oligonucleotide
  Target: LAMA2; (+) strand; PAM type: NRG; PAM sequence: CGG
aatcacttgaacctgagagg

SEQ ID NO: 136396 - DNA, 20 bp, Artificial Sequence
  Description of Artificial Sequence: Synthetic oligonucleotide
  Target: LAMA2; (+) strand; PAM type: NRG; PAM sequence: GAG
tcacttgaacctgagaggcg

SEQ ID NO: 136397 - DNA, 20 bp, Artificial Sequence
  Description of Artificial Sequence: Synthetic oligonucleotide
  Target: LAMA2; (+) strand; PAM type: NRG; PAM sequence: AGG
cacttgaacctgagaggcgg

SEQ ID NO: 136398 - DNA, 20 bp, Artificial Sequence
  Description of Artificial Sequence: Synthetic oligonucleotide
  Target: LAMA2; (+) strand; PAM type: NRG; PAM sequence: CAG
aacctgagaggcggaggttg

SEQ ID NO: 136399 - DNA, 20 bp, Artificial Sequence
  Description of Artificial Sequence: Synthetic oligonucleotide
  Target: LAMA2; (+) strand; PAM type: NRG; PAM sequence: GAG
tgagaggcggaggttgcagt

SEQ ID NO: 136400 - DNA, 20 bp, Artificial Sequence
  Description of Artificial Sequence: Synthetic oligonucleotide
  Target: LAMA2; (+) strand; PAM type: NRG; PAM sequence: TGG
aggcggaggttgcagtgagt

SEQ ID NO: 136401 - DNA, 20 bp, Artificial Sequence
  Description of Artificial Sequence: Synthetic oligonucleotide
  Target: LAMA2; (+) strand; PAM type: NRG; PAM sequence: GGG
ggcggaggttgcagtgagtt

SEQ ID NO: 136402 - DNA, 20 bp, Artificial Sequence
  Description of Artificial Sequence: Synthetic oligonucleotide
  Target: LAMA2; (+) strand; PAM type: NRG; PAM sequence: TGG
catactactgcactccatcc

SEQ ID NO: 136403 - DNA, 20 bp, Artificial Sequence
  Description of Artificial Sequence: Synthetic oligonucleotide
  Target: LAMA2; (+) strand; PAM type: NRG; PAM sequence: GGG
atactactgcactccatcct

SEQ ID NO: 136404 - DNA, 20 bp, Artificial Sequence
  Description of Artificial Sequence: Synthetic oligonucleotide
  Target: LAMA2; (+) strand; PAM type: NRG; PAM sequence: CAG
ctgcactccatcctgggcaa

SEQ ID NO: 136405 - DNA, 20 bp, Artificial Sequence
  Description of Artificial Sequence: Synthetic oligonucleotide
  Target: LAMA2; (+) strand; PAM type: NRG; PAM sequence: GAG
gcactccatcctgggcaaca

SEQ ID NO: 136406 - DNA, 20 bp, Artificial Sequence
  Description of Artificial Sequence: Synthetic oligonucleotide
  Target: LAMA2; (+) strand; PAM type: NRG; PAM sequence: GAG
tccatcctgggcaacagagc

SEQ ID NO: 136407 - DNA, 20 bp, Artificial Sequence
  Description of Artificial Sequence: Synthetic oligonucleotide
  Target: LAMA2; (+) strand; PAM type: NRG; PAM sequence: TAG
gcgagactccatgtcaataa

SEQ ID NO: 136408 - DNA, 20 bp, Artificial Sequence
  Description of Artificial Sequence: Synthetic oligonucleotide
  Target: LAMA2; (+) strand; PAM type: NRG; PAM sequence: GAG
taaattaatttaacatgttt

SEQ ID NO: 136409 - DNA, 20 bp, Artificial Sequence
  Description of Artificial Sequence: Synthetic oligonucleotide
  Target: LAMA2; (+) strand; PAM type: NRG; PAM sequence: TAG
attaatttaacatgtttgag

SEQ ID NO: 136410 - DNA, 20 bp, Artificial Sequence
  Description of Artificial Sequence: Synthetic oligonucleotide
  Target: LAMA2; (+) strand; PAM type: NRG; PAM sequence: AGG
ttaatttaacatgtttgagt

SEQ ID NO: 136411 - DNA, 20 bp, Artificial Sequence
  Description of Artificial Sequence: Synthetic oligonucleotide
  Target: LAMA2; (+) strand; PAM type: NRG; PAM sequence: GGG
taatttaacatgtttgagta

SEQ ID NO: 136412 - DNA, 20 bp, Artificial Sequence
  Description of Artificial Sequence: Synthetic oligonucleotide
  Target: LAMA2; (+) strand; PAM type: NRG; PAM sequence: GAG
atttaacatgtttgagtagg

SEQ ID NO: 136413 - DNA, 20 bp, Artificial Sequence
  Description of Artificial Sequence: Synthetic oligonucleotide
  Target: LAMA2; (+) strand; PAM type: NRG; PAM sequence: AGG
tttaacatgtttgagtaggg

SEQ ID NO: 136414 - DNA, 20 bp, Artificial Sequence
  Description of Artificial Sequence: Synthetic oligonucleotide
  Target: LAMA2; (+) strand; PAM type: NRG; PAM sequence: GAG
taacatgtttgagtagggag

SEQ ID NO: 136415 - DNA, 20 bp, Artificial Sequence
  Description of Artificial Sequence: Synthetic oligonucleotide
  Target: LAMA2; (+) strand; PAM type: NRG; PAM sequence: TGG
tgatcatgaatatcattaac

SEQ ID NO: 136416 - DNA, 20 bp, Artificial Sequence
  Description of Artificial Sequence: Synthetic oligonucleotide
  Target: LAMA2; (+) strand; PAM type: NRG; PAM sequence: GAG
atcatgaatatcattaactg

SEQ ID NO: 136417 - DNA, 20 bp, Artificial Sequence
  Description of Artificial Sequence: Synthetic oligonucleotide
  Target: LAMA2; (+) strand; PAM type: NRG; PAM sequence: AAG
aaatactgctaatttttttc

SEQ ID NO: 136418 - DNA, 20 bp, Artificial Sequence
  Description of Artificial Sequence: Synthetic oligonucleotide
  Target: LAMA2; (+) strand; PAM type: NRG; PAM sequence: AAG
ttataatacaaactgctatc

SEQ ID NO: 136419 - DNA, 20 bp, Artificial Sequence
  Description of Artificial Sequence: Synthetic oligonucleotide
  Target: LAMA2; (+) strand; PAM type: NRG; PAM sequence: CAG
caagaatattatcatcatcc

SEQ ID NO: 136420 - DNA, 20 bp, Artificial Sequence
  Description of Artificial Sequence: Synthetic oligonucleotide
  Target: LAMA2; (+) strand; PAM type: NRG; PAM sequence: CAG
attttctttatgcctcttcc

SEQ ID NO: 136421 - DNA, 20 bp, Artificial Sequence
  Description of Artificial Sequence: Synthetic oligonucleotide
  Target: LAMA2; (+) strand; PAM type: NRG; PAM sequence: CAG
tctttatgcctcttcccagt

SEQ ID NO: 136422 - DNA, 20 bp, Artificial Sequence
  Description of Artificial Sequence: Synthetic oligonucleotide
  Target: LAMA2; (+) strand; PAM type: NRG; PAM sequence: AAG
cccagtcagtctctgccccc

SEQ ID NO: 136423 - DNA, 20 bp, Artificial Sequence
  Description of Artificial Sequence: Synthetic oligonucleotide
  Target: LAMA2; (+) strand; PAM type: NRG; PAM sequence: AAG
tctctgcccccaagctccca

SEQ ID NO: 136424 - DNA, 20 bp, Artificial Sequence
  Description of Artificial Sequence: Synthetic oligonucleotide
  Target: LAMA2; (+) strand; PAM type: NRG; PAM sequence: AGG
ctctgcccccaagctcccaa

SEQ ID NO: 136425 - DNA, 20 bp, Artificial Sequence
  Description of Artificial Sequence: Synthetic oligonucleotide
  Target: LAMA2; (+) strand; PAM type: NRG; PAM sequence: AAG
ttcctgttttattttcctaa

SEQ ID NO: 136426 - DNA, 20 bp, Artificial Sequence
  Description of Artificial Sequence: Synthetic oligonucleotide
  Target: LAMA2; (+) strand; PAM type: NRG; PAM sequence: TAG
gttttattttcctaaaagat

SEQ ID NO: 136427 - DNA, 20 bp, Artificial Sequence
  Description of Artificial Sequence: Synthetic oligonucleotide
  Target: LAMA2; (+) strand; PAM type: NRG; PAM sequence: AGG
ttttattttcctaaaagatt

SEQ ID NO: 136428 - DNA, 20 bp, Artificial Sequence
  Description of Artificial Sequence: Synthetic oligonucleotide
  Target: LAMA2; (+) strand; PAM type: NRG; PAM sequence: AAG
aaagattaggtatgtttaaa

SEQ ID NO: 136429 - DNA, 20 bp, Artificial Sequence
  Description of Artificial Sequence: Synthetic oligonucleotide
  Target: LAMA2; (+) strand; PAM type: NRG; PAM sequence: TAG
aagatcatataaatgaataa

SEQ ID NO: 136430 - DNA, 20 bp, Artificial Sequence
  Description of Artificial Sequence: Synthetic oligonucleotide
  Target: LAMA2; (+) strand; PAM type: NRG; PAM sequence: GAG
gatcatataaatgaataata

SEQ ID NO: 136431 - DNA, 20 bp, Artificial Sequence
  Description of Artificial Sequence: Synthetic oligonucleotide
  Target: LAMA2; (+) strand; PAM type: NRG; PAM sequence: TGG
ataatagagtatccactctt

SEQ ID NO: 136432 - DNA, 20 bp, Artificial Sequence
  Description of Artificial Sequence: Synthetic oligonucleotide
  Target: LAMA2; (+) strand; PAM type: NRG; PAM sequence: TGG
tggtgtaaacttatattatg

SEQ ID NO: 136433 - DNA, 20 bp, Artificial Sequence
  Description of Artificial Sequence: Synthetic oligonucleotide
  Target: LAMA2; (+) strand; PAM type: NRG; PAM sequence: TGG
ttatgtggcataatcctttt

SEQ ID NO: 136434 - DNA, 20 bp, Artificial Sequence
  Description of Artificial Sequence: Synthetic oligonucleotide
  Target: LAMA2; (+) strand; PAM type: NRG; PAM sequence: GAG
atgtggcataatcctttttg

SEQ ID NO: 136435 - DNA, 20 bp, Artificial Sequence
  Description of Artificial Sequence: Synthetic oligonucleotide
  Target: LAMA2; (+) strand; PAM type: NRG; PAM sequence: CAG
ataatcctttttggagtcat

SEQ ID NO: 136436 - DNA, 20 bp, Artificial Sequence
  Description of Artificial Sequence: Synthetic oligonucleotide
  Target: LAMA2; (+) strand; PAM type: NRG; PAM sequence: CAG
atcagcattgttgtgtgtat

SEQ ID NO: 136437 - DNA, 20 bp, Artificial Sequence
  Description of Artificial Sequence: Synthetic oligonucleotide
  Target: LAMA2; (+) strand; PAM type: NRG; PAM sequence: TAG
tgttccatttttatgttgaa

SEQ ID NO: 136438 - DNA, 20 bp, Artificial Sequence
  Description of Artificial Sequence: Synthetic oligonucleotide
  Target: LAMA2; (+) strand; PAM type: NRG; PAM sequence: CAG
ttcattgtttaaatacacca

SEQ ID NO: 136439 - DNA, 20 bp, Artificial Sequence
  Description of Artificial Sequence: Synthetic oligonucleotide
  Target: LAMA2; (+) strand; PAM type: NRG; PAM sequence: TGG
tgtatcatttcccccattca

SEQ ID NO: 136440 - DNA, 20 bp, Artificial Sequence
  Description of Artificial Sequence: Synthetic oligonucleotide
  Target: LAMA2; (+) strand; PAM type: NRG; PAM sequence: AAG
tcccccattcatggaaacct

SEQ ID NO: 136441 - DNA, 20 bp, Artificial Sequence
  Description of Artificial Sequence: Synthetic oligonucleotide
  Target: LAMA2; (+) strand; PAM type: NRG; PAM sequence: AGG
cccccattcatggaaaccta

SEQ ID NO: 136442 - DNA, 20 bp, Artificial Sequence
  Description of Artificial Sequence: Synthetic oligonucleotide
  Target: LAMA2; (+) strand; PAM type: NRG; PAM sequence: CAG
atggaaacctaaggtgtttc

SEQ ID NO: 136443 - DNA, 20 bp, Artificial Sequence
  Description of Artificial Sequence: Synthetic oligonucleotide
  Target: LAMA2; (+) strand; PAM type: NRG; PAM sequence: AGG
tggaaacctaaggtgtttcc

SEQ ID NO: 136444 - DNA, 20 bp, Artificial Sequence
  Description of Artificial Sequence: Synthetic oligonucleotide
  Target: LAMA2; (+) strand; PAM type: NRG; PAM sequence: TGG
acctaaggtgtttccaggtt

SEQ ID NO: 136445 - DNA, 20 bp, Artificial Sequence
  Description of Artificial Sequence: Synthetic oligonucleotide
  Target: LAMA2; (+) strand; PAM type: NRG; PAM sequence: TAG
cttctatgaacatttttgtt

SEQ ID NO: 136446 - DNA, 20 bp, Artificial Sequence
  Description of Artificial Sequence: Synthetic oligonucleotide
  Target: LAMA2; (+) strand; PAM type: NRG; PAM sequence: AGG
ttctatgaacatttttgttt

SEQ ID NO: 136447 - DNA, 20 bp, Artificial Sequence
  Description of Artificial Sequence: Synthetic oligonucleotide
  Target: LAMA2; (+) strand; PAM type: NRG; PAM sequence: AAG
atttttgtttaggtcttttt

SEQ ID NO: 136448 - DNA, 20 bp, Artificial Sequence
  Description of Artificial Sequence: Synthetic oligonucleotide
  Target: LAMA2; (+) strand; PAM type: NRG; PAM sequence: AGG
tttttgtttaggtcttttta

SEQ ID NO: 136449 - DNA, 20 bp, Artificial Sequence
  Description of Artificial Sequence: Synthetic oligonucleotide
  Target: LAMA2; (+) strand; PAM type: NRG; PAM sequence: TGG
acatgtaatgtcatttatct

SEQ ID NO: 136450 - DNA, 20 bp, Artificial Sequence
  Description of Artificial Sequence: Synthetic oligonucleotide
  Target: LAMA2; (+) strand; PAM type: NRG; PAM sequence: CAG
tatcttggatatgtacctaa

SEQ ID NO: 136451 - DNA, 20 bp, Artificial Sequence
  Description of Artificial Sequence: Synthetic oligonucleotide
  Target: LAMA2; (+) strand; PAM type: NRG; PAM sequence: AGG
atcttggatatgtacctaac

SEQ ID NO: 136452 - DNA, 20 bp, Artificial Sequence
  Description of Artificial Sequence: Synthetic oligonucleotide
  Target: LAMA2; (+) strand; PAM type: NRG; PAM sequence: GGG
tcttggatatgtacctaaca

SEQ ID NO: 136453 - DNA, 20 bp, Artificial Sequence
  Description of Artificial Sequence: Synthetic oligonucleotide
  Target: LAMA2; (+) strand; PAM type: NRG; PAM sequence: GGG
cttggatatgtacctaacag

SEQ ID NO: 136454 - DNA, 20 bp, Artificial Sequence
  Description of Artificial Sequence: Synthetic oligonucleotide
  Target: LAMA2; (+) strand; PAM type: NRG; PAM sequence: AAG
acctaacaggggaaaatttg

SEQ ID NO: 136455 - DNA, 20 bp, Artificial Sequence
  Description of Artificial Sequence: Synthetic oligonucleotide
  Target: LAMA2; (+) strand; PAM type: NRG; PAM sequence: AGG
cctaacaggggaaaatttga

SEQ ID NO: 136456 - DNA, 20 bp, Artificial Sequence
  Description of Artificial Sequence: Synthetic oligonucleotide
  Target: LAMA2; (+) strand; PAM type: NRG; PAM sequence: AAG
aaaaactacctgttttctaa

SEQ ID NO: 136457 - DNA, 20 bp, Artificial Sequence
  Description of Artificial Sequence: Synthetic oligonucleotide
  Target: LAMA2; (+) strand; PAM type: NRG; PAM sequence: AGG
aaaactacctgttttctaaa

SEQ ID NO: 136458 - DNA, 20 bp, Artificial Sequence
  Description of Artificial Sequence: Synthetic oligonucleotide
  Target: LAMA2; (+) strand; PAM type: NRG; PAM sequence: GGG
aaactacctgttttctaaaa

SEQ ID NO: 136459 - DNA, 20 bp, Artificial Sequence
  Description of Artificial Sequence: Synthetic oligonucleotide
  Target: LAMA2; (+) strand; PAM type: NRG; PAM sequence: CAG
gtgctaatttacattcccaa

SEQ ID NO: 136460 - DNA, 20 bp, Artificial Sequence
  Description of Artificial Sequence: Synthetic oligonucleotide
  Target: LAMA2; (+) strand; PAM type: NRG; PAM sequence: CAG
ttacattcccaacagcaatg

SEQ ID NO: 136461 - DNA, 20 bp, Artificial Sequence
  Description of Artificial Sequence: Synthetic oligonucleotide
  Target: LAMA2; (+) strand; PAM type: NRG; PAM sequence: CAG
cattcccaacagcaatgcag

SEQ ID NO: 136462 - DNA, 20 bp, Artificial Sequence
  Description of Artificial Sequence: Synthetic oligonucleotide
  Target: LAMA2; (+) strand; PAM type: NRG; PAM sequence: GAG
tgccatttaatctaaaacat

SEQ ID NO: 136463 - DNA, 20 bp, Artificial Sequence
  Description of Artificial Sequence: Synthetic oligonucleotide
  Target: LAMA2; (+) strand; PAM type: NRG; PAM sequence: TAG
atgagaactttgtcaatata

SEQ ID NO: 136464 - DNA, 20 bp, Artificial Sequence
  Description of Artificial Sequence: Synthetic oligonucleotide
  Target: LAMA2; (+) strand; PAM type: NRG; PAM sequence: AGG
tgagaactttgtcaatatat

SEQ ID NO: 136465 - DNA, 20 bp, Artificial Sequence
  Description of Artificial Sequence: Synthetic oligonucleotide
  Target: LAMA2; (+) strand; PAM type: NRG; PAM sequence: CAG
actttgtcaatatataggtc

SEQ ID NO: 136466 - DNA, 20 bp, Artificial Sequence
  Description of Artificial Sequence: Synthetic oligonucleotide
  Target: LAMA2; (+) strand; PAM type: NRG; PAM sequence: TAG
cacccaccatttctttatta

SEQ ID NO: 136467 - DNA, 20 bp, Artificial Sequence
  Description of Artificial Sequence: Synthetic oligonucleotide
  Target: LAMA2; (+) strand; PAM type: NRG; PAM sequence: AAG
aaatattaatatgcatttaa

SEQ ID NO: 136468 - DNA, 20 bp, Artificial Sequence
  Description of Artificial Sequence: Synthetic oligonucleotide
  Target: LAMA2; (+) strand; PAM type: NRG; PAM sequence: CAG
atgcatttaaaagaatttaa

SEQ ID NO: 136469 - DNA, 20 bp, Artificial Sequence
  Description of Artificial Sequence: Synthetic oligonucleotide
  Target: LAMA2; (+) strand; PAM type: NRG; PAM sequence: AGG
tgcatttaaaagaatttaac

SEQ ID NO: 136470 - DNA, 20 bp, Artificial Sequence
  Description of Artificial Sequence: Synthetic oligonucleotide
  Target: LAMA2; (+) strand; PAM type: NRG; PAM sequence: GGG
gcatttaaaagaatttaaca

SEQ ID NO: 136471 - DNA, 20 bp, Artificial Sequence
  Description of Artificial Sequence: Synthetic oligonucleotide
  Target: LAMA2; (+) strand; PAM type: NRG; PAM sequence: AAG
aaaagaatttaacagggaaa

SEQ ID NO: 136472 - DNA, 20 bp, Artificial Sequence
  Description of Artificial Sequence: Synthetic oligonucleotide
  Target: LAMA2; (+) strand; PAM type: NRG; PAM sequence: TAG
aattttctattaatcacatg

SEQ ID NO: 136473 - DNA, 20 bp, Artificial Sequence
  Description of Artificial Sequence: Synthetic oligonucleotide
  Target: LAMA2; (+) strand; PAM type: NRG; PAM sequence: TGG
tttctattaatcacatgtag

SEQ ID NO: 136474 - DNA, 20 bp, Artificial Sequence
  Description of Artificial Sequence: Synthetic oligonucleotide
  Target: LAMA2; (+) strand; PAM type: NRG; PAM sequence: TAG
agtggatttttttttcattc

SEQ ID NO: 136475 - DNA, 20 bp, Artificial Sequence
  Description of Artificial Sequence: Synthetic oligonucleotide
  Target: LAMA2; (+) strand; PAM type: NRG; PAM sequence: CAG
agatactgtgttacattttt

SEQ ID NO: 136476 - DNA, 20 bp, Artificial Sequence
  Description of Artificial Sequence: Synthetic oligonucleotide
  Target: LAMA2; (+) strand; PAM type: NRG; PAM sequence: CAG
tgtgttacatttttcagtca

SEQ ID NO: 136477 - DNA, 20 bp, Artificial Sequence
  Description of Artificial Sequence: Synthetic oligonucleotide
  Target: LAMA2; (+) strand; PAM type: NRG; PAM sequence: AAG
taccatttcttttttgctac

SEQ ID NO: 136478 - DNA, 20 bp, Artificial Sequence
  Description of Artificial Sequence: Synthetic oligonucleotide
  Target: LAMA2; (+) strand; PAM type: NRG; PAM sequence: GAG
tcgtatgtgtgtatgtcctt

SEQ ID NO: 136479 - DNA, 20 bp, Artificial Sequence
  Description of Artificial Sequence: Synthetic oligonucleotide
  Target: LAMA2; (+) strand; PAM type: NRG; PAM sequence: TAG
tgtgtgtatgtccttgagta

SEQ ID NO: 136480 - DNA, 20 bp, Artificial Sequence
  Description of Artificial Sequence: Synthetic oligonucleotide
  Target: LAMA2; (+) strand; PAM type: NRG; PAM sequence: AAG
tgtccttgagtatagtttaa

SEQ ID NO: 136481 - DNA, 20 bp, Artificial Sequence
  Description of Artificial Sequence: Synthetic oligonucleotide
  Target: LAMA2; (+) strand; PAM type: NRG; PAM sequence: AAG
tatagtttaaaagctgcttg

SEQ ID NO: 136482 - DNA, 20 bp, Artificial Sequence
  Description of Artificial Sequence: Synthetic oligonucleotide
  Target: LAMA2; (+) strand; PAM type: NRG; PAM sequence: TGG
tgtttgcttattccaacatc

SEQ ID NO: 136483 - DNA, 20 bp, Artificial Sequence
  Description of Artificial Sequence: Synthetic oligonucleotide
  Target: LAMA2; (+) strand; PAM type: NRG; PAM sequence: CAG
ttccaacatctggttgatct

SEQ ID NO: 136484 - DNA, 20 bp, Artificial Sequence
  Description of Artificial Sequence: Synthetic oligonucleotide
  Target: LAMA2; (+) strand; PAM type: NRG; PAM sequence: AAG
cgttgattgctttttctcat

SEQ ID NO: 136485 - DNA, 20 bp, Artificial Sequence
  Description of Artificial Sequence: Synthetic oligonucleotide
  Target: LAMA2; (+) strand; PAM type: NRG; PAM sequence: GAG
ttgctttttctcataagtat

SEQ ID NO: 136486 - DNA, 20 bp, Artificial Sequence
  Description of Artificial Sequence: Synthetic oligonucleotide
  Target: LAMA2; (+) strand; PAM type: NRG; PAM sequence: TAG
ttattgcttccttgtatgtc

SEQ ID NO: 136487 - DNA, 20 bp, Artificial Sequence
  Description of Artificial Sequence: Synthetic oligonucleotide
  Target: LAMA2; (+) strand; PAM type: NRG; PAM sequence: TGG
atttttttttaattgcaacc

SEQ ID NO: 136488 - DNA, 20 bp, Artificial Sequence
  Description of Artificial Sequence: Synthetic oligonucleotide
  Target: LAMA2; (+) strand; PAM type: NRG; PAM sequence: TAG
aacctggatgtcatgaataa

SEQ ID NO: 136489 - DNA, 20 bp, Artificial Sequence
  Description of Artificial Sequence: Synthetic oligonucleotide
  Target: LAMA2; (+) strand; PAM type: NRG; PAM sequence: TAG
tcatgaataatagcacattg

SEQ ID NO: 136490 - DNA, 20 bp, Artificial Sequence
  Description of Artificial Sequence: Synthetic oligonucleotide
  Target: LAMA2; (+) strand; PAM type: NRG; PAM sequence: TGG
atagcacattgtagaaactc

SEQ ID NO: 136491 - DNA, 20 bp, Artificial Sequence
  Description of Artificial Sequence: Synthetic oligonucleotide
  Target: LAMA2; (+) strand; PAM type: NRG; PAM sequence: GGG
tagcacattgtagaaactct

SEQ ID NO: 136492 - DNA, 20 bp, Artificial Sequence
  Description of Artificial Sequence: Synthetic oligonucleotide
  Target: LAMA2; (+) strand; PAM type: NRG; PAM sequence: AAG
ggttttgttatgttcctctg

SEQ ID NO: 136493 - DNA, 20 bp, Artificial Sequence
  Description of Artificial Sequence: Synthetic oligonucleotide
  Target: LAMA2; (+) strand; PAM type: NRG; PAM sequence: GAG
ttttgttatgttcctctgaa

SEQ ID NO: 136494 - DNA, 20 bp, Artificial Sequence
  Description of Artificial Sequence: Synthetic oligonucleotide
  Target: LAMA2; (+) strand; PAM type: NRG; PAM sequence: CAG
attcttttttgttgtcgcat

SEQ ID NO: 136495 - DNA, 20 bp, Artificial Sequence
  Description of Artificial Sequence: Synthetic oligonucleotide
  Target: LAMA2; (+) strand; PAM type: NRG; PAM sequence: TGG
ttttttgttgtcgcatcagt

SEQ ID NO: 136496 - DNA, 20 bp, Artificial Sequence
  Description of Artificial Sequence: Synthetic oligonucleotide
  Target: LAMA2; (+) strand; PAM type: NRG; PAM sequence: TGG
catcagttggttaacttgac

SEQ ID NO: 136497 - DNA, 20 bp, Artificial Sequence
  Description of Artificial Sequence: Synthetic oligonucleotide
  Target: LAMA2; (+) strand; PAM type: NRG; PAM sequence: GGG
atcagttggttaacttgact

SEQ ID NO: 136498 - DNA, 20 bp, Artificial Sequence
  Description of Artificial Sequence: Synthetic oligonucleotide
  Target: LAMA2; (+) strand; PAM type: NRG; PAM sequence: AAG
ggttaacttgactgggctca

SEQ ID NO: 136499 - DNA, 20 bp, Artificial Sequence
  Description of Artificial Sequence: Synthetic oligonucleotide
  Target: LAMA2; (+) strand; PAM type: NRG; PAM sequence: TAG
cccaacttttttctttcctg

SEQ ID NO: 136500 - DNA, 20 bp, Artificial Sequence
  Description of Artificial Sequence: Synthetic oligonucleotide
  Target: LAMA2; (+) strand; PAM type: NRG; PAM sequence: GAG
caacttttttctttcctgta

SEQ ID NO: 136501 - DNA, 20 bp, Artificial Sequence
  Description of Artificial Sequence: Synthetic oligonucleotide
  Target: LAMA2; (+) strand; PAM type: NRG; PAM sequence: CAG
tttttctttcctgtagagtg

SEQ ID NO: 136502 - DNA, 20 bp, Artificial Sequence
  Description of Artificial Sequence: Synthetic oligonucleotide
  Target: LAMA2; (+) strand; PAM type: NRG; PAM sequence: CAG
cagaacctaaaatctctgtt

SEQ ID NO: 136503 - DNA, 20 bp, Artificial Sequence
  Description of Artificial Sequence: Synthetic oligonucleotide
  Target: LAMA2; (+) strand; PAM type: NRG; PAM sequence: CAG
aaaatctctgttcagttttt

SEQ ID NO: 136504 - DNA, 20 bp, Artificial Sequence
  Description of Artificial Sequence: Synthetic oligonucleotide
  Target: LAMA2; (+) strand; PAM type: NRG; PAM sequence: TAG
tctgttcagtttttcagccc

SEQ ID NO: 136505 - DNA, 20 bp, Artificial Sequence
  Description of Artificial Sequence: Synthetic oligonucleotide
  Target: LAMA2; (+) strand; PAM type: NRG; PAM sequence: TGG
ttcagtttttcagccctagc

SEQ ID NO: 136506 - DNA, 20 bp, Artificial Sequence
  Description of Artificial Sequence: Synthetic oligonucleotide
  Target: LAMA2; (+) strand; PAM type: NRG; PAM sequence: GGG
tcagtttttcagccctagct

SEQ ID NO: 136507 - DNA, 20 bp, Artificial Sequence
  Description of Artificial Sequence: Synthetic oligonucleotide
  Target: LAMA2; (+) strand; PAM type: NRG; PAM sequence: TGG
tcagccctagctgggctact

SEQ ID NO: 136508 - DNA, 20 bp, Artificial Sequence
  Description of Artificial Sequence: Synthetic oligonucleotide
  Target: LAMA2; (+) strand; PAM type: NRG; PAM sequence: TAG
tgggctacttggaatctgac

SEQ ID NO: 136509 - DNA, 20 bp, Artificial Sequence
  Description of Artificial Sequence: Synthetic oligonucleotide
  Target: LAMA2; (+) strand; PAM type: NRG; PAM sequence: AGG
gggctacttggaatctgact

SEQ ID NO: 136510 - DNA, 20 bp, Artificial Sequence
  Description of Artificial Sequence: Synthetic oligonucleotide
  Target: LAMA2; (+) strand; PAM type: NRG; PAM sequence: GGG
ggctacttggaatctgacta

SEQ ID NO: 136511 - DNA, 20 bp, Artificial Sequence
  Description of Artificial Sequence: Synthetic oligonucleotide
  Target: LAMA2; (+) strand; PAM type: NRG; PAM sequence: CAG
tacttggaatctgactaggg

SEQ ID NO: 136512 - DNA, 20 bp, Artificial Sequence
  Description of Artificial Sequence: Synthetic oligonucleotide
  Target: LAMA2; (+) strand; PAM type: NRG; PAM sequence: AGG
acttggaatctgactagggc

SEQ ID NO: 136513 - DNA, 20 bp, Artificial Sequence
  Description of Artificial Sequence: Synthetic oligonucleotide
  Target: LAMA2; (+) strand; PAM type: NRG; PAM sequence: TAG
gaatctgactagggcaggtg

SEQ ID NO: 136514 - DNA, 20 bp, Artificial Sequence
  Description of Artificial Sequence: Synthetic oligonucleotide
  Target: LAMA2; (+) strand; PAM type: NRG; PAM sequence: AGG
aatctgactagggcaggtgt

SEQ ID NO: 136515 - DNA, 20 bp, Artificial Sequence
  Description of Artificial Sequence: Synthetic oligonucleotide
  Target: LAMA2; (+) strand; PAM type: NRG; PAM sequence: TGG
gactagggcaggtgtaggtc

SEQ ID NO: 136516 - DNA, 20 bp, Artificial Sequence
  Description of Artificial Sequence: Synthetic oligonucleotide
  Target: LAMA2; (+) strand; PAM type: NRG; PAM sequence: CAG
ggcaggtgtaggtctggcat

SEQ ID NO: 136517 - DNA, 20 bp, Artificial Sequence
  Description of Artificial Sequence: Synthetic oligonucleotide
  Target: LAMA2; (+) strand; PAM type: NRG; PAM sequence: GAG
ggtgtaggtctggcatcagt

SEQ ID NO: 136518 - DNA, 20 bp, Artificial Sequence
  Description of Artificial Sequence: Synthetic oligonucleotide
  Target: LAMA2; (+) strand; PAM type: NRG; PAM sequence: TGG
tctggcatcagtgagcaatt

SEQ ID NO: 136519 - DNA, 20 bp, Artificial Sequence
  Description of Artificial Sequence: Synthetic oligonucleotide
  Target: LAMA2; (+) strand; PAM type: NRG; PAM sequence: CAG
gcatcagtgagcaatttgga

SEQ ID NO: 136520 - DNA, 20 bp, Artificial Sequence
  Description of Artificial Sequence: Synthetic oligonucleotide
  Target: LAMA2; (+) strand; PAM type: NRG; PAM sequence: GAG
atcagtgagcaatttggaca

SEQ ID NO: 136521 - DNA, 20 bp, Artificial Sequence
  Description of Artificial Sequence: Synthetic oligonucleotide
  Target: LAMA2; (+) strand; PAM type: NRG; PAM sequence: CAG
atttggacagagtttatgca

SEQ ID NO: 136522 - DNA, 20 bp, Artificial Sequence
  Description of Artificial Sequence: Synthetic oligonucleotide
  Target: LAMA2; (+) strand; PAM type: NRG; PAM sequence: GAG
acagagtttatgcacagatt

SEQ ID NO: 136523 - DNA, 20 bp, Artificial Sequence
  Description of Artificial Sequence: Synthetic oligonucleotide
  Target: LAMA2; (+) strand; PAM type: NRG; PAM sequence: AGG
cagagtttatgcacagattg

SEQ ID NO: 136524 - DNA, 20 bp, Artificial Sequence
  Description of Artificial Sequence: Synthetic oligonucleotide
  Target: LAMA2; (+) strand; PAM type: NRG; PAM sequence: TGG
agattgaggctccctttctg

SEQ ID NO: 136525 - DNA, 20 bp, Artificial Sequence
  Description of Artificial Sequence: Synthetic oligonucleotide
  Target: LAMA2; (+) strand; PAM type: NRG; PAM sequence: TGG
acctctctttacacctgctg

SEQ ID NO: 136526 - DNA, 20 bp, Artificial Sequence
  Description of Artificial Sequence: Synthetic oligonucleotide
  Target: LAMA2; (+) strand; PAM type: NRG; PAM sequence: TAG
acacctgctgtggctatttt

SEQ ID NO: 136527 - DNA, 20 bp, Artificial Sequence
  Description of Artificial Sequence: Synthetic oligonucleotide
  Target: LAMA2; (+) strand; PAM type: NRG; PAM sequence: TAG
ctatttttagttttgttcac

SEQ ID NO: 136528 - DNA, 20 bp, Artificial Sequence
  Description of Artificial Sequence: Synthetic oligonucleotide
  Target: LAMA2; (+) strand; PAM type: NRG; PAM sequence: AAG
gttttgttcactagttcttc

SEQ ID NO: 136529 - DNA, 20 bp, Artificial Sequence
  Description of Artificial Sequence: Synthetic oligonucleotide
  Target: LAMA2; (+) strand; PAM type: NRG; PAM sequence: CAG
tgttcactagttcttcaagc

SEQ ID NO: 136530 - DNA, 20 bp, Artificial Sequence
  Description of Artificial Sequence: Synthetic oligonucleotide
  Target: LAMA2; (+) strand; PAM type: NRG; PAM sequence: TGG
tcttcaagccagtaaaactg

SEQ ID NO: 136531 - DNA, 20 bp, Artificial Sequence
  Description of Artificial Sequence: Synthetic oligonucleotide
  Target: LAMA2; (+) strand; PAM type: NRG; PAM sequence: GGG
cttcaagccagtaaaactgt

SEQ ID NO: 136532 - DNA, 20 bp, Artificial Sequence
  Description of Artificial Sequence: Synthetic oligonucleotide
  Target: LAMA2; (+) strand; PAM type: NRG; PAM sequence: GAG
aaaactgtgggtttctattt

SEQ ID NO: 136533 - DNA, 20 bp, Artificial Sequence
  Description of Artificial Sequence: Synthetic oligonucleotide
  Target: LAMA2; (+) strand; PAM type: NRG; PAM sequence: TAG
gtgggtttctatttgagttt

SEQ ID NO: 136534 - DNA, 20 bp, Artificial Sequence
  Description of Artificial Sequence: Synthetic oligonucleotide
  Target: LAMA2; (+) strand; PAM type: NRG; PAM sequence: TGG
tatttgagttttagccattc

SEQ ID NO: 136535 - DNA, 20 bp, Artificial Sequence
  Description of Artificial Sequence: Synthetic oligonucleotide
  Target: LAMA2; (+) strand; PAM type: NRG; PAM sequence: GAG
tttgagttttagccattctg

SEQ ID NO: 136536 - DNA, 20 bp, Artificial Sequence
  Description of Artificial Sequence: Synthetic oligonucleotide
  Target: LAMA2; (+) strand; PAM type: NRG; PAM sequence: CAG
tagccattctggagctcatc

SEQ ID NO: 136537 - DNA, 20 bp, Artificial Sequence
  Description of Artificial Sequence: Synthetic oligonucleotide
  Target: LAMA2; (+) strand; PAM type: NRG; PAM sequence: AAG
atccagtgccttttccttct

SEQ ID NO: 136538 - DNA, 20 bp, Artificial Sequence
  Description of Artificial Sequence: Synthetic oligonucleotide
  Target: LAMA2; (+) strand; PAM type: NRG; PAM sequence: TAG
cttttccttctaagtattca

SEQ ID NO: 136539 - DNA, 20 bp, Artificial Sequence
  Description of Artificial Sequence: Synthetic oligonucleotide
  Target: LAMA2; (+) strand; PAM type: NRG; PAM sequence: TGG
ctaagtattcatagtcttcc

SEQ ID NO: 136540 - DNA, 20 bp, Artificial Sequence
  Description of Artificial Sequence: Synthetic oligonucleotide
  Target: LAMA2; (+) strand; PAM type: NRG; PAM sequence: TAG
cttcctggcttacctgttct

SEQ ID NO: 136541 - DNA, 20 bp, Artificial Sequence
  Description of Artificial Sequence: Synthetic oligonucleotide
  Target: LAMA2; (+) strand; PAM type: NRG; PAM sequence: AGG
ttcctggcttacctgttctt

SEQ ID NO: 136542 - DNA, 20 bp, Artificial Sequence
  Description of Artificial Sequence: Synthetic oligonucleotide
  Target: LAMA2; (+) strand; PAM type: NRG; PAM sequence: CAG
acctgttcttaggtgcactc

SEQ ID NO: 136543 - DNA, 20 bp, Artificial Sequence
  Description of Artificial Sequence: Synthetic oligonucleotide
  Target: LAMA2; (+) strand; PAM type: NRG; PAM sequence: TGG
ttaggtgcactccagatatc

SEQ ID NO: 136544 - DNA, 20 bp, Artificial Sequence
  Description of Artificial Sequence: Synthetic oligonucleotide
  Target: LAMA2; (+) strand; PAM type: NRG; PAM sequence: CAG
acacacaccaaatatataca

SEQ ID NO: 136545 - DNA, 20 bp, Artificial Sequence
  Description of Artificial Sequence: Synthetic oligonucleotide
  Target: LAMA2; (+) strand; PAM type: NRG; PAM sequence: TAG
aaatatatacacagaattta

SEQ ID NO: 136546 - DNA, 20 bp, Artificial Sequence
  Description of Artificial Sequence: Synthetic oligonucleotide
  Target: LAMA2; (+) strand; PAM type: NRG; PAM sequence: TGG
gaatttatagctgttatctc

SEQ ID NO: 136547 - DNA, 20 bp, Artificial Sequence
  Description of Artificial Sequence: Synthetic oligonucleotide
  Target: LAMA2; (+) strand; PAM type: NRG; PAM sequence: GGG
aatttatagctgttatctct

SEQ ID NO: 136548 - DNA, 20 bp, Artificial Sequence
  Description of Artificial Sequence: Synthetic oligonucleotide
  Target: LAMA2; (+) strand; PAM type: NRG; PAM sequence: GAG
tttatagctgttatctctgg

SEQ ID NO: 136549 - DNA, 20 bp, Artificial Sequence
  Description of Artificial Sequence: Synthetic oligonucleotide
  Target: LAMA2; (+) strand; PAM type: NRG; PAM sequence: AAG
tgggagctttgctccaataa

SEQ ID NO: 136550 - DNA, 20 bp, Artificial Sequence
  Description of Artificial Sequence: Synthetic oligonucleotide
  Target: LAMA2; (+) strand; PAM type: NRG; PAM sequence: TAG
tacttcacaattattaaaaa

SEQ ID NO: 136551 - DNA, 20 bp, Artificial Sequence
  Description of Artificial Sequence: Synthetic oligonucleotide
  Target: LAMA2; (+) strand; PAM type: NRG; PAM sequence: AAG
attaaaaatagaacctccat

SEQ ID NO: 136552 - DNA, 20 bp, Artificial Sequence
  Description of Artificial Sequence: Synthetic oligonucleotide
  Target: LAMA2; (+) strand; PAM type: NRG; PAM sequence: TAG
aaaaatagaacctccataag

SEQ ID NO: 136553 - DNA, 20 bp, Artificial Sequence
  Description of Artificial Sequence: Synthetic oligonucleotide
  Target: LAMA2; (+) strand; PAM type: NRG; PAM sequence: AAG
ttctgccatttgaaaccaaa

SEQ ID NO: 136554 - DNA, 20 bp, Artificial Sequence
  Description of Artificial Sequence: Synthetic oligonucleotide
  Target: LAMA2; (+) strand; PAM type: NRG; PAM sequence: TGG
tgccatttgaaaccaaaaag

SEQ ID NO: 136555 - DNA, 20 bp, Artificial Sequence
  Description of Artificial Sequence: Synthetic oligonucleotide
  Target: LAMA2; (+) strand; PAM type: NRG; PAM sequence: GGG
gccatttgaaaccaaaaagt

SEQ ID NO: 136556 - DNA, 20 bp, Artificial Sequence
  Description of Artificial Sequence: Synthetic oligonucleotide
  Target: LAMA2; (+) strand; PAM type: NRG; PAM sequence: GAG
aaaccaaaaagtgggatttt

SEQ ID NO: 136557 - DNA, 20 bp, Artificial Sequence
  Description of Artificial Sequence: Synthetic oligonucleotide
  Target: LAMA2; (+) strand; PAM type: NRG; PAM sequence: TAG
aaagtgggattttgagaatg

SEQ ID NO: 136558 - DNA, 20 bp, Artificial Sequence
  Description of Artificial Sequence: Synthetic oligonucleotide
  Target: LAMA2; (+) strand; PAM type: NRG; PAM sequence: GAG
gtgaacatactacattattt

SEQ ID NO: 136559 - DNA, 20 bp, Artificial Sequence
  Description of Artificial Sequence: Synthetic oligonucleotide
  Target: LAMA2; (+) strand; PAM type: NRG; PAM sequence: AAG
acatactacattatttgaga

SEQ ID NO: 136560 - DNA, 20 bp, Artificial Sequence
  Description of Artificial Sequence: Synthetic oligonucleotide
  Target: LAMA2; (+) strand; PAM type: NRG; PAM sequence: TGG
attatttgagaaagcaaata

SEQ ID NO: 136561 - DNA, 20 bp, Artificial Sequence
  Description of Artificial Sequence: Synthetic oligonucleotide
  Target: LAMA2; (+) strand; PAM type: NRG; PAM sequence: CAG
taaacacatccaaataaaaa

SEQ ID NO: 136562 - DNA, 20 bp, Artificial Sequence
  Description of Artificial Sequence: Synthetic oligonucleotide
  Target: LAMA2; (+) strand; PAM type: NRG; PAM sequence: TGG
acacatccaaataaaaacag

SEQ ID NO: 136563 - DNA, 20 bp, Artificial Sequence
  Description of Artificial Sequence: Synthetic oligonucleotide
  Target: LAMA2; (+) strand; PAM type: NRG; PAM sequence: AAG
catccaaataaaaacagtgg

SEQ ID NO: 136564 - DNA, 20 bp, Artificial Sequence
  Description of Artificial Sequence: Synthetic oligonucleotide
  Target: LAMA2; (+) strand; PAM type: NRG; PAM sequence: TAG
caaataaaaacagtggaagt

SEQ ID NO: 136565 - DNA, 20 bp, Artificial Sequence
  Description of Artificial Sequence: Synthetic oligonucleotide
  Target: LAMA2; (+) strand; PAM type: NRG; PAM sequence: AGG
aaataaaaacagtggaagtt

SEQ ID NO: 136566 - DNA, 20 bp, Artificial Sequence
  Description of Artificial Sequence: Synthetic oligonucleotide
  Target: LAMA2; (+) strand; PAM type: NRG; PAM sequence: TAG
ttcaaatgtttgccatattg

SEQ ID NO: 136567 - DNA, 20 bp, Artificial Sequence
  Description of Artificial Sequence: Synthetic oligonucleotide
  Target: LAMA2; (+) strand; PAM type: NRG; PAM sequence: CAG
aaatgtttgccatattgtag

SEQ ID NO: 136568 - DNA, 20 bp, Artificial Sequence
  Description of Artificial Sequence: Synthetic oligonucleotide
  Target: LAMA2; (+) strand; PAM type: NRG; PAM sequence: CAG
gccatattgtagcagaattt

SEQ ID NO: 136569 - DNA, 20 bp, Artificial Sequence
  Description of Artificial Sequence: Synthetic oligonucleotide
  Target: LAMA2; (+) strand; PAM type: NRG; PAM sequence: TAG
attttcacatgatatacact

SEQ ID NO: 136570 - DNA, 20 bp, Artificial Sequence
  Description of Artificial Sequence: Synthetic oligonucleotide
  Target: LAMA2; (+) strand; PAM type: NRG; PAM sequence: TAG
atatacacttagcctttttc

SEQ ID NO: 136571 - DNA, 20 bp, Artificial Sequence
  Description of Artificial Sequence: Synthetic oligonucleotide
  Target: LAMA2; (+) strand; PAM type: NRG; PAM sequence: TAG
atatatatatatatacacta

SEQ ID NO: 136572 - DNA, 20 bp, Artificial Sequence
  Description of Artificial Sequence: Synthetic oligonucleotide
  Target: LAMA2; (+) strand; PAM type: NRG; PAM sequence: CAG
tatatatatacactatagaa

SEQ ID NO: 136573 - DNA, 20 bp, Artificial Sequence
  Description of Artificial Sequence: Synthetic oligonucleotide
  Target: LAMA2; (+) strand; PAM type: NRG; PAM sequence: TAG
ctaatctctaataaaataca

SEQ ID NO: 136574 - DNA, 20 bp, Artificial Sequence
  Description of Artificial Sequence: Synthetic oligonucleotide
  Target: LAMA2; (+) strand; PAM type: NRG; PAM sequence: CAG
aataaaatacatagtataaa

SEQ ID NO: 136575 - DNA, 20 bp, Artificial Sequence
  Description of Artificial Sequence: Synthetic oligonucleotide
  Target: LAMA2; (+) strand; PAM type: NRG; PAM sequence: CAG
aatattgtttgatttttgtt

SEQ ID NO: 136576 - DNA, 20 bp, Artificial Sequence
  Description of Artificial Sequence: Synthetic oligonucleotide
  Target: LAMA2; (+) strand; PAM type: NRG; PAM sequence: CAG
cagacattgttccttataac

SEQ ID NO: 136577 - DNA, 20 bp, Artificial Sequence
  Description of Artificial Sequence: Synthetic oligonucleotide
  Target: LAMA2; (+) strand; PAM type: NRG; PAM sequence: TAG
gaactccaactaaacttatt

SEQ ID NO: 136578 - DNA, 20 bp, Artificial Sequence
  Description of Artificial Sequence: Synthetic oligonucleotide
  Target: LAMA2; (+) strand; PAM type: NRG; PAM sequence: TAG
ccaactaaacttatttagtc

SEQ ID NO: 136579 - DNA, 20 bp, Artificial Sequence
  Description of Artificial Sequence: Synthetic oligonucleotide
  Target: LAMA2; (+) strand; PAM type: NRG; PAM sequence: CAG
ttatttagtctagtgctatt

SEQ ID NO: 136580 - DNA, 20 bp, Artificial Sequence
  Description of Artificial Sequence: Synthetic oligonucleotide
  Target: LAMA2; (+) strand; PAM type: NRG; PAM sequence: TAG
cagaaaaaaaatgtcaatca

SEQ ID NO: 136581 - DNA, 20 bp, Artificial Sequence
  Description of Artificial Sequence: Synthetic oligonucleotide
  Target: LAMA2; (+) strand; PAM type: NRG; PAM sequence: TGG
aaatgtcaatcatagttgta

SEQ ID NO: 136582 - DNA, 20 bp, Artificial Sequence
  Description of Artificial Sequence: Synthetic oligonucleotide
  Target: LAMA2; (+) strand; PAM type: NRG; PAM sequence: TGG
gttgtatggataatgatcac

SEQ ID NO: 136583 - DNA, 20 bp, Artificial Sequence
  Description of Artificial Sequence: Synthetic oligonucleotide
  Target: LAMA2; (+) strand; PAM type: NRG; PAM sequence: CAG
cttttatgtcattaacatta

SEQ ID NO: 136584 - DNA, 20 bp, Artificial Sequence
  Description of Artificial Sequence: Synthetic oligonucleotide
  Target: LAMA2; (+) strand; PAM type: NRG; PAM sequence: AGG
ttttatgtcattaacattac

SEQ ID NO: 136585 - DNA, 20 bp, Artificial Sequence
  Description of Artificial Sequence: Synthetic oligonucleotide
  Target: LAMA2; (+) strand; PAM type: NRG; PAM sequence: AAG
cattaacattacaggacctt

SEQ ID NO: 136586 - DNA, 20 bp, Artificial Sequence
  Description of Artificial Sequence: Synthetic oligonucleotide
  Target: LAMA2; (+) strand; PAM type: NRG; PAM sequence: GAG
acattacaggaccttaagtt

SEQ ID NO: 136587 - DNA, 20 bp, Artificial Sequence
  Description of Artificial Sequence: Synthetic oligonucleotide
  Target: LAMA2; (+) strand; PAM type: NRG; PAM sequence: AAG
acaggaccttaagttgagtt

SEQ ID NO: 136588 - DNA, 20 bp, Artificial Sequence
  Description of Artificial Sequence: Synthetic oligonucleotide
  Target: LAMA2; (+) strand; PAM type: NRG; PAM sequence: AAG
ggaccttaagttgagttaag

SEQ ID NO: 136589 - DNA, 20 bp, Artificial Sequence
  Description of Artificial Sequence: Synthetic oligonucleotide
  Target: LAMA2; (+) strand; PAM type: NRG; PAM sequence: AAG
aagttgagttaagaagatgt

SEQ ID NO: 136590 - DNA, 20 bp, Artificial Sequence
  Description of Artificial Sequence: Synthetic oligonucleotide
  Target: LAMA2; (+) strand; PAM type: NRG; PAM sequence: AAG
atgtaagtcaatactctcta

SEQ ID NO: 136591 - DNA, 20 bp, Artificial Sequence
  Description of Artificial Sequence: Synthetic oligonucleotide
  Target: LAMA2; (+) strand; PAM type: NRG; PAM sequence: AGG
tgtaagtcaatactctctaa

SEQ ID NO: 136592 - DNA, 20 bp, Artificial Sequence
  Description of Artificial Sequence: Synthetic oligonucleotide
  Target: LAMA2; (+) strand; PAM type: NRG; PAM sequence: CAG
aatactctctaaaggttcat

SEQ ID NO: 136593 - DNA, 20 bp, Artificial Sequence
  Description of Artificial Sequence: Synthetic oligonucleotide
  Target: LAMA2; (+) strand; PAM type: NRG; PAM sequence: TAG
aaaggttcatcagctattta

SEQ ID NO: 136594 - DNA, 20 bp, Artificial Sequence
  Description of Artificial Sequence: Synthetic oligonucleotide
  Target: LAMA2; (+) strand; PAM type: NRG; PAM sequence: AAG
atgtttacataatcttaacc

SEQ ID NO: 136595 - DNA, 20 bp, Artificial Sequence
  Description of Artificial Sequence: Synthetic oligonucleotide
  Target: LAMA2; (+) strand; PAM type: NRG; PAM sequence: TGG
caagtaacacatattgaata

SEQ ID NO: 136596 - DNA, 20 bp, Artificial Sequence
  Description of Artificial Sequence: Synthetic oligonucleotide
  Target: LAMA2; (+) strand; PAM type: NRG; PAM sequence: TGG
tatggaaataaatattgccc

SEQ ID NO: 136597 - DNA, 20 bp, Artificial Sequence
  Description of Artificial Sequence: Synthetic oligonucleotide
  Target: LAMA2; (+) strand; PAM type: NRG; PAM sequence: TGG
attgccctggtgcttttgaa

SEQ ID NO: 136598 - DNA, 20 bp, Artificial Sequence
  Description of Artificial Sequence: Synthetic oligonucleotide
  Target: LAMA2; (+) strand; PAM type: NRG; PAM sequence: GGG
ttgccctggtgcttttgaat

SEQ ID NO: 136599 - DNA, 20 bp, Artificial Sequence
  Description of Artificial Sequence: Synthetic oligonucleotide
  Target: LAMA2; (+) strand; PAM type: NRG; PAM sequence: AAG
tggtgcttttgaatgggaat

SEQ ID NO: 136600 - DNA, 20 bp, Artificial Sequence
  Description of Artificial Sequence: Synthetic oligonucleotide
  Target: LAMA2; (+) strand; PAM type: NRG; PAM sequence: TAG
tgcttttgaatgggaataag

SEQ ID NO: 136601 - DNA, 20 bp, Artificial Sequence
  Description of Artificial Sequence: Synthetic oligonucleotide
  Target: LAMA2; (+) strand; PAM type: NRG; PAM sequence: AGG
gcttttgaatgggaataagt

SEQ ID NO: 136602 - DNA, 20 bp, Artificial Sequence
  Description of Artificial Sequence: Synthetic oligonucleotide
  Target: LAMA2; (+) strand; PAM type: NRG; PAM sequence: CAG
tgaatgggaataagtaggca

SEQ ID NO: 136603 - DNA, 20 bp, Artificial Sequence
  Description of Artificial Sequence: Synthetic oligonucleotide
  Target: LAMA2; (+) strand; PAM type: NRG; PAM sequence: TAG
aataagtaggcacagcataa

SEQ ID NO: 136604 - DNA, 20 bp, Artificial Sequence
  Description of Artificial Sequence: Synthetic oligonucleotide
  Target: LAMA2; (+) strand; PAM type: NRG; PAM sequence: TGG
gatttaacatataatgaaaa

SEQ ID NO: 136605 - DNA, 20 bp, Artificial Sequence
  Description of Artificial Sequence: Synthetic oligonucleotide
  Target: LAMA2; (+) strand; PAM type: NRG; PAM sequence: GGG
atttaacatataatgaaaat

SEQ ID NO: 136606 - DNA, 20 bp, Artificial Sequence
  Description of Artificial Sequence: Synthetic oligonucleotide
  Target: LAMA2; (+) strand; PAM type: NRG; PAM sequence: AAG
aatgggttgcaatctataat

SEQ ID NO: 136607 - DNA, 20 bp, Artificial Sequence
  Description of Artificial Sequence: Synthetic oligonucleotide
  Target: LAMA2; (+) strand; PAM type: NRG; PAM sequence: AAG
atctataataagacatgctg

SEQ ID NO: 136608 - DNA, 20 bp, Artificial Sequence
  Description of Artificial Sequence: Synthetic oligonucleotide
  Target: LAMA2; (+) strand; PAM type: NRG; PAM sequence: AAG
acatgctgaagattcaataa

SEQ ID NO: 136609 - DNA, 20 bp, Artificial Sequence
  Description of Artificial Sequence: Synthetic oligonucleotide
  Target: LAMA2; (+) strand; PAM type: NRG; PAM sequence: CAG
ctgaagattcaataaaagct

SEQ ID NO: 136610 - DNA, 20 bp, Artificial Sequence
  Description of Artificial Sequence: Synthetic oligonucleotide
  Target: LAMA2; (+) strand; PAM type: NRG; PAM sequence: TGG
tattgattcattcttcaaat

SEQ ID NO: 136611 - DNA, 20 bp, Artificial Sequence
  Description of Artificial Sequence: Synthetic oligonucleotide
  Target: LAMA2; (+) strand; PAM type: NRG; PAM sequence: TAG
tcttcaaattggtcattcat

SEQ ID NO: 136612 - DNA, 20 bp, Artificial Sequence
  Description of Artificial Sequence: Synthetic oligonucleotide
  Target: LAMA2; (+) strand; PAM type: NRG; PAM sequence: TGG
gtcattcattagcaactaat

SEQ ID NO: 136613 - DNA, 20 bp, Artificial Sequence
  Description of Artificial Sequence: Synthetic oligonucleotide
  Target: LAMA2; (+) strand; PAM type: NRG; PAM sequence: GAG
cattcattagcaactaattg

SEQ ID NO: 136614 - DNA, 20 bp, Artificial Sequence
  Description of Artificial Sequence: Synthetic oligonucleotide
  Target: LAMA2; (+) strand; PAM type: NRG; PAM sequence: CAG
aaccgatttttaaaaataaa

SEQ ID NO: 136615 - DNA, 20 bp, Artificial Sequence
  Description of Artificial Sequence: Synthetic oligonucleotide
  Target: LAMA2; (+) strand; PAM type: NRG; PAM sequence: TAG
tttaaaaataaacagcaaaa

SEQ ID NO: 136616 - DNA, 20 bp, Artificial Sequence
  Description of Artificial Sequence: Synthetic oligonucleotide
  Target: LAMA2; (+) strand; PAM type: NRG; PAM sequence: AAG
aatagcaatgaaatttcata

SEQ ID NO: 136617 - DNA, 20 bp, Artificial Sequence
  Description of Artificial Sequence: Synthetic oligonucleotide
  Target: LAMA2; (+) strand; PAM type: NRG; PAM sequence: AAG
ctattccctgaccataaaac

SEQ ID NO: 136618 - DNA, 20 bp, Artificial Sequence
  Description of Artificial Sequence: Synthetic oligonucleotide
  Target: LAMA2; (+) strand; PAM type: NRG; PAM sequence: AGG
tattccctgaccataaaaca

SEQ ID NO: 136619 - DNA, 20 bp, Artificial Sequence
  Description of Artificial Sequence: Synthetic oligonucleotide
  Target: LAMA2; (+) strand; PAM type: NRG; PAM sequence: AAG
caaggcaattaaattgtgca

SEQ ID NO: 136620 - DNA, 20 bp, Artificial Sequence
  Description of Artificial Sequence: Synthetic oligonucleotide
  Target: LAMA2; (+) strand; PAM type: NRG; PAM sequence: AGG
aaggcaattaaattgtgcaa

SEQ ID NO: 136621 - DNA, 20 bp, Artificial Sequence
  Description of Artificial Sequence: Synthetic oligonucleotide
  Target: LAMA2; (+) strand; PAM type: NRG; PAM sequence: GAG
attgtgcaaaggttaatttt

SEQ ID NO: 136622 - DNA, 20 bp, Artificial Sequence
  Description of Artificial Sequence: Synthetic oligonucleotide
  Target: LAMA2; (+) strand; PAM type: NRG; PAM sequence: CAG
gttaattttgagcacataat

SEQ ID NO: 136623 - DNA, 20 bp, Artificial Sequence
  Description of Artificial Sequence: Synthetic oligonucleotide
  Target: LAMA2; (+) strand; PAM type: NRG; PAM sequence: TAG
cacataatcagtaactgtaa

SEQ ID NO: 136624 - DNA, 20 bp, Artificial Sequence
  Description of Artificial Sequence: Synthetic oligonucleotide
  Target: LAMA2; (+) strand; PAM type: NRG; PAM sequence: AAG
actgtaatagaaacaaatca
